United States Patent Application Publication US 2007/0192889 A1 - sequence listing, part 3

SEQ ID NO: 4790 - DNA, 1830 bp, Zea mays
  Clone ID: TF_ZmC4916_369
atggatcctaagggcaaggggatgatgatcaacgacaaggagaaggagaccttcgtcaacgagcccaatgatgacaagcccaccgactcaggctcgggccacaaaagaaaagacgggaggaagaagaagacaaagcgcatcaaggaaattgtctactacgacagcgacgaatcttcctcctcccaaaaggacgacgacgaccatgatagacgaaagacgatccataaaaatgcacaagctactactgtgttgctagcctctttgtgcagggacgagtatcacaaggtgagcggcttggacaatgccaagcagatctgggacaccctcaagatctctcatgagggaaacgatgtcaccttgctcaccaaaatggagttggtggaaggcgagcttggacggttcgcgatgataaggggcgaggagccgacacaaacatacaaccggctcaagacccttatcaacaaaataaggagctacgggagcacgcgatggacggaccacgacgtcgtccgcctaatgctaaggtcatttaccgttcttgatcctcatttggtgaacaatattcgtgaaaatcccaggtacaccaagatgtcgcccgaagaagttcttggggaatttgttagcgggcgaatgatgattaaggaggcgaggtacgtggacgacgccttgaatggtccgatcaacgagccgcaaccccttgctctcaaggcaacacgaagcaaggaggcgctacctagcaaggtggcacagattgaggcggccggacttaataatgaagagatggctctcatcatcaaaagattcaagacggtgcttaaaggtcgcaagggacagccaagcaagaccaaagccaaggggaagcgctcatgcttcaaatgcggtaagcttggtcattttattgctaactgtcccgacaatgatagtgatcaggatcaagggaacaagagggagaaaaagaagaactataagaaggcaaagggcgaggctcatcttggcaaggagtgggattcagactgctcctcgtccgactccgacaatgagggactcgccgccactgccttcaacaagtcatccctcttccccaacgagcgtcacacttgcctcatggcaagggagaagaaagataagtctaaaacccaagggaccctcaagcgcttcctaaggagagctcaaaatgagtttgagctcaaggtgaagaagataaggagcgacaacgggtccgaattcaagaaccttcaagtggaagagttccttgaggaggaggggatcaagcacgagttctccgctccctacacacctcagcaaaatggtgtggtagagaggaagaacaggacgctcatagatatggcgtggactatgcttggagaattcaagacccccgagtgcttttggtcggaagccgtgaacacggcttgccacgccaccaacagggtctaccttcaccgcctcctcaagaagacgtcgttgtatcaaatggatgtgaagagcgctttcctcaatgggccgatcaaggaggaggtgtacgtggagcaaccccctggcttcgaggatgaacggtaccccgaccattcttgtgaagagtttagcagggtaatgacgcagaaattcgagatgtcaatgatgggcgagttgaactacttccttgggttccaagtgaagcaactcaaggacggcaccttcatctcccaaacgaagtacacgcaagacttgctaaagcggtttgggatgaaggacgccaagcccgcaaagactccgatgggaaccgacggacacatcgacctcaacaaaggagattttggtgaggcaatggggttaaagggccaagattga

SEQ ID NO: 4791 - DNA, 5337 bp, Zea mays
  Clone ID: TF_ZmC4916_372
atggatcctaagggcaaggggatggtggtcaatgataaggagaaggagtcattatttgtcaatgatccaaaggaggacaagcctactgactcgggctcgagccacaaaagaaaagatgggaggaagaagaaaacaaggcgtatcaaagagatagtctactacgacagcgacgaatcctcttcttcccaaaaggacgacgacaacgtctacgagaataagaagacagttaattcatacttctcttttgattattctcatattcctcaaactaccaatgctcatttactctccattccacttgcctcattgtgcagggacgagtaccataaggtgagcggcttggacaatgccaagcagatctgggacaccctcaagatctcacatgaggggaacgacgtcaccatgctcaccaagatggagttggtggaaggcgaactcggaagattcgcgatgataagaggggaggagccaacccagacgtacaacaggctcaagacccttgtcaacaagataaggagctatggaagcacgcgatggacggaccacgacgtcgtccgcctaatgctaaggtcctttactgtacttgatccacatctggtaaacaatattcgtgaaaatcctaggtacaccaagatgtcgcccgaagaaattcttgggaaatttgtaagcgggcggatgatgattaaggaggcgagatacatagatgatgcgttgaatggcccaatccacgagcctcaaatcgttgctctcaaagcaacaaggagcaaggaggcgctacctagcaaggtggcgcaagttgaggcggccgggcttaatgaggaagaaatggccctcattatcaagcggttcaagacggcgctaaagggtcgcaaggagcaccccaacaagaacaagacgaaggggaagcgctcctgcttcaagtgtggtaagattggtcattttatcactaattgccccgataatgatagtgaccaggaaaagaagagtggaaagtgggaaaagaagaagaactacaagaaggcgaagggcgaggcacatcttggaaaggagtgggattcggattgctcctcgttcgactccgacaacgaaggactcgccgccaccgccttcaacaagtcatccctcttccccaacgagcatcacacatgcctcatggcaaaggagaagaaggtatgtactcgaaacaatattacttatgcttcttcaagcgaggatgagtctagtgatgatgatgaaatagactattcatgcttattcaagggattagatagaactaagattgataagattaatgaattgattgatgctttgaatgataagaatagattactagaaaaacaagaggaccttttatatgaagagcatgataaatttgttagtgcacaaaattctcttgctctagaagttaaaaggaatgaaatgctttcttgtgaactatctacttgtcatgaaaccatttctactttaaaaggtgttaatgatgatttaaatgctaaactagaagtagcaaataaatctaactcttgtgtagaacatgttatgatttgcaataggtgcaaagattttaatgttgatgcttgtagtgaacacctagtttgcatttctaaattaaataatgaagtggctagtcttaatgcccaacttaagtctagcaagagtgaatttgacaagctaaaatttgcaagggatgcctacacgattggtagacacccctcaattaaggatggtcttggcttcaagagggaagtcaagaacttaacaagccataaggcttccatctccgccaaggagaaagggaaggcccctatggctagtaatgctcaaaagaaccatgccttcatgtatcacgataggaaacattctagaaatggttatagaagttatgatgctcttgattctcatgccatggttgtttctagttcttctattatgcatgatagaaatttagcttggagaaatgttattaatcacatgcctagaagaaatgttgttcatgtttctaggaaaataataaatgaaccttctacaatttatcatgcttgcaatgcttcatttgcgatttatagaaaggataggaaagtgattgctaggaaactaggggcaaaatgcaagggagataaaacttgcatttgggtccctaaagatattatcactaaccttgtaggacccaacaagagttgggtttatgcatccgggggatcaagctggattatcgacagtggatgcacaaaccacatgacgggggagaagaagatgttcacctcctatgtcaagaataaagattcccaagattcaattatatttggtgacgggaatcaaggcaaggttaaaggcttaggcaagattgcaatctcaaatgagcactctatttctaatgtattcttagtagagtcacttggatataatttgttatccgtaagtcaattatgtaatatgggatataattgtctattgacaaatgtagatgtgtctgtctttagaagaagtgatggttcattagcttttaagggtgtattagacgacaaactctatttagttgattttgcaaaagaggaggtcggtctagatgcatgcttaattgctaagactagcatgggctggctgtggcatcgccgcttagcacatgtggggatgaagaaccttcacaagcttctaaagggagaacacgtgataggtctaactaatgttactttcgaaaaagatagaccttgtgcagcttgtcaagcagggaaacaagtgggaagctctcatcgtgccaaaaatgtgatgacaacatcaagacccctggagttacttcatatggacctcttcggacccgtcgcctatctaagcataggaggaagtaagtatggtcttgttatagttgatgatttttcccgcttcacttgggtattctttttgcaggataaatctgaaacccaagggaccctcaagcgcttcctaaggagagctcaaaatgagtttgagctcaaggtgaagaagataaggagcgacaatgggtccgaattcaagaaccttcaagtggaggagtatcttgaggaggaaggaatcaagcacgagttctccgctccctacacaccacagcaaaatggtgtggtagagaggaagaacaggacgcttatagacatggcaaggacgatgcttggagagttcaagacccccgagcgcttttggtcggaagtcgtgaacacggcttgccacaccatcaaccgggtctaccttcatcgcctcctcaagaagacttcgtatgagctactaaccggtaacaaacccaatgtttcgtatttccgagtttttggtagtaaatgctacattctagtgaagaagggtaggaattccaaatttgctcccaaagccgtagaagggtttttgttaggttatgactcaaatacaaaggcgtatagggtcttcaacaaatcattgggtttggttgaagtctctagcgacgttgtatttgatgagactaatggctctccaaaggagcaagttgttgaccttgatgatgtagatgaagaagacgttccaacagccgcaatacgcaccatggcgattggagatgtgcggccacaggaacaaaatgagcgagatcaaccttcttcctcaacaatggtgcatcctccaactcaagacgatgaacaggttcatcaagaggaggcgtatgatcaagggggagcacaagatgatcatgtaatggaggaagaagcacaaccggcacctccaactcaagtccgagcgatgattcaaagggatcatcccgtcgaccagattttgggtgacattagcaagggagtaactactcggtctcgattagttaatttttgtgagcattactcttttgtctcttccattgagcctttcagggaggagctcaacaacttcaagagaaatgaagtttggacactggtgcctcgtcccaagcaaaatgttgtgggaaccaagtgggtgttccgcaacaaacaagacgagcacggggtggggacaaggaacaaggcacgacttgtggcaaaaggttatgcccaagtcgcaggtttggactttgaggagacttttgctcctgtggctaggctagagtccattcgtattttgctagcatatgccgctcaccattctttcaggttgttccaaatggatgtgaagagcgctttcctcaacgggccaatcaaggaggaggtgtacgtggagcaaccccctggcttcgaggatgaacagtaccccgaccacatctgtaagctctctaaggcactctatggacttaagcaagccccaagagcatggtatgaatgccttagagactttttaattgctaatactttcaaggttggcaaagccgatccaactctttttactaagacatgtgatggtgatctttttgtgtgccaaatttatgtcgatgatataatatttggttctactaaccaaaagtcatgtgaagagtttagcagggtgatgactcaaaagtttgagatgtcgatgatgggcgagttaagctatttccttgggttccaagtgaggcaactcaaggatgggactttcatctcccaaacgaagtacacacaagacttgatcaagcggtttgggatgaaggacgccaagcccgcaaagactccaatgggaaccgacggacacaccgacctcaacaaaggaggtaagtccgttgatcaaaaggcataccaatctatgctagtgtctttactttatctatgtgctagtagaccagacattatgcttagcgtatgcatgtgtgctagatttcaatccgatccaagggagtgtcacttagtggctgtgaagcgaattcttagatatttagtcgctacgccttgcttcgggatctggtatccaaaggggtctacctttgacttgattggatattcagactccaactatgctggatgtaaggtcgataggaagagtacatcggggacgtgccaattcttaggaaggtccctggtgtcatggagttctaagaaacaaactttcgttgccctatccaccgctgaggccgagtatgtttccgcaggacagtgttgcgcgcaactactttggatgaggcaaaccctcagggactttggctacaatctgagcaaagtcccactcctatgtgataatgagagtgctatccgcatggtggataatcctgttgaacacagccgcacaaagcacattgacatccggcatcactttttgagagaccaccagcaaaagggagatatcgaagtgtttcatgttagcaccgagaaccagctagccgatatctttactaagcctctagatgagtcgaccttttgcaggctgcgtagtgagctaaatgtcttagattcgcggaacttggattga

SEQ ID NO: 4792 - DNA, 1645 bp, Zea mays
  Clone ID: TF_ZmC4916_373
atgacgtggctggcgcaccggacatgtccggtgtgcaccggactgtccggcgactttcagaagggaatcgtgatcaacgacaaggagaaggagtccttcgtcaacgagccaaaggatgacaaacctattgactcggggtcgggccacaagcgcaaagatgggaagaagaagaagacaaagcgcatcaaggagatcgtctactacgacgatagcgatgagtctacttcttcccaaaagaacgacaacaacgactacgagaaaaagaaaacggtcaattcgaacttttcttttgattactctcgtattcctcaaagtacaaatgctcatttattatctattccacttggtaaacctcctcattttgatggagaggactacggattttggagtcacaaaatgcgtagtcacttgttctctctccatcctagcatatgggagatagtagaaagtggaatgcattttgatagtagtgatagtcccatgtttatcaatgagcaaattcataaaaacgcacaagctactactgtgttgctagcctcattgtgcagggatgagtaccacaaagtgagcggcttggacaatgccaagcagatctgggacaccctcaaaatctcacatgagggcaacgatgtcaccatgctcaccaagatggagttggtggaagacgaacttgggagattcgctatgataaggggggaagagccaacccaaacatacaaccggctaaaaccccttgtcaacaagataaggagctacggaagcacgcgatggacggatcacgacgtcgtccgcctaatgctaaggtcttttactgtccttgatcctcatcttgtaaacaatattcgtgagaatcctaggtacaccaagatgacgcccgaggagatacttggaaagttcgtgagcggacgaatgatgatcaaggaagcaagatacgtggacgacgcattgaatggtccaatcaatgagcctcaacctattgctctcaaggcaacaagaagcaatgagatgctacctagcaaggtggcacaaattgaggcggccggacttaatgatgaagagatggctctcatcatcaagagattcaagacggcgctaaaaggtcgcaaggggcagccaagcaagaccaagacaaaggggaagcgctcatgcttcaaatgcggtaagcttggtcattttattgctaactgtcccgacaatgatagtgatcaggatcaagggaacaagagggagaaaaagaagaactataagaaggcaaagggcgaggctcatcttggcaaggagtgggattcggactgctcctcgtccgactccgacattgagggactcgccgccactgccttcaacaagtcatccctcttccccaacgagcgtcacacttgcctcatggcaagggagaagaaagtaagcactcctaatactagtacttatgcttcttcaagtgaggatgagtctagtgatgatgatgagatagattactcatgcttattcaagggattagatagaactaaggtagataaaattaatgaattgattgatgccttgaatgataggaatatactgttagaaaagcaagaggatttgttgtatgaagaacatgaaaaatttgtagaagctcagaaatctcttgctaagagtcgacctgcag

SEQ ID NO: 4793 - DNA, 4995 bp, Zea mays
  Clone ID: TF_ZmC4916_387
atggatcctaaggggaagggaatcgtgatcaatgacaaggagaaggagtccttcgtcaacgagccgaaggatgacaagactactgactcgggctcaggccacaagtgcaaagacgggaagaaaaagaagacaaggcgcatcaaggagatcgtctactacgacgatagcgatgagtctacctcttcccaaaaggacgacgacaatgactacaggaagacggtcaattcgaacttttcatttgattattctcgtattccacatagttcgaattcgcatttgctttccattcctcttggcaaacctccacacttcgatggggaagactacggattttggagtcacaaaatgcgtagtcacttattctctctccatccaagcatatgggagattgtagagaatggaatgaaatttgatagctcggatagccctatgcttataaatgaacaaatccatagaaatgcacaagctactactgttctattagcatctttgtgcagggaagagtacaataaggtgagcggcttggacaacgccaagcagatatgggacaccctcaaaatctctcacgaggggaatgacatcaccatgctcactaaaatggagttggtggagggcgagcttggacgattcgcaatgataaggggagaagagccaacccaaacttacaacaggctgaagacccttatcaacaaaataaggagctacggaagcacgcgatggacagaccacgacgtcgtccgcctaatgctaaggtcatttaccgttcttgatcctcatttggtgaacaatattcgtgaaaatcctaggtacaccaagatgtcgcccgaagaagttcttggaaaatttgtaagcgggcgaatgatgatcaaggaggcaaggtacgtggacgacgcattgaatggtccaatccatgagcctcaacccattgctctcaaggcaacaaggagcaaggaggcgctaccaagcaaggtggcgcaagttgaggcggccgggctaaataatgaggagatggccctcatcattaagcgcttcaagacggcgcttaaaggtcgcaagggacagccaagcaagaccaagacaaaggagaagcgctcatgcttcaaatgcggtaagcttggtcattttattgctaactgtcccgataatgaaagtgaccaggaacaagggagcaagagggagaagaagaaggcatacaagaaggcaaagggcgaggcacatctaggcaaggagtgggattcagattgctcctcctccgactccgacaatgaaggactcgccgccactgccttcaacaagtcatccctcttccccaacgagcatcacacatgccttatggcaagggagaagaaggtgagtactcaagactccacttatgcttcctctagtgataatgagtctagtgatgatgatgacatagattattcatgcttgttcaagggcttagatagatctaagatagataaaattaatgagttgattgatgctttgaatgataagaatagattactagaaaaacaagaggatcttttatatgaggagcatgataaatttgttagtgcacaaaattctcttgctctagaaattaaaagaaatgaagtgctttctagtgaattatcttcttgtcatgaaaccattgctactttaaaaggtgttaataatgatttaaatgctaaactagaagtggctagtaaatctaactcttgtgtagaacatgttatggtttgcactaggtgtaaagattttaatattgatgcttgtagtaaacacctagtttcaatttctaaattgaatgatgaagtggctagtcttaatgcccaacttaagactagcaagagtgattttgataaactaaaatttgcaagggatgcctacacaattggtagacacccctcaattaaggatgggcttggcttcaagagggaagtcaagaacttgacaagccataaggctcccattcccactaaggagaaagggaaggcccctatggctactagtgccaaaaagaaccatgccttcttgtatcatgataggaaaaattctagaaatgcttttagaagttatgatgtttttaattcacatgcttatgattcttatgccatgactgcttctagttcttcctatatgcatggtagaaatgtgactaggagaaatgctattcatcatgtgcctagaaagaatattattcatgctcctaggaaagtagtaaatgaaccttctacaatttattgtgctttaaatgcttcctttgctatttgtagaaaggataggaagatagttgctagaaaattaggggcaagatgcaagggagacaaaacttgcatttgggtccctaaggatatttgtgctaaccttgtaggacccaacatgagttgggtttatgcatccgggggttcaagctggattatcgacagcggatgcacaaaccatatgacgggggagaagaagatgttcacctcctacgtcaagaataaggattcccaagattcaataattttcggtgatgggaatcaaggcaaggataagtctgaaacccaagggaccctcaagcgcttcctcaggagagctcaaaatgagtttgagctcaaggtgaagaagataaggagcgacaacgggtccgagttcaagaaccttcaagtggaggagttccttgaggaggaagggatcaagcatgagttctctgctccctacacaccacagcaaaatggtgtggtagagaggaagaacaggacgctaatcgacatggcgaggactatgcttggagagttcaagacccccgagcgtttttggtcggaagccgtgaacacggcttgccacgccatcaacagggtctaccttcaccgcctcctcaagaagacgtcgtatgagcttctaaccggtaacaaacccaatgtatcttactttcgtgtatttgggagcaagtgctacattctagtgaagaagggtagaaattctaagtttactcccaaagctgtagaagggtttttattaggttatgactcaaatacaaaggcgtatagagtcttcaacaaatcatcgggtttggttgaagtctctagcgacgttgtatttgatgagactaatggctctccaagagagcaagttgttgattgtgatgatgtagatgaagaagatgttccaacggccgctatacgaaccatggcaattggagaagtgcggccacaggaacacgatgaacgagatcaaacatcttcctcaactatggtgctacccccaactcaagacgatgaacaggttcatcaacaggaggcgtgtgatcaagggggagcacaagatgatcgtgtgatggaggaagatgcgcaaccggcacctccaacccaagttcgagcgatgattcaaagggatcatcccgtcgaccaaattctgggtgatattagcaagggagtaactactcgatctcgattagttaatttttgtgagcattactcctttgtctcttctattgagcctttcagggtagaggaggccttgctagatccggattggatattggccatgcaggaggagctcaacaacttcaagcgcaatgaagtttggacactggtgcctcgtccgaagcaaaatgttgtgggaaccaagtgggtgttccgcaacaaacaggacgagcatggggtggtgacgaggaacaaggctcgacttgtggcaaaaggttatgcccaagtcgcaggtttggactttgaggagacatttgctcctgtggctaggctagaatcaattcgtattttgctagcatatgccgctcaccattctttcaggttgtaccaaatggatgtgaagagcgctttcctcaacgggccaatcaaggaggaggtgtacgtggagcaaccccctggcttcgaggatgaacggtaccccgactatgtgtgtaagctctctaaggcgctctatggacttaagcaagccccaagagcatggtatgaatgccttagagactttttaattgctaatgctttcaaggttgggaaagccgatccaactctttttacaaagacttgtgatggtgatttgtttgtgtgccaaatttatgtcgatgacataatatttggttctactaaccaaaagtcttgtgaagagtttagcagggtgatgacgcagaaattcgagatgtcgatgatgggcgagttgaactacttccttgggttccaagtgaagcaactcaaggacggcaccttcatctcccaaacgaagtacacgcaagatctgctaaagcggtttgggatgaaggacgccaagcccgcaaagactccgatggggaccgacggacacaccgacctcaacaaaggaggtaagtccgttgatcaaaaagcataccggtcaatgataggttctttgctttacttatgtgctagtagaccggatattatgcttagcgtatgcatgtgtgctagatttcaatccaatcctaaggagtgtcacttagtggcggtaaagcgaattcttagatatttggttgctacgccttgcttcgggctctggtatccaaaggggtctacttttgacttagttggatactcagactccgactatgctggatgtaaggtcgataggaagagtacatcggggacgtgccaattcttaggaaggtccctggtgtcatggaactctaagaaacaaacctccgttgccctatccaccgctgaggccgagtacgttgccgcaggtcagtgttgcgcgcaactactttggatgaggcaaaccctccgggactttggctacaatctgagcaaagtcccactcctatgtgacaatgagagtgctatccgcatggcggaaaatcctgttgaacacagccgcacaaagcacatagacatccggcatcactttttgagagaccaccagcaaaagggggatatcgaagtgtttcatgttagcaccgagaaccagctagccgatatctttaccaagcctctagatgagaagaccttttgcaggctgcgtagtgagctaaatgtcttagattcgcggaacttggattga

SEQ ID NO: 4794 - DNA, 1981 bp, Zea mays
  Clone ID: TF_ZmC4916_389
atggatcctaaggggaagggaatcgtgatcaacgacaaggagaaggagtccttcatcaacgagccaaaggatgataagcctactgactcgggctcgggccacaagcgcaaagatgggaagaagaagaagacaaggcgcatcaaggagatcgtctactacgacgatagcgatgagtctacttcttcccaaaaggacgactacaggaagacggtcaattcgaacttctcatttgattattctcgtattccacatagttcgaattctcatttgctttccattcctcttggcaaacctccacacttcgatggggaggactacggattttggagtcacaaaatgcgtagtcacttattctcactccatccaagcatatgggagattgtagagaatggaatgaaatttgatagctcggatagccctatgcttataaatgaacaaatccataaaaatgcacaagctactactgttctattagcatctttgtgcagggaagagtacaataaggtgagcggcttggacaacgccaagcagatatgggacaccctcaagatctctcacgaggggaacgacatcaccatgctcactaaaatggagttggtggagggcgagcttggacgattcgcaatgataaggggagaggagccaacccaaacctacaatcggctcaagactcttatcaacaaaataaggagctacggaagcacgcgatggacggaccacgacgtcgtccgtctaatgctaaggtcctttaccgttcttgatcctcatctcgtaaacaatattcgtgagaatcctaggtacatgatgatgacgcccgaggaggtactcggaaaattcgtaagtgggcggatgatgatcaaggaggcgagatatgtcgacgacgctctaaacggtccaatcaatgagcctcaacctcttgctctcaaggcaacaagaagcaaggagatgctacctagcaaggtggcacaaattgaggcggccggacttaatgatgaagagatggctctcatcatcaagagattcaagacgacgctaaaaggccgcaagggacagccaagcaagaccaagacaaaggggaagcgctcatgcttcaaatgtggtaagcttggtcattttattgctaactgtcccgacaatgatagtgatcaggatcaagggaacaagagggagaagaagaagaactataagaaggcaaagggcgaggcgcatctaggcaaggagtgggactcagactgcttcctttccgactccgacaatgaaggactcgccgccaccgccttcaacaagtcatccttcttccccaacgagcatcacacatgccttatggcaagggaaaagaaggtgagtactcgagaccccacttatgcttcttctagtgataatgagtctagtgatgatgatgacatagactattcatgcttattcaagggcttagatagatctaagatagataagataaatgaactcattgatgccttaaatgataagaataggctattagagaaacaagaggatttgttgtatgaagaacatgataaatttgtagaggcacaaaaatcctatgccttagaagttaaaagaaatgaaatgctttcttatgaactgtctacttgtcatgaaaccatttctactttgcaaggtgttaacaatgatttaaatgcaaaattagaagtagcaaataaatctaattcttgtgaagaacacgttataatctgcactaggtgtaaggattttgatattgatgcctgtagtgaacacctagtttcaatttcgagattgaatgatgaagtagctagtcttaatgcccaacttaagactagcaaaagtgatttcgataagctaaaatttgctagggatgcctacacggttggtagacacccctcaattaaggatggacttggcttcaagagggaagccaagaacttaacaagccataaggctcccatctccgccaaggagaaagggaaggcccctatggcaa

SEQ ID NO: 4795 - DNA, 5118 bp, Zea mays
  Clone ID: TF_ZmC4916_393
atggatcctaaggggaagggaatcgtgatcaacgacaaagagaaggaatccttcgtcaacgagccgaaggacgacaagcctaccgactccggctcgggcaatagacggaaggaagggaagaagaagaagacgaggcgcatcaaggagatcgtctactacgacgacaacgatgagtctacttcttcccaaaaggatgacgaccacaacgactacgagagagggaaaccggttaattcgaacttttcttttgactactcttgtattccgcaaagttcaaattcacatttgctctccattccactcggcaagcccccacactttgatggggaggactacggattttggagccacaaaatgcgtagtcacctattctctctccatcctagtatatgggagattgtagagagtggaatgcactttgatagttcggatagtcccatgttcattaatgagcaaatccataagaatgcacaagctactactgttcttctagcttcattgtgcagggatgaatatcacaaagtgagcggcttggataacgccaagcagatctgggacaccctcaagatttcacatgaggggaacgacgtcaccttgctcaccaaaatggagttggtggaaggcgagcttggacggtttgcgatgataaggggcgaggagccaactcaaacatacaaccggctcaagatccttatcaacaaaataaggagctacagaagcacgcgatggacggaccacgacgtcgtccgactgatgctaaggtcctttacagttcttgatcctcatttggtgaataatattcgtaagaatcccaggtacgtggacgacgcattgaatggtccaatcaacgagcctcaaccccttgctctcaaggcaacaagaagcaaggaggcgctacctagcaaggtggcacaatttgaggcagccggacttaatgatgaagagatggccctcatcatcaagagattcaagacggcgctaaagggtcacaaggggcagccaagcaagaccaagacaaaggggaagcgctcatgcttcaaatgtggtaagcttggtcattttattgctaactgtcccgacaatgatagtgaccaagaaaaaggaaacaagagggagaagaagaaaaattacaagaaggccaagggcgaggcacatatcggaaaggagtgggattcggattgctcctcctccgactctgacaatgaaggactcgctgccactgccttcaacaagtcatccctcttccccaacgagcatcacacatgcctcatggcgaaagagaagaaggtatgtactcgagacagtactacttatgattcctcaagtgatgatgattctagcgatgaggaaatagattactctagcttgttcaagggattggatagaaataaaattgataaaatcaatgaattgattgatgccttgaatgaaaaagataggcttttagaaaagcaagaggatttgttgtatgatgaacatgataaatttgtagaggcacaaaaatcctatgctttagaagttaaaagaaatgaaatgctttcttatgaactatctacttgtcatgaaaccatttctactttacaaggtgttaacaatgatttaaatgctaaattagaagcagctaataaatctaattcttgtgtagaacatgttatgatttgcattaggtgtaaggattttgatattgatgcttgtagtgaacacctagtttcaatttctagattaaatgatgaaatagctagtcttaatgaccaacttaagactagcaaaagtgattttgataagctaaaatttgcaagggatgcctacacgattggtagacacccctcaattaaggatggacttggcttcaagagggaagtcaaggacttaacaagtcataaggctcccatctccaccaaggagaaagggaaggcccctatggctattagtgctaaaaagaaccatgcttttatgtatcatgataggagacatgctagaaatgcaaatagaagttatgatgcttttgattcacatgtttatgattcatatgctatgtttgcttctagttcttcctgtttatgcatccgggggatcaaactggattatcgacagtggatgcacaaaccatatgacgggggagaagaagatgttcacctcctacgtcaaaaacaaggattccaagattcaataatattcggtgatgggaatcaaggcaaggtaaaagggttagatgtgtctgtcgttagaagaagtgatggttcactagcttttaagggtgtattagacgacaaactttacttagttgattttgcaaaagaggaggccggtctagatgcatgcttaattgctaagactagcatgggctggttgtggcatcgccgcttagcacatgtggggatgaagaaccttcacaagcttctaaagggagaacatgtgatatgtttaactaatgtgcaattcgaaaaagatagaccttgtgcagcttgtcaagcaggcaaactggtgggaagctctcatcacatcaaaaatgtgatgaccacatcaagacctttggagatgcttcacatggacctattcggacccgtcgcctatctaagtataggaggaagtaagtatggtcttgttatagttgatgacttttcccgcttcacttgggtattctttttgcaggataaatctgaaacccaagggaccctcaagcgcttcctaaggagagctcaaaacgagtttgagctcaaggtgaaaaagataaggagcgacaatgggtccgagttcaagaaccttcaagtggaggagtaccttgaggaggaagggatcaagcacgagttctccgctccctacacaccacagcaaaatggtgtggtagagaggaagaacatgacgcttatagacatggcgaggacgatgctaggagagttcaagaccctcgagcgcttttggtcggaagccgtgaacacggcttgccacgccatcaacagggtctacctgcatcgcctcctcaagaagatgtcgtatgagctactaaccggtaacaaacccaatttttcgtattttcgagtttttgggagtaaatgctacattctagtgaagaagggtaggaattccaaatttgctcccaaagccgtagaagggtttttgttaggttatgactcaaatacaaaggcgtatagagtcttcaacaaatcatcgggtttggttgaagtctctagcgacgttgtatttgatgagactaatggctctccaagagagcaagttgttgattttgatgatgcagatgaagaagaagttccaacgaccgcaatatgcaccatggcaattggagatgtgcggccacaggaacaagatgagcaagatcaaccttcttcctcaacaatggtgcaacccccatctcaagatgatgaacaggaggtgtgtgatcaagggggagcacaagatgatcttgcaatggaggaagaagcacaatcggcacctccaacccaagttcgagcaatgattcaaagggatcatccagtcgaccaaattttgggtgatattagcaagggagtaactactcgatctcgattagttaatttttgtgagcattactcctttgtctcttctattgagcctttcagggtagaagaggccttgctagatccggactgggtgttggccatgcaggaggagctcaacaacttcaaaagaaatgaagtttggacactggtgcctcgtcccaagcaaaatgttgtgggaaccaagtgggtgttccgcaagaaacaagacgagcacggagtggtaacgaggaacaaggctcgacttgtggcaaaaggttatgcccaagtcgcaggtttggactttgaggagacttttgctcctgtggctaggctagagtccattcgtattttgttagcatatgccgctcaccattctttcaggttgttccaaatggatgtgaagagcgctttcctcaacgggccaatcaaggaggaggtgtacgtggagcaaccccctggcttcgaggatgaacgataccccgaccacgtgtgtaagctctctaaggcgctctatggacttaagcaagccccaagagcatggtatgaatgccttagagactttttaattgcaaatgctttcaaggttgggaaagccgatccaactctttttactaagacttgtgatggtgatctttttgtgtgccaaatctatgtcgatgacataatatttggttctactaaccaaaagtcttgtgaagagtttagcaaggtgatgactcagaaattcgagatgtcgatgatgggcgagttaagctacttccttgggttccaagtgaggcaactcaaggatggaaccttcatctcccaaacgaagtacacacaagatttgatcaagaggtttgggatgaaggacgccaagcccgcaaagactccgatgggaaccgacggacacaccgacctcaacaaaggaggtaagtctgttgatcaaaaagcataccggtctatgatagggtctttactttatttatgtgctagtaggccggatattatgcttagcgtatgcatgtgtgctagatttgaatccgatcctaaggagtgtcacttagtggctgtgaagcgaattcttagatatttagtcgctacgccttgtttcaggatctggtatccaaaggggtctacctttgacttgattggatattcagactccgactatgctgggtgtaaggtcgataggaagagtacatcggggatgtgccaattcttaggaaggtccctggtgtcatggagttctaagaaacaaacctccgttgccctatccaccgctgaggccgagtacgttgccgcaggacagtgctgcgcgcaactactttggatgaggcaaaccctcagggactttggctacaatctgagcaaagtcccactcctatgtgataatgagagtgctatccacaaggcggataatcctgttgaacacagccgcacaaagcacattgacatccggcatcactttttgagagaccaccagcaaaagggagatatcgaagtgtttcatgttagctccgagaaccagctagctgatatctttaccaagcctttagatgagcagaccttttgcaagttgcgtagtgagctaaatgtcttagattcgcggaacttggattga

SEQ ID NO: 4796 - DNA, 3285 bp, Zea mays
  Clone ID: TF_ZmC4916_408
atggatcctaaggggaagggaattgtgatcaacgacaaggagaaggagtccttcgtcaacgagccaagggatgacaagtccaatgactcgggctcgggccacaagcgaagagatgggaagaagaagaagacaagacgcatcaaggagatcgtctactacgacagcgataagtcctcttcttcccaaaaggacgacgaccacgacaaacaaaggaaaccggttaattctaacttttcttttgactactctcgtattccgcaaagttcaaattcacatttgctttctattccactcggcaagcccccacactttgatggggaggactacggattttggagccacaaaatgcgtagtcacctattctctctccatcctagcatatgggagattgtagatagtggaatgcactttaatagttcggatagtcctatattcattaatgagcaaatccataagaatgcacaagctactactgttcttctagcctcattgtgcagggatgaatataataaagtgagtggcttggataacgccaagcaaatctgggataccctcaagatctctcatgagggaaatgacgctaccttgctcaccaaaatggagttggtggagggcgagcttggacggttcgcgatgataaggggcgaggagccaactcagacatacaaccggctcaagacccttatcaacaaaataaggagctacggaagcacgcgatggacggaccacgacgtcgtccgactaatgctcaggtcctttaccgttcttgatcctcatttggtgaataatattcgtgagaatcccaggtacaccaaaatgtcgcccgaagaagtcctaggaaaattcgtcagcgggcgaatgatgatcaaggaggcaaggtatgtggacgacgccttgaatggaccgatcaacgagccgcaaccttttgctctcaaagccacagggaacaaggaggcgctacccagcaaggtggcgcaaattgaggcggccggtcttaatgaagaagaaatggccctcattatcaagagattcaagacggtgctaaagggtcgcaatggacagccgagcaagactaagaccaaggggaagcgatcatgcttcaaatgcggtaagcttggtcattttattgctaactgtcccgataatgatagtgaccaggaaaagggaaacaagagggaaaagaagaagcattacaagaaggcaaagggcgaggcgcatctaggcaaggagtgggactcggattgctcctcgtccgactccgacaatgaaggactcgccgccaccgccttcaacaaatcaaccctcttccccaacgagcgtcacacatgccttatggcaagggagaagaaggtatgtactcgcaactctacctatgcttcttcaagtgaggacgaatctagtgatgaggatgaagtagattattcatgtttgttcaagggcttagatagatctaagatagacaaaattaatgaattaattgatgccttgaatgaaaagaatatacttttagaaaagcaagaggatttgttgtatgaagagcatgataaatttgttgaggcacaaaaatcctatactttagaagttaaaagaaatgaaatgctttcttttgaactatctacttgtcatgaaaccatttctactttgaaaggtgtcaacaatgatttaaatgctaaattagaagtagcaaataaatccaattcttgtgtagaacatgttgaaatttgtactaggtgtaaagattttgacattgatgcttgtagtgaacacctagtttcaatttccaagcttaatgatgaactggctagtcttaatgctcaacttaagactagcaagaatgattttgataagctaaaatttgcaagggatgcctacacaattggcagacacccctcaattaaggatggacttggcttcaagagagaagctaagaacttaacaagccataaggctcccattctcgccaaggagaaagggaaggcccctatggctagtaatgtgcaaaagaaccatgcttttatgtactatgataggagatattctagaaatgcttttagaggtcatgatgtgtttgattcacatgcttatgactcttatgctatgactgcttctagttctcatgttatgcatggtagaaatatgtctaggagaaatgctattcatcatgtgcctagaaagaatgttattcatgctcctaggaaagtagtgaatgaaccttctacaatttattgtgctttgaatacttcatttgcaatttgtagaaaggatagaaaagtaattgctaggaagttaggggcaaaatgcaaaggtgataaaacttgcatttgggtccctaaggaaattgtgactaaccttgtaggacccaacaagagttgggtttatgcatccgggggttcaagctggattatcgacagcggatgcacaaaccatatgacgggggagaagaagatgttcacctcctacgtcaagaataaagattcccaagattcaattatattcggtgatgggaatcaaggcaaggataagtctgaaacacaagggaccctcaagcgcttcctcaggagagctcaaaatgagtttgagctcaaagtaaagaagataaggagcgacaacgggtccgagttcaagaaccttcaagtggaggagttccttgaagaggaagggatcaagcacgagttctccgctccctacacaccacagcaaaacggtgtggtagagaggaagaacaggatgctcatcgatatggcgaggacgatgctaggagagttcaagacccccgagagcttttggacggaagccgtgaacacggcttgccacaccatcaacagggtctaccttcatcgcctcctcaagaagacgtcgtatgagctactaaccggtaacaaacccaatgtatcttactttcgtgtatttgggagcaagtgctacattctagtgaagaagggtataaattctaagtttgctcccaaagctgtagaagggtttttgttaggttatgactcaaatacaaaggcatatagagtcttcaacaaatcatcgggtttggttgaagtctctagcgacgttgtatttgacgagactaatggctctccaagagagaaagttgttgatcttgatgatgtagatgaagaagatgttcctacggccgctatacgaaccatggcgattggagaagttcggccacaggaacaagataaacgagatcaaccttctccctcaaccgaagatgatgaaaaggtacctcaagtggaggcgcttgatcaaggggagcacaagatgatcaagtga

SEQ ID NO: 4797 - DNA, 5430 bp, Zea mays
  Clone ID: TF_ZmC4916_409
atggatcctaaggggaagggaatcgtgatcaacgacaaggagaaggagtccttcgtcaacgagccaaaggatgacaagtccaacgacttgggctcaggccatagacgaaaagatgggaagaagaagaagacaaggcgcatcaaggagattgtctactacgacagcgacgaatcttcctcttctcaaaaggacgacgacaacaactacaggaagacggtcaattcgaacttttcatttgactattctcgtattccacataattcgaattcgcatttgctttccattcctcttggcaaacctccacacttcgatggggaggactacggattttggagtcacaaaatgcgtagtcacttattctctctccatccaagtatatgggagattgtagagaatggaatgaaatttgatagctcggatagtcctatgcttataaatgaacaaatccatagaaatgcacaagctactactgttctcttagcatctttgtgcagggaagaatacaataaggtgagcggcttggacaatgccaagcagatatgggacaccctcaagatctctcacgagggcaatgacgtcaccatgctcaccaagatggagttggtggagggcgaacttggaagattcgctatgataaggggggaggaccacttggcattaactgagccaagggatgacaagtccaacaactcgggctcgggacacaagcgaaaagatgggaagaagaagaagacaagacgcatcaaggagatcgtctactacgacagcgatgagtcctcttcttcccaaaagaacgacgacaacgactacaggaagacggttaattcgaacttctcatttgattattctcgtattccacatagttcgaattcgcatttactttccattcctcttggtaaacctccacattttgatggggaagactacggattttggagtcacaaaatgcgtagtcatttattctctctccatccaagcatatgggagattgtagagaatggaatgaaatttgatagctcggatagccctatgtttatcaatgaacaaattcataaaaatgcacaagctactactgttctcttagcatctttgtgcagggaagagtacaataaggtgagcggcttggacaatgccaagcagatatgggacaccctcaagatctctcacgaggggaacgacatcaccatgctcaccaagatggagttggtggagggcgagcttggacgattcgccatgataaggggagaagagccaactcaaacttacaaccggctcaagacccttatcaacaagataaggagctacggaagcacgcgttggacggatcacgacgtcgtccgcctaatgctcaggtcatttaccgttcttgatcctcatctcgtgaacaatattcgtgagaaccccaggtacacgatgatgacgcccgaagaagtacttggaaaattcgtgagcgggcggatgatgatcaaggaggcaaggtacgtcgatgacgcgttgaacggtccaatccacgagcctcaacccattgctctcaaggcatcgaggagcaaggaggcactaccaagcaaggtggcgcaaattgaggcggccgggcttaatgatgaagaaatggctctcatcattaagcgcttcaagacggtgctaaagggtcgcaatggacagccgagcaagactaagaccaaggggaagcgatcatgcttcaaatgcggtaagcttggtcattttattgctaactgtcctgataatgaaagtgaccaggaaaagggaaacaagagggaaaagaagaagcattataagaaggcaaagggtgaggcgcatctaggcaaggagtgggactcggattgctcctcatccgactccgacaatgaaggactcgccgccaccgccttcaacaaatcaaccctcttccccaacgagcgtcacacatgccttatggcaagggagaagaagatatgtactcgcaactctacctatgcttcttcaagtgaggacgaatctagtgatgaggatgaagtagattattcatgtttgttcaagggcttagatagatctaagatagacaaaattaatgaattaattgatgccttgaatgaaaagaatatacttttagaaaagcaagaggatttgttgtatgaagagcatgataaatttgttgaggcacaaaaatcctatgctttagaggttaaaagaaatgaaatgctttcttttgaactatctacttgtcatgaaaccatttctactttgaaaggtgtcaacaatgatttaaatgctaaattagaagtagcaaataaatccaactcttgtgttgaacatgttgaaatttgcactaggtgtaaggatgttgatattaatgcctgtagtgaacacttagtttccatttcaaaattgagtgatgaagtagctagtcttaatgctcgacttaagactagcaaaagtgattttgaaaaactaaaatttgctagggatgcctacacggttggtagacacccctcaattaaggatggacttggcttcaagagggaagccaagaacttaacaagtcataaggctcccattcccgccaaggagaaagggaaggcccctatggctactagtgctaaaaggaaccatgcctttttgtatcatgataaaagacaaactagaaatagaagttatgatgcttttgattcatatgtttatgattctcatgccataaaggatagaaaagtaattgctaggaagttaggggcaaaatgcaaaggtgataaaacttgcatttgggtccctaaggaaattgtgactaaccttgtaggacccaacaagagttgggtttatgcatccgggggttcaagctggattatcgacagcggatgcacaaaccatatgacgggggagaagaagatgttcacctcctacgtcaagaataaagattcccaagattcaattgtattcggtgatgggaatcaaggcaaggaaaaatccgaaacccaagggactctcaaacgcttcctcaggagagctcaaaatgagtttgagctcaaagtgaaaaagataagaagcgacaacgggtccgagttcaagaaccttcaagtggaggagttccttgaagaggaagggatcaagcacgagttctccgttccctacacaccacagcaaaatggtgtggtagagaggaagaacaggacactcatcgacatggcgaggacgatgctaggagagtacaagacccccgagtgcttttggacggaagccgtgaacacggcgtgccacgccatcaacagggtctaccttcatcgcctcctcaagaagacgtcgtatgagctactaaccggtaacaaacccaatgtatcgtactttcgtgtatttgggagtaaatgctacattctagtgaagaagggtagaaattctaagtttgctcccaaagctgtagaagggtttttgttaggttatgactcaaatacaaaggcgtatagagtcttcaacaaatcatcgggtttggttgaagtctctagcgacgttgtatttgatgagactaatggctctccaagagagcaagttgttgattgtgatgatgtagatgaagaagatgttccgacggccgctatacggaccatggcgattggagaagtacggccacaggaacaagatgaacgaaatcaaccttcttcctcaactatggtgcatcccccaaccgaagatgacgaacaggtacctcaagtggaggcgctcgatcaagggggagcacaagataatcatgtgatggaggaagaagtgcaaccggcacctccaacccaagttcgagcgatgattcaaagggatcatcccgtcgaccaaattctgggtgacattagcaagggagtaactactcgatctcgattagttaatttttgtgagcattactcttttgtctcttctattgagcctttcagggtagaggaggccttgctagatccggactgggtgttggccatgcaagaggagctaaacaacttcaagcgcaatgaagtttggacactggtgcctcgtccgaagcaaaatgttgtgggaaccaagtgggtgttccgcaacaaacaggacgagcacggggtggtgacgaggaacaaggctcgacttgtggcaaaaggttatgcccaagtcgcaggtttggactttgaggagacctttgctcctgtggctaggcttgagtccattcgtattttgctagcatatgccgctcaccattctttcaggttgtaccaaatggatgtgaagagcgctttcctcaacgggccaatcaaggaggaggtgtacgtggagcaaccccctggcttcgaggatgaacggtaccccgaccacgtgtgtaagctctctaaggcgctctatggacttaagcaagccccaagagcatggtatgaatgccttagagactttttacttgctaatgctttcaaggttgggaaggccgatccaactctttttacaaagacaagtgatggtgatttgtttgtgtgccaaatttatgtcgatgacataatatttggttctactaaccaaaagtcttgtgaagagtttagcagggtgatgacgcagaaattcgagatgtcgatgatgggcgagttgaactacttccttgggttccaagtgaagcaactcaaggaaggcaccttcatctcccaaacgaagtacacgcaagatctgctaaagcggtttgggatgaaggacgccaagcccgcaaagactccgatggggaccgacggacacaccgacctcaacaaaggaggtaagtccgttgatcaaaaagcataccggtcaatgataggttctttgctttacttatgtgctagtagaccggatattatgcttagcgtatgcatgtgtgctagatttcaatccgatcctaaggaatgtcacttagtggcggtgaagcgaattcttagatatttagttgctacgccttgcttcggactctggtatccaaaggggtctacctttgacttagttggatactcagactccgactatgctggatgtaaggtcgataggaagagtacatcggggacgtgccaattcttaggaaggtccctggtgtcatggaactctaagaaacaaacctccgttgccctatccaccgctgaggccgagtatgttgccgcaggacagtgttgcgtgcaactactttggatgaggcaaaccctcagggactttggctacaatctgagcaaagtcccactcctatgtgacaatgagagtgctatccgcatggcggaaaatcctgttgaacacagccgcacaaagcacatagacatccggcatcactttttgagagaccaccagcaaaagggagatatcgaagtgtttcatgttagcaccgagaaccagctagccgatatctttaccaagcctctagatgagaagaccttttgcaggctgcgtagtgagctaaatgtcttagattcgcggaacttggattga

SEQ ID NO: 4798 - DNA, 2514 bp, Zea mays
  Clone ID: TF_ZmC4916_428
atggatcctaagggaaaggggatggtggtcaacaacaacgagaaggagtctatcttcaacgagccgaaggatgacaagcctatcgactcgggctcaagccacaagcgcaaagacgggaagaagaagaagacaaggcgcatcaaggagattaaggatgacgacgactacgagaaaaagaaaacgatcaattcaaacttttcttttgactactctcgtattccgcatagtacaaatgctcatttattatctattccacttggtaaacctcctcactttgatagagaggactacggattttggagtcacaaaatgcgtagtcatttgttctctctccatccaagcatatgggagatagttgagaatggaatgcattttgatagtagtgatagtcccatgtttatcaatgagcaaattcataaaaatgcacaagctactactgttcttctagcttccttgtgcagggatgaataccacaaagtgagcggcttggataacgccaagcaaatttgggacaccctcaagatctctcatgaggggaatgatgtcacaatgctcaccaagatggagttggtggaaggcgaactcaggagattcgctatgataaggggagaagagccaactcaaacgtacaaccggctaaagacccttgtcaacaagataagaagctatggaagcacgcgatggacggaccacgacgtcgtccgcctaatgctaaggtcttttactgtccttgatcctcatcttgtaaacaatattcgtgagaatcctaggtacaccaagatgacgcctgaggagatacttggaaagttcgtgagcgggcgaatgatgatcaaggaagcaagatacgtggacgacgcattgaatggtccaatcaatgagcctcaacctcttgctctcaaggcaacaagaagcaaggagacgctacctagcaaggtggcacaaattgaggcggccggacttaatgatgaagagatggctctcatcatcaagagattcaagacggcgctaaaaggtcgcaaggggcagccaagcaagaccaagacaaaggggaagcgctcatgcttcaaatgtggtaagcttggtcattttattgctaactgtcccgacaatgatagtgatcaggatcaagggaacaagagggagaagaagaagaattataagaaggcaaagggcgaggcacatctaggcaaggagtgggattcggattgctcctcatccgactccgacaatgaaggactcgccgccaccgccttcaacaagtcatccttcttccccaacgagcatcacacttgccttatggcaagggagaagaaggtttatgcatctgggggttcaaactggattatcgacagccgatgcacaaaccatatgacgggggagaagaaaatgttcacctcctacgtcaaaaacaaggattcccaagattcaataatattcggcgatgggaatcaaggcaaggataagtctgagacccaagaaaccctcaagcacttcctaaggagagctcaaaacgagtttgagctcaaggtgaagaagataaggagcgacaacgggtccgagttcaagaaccttcaagtggaggagtaccttgaggaggaagggatcaagcacgagttctccgctccctacacaccacagcaaaatggtgtggtagagaggaagaataggacgctaatcgatatggcgaggacgaagcttggagaattcaagacccccgagcgtttttggtcggaagctgtgaacacggcttgccacgccatcaacagggtctaccttcaccgcctcctcaagaagacgtcgtatgagcttctaaccggttatgattcaaatacaaaggcgtatagggtcttcaacaaatcatcgggtttggttgaagtctctagcgacgttgtatttgatgagactaatggctctccaagagagcaagttgttgatcttgatgatgtagatgaagaagatgttccgacggccgctatacgaaccatggcgattggtgaagtacgaccacaggaacaaaaggagcaagatcaaccttcttcctcaactatggtgcatcccccaactcaagacgatgaacaggttcatcaacaggaggcgtgtgatcaagggggatcacaagatgatcatgtgatggaggaagaaactcatcctgcacctccaacccaagttcgagcgatgattcaaagggatcatcccgtcgatcaaattcttggtgatattagcaagggagtaactactcaatctcgattagttaatttttgtgagcattactcctttgtctcttctattgagcctttcagggtagaggaggccttgctagatccggactgggtgttggccatgcaagaggagctcaacaacttcaagaggaatgaggtttggacactggtgcctcgtcctaagcaaaatgttgtgggaaccaagtgggtgtttgtcggtgttttgggtccgaccgcacacccggggttgcccctcaaggtgtttttaggagtaggacggtgtcgacaactgtag

SEQ ID NO: 4799 - DNA, 5454 bp, Zea mays
  Clone ID: TF_ZmC4916_434
atggatcctaagggcaaggggatggtgatcaacgacaaggagaccttcgtcaacgagctcaatgatgacaagcccactgactcaggctcgagccacaaaagaaaagacgggaggaagaagaagacaaggcgcatcaaggaaattgtctactacgacagcgacgaatcttcctcctctcaaaaggacgacgacgaccacgatagacgaaagacggttaactcaaacttttctttcgattattcgcgcatcccgcaaagttcaaattcacatttgctctccattccactcggcaagcccccacactttgatggggaggactacggtttttggagccacaaaatgcgtagtcacctattctctctccatccaagcatatgggagattgtagagaatggaatgaaatttgatagctcggatagccctatgcttataaatgaacaaatccatagaaatgcacaagctactactgttctattagcatctttgtgcagggaagagtacaataaggtgagcggcttggacaacgccaagcagatatgggacaccctcaagatctctcacgaggggaacgacatcaccatgctcactaaaatggagttggtggagggcgagcttggacgattcgcaatgataaggggagaggagccaactcaaacttacaaccggctcaagacccttatcaacaaaataaggagctacggaagcacgcgatggacggaccacgacgtcgtccgcctaatgctaaggtcctttaccgttcttgatcctcatctcgtaaacaatattcgtgagaatcccaggtacacgatgatgacgcctgaggaggtgctcggaaaattcgtaagcgggcggatgatgatcaaggaggcgagatacgtcgacgacgctctaaacggtccaatcaatgagccgcaacctcttgctctcaaggcaacacgaagcaaggaggcgctacctagcaaggtggcacagattgaggcggccggacttaatgatgaagagatggctctcatcatcaaaagattcaagacggcactaaaaggccgcaaggggcagccaagcaagaccaagacaaaggagaagcgcttatgcttcaaatgtggtaagcttggtcattttattgctaactgtcccgacaatgatagtgatcaggatcaagggaacaagagggagaagaagaagaactataagaaggcaaagggcgaggcgcatctaggcaaagagtgggactcggactgctcctcttccgactccgacaatgaaggactcaccgtcaccgccttcaacaaatcaaccctcttccccaacgagcgtcacacatgccttatggcaagggagaagaaggtatgtactcgaaactctacctatgcttcttcaagtgaggacgaatctagtgatgaggatgaagtagattactcatgtttgtttaagggcctagatagaaccaaggtagacaaaattaatgaattgattgatgccttgaatgataagaatatgcttttagaaaagcaagaggatttgttgtatgaagaacatgataaatttgtagaagcacaaagatctcatgctctagaagttaaaagaaatgaaatgctttcttgtgaattatcttcttgccatgagacaatttctaaattaaggagcattaatgataatttgaatgctaagttagagattgctagtaaatctaattcttgtgtagaaattgttgaaacttgtaataggtgtaaagattttgacattgatgcttgtagtgatcatttagtttcaatttctaagttaaatgaggaattagctagtcttaatgcccaacttaagactagcaagaatgaatttgacaagctaaaatttgcaagggatgcctacacgattggtagacacccctcaattaaggatggacttggcttcaagagagaagccaagaacttaacaagccataaggctctcattcccgccaaggagaaagggaaggcccctatggctagtagtgtgcaaaagaaccatgcgtttatgtaccatgataagagacaaactagaaatgcttataggagttacaatgcatataatgcctttgattctcatgccatgattgcttctagttctttttatgtgcatgatagaaatgttggtaggagaaatgttgttcataatttgcctaggagaaatgttgttaatgttcctaggagagttaatgaaccttctacaatatatcatgctttgaatgattcctttgctatttgtagaaaggataggaaaatagttgctaggaagttaggggccaaatgcaagggatacaaaacttgcatttgggtccctaaggatatttgcactaaccttgtaggacccaacatgagttgggtttatgcatccgggggttcaagctggattatcgacagcggatgcacaaaccatatgacgggggagaagaagatgttcacctcctacgtcaagaataaggattcccaagattcaattatattcggtgatgggaatcaaggcaaggtaaaagggttagttaagtctcttggttacaatttgctatctgttagtcaactatgcaatatgggatataattgtctttttacaaatgtagatgtgtctgtctttagaagaagtgatggttcactagcctttaagggtgtattagacggcaagctttacttagttgattttgcaaaagaagaggccgatctagatgcatgcttaattgctaagactagcatgggctggctgtggcatcgccgcttagcacatgtggggatgaagaaccttcacaagcttctaaagggagaacacgtgataggtttgactaacgtacaattcgaaaaatatagaccttgtgcagcttgtcaggcaggtaaacaggtgggaggagcacatcacagcaagaatgtgatgaccacatcaagacccctggagctgctacatatggacctcttcggacccgtcgcctatctaagcataggaggaagtaagtatggtttagttattgttgatgacttttcccgcttcacttgggtgttctttttgcaggataagtctgaaacccaagggaccctcaagcgcttcctcaggagagctcaaaatgagtttgagctcaaggtgaaaaagataaggagcgacaacgggtccgagttcaagaaccttcaagtggaggagttccttgaggaggaagggatcaagcacgagttctccgctccctacacaccacagcaaaatggtgtggtagagaggaagaacaggacgctaatcgatatggcgaggacgatgcttggagaattcaagactcccgagcgtttttggtcggaagccgtgaacacggcttgccacgccatcaaccaggtctaccttcatcgtctcctcaagaagacctcgtatgagctactaaccggtaacaaacccaatgtatcttactttcgagtatttgggagcaagtgctacattctagtgaagaaggttagaaattctaagtttgctcccaaagctgtagaagggtttttgttaggttatgactcaaatacaaaggcgtatagagtcttcaacaaatcatcgggtttggttgaagtctctagcgacgttgtatttgatgaaactaatggctctccaagagagcaagttgttgatcttgatgatgtagatgacgaagacgttccaacggccgcgatacgcaccatgacgattggagatgtacggcctcgggaacaattggagcaagatcaactgtcttcctcaactatggtgcatcccccaacccaagatgacgaacaggtacctcaagtggaggcgcatgatcaagggggagcacaggatgttcaagttgaagaggaagaagcgcaatcggcacctccaacccaagttcgagcggtgattcaaagggattatcccgtcgaccaaattttgggtgacattagcaagggagtaactactcgatctcgattagttaatttttgtgagcattactcctttgtctcttctattgagccttttaaggtagaggaggccttgctagatccggattgggtgttggccatgcaggaggaactcaacaacttcaagcgcaatgaagtttggacactggacgagcacagggtggtgacgaggaacaaggctcgacttgtggcaaaaggttatgcccaagtcacaggtttggactttgaggagacttttgctcctgtggctaggctagaatcaattcgtatcttgctagcatatgcctctcaccattctttcaggttgttccaaatggatgtgaagagcgctttcctcaacgggccaatcaaggaggaggtgtacgtggagcaaccccctggcttcgaggatgaacggtaccccgaccacgtgtgtaagctctctaaggcgctctatggacttaagcaagccccaagagcatggtatgaatgccttagagactttttaattgctaatgctttcaaggttgggaaagccgatccaactctctttacaaagacatgtgatggtgatttgtttgtgtgccaaatttatgtcgatgacataatatttggttctactaaccaaaagtcttgtgaagagtttagcagggtaatgacgcagaaattcgagatgtcgatgatgggcgagttgaactacttccttgggtttcaagtgaagcaactcaaggacggcaccttcatctcccaaacaaagtacacgcaagacttgctgaagcggtttgggatgaaggacgccaagcccgcaaagactccgatggggaccgacggacacaccgacctcaacaaaggaggtaagtccgttgatcaaaaagcataccggtcaatgatagggtctttactttatttatgtgctagtagaccggatattatgcttagcgtatgcatgtgtgctagatttcaatccgatcctaaggagtgtcacttagtggcggtgaagcgaattcttagatatttggttgctacgccttgcttcgggctctggtatccaaaggggtctacctttgacttggttggatactcaggctccgactatgctgcatataaggtcgataggaagagtacatcggggacgtgccaattcttaggaaggtccctggtgtcgtggaactctaagaaacaaacttccgttgccctatccaccgctgaggccgagtatgttgccgcaggacagtgttgcgcgcaactactttggatgaggcaaaccctccgggactttggctacaatctgagcaaagtcccactcctatgtgacaatgagagtgctatccgcatggcggaaaatccagttgaacacagccgcacaaagcacattgacatccggcatcagtttctgcgagaccaccagcaaaagggagatatcgaagtgtttcatgttagcaccgagaaccagctagccgatatctttaccaaacctctagatgagaagaccttttgcaggctgcgtagtgagctaaatgtcttagattcgcggaacttggattga

SEQ ID NO: 4800 - DNA, 5010 bp, Zea mays
  Clone ID: TF_ZmC4916_454
atggatcctaaggggaagggtatagtgatcaacgacaaagagaaggaatccttcgtcaacgagccgaaggacgataagcctaccgactccggctcgggccaaagacggaaggaagggaagaagaagaagaccaggcgcatcaaggagatcgtctactacgacagcgacgagtctacttcttcccaaaaggacgaggaccacaacgactacgagagaagaaaaccggttaattctaacttttcttttgactactctcgtattccgcatagttcaaattcacatttgctttccattccactcggcaagcccccacactttgatggggaggactacggattttggagccacaaaatgcgtagtcacctattctctctccatcctagtatatgggagattgtagagagtggaatgcattttgatagttcggatagtcccatgttcattaatgaacaaattcataagaatgcacaagctactactgttcttctagcttccttgtgcaggaatgaataccataaggtgagcggcttggataacgccaagcaaatctgggacaccctcaaaatttctcatgaggggaacgacgtcaccttactcaccaagatggagttggtggagggcgagcttggacggttcgcaatgataaggggcgaggagccaacgcaaacatacaatcggctcaagacccttatcaacaagataagaagctacgggagcacgcgatggacggaccacgacgtcgtccgcctaatgctaaggtcatttaccgttcttgatcctcacttggtgaacaatatacgtgaaaatcccaggtacaccaagatgtcgcccgaagaagttcttgggaaatttgttagcgggcgaatgatgatcaaggaggcgagatatgtggacgacgccttgaatggtccgatcaacgagccgcaacctctcgctctcaaggcaacacgaagcaaggaggcgctacctagcaaggtggcacaaattgaggcggccggactcaacgatgaagagatggctctcatcatcaagagattcaagacggcgctaaatggtcgcaaggggcagccaagcaagaccaagaccaaggggaagcgctcatgcttcaaatgcggtaagcttggtcattttatcgctaactgtcccgataatgaaagtgaccaggaaaaggggaacaaaagagaaaagaagaagcaatacaagaaggcaaagggcgaggcgcatctaggaaaggagtgggactcggattgctcctcctccgactccgacaacgaaggactcgccgccactgccttcaacaaatcggctctcttccccaacgagcgtctcacatgtcttatggcaagggagaagaaggtgagtactcaagactccacttatgcttcttctagtgatagtgagtctagtgatgatgacatagattattcatgcttgttcaagggcttagatagatctaagatagataaaatcaatgaattgattgatgcattgaatgaaaaggataggcttttagaaaagcaggaggatttattgtatgatgaacatgataaatttgtagaggcacaaaaatcatatgctttagaagtaaaaagaaatgaaatgctttcttatgaactatctacttgtcatgaaaccatttctactttacaaggtgttaacaatgatttaaatgctaaattagaagtagcaaacaaatctaattcttgtgtagaacatgttgaaatttgtactaggtgtaaagactttgacattaatgcttgtagtgaacacctagtttcaatttccaagcttaatgatgaactggctagtcttaatgctcaacttaagactagcaagaatgatttcgataagctaaaatttgcaagggatgcctacacaattggtagacacccctcaattaaggatggacttggcttcaagagagaagctaagaacttaacaagccataaggctcccattcccgccaaggagaaagggaaggcccctatggctactagtgctaaaaggaaccatgcatttttgtatcatgatagaagacaaactagaaatgtaagtcatgatgcttatgattcatatgtttatgattctcataccatgtttgctcctagttcctcttatgtgtatgatagaaatgttactaggagaaatgttgttcctaaaagaaatgctattcatcatgtgcctagaaggaatgttattcatgctcctaggaaaatagcaaatgaaacttccacaatttattatgctttaaatgcttcctttgctatttgtagaaaggataagaaaattgttgctaggaagttaggggcaaaatgcaagggagacaaaacttgcatttgggtccctaaggatatttgcactaaccttgtaggacccaacatgagttgggtttatgcatccgggggttcaagctggattattgatagcagatgcacaaaccatatgacgggggagaagaagatgttcacctcctacgtcaagaataaggattcccaagattcaatcatattcggtgatgggaatcaaggcaaggataagtctgaaacccaagggaccctcaaacgcttcctcaggagagctcaaaatgagtttgagctcaaagtgaaaaagataagaagcgacaacgggtccgagttcaagaaccttcaagtggaggagttccttgaagaggaagggatcaagcacgagttctccgctccctacacaccacagcaaaatggtgtggtagagaggaagaacaggacgctcatcgacatggcgaggacgatgctaggagagttcaagacccccgagtgcttttggacggaagccgtgaacacggcgtgccacgccatcaacagggtctaccttcatcgcctcctcaagaagacgtcgtatgagctactaaccggtaacaaacccaatgtatcgtactttcgtgtatttgggagtaaatgctacattctagtaaagaagggtagaaattctaagtttgctcccaaagctgtagaagggtttttattaggttatgactcaaatacaaaggcgtatagagtcttcaacaaatcatcgggtttggttgaagtctctagcgacgttgtatttgatgagactaatggctctccaatagagcaagttgttgattgtgatgatgtagatgaagaagatgttccgacggccgctatacggaccatggcgattggagaagtacggccacaggaacaagatgaacgagatcaaccttcttcctcaactatggtgcaacccccaaccaaagatgacgaacaggtacctcaagtggaggcgcttgatcaagggggagcacaaaatgatcaagtgatagaggaagaagcgcaaccggcacctccaactcaagttcgagcgatgattcaaagggatcatcccgtcgaccaaattctgggtgacattagcaagggagtaactactcgatctcgattagttaatttttgtgagcattactcctttgtctcttctattgagcctttcagggtagaagaggccttgctagatccggactgggtgttggccatgcaagaggagttaaacaacttcaagcgcaatgaagtttggacactggtgcctcgtccgaagcaaaatgttgtgggaaccaagtgggtgttccgcaacaaacaggacgagcacggggtggtgacgaggaacaaggctcgacttgtggcaaaaggttatgcccaagtcgcaggtttggatttcaaggagacttttgctcctgtggctaggctagaatcaattcgtatcttgctagcatatgccgctcaccattctttcaggttgtttcaaatggatgtgaagagcgccttcctcaacgggccaatcaaggaggaggtgtacgtggagcaaccccctggcttcgaggatgaacggtaccccgaccatgtgtgtaagctctctaaggcgctctatggacttaagcaagccccaagagcatggtatgaatgccttagagatttcttaattgctaatgctttcaaggttgggaaagccgatccaactctttttactaagacttgtaatggtgatttgtttgtgtgccaaatttatgtcgatgacataatatttggttctactaaccaaaagtcttgtgaagagtttagcagggtgatgacgcagaaattcgagatgtcgatgatgggcgagttgaactacttccttgggttccaagtgaagcaactcaaggacggcaccttcatctcccaaacgaagtacacgcaagatctgctaaagcggtttgggatgaaggacgccaagcccgcaaagactccgatggggaccgacggacacaccgacctcaacaaaggaggtaagtccgttgatcaaaaagcataccggtcaatgataggttctttgctttacttatgtgctagtagaccggatattatgcttagcgtatgcatgtgtgctagatttcaatccgatcctaaggagtgtcacttagtggcggtgaagcgaattcttagatatttggttgctacgccttgcttcgggctctggtatccaaaggggtctacctttgacttagttggatactcagactccgactatgctggatgtaaggtcgataggaagagtacatcggggacgtgccaattcttaggaaggtccctggtgtcatggaactctaagaaacaaacttccgttgccctatccaccgctgaggccgagtatgttgccgcaggacagtgttgcgcgcaactactttggatgaggcaaaccctcagggactttggctacaatctgagcaaagtcccactcctatgtgataatgagagtgctatccgcatggcggaaaatcctgttgaacacagccgcacaaagcacatagacatccggcatcactttttgagagaccaccagcaaaagggagatatcgaagtgtttcatgttagcaccgagaaccagctagccgatatcttcactaagcctctagatgagaagaccttttgcaggttgcgtagtgagctaaatgtcttagattcgcggaacctggattga

SEQ ID NO: 4801 - DNA, 4986 bp, Zea mays
  Clone ID: TF_ZmC4916_471
atggatcctaaggggaagggaatcgtgatcaacgacaaggagaaggagtccttcgtcaacgagccgaaggatgacaagcctactgactcggggtcgggccacaagcgtaaagatgggaagaagaagaagacaaggcgtatcaaggagatcgtctactacgacgatagcgatgagtcgacttcttcccaaaaggacgacgacaacgactacaggaagacggtcaattcgaacttttcatttgattattctcgtattccacatagttcgaattcgcatttgctttctattcctcttggcaaacctccacacttcgatggggaagactacggattttggagtcacaaaatgcgtagtcacttattctctctccatccaagcatgtgggagattgtagagaatggaatgaaatttgatagctcggatagccctatgcttataaatgaacaaatccatagaaatgcacaagctactactgttctattagcatctttgtgcagggaagagtacaataaggtgagcggcctggacaacgccaagcagatatgggacaccctcaagatctctcacgaagggaacgacatcaccatgctcactaaaatggagttggtggagggcgagcttggacgattcgcaatgataaggggagaggagccaacccaaacttacaaccggctcaagacccttatcaacaaaataaggagctacggaagcacgcgatggacggaccacgacgtcgtccgcctaatgctaaggtcctttaccgttcttgatcctcatctcgtaaacaatattcgtgagaatcccaggtacacgatgatgacgcccgaggaggtactcggaaaattcgtaagcgggcggatgatgatcaaggaggcgagatacgtcgacgacgctctaaacggtccaatcaatgagcctcaacctcttgctctcaaggcaacaagaagcaaggaaatgctacctagcaaggtggcacaaattgaggcggccggacttaatgatgaagagatggctctcatcatcaagagattcaagacggcactaaaaggccgcaaggggcaaccaagcaagaccaagacaaaggggaagcgctcatgcttcaaatgtggtaagcttggtcattttattgctaactgtcccgacaatgatagtgatcaggatcaagggaacaagagggagaagaagaagaactataagaaggcaaagggcgaggcgcatctaggcaaggagtgggactcggactgctcctcttccgactccgacaatgaaggactcgccgccaccgccttcaacaagtcatccctcttcccaaacgagcgtcacacatgccttatggcaagggagaaaaaggtgagtactcgagactccacttatgcttcttctagtgataatgagtctagtgatgatgatgacatagactattcatgcttattcaagggcttagatagatctaagatagataagattaatgagttgattgatgctttgaatgacaagaatagattactagaaaaacaagaagatcttttatatgatgagcatgataaatttgttagtgcacaaaattctcttgctctagaaattaaaaggaatgaaatgctctctggtgaattatctacttgtcataacaccatttctactttagaaggtgtcaacaatgatttaaatgctaaattagaagtggcaaataaatctaattcttgtgaagaatatgttgtaatttgtactaggtgtaaagactttgacattgatgcgtgtagtgaacacctagtttcaatttccaagcttaatgatgaattggctagtcttaatgctcaacttaagactagcaagaatgattttgataagctaaaatttgcaagggatgcctacacgattggtagacacccctcaattaaggatggacttggcttcaagagggaagccaagaacttaacaagccataaggctcccatctccgccaaggagaaagggaaggcccctatggcaagtagtactaaaaggaaccatgcttttatgtatcatgataggagacaaactagaaatgcttataggaataataatgcttatgatgattttgaccctcatgccatgtttgcttctagttcttcctatatgcatggtagaaatatgtctaggagaaatgctattcatcatgtgcctaaaaagaatattattcatgctcctaggaaagtagtgaatgaaccttctacaatttattgtgctttaaatgcttcctttgctatttgtagaaaggataggaaaataattgctaggaagttaggggcaaaatgcaagggagacaaaacttgcatttgggtccctaaggatatttgcactaaccttgtaggacccaacatgagttgggtttatgcatccgggggttcaagctggattattgatagcggatgcacaaaccatatgacgggggagaagaagatgttcacctcctacgtcaagaataaggattcccaagattcaattatattcggtgatgggaatcaaggcaaggataagtctgaaacccaagggaccctcaagcgcttcctcaggagagctcaaaatgagtttgagctcaaggtgaagaagataaggagcgacaacgggtccgagttcaagaaccttcaagtggaggagttccttgaggaggaagggatcaagcacgagttctccgctccctacacaccacagcaaaatggtgtggtagagaggaagaacaggacgctaatcgatatggcgaggacgatgcttggagaattcaagacccccgagtgtttctggtcggaagccgtgaacacggcttgccacgccatcaacagggtctaccttcatcgcctcctcaagaagacttcgtatgagctactaaccggtaacaaacccaatgtatcttactttcgtgtatttgggagcaagtgctacattctagtaaagaagagtagaaattctaagtttgctcccaaagctgtagaagggtttttgttaggttatgactcaaatacaaaggcgtatagagtcttcaacaaatcatcgggtttggttgaagtctctagcgacgttgtatttgatgagactaatggctctccaagagagcaagttgttgatcttgatgatgtagatgaagaagacgttccaacggccgctatgcgcaccatggcgattggtgatgtgcgaccacaggaacaattggagcaagatcaaccttcttcctcaacaatgatgcatcccccaactcaaaacgatgaacaagttcatcaagaggagtgtggtcaagggggagcacaagatgatcatgtgatggagaaagaagcacaaccggcacctccaacccaagttcgagcgatgattcaaagggatcatcccgtcgaccaaattctgggtgatattagcaagggagtaactactcgatctcgattagttaatttttgtgagcattactcctttgtctcttctattgagcctttcagggtagaagaggccttgctagatccggactgggtgttagccatgcaggaggaactcaacaacttcaagcgcaatgaagtttggacactggtgcctcgtcccaagcaaaatgttgtgggaaccaagtgggtgttccgcaacaaacaggacgagcacggggtggtgacgaggaacaaggctagacttgtggcaaaaggttatgcccaagtcgcaggtttggactttgaggagacgtttgctcctgtggctaggctagagtcaattcgcatcttgctagcatatgccgctcaccattccttcaggttgtaccaaatggatgtgaagagcgctttcctcaacgggccaatcaaggaggaggtgtacgtggagcaaccctctggcttcgaggatgaacggtaccccgaccacgtgtgtaagctatctaaggcgctctatggacttaagcaagccccaagagcatggtatgaatgccttagagactttctaattgttaattctttcaaggttgggaaagccgatccaactctttttactaagacatgtgatggtgatttgtttgtgtgccagatttatgtcgatgacataatatttgattctactaaccaaaagtcttgtcaagagtttagcagggtgatgacgcagaaattcgagatgtcaatgatgggcgagttgaactatttccttgggttccaagtgaagcaactcaaggacggcaccttcatctcccaaacgaagtacacgcaagatctgctaaagcggtttgggatgaaggacgccaagcccgcaaagacaccgatgggaaccgacggacacaccgacctcaacaaaggaggtaagtccgttgatcaaaaagcataccggtcaatgatagggtctttactttatttatgtgctagtagaccggatattatgcttagcgtatgcatgtgtgctagatttcaatccaatcctaaggagtgtcacttagtggcggtgaagcgaattctaagatatttggttgctacgccttgcttcgggctctggtatccaaaaaggtctacctttgacttggttggatactcagattccgactacgctggatgtaaggtcgataggaagagtacatcagggacgtgccaattcttaggaaggtccctggtgtcgtggaactctaagaaacaaacctccgttgccctatccaccgctgaggccgagtatgttgccacaggacagtgttgcgcgcaactactttggatgaggcaaaccctcagggactttggctacaatctgagcaaagtcccactcctatgtgataatgagagtgctatccgcatggcggaaaatcctgttgagcacagccgcacaaagcacatagacatccggcatcactttttgagagattaccagcaaaagggagatatcgaagtgtttcatgttagcaccgagaaccagctagccgatatctttaccaagcctctagatgagaagaccttttgcaggttgcgtagtgagctaaatgtcttagattcgcggaacttggattga

SEQ ID NO: 4802 - DNA, 4725 bp, Zea mays
  Clone ID: TF_ZmC951_358
ctaggtgctctcaataatatccggtcgagatgcacataaatagagtaaagaacctatcatcgaccggtataccttttgatctacgaatttacctcccgtgttgaggtcgagatgcccattggttcccatgggtgtcttgatgggcttggcatccttcatcccaaacttgtttagaatgtcttgaatatactttgtttggctaatgaaggtgccctcttggagttgcttcacttgaaatcccaagaagtacttcaactcccccatcattgacatctcgaatttttgtgtcatgatcctactaaattcttcacatgtagattcgttagtagacccaaatatgatatcatcaacataaatttggcatacaaacaaatcattgtcaaaagttttagtaaataaagtaggatcggcctttccaactttgaagccgttagtgataaggaaatctcttaggcattcataccatgctcttggggcttgcttgagcccataaagcgccttagagagtttatacacatagttaggatactcactatcttcaaagccgggaggttgctcaacatagacctcttccttgattgatccgttgaggaaggcacttttcacgtccatttgataaagcttaaagccatggtaagtagcataggcaagtaatatgcgaattgattcaagcctagctatgggtgcataggtttcaccgaaatccaaaccttcgacttgtgaatatcctttggccacaagtcgggctttgttccttgtcaccacaccatgctcatcttgcttgttgcggaagacccacttggttcctacaacattttggttaggacgtggaaccaaatgccatacctcgttcctagtgaagttgttgagctcctcttgcatcgccaccacccaatccgaatcttgaagtgcttcctctactttgtgtggctcaatagaggaaacaaaagagtaatgctcacaaaaatgtgcaacacgagatctagtggttacccccttatgaatgtcgccgaggatggtgtcgacggggtgatctcgttggattgcttggtggactcttgggtgtggcggtctcggttccgcatcctctttgtcttgatcatttgcatctcccccttgatcattgctgtcatcttgaggtggctcatctttttgatcttctccttcatcaacttgagcctcatcctcattttgagttggtggagatgcttgcgtggaggaggatggttgatcttgtgcatttggaggctctttggattctttaggacacacatccccaatggacatgttccttagcgcgacgcacggagcctcttcatcacctatctcatcaagatcaacttgctctacttgagagccgttagtctcatcaaacacaacgtcacaagaaacttcaacttgtccagaggacttgttaaagactctatatgcccttgtgtttgaatcatatcctagtaaaaagccttctacagtcttaggagcaaatttagattttctacctcttttaacaagaataaagcatttgctaccaaagactctaaaatatgaaatattgggctttttaccgataagaagttcatatgatgtcttcttgaggattcggtgtagatacaaccggttgatggcgtagcaggcggtgttgaccgcctcggcccaaaaccgatccgaagtcttgtactcatcaagcatggttcttgccatgtccaatagagttctattcttcctctctactacaccattttgttgtggcgtgtagggagaagagaactcatgcttgatgccctcttcctcaaggaagccttcaatttgagagttcttgaactccgtcccgttgtcgcttctaattttcttgatccttaagccgaactcattttgagctcgtctcaagaatccatttaagtttcttgggtatgagatttttctcccgccgatgcttatgtaagctatcgggccgaataggtccatgtgtaggagctcgagtggcctgtcagtcgtcatgatgttcttgtgtggatgatgaacaccaacttgcttccctgcctgacatgcgctacaaatcctgtctttctcaaaatgaacatttgttagtcccaaaatgtgttctccctttagaagtttgtgaacattcttcattccaacatgtgctagtcggcgatgccagagccagcccatgttagtcttagcaattaagcaagtgtcgagttcagctctatcaaaatctactaagtatagctgaccctctaacactcccttaaatgctattgaatcatcactccttctaaagacagtaacacctacatcttgatttccatcctcgaatgtgatagctcgttggggatcttggtttttctcgtaggaggagaacatcttcttctcccctgtcatgtggtttgtgcacccgctatcgatgatccaacttgagcccccagatgcataaacccaaacacaagtctttgaccccttgtgcttgcccccaacatacttggcaactacattgccggatttgttagttaaaacataagatgcatcaaaagttttaaatgaaatgttatgatcatttgatgcactaggagttttcttcttaggcaatttagcatgggttgattgcctagaactagatgtctcacccttatacataaaagcatgattagggccagagtgagacttcctagagtgaattctcctaattttgctctcgggataaccggcagggtaaaaaatgtaaccctcgttatcctgaggcatgggagccttgcccttaacaaaattagacaatcttttaggaggggcattaagtttgatattgtcccccttttggaagccaatgtcatccttgatgccggggcgtctcccactatagagcatgcttctagcaaatttaaacttttcattttctaagtcatgctcggcaattttagcatctaatttagctatatgatcattttgttgtttaattaaagccatatgatcatgaatagcatcaatgttaatgtctctacatctagtgcaaatagtgacatgctcagtggtagatgtagagggtttgcaagaattaagttcaacaatcttagcacataaaatgtcattgttatctctaagatcggaaatggaagcattgcaaacatctaattctttagccttagcaagcaatttttcattttcaatcctaaggctagcaagagatatgttcaattcttcaatcttagcaagtaaatcaacattatcatttctaagattgggaattgaaacatcacaagcatttgaatcaaccttagtaattaatctagcattctcatttctaaggttggcaattaaatcatgtgatgtgcctagctcactagttaatttttcacatttttcaacttctagagcgtaagcatttttaaccttaacatgctttttgttttccttgattaggaagtcctcttgggtgtccaagagttcatccttttcatggatggaattgtggccgacattggggaagaggagtcccttggtgacggcgatgttggcggcgtcctcgtcggaggaggagtcggtggagctctcgtcggagtcccactcccggcaaacatgggcatcgccgcccttcttcttgtagtatctcttcttctcctttcttctccctttcttgtcgtcgcccctgtcactatcactagataatggacatttagaaatgaaatgaccgggcttaccacacttgtagcacactttcttggagcggggcttgtaatccttccccctcctttgcgtgaggatttggctgaagctcttgatgatgagcgtcatttcctcgttgtcgagcttggaggcgtcgatgggtgttctacttgatgtagatttctccttcttttcctccgtcgccttgaatgcgaccggttgtgcttcggacgtggaggggccatcaagctcgttgattttctttgagccacgaattaattgaacttgtgtagggttaaggaaaacaagtgatctaagaataaccttaaccatttcgtggtcatcccattttttgctcccgaggttgcgcacttggttcaccaaggttttgagccggttgtacatgtcttgtggctcctccccttggcgaagtcggaagcgatcgagctccccctcgatcgtctcccgcttggtgatcttggtcacctcgtctccttcgtgcgcggtctttagcacgtcccaaatttcctttgcgctattcaacccttgcaccttattatactcctctcgacttagagaggctaggagtatagtggtggcttgggagttgaagtgcataatttgggctacttcatcctcatcatagtcttcatcccttttgtggagtgaggttaggtgatatcgcatcatatcactccacctagcataatcttcaccatcaaacattggtggtttgcctaatgggacggaaagtaatggcgtatgtttaggaatgcgagggtagcgtaaggggatcttactaaactttttgcgctcatggcgcttagaagttacggacggcgtgtcggagccggaggtggatggcgacgaggagtcggtctcgtagtagaccaccttcctcatcttcttcttcttcttgtcaccgctccgacgcgacttgtgtgaaggggattccttttccttccccttccctttgttgtaggactctcccgatggagcctccccgtggcttgtaatgggcttctcgccggtccccatctctttcttggcgtgatctcccgacat

SEQ ID NO: 4803 - DNA, 5166 bp, Zea mays
  Clone ID: TF_ZM3612.C6.o4.fg
atggatcctaaaggcaaggggatggtgatcaacgacaaggagaaggagtccttcgtcaacgagcccaatgatgacaggtccaccgactcaggatcgggccacaaaagaaaagacgagaggaagaagaagacaaggcgcatcaaggaaattgtctactacgacagcgacgaatcttcctcctctcaaaaggacgtcgacgactacgataaacgaaagatggttaactcaaacttttctttcgattattcgcgcatcccgcatagttcaaatgctcaattgctccccattccacttggcaagccccctcactttgatggagaggattacggattttggagccacaaaatgtgtactcacctgttttctctccatccaagcatttgggagattgtggaaagtggaatgaaatttgatagctcggatagccctgtgtttattaatgaacagattcataaaaatgcacaagctactactgtgttgctagcctctttgtgcagggacgagtatcacaaggtgagcggcttggacaatgccaagcagatctgggacaccctcaagatctctcatgagggaaacgacgtcaccttgctcaccaaaatggagttggtggagggcgagcttggacggttcgcgatgataaggggcgaggagccgacacaaacatacaaccggctcaagacccttatcaacaaaataaggagctacgggagcacgcgatggacggaccacgacgtcgtccgcctaatgctaaggtcatttaccgttcttgatcctcatttggtgaacaatattcgtgaaaatcccaggtacaccaagatgtcgcccgaagaagttcttgggaaattcgttagcgggcgaatgatgatcaaggaggcgaggtacgtggacgacgccttgaatggtccgatcaacgagccgcaaccccttgctctcaaggcaacacgaagcaaggaggcgctacctagcaaggtggcacagattgaggcggccggacttaatgatgaagagatggctctcatcatcaaaagattcaagacggtgcttaaaggtcgcaagggacagccaagcaagaccaaagccaaggggaagcgctcatgcttcaaatgcggtaagcttggtcattttattgctaactgtcccgacaatgatagtgatcaggatcaagggaacaagagggagaaaaagaagaactataagaaggcaaagggcgaggctcatcttggcaaggagtgggattcggactgctcttcgtccgactccgacaatgaaggactcgccgccaccgccttcaacaagtcatccctcttccccaacgagcgtcacacttgcctcatggcaagggagaagaaagtaagcacacataatactagtacttatgcttcttcaagtgaggatgagtctagtgatgatgatgagatagattactcatgcttattcaagggattagatagaaccaaggtagacaaaattaatgaattaattgatgccttgaatgataggaatatacttttagaaaagcaagaggatttgttgtatgaagagcatgataaatttgtagaagctcagaaatctcttgctctagaaattaagaggaatgaaatgctctctagtgaattatcttcttgtcatgaaactattgctaagttaaaaagttttaatgatgatttaaatgctaaactagaagtagctagtaaatctaattcttgtgtagaaattgttgaaacttgtaataggtgtaaagattttgacattgatgcttgtagtgatcatttagtttcaatttccaaattaaatgatgaattagctagtcttaatgcccaacttaagactagcaagaatgaatttgacaagctaaaatttgcaagggatgcttacacgattggtagacacccctcaattaaggatggacttggctacaagagggaagccaagaacttgacaagccataaggctcccatctccgccaaggaaaaagggaaggcccctatggctagtagtgtgcaaaagaaccatgcctttatgtaccatgatagaagacaacctagaaatgcttataggagttgtaatgcatataatgtctttgattctcatgccatgtttgcttctagttcttcttatgtgcatgatagaaatgttggtaggagaaatgttattcataatatgcctaggaaaaatgttgttaatgttcctaggaaagtaaatgaaccttctacaatttatcatgctttaaatgcttcctttgctatttgtagaaaggataggaagatagttgctagaaaattaggggcaagatgcaagggagacaaaacttgcatttgggtccctaaggatatttgtgctaaccttgtaggacccaacatgagttgggtttatgcatccgggggttcaagctggattattgacagcggatgcacaaaccatatgacgggggagaagaagatgttcacctcctacgtcaaaaacaaagattcccaagattcaataatattcagtgatgggaatcaaggcaaggtaaaagggctaggtaaaattgcaatctccaatgagcactctatctctaatgtgtttttagtagagtctcttggatataatttactatctgttagtcaattgtgcaatatgggatataactgtctatttacaaatgtagatgtgtctgtctttagaagatgtgatggttcactagcttttaagggtgtactagacggcaagctttacttagttaattttgcaaaagaagaggctggtctagatgcatgcttaatggctaagacttgcatgggctggctgtggcatcgccgcttagcacatgtggggatgaagaacctccacaagcttctaaagggagaacacgtgataggtctaaccaatgttcatttcgaaaaagatagaccttgtgcagcttgtcaagcagggaaacaggtgggaagctctcatcacaccaaaaatgtgatgacaacatcaagacccctggagctgctacatatggacctcttcggacccgtcgcctatctgagcataggaggaagtaagtatggtctagttatcgttgatgacttttcccgcttcacttgggtgttctttttgcaggataagtctgaaacccaagggaccctcaagcgcttcctaaggagagctcaaaatgagtttgagctcaaggtgaagaagataaggagcgacaacgggtccgaattcaagaaccttcaagtggaggagtttcttgaggaggaggggatcaagcacgagttctccgctccctacacacctcagcaaaacggtgtggtagagaggaagaacaggacgctcatagatatggcgaggactatgcttggagaattcaagacccccaagtgcttttggtcggaagccgtgaacacggcttgccacgccatcaacagggtctaccttcaccgcctcctcaagaagacgtcgtatgagctactaaccggtaacaaacctaatgtatcatattttcgtgtttttgggagtaaatgctacattctagtgaagaagggtaggaattccaaatttgctcccaaagccgtagaagggtttttattaggttatgattcaaatacaaaggcgtatagggtcttcaacaaatcatcgggtttggttgaagtctctagcgacgttgtatttgatgagactaatggctctccaagagagcaagttgttgatcttgatgatgtagatgaagaagacgttccaacggccgcgatacgcaccatggcgattggagatgtacgacctcaagaacatttggagcaagatcaaccgtcttcctcaactatgcctttcagggtagaagaggccttgctagatccggactgggtgttggccatgcaggaggaactcaacaacttcaagcgcaatgaagtttggacactggtgcctcgtcccaagcaaaatgttgtgggaaccaagtgggtgttccacaacaaacaggacgagcacggggtggtgacgaggaacaaggcccggcttgtggcaaaaggttatgcccaagtcgcaggtttgaactttgaggagacttttgctcctgtggctaggctagagtcaattcgcatcttgctagcatatgccgctcaccattctttcaggttgtaccaaatggatgtgaagagcgctttcctcaacgggccgatcaaggaggaggtgtacgtggagcaaccccctggcttcgaggatgaacggtaccccgaccacgtgtgtaagctctctaaggcgctctatggacttaagcaagccccaagagcatggtatgaatgccttagagactttttaattgctaatgctttcaaggttgggaaagccgatccaactctttttactaagacttgcgacagtgatctttttgtgtgccaaatttatgtcgacgacataatatttggttctactaaccaaaagtcttgtgaagagtttagcagggtgatgacgcagaaattcgagatgtcaatgatgggcgagttgacctacttccttgggttccaagtgaagcaactcaaggacggcaccttcatctcccaaacgaagtacacacaagatctgctaaagaggtttgggatgaaggacgccaagcccgcaaagacgccgatgggaaccaacggacacaccaacctcaacaaaggaggttctttgctttatttatgtgctagtagaccggatattatgcttagcgtatgcatgtgtgctagatttcaatctgatcctaaggagtgtcacttagtggctgtgaagcgaattcttcgatatttagtcgctacgccttgcttcgggatctggtatccaaaggggtctaactttgacttgattgggtactcagattccgactatgctggatgtaaggtcgataggaagagtacatcggggacgtgccaattcttaggaaggtccctggtgtcatggaactctaagaaacaaacctccgttgccctatccaccgctgaggccgagtacgttgccgcaggacagtgttgcgcgcaactactttggatgaggcaaaccctcagggactttggctacaatctgagcaaagtcccactcctatgtgataatgagagtgctatccgaatagcggaaaatcctgttgagcacagccgcacaaagcacattgacatccggcatcactttttgagagaccaccagcaaaagggggatatctaa

SEQ ID NO: 4804 - DNA, 4095 bp, Zea mays
  Clone ID: TF_ZM3654.C1.o3.fg
atggatcctaaggggaagggaatcgtgatcaacgacaaggagaaggagtccttcgtcaacgagccgaagaatgacaagcctactgactcgggctcgggccacaagcgcaaagatgggaagaagaagaagacaaggcgcatcaaggagatcgtctactacgacgatagcgatgagtctacttcttcccaaaaggacgacgacaacgactacaggaagacggtcaattcaaacttttcatttgattattctcgtattccacatagttcgaattcgcatttgctttccattcctcttggtaaacctccacactttgatggggaggactacagattttggagtcacaaaatgcgtagtcacttattctctctccatccgagcatatgggagattgtagagaatggaatgaaatttgatagctcggatagccctatgcttataaatgaacaaatccatagaaatgcacaagctactactgttctattagcatctttgtgcagggaagagtacaataaggtgagcggcttggacaatgccaagcagatatgggacaccctcaagatctctcacgaggggaacgacatcaccatgcttactaaaatggagttggtggagggcgagcttggacgattcgcaatgataaggggagaggagccaacccagacttacaaccgactcaagacccttatcaacaaaataaggagctacggaagcacgcgatggacggaccacgatgccgtccgcctaatgctaaggtcctttaccgttcttgatcctcatctcgtaaacaatattcgtgagaatcccaggtacacgacgatgacgcccgaggaggtactcggaaaattcgtaagcgggcggatgatgatcaaggaggcgagatacgtcgacgacgctctaaacggtccaatcaatgagcctcaacctcttgctctcaaggcaacaagaagcaaggagatgctacctagcaaggtggcacaaattgaggcggccggacttaatgatgaagagatggctctcatcatcaagagattcaagacggcgctaaaaggccgcaaggggcagccaagcaagaccaagacaaaggggaagcgctcatgcttcaaatgtggtaagcttggtcattttattgctaactgtcccgacaatgatagtgatcaggatcaagggaacaagagggagaagaagaagaactataagaaggcaaagggtgaggcgcatctaggcaaggagtgggactcggactgctcctcttccgactccgacaatgaaggactcgccgccaccgccttcaacaagtcatcccttttccccaacgagcgtcacacatgccttatggcaagggagaagaaggtttatgcatccgggggctcaagctggattatcgacagcggatgcacaaaccatatgacgggggagaagaagatgttcacctcctacgtcaagaataaggattcccaagattcaataatattcggtgatgggaaccaaggcaaggtaaaagggttagttgagtctctgggatataatttactatctgttagtcaattatgcaatatgggatataactgtttattcacaaacatagatgtgtctgtctttagaagaagtgatggttcactagcttttaagggtgtattagatggcaagctttacttagttgaatttgcaaaagaagagaccggtctagatgcatgcttaattgctaagactagcatgggctggctgtggcatcgccgcttagcacatgtgggaatgaagaaccttcacaagcttctaaagggagaacacgtgataggattaactaatgtgcaattcgaaaaagatagaccttgtgcagcttgtcaggcaggtaaacaagtgggaggagcacatcacagcaagaatgtgatgaccacatcaagacccttggagttgctacatatggacctcttcggacccgtcacctatctaagcataggaggaagtaagtatggtctagttattgttgatgacttttcccgcttcacttgggtgttctttttgcaggataagtctgaaacccaagggaccctcaagcgcttcctaaggagagcacaaaatgagtttgaactcaaagtgaagaagataagaagcgacaacgggtccgagttcaagaaccttcaagtggaggagttccttgaggaggaagggatcaagcacgagttctccgctccctacacaccacaacaaaatggtgtggtagagaggaagaacaggacgctcatcgatatggcgaggacgatgctaggagagttcaagacccccgagtgcttttggtcggaagctgtgaacacggcttgccacaccatcaacagggtctaccttcatcgcctcctcaagaagacgttgtatgagcttctaaccggtaacaaacccaatgtatcttactttcgtgtatttgggagcaaatgctacattctagtgaagaagggtagaaagtctaagtttgctcccaaagctgtagaagggtttttgttaggttatgactcaaatacaaaggcgtatagggtcttcaacaaatcatcgggtttggttgaagtctctagcgacgttgtatttgatgagactaatggctctccaagagagcaagttgttgattgtgatgatgtagatgaagaagatgttccgacggccgctatacacaccatggcgattggagatgtgcggccacaggaacaaaaggagcaagatcagccttattcctcaactatggtgcttcccccaactcaagacgatgaacaggttcatcaacaagaggcgtgtgatcaagggggagcacaagatgatcatgtgatggaggaagaagcgcaaccggcacctccaacccaagttcgagcgatgattcaaagggatcatcccgtcgaccaaattctgggtgatattagcaagggagtaactactcgatctcgattagttaatttttgtgagcattactcatttgtctcttctattgagcctttcagggtagaggaggccttgctagatccggactgggtgttggccatgcaagaggagctcaacaacttcaagtgcaatgaagtttggacactggtgcctcgtcccaagcaaaatgttgtgggaaccaagttgttccaaatggatgtgaagaacgctttcctcaacgggccaatcaaggaggaggtgtacgtggagcaactccctggcttcgaggatgaacggtaccccgaccacgtgtgtaagctctctaaggcgctctatggacttaagcaagccccaagagcatggtatgaatgccttagagatttcttaattgctaatgctttcaaggttgggaaagccgatccaactcttttcactaagacttgtgacggtgatctttttgtgtgccaaatttatgtcgatgacataatatttggttctactaataaaaagtcttgtgaagaatttagcagggtgatgacgcagaaattcgagatgtcgatgatgggcgagttgaactacttccttgggttccaagtgaagcaactcaaggacggcaccttcatctctcaaacaaagtacacgcaagacttgctgaagcagtttgggatgaaggatgccaagcccgcaaagactccgatggggaccgacggacacaccgacctcaacaaaggagattccgattatgctggatgtaaggtcgataggaagagtacatcggggacgtgccaattcttaggaaggtccctggtgtcatggaattctaagaaacaaacctccgttgccctatccaccgctgaggccgagtatgttgccgcaggacagtgttgcgcgcaactactttggatgaggcaaaccctcagggactttggctacaatctgagcaaagtcccactcctatgtgataatgagagtgctatccgcatggcggaaaatcctgttgagcacagccgcacaaagcacatagacatccggcatcactttttgagagaccaccagcaaaagggagatatcgaagtgtttcatgttagcaccgagaaccagctagccgatatctttaccaagcctctagatgagaagaccttttgcaggctgcgtagtgagctaaatgtcttagattcgcggaacttggattga

SEQ ID NO: 4805 - DNA, 4344 bp, Zea mays
  unsure (1)..(4344): unsure at all n locations
  Clone ID: TF_ZM3667.C6.o2.fg
atggatcctaagggaaaggggatggtgatcgacaacaacgagaaggagtctatcctcaatgagccgaagaatgacaagtctaccgacttgggctcaagccacaagcgcaaagatgggaagaagaagaagacaaggcacatcaaggagatcgtctactacgacgacagcgatgagtctacttcgtcccaaaaggacgacgacaacgactacaggaagacggttaattcgaacttttcatttgattattctcgtattccacatagttcgaattcgcatttgctttccattcctcttggcaaacctgcacaattcgatggggaggactacggattttggagtcacaaaatgcgtagtcacttattctctctccatccaagcatatgggagattgtagagaatggaatgaaatttgatagctcggatagccctatgcttataaatgaacaaatccatagaaatgcacaaactactattgttctattagcatctttgtgcagggaagagtacaataaggtgagcggcttggacaacgccaagcagatatgggacaccctcaaaatctctcacgatgggaacgacatcaccatgctcactaaaatggagttggtggagggcgagcttggacgattcgcaatgataaggggagaggagccaacccaaacttacaaccggctcaagacccttatcaacaaaataaggagctatggaagcactcgatggacggaccacgacgtcgttcgcctaatgctaaggtcctttaccgtccttgatcctcatctcgtaaacaatattcgtgagaatctcaggtacacgatgatgacgcccgaggaggtactcggaaaatttgtaagcgggaggatgatgatcaaggaggcgagatacgtcgacgacgctctaaacggtccaatcaatgagcctcaacctcttgctctcaaggcaacaagaagcaaggaaacgctacctagcaaggtggcacaaattgaggcagccggacttaatgatgaagagatggctctcatcatcaagagattcaagacggcactaaaaggccgcaaggggcaaccaagcaagaccaagacaaaagggaagcgctcatgcttcaaatgtggtaagcttggtcattttattgctaactgtcccgacaatgatagtgatcaggatcaagggaacaagagggagaagaagaagaactataagaaggcaaagggcgaggcgcatctaggcaaggagtgggactcggactgctcctcttccgactccgacaatgaaggactcgccgccaccgccttcaacaagtcatccctcttccccaacgagcgtcacacatgccttatggcaagggagaagaaggtgagtactcaagactccacttatgctttttctagtgataatgagtctagtgatgatgatgacatagattattcatgcttattcaagggcttagatagatctaagatagataaaattaatgaattgattgatgccttgaatgataagaataggcttttagaaaagcaagaggatttgctgtatgaagaacatgacaaatttgtagaaacacaaaaatcacttgcattagagattaagagaaatgaaatgctttcttttgaactatctacttgtcatgaaaccatttctactttaaaaggtgtcancaatgatttaaatgctaaattagaagtagcaaataaatctaattcttgtgtagaacatgttgtaatttgtactaggtgtaaagattttgacattgatgcttgtagtgaacacctagtttcaatttccaagcttaatgatgagttggctagtcttaatgtttatgcatccgggggttcaagctggattatcgacagcggatgcacaaaccatatgacgggggagaagaagatgttcacctcctacgtcaagaataaggattcccaagattcaattatattcggtgatgggaatcaaggcaagaataagtctgaaacccaagggaccctcaagcgcttcctcaggagagctcaaaatgagtttgagctcaaggtgaagaagataaggagcgacaacgggtccgagttcaagaaccttcaagtggaggagttccttgaggaggaagggatccagcacgagttctccgctccctacacaccacagcaaaatgccgtgaacacggcttgccacgccatcaacagggtctaccttcatcgcctcctcaagaagacttcgtatgagctactaaccggtaacaaacccaatgtatcttactttcgtgtatttgggagcaagtgctacattctagtgaagaagggtagaaattctaagtttgctcccaaagctgtagaagggtttttgttaggttatgactcaaatacaaaggcgtatagagtcttcaacaaatcatcggatttggttgaagtctctagcgacgttgtatttgatgagactaatggctctccaagagagcaagttgttgatcttgatgatgtagacgaagaagatgttccgacggctgctatacgaaccatggcgattggtgatgtgcgaccacaggaacaagatgagcaagatcaaccttcttcctcaactatggtgcatcccccaactcaagacgatgaacaggttcatcaacaggagacgtgtgatcaagggggagcacaagatgatcatgtgatgggggaagaagcgcaaccggcacctccaacccaagttcgagcgatgattcaaagggatcatcccgtcgaccaaattctgggagatattagcaagggagtaactactcggtctcgattagttaatttttgtgaacattactcctttgtctcttttattgagccttttagggtagaagaggccttgctagatccgtactgggtgttggccatgcaagaggagctcaacaacttcaaaaggaatgaagtttggacgctggtgcctcgtcctaagcaaaatgttgtgggaaccaagtgggtgttccgcaacaaacaagacgagcacggagtggtgacaaggaacaaggctcgacttgtggcaaaaggttatgcccaagtcgcaggtttggactttgaggagacttttgctcctgtggctaggctagagtccattcgtatcttgctagcatatgccgctcaccattctttcaggttgttccaaatggatgtaaagagcgctttcctcaacgggccaataaaggaggaagtgtacgtggagcaaccccctggcttcgaggatgaacggtaccccgaccacgtatgtaagctctctaaggcgctctatggacttaagcaagccccaagagcatggtatgaatgccttagagatttcttaattgctaatgcttttaaggttgggaaagccgatccaactcttttcactaagacatgtgatggtgatttgtttgtgtgccaaatttatgtcgatgacataatatttggttctactaataaaaagtcttgtgaagagtttagcagggtgatgacgcagaaattcgagatgttaatgatgggcgagttgaactacttccttgggttccaagtgaagcaactcaaggatggcaccttcatctctcaaacgaagtacacgcaagacttgctaaagcggtttgggatgaaggacgccaagcccgcaaagactccgatgggaaccgatggacacaccgaccttaacaaaggaggtaagtcagttgatcaaaaagcataccggtcaatgataggatcgttactttacttatgtgctagtagaccggatattatgcttagcgtatgcatgtgtgctagatttcaatacgatcctaaggagtgtcacttagtggcagtgaagcgaatccttagatatttagttgctacgccttgcttcgggctctggtatccaaaggggtctacctttgacttaattggatattcagattccgactatgctggatgtaaggtcgataggaagagtacatcggggacgtgccaattcttaggaaggtccctggtgtcatggaactctaagaaacaaacttccgttgccctatccaccgctgaggccgagtatgttgtcgcaggacagtgttgcgcgcaactactttggatgaggcaaaccctccgggactttggctacaatctgagcaaagtcccactcctatgtgataatgagagtgttatccgcatggcggaaaatcctgttgagcacagccgaacaaagcacatagacatccggcatcactttttgagagaccaccagcaaaagggagatatcgaagtgtttcatgttagcaccgagaaccagctagccgatatctttaccaagcctctagatgagaagaccttttgcaggctgcgtagtgagctaaatgtcttagattcgcggaacttggattga

SEQ ID NO: 4806 - DNA, 2595 bp, Zea mays
  Clone ID: TF_ZM4163.C7.o1.fg
atggatcctaaggggaagggaatcgtgatcaacgataaggagaaggagtccttcgtcaacgagccaagggatgacaagtccaacgactcaagctcgggccacagacgcaaagatgggaagaagaagaagacaagacgcatcaaggagatcgtctactacgacagtgatgagtctacttcttcccaaaaggatgaggacaacgactacaaacaaaagacggttaactcaaacttttcttttgattattcgcgcattccgcatagctcaaatgctcatttgctccccattccacttggcaagcctcctcactttgatggagaggactacggattttggagtcacaaaatgcgtactcacctattttctctccatccaagcatttgggagattgtggaaagtggaatgaaatttgatagctcggatagcccttcgtttataaatgaacagatccataaaaatgcacaagctactactgtgttgctagcctctttgtgcagggacgagtatcacaaagtgagcggcttggacaatgccaagcagatttgggacaccctcaagatctctcatgagggaaatgatgtcaccttactcaccaagatggaattggtggagggcgagctcggacgattcgcgatgataaggggcgaggagccgacacaaacatataaccggctcaagatcctcatcaacaaaataaggagctacggaagcacgcgatggacggatcacgacgttgtccgcctaatgctaaggtcatttaccgtccttgatcctcacttggtgaacaatattcgtgaaaatcctaggtacatcaagatgtcgcccgaagaaattcttggaaaatttgtaagcgggcggatgatgattaaggaggcgaggtacgtggacgacgcgttgaatggaccaatccatgagcctcaacccattgctctcaaggcaacaaggagcaaggaggcgctacccagcaaggtagcgcaaattgaggcggccggtcttaatgatgaagagatggccctcatcatcaaaagattcaagacggcactaaagggtcgcaagggacagccaagcaagactaagaccaagggaaagcgatcatgcttcaaatgcggtaagcttggtcattttattgctaactgtcccgacaatgatagtgaccaggatcacgggagcaagagggaaaagaagaagcattacaagaaggccaagggcgaggcacatatcagaaaggagtgggattcggattgctcctcctccgactccgacaatgaaggactcgccgccactgccttcaacaagacatccctcttccccaacgagcgtcacacatgccttatggcacgggagaagaaggtatgtaatcaagacaatgtcacttatgattcttccagtgataatgagtctagtgatgatgaaatagattactctagtttgttcaagggattggatagaactaaagtagataaaattaatgaattgattgatgccttgaatgaaaaagatagactcttagaaaaacaagaggaccttttgtatgaagagcatgacaaatttgtagaggcacaaaaatcttatgctttagaagttaaaagaaataaagtgctttctagtgaactatcttcttgtcatgaaaccattgctactttaaagagagttaatgacgacttaaatgctaaactagaagtagctagtaaatctaattcttgtgtagaacatgttgagatttgcactaggtgtaaagattttgacattgatgcttgtagtgaacacctagtttcaatttccaaacttaatgatgaattggctagtcttaatgctcaacttaagactatcaagagtaattttgataagctaaaatttgcaagggatgcctacacaattggtagacacccctcaattaaggatggacttggcttcaagagggaagccaagaacttaacaagccataaggctcccattcccgctaaggagaaagggaaggcccctatggctactagtgctaaaaagaaccatgcctttttgtatcatgataggagacaaactagaaatgcttataggagttataatgcatacaatgatttgtctcatgctatgtttgcttctagttcctcatatgtgtatgatagaaatgttggtagaagggacgttgttcataatatgcctaggagaaatgttgttaatattcctaggaaagttaatgagccttctacaatatatcatgctttgaatgcttcctttgcaatttgtagaaaggatagaaaggtttatgcatccgggggttcaagctggattatcgacagcggatgcacaaaccatatgacgggggagaagaaaatgttcacctcctacgtcaagaataaagattcccaagattcaatcatattcggtgatgggaatcaaggcaaggataagtctgaaacccaagggaccctcaagcgcttcctcaggagagctcaaaatgagtttgagctcaaggtgaagaagataaggagcgacaacgggtccgagttcaagaaccttcaagtggaggagttccttgaagaggaagggatcaagcacgagttctccgctccctacacaccacaacaaaatggtgtg

SEQ ID NO: 4807 - DNA, 4839 bp, Zea mays
  Clone ID: TF_ZM4323.C9.o5.fg
atggatcctaaggggaagggaatcgtgatcaacgataaggagaaggagtccttcgtcaacgagcccaaagatgacaagcataccgactcaggctcgggccatagacggaaggaagggaagaagaagaagacaaggcgcatcaaggaaatcgtctactacgacgacagcgacgaatcttcctcttcccaaaaggacaacgacgacaacgactatgacaaacaaaagacggttaactcaaacttttcttttgattattcgcgcattccgcatagctcaaatgctcatttgctccccattccacttggcaagcctcctcactttgatggagaggactacggattttggagtcacaaaatgcgtactcacctattttctctccatccaagcatttgggagattgtggaaagtggaatgaaatttgatagctcggatagcccttcatttattaatgaacagatccataaaaatgcacaagctactactgtgttgctagcctctttgtgcagggacgagtatcacaaggtgagcggcttggacaatgccaagcagatttgggacaccctcaagatctctcatgaggggaatgatgtcaccttactcaccaagatggagttggtggagggcgagctcggacgattcgcgatgataaggggcgaggagccgacacaaacatacaaccggctcaagatccttatcaacaaaataaggagctacggaagcacgcggtggacggatcacgacgtcgtccgcctaatgctaaggtcatttaccgttcttgatcctcacttggtgaacaatattcgtgaaaatcctaggtacatcaagatgtcgcccgaagaaattcttggaaaatttgtaagcgggcgaatgatgatcaaggaggcgaggtacgtggacgacgcattgaatggcccaatccatgagcctcaacccattgctcttaaggcaacgaggagcaaggaggcgctacccagcaaagtggcgcaaattgaggcggctggtcttaatgatgaagagatggccctcatcatcaaaagattcaagacggcgcttaaaggtcgcaagggacagccaagcaagaccaaagccaaggggaagcgctcatgcttcaaatgtggtaagcttggtcattttattgctaactgtcccgacaatgatagtgatcaggaccaagtgaacaagagggaaaagaagaagcactacaagaaggcaaagggcgaggcacatctaggcaaggaatgggactcggattgctcctcttccgactccgacaatgaaggactcgccgccaccgccttcaacaaatcaaccctcttccccaacgagcgtcacacatgccttatggcaagggagaagaaggtatgtactcggaactctacctatgcttcttcaagtgaggacgaatctagtgatgaagatgaagtagattactcatgtttgtttaagggtctagatagaaccaaggtagacaaaattaatgaattgattgatgctctaaatgagaagaacatgcttttagagaaacaagaggatttattgtatgaagaacatgataaatttatagaagctcaaaaatcctatgctttagaagttaaaagaaatgaaatgctttcttttgaactatctacttgtcatgaaaccatctctactttaaaaggtgtcaacaatgatttaaatgctaaattagaagtagcaaataaatccaattcttgtgtagaacatgtcgcaatttgttctaggtgtaaagattttgatattaatgcttgtagtgaacacttagtttctatttcaaaattaaatgatgaattagctagtcttaatgcacaacttaagactagcaagagtgattttgataaactgaaatttgctagggatgcctacactgttggtagacacccctccattaaggatggacttggcttcaaaagggaagccaagaacttaacaagccataaggctcccattcccgcaaaggagaaagggaaggcccctatggctactagcactaaaaagaaccatgcttttttatatcatgatagaagacaatctagaagtgcttataggggttataatgcttttgattctcatcatatgattgcttctagctcttcttatatgcatggtagaaatatgtctaggagaaatgctattcatcatgtgcctagaaagaatgttagtcatgctcctaggaaagtagtaaatgaattttctacagtatatcatgctttgaatgcttcctttgcaatttgtagaaaggatagaaaagtaattgctaggaagttaggggctaaatgcaagggtgataaaacttgcatttgggtccctaagaagatttgtgctaaccttgtaggacccaacatgagttgggtttatgcatccgggggttcaagctggattatagacagcggatgcacaaaccatatgacgggggagaagaagatgttcacctcctacgtcaagagtaaggattcccaagattcaattatattcggtgatgggaatcaaggcaaggataagtctgaaacccaagggaccctcaagcgcttcctcaggagagctcaaaatgagtttgagctcaaggtgaagaagataaggagcgacaacgggtccgaattcaagaaccttcaagtggaggagttccttgaagaggaagggatcaagcacgagttctccgctccctacacaccacagcaaaatggtgtggttgagaggaagaacaggacgctaatcgacatggcgaggacgatgcttggagaatttaagacccccgagcggttttggtcggaagtcgtgaacacgggcttgccacgccatcaacagggtctaccttcaccgactcctcaagaagacgtcgcgtatagagtcttcaacaaatcattgggtttggttgaagtctctagcgacgttgtatttgatgagactaatggctctccaagagagcaagttgttgatcttgatgaagtagatgaagaagatgttccaacggccgccatacgaaccatggcgattggtgacgtgcgaccacaggaacaagatgagcaagatcaaccctcttcctcaactatggtgcattccccaacacaagacgatgaacaagttcatcaacaggaggcgtgtgatcaagggggagcacaagatgatcatgtgatggaggaagaagcgcaaccggcacctccaacccaagttcgagcgatgattcaaagggatcatcccgtcgaccaaattctgggtgacattagcaagggagtaactactcgatctcgattagttaatttttgtgaacattactcctttgtctcttctattgagcctttcagggtagaagaggccttgctagatccggactgggtgttggccatgcaagaggagttaaacaacttcaagcgcaatgaagtttggacactggtgcctcgtcccaagcaaaatgttgtgggaaccaagtgggtgttccgcaacaaacaggacgagcacggggtggtgacaaggaacaaggctcgacttgtggcaaaaggttatgcccaagtcgcaggtttggactttgaggagacttttgctcctgtggctaggctagagtcaattcgtatcttgctagcatatgccgctcaccattctttcaggttgttccaaatggatgtgaagagcgcattcctcaacgggccaataaaggaggaggtgtacgtggagcaaccccctggcttcgaggatgaacggtaccccgaccacgtgtgtaagctctctaaggcgctctatggacttaagcaagccccaagagcatggtatgaatgccttagagatttcttaattgctaatgctttcaaggttgggaaagccgatccaactctttttacaaagacttgtgatggtgatttatttgtgtgccaaatttatgtcgatgacataatatttggttctactaataaaaagtcttgtgaagagtttagcagggtgatgacgcagaaattcgagatgtcgatgatgggcgagttgaactacttccttgggttccaagtgaagcaactcaaggacggcaccttcatctcccaaacgaagtacacgcaggacctgctaaagcggtttgggatgaaggacgccaagcctgcaaagacaccgatgggaaccgacggacacaccgacctcaacaaaggaggtaagtccgttgatcaaaaagcataccggtcaatgatagggtcattactttacttatgtgctagtagaccggatattatgcttagcgtatgcatgtgtgctagatttcaatccgatcctaaggagtgtcacttagtggcggtgaagcgaattcttagatatttagttgctacgccttgcctcgggctctggtatccaaaggggtctacctttgacttgattggatactcagactccgattatgctggatgtaaggtcgataggaagagtacatcggggacgtgccaattcttaggaaggtccttggtgtcatggaaatctaagaaacaaacctccgttgccctatccaccgctgaggccgagtacattgccgcaggacagtgttgcgcgcaactactttggatgaggcaaaccctcagggactttggctacactctgagcaaagtcccactcctatgtgataatgagagtgctatccgcatggcggaaaatcctgttgaacacagccgcacaaagcacatagacatccggcatcactttttgagagaccaccagcaaaagggggatatcgaggtgtttcatgttagcaccgagaaccagctagccgatatctttaccaagcctctagatgagaagaccttctgcaggttgcgtagtgagctaaatgtcttagattcgcggaacttggattga

SEQ ID NO: 4808 - DNA, 4938 bp, Zea mays
  Clone ID: TF_ZM4330.C2.o1.fg
atggatcctaaggggaagggaatcatgatcaacgacaaggagaaggagtccttcgtcaacgagccaaaggatgacaagcctaccgactcgggctcgggccacagacgcaaagatgggaagaagaagaagacaagacgcatcaaggagatcatctactacgacgacagtgatgagttcacttcttcccaaaaggacaacaacgacgacgactacaagaaaaagaaaacggtcaattcaaacttttcttttgattactctcgtattcctcaaagtacaaatgctcatttattatctattccacttggtaaacctcctcattttgatggagaggactacggattttggagtcacaaaatgcgtagtcacttgttctctctccatcctagtatatgggagattgtagagagtggaatgcactttgatagtacggatagtcccatgtttattaatgagcaaattcataaaaatgcacaagctactactgttcttctagcttctttatgcagggatgaataccacaaagtgagcggcttggataacgccaagcaaatttgggacaccctcaagatctctcatgaggggaatgatgtcacaatgctcaccaagatggagttggtggaaggcgaactcgggagattcgctatgataaggggagaagagtcaactcaaacatacaaccagataaagacccttgtcaacaagataagaagctatggaagcacgtcttttactgtccttgatcctcatcttgtaaacaatattcgtgagaatcctaagtacaccaagatgacgcccgaggagatacttggaaagttcgtgagtgggcgaatgatgatcaaggaagaaagatacgtggacgacgcattgaatggtccaatcaatgagcctcaacctcttgctctcaaggcaacaagaagcaaggagacggtacctagtaaggtggcacaaattgaggctgccggacttaatgatgaagagatggctctcatcatcaagagattcaagacggcgctaaaaggttgcaaggggcagccaagcaagaccaagacaaaggggaagcgctcatgcttcaaatgtggtaagcttggtcattttattgctaactgtcccgacaatgatagtgatcaggatcaagggaacaagagggagaagaagaagaactataagaaggcaaagggcgaggcgcatctaggcaaggagtgggattcagattgctcctcttccgactccgacaatgaaggactcgccgccaccgccttcaacaagtcatccctcttccccaacgagcgtcacacatgccttatggcaagggagaagaaggtatgtactcgaaactctacttatgcttcctcaagtgaggacgaatctagtgatgaggatgaaatagattattcatgtttatttaagggtctagatagaaccaaggtagataaaattaatgaattgattgatgccttgaatgataagaatagacttttagaaaatcaagaggatttgttatatgaagaacacgacaaatttgtagaagcacaaaaatctcatgctttagaagttaaaagaaatgaagtactttcttgtgaattatcttcttgccatgaaacaatttctagcttaaggagcattaatgatgatttgaatgctaggttagaaatagctagtaaatcaacatcttgtgtagaaattgttgaaacttgcaataggtgtaaagactttgatattaatgcttgtagcaaacatctagtctcaatttctaaattaagtgatgaggtggctagtcttagtgcccaacttaaaactagcaagagtaattttgataaactaaaattttctagggatgcctacacggttggtagacacccctctattaaggatggacttggcttcaagagggaagccaagaacttaacaagccataaggctcccatctccgccaaggagaaagggaaggcccctatggcaagtagtactaaaaagaaccatgcttttatgtacaatgatagaagacagtcttataggagttgtaatgcttacaatgcttttgatgcacatgcctatgattcctatgctatgtttgcttctagttcttcctatatgcatggtagagatatgcctagaaagaatattgttcatgttgctaggaaagttatggatggtccttctacaatttatcatactttaaatgctttctttgctatttgtaaaaaggataggaagatagttgctaggaaattaggggcaaaatgcaagggtgataaaacttgcatttgggtccctaagacaattgtgactaaccttgtaggacccaacaagagttgggtttatgcatccgggggttcaagctggattatagacagcggatgcacaaaccatatgacgggggagaagaagatgttcacctcctacgtcaaaaacaaggattcccaagattcaataatattcggtgatgggaatcaaggcaaggataagtctgaaacccaagggaccctcaagcgcttcctaaggagagctcaaaatgagtttgagctcaaggtgaagaagataaggagcgacaacgggtccgagttcaagaaccttcaagtggaggagtttcttgaggaggaagggatcaagcacgagttctccgccccctacacaccacaacaaaatggtgtggtagagaggaagaacaggacgctcattgatatggcgaggacgatgcttggagagttcaagacccccgagtgcttttggtcggaagccgtaaacacggcttgccacgccatcaatagggtctaccttcatcacctcctcaagaagacgtcgtatgagctgctaaccggtaacaaacccaatgtatcgtactttcgtgtatttgggagcaaatgttacattctagtgaagaagggtagaaattctaagtttgctcccaaagctgttgaagggtttttgttaggttatgattcaaatacaaaggcgtatagagtcttcaacaaatcatcgagtttggttgaagtctctagcgacgttgtatttgataagactaatggctctccaagagagcaagttgttgattgtgatgatgtagatgaagaagatgttctgacggccgctatacgcaccatggcgattggagatgtgcggccacaggaacaaaagaagcaagatcaaccttcttcctcaactatggtgcaccccccaactcaagatgatgaacaggttcatcaacaagaggcgtgtgatcaagggggagcacaagatgatcatgtgatggaggaagaagcgcaaccggcacctccaacccaagttcgagcgatgattcaaagggatcatcccgtcgatcaaattctgggtgacataagcaagggagtaactactcggtctcgactagttaatttttgtgagcattactcctttgtctcttctattgagcctttcagggtagaagaggccttgctagatccggactgggtgttggccatgcaagaggagctcaacaacttcaagcgcaatgaagtttggacattggtgcctcgtcccaagcaaaacgttgtgggaaccaagtgggtgttccgcaacaaacaggacgagcacggggtggtgacgaggaacaaggctcgacttgtggcaaaaggttatgcccaagtcgcaggtttggactttgaggagacttttgctcctgtggctaggctagagtccattcgtattttgctagcatatgccactcaccattctttcaggttgttccaaatggatgtgaagagcgctttcctcaacgggccaatcaaggaggaggtgtacgtggagcaaccccctggcttcgaggatgaacggtaccccgaccacgtgtgtaagctctctaaggcgctctatggacttaagcaagccccaagagcatggtatgaatgccttagagatttcttaattgctaatgctttcaaggttgggaaagccgatccaactcttttcactaagacttgtgatggtgatatatttgtgtgccaaatttatgtcgatgacataatatttggttctactaataaaaagtcttgtgaagagtttagcagggtgatgacgcagaaattcaagatgtcaatgatgggcgagttgaactacttccttgggttccaagtgaagcaactcaaggacggcaccttcatctctcaaacgaagtacacgcaagacttgctgaagcggtttgggatgaaggatgccaagcccgcaaagactccgatggggaccgacggacacactgatctcaacaaaggaggtaagtccgttgatcaaaaggcataccggtcaatgatagggtcattactttacttatgtgctagtagaccggatattatgcttagcgtatgcatgtgtgctagatttcaatccgatcctaaggagtgtcacttagtggcagtgaagcgaatccttagatatttggttgctacgccttgcttcgggctctggtatccaaaggggtctacctttgacctaattggatattcagattccgactatgctggatgtaaggtcgataggaagagtacatcggggacatgccaattcttaggaaggtccctggtgtcatggaactctaagaaacaaacttccgttgccctatccaccgctgaggccgagtatgttgccgcaggacagtgttgcgcgcaactactttggatgaggcaaaccctcaaggactttggctacaatctgagcaaagtcccactcctatgtgataatgagagtactatccgcatggcggaaaatcctgttgaacacagccgcacaaagcacatagacatccggcatcactttttgagagaccaccagcaaaagggagatatcgaagtgtttcatgttagcaccgagaaccagttagccgatatctttaccaagcctctagatgagacgaccttttgcaggttgcgtagtgagctaaatgtcctagattcgtggaacttggattga

SEQ ID NO: 4809 - DNA, 5454 bp, Zea mays
  Clone ID: TF_ZM4333.C3.o1.fg
atggatcctaaagggaagggaatcgtgatcaacgacaaggagaaggagtccttcgtcaacgagccaagggatgacaagtccaacgactcgggctcgggccacagacgcaaagatgggaagaagaagaagacaagacgcatcaaggagatcgtctactacgacagcgatgagtctacttcctcccaaaaggacgacgaccacaacgaatacgagagaaagaaaccggtcaattcgaacttttcttttgattactctcgtattcctcaaagtactaatgctcatttattatctattccacttggtaaacctcctcatgttgatggagaggactacggattttggagtcacaaaatgcgtagtcacttgttctctctccatcctagcatatgggagattgtagaaagtggaatgcactttgatagtacggatagtcccatgtttattaatgaacaaattcataaaaatgcacaagctactactgtgttgttagcctctttgtgcagggacgagtaccataaggtgagcggcttggacaatgccaagcagatttgggacaccctcaagatctctcatgaggggaataatgtcaccttgctcaccaagatggagttggtggagggcgagcttggacgattcgcaatgataaggggcgaggagccgacacaaacatacaacaggctcaagacccttatcaacaaaataaggagctacgggagcacgcgatggacggaccacgacgtcgtccgcctaatgctaaggtcatttaccattcttgatcctcatttggtaaacaatatacgtgaaaatcccaggtacaccaagatgtcgcccgaagaagttcttgggaaattcgttagcgggcgaatgatgatcaaggaggcgaggtacgtggacgacgccttgaatggtccgatcaacgagccgcaaccccttgctctcaaggcaacacgaagcaaggaggcgctacctagcaaggtggcacaaattgaggcggccggacttaatgatgaagagatggctctcatcatcaaaagattcaagacggtgcttaaaggtcgcaagggacagccaagcaagaccaaagccaaggggaagcgctcatgcttcaaatgcggtaagcttggtcattttattgctaattgtcccgacaatgatagtgatcaggatcaagggaacaagagggagagaaagaagaactataagaaggcaaagggcgaggctcatcttggcaaggagtgggattcggactgctcttcgtccgactccgacaatgaaggactcgccgccactgctttcaacaagtcatccctcttccccaacgagcgacacacttgcctcatggcaagggagaagaaagtaagcactcataatactagtacttatgcttcttcaagtgaggatgagtctagtgatgatgatgagatagattactcatgcttattcaagggattagatagaaccaaggtagacaaaattaatgaattgattgatgccttgaatgataggaatatacttttagaaaagcaagaggatttgttgtatgaagaacatgataaatttgtagaagctcagaaatctcttgctctagaaattaagagaaatgaaatgctctctagtgaactatcttcttgtcatgaaactattgctaagttaaagagttttaatgatgatttaaatgctagactagaagtagctagtaaatctaattcttgtgtagaacatgttatggattgcactaggtgtaaagattttaatgttgatgcttgtagtgaacacctagtttcaatttctaaattgaatgatgaagtggctagtcttaatgcccaacttaagactagcaaaagtaattttgataaactaaaatttgcaagggattcctacacaattggtagacacccctcaattaaggatggacttggctacaagagggaagccaaggacttgacaagccataaggctcctatctccgccaaggagaaagggaaggctcctatggctagtagtgctaaaaagaaccatgcctttatgtaccatgataggagacatactagaaatgcaaatagaagttataatgtttttgattcatatgcttatgattctcatgacatgtttgcttctagttctttctatgtgcatggtaggaatgttggtaggagaaatgttgttcataatatgactaggagaaatgttgttaatgttcctaggaaagtcaatgaaccttctacaatatatcatgctttgaatgcttcctttgcaatttgtagaaaggatagaaaggtgattgctagaaagttaggggcaaaatgcaagggtgataaaacttgcatttggatccctaaggaaattgtgactaaccttgtaggacccaacaagagttgggtttatgcatccgggggttcaagctggattattgacagcggatgcacaaaccatatgacgggggagaagaagatgttcacctcctacgtcaagaataaagattcccaagatttaataatattcggtgatgggaatcaaggcaaggtaaaagggttagatgtgtctgtctttagaaggtgtgatggttcactagcttttaagggtattctagatggcaagctttacttagtggattttgcaaaagaagaggccggtctagatgcatgcttaatggctaagacttgcatgggctggctgtggcatcgccgcttagcacatgtggggatgaagaacctccacaagcttctaaagggagaacacgtgataggtctaaccaatgttcatttcgaaaaagatagaccttgtgcagcttgtcaagcagggaaacaggtgggaggctctcatcacaccaaaaatgtgatgacaacatcaagacccctggagctgctacatatggacctcttcggacccgtcgcctatctgagcataggaggaagtaagtatggtttagttattgttgatgacttttcccacttcacttgggtgttctttttgcaggataagtctgaaacccaagggaccctcaagcgcttcatcaggagagctcaaaatgagtttgagctcaaggtgaagaagataaggagcgacaacgggtctgagttcaagaaccttcaagtggaggagttccttgaggaggaagggatcaagcacgagttctccgctccctacacaccacagcaaaatggtgtggtagagaggaagaacaggacgctaatcgatatggcgaggacgatgcttggagaattcaagacccccgagtgtttctggtcggaagccgtgaacacggcttgccacgccatcaacagggtctaccttcatcgcctcctcaagaagacttcgtatgagctactaaccggtaacaaacccaatgtatcttactttcgtgtatttgggagcaagtgctacattctagtaaagaagggtagaaattctaagtttgctcccaaagctgtagaagggtttttgttaggttatgactcaaatacaaaggcgtatagagtcttcaacaaatcatcgggtttggttgaagtctctagcgacattgtatttgatgagactaatggctctccacgagagcaagttgttgattgtgatgatgtagatgaagaagatgttccgacggccgctatacgaaccatggcgattggagaagtgcggccacaggaacaagatgaacgagatcaaccttcttcctcaacaacggtgcattccccaactcaagacgatgaacaggttcatcaaaaggaggcgtgtgatcaagggggagcacaagatgatcacgtgatggaggaagaagcgcaaccggcacctccaacccaagttcgagcggtgattcaaagggatcatcccgtcgaccaaattctgggtgatattagcaagggagtaactactcgatctcgattagttaatttttgtgagcattactcttttgtctcttctattgagcctttcagggtagaagaggccttgctagatccagactgggtgttggccatgcaggaggagctaaacaacttcaaaaggaatgaagtttggacactggtgcctcgtcctaagcaaaatgttgtgggaaccaagtgggtgtttcgcaacaaacaagacgagcacggagtggtgacgaggaacaaggctcgacttgtggcaaaaggttatgcccaagtcgcaggtttggactttgaggagacttttgctcctgtggctaggctagagtccatttgtatcttgctagcatatgccgctcaccattctttcaggttgtaccaaatggatgtgaagagcgctttcctcaatgggccgatcaaggaggaggtgtacgtggagcaaccccctggctttgaggatgaacggtaccccgaccacgtgtgtaagctctctaaggcgctctatggacttaagcaagccccaagagcatggtatgaatgccttagagactttttaattgctaatgctttcaaggttgggaaagccgatccaactctttttactaagacatgtgatggtgatttgtttgtgtgccaaatttatgtcgatgacataatatttggttctactaaccaaaagtcttgtgaagagtttagcagggtgatgacgcagaaattcgagatgtcgatgatgggcgagttgaactacttccttgggttccaagtgaagcaactcaaggacggcaccttcatctcccaaacaaagtacacgcaagacttgctgaagcggtttgggatgaaggacgccaagcccgcaaagactccgatggggaccgacggacacaccgacctcaacaaaggaggtaagtccgttgatcaaaaagcataccggtccatgataggttctttgctttatttatgtgctagtagaccggatattatgcttagcgtatgcatgtgtgctagatttcaatccgatcctaaggagtgtcacttagtggcggtgaagcgaattcttagatatttagttgctacgccttgcttcgggatctggtatcctaaggggtctaactttgacttgattgggtactcagattccgactatgctggatgtaaggtcgataggaagagtacatcggggacgtgccaattcttaggaaggtccctggtgtcatggaactctaagaaacaaacctccgttgccctatccaccgctgaggccgagtacgttgccgcaggacagtgttacgcgcaactactttggatgaggcaaaccctccgggactttggctacaatctgagcaaagtcccactcctatgtgacaatgagagtgctatccgcatggcggaaaatcctgttgagcacagccgcacaaagcacatagacatccggcatcactttttgagagaccaccagcaaaagggagatatcgaagtgtttcatgttagcaccgagaaccagctagccgatatctttaccaagcctctagatgagaagaccttttgcaggttgcgtaatgagctaaatgtcttagattcgcggaacttggattga

SEQ ID NO: 4810 - DNA, 1996 bp, Zea mays
  Clone ID: TF_ZM4454.C3.o1.fg
atggatcctaaaggcaaggggatggtgatcaacgacaaggaaaaggagtccttcgtcaacgagcccaatgatgacaagctcaccgactcaggctcgggccacaaaagaaaagacgggagaaagaagaaggcaaggcgcatcaaggaaattgtctactacgacagcgacgaatcttcctcctcccaaaaggacgacgacgactacgataaacgaaagacggttaactcaaacttttctttcgattattcgcgcatcccgcatagttcaaatgctcaattgcttcccattccacttggcaagccccctcactttgatggagaggattacggattttggagccacaaaatgcgtactcacctgttttctctccatccaagcatttgggagattgtggaaagtggaatgaaatttgatagctcggatagccctatgtttattaatgaacagattcatagaaatgcacaagccactactgtattgctagcctctttgtgcagggacgagtatcacaaggtgagcggcttggacaatgccaagcagatctgggacaccctcaagatctctcatgagggaaacgacgtcaccttgctcaccaaaatggagttggtggaaggcgaacttggacggttcgcgatgataaggggggaggagccgacgcaaacatacaaccggctcaagacccttatcaacaaaataaggagctacgggagcacgcgatggacggaccacgacgtcgtccgcctaatgctaaggtcatttaccgttcttgatcctcatttggtgaacaatatacgtgaaaatcccaggtacaccaagatgtcgcccgaagaagttcttgggaaattcgttagtgggcgaatgatgattaaggaggcaaggtacgtggacgacgccttgaatggtccgatcaacgagccgcaaccccttgctctcaaagcaacacgaagcaaggaggcgctacctagcaaggtggcacagtttgaggcggccggacttaatgatgaagagatggctctcatcatcaaaagattcaagacggtgcttaaaggtcgcaagggacagccaagcaagaccaaagccaaggggaagcgctcatgcttcaaatgcggtaagcttggtcattttattgctaactgtcccgacaatgatagtgatcaggatcaagggaacaagagggagaaaaagaagaactataagaaggcaaagggcgaggctcatctgggcaaggagtgggattcggactgctctttatccgactccgacaatgaaggactcgccgccaccgccttcaacaagtcatccctcttccccaacaagcgtcacacttgcctcatggcaagggagaagaaagtaagcactcataatactagtacttatgcttcttcaagtgaggatgagtctagtgacgatgatgagatagattactcatgcttattcaagggattagatagaaccaaggtagacaaaattaatgaattgattgatgccttgaatgataggaatatacttttagaaaagcaagaggatttgttgtatgaagaacatgataaatttgtagaagctcagaaatctcttgctctagaaattaagaggaatgaaatgctctctagtgaattatcttcttgtcatgaaaccattgctactttaaagagtgttaatgatgacttaaatgctaaactagaagtagctagtaaatctaattcttgtgtagaacatgttgagatttgcactaggtgtaaagatttcgatgttgatgcttgtagtgatcatttagtttcaatttccaaattaactgaggaattggctagtcttaatgcccaacttaagactagcaagaatgaatttgataaactaaaatttgcaagggatgcctacacgatcggtagacacccctcaattaaggatggacttggcttcaagagggaagccaagaacttaacaagccataaggctcccattcccgctaaggagaaagggaaggcccctatggctacta

SEQ ID NO: 4811 - DNA, 1987 bp, Zea mays
  Clone ID: TF_ZM4496.C1.o2.fg
atggatcctaaggggaagggaattgtgatcaacgacaaggagaaggagtccttcgtcaacgagccaagggatgacaagtccaataactcgggctcgggccacaagcgaagagatgggaagaagaagaagacaagacgcatcaaggagatcgtctactacgacagcgatgagtcctcttcttcccaaaaggacgacgaccacgacaaacaaaggaaaccggttaattcgaacttttcatttgattattctcgtattccacatagttcgaattcgcatttgctttccattcctcttggtaaacctccacattttgatggggaggactacggattttggagtcacaaaatgcgtagtcatttattctctctccatccaagcatatgggagattgtagagaatggaatgaactttgatagctcggatagccctatgtttattaatgaacaaattcataaaaatgcacaagctactactgttctcttagcatctttgtgcagggaagaatacaataaggtgagcggcttggacaatgccaagcagatatgggacaccctcaagatctctcacgaggggaacgacatcaccatgctcaccaagatggagttggtggagggcgagcttggacggttcgcgatgataaggggcgaggagccaactcagacatacaaccggctcaagacccttatcaacaaaataaggagctacggaagcacgcgatggacggaccacgacgtcgtccgactaatgctcaggtcctttaccgttcttgatcctcatttggtgaataatattcgtgagaatcccaggtacaccaaaatgtcgcccgaagaagtcctaggaaaattcgtcagcgggcgaatgatgatcaaggaggcaaggtatgtggacgacgccttgaatggaccgatcaacgagccgcaaccttttgctctcaaagccacagggaacaaggaggcgctactcagcaaggtggcgcaaattgaggcggccggtcttaatgaagaagaaatggccctcattatcaagagattcaagacggtgctaaagggtcgcaatggacagccaagcaagaccaagaccaaggggaagcgctcatgcttcaaatgcggtaagcttggtcattttatcgctaactgtcccgataatgaaagtgaccaggaaaaggggaacaaaagagaaaagaagaagcaatacaagaaggcaaagggcgaggcgcatctaggaaaggagtgggactcggattgctcctcctccgactccgacaacgaaggactcgccgccactgccttcaacaaatcggctctcttccccaacgagcgtctcacatgtcttatggcaagggagaagaaggtgagtactcaagactccacttatgcttcttctagtgatagtgagtctagtgatgatgacatagattattcatgcttgttcaagggcttagatagatctaagatagataaaatcaatgaattgattgatgcattgaatgaaaaggataggcttttagaaaagcaggaggatttattgtatgatgaacatgataaatttgtagaggcacaaaaatcatatgctttagaagtaaaaagaaatgaaatgctttcttatgaactatctacttgtcatgaaaccatttctactttacaaggtgttaacaatgatttaaatgctaagttagaagtagcaaataaatctaattcttgtgtagaacatgttaagatttgcactaggtgtaaggatttcgatgttgatgcctgtagtgaacatctagttttaatttccaaattaaataaggaagtggctagtcttaatgcccaacttaagactagcaagaatgaagttgataaaataaaatttgcaagggatgcctatacggttggtagacacccctcaattaaggatggtcttggcttcaagagagaggccaagaacttaacaagccataaggctcccatcttcgtcaaggagaaagggaaggcccctatggcta

SEQ ID NO: 4812 - DNA, 2117 bp, Zea mays
  Clone ID: TF_ZM4496.C6.o4.fg
atggatcctaaggggaagggaattgtgatcaacgacaaggagaaggagtccttcgtcaacgagccaagggatgacaagtcaaatgactcgggctcgggccacaagcgaagagatgggaagaagaagaagacaagacgcatcaaggagatcgtctactacgacagcgatgagtcctcttcttcccaaaaggacgacgactacgacaaacaaaggaaaccggttaattctaacttttcttttgactactctcgtattccgcatagttcaaattcacatttgctttccattccactcggcaagcccccacactttgatggggaggactacggattttggagccacaaaatgcgtagtcacctattctctctccatcctagcatatgggagattgtagagaatggaatgaaatttgatagctcggatagccctatgtttatcaatgaacaaattcataaaaatgcacaagctactactgttctcttagcatctttgtgcagggaagagtacaataaggtgagcggcttggacaatgccaagcagatatgggacaccctcaagatctctcacgagggaaacgacatcaccatgctcaccaagatggagttggtggagggcgagcttggacgattcgccatgataaggggagaagagccaactcaaacttacaaccggctcaagacccttatcaacaagataaggagctacggaagcacgcgttggacggatcacgacgtcgtccgcctaatgctcaggtcatttaccgttcttgatcctcatctcgtgaacaatattcgtgagaaccccaggtacacgatgatgacgcccgaagaagtacttggaaaattcgtgagcgggcggatgatgatcaaggaggcaaggtacgtcgatgacgcgttgaacggtccaatccacgagcctcaacccattgctctcaaggcatcgaggagcaaggaggcactaccaagcaaggtggcgcaaattgaggcggccgggcttaatgatgaagaaatggctctcatcattaagcgcttcaagacggtgctaaagggtcgcaatggacagccgagcaagactaagaccaaggggaagcgatcatgcttcaaatgcggtaagcttggtcattttattgctaactgtcctgataatgaaagtgaccaggaaaagggaaacaagagggaaaagaagaagcattataagaaggcaaagggtgaggcgcatctaggcaaggagtgggactcggattgctcctcatccgactccgacaatgaaggactcgccgccaccgccttcaacaaatcaaccctcttccccaacgagcgtcacacatgccttatggcaagggagaagaaggtaggtactcgcaactctacctatgcttcttcaagtgaggaagaatctagtgatgaggatgaagtagattattcatgtttgttcaagggcttagatagatctaagatagacaaaattaatgagttaattgatgccttgaatgaaaagaatatacttttagaaaagcaagaggatttgttgtatgaagagcatgataaatttgttgaggcacaaaaatcctatgctttagaagttaaaagaaatgaaatgctttcttttgaactatctacttgtcatgaaaccatttctactttgaaaggtgtcaacaatgatttaaatgctaaattagaagtagcaaataaatccaattcttgtgtagaacatgttgaaatttgtactaggtgtaaagattttgacattaatgcttgtagtgaacacctagtttcaatttccaagcttaatgatgaactggctagtcttaatgctcaacttaagactagcaagaatgatttcgataagctaaaatttgcaagggatgcctatacaattggtagacacccctcaattaaggatggacttggcttcaagagagaagctaaggacttaacaagccataaggctcccattcccgccaaggagaaagggaaggcccctatggctagtaatgtgcaaaagaaccatgcttttatgtattatgataggagacaaactagaaatgcttataggagttataatgcttttgatgattttgactctcatgccatgtttgctcctagttcctcttatgt

SEQ ID NO: 4813 - DNA, 5010 bp, Zea mays
  Clone ID: TF_ZM4551.C4.o7.fg
atggatcctaaggggaagggtatagtgatcaacgacaaagagaaggaatccttcgtcaacgagccgaaggacgataagcctaccgactccggctcgggccaaagacggaaggaagggaagaagaagaagaccaggcgcatcaaggagatcgtctactacgacagcgacgagtctacttcttcccaaaaggacgaggaccacaacgactacgagagaagaaaaccggttaattcgaacttttcttttgattactctcgtattccgcaaagttcacattctcatttgctctccattccactcggcaagcccccacactttgatggagaggactacggattttggagccacaaaatgcgtagtcacctattctctctccatcctagtatatgggagattgtagagagtggaatgcattttgatagttcggatagtcccatgttcattaatgaacaaattcataagaatgcacaagctactactgttcttctagcttccttgtgcaggaatgaataccataaggtgagcggcttggataacgccaagcaaatctgggacaccctcaaaatttctcatgaggggaacgacgtcaccttactcaccaagatggagttggtggagggcgagcttggacggttcgcaatgataaggggccaggagccaacgcaaacatacaatcggctcaagacccttatcaacaagataagaagctacgggagcacgcgatggacggaccacgacgtcgtccgcctaatgctaaggtcatttaccgttcttgatcctcacttggtgaacaatatacgtgaaaatcccaggtacaccaagatgtcgcccgaagaagttcttgggaaatttgttagcgggcgaatgatgatcaaggaggcgagatatgtggacgacgccttgaatggtccgatcaacgagccgcaacctctcgctctcaaggcaacacgaagcaaggaggcgctacctagcaaggtggcacaaattgaggcggccggactcaacgatgaagagatggctctcatcatcaagagattcaagacggcgctaaatggtcgcaaggggcagccaagcaagaccaagaccaaggggaagcgctcatgcttcaaatgcggtaagcttggtcattttatcgctaactgtcccgataatgaaagtgaccaggaaaaggggaacaaaagagaaaagaagaagcaatacaagaaggcaaagggcgaggcgcatctaggaaaggagtgggactcggattgctcctcctccgactccgacaacgaaggactcgccgccactgccttcaataaatcggctctcttccccaacgagcgtctcacatgtcttatggcaagggagaagaaggtgagtactcaagactccacttatgcttcttctagtgatagtgagtctagtgatgatgacatagattattcatgcttgttcaagggcttagatagatctaagatagataaaatcaatgaattgattgatgcattgaatgaaaaggataggcttttagaaaagcaggaggatttattgtatgatgaacatgataaatttgtagaggcacaaaaatcctatgctttagaagttaagagaaatgaaatgctttcttttgaactatctacttgtcatgaaaccatttctactttgaaaggtgtcaacaatgatttaaatgctaaattagaagtagcaaacaaatccaattcttgtgtagaacatgttgaaatttgtactaggtgtaaagactttgacattaatgcttgtagtgaacacctagtttcaatttccaagcttaatgatgaactggctagtcttaatgctcaacttaagactagcaagaatgatttcgataagctaaaatttgcaagggatgcctacacaattggtagacacccctcaattaaggatggacttggcttcaagagagaagctaagaacttaacaagccataaggctcccattcccgccaaggagaaagggaaggcccctatggctactagtgctaaaaggaaccatgcatttttgtatcatgatagaagacaaactagaaatgtaagtcatgatgcttatgattcatatgtttatgattctcataccatgtttgctcctagttcctcttatgtgtatgatagaaatgttactaggagaaatgttgttcctaaaagaaatgctattcatcatgtgcctagaaggaatgttattcatgctcctaggaaaatagcaaatgaaccttccacaatttattatgctttaaatgcttcctttgctatttgtagaaaggataagaaaattgttgctaggaagttaggggcaaaatgcaagggagacaaaacttgcatttgggtccctaaggatatttgcactaaccttgtaggacccaacatgagttgggtttatgcatccgggggttcaagctggattattgacagcggatgcacaaaccatatgacgggggagaagaagatgttcacctcctacgtcaaaaataaggattcccaagattcaattatattcggtgatgggaatcaaggcaaggataagtctgaaacccaagggaccctcaagcgcttcctcaggagagctcaaaatgagtttgagctcaaagtgaaaaagataaggagcgacaacgggtccgagttcaagaactctcaagtggaggagttccttgaagaggaagggatcaagcacgagttctccgctccctacacaccacagcaaaatggtgtggtagagaggaagaacaggacgctcattgacatggcgaggacgatgctaggagagttcaagacccccgagtgcttttggacggaagccgtgaacactgcttgccacgccatcaacagggtctaccttcatcgcctcctcaagaagacgtcgtatgagcttctaaccggtaacaaacccaatgtatcttactttcgtgtatttgggagcaagtgctacattctagtgaagaaaggtagaaattctaagtttgctcccaaagctgtagaagggtttttgttaggttatgactcaaatacaaaggcgtatagagtcttcaacaaatcatcgggtttggttgaagtctctagcgacgttgtatttgatgagactaatggctctccaagagagcaagttgttgattgtgatgatgtagatgaagaagatgttccgacggccgctatacggaccatggcgattggagaagtacggccacaggaacaagatgaacgagatcaaccttcttcctcaactatggtgcaacccccaaccaaagatgacgaacaggtacctcaagtggaggcgcttgatcaagggggagcacaagatgatcaagtgatagaggaagaagcgcaaccggcacctccaacccaagttcgagcgatgattcaaagggatcatcccgtcgaccaaattctgggtgacattagcaagggagtaactactcgatctcgattagttaatttttgtgagcattactcctttgtctcttctattgagcctttcagggtagaagaggccttgctagatccggactgggtgttggccatgcaagaggagttaaacaatttcaagcgcaatgaagtttggacactggtgcctcgtccgaagcaaaatgttgtgggaaccaagtgggtgttccgcaacaaacaggacgagcacggggtggtgacgagaaacaaggctcgacttgtggcaaaaggttatgcccaagtcgcaggtttggattttgaggagacttttgctcctgtggctaggttagagtcaattcgaatcttgctagcatatgccgctcaccattccttcaggttgttccaaatggatgtgaagagcgctttcctcaacgggccaatcaaggaggaggtgtacgtggagcaaccccctggcttcgaggatgaacggtaccccgaccatgtgtgtaagctctctaaggcgctctatggacttaagcaagccccaagagcatggtatgaatgccttagagactttttacttgctaatgctttcaaggttgggaaggccgatccaactcttttcactaagacatgtgatggtgatttgtttgtgtgccaaatttatgttgatgacataatatttggttctactaaccaaaagtcttgtgaagagtttagcagggtgatgacgcagaaattcgagatgtcgatgatgggcgagttgaactacttccttgggttccaagtgaagcaactcaaggacggcaccttcatctcccaaacgaagtacacgcaagatctgctaaagcggtttgggatgaaggacgccaagcccgcaaagactccgatggggaccgacggacacaccgacctcaacaaaggaggtaagtccgttgatcaaaaagcataccggtcaatgataggttctttgctttacttatgtgctagtagaccggatattatgcttagcgtatgcatgtgtgctagatttcaatccgatcctaaggagtgtcacttagtggcggtgaagcgaattcttagatatttggttgctacgccttgcttcgggctctggtatccaaaggggtctacctttgacttagttggatactcagactccgactatgctggatgtaaggtcgataggaagagtacatcggggacgtgccaattcttaggaaggtccctggtgtcatggaactctaagaaacaaacttccgttgccctatccaccgctgaggccgagtatgttgccgcaggacagtgttgcgcgcaactactttggatgaggcaaacccttagggactttggctacaatctgagcaaagtcccactcctatgtgataatgagagtgctatccgcatggcggaaaatcctgttgaacacagccgcacaaagcacatagacatccggcatcactttttgagagaccaccagcaaaagggagatatcgaagtgtttcatgttagcaccgagaaccagctagccgatatcttcactaagcctctagatgagaagaccttttgcaggttgcgtagtgagctaaatgtcttagattcgcggaacctggattga

SEQ ID NO: 4814 - DNA, 4827 bp, Zea mays
  Clone ID: TF_ZM4576.C1.o3.fg
atggatcctaaggggaagggaatcgtgatcaacgataaggagaaggagtccttcgtcaacgagcccaaagatgacaagcctaccgactctggctcgggccatagacggaaggaagggaagaagaagaagataagacgcatcaaggagatcgtctactacgacgacagcgacgaatcttcctcttcccaaaaggacaacgacgacaacgactatgacaaacaaaagacggttaactcaaacttttcttttgattattcgcgcattccgcatagctcaaatgctcatttgctccccattccacttggcaagcctcctcactttgatggagaggactacggattttggagtcacaaaatgcgtactcacctattttctctccatccaagcatttgggagattgtggaaagtggaatgaaatttgatagctcggatagcccttcgtttattaatgaacagatccataaaaatgcacaagctactactgtgttgctagcctctttgtgcagggacgagtatcacaaggtgagcggcttggacaatgccaagcagatttgggacaccctcaagatctctcatgaggggaatgatgtcaccttactcaccaagatggagttggtggagggcgagctcggacgattcgcgatgataaggggcgaggagccgacacaaacatacaaccggctcaagatccttatcaacaaaataaggagctacggaagcacgcgatggacggatcacgacgtcgtccgcctaatgctaaggtcatttaccgttcttgatcctcacttggtgaacaatattcgtgaaaatcctaggtacatcaagatgtcgcccgaagaaattcttggaaaatttgtaagcgggcgaatgatgatcaaggaggcgaggagcaaggaggcgctacctagcaaggtggcgaaaattgaggcggccggtcttaatgatgaagagatggccctcatcatcaaaagattcaagacggcactaaagggtcgcaagggacagccaagcaagactaagaccaagggaaagcgatcatgcttcaaatgcggtaagcttggtcattttattgctaactgtcccgacaatgatagtgaccaggaacacaggagcaagagggaaaagaagaagcattacaagaaggccaagggcgaggcacacatcggaaaggagtgggattcggactgctcctcctccgactccgacaatgaagggcttgccgccaccgccttcaacaaatcaaccctcttccccaacgagcgtcacacatgccttatggcaagggagaagaagatgagtactcgagacaccacttatgtctcttctagtgatgatgagtctagtgatgaggaaatagattactctaacttgttcaagggattggatagaaataagattgataaaatcaataaattgattgatgccttgaatgagaaggatagactcttagagaaacaagaggatttattgtatgaagaacatgataaatttatagaagcacaaaaatcctatgctttagaagttaaaagaaatgaaatgctttcttttgaactatctacttgtcatgaaaccatttctactttaaaaggtgtcaacaatgatttaaatgctaaattagaagtagcaaataaatccaattcttgtgtagaacatgttgtaatttgtactaggtgtaaagattttgatattgatgcttgtagtgaacacctagtttcaatttccaagcttaatggtgaattggctagtctcaatgctcaacttaagactagcaagaatgatttcgataaactaaaatttgcaagggatgcctacacaattggtagacacccctcaattaaggatggacttggcttcaagagagaagccaagaacttaacaagccataaggctcccattcccgccaaggagaaagggaaggcccctatggctagtaatgtgcaaaagaaccatgcgtttatataccatgacaggagacaatctagaaatgcttataggaattataatgcttatgatgattttgactctcatgccatgtttgcttccagttcttcctatatgcatggtagaaatatgtctaggagaaatgctattcatcatgtgcctagaaagaatattattcatgctcctaggaaagtagtgaatgaaccttctacaatatatcatgctttgaatgcttcctttgcaatttgtagaaaggatagaaaggtttatgcatccgggggttcaagctggattattgacagcggatgcacaaaccatatgacgagggagaagaagatgttcacctcctatgtcaagaataaggattcccaagattcaatcatattcggtgatgggaatcaaggcaaggataagtctgaaactcaagggaccctcaagcgcttcctcaggagagctcaaaatgagtttgagcttaaggtgaagaagataaggagcgacaacgggtccgagttcaagaaccttcaagtggaggagtttcttgaagaggaagggatcaagcacgagttctccgctccctacacaccacagcaaaatggtgtggtagagaggaagaacaggacgctcattgacatggcgaggacgatgctaggagagttcaagacccccgagtgcttttggacggaagccgtgaacacggcttgccacgccatcaacagggtctaccttcatcgcctcctcaagaagacgtcgtatgagctactaaccggtaacaaacccaatgtatcttattttcgtgtatttgggagcaagtgctacattctagtgaagaagggtagaaattctaagtttgctcccaaagcagtagaagggtttctattaggttatgactcaaatacaaaggcgtatagagtcttcaacaaatcatcgggtttggttgaagtctctagcgacgttgtatttgatgagactaatggctctccaagagagcaagttgttgatcttgatgatgtagatgaagaagatgttccaacggccgctatgcgcaccatggctattggtgatgtgcgaccacaggaacacttggagcaagatcaaccttcttcctcaacaatggtgcatcccccaactcaagacgatgaacaggttcatcaacaggaggcgtgtgatcaagggggagcacaagatgatcatgtgatggaggaagaagcgcaaccggcacctccaacccaagttcgagcgatgattcaaagggatcatcccgtcgaccaaattctgggtgacattagcaagggagtaactactcggtctcgattagttaatttttgtgagcattactcctttatctcttctattgagcctttcagggtagaagaggccttgctagatccggactgggtgttggccatgcaagaggagctcaacaacttcaagaggaatgaagtttggacactggtgcctcgtccgaagcaaaatgttgtgggaaccaagtgggtgttccgcaacaaacaggacgagcacggggtggtgacaaggaacaaggctcgacttgtggcaaaaggttatgcccaagtcgcaggtttggactttgaggagacttttgctccggtggctaggctagagtccattcgtatcttgctagcatatgccgctcaccattctttcaggttgttccaaatggatgtgaagagcgctttcctcaacgggccaataaaggaggaggtgtacgtggagcaaccccctggcttcgaggatgaacggtaccccgaccacgtgtgtaagctctctaaggcgctctatggacttaagcaagccccaagagcatggtatgaatgccttagagatttcttaattgctaatgctttcaaggttgggaaagtcgatccaactcttttcactaagacatgtgatggtgatctgtttgtgtgccaaatttatgtcgatgacataatatttggttctactaataaaaagtcttgtgaagagtttagcagggtaatgacgcagaaattcgagatgtcaatgatgggcgagttgaactacttccttgggttccaagtgaagcaactcaaggacggcaccttcatctctcaaacgaagtacacgcaagatctgctgaagcggtttgggatgaaggacgccaagcccgcaaagactccgatgggaaccgacggacacaccgacctcaacaaaggaggtaagtccgttgatcaaaaagcataccggtcaatgatagggtctttactttacttatgtgctagtagaccggatattatgcttagcgtatgcatgtgtgctagatttcaatccgatcctaaggagtgtcacttagtggcggtgaagcgaattcttagatatttagttgctacgccttgcttcgggctctggtatccaaaggggtctacctttgacttgattggatattcagactccgattatgctggatgtaaggtcgataggaagagtacatcggggacgtgccaattcttaggaaggtccctggtgtcatggaattctaagaaacaaacctctgttgccctatccaccgctgaggccgagtatgttgccgcaggacagtgttgcgcgcaactactttggatgaggcaaaccctcagggactttggctacaatctgagcaaagtcccactcctatgcgataatgagagtgctatccgcatggcggaaaatcctgttgaacacagccgcacaaagcacatagacatccggcatcactttttgagagaccaccagcaaaagggggatatcgaagtgtttcatgttagcaccgagaaccagctagccgatatctttaccaagcctctagatgagaagaccttttgcaggctgcgtaatgagctaaatgtcttagatttgcggaacttggattga

SEQ ID NO: 4815 - DNA, 4518 bp, Zea mays
  Clone ID: TF_ZM4577.C6.o12.fg
atggatcctaaggggaagggaatcgtgatcaacgataaagagaaggagtccttcgtcaacaagcctaaggatgacaagcctatcgactcaggcttgggccacaaacacaaagatggaaagaagaagaagacaagacgcatcaaggagatcgtctactacgacgacagtgatgagtccacttcttcccataaggacaacgacgacaacgactacgacaaacgaaagacggtcaactcaaacttttcttttgattattcgcgtattcctcaaagttcaaattcacatttgctctccattcctctcggcaagcctccacactttgatggggaggactacggattttggagccacaaaatgcgtagtcacctgttctctctccatccaagcatatgggagattgttgagaatggaatgaaatttgatagctcgaatagtcctatttttattaatgaacagattcatagaaatgcacaagctactactgtgttgttagcctccttgtgcagggacgagtaccataaggtgagcggcttggacaatgccaagcaaatctgggacaccctcaggatctctcatgaggggaatgacgtcaccttgctcaccaagatggagttggtagaaggcgagctcggaagatttgcgatgataaggggcgaggagccaacccaaacatacaaccggctcaagacccttatcaacaaaataaggagctacggaagcacgcgatggacggaccacgacgtcgtccgcctaatgctaaggtcctttaccgttctcgatccacatttggtgaataatattcgtgagaatcccaggtacaccaagatgtcgcccgaagaagtccttgggaagttcgtaagcgggcgaatgatgatcaaggaggcgagatacgtggacgatacgttgaacggtccaatccatgagcctcaatccattgctctcaaggcaacgaggagcaaggaggcattacctagcaaggtggcgcaagttgaggcagcagggctcaatgatgaagagatggccctcatcatcaagcacttcaagacgacgcttaagggtcgcaagggacagccaagcaagaccaagacaaaggggaagcgctcatgcttcaaatgtggtaagcttggtcattttattgctaactgtcccgataatgatagtgaccaggaaaaaggaaacaagagggagaagaagaagaattacaagaagaccaagggcgaggcacatatcggaaaggagtgggattcggattgctcctcctccgactctgacaatgaaggactcgccgccactgctttcaacaagtcatccctcttccccaacgagcatcacacatgcctcatggcgaaggagaagaaggtatgtactcgggataccacttatgcttcttcaaatgatgatgattctagtgatgacgatgagatagactattctagtttatttaaaggtttggatagaattaaaattggcaaaattaatgagttaattgatgccttgaatgacaagaataggttactagaaaagcaagaggatttgttgtatgaagagcatgataaatttgtcagtgcacaaaattcacttgctttagaagttaaacgaaatgatatgctttcttgtgaaatatctacttgccatgagacaatttctagcttaaagagcataaatgatgatttaaatgctaagttagaaaaatctagtaaattaacatcttgtgtagaacatgttgtgatttgcactaggtgtaaagattttaatgttgatgcttgtagtgaacacctagattgcatttttaaaataaatgatgaagtagctagtcttaatgctcaacttaagactagcaagagtgaatttgacaaactaaaatttgcaagggatgcctacacaattggtagacacccctcaattaaggatggtcttggcttcaagagggaagccaagaacttgacaagccataaggcccccatctccgccaaggagaaagggaaggcccctatggctagtagtgtgcaaaagaaccatgcttttatgtaccatgataggagacaatctagaaatacttataggagttgtaatgcatatgatgcttttgattctcatgccatgtttgcttctagttcttcctatgtgcatgatagaaatgttgatgtgtctgtctttagaagatgtgatggttcactagcttttaagggtgtactagacggcaaactttatttggttgattttgcaaaagaagaagccggtctagatgcatgcttaattgctaagacttgcatgggctggctgtggcatcgccgcttagcacatgtggggatgaagaacctccacaagcttctaaagggagaacacgtgataggtctaactaatgtacacttcgaaaaagatagaccttgtgcggcttgtcaagcagggaaacaggaggaagataaatctgaaacccaagggaccctcaagcgcttcctcaggagagctcaaaatgagtttgagctcaaggtgaagaagataaggagcgacaacgggtccgaattcaagaatcttcaagtggaggagttccttgaggaggaggggatcaagcacgagttctccgctccctacacacctcaacaaaatggtgtggtagagaggaagaacaggacgctcatcgatatggcgaggactatgcttagagagttcaagacccccgagcgtttttggttggaagccgtgaacacggcttgccacgccatcaacatggtctatcttcaccgcctcctcaagaagacttcatatgagctgctaactggtaacaaacccaatgtgtcttattttcgtgtatttgggagtaagtgttatattcttgtgaagaaaggtagaacctctaaatttgctcccaaagctgtagaagggtttttattaggttatgattcaaatacaaaggcgtatagggtcttcaacaaatcatcggggttggttgaagtctctagcgacgttgtatttgatgagactaatggctctccaagagagcaagttgttgatcttgatgatgtagatgaagaagacgttccaacggccgcaatgcgcaccatggcgattggagatgtgaggccactagaacaaaaggagcaagatcaaccttcttcctcaactatggtgcatcccccaacccaagatgacaaacaggtacctcaagtggaggcgcatgatcaagggggagcacaggatgttcaagttgaagaggaagaagcacctcaggcacctccaacccaagttcgagcgacgattcaaagggatcatcccatcgaccaaatattgggtgatattagcaagggagtaactactcgttctagattagtaaatttctgtgagcattactcttttgtctcttctattgagcctttcagggtagaagaggccttgctagatccggactgggtgttggccatgcaggaggagctaaacaacttcaagcgtaatgaagtttggacactggacgagcacggtggtgacgaggaacaaggctcgacttgtggcaaaaggttatgcccaagtcgcaggttgtaccaaatggatgtgaagagcgctttcctcaacgggccgatcaaggaggaggtgtacgtggagcaaccccctggcttcgaggatgaacggtaccccaaccacgtgtgtaagctctctaaggcgctctatggacttaagcaagccccaagagcatggtatgaatgccttagagactttttaattgctaatgctttcaaggttgggaaagccgatccaactcttttcactaagacttgcgatggtgatctttttgtgtgccaaatttatgttgatgacataatatttggttctactaaccaaaagtcttgtgaagagtttagcaggcaactcaaggacggcaccttcatctcccaaacgaagtacacgcaagacttgctaaagcggtttgggatgaaggacgccaagcccgcaaagacgtcgatgggaactgacggacacaccgacctcaacaaaggagtcgctacgccttgcttcgggatctggtacccaaaggggtctaactttgacttgattggatactcagattccgactatgctagatgtaaggtcgataggaagagtacatcggggatgtgccaattcttagtaaggtccctggtgtcgtggaactctaagaaacaaacttccgttgccctatccaccgctgaggtcgagtatgttgccgcaggacagtgttgcgcgcaactactttggatgaggcaaaccctccgggactttggctacaatctgagcaaagtctcactcctatgtgacaatgagagtcctatccgaatagcggaaaatcctgttgagcacagccgcacaaagcacattgacatccggcatcactttttgagagaccaccagcaaaagggagatatcgaagtgtttcatgttagcaccgagaaccagctagccgatatcttcactaagcctttagatgaaaagaccttttgcaggctgcgtagtgagctaaatatcctagattcgcggaacttggattga

SEQ ID NO: 4816 - DNA, 1926 bp, Zea mays
  Clone ID: TF_ZM4581.C2.o1.fg
atggatcctaaggggaaaggaattgtgatcaacgacaaggagaaggagtccttcgtcaacgagccaagggatgacaagtccaacaactcgggctcgggacacaagcgaaaagatgggaagaagaagaagacaagacgcatcaaggagatcgtctactacgacagcgatgagtcctcttcttcccaaaaggacgacgacaacgactacaggaagacggttaattcgaacttctcatttgattattctcgtattccacatagttcgaattcgcatttactttccattcctcttggtaaacctccacattttgatggggaagactacggattttggagtcacaaaatgcgtagtcatttattctctctccatccaagcatatgggagattgtagagaatggaatgaaatttgatagctcggatagccctatgtttatcaatgaacaaattcataaaaatgcacaagctactactgttctcttagcatctttgtgcagggaagagtacaataaggtgagcggcttggacaatgccaagcagatatgggacaccctcaagatctctcacgaggggaacgacatcaccatgctcaccaagatggagttggtggagggcgagcttggacgattcgccatgataaggggagaagagccaactcaaacttacaaccggctcaagacccttgtcaacaagataaggagctatggaagcacgcggtggacggaccacgacgtcgtccgcctaatgctaaggtccttcactgttcttgatcctcatttggtgaataatattcgtgagaatcccaggtacaccaaaatgtcgcccgaagaaattcttggaaaatttgtaagcgggcggatgatgatcaaggaggcaaggtacgtcgatgacgcgttgaacggtccaatccacgagcctcaacccattgctctcaaggcatcaaggagcaaggaggcactaccaagcaaggtggcgcaaattgaggcggccgggcttaatgatgaagaaatggctctcatcattaagcgcttcaagacggtgctaaagggtcgcaatggacagccgagcaagactaagaccaaggggaagcgatcatgcttcaaatgcggtaagctaggtcattttattgctaactgtcctgataatgaaagtgaccaggaaaaggggaacaaaagggagaagaagaagcactacaagaaggcaaagggcgaggcacatctaggcaaggagtgggactcggattgctcctcttccgactccgacaatgaaggactcgccgccaccgccttcaacaaatcaaccctcttccccaacgagcgccacacatgccttatggcaagggagaagaaggtatgtactcgcaattctacctatgcttcttcaagtgaggacgaatctagtgatgaggatgaagtagattattcatgtttgttcaagggcttagatagatctaagatagacaaaattaatgaattaattgatgccttgaatgaaaagaatatacttttagaaaagcaagaggatttgttgtatgaagagcatgataaatttgttgaggcacaaaaatcctatgctttagaagttaaaagaaatgaaatgctttcttttgaactatctacttgtcatgaaaccatttctactttgaaaggtgtcaacaatgatttaaatgctaaattagaagtagcaaataaatccaattcttgtgtagaacatgttgaaatttgtactaggtgtaaagattttgacattaatgcttgtagtgaacacctagtttcaatttccaagcttaatgatgaactggctagtcttaatgctcaacttaagactagcaagaatgatttcgataagctaaaatttgcaagggatgcctacacaattggtagacacccctcaattaaggagtggacttggcttcaagagagaagctaa

SEQ ID NO: 4817 - DNA, 4854 bp, Zea mays
  Clone ID: TF_ZM4588.C1.o9.fg
atggatcctaagggaaaggggatggtggtcaacaacaacgagaaggagtctatcttcaacgagtcgaaggatgacaagcctaccgactcgggctcaggccacaagcgcaaagacaggaagaagaagaagacgaggcgcatcaaggagatcgtcgactacgacagcgacgaatcttcctcttcccaaaaggatgacgacgactacgagaaaaagaaaacggtcaattcgaacttttcttttgattactctcgtattcctcaaagtacaaatgctcatttagtatctattccacttggtaaacctcctcattttgatggagaggactacggattttggagtcacaaaatgcgtagtcacttgttctctctccatcctagtatatgggagattgtagagagtggaatgcactttgatagtacggatagtcccatgtttattaatgagcaaattcataaaaatgcacaagctactactgttcttctagcttcattgtgcagggatgaataccacaaagtgagcggcttggataacgccaagcaaatttgggacaccctcaagatctctcatgaggggaatgatgtcacaatgctcaccaagatggagttggtggaaggcgaactcgggagattcgctacgataaggggagaagagccaactcaaacgtacaaccggctaaagacccttgtcaacaagataagaagctatggaagcacgcgatggacagaccacgacgtcgtccgcctaatgctaaggtattttactgtccttgatcctcatcttgtaaacaacattcgtgagaatcctaggtacaccaagatgacgcccgaggagatacttggaaaattcgtgagcgggcgaatgatgatcaaggaagcaagatacgtggacgacacattgaatggtccaatcaatgagcctcaacctcttgctctcaaggcaacaagaagcaaggatacgctacctagcaaggtggcacaaatagaggcggccggacttaatgatgaagagatggctctcatcatcaaaagattcaagacggcgctaaaaggtcgcaaggggcagccaagcaagaccaagacaaaggggaagcgctcatgcttcaaatgtggtaaacttggtcattttattgctaactgtcccgacaatgatagtgatcaggatcaagggaacaagagggagaagaagaagaattataagaaggcaaagggcgaggcacatcttggaaaggagtgggattcggattgctcctcttccgactccgacaatgaaggactcgccgccaccgccttcaacaagtcatccctcttccccaacgagcgtcacacatgccttatggcaagggagaagaaggtatgtactcgaaacactacttatgcttcttcaagtgaggacgaatctagtgatgaggatgaaatagattattcatgtttatttaagggcctagatagaaccaaggtagataaaattaatgaactgattgatgccttgaatgataagaataggcttttagaaaagcaagaggatatgttgtatgaagaacatgacaaatttgtagaagcacaaaaatctcatgctctagaagttaaaagaaatgaaatgctttcttgtgaattatcttcttgccatgagacaatttctaacttaaggagcattaatgatgatttgaatgctaagttagaaatagctagtaaatcaacatcttgtgtagaaaatgatgttatttgcaataggtgtaaagattttgacattgatgcttgtagtgaacacatagcctctattgcaaaattaaatgatgaaattgctagtcttaatgcccaacttaagactagcaaaagtaaatttgacaaattaaaatttgcaagggatgcctacacaattggtagacacccctcaattaaggatggtcttggcttcaagagggaagtcaagaacttaacaagccataaggcttccatctccacaaaggagaaagggaaggcccctatggcgagtaatgcaaaaaagaaccatgccttcatgtaccatgatagaaaattttctagaaatgttcatgatgataggagttgtaatgcttataatgcttttgactctcatgccatgtttgcttctagttcttcctatatgcatggtagaaatgtgtttagaagaaatgttgttcatcatatgcctaggagaaatgttggtagtactcctaggaaagttaatgaaccttctacaatttatcatgcctgtgatgcttcatttgcaatttgtagaaaggatagaaaggtttatgcatccgggggttcaagctggattatcgacagcggatgcacaaaccacatgacgggggagaagaagatgttcacctcctacgtcaagaacaaggacacccaagattcaataatattcggtgatgggaaccaaggcaagttgagtcccttggatataatttactatctaagaagtgatggttcactagcttttaagggtgtattagacggcaaactttacttagttgattttgcaaaagaggaggccggtctagatgcatgcttaatagctaagactagcatgggctggatgtggcatcgccgcttagcacatgtggggatgaagaaccttcacaagcttttaaagggagaacatgtgataggtttaactaacgtgcaattcgaaaaagatagaccttgtgcagcatgtcaagcaggtaaacaggtgggaggagcacatcacagcaagaatgtgatgaccacatcaaggcccctggagctgctacatatggacctcttcggacccgtcgcttatctaagcatagggggaagtaagtatggtttagttattgtggatgacttttcccgcttcacttgggtattctttttgcaggataagtctgagacccaaggaaccctcaagcgcttcctaaggagagctcaaaacgagtttgagctcaaggtgaagaagataaggagcgacaacgggtcagagttcaagaaccttcaagtggaggagttctttgaggaggaagggatcaagcacgagttctccactccctacacaccacagcaaaatggtgtggtagagaggaagaacaggacgctaatcgatatggcgaggatgatgcttgaagaattcaagacccccgagcgtttttggtcggaagctgtgaacacggcttgccacgccatcaacagggtctaccttcaccgcctcctcaagaagacgtcatatgagcttctaaccggtaacaaacccaatgtatcttactttcgtgtatttgggagcaaatgttacattctagtgaagaagggtagaaattctaagtttgctccaaaagctgtagaagggtttttgttaggttatgattcaaatacaaaggcgtatagggtcttcaacaaatcatcgggtttggttgaagtctctagcgacgttgtatttgatgagactaatggctctccaagagagcaagttgttgatcttgatgatgtagatgaagaagatgttccgacggccgctatacgaaccatggcgattggtgaagtacgaccacaggaacaaaaggagcaagatcaaccttcttcctcaactatggtgcatcccccaactcaagacgatgaacagattcatcaacaggaggcgtgtgatcaagggggagcacaagatgatcatgtgatggaggaagaagcgcaaccggcacctccaacccaagttcgagcgatgattcaaagggatcatcccgtcgagcaaattttgggtgatattagcaagggagtaactactcgatctcgattagttaatttttgtgagcattactcctttgtctcttctattgagcctttcagggtagaagaggccttgctagatccggactgggtgttggccatgcaagaggagctcaacaacttcaagaggaatgaagtttggacgctggtgcctcgtcctaagcaaaatgttgtgggaaccaagttgttccaaatggatgtgaagagcgctttcctcaacgggccaatcaaggaggaggtgtacgtggagcaaccccctggcttcgaggatgaacggtaccccgaccacgtgtgtaagctctctaaggcgctctatggacttaagcaagccccaagagcatggtatgaatgccttagagatttcttaattgctaatgccttcaaggttgggaaagccgatccaactcttttcactaagacttgtgacggtgatctgtttgtgtgccaaatttatgtcgatgacataatatttggttctactaataaaaagtcgtgtgaagagtttagcagggtgatgacgcagaaattcgagatgtcaatgatgggcgagttgaactacttccttgggttccaagtgaagcaactcaaggacggcaccttcatctctcaaacaaagtacacgcaagtcttgctgaagcggtttgggatgaaggatgccaagcccgcaaagactccgatggggaccgacggacacaccgatctcaacaaaggaggtaagtccgttgatcaaaaagcataccggtctatgatagggtcgttactttatttatgtgctagtagaccggatattgtgcttagcgtatgcatgtgtgctagatttcaatctgatcctaaggagtgtcacttagtggcagtgaagcgaatccttagatatttagttgctacgccttgcttcgggctctggtatccaaatgggtctacctttgatctaattggatattcagattccgactatgctggatgtaaggtcgataggaagagtacatcggggacgtgccaattcttaggaaggtccctggtgtcatggaattctaagaaacaaacctctgttgccctattcaccgctgaggccgagtacgttgccgcaggatag

SEQ ID NO: 4818 - DNA, 5157 bp, Zea mays
  Clone ID: TF_ZM4592.C3.o1.fg
atggatcctaagggaaaggggatggtggtcgacaacaacgagaaggagtctatcttcaacgagccgaagaatgacaagtctaccgactcgggctcaagccacaagcgcaaagatgggaagaagaagaagacaaggcgcatcaaggagatcgtctactacgacagcgacgaatcctcttcttcccaaagggacgacgacaacgactacaggaagacggtcaattcaaacttttcatttgattattctcgtattccgcatagttcgaattcgcatttgctttccattcctcttggcaaacctccacaccttgatggggaggactacggattttggagtcataaaatgcgtagtcatttattctctctccatccaagcatatgggagattgtagaaaatggaatgaaatttgatagctcggatagccctatgtttattaatgaacagattcataaaaatgcacaagctactactgtgttgctagcctctttgtgcagggacgagtacaataaggtgagcggcttggacaatgccaagcaaatatgggacaccctcaagatttctcacgaggggaacgacatcaccatgctcactaaaatggagttggtggagggcgaacttggaaggtttgcgatgataaggggcgaggagccaacccaaacatacaaccgtctcaagacccttatcaacaaaataaggagctatggaagcacgcgatggacggaccatgacgtcgtccgactattactaaggtcctttaccattcttgatcctcatttggtgaataacattcgtgagaatcccaggtacaccaaaatgtcgcccgaagaagtcctaggaaaattcgtcagcgggcgaatgatgattaaggaagcaaggtacgtggacgacgccttgaatggaccgatcaacgagccgcaacctcttgctctcaaagcaacaagaagcaaggaggcgctaccgagcaaggtggcacaaattgaagcggccggacttaatgatgaagagatggccctcatcatcaaaagattcaagacggcgcttaagggtcgcaagggacagccaagcaagaccgaagccaaggggaagcgctcatgcttcaaatgcggtaagcttggtcattttattgctaactgtcccgacaatgatagtgaccaggaccaagggaacaaaagggagaagaagaagcattacaagaaggccaagggcgaggcacatatcggaaaggagtgggattcggattgctcctcctccgactccgacaatgaaggacttgccgccaccgccttcaacaaatcaaccctcttccccaacgagcgtcacacatgccttatggcaagggagaagaaggtatgtactcgaaactctacctatgcttcttcaagtgaggacgaatctagcgatgaggatgaagtagattactcatgtctgtttaagggcctagatagaaccaaggtagacaaaattaatgaattaattgatgccttgaatgataagaatatgcttttagaaaagcaagaggattttttgtatgaagaacatgataaatttgtagaagctcaaagatctcatgctctagaagttaaaagaaatgaaatgctttcttgtgaattatcttcgtgccatgagacaatttctaaattaaggagcattaatgatgatttgaatgctaagttggagattgctagtaaatctacctcttgtgtagaaaatgttgtaacgtgcactaggtgtaaagatattaacattgatgcttatagtgaacacctagcttgcatttctaaattaaatgaagaggtagctagtcttaatgcccaacttgagactagcaaaagtgattttgataagctaaaatttgcaagggatgcctacacaattggtagacacccctcaattaaggatggacttggcttcaagagagaagccaagaacttaacaagccataaggctcccattcccgccaaggagaaagggaaggcccctatggctagtagtgtgcaaaagaaccatgcgtttatgtaccatgataagagacaaactagaaatgcttataggagttacaatacttatgatgattttgattctcatgacatgtttgcttctagttctttctatgtgcataatagaaatgttggtaggagaaatgctgttcacaatatgcctaggagaaatgttgttaatgttcctaggagagttaatgaaccttctacaatatatcatgccttgaatgcttcctttgctatttgtagaaaggataggaaaatagttgctaggaagttaggggcaagatgcaagggagacaaaacttgcatttgggtccctaaggatatttgcactaaccttgtaggacccaacatgagttgggtttatgcatccgggggttcaagctggattatcgacagcggatgcacaaaccatatgacgggggagaagaagatgttcacctcctacgtcaagaataaggattcccaagattcaatcatattcggtgatgggaatcaaggcaaggtaaaagggttagatgtgtctgtctttagaagaagtgatggttcactagcttttaagggtgtattagacggcaaactttatttagttgactttgcaaaagaagaagccggtctagatgcatgcttaatagctaagactagcatgggctggctgtggcatcgccgcttagcacatgtggggatgaagaaccttcacaagcttctaaagggagaacacgtgataggtttgactaacgtgcaatttgaaaaagatagaccttgtgcagcttgtcaagcaggtaaacaagtgggaggagcacatcacagcaagaatgtgatgaccacttcaagacctctggagctgctacatatggacctcttcggacctgtcgcctatctgagcataggaggaagtaagtatggtctagttattgttgatgacttttcccgcttcacttgggtgttctttttgcaggataagtctgaaacccaagggaccctcaagcgcttcctcaggagagctcaaaatgagtttgagctcaaggtgaagaagataaggagcgacaacgggtccgagttcaagaatcttcaagtggaggagttccttgaggaggaagggatcaagcacgagttctccgctccctacacaccacagcaaaatggtgtggtagagaggaagaacaggacgctaattgatatggcgaggacgatgctaggagaattcaagacccccgagtgcttttggtcggaagccgtgaacacggcttgccacgccatcaacagggtctaccttcaccgcctcctcaagaagacgtcgtatgagctactaaccggtaacaagcccaatgtatcttactttcgtgtatttgggagcaagtgctacattctagtgaagaagggtagaaattctaagtttgctcccaaagctgtagaggggtttttattaggttatgactcaaatacaaaggcgtatagggtcttcaacaaatcatcgggtttggttgaagtctctagcgacgttatgaagaagatgttccgacggccgctatttgaaccatggcgattggagaagttcggccacaggaacaagatgaacgagatcaaccttcttcttcaactatggtgcatcccccaactcaagacgatgaacagggtagaagaggccttgctagatccggactgggtgttggccatgcaagaggagctcaacaacttcaaaaggaatgaagtttggacgctggtgcctcgtcccaagcagaatgttgtgggaaccaagtgggtgttccgcaacaaacaagacgagcacggagtggtgacgaggaacaaggctcgacttgtggcaaaaggttatgcccaagtcgcaggtttggactttgaggagacgtttgctcctgtggctaggctagagtccattcgtatcttgctagcatatgccgctcaccattctttcaggttgttccaaatggatatgaagagcgctttcctcaacgggccaatcaaggaggaggtgtacgtggagcaaccccctggcttcgaggatgaacggtaccccgaccacgtgtgtaagctctctaaggcgctctatggacttaagcaagccccaagagcatggtatgaatgccttagagatttcttaattgctaatgctttcaaggttgggaaagccgatccaactcttttcactaagacatgtgatggtgatttgtttgtatgccaaatttatgtcgatgacataatatttggttctactaataaaaagtcttgtgaagagtttagcagggtgatgacgcagaaattcgagatgtcgatgatgggcgagttgaactacttccttgggttccaagtgaagcaactcaaggacggcaccttcatctctcaaacgaagtacacgcaagatctgctgaagcggtttgggatgaaggacgccaagcccgcaaagactccgatgggaaccgacggacacaccgacctcaacaaaggaggtaagtccgttgatcaaaaagcataccggtcaatgatagggtcattactttacttatgtgctagtagaccagatattatgcttagcgtatgcatgtgtgctagatttcaatccgatcctaaggagtgtcacttagtggcggtgaagcgaatccttagatatttagttgctacgccttgcttcgggctctggtatccaaaggggtctacctttgacttgattggatattcagactccgactatgctggttgtaaggtcgataggaagagtacatcggggacgtgccaattcttaggaaggtccctggtgtcatggaactctaagaaacaaacttccgttgccctatccaccgctgaggccgagtatgttgccgcaggacagtgttgcgcgcaactactttggatgaggcaaaccctcagggactttggctacaatatgagcaaagtcccactcctatgtgataatgagagtgctatccgcatggcggaaaatcctgttgagcacagccgcacaaagcacatagacatccggcatcactttttgagagaccaccagcaaaagggagatatcgaagtgtttcatgttagcaccgagaaccagctagccgatatctttaccaagcctctagatgagaagaccttttgcaggctgcgtagtgagctaaatgtcttagattcgcggaacttggattga

SEQ ID NO: 4819 - DNA, 1762 bp, Zea mays
  Clone ID: TF_ZM4596.C2.o12.fg
atggatcctaaaggcaaggggatggtgatcaacgacaaggagaaggagtccttcgtcaacgagccaaatgatgacaagcccaccgactcaggctcgggccacaaaagaaaagacgggaggaagaagaagacaaggcgcatcaaggaaattgtctactacgacagcgacgaatcttcctcctcccaaaaggacaacgacgactacgatagacgaaagacggttaactcaaacttttctttcgattattcgcgcatcccgcatagttcaaatgctcaattgctccccattccacttggcaagccccctcactttgatggagaggattacggattttggagccacaaaatgcgtactcacctgttttctctccatccaagcatttgggagattgtggaaagtggaatgaaatttgatagctcagatagccctgtgtttattaatgaacagattcataaaaatgcacaagctactactgtgttgctagcttccttgtgcagggacgagtatcacaaggtgagcggcttggacaatgccaagcagatctgggacaccctcaagatctctcatgagggaaacgacgtcaccttgctcaccaaaatggagttggtggagggcgagcttggacggttcgcgatgataaggggcgaggagccgacacaaacatacaaccggctcaagacccttatcaacaaaataaggagctacgggagcacgcgatggacggaccacgacgtcgtccgcctaatgctaaggtcatttaccgttcttgatcctcatttggtgaacaatattcgtgaaaatcccaggtacaccaagatgtcgcccgaagaagttcttgggaaattcgttagcgggcgaatgatgatcaaggaggcgaggtacgtggacgacgccttgaatggtccgatcaacgagccgcaaccccttgctctcaaggcaacacgaagcaaggaggcgctacctagcaaggtggcacagtttgaggcggccggacttaatgatgaagagatggctctcatcatcaaaagattcaagacggtgcttaaaggtcgcaagggacaaccaagcaagaccaaagccaaggggaagcgctcatgcttcaaatgcggtaagcttggtcattttattgctaactgtcccgacaatgatagtgatcaggatcaagggaacaagagggagaaaaagaagaactataagaaggcaaagggcgaggctcatcttggcaaggagtgggattcggactgctcttcgtccgactccgacaatgaaggactcgccgccaccgccttcaacaagtcatccctcttccccaacgagcgtcacacttgcctcatggcaagggagaagaaagtaagcactcataacactagtacttatgcttcttcgagtgaggatgagtctagtgatgatgatgagatagattactcatgcttattcaagggattagatagaaccaaggtagacaaaattaatgaattaattgatgccttgaatgataggaatatactcttagaaaagcaagaggatttgttgtatgaagagcatgataaatttgtagaagctcagaaatctcttgctctagaaattaaaaggaatgaaatgctctccagtgaattatcttcttgtcatgaaactattgctaagttaaaaggttttaatgatgatttaaatgctaaactagaagtagcctgtaaatctaattcttgtgtagagattgttgaaacttgcaataggtgtaaagattttgacattgatgcttgta

SEQ ID NO: 4820 - DNA, 1332 bp, Zea mays
  Clone ID: TF_ZM4611.C3.o9.fg
atggatcccaagggcaaggggatcgtgatcaacgacaaggagaaggagtccttcgtcaacgagccgaaggatgacaagactactgactcgggctcaggccacaagcgcaaagacgggaagaaaaagaagacaaggcgcatcaaggagatcgtctactacgacgatagcgatgagtctacctcttcccaaaaggacgacgacaacgactacaggaagacggcaacaaggagcaaggaggcgctaccaagcaaggtggcgcaagttgaggcggccgggctaaataatgaggagatggccctcatcattaagcgcttcaagacggcgcttaaaggtcgcaagggacagccaagcaagaccaagacaaaggagaagcgctcatgcttcaaatgcggtaagcttggtcattttattgctaactgtcccgataatgaaagtgaccaggaacaagggagcaagagggagaagaagaaggcatacaagaaggcaaagggcgaggcacatctaggcaaggagtgggattcggattgctcctcctccgactccgacaatgaaggactcgccgccactgccttcaacaagtcatccctcttccccaacgagcatcacacatgccttatggcaagggagaagaaggtttatgcatccgggggttcaagctggattatcgacagcggatgcacaaaccatatgacgggggagaagaagatgttcacctcctacgtcaagaataaggattcccaagattcaataattttcggtgatgggaatcaaggcaaggataagtctgaaacccaagggaccctcaagcgcttcctcaggagagctcaaaatgagtttgagctcaaggtgaagaagataaggagcgacaacgggtccgagttcaagaaccttcaagtagaggagttccttgaggaggaagggatcaagcatgagttctccgctccctacacaccacagcaaaatggtgtggtagagaggaagaacaggacgctaatcgacatggcgaggactatgcttggagagttcaagacccccgagcgtttttggtcggaagccgtgaacacggcttgccacgccatcaacagggtctaccttcaccgcctcctcaagaagacgtcatatgagcttctaaccggtaacaaacccaatatgaagaagatgttccgacggcagccatacgaaccatggcgattggggaagtacggccacaggaacaagatgaacgagatcaaccatcttcctcaactacggtgctacccccaactcaagacgatgaacaggttcatcaacaggaggcggatgatcaaggggaagcacaagatgatcatgtga

SEQ ID NO: 4821 - DNA, 1575 bp, Zea mays
  Clone ID: TF_ZM4621.C2.o3.fg
atggatcctaagagaaaggggatggtggtcaacaacgagaaggagtctatcttcaatgagccgaaggatgacaagcctaccgactcgggctcaggccacaagcgcaaagacgggaagaagaagaagacaaggcgcatcaaggagatcgtctactacgacagcgacgaatcttcctcttcccaaaaggacgacgatgactacgagaaaaagaaaacggtcaattcgaacttttcttttgattactctcgtattcctcaaagtacaaatgctcatttattatctattccacttggtaaacctcctcactttgatggagaggactacggattttggagtcacaaaatgcgtagtcacttgttctctctccatcctagtatatgggagattgtagagagtggaatgcactttgatagtacggatagtcccatgttcattaatgagcaaattcataaaaatgcacaagctactactgttcttctagcttcattgtgcagggatgaataccacaaagtgagcggcttggataacgccaagcaaatctgggacaccctcaagatctctcatgaggggaatgacgtcacaatgctcaccaagatggagttggtggagggcgaactcgggagattcgctatgataaggggagaagagccaacccaaacgtataaccggctcaagacccttgtcaacaagataagaagctatggaagcacgcgatggacggaccacgacgtcgtccacctaatgctaaggtcttttactgtccttgatcctcatcttgtaaacaatattcgtgagaatcctaggtacaccaagatgacgcccgaggagatacttggaaagttcgtgagcgggcgaatgatgatcaaggaagcaagatacgtggacgacgcattgaatggtccaatcaatgagcctcaacctcttgctctcaaggcaacaagaagcaaggagacgctacctagcaaggtggcacaaattgaggcggccagacttaatgatgaagagatggctctcatcatcaagagattcaagacggtgctaaaaggttgcaaggggcagccaagcaagaccaagacaaaggggaagcgctcatgcttcaaatgtggtaagcttggtcattttattgctaactgtcccgataatgatagtgatcaggatcaagggaacaagagggagaagaagaagaactataagaaggcaaagggcgaggcgcatctaggcaaggagtgggattcggactgctcctcttccgactccgacaatgaaggactcgccgccaccgccttcaacaagtcatccctcttccccaacgagcgtcacacatgccttatggcaagggagaagaaggtatgtactcaaaactctacttatgcttcttcaagtgaggacaaaacgagtgatgaggatgaaatagattattcatgtttatttaagggcctagataaaaccaaggtagataaaattaatgaattgattgatgccttgaatgataagaataggcttttagaaaagcaagaggatttgttgtatgaagaacatgacaaatttgtagaagcacaaaatatcatgctctag

SEQ ID NO: 4822 - DNA, 2013 bp, Zea mays
  Clone ID: TF_ZM4626.C4.o4.fg
atggatcctaaggggaagggaattgtgatcaacgacaaggagaaggagtccttcgtcaacgagccaagggatgacaagtccaatgactcgggctcgggccacaagcgaaaagatgggaagaagaagaagacaagacgcatcaaggagatcgtctactacgacagcgatgagtcctcttcttcccaaaaggacgacgaccacgactataaaaagacgatatgggacaccctcaagatctctcacgaggggaacgacatcaccatgctcaccaagatggagttggtggagggcgagcttggacgattcgccatgataaggggagaggagccaactcaaacctacaaccggctcaagacccttatcaacaaaataaggagctacggaagcacgcgttggacggatcacgacgtcgtccgcctaatgctcaggtcctttaccgttcttgatcctcatctcgtgaacaatattcgtgagaatcccaggtacacgatgatgacgcccgaggaagtgcttggaaaattcgtgagcgggcggatgatgatcaaggaggcaagatacgttgacgacgcattgaacggtccactccacgagcctcaacccattgctctaaaggcaacgaggagcaaggagtcgcttcctagcaaggtggcgcaaattgaggcggccggtcttaatgaagaagaaatggccctcattatcaagagattcaagacggtgctaaagggtcgcaatggacagccgagcaagactaagaccaaggggaagcgatcatgcttcaaatgcggtaagcttggtcattttattgctaactgtcccgataatgatagtgaccaggaaaagggaaacaagagggaaaagaagaagcattacaagaaggcaaagggcgaggcgcatctaggcaaggagtgggactcggattgctcctcgtccgactccgacaatgaaggactcgccgccaccgccttcaacaaatcggctctcttccccaacgagcatcacacttgcctcatggcaagggaaaagaaggtttatgcatccgggggttcaagctggattatcgacaacggatgcacaaaccatatgacgggggagaagaaaatgttcacctcctacgtcaagaataaagattcccaagattcaatcatattcggtgatgggaatcaaggcaaggaaaagtccgaaacccaagggactctcaaacgcttcctcaggagagctcaaaatgagtttgagctcaaagtgaagaagataaggagcgacaacggatccgagttcaagaaccttcaagtggaggagttccttgaagaagaggggatcaagcacgagttctccgctccctacacaccacaacaaaatggtgtggtagagaggaagaacaggacgctcatcgatatggcaaggacgatgctaggagagttcaagacccccgaatgcttttggacggaagccgttaacactgcttgccacgccatcaacagggtctaccttcatcgcctcctcaagaagacgtcgtatgagctactaaccggtaacaaacccaatatgaagaagatgttccgacggccgctatacgaaccatggcgattggtgatgtgcgaccacaggaacaagaagagcaagatcaaccttcttcctcaactatggtgcatcccccaaccgaagatgacgaacaggttgttccaaatggatgtgaagagcgctttcctcaacgggccaatcaaggaggaggtgtacgtggagcaaccccctggcttcgaggatgaacggtaccccgaccattcttgtgaagagtttagcagggtgatgacgcagaaattcgagatgtcgatgatgggcgagttgaactacttccttgggttccaagtgaagcaactcaaggacggcaccttcatctcccaaacgaagtacacgcaagatctgctaaagcagtttgggatgaaggacgccaagcccgcaaagactccgatggggaccgacggacacaccgacctcaacaaaggagattttttgtga

SEQ ID NO: 4823 - DNA, 4542 bp, Zea mays
  Clone ID: TF_ZM4635.C5.o3.fg
atggatcctaaggggaagggtatagtgatcaacgacaaagaaaaggaatcctttgtcaacgagccgaaggacgataagcctaccgactccggctcgggccaaagacggaaggaagggaagaagaagaagaccaggcgcatcaaggagatcgtctactacgacagcgacgagtctacttcttcccaaaaggacgaggaccacaacgactacgagaaaagaaaaccggttaattctaacttttcttttgactactctcgtattccgcaaagttcacattctcatttgctctccattccactcggcaagcccccacactttgatggagaggactacggattttggagccacaaaatgcgtagtcacctattctctctccatccaagcatatgggagattgtagagaatggaatgaactttgatagctcagatagccctatgtttatcaatgaacaaattcataaaaatgcacaagctactactgttctcttagcatctttgtgcagggaagaatacaataaggtgagcggcttggacaatgccaagcagatatgggacaccctcaagatctctcacgaggggaacgacatcaccatgctcaccaagatggagttggtggagggcgagcttggacggttcgcgatgataaggggcgaggagccaactcagacatacaaccggctcaagacccttatcaacaaaataaggagctacggaagcacgcgatggacggaccacgacgtcgtccgactaatgctcaggtcctttaccgttcttgatcctcatttggtgaataatattcgtgagaatcccaggtacaccaaaatgtcgcccgaagaagtcctaggaaaattcgtcagcgggcgaatgatgatcaaggaggcaaggtatgtggacgacgccttgaatggaccgatcaacgagccgcaaccttttgctctcaaagccacagggaacaaggaggcgctacccagcaaggtggcgcaaattgaggcggccggtcttaatgaagaagaaatggccctcattatcaagagattcaagacggtgctaaagggtcgcaatggacagccgagcaagactaagaccaaggggaagcgatcatgcttcaaatgcggtaagcttggtcattttattgctaactgtcctgataatgatagtgaccaggaaaaggggaacaagagggaaaagaagaagcattacaagaaggcaaagggcgaggcgcatctaggcaaggagtgggactcggactgctcctcgtccgactccgacaatgaaggactcgccgccaccgccttcaacaaatcaaccctcttccccaacgagcgtcacacatgccttatggcaagagagaagaaggtatgtactcgcaactctacctatgcttcttcaagtgaggacgaatctagtgatgaggatgaagtagattattcatgtttgttcaagggcttagatagatctaagatagacaaaattaatgaattaattgatgccttgaatgaaaagaatatacttttagaaaagcaagaggatttgttgtatgaagagcatgataaatttgttgaggcacaaaaatcctatgctttagaagttaagagaaatgaaatgctttcttttgaactatctacttgtcatgaaaccatttctactttgaaaggtgtcaacaatgatttaaatgctaaattagaagtagcaaacaaatccaattcttgtgtagaacatgttgaaatttgtactaggtgtaaagactttgacattaatgcttgtagtgaacacctagtttcaatttccaagcttaatgatgaactggctagtcttaatgctcaacttaagactagcaagaatgatttcgataagctaaaatttgcaagggatgcctacacaattggtagacacccctcaattaaggatggacttggcttcaagagagaagctaagaacttaacaagccataaggcttccattcccgccaaggagaaagggaaggcccctatggctactagtgctaaaaggaaccatgcatttttgtatcatgatagaaaacaaactagaaatgtttatgcatccgggggttcaagctggattattgatagcggatgcacaaaccatatgacgggggagaagaagatgttcacctcctacgtcaagaataaggattcccaagattcaatcatattcggtgatgggaatcaaggcaaggtaaaagggctagatgtgtctgtctttagaagaagtgatggttcactagcttttaagggtgtattagacggcaaactttatttagttgattttgcaaaagaagaggccggtctagatgcatgcttaatggctaagacttgcatgggctggctgtggcatcgccgcttagcacatgtggggatgaagaacctccacaagcttctaaagggagaacatgtgataggtctaaccaatgttcatttcgaaaaagatagaccttgtgcagcttgtcaagcagggaaacaggtgggaggagcgcatcacagcaagaatgtgatgaccacttcaagacccctggagctgctgcatatggatctcttcggacccgtcgcctatctaagcatagggggaagtaagtatggtctagttattgttgatgacttttcccgcttcacttgggtgttctttttgcaggataagtctgaaacccaagggaccctcaagcgcttcctcaggagggctcaaaatgagtttgagctcaaagtgaaaaagataaggagcgacaacgggtccgagttcaagaaccttcaagtggaggagttccttgaagaagaagggatcaagcacgagttctccgctccctacacaccacagcaaaatggtgtggtagagaggaagaacaggacgctcatcgacatggcgaggacgatgctaggagagttcaagacccccgagtgcttttggacggaagccgtgaacacggcttgccacgccatcaacagggtctaccttcatcgcctcctcaagaagacgtcatatgagctactaaccgatgaagaagatgttccgacggccgctatacgaaccatggcgattggtgatgtgcgaccacaggaacaagaagagcaagatcaaccttcttcctcaactatggtgaatcccccaactcaagacgatgaacatgttcatcaacaggaggcgtgtgatcaagggggagcacaagatgatcatgtgatggaggaagaagcgcaaccggcacctccaacccaagttcgagcgatgattcaaagggatcatcccgtcgaccaaattctgggtgacattagcaagggagtaactactcgatctcgattagttaatttttgtgagcattactcctttgtctcttctattgagcctttcagggtagaagaggccttgctagatccggactgggtgttggccatgcaagaggagctaaacaacttcaagcgcaatgaagtttggacactggtgcctcgtccgaagcaaaacgtcgtgggaaccaagtgggtgttccgcaacaaacaggacgagcacggggtggtgacaaggaacaaagctcgacttgtggcaaaaggttatgcccaagtcgcaggtttggactttgaggagacttttgctcctgtggctaggctagaatcaattcgtatcttgctagcatatgctgctcaccattctttcaggttgttccaaatggatgtgaagagcgctttcctcaacgggccaatcaaggaggaggtgtacgtagagcaaccccctggcttcgaggatgaacggtaccccgaccatgtgtgtaagctctctaaggcgctctatggacttaagcaagccccaagagcatggtatgaatgccttagagactttttaattgctaatgctttcaaggttgggaaagccgatccaactctttttacaaagacatgtgatggtgatttgtttgtgtgccaaatttatgtcgatgacataatatttggttctactaaccaaaagtcttgtgaagagtttagcagggtgatgacgcagaaattcgagatgtcgatgatgggcgagttgaactacttccttgggttccaagggtctacctttgacttagttggatactcagactccgactatgctggatgtaaggtcgataggaagagtacatcggggacgtgccaattcttaggaaggtccctggtgtcatggaactctaagaaacaaacttccgttgccctatccaccgctgaggccgagtatgttgccgcaggacagtgttgcgcgcaactactttggatgaggcaaaccctcagggactttggctacaatctgagcaaagtcccactcctatgtgacaatgagagtgctatccgcatggcggagaatcctgttgagcacagccgcacaaagcacatagacatccggcatcactttttgagagaccaccagcaaaagggagatatcgaagtgtttcatgttagcaccgagaaccagctagccgatatcttcactaagcctctagatgagaagaccttttgcaggttgcgtagtgagctaaatgtcttagattcgcggaacctggattga

SEQ ID NO: 4824 - DNA, 4647 bp, Zea mays
  Clone ID: TF_ZM4646.C9.o8.fg
atggatcctaaagggaagggaatcgtgatcaacgacaaggagaaggaatccttcgtcaacgagccaagggatgacaagtccaacgactcgggctcgggccacagacgcaaagatgggaagaagaagaagacaagacacatcaaggagatcgtctactacgacagcgatgagtctacttcctcccaaaaggacgacgaccacaacgaatatgagagaaagaaaccggtcaattcgaacttttcttttgattactctcgtattcctcaaagtactaatgctcatttattatctattccaattggtaaacctcctcattttgatggagaggactacggattttggagtcacaaaatgcgtagtcacttgttctctctccatcctagcatatgggagattgtagaaagtggaatgcactttgatagtacggatagtcccatgtttattaatgaacagattcataaaaatgcacaagctactactgtgttgctagcctctttgtgcagggacgagtaccataaggtgagcggcttggacaatgccaagcagatctgggacaccctcaagatctctcatgagggaaacgatgtcaccttgctcaccaaaatggagttggtggaaggcgaacttggacggttcgcgatgataaggggggaggagccgacgcaaacatacaaccggctcaagacccttatcaacaaaataaggagctacgggagcacgcgatggacggaccacgacgtcgtccgcctaatgctaaggtcatttaccgttcttgatcctcatttggtgaacaatatacgtgaaaatcccaggtacaccaagatgtcgcccgaagaagttcttgggaaattcgttagtgggcgaatgatgatcaaggaggcaaggtacgtggacgacgccttgaatggtccgatcaacgagccgcaaccccttgctctcaaggcaacacgaagcaaggaggctctacctagcaaggtggcacagattgaggcggccggacttaatgatgaagagatggctctcatcatcaaaagattcaagacggtgcttaaaggtcgcaagggacagccaagcaagactaaagccaaggggaagcgctcatgcttcaaatgcggtaagcttggtcattttattgctaactgtcccgacaatgatagtgatcaggatcaagggaacaagagggagaaaaagaagaactataagaaggcaaagggcgaggctcatcttggcaaggagtgggattcggactactcttcgtctgactccgacaatgaaggactcgccgccactgccttcaacaagtcatccctcttccccaacgagcgacacacttgcctcatggcaagggagaagaaagtaagcactcataatactagtacttatgcttcttcaagtgaggatgagtccagtgatgatgatgagatagattactcatgcttattcaagggattagatagaaccaaggtagacaaaattaatgaattgattgatgccttgaatgataggaatatacttttagaaaagcaagaggatttgttgtatgaagaacatgataaatttgtagaagctcagaaatctcttgctctagaaattaagagaaatgaaatgctctctagtgaactatcttcttgtcatgaaactattgctaagttaaagagttttaatgatgatttaaatgctagactagaagtagctagtaaatctaattcttgtgtagaaattgttgaaacttgcaataggtgtaaagattttgacattgatgcttgtagtgaacacctagtttcaatttccaaacttaatgatgaattggctagtcttaatgctcaacttaagactagcaagagtaattttgataagctaaaatttgcaagggatgcctacacaattggtagacacccctcaattaaggatggacttggcttcaagagagaagccaagaacttaacaagccataaggctcccattcccgccaaggagaaagggaaggcccctatggctagtagtgtgcaaaagaaccatgcgtttatgtatcatgataagagacaaactagaaatactaatagaagttacaatgcttatgatgattttgattctcatgacatatttgcttctagttctttctatgtgcatgatagaaatgttggtaggaaaaatactgttcacaatatgcctaggagaaatgttgttaatgttcctaggagaattaatgaaccttctacaatatatcatgctttgaatacttcctttgctatttgtagaaaggataggaaaatagttgctaggaagttaggggcaaaatgcaagggagacaaaacttgcatttgggtccctaaggagatttgcactaaccttgtaggacccaacataagttgggtttatgcatccgggggttcaagctggattgtcgacagcggatgcacaaaccatatgacgggggagaagaagatgttcacctcctacgtcaagaataaggattcccaagattcaattatattcggtgatgggaatcaaggcaaggataagtctgaaacccaagggaccctcaagcgcttcctcaggagagctcaaaatgagtttgagctcaaggtgaagaagataaggagcgataacgggtccgagttcaagaactttcaagtggaagagttccttgaggaggaagggatcaagcatgagttctccgctccctacacaccacagcaaaatggtgtggtagagaggaagaacaggacgctaatcgacatggcgaggacgatgcttggagaattcaagacccccgagcgtttttggtcgaaagccgtgaacacggcttgccacgccatcaacagggtctaccttcatcgcctcctcaagaagacttcgtatgagctactaaccagtaacaaacccaatgtatcttactttcgtgtatttgggagcaagtgctacattctagtgaagaagggtagaaattctaaatttgctcccaaagctgtagaagggtttttgttaggttatgattcaaatacaaaggcgtatagagtcttcaacaaatcatcgggtttggttgaagtctctagcgacattgtatttgatgagactaatggctctccaagagagcaagttgttgattgtgatgatcctttcagggtagaggaggccttgctagatccagattgggtattggccatgcaggaggaactcaacaacttcaagcgcaatgaagtttggacactggtgcctcgtcccaagcaaaatgttgtgggaaccaagtgggtgttccgcaacaaacaggacgagcacggggtggtgacgaggaacaaggctcgacttgtggcaaaaggttatgcccaagtcgcaggtttggactttgaggagacgtttgctcctgtggctaggctagaatcaattcgtatcttgctagcatatgccgctcaccattctttcaggttgtaccaaatggatgtgaagagcgctttcctcaatgggccaatcaaggaggaggtgtatgtggagcaaccccctggcttcgaggatgaacggtaccccgaccacgtgtgtaagctctctaaggcgctctatggacttaagcaagccccaagagcatggtatgaatgccttagagatttcttaattgctaatgctttcaaggttgggaaagccgatccaactctttttacaaagacatgtgatggtgatttgtttgtgtgccaaatttatgtcgatgacataatatttggttctactaaccaaaagtcttgtgaagagtttagcagggtgatgacgcagaaattcgagatgtcgatgatgggcgagttgaactacttccttgggttccaagtgaagcaactcaaggacggcaccttcatctcccaaacaaagtacacgcaagacttgctgaagcggtttgggatgaaggacgccaagcccgcaaagactccgatggggaccgacggaaacaccgacctcaacaaaggaggtaagtccgttgatcaaaaagcataccggtcaatgataggttctttgctttatttatgtgctagcagaccggatattatgcttagcgtatgcatgtgtgctagatttcaatccgaccctaaggagtgtcacttagtggcggtgaagcgaattcttagatatttggttgctacgccttgcttcgggctctggtatccaaaggggtctacttttgacttggttggatactcagactccgactatgctggatgtaaggtcgataggaagagtacatcggggacgtgccaattcttaggaaggtccctggtgtcatggaactctaagaaacaaacttccgttgccctatccaccgctgaggccgagtatgttgccgcaggacagtgttgcgcgcaactactttggatgaggcaaaccctccgggactttggctacaatctgagcaaagtcccactcctatgtgataatgagagtgctatccgcatggcggaaaatcctgttgaacacagccgcacaaagcacattgacatccgacaccactttttgagagaccaccagcaaaagggagatatcgaagtgtttcatgttagcaccgagaaccagctagccgatatctttaccaagcctctagatgagaagaccttttgcaggttgcgtagtgagctaaatgtcttagattcgcggaacatggattga

SEQ ID NO: 4825 - DNA, 4989 bp, Zea mays
  Clone ID: TF_ZM4683.C5.o10.fg
atggatcctaaggggaagggaatcgtgatcaacgataaggagaaggagtccttcgtcaacgagcccaaagatgacaagcataccgactcaggctcgggccatagacggaaggaagggaagaagaagaagacaaggcgcatcaaggaaatcgtctactacgacgacagcgacgaatcttcctcttcccaaaaggacaacgacgacaacgactatgacaaacaaaagacggttaactcaaacttttcttttgattattcgcgcattccgcatagctcaaatgctcatttgctccccattccacttggcaagcctcctcactttgatggagaggactacggattttggagtcacaaaatgcgtactcacctattttctctccatccaagcatttgggagattgtggaaagtggaatgaaatttgatagctcggatagcccttcatttattaatgaacagatccataaaaatgcacaagctactactgtgttgctagcctctttgtgcagggacgagtatcacaaggtgagcggcttggacaatgccaagcagatttgggacaccctcaagatctctcatgaggggaatgatgtcaccttactcaccaagatggagttggtggagggcgagctcggacgattcgcgatgataaggggcgaggagccgacacaaacatacaaccggctcaagatccttatcaacaaaataaggagctacggaagcacgcggtggacggatcacgacgtcgtccgcctaatgctaaggtcatttaccgttcttgatcctcacttggtgaacaatattcgtgaaaatcctaggtacatcaagatgtcgcccgaagaaattcttggaaaatttgtaagcgggcgaatgatgatcaaggaggcgaggtacgtggacgacgcattgaatggcccaatccatgagcctcaacccattgctcttaaggcaacgaggagcaaggaggcgctacccagcaaagtggcgcaaattgaggcggctggtcttaatgatgaagagatggccctcatcatcaaaagattcaagacggcgcttaaaggtcgcaagggacagccaagcaagaccaaagccaaggggaagcgctcatgcttcaaatgtggtaagcttggtcattttattgctaactgtcccgacaatgatagtgatcaggaccaagtgaacaagagggaaaagaagaagcactacaagaaggcaaagggcgaggcacatctaggcaaggaatgggactcggattgctcctcttccgactccgacaatgaaggactcgccgccaccgccttcaacaaatcaaccctcttccccaacgagcgtcacacatgccttatggcaagggagaagaaggtatgtactcggaactctacctatgcttcttcaagtgaggacgaatctagtgatgaagatgaagtagattactcatgtttgtttaagggtctagatagaaccaaggtagacaaaattaatgaattgattgatgctctaaatgagaagaacatgcttttagagaaacaagaggatttattgtatgaagaacatgataaatttatagaagctcaaaaatcctatgctttagaagttaaaagaaatgaaatgctttcttttgaactatctacttgtcatgaaaccatctctactttaaaaggtgtcaacaatgatttaaatgctaaattagaagtagcaaataaatccaattcttgtgtagaacatgtcgcaatttgttctaggtgtaaagattttgatattaatgcttgtagtgaacacttagtttctatttcaaaattaaatgatgaattagctagtcttaatgcacaacttaagactagcaagagtgattttgataaactgaaatttgctagggatgcctacactgttggtagacacccctccattaaggatggacttggcttcaaaagggaagccaagaacttaacaagccataaggctcccattcccgcaaaggagaaagggaaggcccctatggctactagcactaaaaagaaccatgcttttttatatcatgatagaagacaatctagaagtgcttataggggttataatgcttttgattctcatcatatgattgcttctagctcttcttatatgcatggtagaaatatgtctaggagaaatgctattcatcatgtgcctagaaagaatgttagtcatgctcctaggaaagtagtaaatgaattttctacagtatatcatgctttgaatgcttcctttgcaatttgtagaaaggatagaaaagtaattgctaggaagttaggggctaaatgcaagggtgataaaacttgcatttgggtccctaagaagatttgtgctaaccttgtaggacccaacatgagttgggtttatgcatccgggggttcaagctggattatagacagcggatgcacaaaccatatgacgggggagaagaagatgttcacctcctacgtcaagagtaaggattcccaagattcaattatattcggtgatgggaatcaaggcaaggataagtctgaaacccaagggaccctcaagcgcttcctcaggagagctcaaaatgagtttgagctcaaggtgaagaagataaggagcgacaacgggtccgaattcaagaaccttcaagtggaggagttccttgaagaggaagggatcaagcacgagttctccgctccctacacaccacagcaaaatggtgtggttgagaggaagaacaggacgctaatcgacatggcgaggacgatgcttggagaatttaagacccccgagcggttttggtcggaagtcgtgaacacggcttgccacgccatcaacagggtctaccttcaccgactcctcaagaagacgtcgtatgaactactaaccggtaacaaacccaatgtatcttactttcgtgtatttgggagcaagtgctacattctagtgaagaagggtagaaattctaaatttgctcccaaagctgtagaaggttttttgttaggttatgactcaaatacaaaggcgtatagagtcttcaacaaatcattgggtttggttgaagtctctagcgacgttgtatttgatgagactaatggctctccaagagagcaagttgttgatcttgatgaagtagatgaagaagatgttccaacggccgccatacgaaccatggcgattggtgacgtgcgaccacaggaacaagatgagcaagatcaaccctcttcctcaactatggtgcattccccaacacaagacgatgaacaagttcatcaacaggaggcgtgtgatcaagggggagcacaagatgatcatgtgatggaggaagaagcgcaaccggcacctccaacccaagttcgagcgatgattcaaagggatcatcccgtcgaccaaattctgggtgacattagcaagggagtaactactcgatctcgattagttaatttttgtgaacattactcctttgtctcttctattgagcctttcagggtagaagaggccttgctagatccggactgggtgttggccatgcaagaggagttaaacaacttcaagcgcaatgaagtttggacactggtgcctcgtcccaagcaaaatgttgtgggaaccaagtgggtgttccgcaacaaacaggacgagcacggggtggtgacaaggaacaaggctcgacttgtggcaaaaggttatgcccaagtcgcaggtttggactttgaggagacttttgctcctgtggctaggctagagtcaattcgtatcttgctagcatatgccgctcaccattctttcaggttgttccaaatggatgtgaagagcgcattcctcaacgggccaataaaggaggaggtgtacgtggagcaaccccctggcttcgaggatgaacggtaccccgaccacgtgtgtaagctctctaaggcgctctatggacttaagcaagccccaagagcatggtatgaatgccttagagatttcttaattgctaatgctttcaaggttgggaaagccgatccaactctttttacaaagacttgtgatggtgatttatttgtgtgccaaatttatgtcgatgacataatatttggttctactaataaaaagtcttgtgaagagtttagcagggtgatgacgcagaaattcgagatgtcgatgatgggcgagttgaactacttccttgggttccaagtgaagcaactcaaggacggcaccttcatctcccaaacgaagtacacgcaggacctgctaaagcggtttgggatgaaggacgccaagcctgcaaagacaccgatgggaaccgacggacacaccgacctcaacaaaggaggtaagtccgttgatcaaaaagcataccggtcaatgatagggtcattactttacttatgtgctagtagaccggatattatgcttagcgtatgcatgtgtgctagatttcaatccgatcctaaggagtgtcacttagtggcggtgaagcgaattcttagatatttagttgctacgccttgcctcgggctctggtatccaaaggggtctacctttgacttgattggatactcagactccgattatgctggatgtaaggtcgataggaagagtacatcggggacgtgccaattcttaggaaggtccttggtgtcatggaaatctaagaaacaaacctccgttgccctatccaccgctgaggccgagtacattgccgcaggacagtgttgcgcgcaactactttggatgaggcaaaccctcagggactttggctacactctgagcaaagtcccactcctatgtgataatgagagtgctatccgcatggcggaaaatcctgttgaacacagccgcacaaagcacatagacatccggcatcactttttgagagaccaccagcaaaagggggatatcgaggtgtttcatgttagcaccgagaaccagctagccgatatctttaccaagcctctagatgagaagaccttctgcaggttgcgtagtgagctaaatgtcttagattcgcggaacttggattga

SEQ ID NO: 4826 - DNA, 4479 bp, Zea mays
  Clone ID: TF_ZM4791.C3.o3.fg
atggatcctaaagggaagggaatcgtgatcaacgacaaggagaaggagtccttcgtcaacgagccaagggatgacaagtccaacgactcgggctcgggccacagacgcaaagatgggaagaagaagaagacaagacgcatcaaggagatcgtctactacgacagcgatgagtctacttcctcccaaaaggacgacgaccacaacgaatacgagagaaagaaaccggtcaattcgaacttttcttttgattactctcgtattcctcaaagtactaatgctcatttattatctattccacttggtaaacctcctcattttgatggagaggactacggattttggagtcacaaaatgcgtagtcacttgttctctctccatcctagcatatgggagattgtagaaagtggaatgcactttgatagtacggatagtcccatgtttattaatgaacagattcataaaaatgcacaagctactactgtgttgctagcctctttgtgcagggacgagtaccataaggtgagcggcttggacaatgccaagcagatctgggacaccctcaagatctctcatgaggggaatgatgtcaccttgctcaccaaaatggagttggtggagggcgagcttggacggttcgcgatgataaggggcgaggagccgacacaaacatacaatcggctcaagaccctcatcaacaaaataaggagctacgggagcacgcgatggacggaccacgacgtcgtccacctaatgctaaggtcatttaccattcttgatcctcatttggtaaacaatatacgtgaaaatcccaggtacaccaagatgtcgcccgaagaagttcttgggaaattcgttagcgggcgaatgatgatcaaggaggcgaggtacgtggacgacgccttgaatggtccgatcaacgagccgcaaccccttgctctcaaggcaacacgaagcaaggaggcgctacctagcaaggtggcacagattgaggcggccggacttaatgatgaagagatggctctcatcatcaaaagattcaagacggtgcttaaaggtcgcaagggacaaccaagcaagaccaaagccaaggggaagcgctcatgcttcaaatgcggtaagcttggtcattttattgctaactgtcccgacaatgatagtgatcaggatcaagggaacaagagggagaaaaagaagaactataagaaggcaaagggcgaggctcatcttggcaaggagtgggattcggactgctcttcgtccgactccgacaatgaagcactcgccgccaccgccttcaacaagtcatccctcttcctcaacgagcgacacacttgcctcatggcaagggagaagaaagtaagcactcataatactagtacttatgcttcttcaagtgaggatgagtctagtgatgatgatgagatagattactcatgcttattcaagggattagatagaaccaaggtagacaaaattaatgaattgattgatgccttgaatgataggaatatacttttagaaaagcaagaggatttgttgtatgaagaacatgataaatttgtagaagctcagaaatctcttgctctagaaattaagagaaatgaaatgctctctagtgaactatcttcttgtcatgaaactattgctaagttaaagagtcttaatgatgatttaaatgctagactagaagtagctagtaaatctaattcttgtgtagaaattgttgaaacttgtaataggtgtaaagattttgacattgatgcttgtagtgaacacctagtttcaatttccaaacttaatgatgaattggctagtcttaatgctcaacttaagactagcaaaagtaattttgataagctaaaatttgcaagggatgcctacacaattggtagacacccctcaattaaggatggacttggctacaagaaggaagccaagaacttgacaagccataaggctcccatctccgccaaggagaaagggaaggcccctatggctagtagtgtgcaaaagaaccatgcctttatgtaccatgatagaagacaatctagaaatgcttataggagatgtaacgcatatgacgcttttgattctcatgacatgtttgcttctagttcttcttatgtgcataatagaaatgttggtaggagaaatgttgttcataatatgcctaagagaaatgttgttaatgttcctaggaaagtttatgcatccgggggttcaagctggattatcgacagtggatgcacaaaccatatgacgggggagaagaagatgttcacctcctacgtcaagaatagggattcccaagattcaattatattcggtgatgggaatcaaggcaaggataagtctgaaacccaagggaccctcaagcgcttccttaggagagctcaaaatgagtttgagctcaaggtgaagaagataaggagcgacaacgggtctgagttcaagaaccttcaagtggaggagttccttgaggaggaagggatcaagcacgagttctccgctccctacacaccacagcaaaatggtgtggtagagaggaagaacaggacgctaatcgatatggcgaggacgatgcttggagaattcaagacccccgagcgtttttggtcggaagccgtcaacatggcttgccacgccatcaacagggtctaccttcaccacctcctcaagaagacgtcgtatgagcttctaaccggtaacaaacccaatgtatcttactttcgtgtatttgggagcaaatgctacattctagtgaagaagggtagaaattctaagtttgctcccaaagccgtggaagggtttttgttaggttatgactcaaatacaaaggcgtatagagtcttcaacaaatcatcgggattggttgaagtctctagcgacgttgtatttgatgagactaatggatctccaagagagcaagctgttgatcttgatgatgtagatgaagaagatgttccgacggccgctatacgaaccatggtgattggtgatatacgaccacaggaacaaaaggagcaagatcaaccttcttcctcaactttgatgcatcccccaactcaagacgatgaacaggttcatcaacgagaggcgtgtgatcaagggggagcacaagacgatcatgtgatggaggaagaagcgcaaccggcaccaccaacccaagttcgagcgatgattcaaagggatcatcccgtcgaccaaattctgggtgatattagcaagggagtaactactcgatctcgattagttaatttttgtgagcattactcctttgtctcttctattgagcctttcagggtagaagaggccttgctagatccggactgggtgttagccatgcaggaggaactcaacaacttcaagcgcaatgaagtttggacactggtgcctcgtcccaagcaaaacgttgtgggaaccaagtgggtattccgcaacaaacaggacgagcacggggtggtgacgaggaacaaggctcgacttgtggcaaaaggttatgcccaagtcgcaggtttggactttgaggagacgtttgctcctgtggctaggctagaatcaattcgtatcttgctagcatatgccgctcaccattctttcaggttgttccaaatggatgtgaagagcgctttcctcaacgggccaatcaaggaggaggtgtacgtggagcaaccccctggcttcgaggatgaacggtaccccgaccacgtgtgtaagctctctaaggcgctctatggacttaagcaagccccaagagcatggtatgaatgccttagagactttctaattgttaatgctttcaaggttgggaaagccgatccaactctttttactaagacatgtgatggtgatttgtttgtgtgccaaatttatgtcgatgacataatatttggttctactaaccaaaagtcttgtgaagagtttagcagggtgatgacgcagaaattcgagatgtcgatgatgggcgagttgaactacttccttgggttccaagtgaagcaactcaaagacggcaccttcatctcccaaacgaagtacacacaagatctgctaaagcggtttgggatgaaggacgccaagcccgcaaagactccgatggggaccgacggacacaccgacctcaacaaaggagggtctttactttatttatgtgctagtagaccggatattatgcttagcgtatgcatgtgtgctagatttcaatccgatcctaaggagtgtcacttagtggcggtgaagcgaattcttagatatttggttgctacgccctgcttcgggctctggtatccaaaggggtctacctttgacttggttggatactcagattccgactatgctggatgtaaggtcgataggaagagtacatcagggacgtgccaattcttaggaaggtccctggtgtcgtggaactctaagaaacaaacctccgttgccctatccaccgctgaggccgagtatgttgccgcaggacagtgttga

SEQ ID NO: 4827 - DNA, 1990 bp, Zea mays
  Clone ID: TF_ZM4796.C7.o1.fg
atggatcctaaggggaagggaatcgtgatcaacgacaaggagaaggagtctttcgtcaacgagccaaaggatgacaagcctactgactcgggcttgagccacaagcgcaaagacgggaagaagaagaagacaaggcgcatcaaggagatcgtctactacgacagcgacgaatcttcctcttcccaaaaggacgacgacgactacgagaaaaagaaaacggtcaattcgaacttttcttttgattactctcgtattcctcaaagtacaaatgctcatttattatctattccacttggtaaacctcctcattttgatggagaggactacggattttggagtcacaaaatgcatagtcacttgttctctctccatcctagtatatgggagattgtagagagtggaatgcactttgatagtacggatagtcccatgttcatcaatgagcaaattcataaaaatgcacaggctactactgttcttctagcttcattgtgcagggatgaataccacaaagtgagcggcttggataacgccaagcaaatctgggacaccctcaaggtctctcatgaggggaatgacgtcacaatgctcaccaagatggagttggtggagggcgaactcgggagattcgctatgataaggggagaagagccaacccaaacgtacaaccggctcaagacccttatcaacaagataagaagctatggaagcacgcgatggacggaccacgacgttgttcgcctaatgctaaggtcttttactgtccttgatcctcatcttgtaaacaatattcgtgagaatcctaggtataccaagatgacgcccgaggagatacttggaaagttcgtgagcgggcgaatgatgatcaaggaagcaagatatgtggacgacgcattgaatggtccaatcaatgagcctcaacatctagctctcaaggcaacaagaagcaaggagacgctacctagcaaggtggcacaaattgaggcggccagacttaatgatgaagagatggctctcatcatcaagagattcaagacggcgctaaaaggtcgcaaggggcagccaagcaagaccaagacaaaggggaagcgctcatgcttcaaatgtggtaagcttggtcattttattgctaactgtcccgacaattatagtgatcaggatcaagggaacaagagggagaagaagaagaactataagaaggcaaagggcgaggcgcatctaggcaaggagtgggattcggattgctcctcttccgactccgacaatgaaggactcgccgccaccgccttcaacaagtcatccctcttccccaacgagcgtcacacatgccttatggcaagggagaagaaggtatgtactcgaaactctacttatgcttcttcaagtgaggacgaatctagtgatgaggatgaaatagattattcatgtttatttaagggcctagatagaaccaaggtagataaaattaatgaattgattgatgccttgaatgataagaataggcttttagaaaagcaagaggatttgttgtatgaagaacatgacaaatttgtagaagcacaaaaatctcatgctctagaagttaaaagaaatgaaatgctttcttgtgaattatcttcttgccatgagacaatttctaacttaaggagcattaatgatgatttgaatgctaagttagaaatagctagtaaatcaacatcttgtgtagaaattgttgcaacttataataggtgtaaagattttgacattgatgcttgtagtgaacacctagcttcaatttccaaacttaatgatgaattggctagtcttaatgctcaacttaagactagcaagagcgaatttgataagctaaaatttgcgacggatgcctacatgattggtagacacccctcaattaaggatggacttggcttcaagagggaagccaagaacttaacaagccataaggtccctatccccgccaaggagaaagggaaggctcctatggcaa

SEQ ID NO: 4828 - DNA, 3709 bp, Zea mays
  Clone ID: TF_ZM4824.C5.o1.fg
atggatcctaaggggaagggaatcgtgatcaacgataaggagaaggagtccttcgtcaacgagcccaaagatgacaagcctaccgactccggctcgggccatagacggaaggaagggaagaagaagaagacaaggcgcatcaaggagatcgtctactacgacagcaacgaatcttcctcttcccaaaaggacaacgacgacaacgactatgacaaacaaaagacggttaactcaaacttttcttttgattattcgcgcattccgcatagctcaaatgctcatttgcttcccattccacttggcaagcctcctcactttgatggagaggactacggattttggagtcacaaaatgcgtactcacctattttctctccatccaagcatttgggaggttgtggaaagtggaatgaaatttgatagctcggatagcccttcatttattaatgaacagatccataaaaatgcacaagctactactgtgttgctagcctctttgtgcagggacgagtatcacaaggtgagcggcttggacaatgccaagcagatttgggacaccctcaagatctctcatgaggggaatgatgtcaccttactcaccaagatggagttggtggagggtgagctcggacgattcgcgatgataaggggcgaggagccgacacaaacatacaaccggctcaagatccttatcaacaaaataaggagctacggaagcacgcgatggacggatcacgacgtcgtccgcctaatgctaaggtcatttaccgttcttgatcctcacttggtgaacaatattcgtgaaaatcctaggtacatcaagatgtcgcccgaagaaattcttggaaaatttgtaagcgggcgaatgatgatcaaggaggcgaggtacgtggacgacgcgttgaatggcccaatccatgagcctcaacccattgctctcaaggcaacaaggagcaaggaggcgctacccagcaaggtggcgcaaattgaggcggccggtcttaatgatgaagagatggccctcatcatcaaaagattcaagacggcactaaagggtcgcaagggacagccaagcaagactaagaccaagggaaagcgatcatgcttcaaatgcggtaagcttggtcattttattgctaactgtcccgacaatgatagtgaccaggaacacgggagcaagagggaaaagaagaagcattacaagaaggccaagggcgaggcacatatcggaaaggagtgggattcggattgctcctcctccgactccgacaatgaaggactcgccgccactgccttcaacaagtcatccctcttccccaacgagcgtcacacatgccttatggcaagggagaagaaggtatgtaatcaaaacaatgtcacttatgattcttccagtgatgatgagtctagtgatgatgaaatagattactctagtttgttcaagggattggatagaactaaagtagataaaattaatgaattaattgatgccttgaatgaaaaagatagactcttagaaaaacaagaggaccttttgtatgaagagcatgacaaatttgtagaggcacaaaaatcttatgctttagaagttaaaagaaatgaagtgctttctagtgaactatcttcttgtcatgaaaccattgctactttaaagagtgttaatgatgacttaaatgctaaactagaagtagctagtaaatctaattcctgtgtagaacatgttgagatttgcactaggtgtaaagatttcgatgttgatgcttgtagtgatcatttagtttcaatttccaaattaactaaggaattggctagtcttaatgcccaacttaagactagcaagaatgaatttgataaactaaaatttgcaagggatgcctacacgatcggtagacacccctcaattaaggatggacttggcttcaagagggaagccaagaacttaacaagccataaggctcccattcccgccaaggagaaagggaaggcccctatggctagtagtgtgcaaaagaaccatgcttttatgtatcatgataggagacaaactagaaacgcttataggagtttcaatgcttatgatgattttgactttcatgccatgtttgcttctagttcttcctatatgcatggtagaaatatgtctaggaaaaatgctattcatcatatgcctagaaagaatgttattcatgctcctaggaaagtagtgaatgaaccttctataatttattgtgctttaaatgcttcctttgctatttgtagaaaggataggaaaatagtcgctaggaagttaggggcaaaatgcaagggagacaaaacttgcatttgggtccctaaggatatttgcactaaccttgtaggacccaacatgagttgggtttatgcatccgggggttcaagctggattatcgacagcggatgcacaaaccatatgacgggggagaagaaaatgttcacctcctacgtcaagaataaggattcccaagattcaattatattcggtgatgggaatcaaggcaagataaaagggctagtagagtctcttggatataatttgctatcggataagtctgaaacccaagggaccctcaagcgcttcctcaggagagctcaaaatgagtttgagctcaaggtgaagaagataaggagcgacaacgggtccgaattcaagaaccttcaagtggaggagttccttgaggaagaaggaatcaagcacgagttctccgctccctacacaccacaacaaaatggtgtggtagaaaggaagaacaggacgctcatcgatatggcgaggacgatgctaggagagttcaagacccccgagtgcttttggacggaagccgtgaacacggcttgccacgccatcaacagggtctaccttcatcgcctcctcaagaagacctcatatgagctactaaccggtaacaaacccaatgtatcttactttcgtgtatttgggagcaagtgctacattctggtaaagaagggtagaaattctaagtttgctcccaaagctgtagaagggtttttgttaggttatgactcaaatacaaaggcgtatagagtcttcaacaaatcatcgggtttggttgaagtctctagcgacgttgtatttgatgagactaatggctctccaagagagcaagttgttgattgtgatgatgtagatgaagaagatgttccgacggccgctatacgaaccatggcgattggagaagttcggccacaggaacaagatgaacgagatcaaccttcttcctcaactatggtgcatcccccaactcaagacgatgaacaggttcatcaacaggaggcgtgtgatcaagggggagcacaagatgatcacgtgatggaggaagaatcgcaaccggcacctccgacccaagttcgagcgatgattcaaagggatcatcccgtcgaccaaattctgggtgacattagcaagggagtaactactcgatctcgattatttaatttttgtgagcattactcctttgtctcttctattgagccgttcagggtagaggaggccttgctagatccggattgggtattggccatgcaagaggagctcaacaacttcaagcgcaatgaagtttggacactggtgcctcgtcctaagcaaaatgttgtgggaaccaagtgggtgtttcgcaacaaacaggacgagcacggggtggtgacgaggaacaaggctcgacttgtggcaaaag

SEQ ID NO: 4829 - DNA, 4641 bp, Zea mays
  Clone ID: TF_ZM4868.C4.o4.fg
atggatcctaaaggcaaggggatggtgatcaacgacaaagaaaaggagtccttcgtcaacgagccaagggatgacatgtccaacgactcgagctcgggccacaaaagaaaagatgggaggaagaagaagacaaggcgcatcaaggaaattgtctactacgacagcgacgaatcttcctcctcccaaaaggacgacgacgactatgatagacgaaagacgcgcatcccgcatagttcaaatgctcaattgcttcccattccacttggcaagccccctcactttgatggagaggattacggattttggagccacaaaatgcgtactcacctgttttctctccatccaagcatttgggagattgtggaaagtggaatgaaatttgatagctcggatagccctatgtttattaatgaacaaattcatagaaatgcacaagctactactgtattgctagcctctttgtgcagggacgagtatcacaaggtgagcggcttggacaatgccaagcagatctgggacaccctcaagatctctcatgagggaaacgacgtcaccttgctcaccaaaatggagttggtggaaggcgaacttggacggttcgcgatgataaggggggaggagccgacgcaaacatacaaccggctcaagacccttatcaacaaaataaggagctacgggagcacgcgatggacggatcacgacgtcgtccgcctaatgctaaggtcatttaccgttcttgatcctcatttggtgaacaatatacgtgaaaatcccaggtacaccaagatgtcgctcgaagaagttcttgggaaattcgttagtgggcgaatgatgattaaggaggcaaggtacgtggacgacgccttgaatggtccgatcaacgagccgcaaacccttgctctcaaagcaacacgaagcaagaaggcgctacctagcaaggtggcacagtttgaggcggccggacttaatgatgaagagatggtcctcatcatcaaaagattcaagacggcgctaaagggtcgaaagggacagccaagcaagactaagaccaagggaaagcgatcatgcttcaaatgcggtaagcttggtcattttattgctaattgtcccgacaatgatagtgaccaggaacacgggagcaagagggaaaagaagaagcattacaggaaggccaagggcgaggcacatatcggaaaggagtgggattcggattgctcctcctccgactccgacaatgaaggactcaccgccactgccttcaacaagtcatccctcttccccaacgaacgtcacacatgccttatggcaagggagaagaaggtatgtaatcaaaacaatgtcacttatgattcttctagtgacgatgagtctagtgatgatgaaatagattactctagtttgttcaagggattggatagaactaaagtagataaaattaatgaactgattgatgccttaaatgaaaaagatagactcttagaaaaacaagaggatcttttgtatgaagagcatgacaaatttgtagaggcacaaaaatcttatgctttagaagttaaaagaaatgaagtgctttctagtgaactatcttcgtgtcatgaaaccattgctactttaaagagtgttaatgatgacttaaatgctaaactagaagtagctagtaaatctaattcttgtgtagaacatgttgagatttgcactaggtgtaaagatttcgatgttgatgcttgtagtaatcatttagtttcaatttccaaattaactgaggaattggctagtctcaatgcccaacttaggactagcaagaatgaatttgataaactaaaatttgcaagggatgcctacacgattggtagacacccctcaattaaggatggacttggcttcaagagggaagccaagaacttaacaagccataaggctcccattcccgctaaggagaaagggaaggcccctatggctactagtgctaaaaagaaccatgcctttttgtactatgatagaagacaacctagaaatgcttataggagttgtaatgcatataatgcctttgactctcatgccatgtttgcttctagttcttcatatgtgcatgatagaaatgttggtagaaggaatgttgttcataatatgcctagaagagatgttgttaatactcctaggaaagttaatgagccttctacaatatatcatgctttgaatgcttcctttgcaatttgtagaaaggatagaaaggtttatgcatccgggggttcaagctggattattgatagtggatgcacaaaccatatgacgggggagaagaagatgttcacctcctacgtaaagaataaggattcccaagattcaattatcttcggtgatgggaatcaaggcaaggataagtctgaaacccaagggaccctcaagcgcttcctcaggagagctcaaaatgagtttgagctcaaggtgaagaagataaggagcgacaacgggtccgagttcaagaaccttcaagtggaggagtttcttgaggaggaagggatcaagcacgagttctccgctccctacacaccacagcaaaatggtgtggtagagaggaagaacaggacgctaatcgatatggcgaggacgatgcttggagaattcaagacccccaagtgtttctggtcggaagccgtgaacacggcttgccacgccatcaacagggtctaccttcatcgcctcctcaagaagacttcgtatgagctgctaaccggtaacaaacccaatgtatcttactttcgtgtatttgggagcaagtgctacattctagtaaagaagggtagaaattctaagtttgctcccaaagttgtagaagggtttttgttaggttatgactcaaatacaaaggcgtatagagtcttcaacaaatcatcgggtttggttgaagtctctagcgacgttgtatttgatgagactaatggctctccaagagagcaagttgttgattgtgatgatgtagatgaagaagatgttccgacggccgctatacgaaccatggcgattggagtagtgcggccacaggaacaagatgaacgagatcaaccttcttcctcaacaatgatgcatcccccaactcaaaacgatgaacagcctttcagggtagaggaggccttgctagatccggactgggtgttggccatgcaggaggagctcaacaacttcaagcgcaatgaagtttggacactggtgcctcgtccgaagcaaaatgttgtgggaaccaagtgggtgttccgcaacaaacaggacgagcacggggtggtgacgaggaacaaggctcgacttgtggcaaaaggttatgcccaagtcgcaggtttggactttgaggagacgtttgctcctgtggctaggctagaatcaattcgtatcttgctagcatatgccgctcaccattctttcaggttgttccaaatggatgtgaagagcgccttcctcaacgggccaatcaaggaggaggtgtacgtggagcaaccccctggcttcgaggatgaacggtaccccgaccacgtgtgtaagctctctaaggcgctctatggacttaagcaagccccaagagcatggtatgaatgccttagagactttttacttgctaatgctttcaaggttgggaaagccgatccaactctgttcactaagacatgtgatggtgatttgtttgtgtgccaaatttatgtcgatgacataatatttggttctactaaccaaaagtcttgtgaagagtttagcagggtgatgacgcagaaattcgagatgtcgatgatgggcgagttgaactacttccttgggttccaagtgaagcaactcaaggacggcaccttcatctcccaaacaaagtacacgcaagacttgctgaagcggtttgggatgaaggacgccaagcccgcaaagactccgatgggaaccgacggacacaccgacctcaacaaaggaggtaagtctgttgatcaaaaagcataccggtcaatgatagggtctttactttatttatgtgctagtagaccgaacattatgcttagcgtatgcatgtgtgctagatttcaatccgatcctaaggagtgtcacttagtggcggtgaagcgaattcttagatatttggttgctacgccttgcttcgggctctggtatccaaaggggtctacctttgacttggttggatactcagactccgactatgctggatgtaaggtcgataggaagagtacatcagggacgtgccaattcttaggaaggtccctggtgtcgtggaactctaagaaacaaacctttgttgccctatccaccgctgaggccgagtatgttgccgcaggccagtgttgcgcgcaactactttggatgaggcaaaccctcagggactttggctacaatctgagcaaagtcccactcctatgtgataatgagagtgctatccgcatggcggaaaatcctgttgagcacagccgcacaaaacacatagacatccagcatcactttttgagagaccaccagcaaaagggagataacgaattgtttcatgttagcaccgagaaccagctagccgatatctttaccaagcctctagatgagaagaccttttgcaggctgcgtagtgagctaaatgtcttagatttgcggaacttggattga

SEQ ID NO: 4830 - DNA, 642 bp, Zea mays
  Clone ID: TF_ZM4875.C4.o12.fg
atggatcctaagggcaaggggatggtgatcaacgataaggagaaggagtccttcgtcaacgagcccaaagatgacaagcctaccgactcgggctcgggccacaagcgaaaagatggaaagaagaagaagacaagacgcatcaaggagattgtctactacgacgacagcgacgagtcctcttcttcccaaaaggacaacgacgactacgacagacgaaagacggcaacaaggagcaaggaggcgctacctagcaaggtggcgcaaattgaggcagccggacttaatgatgaagagatggccctcatcatcaaaagattcaagacggcgctaaaggatcgcaagggacagccaagcaagaccaagaccaagggaaagcgctcatgcttcaaatgcggtaagcttggtcattttattgctaactgtcccgacaatgatagtgatcaggaacaagggaacaagagggagaagaagaagaactataagaaggcaaaaggcgaggcgcatctaggcaaggagtgggattcggattgctcctcttccgactccgacaatgagggactcgccgccaccgccttcaacaaatcggccctcttccccaatgagcgtcacacatgccttatggcaagggagaagaaggtgtaa

SEQ ID NO: 4831 - DNA, 2097 bp, Zea mays
  Clone ID: TF_ZM4885.C4.o3.fg
atggatacccataggccaccacacttcgacggcactaacttcccatattatagtgctagaatggcttgctacctagaggccgttgatctaggtgtttggagagtcactcgtgacgggatgaaacccctcaagaatcccgagaaaccaaccacgagtgaggaaaaagaaattcacttaaatgctagagccaaaaattgcttgtatgaatctcttagcatggatatttttaatcaagtatttaccttgaaaactgctaatgagatttggctaaaattgcatgagctccatgacggcacatccaatgtccgtgagcaaaaacattgcctagtcttaaatgagtataattcttttgctatgaaagatgatgagcttgttagagacatgtattctcgtttgaatctaattatcaatgagctcaattctattggcattaataagctaggtgatgcggacattgtgaggaagattatctccctactaccacaacgaagatatgggagcatcatcactatccttcacaacatggaggacttgggtaacatgaccccaaccattgtaattggaaaaatcgcgacttttgagatgtcgcgaaaaatgtgtcggggagaggagccaacttcctcaaggccatatgcttttgcatgtgatgaaaggaagggcaaaaagaaggctcccactccaagttcctcaagtgaagaagaggaggaagaagaaattgatgatgatgaagataatcaaccatgcacatcatcctccgaggacgaagaaacaatccgacgcgtcggaaaggtaatggggatgatccgcaagattaatctaatgggtgtgcccctgcaggtcgaagatcttctctttaacattgacaggaaaaagcaaaggaagagaggatgcttcacatgtggggagaagggccacttcagggacaactgtccaactatggccgaacccaaaaaggagaggagcaaaggcaaggcgctaacaagtgttagaacttgggatgactcttcaagtgaagatgaacctccaaggacgcgcagccaccggtcctcatcacggtcatcacacaaatgccttatggcaagaggtaacaaaagcattccatactctagtgatgaaagtggtagtgatgatgaaggtgagggaaagccctctgtagatgagcttgcgaatgccgtagaatttttccaggatgtttgcactaagcaaaaagctcaacttaaaactttgaaaaataagttggttagctctcaaaatgactacaaaggtttgctagaaaaatttgaaacttttgcaaacttaaatagtgagctatcaactaaaattgagctattagaatctagtgctccatccactgctaccgatgacaaccttattaaaaagaatgaaaaacttaaggctaagttagctagctcccaagaagctattgaaaatttgctagagaaaatggaaattcttagcatacacaataatgagctaactactaagctagaaaacattggtagcaccccagcaacatctttagttgaaatacctgaaataattaagaaagatgcttctacttcctgctttgatttaattgatgattctaacccctgcaaccaagtcgttgttgagaatattgttgtagagacatgttcggatgaggttgcaaaggaaaatgaacaattaaagcaagaagtggctcgccttggcaaggctttgtatgacaagaaaggcaaagccaaacaaatccgacctccacaggataacaccactgcgggagtgaacaagcctgtagagggagaaactatgatttgtaggctatgccacatggaaggccacaagtctttccaatgcaaggcgatgaccgggaataaacaaaggcaaaagctcaagcaaaagccatcaagcaaaatctccaacacctacatcaaaaaggtgaacaaaaaggatgctacaccatatttgatcaagaagaaaaagaatggaaaggtgatagcaatcaaggccaacaagcaagccaacaaaggaaaaggggccaaacgcatatgggtgccaaaggagataatttcaaccatgaaaagcaccaagaaggtttggatcccgaaagggaagtga

SEQ ID NO: 4832 - DNA, 2337 bp, Zea mays
  Clone ID: TF_ZM4885.C4.o5.fg
atggatcctaaaggcaaggggatggtgatcaacgacaaggaaaaggagtccttcgtcaacgagcccaatgatgacaagcccaccgactcaggctcgggccacaaaagaaaagacgggagaaagaagaaggcaaggcgcatcaaggaaattgtctactacgacagcgacgaatcttcctcctcccaaaaggacgacgacgactacgatagacgaaagacggttaactcaaacttttctttcgattatttgcgcatcccgcatagttcaaatgctcaattgcttcccattccacttggcaagccccctcactttgatggagaggattacggattttggagccacaaaatgcgtactcacctgttttctctccatccaagcatttgggagattgtggaaagtggaatgaaatttgatagctcggatagccctatgtttattaatgaacagattcatagaaatgcacaagccactactgtattgctagcctctttgtgcagggacgagtatcacaaggtgagcggcttggacaatgccaagcagatctgggacaccctcaagatctctcatgagggaaacgacgtcaccttgctcaccaaaatggagttggtggaaggcgaacttggacggtacaccaagatgtcgcccgaagaagttcttgggaaattcgttagcgggcgaatgatgatcaaggaggcaaggtacgtggacgacgccttgaatggcccgatcaatgagccgcaaccccttgctctcaaggcaacacgaagcaaggaggcgctacctagcaaggtggcacagtttgaggcggcaggacttaatgatgaagagatggctctcatcatcaaaagattcaagacggtgcttaaaggtcgcaagggacagccaagcaagaccaaagccaaggggaagcgctcatgcttcaaatgcggtaagcttggtcattttattgctaactgtcccgacaatgatagtgatcaggatcaagggaacaagagggagaaaaagaagaactataagaaggcaaagggcgaggctcatcttggcaaggagtgggattcggactgctcttcgtccgactccgacaatgaaggactcgccgccaccaccttcaacaagtcatccctcttccccaacgagcgacacacttgcctcatggcaagggagaagaaagtaagcactcataatactagtacttatgcttcttcaagtgaggatgagtctagtgatgatgatgagatagattactcatgcttattcaagggattagatagaaccaaggtagacaaaattaatgaattgattgatgccttgaatgataggaatatacttttagaaaagcaagaggatttgttgtatgaagaacatgataaatttgtagaagctcataaatctcttgctctagaaattaagaggaatgaaatgctctctagtgaattatcttcttgtcatgaaactattgccaagttaaagagttttaatgatgatttaaatgctaaactagaagtagcgagtaaatctaattcttgtgtagaaattgttgaaacttgtaataggtgtaaagatattgacattgatgcttgtagtgaacacctagtttcaatttccaaacttaatgatgaattggctagtcttaatgctcaacttaagactagcaagagtaattttgataagctaaaatttgcaagggatgcctacacaattggtagacacccctcaattaaggatggacttggctacaagagggaagccaaggacttgacaagccataaggctcctatctccgccaaggagaaagggaaggctcctatggctagtagtgctacaaagaaccatgcttttatgtatcatgataggagacatactagaaatgcaaatagaagttataatgtttttgattcatatgtttatgattctcatgacatgtttgcttctagttctttctatgtgcatgataggaatgttggtaggagaaatgttgttcataacatgcctaggagaaatgttgttaatgttcctaggaaagtcaatgaaccttctacaatatatcatgctttgaatgcttcctttgcaatttgtagaaaggatagaaaggtgattgctaggaagtttggggcaaaatgcaagggtgataaaacttgcatttggatccctaaggaaattgtgactaaccttgtaggacccaacaagagttgggtttatgcatccgggggttcaagctggattatagacagcggatgcacaaaccatatgacgggggaaaagaagatgttcacctcctacgtcaagaataaggattcccaagactcaataatattcggtgatgggaatcaaggcaag

SEQ ID NO: 4833 - DNA, 4830 bp, Zea mays
  Clone ID: TF_ZM4929.C1.o1.fg
atggatcctaaggggaagggaattgtgataaacgacaaggagaaggagtccttcgtcaacgagccaagggatgacaagtccaatgactcgggctcgggccacaagcgaagagatgggaagaagaagaagacaagacgcatcaaggagatcgtctactacgacagcgatgagtcctcttcttcccaaaagaacgacgaccacgacaaacaaaggaaaccggttaattcgaacttttcatttgattattctcgtattccacatagttcgaattcgcatttgctttccattcctcttggtaaacctccacattttgatggggaggactacggattttggagtcacaaaatgcgtagtcatttattctctctccatccaagcatatgggagattgtagagaatggaatgaaatttgatagctcggatagccctatgtttatcaatgaacaaattcataaaaatgcacaagctactactgttctcttagcatctttgtgcagggaagagtacaataaggtgagcggcttggacaatgccaagcagatatgggacactctcaagatctctcacgaggggaacgacatcaccatgctcaccaagatggagttggtggagggcgagcttggacgattcgccatgataaggggagaagagccaactcaaacttacaaccggctcaagacccttatcaacaagataaggagctacggaagcacgcgttggacggatcacgacgtcgtccgcctaatgctcaggtcatttaccgttcttgatcctcatctcgtgaacaatattcgtgagaaccccaggtacacgatgatgacgcccgaagaagtacttggaaaattcgtgagcgggcggatgatgatcaaggaggcaaggtacgtcgatgacgcgttgaacggtccaatccacgagcctcaacccattgctctcaaggcatcgaggagcaaggaggcactaccaagcaaggtggcgcaaattgaggcggccgggcttaatgatgaagaaatggctctcatcattaagcgcttcaagacggtgctaaagggtcgcaatggacagccgagcaagactaagaccaaggggaagcgatcatgcttcaaatgcggtaagcttggtcattttattgctaactgtcctgataatgaaagtgaccaggaaaagggaaacaagagggaaaagaagaagcattataagaaggcaaagggtgaggcgcatctaggcaaggagtgggactcggattgctcctcatccgactccgacaatgaaggactcgccgccaccgccttcaacaaatcaaccctcttccccaacgagcgtcacacatgccttatggcaagggagaagaaggtatgtactcgcaactctacctatgcttcttcaagtgaggacgaatctagtgatgaggatgaagtagattattcatgtttgttcaagggcttagatagatctaagatagacaaaattaatgaattaattgatgccttgaatgaaaagaatatacttttagaaaagcaagaggatttgttgtatgaagagcatgataaatttgttgaggcacaaaaatcctacgctttagaggttaaaagaaatgaaatgctttcttttgaactatctacttgtcatgaaaccatttctactttgaaaggtgtcaacaatgatttaaatgctaaattagaagtagcaaataaatccaactcttgtgttgaacatgttgaaatttgcactaggtgtaaggatgttgatattaatgcctgtagtgaacacttagtttccatttcaaaattgagtgatgaagtagctagtcttaatgctcgacttaagactagcaaaagtgattttgaaaaactaaaatttgctagggatgcctacacggttggtagacacccctcaattaaggatggacttggcttcaagagggaagccaagaacttaacaagtcataaggctcccattcccgccaaggagaaagggaaggcccctatggctactagtgctaaaaggaaccatgcctttttgtatcatgataaaagacaaactagaaatagaagttatgatgcttttgattcatatgtttatgattctcatgccataaaggatagaaaagtaattgctaggaagttaggggcaaaatgcaaaggtgataaaacttgcatttgggtccctaaggaaattgtgactaaccttgtaggacccaacaagagttgggtttatgcatccgggggttcaagctggattatcgacagcggatgcacaaaccatatgacgggggagaagaagatgttcacctcctacgtcaagaataaagattcccaagattcaattgtattcggtgatgggaatcaaggcaaggataagtctgaaacccaagggaccctcaagcgctttctcaggagagctcaaaatgagtttgagctcaaggtgaagaagataaggagcgacaacgggtccgagttcaagaaccttcaagtggaggagttccttgaagatgaagggatcaagcacgagttctccgctccctacacaccacagcaaaatggtgtggtagagaggaagaacaggacgctcatcgacatggcgaggacgatgctaggagagttcaagacccccgagtgcttttggacagaagccgtgaacacggcgtgccacgccatcaacagggtctaccttcatcgcctcctcaagaagacgtcgtatgagctactaaccggtaacaaacccaatgtatcgtactttcgtgtatttgggagtaaatgctacattctagtaaagaagggtagaaattctaagtttgctcccaaagctgtagaagggtttttgttaggttatgactcaaatacaaaggcgtatagagtcttcaacaaatcatcgggtttggttgaagtctctagcgacgttgtatttgatgagactaatggctcttcaagagagcaagttgttgattgtgatgatgtagatgaagaagatgttccgacagccgctatacgaaccatggcgattggagaagtgcggccacaggaacaagatgagcaagatcaaccctcttcctcaattatggtgcatcccccgactcaagacgatgaacaggttcatcataaggaggcgtgtgatcaagggggagcacaagataatcatgtgatggaggaagaagtgcaaccggcacctccaacccaagttcgagcgatgattcaaagggatcatcccgtcgaccaaattctgggtgacattagcaagggagtaactactcgatctcgattagttaatttttgtgagcattactcttttgtctcttctatagagcctttcagggtagaggaggccttgctagatccggactgggtgttggccatgcaagaggagctaaacaacttcaagcgcaatgaagtttggacactggtgcctcgtccgaagcaaaatgttgtgggaaccaagtgggtgttccgcaacaaacaggacgagcacggggtggtgacgaggaacaaggctcgacttgtggcaaaaggttatgcccaagtcgcaggtttggactttgaggagacctttgctcctgtggctaggctagagtccattcgtattttgctagcatatgccgctcaccattctttcaggttgtaccaaatggatgtgaagagcgctttcctcaacgggccaatcaaggaggaggtgtacgtggagcaaccccctggcttcgaggatgaacggtaccccgaccatgtgtgtaagctctctaaggcgctctatggacttaagcaagccccaagagcatggtatgaatgccttagagactttttaattgctaatgctttcaaggttgggaaagccgatccaactctttttacaaagacatgtgatggtgatttgtttgtgtgccaaatttatgtcgatgacataatatttggttctactaaccaaaagtcttgtgaagagtttagcagggtgatgacgcagaaattcgagatgtcgatgatgggcgagttgaactacttccttgggttccaagtgaagcaactcaaggaaggcaccttcatctcccaaacgaagtacacgcaagatctgctaaagcggtttgggatgaaggacgccaagcccgcaaagacgccaatggggaccgacggacacaccgacctcaacaaaggaggtaagtccgttgatcaaaaagcataccggtcaatgataggttctttgctttacttatgtgctagtagaccggatattatgcttagcgtgtgcatgtgtgctagatttcaatccgatcctaaggagtgtcacttagtggcggtgaagcgaattcttagatatttggttgctacgccttgcttcgggctctggtatccaaaagggtctacctttgacttagttggatactcagactccgactatgctggatgtaaggtcgataggaagagtacatcggggacgtgccaattcttaggaaggtccctggtgtcatggaactctaagaaacaaacatccgttgccctatccaccgctgaggccgagtacgttgccgcaggtcagtgttgcgcgcaactactttggatgaggcaaactctccgggactttggctacaatctgagcaaagtcccactcctatgtgacaatgagagtgctatccgcatggcggagaatcctgttgagcacagccgcacaaagcacatagacatccggcatcactttttgagagaccaccagcaaaagggagatatcgaagtgtttcatgttagcaccgagaaccagctagccgatatcttcactaagcctctagatgagaagaccttttgcaggttgcgtagtgagctaaatgtcttagattcgcggaacctggattga

SEQ ID NO: 4834 - DNA, 2595 bp, Zea mays
  Clone ID: TF_ZM4951.C1.o9.fg
atggatcctaaggggaagggtatcgtgatcaacgaaaaagagaaggaatccttcgtcaacgagccgaaggacgacaagcctaccgactccggctcgggccatagacggaaggaagggaagaagaagaagacaaggcgtattaaggagatgtctactacgacgacagtgatgagtccacttcttcccacaaggacaacgacgacaacgactacgacaaacaaaagacgggatgaatatcacaaagtgagcggcttggataacgccaagcagatctgggacaccctcaagatttcacatgaggggaacgatgtcaccttgctcaccaagatggagttggtggagggcgagcttggacgattcgcgatgataaggggcgaggagccgacacaaacatacaaccggctcaagacccttatcaacaaaataaggagctacggaagcacgcggtggacggaccacgacgttgtccgactgatgctaaggtcctttaccgttcttgatcctcatttggtgaataatattcgtgagaatcccaggtacaccaaaatgtcgcctgaagaagtccttgggaaattcgtaagcgggcgaatgatgatcaaggaggcgaggtacgtggacgacgccttgaatggtccgatcaacgagccgcaaccccttgctctcaaggcaacaagaagcaaggaggcgctacctagcaaggtggcacaaattgaggcggccggacttaatgatgaagagatggccctcatcatcaagagattcaagacggcgctaaagggtcgcaaggggcggccaagcaagaccaagacaaaggggaagcgctcatgcttcaaatgtggtaagcttggtcattttattgctaattgtcccgataatgatagtgatcaggaccaagggaacaagagggagaagaagaagaactataagaaggcaaagggcgaggcacatctaggaaaggagtgggattctgattgctcctcctccgactccgacaatgaaggactcgccgccaccgccttcaacaagtcatccctcttccccaacgagcgtctcacatgccttatggcaagggagaagaaggtatgtagtcgaaactctacttatgcttcttcaagtgaggacgaatctagtgatgaggatgaaatagattattcatgtttgtttaagggcctagatagaacaaaggtagataaaattaatgaattgattgatgccttgaatgataagaataggcttctagaaaaacaagaggacttgttgtatgaagaacatgataaatttttagaagcacaaaaatctcatgccttagaagttaagagaaacgaaatgctttcgtgtgaattatcttcttgccatgagacaatttctagcttaaggagcattaatgatgatttgaatgctaagttagaaatggctaggaaatcaacaacttgtgtagaaaatgttgctatttgcaatagatgtaaagattttgatattgatgcttgtagtgaacacatagcttctattgcaaaattaaatgatgaaatggctagtcttaatgcccaacttaaggctagcaaaagtgattttgataaactaaaatttgctagggatgcctactcgattggtagacacccctccattaaggatgagcttggcttcaagagggaagccaagaacttaacaagccataaggctcccatctccaccaacgagaaagggaaggcccctatggcaagtagtactaaaaggaaccatgcttttatgtacaatgatagaagacagtctcataggagttgtaatgcttttgattcacatgcctatgattcttatgctatgtatgcttccagttcttcctatatgcattgtagagatatgcctaggaaaaatattcatcatgtgcctagaaagaattttgttcatgctcctaggaaagtttatgcatccgggggctcaagctggattatcgacagcggatgcacaaaccatatgacgggggagaagaagatgttcacctcctacgtcaagaataaggatttccaagattcaatcatattcggtgatgggaaccaaggcaaggtgaaagggttaggcaagattgcaatatccaatgagcactctatctctaatgtgtttttagttgagtctcttggatataatttattatctgtcagtcaattatgtaatatgggatataattgtctatttacaaatgtagatgtgtctgtgtttagaagatgtgacggttcactagcttttaagggtgtactagacggcaaactttatttggttgattttgcaaaagaagaggccggtctagatgcatgcttaatggctaagacttgcatgggctggttgtggcatcgccgcttagcacatgtggggatgaagaacctccacaagcttctaaagggagaacacatgataggtctaaccaatgttcatttcgaaaaagatagaccttgtgcagcttgtcaagcaggtaaacaagtgggaggagcacatcacagcaagaatgtgatgaccacgtcaagacctctggagctgctgcatatggacctcttcggacccgtcgcctatctgagcatagggggaaggttgaaagttgcctag

SEQ ID NO: 4835 - DNA, 1497 bp, Zea mays
  Clone ID: TF_ZM4956.C1.o12.fg
atggatcctaagggcaaggggatggtgatcaacgacaaggagaaggagaccttcgtcaacgagctcaatgatgacaagcccaccgactcaggctcgggccacaaaagaaaagacgggaggaaaaagaagacaaggcgcatcaaggaaattgtctactacgacagcgacgaatcttcctcctcccaaaaggacgacgacgaccacgatagacgaaagacggttaactcaaacttttctttcgattattcgcgcatcccgcatagttcaaatgctcaattgcttcccattccacttggcaagccccctcactttgatggagaggactacggattttggagccacaaaatgcgtactcacctgttttctctccatccaagcatttgggagattgtggaaagtggaatgaaatttgatagctcggatagccctgtgtttattaatgaacagattcataaaaatgcacaagctactactgtgttgctagcctctttgtgcagggacgagtatcacaaggtgagcggcttggacaatgccaagcagatctgggacaccctcaagatctctcatgagggaaacgacgtcaccttgctcaccaaaatggagttggtggaaggcgagcttggacggttcgcgatgataaggggcgaggagccgacacaaacatacaaccggctcaagacccttatcaacaaaataaggagctacgggagcacgcgatggacggaccacgacgtcgtctgcctaatgctaaggtcatttaccgttcttgatcctcatttggtgaacaatattcgtgaaaatcccaggtacaccaagatgtcgcctgaagaagttcttgggaaattcgttagcgggcgaatgatgatcaaggaggcgaggtacgtggacgacgccttgaatggtccgatcaacgagccacaaccccttgctctcaaggcaacacgaagcaaggaggcgctacctagcaaggtggcacaggttgaggcggccggacttaatgatgaagagatggctctcatcatcaaaagattcaagacggtgcttaaagatcgcaagggacagccaagcaagaccaaagccaaggggaagcgctcatgcttcaaatgcggtaagcttggtcattttattgctaactgtcccgacaatgatagtgaccaggatcaagggaataagagggagaaaaagaagaactataagaaggcaaagggcgaggctcatcttggcaaggagtgggattcggactgctcctcgtccgactccgacaatgagggactcgccgccactgccttcaacaagtcattcctcttccccaacgagcgtcacacttgcctcatggcaagggagaagaaagtaagcactcctaatactagtacttatgcttcttcaagtgaggatgagtctagtgatgatgatgagatagattactcatgcttattcaagggattagatagaactaaggaatatactgttagaaaagcaagaggatttgttgtatga

SEQ ID NO: 4836 - DNA, 4830 bp, Zea mays
  Clone ID: TF_ZM4957.C1.o6.fg
atggatcctaaggggaagggaattgtgataaacgacaaggagaaggagtccttcgtcaacgagccaagggatgacaagtccaatgactcgggctcgggccacaagcgaagagatgggaagaagaagaagacaagacgcatcaaggagatcgtctactacgacagcgatgagtcctcttcttcccaaaagaacgacgaccacgacaaacaaaggaaaccggttaattcgaacttttcatttgattattctcgtattccacatagttcgaattcgcatttgctttccattcctcttggtaaacctccacattttgatggggaggactacggattttggagtcacaaaatgcgtagtcatttattctctctccatccaagcatatgggagattgtagagaatggaatgaaatttgatagctcggatagccctatgtttatcaatgaacaaattcataaaaatgcacaagctactactgttctcttagcatctttgtgcagggaagagtacaataaggtgagcggcttggacaatgccaagcagatatgggacaccctcaagatctctcacgaggggaacgacatcaccatgctcaccaagatggagttggtggagggcgagcttggacgattcgccatgataaggggagaagagccaactcaaacttacaaccggctcaagacccttatcaacaagataaggagctacggaagcacgcgttggacggatcacgacgtcgtccgcctaatgctcaggtcatttaccgttcttgatcctcatctcgtgaacaatattcgtgagaaccccaggtacacgatgatgacgcccgaagaagtacttggaaaattcgtgagcgggcggatgatgatcaaggaggcaaggtacgtcgatgacgcgttgaacggtccaatccacgagcctcaacccattgctctcaaggcatcgaggagcaaggaggcactaccaagcaaggtggcgcaaattgaggcggccgggcttaatgatgaagaaatggctctcatcattaagcgcttcaagacggtgctaaagggtcgcaatggacagccgagcaagactaagaccaaggggaagcgatcatgcttcaaatgcggtaagcttggtcattttattgctaactgtcctgataatgaaagtgaccaggaaaagggaaacaagagggaaaagaagaagcattataagaaggcaaagggtgaggcgcatctaggcaaggagtgggactcggattgctcctcgtccgactccgacaatgaaggactcgccgccaccgccttcaacaaatcaaccctcttccccaacgagcgtcacacatgccttatggcaagggagaagaaggtatgtactcgcaactctacctatgcttcttcaagtgaggacgaatctagtgatgaggatgaagtagattattcatgtttgttcaagggcttagatagatctaagatagacaaaattaatgaattaattgatgccttgaatgaaaagaatatacttttagaaaagcaagaggatttgttgtatgaagagcatgataaatttgttgaggcacaaaaatcctatgctttagaggttaaaagaaatgaaatgctttcttttgaactatctacttgtcatgaaaccatttctactttgaaaggtgtcaacaatgatttaaatgctaaattagaagtagcaaataaatccaactcttgtgttgaacatgttgaaatttgcactaggtgtaaggatgttgatattaatgcctgtagtgaacacttagtttccatttcaaaattgagtgatgaagtagctagtcttaatgctcgacttaagactagcaaaagtgattttgaaaaactaaaatttgctagggatgcctacacggttggtagacacccctcaattaaggatggacttggcttcaagagggaagccaagaacttaacaagtcataaggctcccattcccgccaaggagaaagggaaggcccctatggctactagtgctaaaaggaaccatgcctttttgtatcatgataaaagacaaactagaaatagaagttatgatgcttttgattcatatgtttatgattctcatgccataaaggatagaaaagtaattgctaggaagttaggggcaaaatgcaaaggtgataaaacttgcatttgggtccctaaggaaattgtgactaaccttgtaggacccaacaagagttgggtttatgcatccgggggttcaagctggattatcgacagcggatgcacaaaccatatgacgggggagaagaagatgttcacctcctacgtcaagaataaagattcccaagattcaattgtattcggtgatgggaatcaaggcaaggataagtctgaaacccaagggaccctcaagcgctttctcaggagagctcaaaatgagtttgagctcaaggtgaagaagataaggagcgacaacgggtccgagttcaagaaccttcaagtggaggagttccttgaagaagaggggatcaagcacgagttctccgctccctatacaccacagcaaaatggtgtggtagagaggaagaacaggacgctcatcgacatggcgaggacgatgctaggagaattcaagacacccgagtgcttttggacggaagccgttaacactgcttgccacgccatcaacagggtctaccttcatcgcctcctcaagaagacgtcgtatgagctactaaccggtaacaaacccaatgtatcgtactttcgtgtatttgggagtaaatgctacattctagtaaagaagggtagaaattctaagtttgctcccaaagctgtagaagggtttttattaggttatgactcaaatacaaaggcgtatagagtcttcaacaaatcatcgggtttggttgaagtctctagcgacgttgtatttgatgagactaatggctctccaagagagcaagttgttgattgtgatgatgtagatgaagaagatgttccgacggccgctatacggaccatggcgattagagaagtacggccacaggaacaagatgatcaagatcaaccctcttcctcaattatggtgcatcccccgactcaagatggtgaacaggttcatcaaaaggaggcatgtgatcaagggggagcacaagataatcatgtgatggaggaagaagcgctaccggcacctccaacccaagttcgagcgatgattcaaagggatcatcccgtcgaccaaattctgggtgacattagcaagggagtaactactcgatctcgattagttaatttttgtgagcattactcctttgtctcttctattgagcctttcagggtagaagaggccttgctagatccggactgggtgttggccatgcaagaggagttaaacaacttcaagcgcaatgaagtttggacactggtgcctcgtccaaagcaaaatgttgtgggaaccaagtgggtgttccgcaacaaacaggacgagcacggggtggtgacgaggaacaaggctcgacttgtggcaaaaggttatgcccaagtcgcaggtttgaatttcgaggagacctttgctcctgtggctaggctagagtcaattcgaatcttgctagcatatgccgctcaccattctttcaggttgtaccaaatggatgtgaagagcgctttcctcaacgggccaatcaaggaggaggtgtacgtggagcaaccccctggctttgaggatgaacggtaccccgaccatgtgtgtaagctctctaaggcgctctatggacttaagcaagccccaagagcatggtatgaatgccttagagactttttacttgctaatgctttcaaggttgggaaggccgatccaactctttttacaaagacatgtgatggtgatttgtttgtgtgccaaatttatgtcgatgacataatatttggttctactaaccaaaagtcttgtgaagagtttagcagggtgatgacgcagaaattcgagatgtcgatgatgggcgagttgaactacttccttgggttccaagtgaagcaactcaaggacggcaccttcatctcccaaacgaagtacacgcaagatctgctaaagcggtttgggatgaaggacgccaagcccgcaaagactccgatggggaccgacggacacaccgacctcaacaaaggaggtaagtccgttgatcaaaaagcataccggtcaatgataggttctttgctttacttatgtgctagtagaccagatattatgcttagcgtatgcatgtgtgctagatttcaatccgatcctaaggaatgtcacttagtggcggtgaagcgaattcttagatatttagttgctacgccttgcttcgggctctggtatccaaaggggtctacctttgacttagttggatactcagactccgactatgctggatgtaaggtcgataggaagagtacatcggggacgtgccaattcttaggaaggtccctggtgtcatggaactctaagaaacaaacctccgttgccctatccaccgctgaggccgagtatgttgccgcaggacagtgttgcgcgcaactactttggatgaggcaaaccctcagggactttggctacaatctgagcaaagtcccactcctatgtgacaatgagagtgctatccgcatggcggagaatcctgttgaacacagccgcacaaagcacatagacatccggcatcactttttgagagaccaccagcaaaagggagatatcgaagtgtttcatgttagcaccgagaaccagctagccgatatcttcactaagcctctagatgagaagaccttttgcaggttgcgtagtgagctcaatgtcttagattcgcggaacttggattga

SEQ ID NO: 4837 - DNA, 1497 bp, Zea mays
  Clone ID: TF_ZM4958.C1.o3.fg
atggatcctaagggcaaggggatggtgatcaacgacaaggagaaggagaccttcgtcaacgagctcaatgatgacaagcccaccgactcaggctcgggccacaaaagaaaagacgggaggaagaagaagacaaggcgcatcaaggaaattgtctactacgacagcgacgaatcttcctcctcccaaaaggacgacgacgaccacgatagacgaaagacgattcataaaaatgcacaagctactactgtgttgctagcctctttgtacagggacgagtatcacaaggtgagcggcctggacaatgccaagcagatctgggacaccctcaagatctctcatgagggaaacgacgtcaccttgctcaccaaaatggagttggtggaaggcgagcttggacggttcgcgatgataaggggcgaggagccgacacaaacatacaaccggctcaagacccttatcaacaaaataaggagctacgggagcacgcgatggacggaccacgacgtcgtccgcctaatgctaaggtcatttaccgttcttgatcctcatttagtgaacaatattcgtgaaaatcccaggtacaccaagatgtcgcccgaagaagttcttgggaaattcgttagcgggcgaatgatgatcgaggaggcgagatacgtggacgacgccttgaatggtccgatcaacgagccgcaacctcttgctctcaaggcaacacgaagcaaggaggcgctacctagcaaggtggcacagattgaggcggccggacttaatgatgaagagatggctctcatcatcaaaagattcaagacggtgcttaaagatcgcaagggacaaccaagcaagaccaaagccaaggggaagcgctcatgcttcaaatgcggtaagcttggtcattttattgctaactgtcccgacaatgatagtgatcaggatcaagggaacaagagggagaaaaagaagaactataagaaggcaaagggcgaggctcatcttggcaaggagtgggattcggactgctcctcgtccgactcagacaatgaaggactcgccgccactgccttcaacaagtcatccctcttccccaacgagcgtcacacttgcctcatggcaagggagaagaaagataagtctgaaacccaagggaccctcaagcgcttcctaaggagagctcaaaatgagtttgagctcaaagtgaaaaagataaggagcgacaatgggtccgagttcaagaaccttcaagtggaggaatttcttgaggaggaggggatcaagcacgaattctccgctccctacacacctcagcaaaatggtgtgatgaagaagatgttccgacggccgctatacgaaccatggcgattggagaagtgcggccacaggaacaagatgaacgagatcaaccttcttcctcaacaacagtgcatcccccaactcaagacgatgaacaggttcatcaaaaggaggcgtgtgatcaagggggagcacaagatgatcacatga

SEQ ID NO: 4838 - DNA, 5496 bp, Zea mays
  Clone ID: TF_ZM4960.C1.o7.fg
atggatcctatgggaaaggggatggtggtcaacaacaacgagaaggagtctatcttcaacgagccgaaggatgacaagcctaccgactcgggctcgagccacaagcgcaaggacgggaagaagaagaagacaaggcgcatcaaggagatcgtctactacgacagcgacgaatcttcctcttcccaaaaggacgacgacgactacgagaaaaagaaaacggtcaattcgaacttttcatttgattactctcgtattcctcaaaatacaaatgctcatttattatctattccacttggtaaacctcctcattttgatggagaggactacggattttggagtcacaaaatgcgtagtcatttgttctctctccatccaagcatatgggagatagttgagaatggaatgcattttgatagtagtgataatcccatgtttatcaatgagcaaattcataaaaatgcacaagctactactgttcttctagcttctttgtgcagggatgaataccacaaagtgagcggcttggataacgccaagcaaatttgggacaccctcaagatctctcatgaggggaatgatgtcacaatgctcaccaagatggagttggtggaaggcgaactcgggagattcgctatgataaggggagaagagccaactcaaacgtacaaccggctaaagacccttgtcaacaagataagaagctatggaatctatggaagcacgcgatggacggatcacgacgtcgtctgcctaatgctaaggtcttttactgtccttgatcctcatcttgtaaacaatattcgtgagaatcctaggtacaccaagatgacgcccgaggagatacttggaaagttcgtgagcgggcgaatgatgatcaaggaagcaagatacgtggacgacgcattgaatggtccaatcaatgagcctcaacctcttgctctcaaggcaacaagaagcaatgagacgctacctagcaaggtggcacaaattgaggcggccggacttaatgatgaagagatggctctcatcatcaagagattcaagacggcgctaaaaggtcgcaaggggcagccaagcaagaccaagacaaaggggaagcgctcatgcttcaaatgtggtaagcttggtcattttattgctaactgtcctgacaatgatagtgatcaggatcaagggaacaagagggaaaagaagaagaactataagaaggcaaagggcgaggcgcatctaggcaaggagtgggattcgaattgctcctcttccgactccgacaatgaaggactcgccgccaccgccttcaacaagtcatccctcttccccaacgagcgtcacacatgccttatggcaagggagaagaaggtatgtactcgaaacactacttatgcttcttcaagtgaggacgaatctagtgatgaggatgaaatagattattcatgtttatttaagggcctagatagaaccaaggtagataaaattaatgaactgattgatgccttgaatgataagaataggcttttagaaaagcaagaggatttgttgtatgaagaacatgacaaatttgtagaagcacaaaaatctcatgctctagaagttaaaagaaatgaaatgctttcttgtgaattatcttcttgccatgagacaatttctaacttaaggagcattaatgatgatttgaatgctaagttagaaatagctagtaaatcaacatcttgtgtagaaaatgatgttatttgcaataggtgtaaagattttgacattgatgcttgtagtgaacacatagcctctattgcaaaattaaatgatgaaattgctagtcttaatgaccaacttaagactagcaaaagtgaatttgacaaattaaaatttgcaagggatgcctacacaattggtagacacccctcaattaaggatggtcttggcttcaagagggaagtcaagaacttaacaagccataaggcttccatctccacaaaggagaaagggaaggcccctatggcgagtaatgctaaaaagaaccatgcctttatgtaccatgatagaaaattttctggaaatgttcatgatgataggagttgtaatgcttataatgcttttgactctcatgccatgtttgcttctagttcttcctatatgcacggtagaaatgtgtttagaagaaatgttgttcatcatatgcctaggagaaatgttgtcaatatacctaggaaagttaatgaaccttctacaatttatcatgcttgtgatgcttcatttgcaatttgtggaaaggatagaaaggtttatgcatccgggggttcaagctggattatcgatagcggatgcacaaatcatatgacaggggagaagaagatgttcacctcctacgtcaagaacaaggattcccaagattcaattatattcggagatgggaatcaaggcaaggtgaaaggattaggcaaaattgcaatatctaatgagcactctatatctaatgtgtttttagttgagtctcttggatataacttgctatctgttagtcaattatgcaatatgggatataattgtctatttacaaatgtagatgtgtctgtctttagaagaagtgatggttcactatcttttaagggtgtattagacggcaaactttatgtagttgattttgcaaaagaggaggccggtctagatgcatgcttaattgctaagactagcatgggctggctgtggcatcgccacttagcacatgtggggatgaagaaccttcacaagcttctaaagggagaacacgtgataggtctaaccaatgttactttcgaaaaagatagaccttgtgcagcttgtcaagcaggtaagcaagtgggaggagcgcatcacagcaagaatgtgatgaccacatcaagacccctggagctgctacatatggacctcttcggacccgtcgcctatctaagcataggaggaagtaagtatggtctagttattgttgatgacttttcccgcttcacttgggtgttctttttgcaggataagtctgaaacccaagggaccctcaagcgcttcctaaggagagctcaaaatgagtttgagctcaaggtgaagaagataaggagcgacaacgggtccgaattcaagaaccttcaagtggaggagtttcttgaggaggaagggatcaagcacgagttctccgctccctacacaccacaacaaaatggtgtggtagagaggaagaacagaacgctcatcgatatggcgaggacgatgcttggagagttcaagacccccgagtacttttggtcggaagccgtgaatacggcttgccacgccatcaatagggtctaccttcatcgcctcctcaagaagacgtcgtatgagctgctaaccggtaacaaacccaatgtatcgtactttcgtgtatttgggagtaaatgctacattctagtgaagaagggtaggaattccaaatttgctcccaaagctgtagaagggtttttgttaggttatgactcaaatacaaaggcgtatagagtcttcaacaaatcatcaggtttggttgaagtctctagcgacgttgtatttgatgagactaatggctctccaagagagcaagttgttgatcttgatgatgtagatgaagaagatgttccgacggccgctatacgaaccatggcgattggtgatgtacgaccacaggaacaaaaggagcaagatcaaccttcttcctcaaccatggtgcatcccctaactcaagacgatgaacaggttcatcaacaggaggcgtgcaatgaagggggagcacaagatgatcatatgatggaggaagaaactcaaccggcacctccaacccaagttcgagcgatgattcaaagggatcatcccgtcgatcaaattcttggtgatattagcaagggagtaactactcgatctcgattagttaatttttgtgagcattactcttttgtctcttctattgagcctttcagggtagaggaggccttgctagatccggactgggtgttggccatgcaagaggagctcaacaacttcaagcgcaatgaagtttggacacttgtgccttgtcccaagcaaaatgttgtgggaaccaagtgggtgttccgcaacaaacaagacgagcacggagtggtgacaaggaacaaggctcgacttgtggcaaaaggttatgcccaagtcgcaggtttggactttgaggagacttttgctcctgtggctaggctagagtcaattcgtattttgctagcatatgccgctcaccattctttcaggttattccaaatggatgtgaagagcgctttcctcaacgggccaatcaaggaggaagtgtacgtggagcaaccccctggcttcgaggatgaatggtaccccgaccacgtgtgtaagctctctaaggcgctctatggacttaagcaagccccaagagcatggtatgaatgccttagagatttcttaattgctaatgctttcaaggttgggaaagtcgatccaactcttttcactaagacttgtgacggtgatctatttgtgtgccaaatttatgtcgatgacataatatttggttctactaataaaaagtcttgtgaagagtttagcagggtgatgacgcagaaattcgagatgtcgatgatgggcgagttgaactacttccttgggttccaagtgaaacaactcaagaacggcaccttcatctctcaaacgaagtacacacaagacttgctaaagtggtttgggatgaaggacgccaagcccgcaaagactccgatggggaccgacggacacactgacctcaacaaaggaggtaagtctgttgatcaaaaggcataccggtcaatgatagggtcattactttacttatgtgctagtagatcggatattatgcttagcgtatgcatgtgtgctagatttcaatccgatcctaaggagtgtcacttagtggcagtgaagagaatccttagatatttagttgctacaccttgcttcaggctctggtatccaaaggggtctacctttgacctaattggatattcagattctgactatgctggatgtaaggtcgataggaagagtacatcggggacgtgccaattcttaggaaggtccctggtgtcatggaactctaagaaacaaacttccgttgccctatccaccgctgaggccgagtacgttgccgcaggacagtgttgcacacaactactttggatgaggcaaaccctcagggactttggctacaatctgagcaaagtcccactcctatgtgataatgagagtgctatccgcatggcggaaaatcctgttgagcacagccgcacaaagcacattgacatccgacatcactttttgagagaccaccagcaaaagggagatatcgaagtgtttcatgttagcaccgagaaccagctagccgatatctttaccaagcctctagatgagaagaccttttgcaggttgcgtaattttggtgaggcaatggggttcttgggccaagattcatcccgttttggtatttga

SEQ ID NO: 4839 - DNA, 3324 bp, Zea mays
  Clone ID: TF_ZM4986.C2.o2.fg
atggatcctaaaggcaaggggatggtgatcaacgacaaggagaaggagtccttcgtcaacgagccaaataatgacaagcccaccgactcaggctcgggccacaaaagaaaagacgggaggaagaagaagacaaggcgcatcaaggaaattgtctactacgacagcgacgaatcttcctcctcccaaaaggacgacgacgactacgatagacgaaagacgattcataaaaatgcacaagctactactgtgttgctagcttctttgtgcagggacgagtatcacaaggtgagcggcttggacaatgccaagcagatctgggacaccctcaagatctctcatgagggaaacgacgtcaccttgctcaccaaaatggagttggtggagggcgaacttggacggttcgcgatgataaggggcgaggagccgacacaaacatacaaccggctcaagacccttatcaacaaaataaggagctacgggagcacgcgatggacggaccacgacgtcgtctgcctaatgctaaggtcatttaccgttcttgatcctcatttggtgaacaatattcgtgaaaatcccaggtacaccaagatgtcgcccgaagaagttcttgggaaactcgttagcgggcgaatgatgatcaaggaggcaaggtacgtggacgacgccttgaatggtccgatcaacgagccgcaaccccttgctctcaaggcaacacgaagcatggaggcgctacctagcagggtggcacagtttgaggcggccggacttaatgatgaagagatggctctcatcatcaaaagattcaagacggtgcttaaaggtcgcaagggacaaccaagcaagaccaaagccaaggggaagcgctcatgcttcaaatgcggtaagcttggtcatttcattgctaactgtcccgataatgaaagtgaccaggaaaaggggaacaaaagggagaagaagaagcattacaagaaggccaagggcgaggcacatatcggaaaggagtgggattcggattgctcctcctccgactctgacaatgaaggactcgccgccacagccttcaacaagtcatccctcttcccaacgagcgtcacacttgcctcatggcaagagagaagaaagaatatacttttagaaaagcaagaggatttgttgtatgaagagcatgataaatttgtagaagctcagaaatctcttgctctagaaattaagaggaatgaaatgctctctagtgaattatcttcttgtcatgaaactattgctaagttaaaaagttttaatgacgatttaaatgctaaactagaagtagctagtaaatctaattcttgtgtagaaattgttgaaacttgtaataggtgtaaagattttgacattgatacttgtagtgatcatttagtttcaatttccaaattaaatgatgagttagctagtcttaatgcccaacttaagactagcaagaatgaatttgacaagctaaaatttgcaagggatgcctacacgattggtagacacccctcaattaaggatggacttggctacaagagggaagccaagaacttgacaagccataaggctcccatctccgccaaggaaaaagggaaggcccctatggctagtagtgtgcaaaagaaccatgcctttatgtaccatgatagaagacaatctagaaatgcttataggagttgtaatgcatataatgtctttgattctcatgccatgtttgcttctagttcttcttatatgcatgataagaatgttggtaggagaaatgttattcataatatgcctaggaaaaatgttgttaatattcctaggaaagtttatgcatccgggggttcaagctggattatcgacagcggatgcacaaaccatatgacgggggagaagaagatgttcacctcctacgtcaagaataaggattcccaagattcaataatattcggtgatgggaatcaaggcaaggtaaaagggttagttgagtctcttggttataacttgctatctgttagtcaattatgcaatatgggatataactgtctattcacaaatgtagatgtgtctgtctttagaaggtgtgatggttcactagcatttaagggtgtattagacggcaaactttatttagttgattttgcaaaaggggaggccggtctagatgcatgcttaattgctaagactagcatgggctggttgtggcatcgccgtttagcacatgtagggatgaagaaccttcacaagcttctaaagggagaacacgtgataggtttgactaacgtgcaattcgaaaaagatagaccttgtgcagcttgtcaagcaggtaaacaagtgggaggagcgcatcacagcaagaatgtgatgaccacttcaagacccctggagctactacatatggacctcttcggacccgtcgcctatctaagcataggaggaagtaagtacggtctagttattgttgatgacttttcccgcttcacttgggtattctttttgcaggataagtctgaaacccaagggaccctcaagcgcttcctaaggagagctcaaaatgagtttgagctcaaggtgaagaagataaggagcgacaacgggtccgagttcaagaaccttcaagtggaggagttccttgatgaggaagggatcaagcacgagttctccgctccctacacaccacaacaaaatggtgtggtagagaggaagaacaggacgctcatcgatatggcgaggacgatgcttggagagttcaagacccccgagtgcttttggtcggaagccgtgaacacggcttgtcacgccatcaacagggtctaccttcatcgcctcctcaagaagacttcgtatgagctactaaccggtaacaaacccaatgtatcttactttcgtgtatttgggagcaagtgctacattctagtgaagaagggtagaaattctaagtttgctcccaaagctgtagaagggtttttgttaggttatgactcaaatacaaaggcgtatagagtcttcaacaaatcatcgggtttggttgaagtctctagcgacgttgtatttgatgagactaatggctctccaagagagcaagttgttgatcttgatgatgtagatgaagaagacgttccaacggccgccatgcgcaccatggcgattggtgatgtgcgaccacaggaacaagtggagcaagatcaaccttcttcctcaacaatggtgcatcccccaactcaagacgatgaacaggttcatcaaaaggaggtgtgtgatcaagggggagcacaagatgatcacgtgatggaggaagaagcgcaaccggcacctccaactgagagcacctag

SEQ ID NO: 4840 - DNA, 2121 bp, Zea mays
  Clone ID: TF_ZM4986.C3.o1.fg
atggatcctaaagggaagggaatcgtgatcaacgacaaggaaaaggagtccttcgtcaacgagccaaaagatgacaaatccaacgactctggctcgggccacagacgtaaagatgggaagaagaagaagacaagacgtatcaaggagatcgtctactacgacagcgacgagtctacttcttcccacaaggacgacgactacgacaaacataagacagttaactcatacttttcttttgattattcgcgcattccgcacagctcaaatgctcatttgctccccattccacttggcaagcctcctcactttgatggagaggactacggattttggagtcacaaaatgcgtacacacctattttctctccatccaagaatttgggagattgtggaaagtggaatgaaatttgatagctcggatagtccttcgtttattaatgaacagatccataaaaatgcacaagctactactgtgttgctagcctctttgtgcagggacgagtatcacaaggtgagcggcttggacaatgccaagcaaatttgggacaccctcaagatctctcatgaggggaatgatgtcaccttactcaccaagatggagttggtggagggcgagctcggacgattcgcgatgataaggggcgaggagccgacgcaaacatacaaccggctcaagatccttatcaacaaaataaggagctacggaagcacgcgatggacggatcacgacgtcgtccgcctaatgctaaggtcatttaccgttcttgatcctcatctcatgaacaatattcgtgggaatcccaggtacacgaagatgacgcccgaggaggtactcggaaaattcgtaagcgggcgaatgatgatcaaggaggcaagatacgtggacgacgccttgaatggaccgatcaacgagcctcaaccccttgctctcaaggcaacaaaaagcaaggaggcgctacctagcagggtggcacaaattgaggcggccgaacttaatgatgaagagatggccctcatcatcaaaagattcaagacggcgcttaaaggtcgcaagggacagccaagcaagaccaaagccaaggggaagcgttcgtgcttcaaatgcggtaagcttggtcattttattgctaactgtcccgacaatgatagtgatcaggaccaagggaacaagagggagaagaagaagaattataagaaggcaaagggcgaggctcatcttggcaaggagtgggattcggactgctcctcgtctgactccgacaatgagggactcgccgccactgcattcaacaagtcatccctcttccccaacgagcgtcacacttgcctcatggcaagagagaaggtaatcactcgtaatgatatcacttatgattcttctagtgacgatgagtctagtgatgatgaaatagattactctagtttgttcaagggattggataaaaataaaattgataaaatcaatgaattgattgatgccttgaatgaaaaggataggcttttagaaaagcaagaggatttgttgtatgatgaacatgataagtttatagaggcacaaaaatcctatgctttagaagttaaaagaaatgaagtgctttctagtgaattatcttcttgtcatgaaaacattgctactttaaagagtgttaatgatgacttaaatgctaaactagaagtagctagtaaatcaacatcttgtgtagaaattgttgaaacgtgcactaggtgtaaagatcttaatgttgatgcttgtagtaaacatctagtttcaatttctaaattgaatgatgaagtggctagtcttaatgctcaacttaaggctagcaaaagcgaatttgataaactaaaatttgcaagggatgcctacacgatcggtagacacccctcaattaaggatggacttggcttcaagagggaagccaagaacttaacaagccataaggctcccattcccgctaaggagaaagggaaggcccctatagctactagtgctaaaaagaaccatgcctttttgtatcatgataggagacaaactagaaatgcttataggagttataatgcttacgatgatttttctcatgctatgtttgcttctagttcttcatatgtgcatgatagaaat

SEQ ID NO: 4841 - DNA, 4719 bp, Zea mays
  Clone ID: TF_ZM4988.C1.o3.fg
atggatcctaagggcaaggggatggtgatcaacgacaaggagaaggagaccttcgtcaacgagctcaatgatgacaagcccaccgactcaggctcgagccacaaaagaaaagacgggaggaagaagaagacaaggcgcatcaaggaaattgtctactacgacagcgacgaatcttcctcctcccaaaaggacgacgacgaccacgatagacgaaagacggttaactcaaacttttctttcgattattcacgcatcccgcatagttcaaatactcaattgctccccattccacttggcaagccccctcactttgatggagaggactacggattttggagccacaaaatgcgtactcacctgttttctctccatccaagcatttgggagattgtggaaagtggaatgaaatttgatagctcggatagtcctgtgtttattaatgaacagattcataaaaatgcacaagctactactgtgttgctagcctctttgtgcagggacgagtatcacaaggtgagcggcttggacaatgccaagcagatctgggacaccctcaagatctctcatgagggaaacgacgtcaccttgctcaccaaaatggagttggtggaaggcgagcttggacggttcgcaatgataaggggcgaggagccaacacaaacatacaaccggctcaagacccttatcaacaaaataaggagctacgggagcacgcaatggacggaccacgacgtcgtccgcctaatgctaaggtcatttaccgttcttgatcctcatttagtgaacaatattcgtgaaaatcccaggtacaccaagatgtcgcccgaagaagttcttgggaaattcgttagcgggcgaatgatgatcaaggaggcgagatacgtggacgacgccttgaatggtccgatcaacgagccgcaacctcttgctctcaaggcaacacgaagcaaggaggcgctacctagcaaggtggcacagattgaggcggccggacttaatgatgaagagatggctctcatcatcaaaagattcaagacggtgcttaaaggtcgcaagggacagccaagcaagaccaaagccaaggggaagcgctcatgcttcaaatgcggtaagcttggtcattttattgctaactgtcccgacaatgatagtgaccaggatcaagggaataagagggagaaaaagaagaactataagaaggcaaagggtgaggctcaccttggcaaggagtgggattcggactgctcctcgtccgactccgacaatgagggactcgccaccactgccttcaacaagtcatccctcttcccaaacgagcatcacacttgcctcatggcaagggagaagaaagtaagcactcctaatactagtacttatgcttcttcaagtgaggatgagtctagtgatgatgatgagatagattactcatgcttattcaagggattagatagaactaaggtagacaaaattaatgaattgattgatgccttgaatgataggaatatactgttagaaaagcaagaggatctgttgtatgaagaacatgataaatttgtagaagctcagaaatctcttgctctagaaattaagaggaatgaaatgctctctagtgaattatcttcttgtcatgaaactattgctaagttaaaaatttttaatgatgatttaaatgctaaactagaagtagttagtaaatctaactcttgtgtagaaattgttgaaacttgtaataggtgtaaagattttgacattgatgcttgtagtgatcatttagtttcaatttctaaattaaatgaggaattagctagtcttaatgcccaacttaagactagcaagaatgaatttgacaagctaaaatttgcaagggatgcctacacgattggtagacacccctcaattaaggatggacttggctacaagagggaagccaagaacttgacaagccataaggctcccatctccgccaaggagaaaggaaaagcccctatggctagtagtgtgcaaaagaaccatgcttttatgtaccatgataggagacaatctagaaatgcttataggagttgtaatgcatataatgtctttgattctcatgccatgtttgcttctagttcttcttatgtgcatgatagaaatgttggtaggagaaatgctattcataatttgcctaggagaaatgttgttaatgttcctaggaaagtttatgcatccgggggttcaagctggattatcgacagcggatgcacaaaccatatgacgggggagaagaagatgttcacctcctacgtcaaaaacaaagattcccaagattcaataatattcggtgatgggaatcaaggcaaggataagtctgaaacccaagggaccctcaagcgcttcctcgggagagctcaaaatgagtttgagctcaaggtgaagaagataaggagcgataacgggtccgagttcaagaactttcaagtggaagagttccttgaggaggaagggatcaagcatgagttctccgctccctacacaccacagcaaaatggtgtggtagagaggaagaacaggacgctaatcgacatggcgaggacgatgcttggagaattcaagacccccgagcgtttttggtcggaagccgtgaacacggcttgccacgccatcaacagggtctaccttcatcgcctcctcaagaagacttcgtatgagctactaaccggtaacaaacccaatgtatcttactttcgtgtatttggaagcaagtgctacattctagtgaagaagggtagaaattctaaatttgctcccaaagctgtagaagggtttttgttaggttatgactcaaatacaaaggcgtatagagtcttcaacaaatcatcgggtttggttgaagtctctagtgacgttgtatttgatgagactaatggctctccaagagagcaagttgttgattgtgatgatgtagatgaagaagatgttccgacagccgctatacgaaccatggcgattggagaagtgcggccacaggaacaagatgaacgagatcaaccttcttcctcaactatggtgcatcccccaaccgaagatgacgaacaggtacctcaagtggaggcgcttgatcaagggggagcacaagatgatcaagtgatggaggaagaagcgcaactggcacctctgacccaagttcgagcgatgattcaaagggatcatcccgtcgaccaaattctgggtgatattagcaagggagtaactactcgatctcgattagttaatttttgtgagcattactcctttgtctcttctattgagcctttcagggtagaagaggccttgctagatccggactgggtgttggccatgcaggaggaactcaacaacttcaagcgcaatgaagtttggacactggtgcctcgtcctaagcaaaatgttgtgggtgtttcgcaacaaacaagacgagcacggagtgatgacaaggaacaaggctcgacttgtggcaaaaggttatgcccaagtcgcaggttgtaccaaatggatgtgaagagcgctttcctcaatgggccgatcaaggaggaggtgtacgtggagcaaccccctggtttcgaggatgaacggtaccccgaccacgtgtgtaagctctctaaggcgctctatggacttaagcaagccccaagagcatggtatgaatgccttagagactttctaattgttaatgctttcaaggttgggaaagccgatccaactctttttacaaagacatgtgatggtgatttgtttgtgtgccaaatttatgtcgatgacataatatttggttctactaaccaaaagtcttgtgaagagtttagcagggtgatgatgcagaaattcgagatgtcgatgatgggcgagttgaactacttccttgggttccaagtgaagcaactcaaggacggcaccttcatctcccaaacgaagtacacgctagacctgctgaagcggtttgggatgaaggacgccaagcccgcaaagactccggtggggaccgacggacacaccgacctcaacaaaggaggtaagtccgttgatcaaaaagcataccggtcaatgatagggtctttactttatctatgtgctagtagaccggatattatgcttagcgtatgcatgtgtgctagatttcaatccgatcctaaggagtgtcacttagtggcggtgaagcgaattcttagatatttggttgctacgccttgcttcgggctctggtatccaaaggggtctacctttgacttggttggatactcagattccgactatgctggatgtaaggtcgataggaagagtacatcggggacgtgccaattcttaggaaggtccctggtgtcgtggaactctaagaaacaaacttctgttgccctatccaccgttgaggccgagtatgttgccgcaggacagtgttgcgcgcaactactttggatgaggcaaaccctccgggactttggctacaatctgagcaaagtcccactcctatgtgataatgagagtgctatccgcatggcggaaaatcctgttgaacacagccgcacaaagcacattgacatccggcatcactttttgagagaccaccagcaaaagggagatatcgaagtgtttcatgttagcaccgagaaccagctagccgatatctttaccaagcctctagatgagaagaccttttgcaggttgcgtagtgagctaaatgtcttagattcgcggaacttggattga

SEQ ID NO: 4842 - DNA, 1302 bp, Zea mays
  Clone ID: TF_ZM4989.C9.o3.fg
atggatcctaagggaaaggggatggtggtcaacaacaacgagaaggagtctatcttcaacgagccgaaggatgacaagcctaccgactcggtctcgagccacaagcacaaagacgggaagaagaagaagacaaggcgcatcaaggagatcgtgtactatgacagcgacgaatcttcctcttcccaaaaggacgacgactacgagaaaaagaaaacggtcaattcgaacttttcttttgattactctcgtattcctcaaagtacaaatgctcatttattatctattccacttggtaaacctcctcattttgatggagaagactacggattttggagtcacaaaatgcgtagtcacttgttctctctccatcctagtatatgggagattgtagagagtggagtgcactttgatagtacggatagtcccatgttcattaatgagcaaattcataaaaatgcacaagctactactgttcttctagcttcattgtgcagggatgaataccacaaagtgagcggcttggataacgccaaacaaatttgggacaccctcaagatctctcatgaggggaatgacgtcacaatgctcaccaagatggagttggtggagggcgaactcgggagattcgctatgataaggggagaagagccaacccaaacgtacaaccggctcaagacccttgtcaacaagataagaagctatggaagcacgcgatggacggaccacgacgtcgtccgcctaatgctaaggtcttttactgtccttgatcctcatcttgtaaacaatattcgtgagagtcctagtgggcgaatgatgatcaaggaagcaagatacgtggacgacgcattgaatggtccaatcaatgagcctcaacctcttgctctcaaggcaacaagaagcaaggagacgctacctagcaaggtagcacaaattgaggcggtcggacttaatgatgaagagatggctctcatcatcaagagattcaagacggcgctaaaaggtcgcaaggggcagccaagcaagaccaagacaaaggggaagcgctcatgcttcaaatgtggtaagcttggtcattttattgctaactgtcccgataatgatagtgatcaggatcaagggaacaagagggagaagaagaagaactataagaaggcaaagggcgaggcgcatctaggcaaggagtgggattcggattgctcctcttctgactccgacaatgaaggactcgccgccaccgccttcaacaagtcatccctcttccccaacgagcgtcacacatgccttatggcaagggagaagaag

SEQ ID NO: 4843 - DNA, 5229 bp, Zea mays
  Clone ID: TF_ZM4990.C4.o2.fg
atggatcctaaggggaagggaattgtgatcaacgacaaggagagggagtccttcgtcaacgagccaagggatgacaagtccaacgactcaagctcgggccacagacgcaaagatgggaagaagaagaagacaagacgcatcaaggagatcgtctactacgacagcgatgagtctacttcttcccaaaaggatgaggacaacgactacaaacaaaagacggttaactcgaacttttcatttgattattctcgtattcctcaaagttcgaattcgcatttgctttccattccactcggcaagcccccacactttgatggagaagactacggattttggagccacaaaatgcgtagtcacctattctctctccatccaagcatatgggagattgtagagagtggaatgaaatttgatagctcggatagtcctgtgattataaatgaacaaattcatagaaatgcacaagctactactgttctcttagcatctttgtgtagggaagagtacaataaggtgagcggcttggacaatgccaagcaaatatgggacaccctcaagatctctcacgagggcaacgacgtcaccatgctcaccaagatggagctggtggagggcgaacttgggagatttgctatgataaggggggaggagccaacccaaacatacaatcggctcaagacccttgtcaacaaaataaggagctacgggagcacgcgatggacggatcacgacgtcgtccgcctaatgctaaggtcttttaccattcttgatcctcatttggtgaacaacattcgtgaaaatcctaggtacaccaagatgtcgcctgaagaaattcttgggaagttcgtaagcgggcggatgatgattaaggaggcaagatatgtggacgacgcgttgaacggtcctattcatgagcctcaacccgttgctctcaaggcaacaaggagtaaggaggcgctaccaagcaaggtggcgcaagttgaggcggccgggctaaataatgaggagatggccctcatcataaagcgcttcaagacggcgcttaaaggtcgcaagggacagccaagcaagaccaaagccaaggggaagcgctcatgcttcaaatgcggtaagcttggtcattttattgctaactgtcccgacaatgatagtgatcaggaccaagggaacaagagggaaaagaagaagcactacaagaaggcaaagggcgaggcgcatctaggcaaggaatgggactcggattgctcctcttccaactccgacaatgaaggactcgccgccaccgccttcaacaaatcaaccctcttccccaacgagcgtcacacatgcctgatggcaagtgagaagaaggtatgtactcggaactctacctatgcttcttcaagtgaggacgaatctagtgatgaagatgaagtagattactcatgtttgtttaagggtctagatagaaccaaggtagacaaaattaatgaattgattgatgctctaaatgagaagaacatgcttttagagaaacaagaggatttattgtatgaagaacatgataaatttatagaagctcaaaaatcctatgctttagaagttaaaagaaatgaattgctttcttttgaactatctacttgtcatgaaaccatctctactttaaaaggtgtcaacaatgatttaaatgctaaattagaagtagcaaataaatccaattcttgtgtagaacatgtcgcaatttgttctaggtgtaaagattttgatattaatgcttgtagtgaacacttagtttctatttcaaaattaaatgatgaattagctagtcttaatgcacaacttaagactagcaagagtgattttgataaactgaaatttgctagggatgcctacactgttggtagacacccctccattaaggatggacttggcttcaaaagggaagccaagaacttaacaagccataaggctcccattcccgcaaaggagaaagggaaggcccctatggctactagcactaaaaagaaccatgcttttttatatcatgatagaagacaatctagaagtgcttataggggttataatgcttatgatgattttgattctcatcacatgattgcttctagctcttcatatatgcatggtagaaatatgtctaggagaaatgctattcatcatgtgcctagaaagaatgttagtcatgcttctaggaaagtagtaaatgaaccttctacaatttattgtgctttaaatgcttcctttgctattcgtagaaaggataagaaaattgttgctaggaagttaggggcaaaatgcaagggtgacaaaacttgcatttgggtccctaaggatatttgcactaaccttgtaggacccaacatgagttgggtttatgcatccgggggttcaagctggattatcgacagcggatgcacaaaccatatgacgggggagaagaaaatgttcacctcctacgtaaaaaataaagattcccaagattcaattatattcggtgatgggaatcaaggcaaggtaaaaggtttagatgtgtctgtctttagaagaagtgatggttcactagcttttaaaggtgtattagacggcaaactttatttagttgattttgcaaaagaagaggccggtctagatgcatgcttaatagctaagactagcatgggctggctgtggcatcgccgcttagcacatgtggggatgaagaacctccataagcttctaaagggagaacacgtgataggtctaactaatgttcaattcgaaaaagatagaccttgtgcagcttgtcaagcagggaaacaggtgggaggctctcatcacaccaaaaatgtgatgacaacatcaagacccttggagatgctgcatatggacctcttcggacccgtcgcctatctgagcataggaggaagtaagtatggtttagttattgttgatgacttttcccgcttcacttgggtgttctttttacaggataagtctgaaacccaagggaccctcaagcgcttcctcaggagagctcaaaatgagtttgagctcaaagtgaagaagataaggagcgacaacgggtccgagttcaagaaccttcaagtggaggagttccttgaagaggaagggatcaagcacgagttctccgctccctacacaccacagcaaaatggtgtggtagagaggaagaacaggacgctcatcgacatggcgaggacgatgctaggagagttcaagacccccgagtgcttttggacggaagccgttaacacggcttgccacgccatcaacagggtctaccttcatcgcctcctcaagaagacgtcgtatgagctactaaccggtaacaaacccaatgtatcttactttcgtgtatttgggagcaagtgctacattctagtgaagaagggtagaaattctaaatttgctcccaaagctgtagaagggtttttgttaggttatgactcaaatacaaaggcgtatagagtcttcaacaagtcatcgggcttggttgaagtctctagcgacgttgtatttgatgagactaatggctctccaagagagcaagttgttgatcttgatgatgtagatgaagaagatgttccaacggccgctatgcgcaccatggcgattggtgatgtgcgaccacaggaacacttggagcgagatcaaccttcttcctcaactatggtgcatcccccaactcaagacgatgaacagcctttcagggtagaggaggccttgctagatccggactgggtgttggccatgcaggaagagctcaacaacttcaagaggaatgaagtttggacgctggtgcctcgtccgaagcaaaatgttgtgggaaccaagtgggtgttccgcaacaaacaggacgaacatggggtggtgacgagaaacaaggctcgacttgtggcaaaaggttatgcccaagtcgcaggtttggatttcgaggagacttttgctcctgtggctaggctagagtccattcgaatcttgctagcatatgccgctcaccattctttcagattgtaccaaatggatgtgaagagcgctttcctcaacgggccaataaaggaggaagtgtacgtggagcaaccccctggcttcgaggatgaacggtaccccgaccacgtgtgtaagctctctaaggcgctctatggacttaagcaagccccaagagcatggtatgaatgccttagagatttcttaattgctaatgctttcaaggttgggaaagccgatccaactctttttacaaagacttgtgatggtgatttatttgtgtgccaaatttatgtcgatgacataatatttggttctactaataaaaagtcttgtgaagagtttagcagggtgatgacgcagaaattcgagatgtcaatgatgggcgagttgaactacttccttgggttccaagtgaagcaactcaaggacggcaccttcatctcccaaacgaagtacacgcaggacctgctaaagcggtttgggatgaaggacgccaagcctgcaaagacaccgatgggaaccgacggacacaccgacctcaacaaaggaggtaagtccgttgatcaaaaagcataccggtcaatgatagggtcattactttacttatgtgctagtagaccggatattatgcttagcgtatgcatgtgtgctagatttcaatccgatcctaaggagtgtcacttagtggcggtgaagcgaattcttagatatttagttgctacgccttgcctcgggctctggtatccaaaggggtctacctttgacttgattggatattcagactccgactatgctggatgtaaggtcgataggaagagtacatcggggacgtgccaattcttaggaaggtccctggtgtcatggaactctaagaaacaaacctccgttgccctatccaccgctgaggccgagtatgttgccgcaggacagtgttgcgcgcaactactttggatgaggcaaaccctcagggactttagctacaatctgagcaaagtcccgctcctatgtgataatgagagtgctatccgcatggcggaaaatcctgttgaacacagccgcacaaagcacatagacatccggcatcactttttgagagaccaccagcaaaagggagatatcgaagtgtttcatgttagcaccgagaaccagctagccgatatctttaccaagcctctagatgagaagaccttttgcaggctgcgtagtgagctaaatgtcttagattcgcggaacctggattga

SEQ ID NO: 4844 - DNA, 4509 bp, Zea mays
  Clone ID: TF_ZM5007.C1.o5.fg
atggatcctaaggggaagggaatcgtgatcaatgacaaggagaaggagtcccttgtcaacgagccgaaggatgacaagcctaccgactcgggctcgggccacaagcgcaaagacgggaagaagaagaagacaaggcgcatcaaggagatcgtctactatgacagcgacgaatcttcctcttcccaaaaggacgacgacgactacgagaaaaagaaaacggtcaattcgaatttttcttttgattactctcgtattcctcaaagtacaaatgctcatttattatctattccacttggtaaacctcctcactttgatggagaggactacggattttggagtcacaaaatgcgtagtcatttgttctctctccatccaagcatatgggagatagttgagaatggaatgcattttgatagtagtgatagtcccatgtttatcaatgagcaaattcataaaaatgcacaagctactactgttcttctagcttccttgtgcagggatgaataccacaaagtgagcggcttgggtaacgccaagcaaatttgggacaccctcaagatctctcatgaagggaatgatgtcacaatgctcaccaagatggagttggtggaaggcgaactcgggagattcgctatgataaggggagaagagccaactcaaacgtacaaccggctcaagacccttgtcaacaagataagaagctatggaagcacgcgatggacggaccacgacgttgtccgcctaatgctaaggtcttttactgttcttgatcctcatcttgtgaacaatattcgtgagaatcctaggtacaccaagatgacgcccgaggagatacttggaaagttcgttagcgggcgaatgatgatcaaggaagcaagatacgtggacgacgccttgaatggtcctatcaacgagccgcaaccccttgctctcaaggcaacaagaagcaaggaggcgctacctatcaaggtggcacaaattgaggcggccggacttaatgatgaagaaatggcccttatcatcaaaagattcaagacggcgctaaaaggtcgcaagggacaaccaagcaagatcaagacaaaggggaagcgctcatgcttcaaatgtggtaagcttggtcattttattgctaactgtcccgacaatgatagtgatcaggatcaagggatcaagagggagaaaaagaagaactataagaaggcaaagggcgaggcacatcttggcaaggagtgggattcggattgctcttcgtccgacttcgacaatgaaggactcgccgccaccgccttcaacaagtcatccctcttccccaacgagcgtcacacatgccttatggcaagagagaagaaggtatgtactcaaaactctacttatgcttcttcaagtgaggacgaatctagtgatgaggatgaaatagattattcatgcttatttaagggactagatagaaccaaggtagataaaattaatgaattgattgatgccttgaatgataagaacaggcttttagaaaaacaagaggacttgttgtatgaagaacatgacaaatttgtagaagcacaaaaatctcatgctctagaagttaaaagaaatgaaatgctttcttgtgaattatcttcttgccatgagacaatttctagcttaaggagcattaatgatgatttgaatgctaagttagaaacagctagtaaatcaacatcttgtgtaaaaattgttgaaacttgcaataggtgtaaagatattgatattgatgcttgtagtgaacacatagcctctattgcaaaattaaatgatgaagttgctagtcttaatgcccaacttaagactagcaaaagtgaatttgacaaattaaaatttgcaagggatgcctacacaattggtagacacccctcaattaaggatggtcttggcttcaagagagaagtcaagaacttaacaagccataaggcttccatctccataaaggagaaagggaaggcccctatggtgagtaatgctaaaaagaaccatgccttcatgtaccatgatagaaaattttctagaaatgttcatgatgataggagttgtaatgcttataatgcttttgactttcatgccatgtttgcttctagttcttcctatatgcatgcatccggaggttcaagctggattatcgacagcggatgcacaaaccatatgacgggggagaagaagatgttcacctcctacgtcaagaataaggattcccaagattcaataattttcggtgatgggaaccaaggcaaggataagtctgaaacccaagggaccctcaagcgcttcctaaggagagctcaaaatgagtttgagctcaagaggaagaacaggacgcttatcgatatggcgaggacgatgcttggagagttcaagaccccagagtgcttttggtcggaagccgtaaacacggcttgccacgccatcaacagggtctaccttcatcgcctcctcaagaagacgtcgtatgagctgctaaccggtaacaaacccaatgtatcttactttcgtgtatttgggagcaaatgctacattctagtgaagaagggtagaaattctaagtttgctcccaaagttgtagaagggtttttgttaggttatgattcaaatacaaaggcgtatagggtcttcaacaaatcatcgggtttggttgaagcctctagcgacgttgtatttgatgagactaatggctctccaagagagcaagttgttgatcttgatgatgtagatgaagaagatgttccgacggccgctatacgcaccatggagattggagaggtgcgaccacgggaacaaaatgagcgagatcaaccttcttcctcaactatggtgcatcccccaactcaagacgatgaacaggttcatcaacaggaggcgtgtgaccaagggggagcacaagatgatcatgtgatggaggaagaagcacaaccggcacctccaacccaagttcgagcgatgattcaaaggaatcaccccgtcgatcaaattctgggtgatattagcaagggagtaactactcgatctcgattagttaatttttgtgagcattactcctttgtctcttctattgagcctttcagggtagaagaggccttgctagatccggactgggtgttggccatgcaagaggaactcaataacttcaagaggaatgaagtttggacactggtgcctcgtcctaagcagaatgttgtgggaaccaagtgggtgttccgcaacaaacaagacgagcacggagtggtgacaaggaacaaggctcgacttgtggcaaaaggttatgcccaagtcgcaggtttggactttgaggagacttttgctcctgtggctaggctagagtccattcgtatcttgctagcatatgccgctcaccattctttcaggttgtaccaaatggatgtggagagcgctttcctcaatgggccgatcaaggaggaggtgtacgtggagcaaccccctggcttcgaggatgaacggtaccctgaccacgtgtgtaagctctctaaggcgctctatggactcaagcaagccccaagagcatggtatgaatgccttagagatttcttaattgctaatgctttcaaggttgggaaagccgatccaactcttttcactaagacttgtaacggtgatctttttgtgtgtcaaatttatgtcgacgacataatatttggttctactaataaaaagtcttgtgaagagtttagcagggtgatgacgcagaaattcgagatgtcgatgatgggcgagttgaactacttccttgggttccaagtgaagcaactcaaggatggcaccttcatctctcaaacgaagtacacgcaagacttgctgaagcggtttgggatgaaagacgccaagcccgcaaagactccgatggggaccgacggacacacagacctcaacaaaggaggtaagtccgttgatcaaaaggcataccggtcaatgatagggtctttactttatttatgtgctagtagaccggatattatgctaagcgtatgcatgtgtgctagatttcaatccgatcctaaggagtgtcacttagtggcagtgaagcgaatccttagatatttagttgctacgccttacttcggactctggtatccaaaggggtctacctttgacctaattggatatttagattccgactatgctggatgtaaggccgagtatgttgccgcaggacagtgttgcgcgcaactactttggatgaggcaaaccctcagggactttggctacaatctgagcaaagtcccactcctatgtgataatgagagtgctatccgcatggcggaaaatcctgttgagcacagccgcaccaagcacatagacatccgacatcactttttgagagaccaccagcaaaagggtgatatcgaagtgtttcatgttagctccgagaaccagctagccgatatctttaccaagcctctagatgagaagaccttttgcaggttgcgtagtgagctaaatgtagcacccaaaatcctattttag

SEQ ID NO: 4845 - DNA, 2015 bp, Zea mays
  Clone ID: TF_ZM5054.C3.o1.fg
atggatcctaaggggaagggaattgtgatcaacgacaaggagaaggagtccttcgtcaacgagccaagggatgacaagtccaatgactcgggctcgggccacaagcgaaaagatgggaagaagaagaagacaagacgcatcaaggagatcgtctactacgacagcgatgagtcctcttcttcccaaaaggacgacgaccacgacaaacaaaagacggttaactcaaacttttcttttgattattcgcgcattccatatagctcaaatgctcatttgctccccattccacttggcaagcctcctcactttgatggagagaactacggattttggagtcacaaaatgcgtactcacctattttctctccatccaagcatttgggagattgtggaaagtggaatgaaatttgatagctcggatagcccttcattcattaatgagcaaatccataagaatgcacaagctaccactgttcttctagcttcattgtgcagggatgaatataacaaagtgagcggcttggataacgccaaacagatctgggacaccctcaagatctctcatgaagggaatgacgttaccttgctcaccaaaacggagttggtggaaggcgagcttggacggttcgcgatgataaggggcgaggagccaactcagacatacaaccggctcaagacccttatcaacaaaataaggagctacggaagcacgcgatggacggaccacgacgtcgtccgactaatgctcaggtcctttaccgttcttgatcctcatttggtgaataatattcgtgagaatcccaggtacaccaaaatgtcgcccgaagaagtcctaggaaaattcgtcagcgggcgaatgatgatcaaggaggcaaggtatgtggacgacgccttgaatggaccaatcaacgagccgcaaccttttgctctcaaagccacaaggaacaaggaggcgctacccagcaaggtggcgcaaattgaggcggccggtcttaatgatgaagaaatggccctcattatcaagagattcaagacggtgctaaagggtcgcaatggacagccgagcaagactaagaccaaggggaagcgatcatgcttcaaatgcggtaagcttggtcattttattgctaactgtcctgataatgaaagtgaccaggaaaaggggaacaaaagggagaagaagaagcactacaaaaaggccaagggcgaggcgcatataggcaaggagtgggattcggattgctcctcctccgactccgacaatgagggactcgccgccaccgccttcaacaaatcggccctcttccccaacgagcgtcacacgtgtctcatggctaaggagaagaaagtaagtactcgaaactctacttatgcttcttctagtggtgatgattctagtgacgatgatgaaatagactattctagtttatttaaaggtctagatagaattacgattggcaaaattaatgaattaattgatgcattgaatgagaaggataaactcttagagaaacaagaggatttattgtatgaagagcatgataaatttttagaagctcaaaaatctcatgctctagaagttaaaagaaatgaaatgcttacttgtgaattatcttcatgccatgagacaatttcaaaattaaagagcattaacgatgagttgaatgctaagatagaaatagctagtaaatcaacaacttgtgtagaaaatgttgttatttgcaatagatgtaaagactttgatattgatgcttgtagtgaacacatagcttctattgcaaagttaaataatgaagtggctagtcttaatgcccaacttaagactagcaaaagtgaatttgataagttaaaatttgcaagggatgcttacacaataggaagacatccctcaattaaggatgggcttggcttcaagagggaagccaagaacttaacaacccataagactcccatctccaccaaggagaaagggaaggctcctatggctaatagtgttaagaagaatcatgctttcat

SEQ ID NO: 4846 - DNA, 1110 bp, Zea mays
  Clone ID: TF_ZM5059.C8.o5.fg
atggatcctaaggggaagggaatcgtgatcaacgacaaagagaaggaatccttcgtcaacgagccgaaggacgacaagcctaccgactccggctcgggcaatagacggaaggaagggaagaagaagaagacgaggcgcatcaaggagatcgtctactacgacgacaacgatgagtctacttcttcccaaaaggatgacgaccacaacgactacgagagagggaaaccggaggcaaggtacgtggacgacgcattgaatggtccaatcaacgagcctcaaccccttgctctcaaggcaacaagaagcaaggaggcgctacctagcaaggtggcacaatttgaggcagccggacttaatgatgaagagatggccctcatcatcaagagattcaagacggcgctaaagggtcacaaggggcagccaagcaagaccaagacaaaggggaagcgctcatgcttcaaatgtggtaagcttggtcattttattgctaactgtcccgacaatgatagtgaccaagaaaaaggaaacaagagggagaagaagaaaaattacaagaaggccaagggcgaggcacatatcggaaaggagtgggattcggattgctcctcctccgactctgacaatgaaggactcgctgccactgccttcaacaagtcatccctcttccccaacgagcatcacacatgcctcatggcgaaagagaagaaggggagaagaagatgttcacctcctacgtcaaaaatgaggatccccatgattcaattatattcggtgatgggaaccaaggcaaggataagtctgaaacccaagggaccctcaaacgcttcctcaggagagctcaaaatgaaggtgaagaagataagaagcgacaacaggtctgaattcaagaatcttcaagtggaggagtttcttgaggaggaggggatcaagcacgagttctccgctccctacacacctcagcaaaatggtgtggtagagaggaagaacaggacactcattgatatggcaaggactatgctaggagaattcaagacccccgagtgtttttggtcggaagccgtgaacacggcttgccacgccatcaacagggttgtcggggaccataattag

SEQ ID NO: 4847 - DNA, 1834 bp, Zea mays
  Clone ID: TF_ZM5066.C9.o1.fg
atggatcctaagggaaaggggatggtggtcgacaacaacgagaaggagtctatcttcaacgagccaaagaatgacaagtctaccgacttgggctcaagccacaagcgcaaagatgggaagaagaagaagaagacgaggcgcatcaaggagatcgtctactacgacagcgacgaatcctcttcttcccaaaaggacgacgacaacgactacaggaagacggtcaattcgaacttttcatttgattattctcgtattccacatagttcgaattcgcatttgctttccattcctcttggcaaacctccacactttgatggggaggactacggattttggagtcacaaaatgcgtagacatttattctctctccatccaagcatatgggagattgtagagaatggaatgaaatttgatagctcggatagccccatgtttattaatgaacagattcataaaaatgcacaagctactactgtgttgctagcctccttgtgcagggacgagtacaacaaggtgagcggcttggacaacgccaagcagatctgggacaccctcaagatttctcatgagggaaatgacgttaccttgcttaccaaaacggagttggtggaggccgagcttggacggttcgcgatgataaggggcgaggagccaactcaaacatacaaccggctcaagacccttattaacaaaataaggagctacggaagcacgcgatggacggaccacgacgtcgtccgactaatgctaaggtcctttaccattcttgatcctcatttggtgaataatattcgtgagaatcccaggtacaccaaaatgtcgcccgaagaagtcctaggaaaattcgtcagcgggcgaatgatgattaaggaagcaaggtacgtggacgacgccctgaatggaccaatcaatgagccgcaacctcttgctctcaaagccacaagaagcaaggaggcgctacctagcaaggtggcacaaattgaagcggccggacttaatgatgaagagatggccctcatcatcaaaagattcaagacgtcgcttaagggtcgcaagggacagtcaagcaagaccaaagccaaggggaaacgctcatgcttcaaatgcggtaagcttggtcattttattgctaactgtcccgataatgatagtgatcaggacgaagggaataaaagggagaagaagaagcattacaagaaggccaagggcgaggcacatatcggaaaggagtgggattcagattgctcctcctccgactccgaccatgaaggactcgccgccaccgccttcaacaagtcatctctcttccccaacgagcgtcacacatgcctgatggcaagagagaagaaggtgagtactcgagactccacttatgcttcctctagtgataatgagtctagtgatgatgatgacatagactattcatgcttattcaagggattagatagatctaagatagacaagataaatgaactcattgatgcattgaatgagaaggataaactcttagagaaacaagaggatttattgtatgaagagcatgataaatttgtagaagctcaaagatctcatgctctagaagttaaaagaaatgaaatgctttcttgtgaattatcttcttgccatgagacaatttctaaattaaggagcattaatgatgatatgaatgctaagttagaaatagcaaataaatctaattcttgtgtagaacatgttatgagttgcactaggtgtaaagattttgatattgatgcttgtagtgaacatctagtttcaatttccaaattaaaagatgaattggctagtcttaatgcccaacttaagactagcaaaa

SEQ ID NO: 4848 - DNA, 4494 bp, Zea mays
  Clone ID: TF_ZmC119_1202
ttaaggagatctagggaaaaggtggggaaaatctatacgaagctcttcttctctttcccaagttgcttcatcttcactgtggtggctccattgcactttgcacatctttataaccttattcctcgtaactcgagtcaatgtatccaaaatcttgatggggtactcagcatacgtcaggtcatcttgaacattaaggtcttccgttggtaattgctcctcaggtaccctgagacatttcttcagctgagatacatgaaatacatcatgaacatccgcaagatgatctggtaactccaattgatatgcaacctcacccactcgctttaagatcaagaagggtccaataaagcgaggggacagctttcctttaactttaaatctcctcataccccggagtggcgacaccttcaaatagacctgatcaccctccttaaactccagtagccttctcctattatcagcatagctcttttgcctggattgtgcaatcctcaaattttctcttatcattcgaacttgttcttctgcctcttgaataagttcaggcccaaagaactgtctttcaccagtttgatcccaatacagtggtgtcctgcatcttctgccatatagagcctcaaacggtgacatcttcaaactggcttggtagctattattataagaaaactcagcatatggtaagctcttctcccaactgccaccatgcttgagagcacaagctcttaacatatcctccagcacttgattagtcctctctgtctgtccatcagtctggggatggtaggctgaactaaaattcaactttgtatccaagctctcatgcaacttcttccaaaaccgagaagtaaactgtgatcctcgatcagacacgatctttttaggtactccatgtaaacaaactatccgagtcatatacaattctgctagcttggctcccgtgtaattagtcctcaccggtataaaatgagccacttttgtcaatctgtccacaattacccaaatagagtcatatcctgctggagtgcggggtagtccaacaataaaatccataccaatttcctcccatttccactcgggtatcttcagtgggtgcaataatccggctggcctctggtgttcagctttaactctttggcatacatcgcacatagccacatgtgcagccacatctctctttagtccataccaccaatacttttgcttcaaatcctgatacatcttagtactcccaggatggatagaataaactgaatcatgtgcctccttcaatatagtttcccgaagactttcaatgtcgggaacacagatccgattcttgaaccaaatcgtgccttgttcatcctccgtgaactccgggcctctaccctctgttatcagatccttgatctcctggattttggcatcaccaatctgacctttacgaatttcttgctccaaggtaggttccaatttaatagtcactccttccgtatgtgtaacaattcccaggttgagtctctcaaaatcttttgctaattcatcaggtagctgggcaacgaaagcggagtgaacatgttctttccgactcaaggcatctgcaaccaaattcgccttgcctgggtgataatgaatctccaagtcataatccttaatgagctccaaccaacggcgttgcctcaggttgagatccttctgagtgaatatatacttcaaactcttatggtccgtgtatacttggcacttagttcccataatgtagtgtctccaaatcttaagtgcatgcacaacggcagccaactctaagtcatgggtggggtagttcaattcatgcttcctcaactgacgagatgcataggcaatcacatgaccatcttgcataagcacacatccaagtccttggccacatgcatcacagtaaatgtcaaatcccttctgcagatctggcataatcaatactggtggagacatcaatctctccttcaattgatcaaagctctcttggcacttctcatcccacttgaattctcttcctttctccaaaagcgatgtcatgggcttagcaatcttagaaaatccttcaataaatctccgataatatcctgcgagtcccaagaaactccgaatctccgtaactgtagtgggcactctccactccattatctcctttactttagcaggatccacagctattcctccattagaaataatatgaccaaggaatggcaccctgtcaatccaaaactcgcacttgctgaacttagcatagagttgattatctcgtaacttctgtagcaccaaccttagatgttgctcatgatcactttcattcttagaatagataagaatatcgtcgataaacaccacgacgaatctgtccaaatactccataaacactttgttcatcaaattcatgaaataagctggtgcattggttaatccaaatgacataacagtaaactcatataatccgtatcgagtcgagaaagccgtcttgggaatatccgatggtctaatcttcatctgatggtaacccgatcggagatcaatcttcgagaataccctagcacctctcatctgatcaaataaatcctcaatacggggcaacgggtacttgttcttcactgtaacatcattaagagatctataatccacacacatccgctgcgatccatccttcttctgtacaaacagaaccggtgctccccaaggtgaggaactcggacgaatgtaaccagcctcttgtaactccgtcaactgcttcttcagttccttcaactcctctacggacatcctatatggccgtttagaaataggggcggttccaggtaagagatcaataacaaactcgacttctctctcaggtggcatccctggtaactcttctggaaagacatctggaaaatctctaaccacccggatgttatcaccaacaaactcctcaggcataaagaacattgcacgcatggatgaggaggttactgcaatattaacttgaaacctttctcccttagtagtagtgagttctacggtacctctaccacatgctataacggcctttgcctttcttagccatgacataccaaggatcaaatctatactgcttgactccaaaattatagcagtagctccaaattctctacccataatggttaatgtcaatctacgtgtcatttgattcgcctcaacaggccctttaggtgtaattactatcatgggttttctcatatttagcagtggtatttcatttgtgttggcatatctagcagacatgaatgaatgtgtagcaccagaatcaaataatattgttgcaggaattgcattaacataaaacataccaatcacgaggtcaccaccatcaggagtatcatcaatgctgacttgattcaccctggctatagaatatcccttgccaggggtctgttgcttgttctgagctggagtagtagcaatcctctgtgggcagacatttgcataatgaccagtcttcccacacttgaaacattgagtgcccggactctgtcctgcaaactttgtcggggtgcccgtgggagtagcctgtcgaggaggtggagtcctcagtggtgattgctgaactgggcgtggtcctccgggtcgagtcggtgtaccctgtggtgaactgtagcgaggacgaacactgctgctaccctgtccttgtgagatggccttcctcttcaaatcacccagttgaatacgcttgtgttcaatagcaagagccttatcaagtagcctctgaaatgatggaaaggtgtgtgcaaccagtgcatactgcaagggtccattaagcccttcaatgaagtgctcctgtttcctctcatcctcagcaacttcctccggagcatatctcgacaactgaatgaatttgtctctgtactcgctgaccgacatgttgccttgcttcaatgacagaaactccttcttcttgatctttatcataccagctggaatatggtagttcctgaattgtgtgctgaactctgcccaagtaatagtatcagcagcatcatgggcagcagtataagaatcccaccagtcagcagcaggacccgtcagacgtccagaagcatataaaaccttctcccggtcagtgcattgtgcaatattcagcatcttctcaattgacttcagccaatcatctgcgtccagtggatcaggtgagctagcgaatgtaggtggcttatgactcataaactcccggtgcttatcacgaggtggaaccggtggtggtggtggaggcaatggcacttgttgctgctgttgctgttgttgcatttgctgttgcagctgctgctgttgcgccctcctttcttggcgtatctcatctctctcctggcgcaactcctggcgtatgtcttctctttcctgacgcatctcttggcgttcttgctgcatctgggcacgcatatcagccatagtgtccgccatttgctgcatcaccgccatctgagcagcaaccagcgggtcaactccgcctggtggaggattagggggattcat

SEQ ID NO: 4849 - DNA, 4485 bp, Zea mays
  Clone ID: TF_ZmC119_1226
ttaagatgaactagagaaaaggtggggaaaatctatacgaagctcttcttctctttcccaagttgcttcatcttcactgtggtgactccattggactttgcacatctttatcaccttatttcttgtaactcgagtcaatgtatccaaaatcttgatcgggtactccgtgtaagtcaaatcaccttgaacactgagctcttccaagggtaactgttcctcgggaacacggagacacttcttaagttgagacacatggaacacattatgcacatccgatagactatccggtaactcgagttggtatgccatctccccaactcttctaaagatcaagaatggtccaatatagcgaggggacaatttgcccttaactttaaatctcctcattccacgcagtggtgacaccttgaggtacacataatctccttcttcaaattccagtggcctccttctattatcagcatagctcttttgcctggtttgagccactctcaaattctctcgaattatacgaacttgttcttctgcttcttgaatcagttcaggcccaaagaactgtctttctccagtctgatcccaatatagaggagtcctgcacttcctcccatataaagcttcaaaaggtgacatcttcagactggcctgatagctattattataagagaactcagcataaggtagacttttatcccaactccctccatgctgaagggcacatgctctcaacatatcttccaatacttgattagtcctttcggtctgtccatcagtctgagggtgataagctgtactgaaattcaacttcgtgctcatgttctcatgaaagcttctccaaaatcttgaggtaaactgcgaacctcgatcagacacgatcttctttggtactccatgtaaacacacaatccgagccatatataactctgctagctgagaacctttataagtagtcttgacaggaataaagtgagccactttagtcaatctatccacaatcacccatattgcatcatatcctttctgggtgcgaggcaatccagtaatgaaatccataccaatctcttcccatttccactcgggtatcttcagtggatgcagtagtccagctggcctctggtgttcagccttgactctttgacatacatcacacatagccacatgtgcagccacatctctcttcaatccataccaccaatactttcgcttcaaatcctggtacatcttggtactaccaggatgaatagagtaatctgaatcatgggcctctttcaatatagtctctcgaaggcttttaatatcaggaacacacattctatccttgaaccatacagtgccttgctcatcttccgtgaactccggaactcgaccttcagtaatcagatccttaatctcttttattttagcatcaccaatttgtcctttgcggatctcctgctccaaagtaggttccacatcaatagtaactccttcagtatgagcaactatccccaggttaagtctcctgaaatcctcaacaatctcatcgggtagctgggcaacaatagctgaatgaacatgctccttgcgactcaaggcatctgcaaccaaattggccttgcccgggtgatagtgaatctccaaatcataatcctttataagctccaaccaacgacgttgcctaaggttgagatccttctgagtgaatatatacttcaaactcttatgatccgtatatacttggcacttagtccccataatgtagtgtctccaaatcttaagtgcatgcacaactgctgctagttccaagtcatgagtggggtagttcagttcatgcttccgcaactgacgagatgcataggcaatcacatgtccttcttgcatgagcacacatccaagtccttggccacatgcatcacaataaatgtcaaaccccttctgtaggtctggcataaccaataccggtggcgacatcaacctcttcttcaatagatcaaagctgtcttgacacttctcgtcccacttaaattcttttcccttctccaaaagtgaagtcataggcttagcaatcttagaaaatccttcaataaatctccgataatagcctgctaatcccaagaaactccgaatctcagtaactgtagtgggtactctccactccattatctccttaactttagcaggatccactgctattcctccattagaaataatatgaccaagaaatggcacttcgccaatccaaaactcgcacttgctgaacttagcatagagttgattatctcgtagcttctgtagcaccatcctcagatgttcctcgtgatcactttcactctgagaataaataagaatatcgtcgatgaataccacgacgaatctgtccaaatactccataaacaccttgttcattaagttcataaaataggctggtgcgttagtcaatccaaacgacataactgtgaactcatataatccatatctagtcgagaaagccgtcttgggaatatccgatggtctaatcctcatctgatgataaccggatcggagatcaatcttcgagaatactcttgcacccctcatctgatcaaataaatcctcaatacggggcaacggatacttgttcttcaccgtaacatcattaagagatctataatccacacacatccgttgcgatccatccttcttctgtacaaacaagaccggtgctccccaaggtgaggaactcggacgaatgtacccagcctcttgtaactcagttaactgcttcttaagttccttcaactcctctacggacatcctatatggccgtttagaaataggggcggttccaggtaagaggtcaataacaaactcaacttctctatcaggtggcatccctggtaactcctctggaaagacatccggaaaatctctaaccacccggatattgtcaccaacaaactcctcaggcataaagaacattgcacgcatagatgaggatgttactgcaatattaacttgaaacctttctcctttagtagtagtgagttctacggtacctctaccacatgctataacggcctttgcctttcttagccatgacataccaaggatcaaatctatactgcttgactccaatattatggcagtagctccaaattctctacccataatggttaatgtcaatctacgtgtcatttggttcgcctcaacaggccctttaggtgtaattactatcaggggttttctcatgtttagcagtggtatttcatttgtgttggcatatctagcagacatgaatgaatgtgtagcaccagaatcaaataatatggttgcaggaattgcattaacataaaacataccaagtacgaggtcccctccatccggagtagcatcaacgctgacttgattaactttggcaatagaatatcccttgccagttcctggagtttgctgcttgttctgaactggagtagtagcaatcctctgtgggcagacatttgcataatgacccatcttcccacacttgaaacattgagtgcccggactctgtcctgcaaacttcgtcggggtgccagtaggggtagcctgccgaggaggtggagtcctcagtggtgattgcggaactgggcgtggtcctccgggtcgagtcggtgtaccctgtggtgagctatagcgaggacgaacaatgctgcttccttgtgcttgagatattgcctttctcttcaaatctcccagctgaacacgcttgtgttcaatagcaagtgccttatccaacagtctctgaaatgatggaaatgtgtgtgccactagagcatactgcaggggtccattaagtccttcaataaaatgctcctgcttcctctcgtcttcagcaacttcttcaggggcatatctggataactgaataaacttgtcgcggtactcgctgactgacatacccccttgcttcagcgatagaaattccttcttcttgatctttatcatcccagctggaatatggtagttcctgaactgtgtactgaactctgcccaagtaatagtatccgcagcatcatgggcagcagtataagaatcccaccagtccgcagcaggaccagtcagacgtcccgaagcatataaaaccttctcccgatcagtgcactgtgcaatattcagcatcttctcaacagacttcagccaatcatccgcgtccagtggatcaggtgagctagcgaatgtaggtggcttatgactcatgaactctctatgcttgtcccggggtggaactggtggtggtggtggaggcagtggcacttgttgctgctgttgctgttgttgttgctgctgttgtgccctcctttcctggcgtatctcatcccgctcctggcgcaactcttgccgtatatcttctctttcctgacgcatctcttggcgttcctgctgcatctgggcacgcatatcagccatagtgtctgccatttgctgcatcaccgccatctgagcagcaaccagtgggtcaactccgcctggtggaggattaggaggatccat

SEQ ID NO: 4850 - DNA, 2805 bp, Zea mays
  Clone ID: TF_ZmC10872_3
atgtcgggagaactcgccaagaaggagatggagaccggcaacaagcccgctacaagccacgggaaggcttcatcgggagagtcccgcaacaaggagaagaagagggagaagaagaaggagaagaagacttcttctcacaagtcgcatcggagtggcgacaaaataaagaagatgaggaaggtggtctactacgagaccgacacttcatcaccttctaccttcggctccgacgcgccctccataacttctaagcgccatgagcgcaagaagtttagtaagatccccttacattatcctcatacctctagacatactccattactttccgttccattaggcaaaccgccaacctttgacggtgaagattatgctaggtggagtgatttaatgaaatttcatctaacctcactccacaaaagtatatggaatgttgttgagtttggagcacaggaaccatccgtaggggatgaggattatgatgaggacgaggtggcccaaatcgagcacttcaactcccaagccacaaccatactcctcgcctctctaagtagggaggagtacaacaaggtgcaaggactaaaaaacgccaaggaagtttgggacgtgctcaaaacggcgcacgagggtgatgaactcaccaagatcaccaagcgggaaacgatcgagggggagctcggtcgcttccgtcttcgccaaggggaggagccacaagatatgtacaaccggctcaagaccttggtgaatcaagtgcgcaacctcgggagcaaaaagtgggatgaccacgaggtggttaaggttattctaagatcacttattttccttaaccccactcaagtacaattaattcgtggcaacccaagatatacactaatgacccccgaggaagtaatcgagaattttgtgagctttgaatttatgatcaagggctcacgaaagatcaacgagcttgacggcccctccatgtccgaagcacaaccggtcgcattcaaggcgacggaggagaagaaggaggagtctacatcgagtagaacacccatcgacgcctccaagctcgacaacgaggaaatggtgctcgtcatcaagagcttccaccaaatcctcaaacaaaggagggggaaagattacaagccccgctccaagaaggtttgctacaaatgtggtaagcccggtcactttatagctaaatgtcctatttctagtgacagtgacaggggtgacgacaagaaggggagaagaaaggagaagaagagatactacaagaagaagggcggcgatacccatgtttgtcgcgagtgggactccgacgaaagctctagcgactcctcctccgacgaggacgccgccaacatcgccgtcaccaagggacttctctttcccaacgtcggccacaagtgcctcatggcaaaggacggcaaaaagaagaaggttaaatctaaatcctccactagatatgaatcctctagtgatgaaaatgctagtgatgaggaagataacttgcgcactctttttgccaacttaaacatgcaacaaaaggagaaattaaatgaactaataagtgccatccatgagaaggatgatctcttggactcccaagaggacttcctaatcaaggaaaacaaaaagcatgttaaagttaaaaatacttatgctctagaagttgaaaaatgtgaaaaattatctagtgagctaagcacttgccatgagactatagacaaccttagaaatgagaattctaatttgttagctaaggttgattctattgcttgtaatgtttcaattcccaatcttagaaatgataatgatgatttgcttgctaagattgaagaattgaacatatcttttgttagccttagaaaggaaaatgaaaaattaattgctaaggctaaagattttgatgtttgcaatgttacaatttccgatcttagagataagaatgatatattgcgtgctaagattgttgaacttaattcttgcaaaccctctacatctatcgtagaacataccactatttgtactacatgtagagatgttaacattgatgctatacatgatcacatggctttaattaaacaacaaaatgatcatatagctaaattagatgctaaaattgccgagcatgacttagagaacgaaaaatttaaatttgctagaagcatgctctatagagggagacgccccggcattaaggatggcattggcttccaacagggaggcaatgtcaaacttaatgcccctcctaagaaattgtctaattttgttaagggcaaggctcccatgcctcaggataacgagggttacattttgtaccctgtcggctatcccgaggacaaaattaggaaaattcattctaggaagtctcactctggccctaaccatgctttcatgtataagggtgagacatctagctctaggcaaccaacccgtgctaagttgcctaagaagaaaattcctaatgcatcaaatgaacatagtttttcattcaaaacttttgatgcatcttatgttttgactaacaaatctggcaaggtttatgcatccgggggctcaagttggattatcgacagcgggtgcacaaaccacatgataggggagaagaagatgttctcctcctatgagaaaaaccaagatccccaacgagctatcacattcggggatggaaatcaaggtttggtcaaaggattgggtaaaattgctatatctcctggtcactggatgttaccaaatacccttcccactaaacttatgcaacacaagaaatggaatagagagagaaaatattgcaaaatctggcaacacctcccttga

SEQ ID NO: 4851 - DNA, 3089 bp, Zea mays
  Clone ID: TF_ZmC119_1222
gccagcaggtcgactccctcttgcatcaagacatagcctaaactactgcctgatgcgtcacaatacacatcaaaaggcttttcaatgtccggttgagctaatatcggagcagaggtcaataacaccttcagctgctcgaaggcttcattgcatcttgaggaccaattaaattttgtgtggttcttcaataaacttgtgattggcttcacaagcttggaaaaatccgggataaatcggcggtaataaccagccaatccaaggaaacttcggacttgatgtacagtggttggcggtttccactctaaaatatccttgaccttaatgggatcaactgcaatccctttggcagacaatacgtgtcccaaaaattgaatttcctccagccagaacgcgcacttgctgaacttggcatatagctgatgttcccttaggcgcgtcaatacaatccgtaaatgctgagcatggtcttcttcattcttggaatatatcaagatatcatcaatgaagactaccacgaacttgtccaattcaggcatgaataccgagttcattagataagtgaaatgggcaggagcatttgtgagcccgaaagacattaccaaatattcaaacaatccatatcgcgtagtaaacgcggtcttcggtatatcctcgggccgaatacggatttgatgatagcccgacctgagatcaattttggaaaataccctcgccccagtcaattgatcaaataagatgtcgatccggggaagggggtacttattcttgatggtgacctcatttaggggtcgataatccacgcacattctcaaggtttgatccttcttcttaacaaaaatggcgggacaaccccacggggacgagcttggccggataaatcccttattcagcaggtcttgtaattgaatcttcaattcgggctttagctcaattacgaattctacatctctttcacggggcagtccaggcaaatcttccggaaatacatctagaaactcacatactaccggaatgttcttgatctccggtacaatggcttcatagactctaccagaagttttggccggattggttgcggggagagtcaaaagaatctcttcttggttataactcaacctgacggttctgaattcagtgttgagaattgccttgtgttgagttaaccaattcatacccaagattacatctatatcctggcctttcagaacgatcatattagcaggaaagttccgtccggccattgttactggcactccataggccacttctttagtataaatatgtcccccaggtgaatgaattttaaatccctcctttgattcatggtatgcaatatgatgttgttccacaaacttcttgctaataaatgtatgtgaagcaccagaatcaaaaagaataattgctgggtgactggctacgggaaacgtacccatcatcaccggctctccctctggtgtggtagccacttgcatataatatactcgccccgttttcttggtattcttgcccgaagtacttcccttgcctggagctgaatttcccgatccttgcgaagcattggattgattttgcctaggatatgggcagtccttgatgaagtgtcccgacttgccgcaattaaagcacccagttgaagaactaggcaaggcaggaaatcgagtgcctggggcacccggctgctttggggtagtgggggcattgttggggcggataataataggctgcttgaagggaaatgaaggtggacgagaaaaagggcgattttgggttgagggtcgaatcacaaaccgtggtttcttcgcctggccctgattaggccgctcaccaccgaatcccttagtctttccagaatttccatatttggcctccacagataaggctgtgctgacagcctttccataagtaagatcaatacatgcagccatttttcgctgcattcggtcgttcagtcctctcataaaacaattcttctttttcaaatccgtattcacctgatcaattgcgtattgtgacaggtgattgaacttgttgagatattgattaacagtatctcctccttgcttcagtttcatgaactcttcttgtttcatgtgcagcactccctcaggaatgtaatgctcgcggaatgctgctttgaactcgttccatgtaatttgatggttgtccggctggatggccacaaagttcccccaccaagtactggcaggtcctcggagttgctgtgctgcaaacagtggcttctgtacttccgaacagcgtagaaggccaaacttctgctctatgacccgtatccattcgtcggcctcgagcgggtcttctgctttgatgaagagaggcggacgagtctcagagaaatctagataagtggtctcacggggaccttgttggaatcctcttcccgcttgttgttgaagctgttgctgacccgccatcaccctcaggaagcgggtgttgtcggctgtggcgttcaccaaggtagcaattgcctcggcaagcgtgggtggaacgggaggcggattcggggtaacgtcccgacccccggatgttccggatgcatcctgtgcacgagtcctcaaagaaggaggaggctcaaaaaggtctaactccccacccagcgcacgtcccgcaacgtgagatggtccagcttctgcctcagcaggtggtgcaggctcacttgggtgtagttgtgagtataatacatggacttcctcgtgcaacgtgttgcagtaaacctgcaggtcatcaacagtcgagctaagttctttaattcgggcctgagcccttgcttccttagcacacattagcaaacgagactgcacagcccagtcaagtgctaagtctcgatcagcgagttgatcctgcaagtgtcggatgtcccttctcagttcgttgattctatcaccgtcagcgacccaagcatcagtcctttgttgcagtgctgcctgaagtcgactcacacgagcttcaaggtctccgatggggtcgttactcccactactgctgctttcatgtcggggagccaattgatgccgaggcaccccaattggtcccgtggacttgcgtgccgttagcctggtacgtggcggcat

SEQ ID NO: 4852 - DNA, 4833 bp, Zea mays
  Clone ID: TF_ZmC119_1413
tcaatcaggaactcgaaggcacttcttcaattgagatacatggaacacattatgcactgtagacaatgtttcgggtagttgaagtcggtatgctactagtctgtatctttcaagaataagaaacaggccaatatactcgggtgccagttttccttttaccccgaaacggttcacacctttcattggtgatactttcaagtatacatgatcattgacttgaaagaccaaaggttgacgtcgcttatccgcataattcttttgccgagcttgtgcctctttcaagttgtgtatgattcgttggactttttctttcgtctctttaaccatgttgggcctgaaaaaccatctttcttcgggttcagaccaatttaagggtgtccgacatcgtcgtccatacagtgcttcgaatggtgccatctttatgctctcttgatagctattattataagaaaattctgccaatggcagacattcatcccatttttgcggaaactccaggacacatgcctgcaacatgtcttcaagtatttgatttactctctcagtttgtccacttgtttgaggatgatatgccgagctgtggagtagtttagtacccaagaatttctgcagttcactccaaaatttggatacaaattgtggtccacgaaccgacactatcgtttttggaactccgtgcaaactaagaatacaagcaatgtataactgggcatagacaacaactgggtgatcggtcttgacgggcagaaaatgtgctatcttggtaagtcgatcaacaatcacccaaatagagtcatatccttttgcggtcctgggcaatcccacaatgaagtccatgcttatgtcttcccatttccatgttggtattgataatgactgcaatggaccggcagttttcatgtgtatggccttgacacgtctacaagtgtcacatttagccacatagcgtgcaatttcaatcttcatttttgtccaccagtaatgttgctttaagtcttgatacatcttagtgcttccgggatgaatagaataacgactaagatgtgcctcatccagaatttgctggcggagctcttcgttctttggcacaactatgcggtttttaaaccatatcacaccttgatcgtcttctttgaaacacttggctgttccagcccttatcttttctcgtatgtgcttcatacccagattatccttttgagcatcaattattctttgcaaaatgattgactcaagccttaactgatttagagttccttgttgaatgatccccaggtttagcttttccatttcttgacataaagtgttctcgaagatctttgccataagacagtggcaggaagtcttacgactcaatgcatctgccaccacattggccttgcctgggtgataatggatctccaattcatagtctttaatgagctcaagccatcgtctttgcctcatatttaactctgactgggtgaagatgtacttcaaacttttatgatctgtatatatgtgacagatatttcccagcagatagtgacgccaaatctttagggcatgaaccacagcagctaactccagatcatgagttggatagtgctcctcatgtcggcgcaactgccttgaagcatacgcaatcactcggccctcttgcatcagtacacagccgagcccactgccagatgcatcacaatacacatcgaaaggcttagtgatgtccggttgagctaataccggagcagtggtcaatagtgtcttcagttgctcaaaggcttcattgcacttagaagaccaattgaacttagtatcattcttcaacaaacttgtgattggcttcacaagcttagaaaaatctgatatgaatctgcggtaatacccagctagtccaagaaaactccggacttggtgaacagtcgttggaggtttccactccagaatatctttgaccttgctaggatctaccgcaattcctttagctgataatacgtgccccaaaaattgaatttcttccagccagaatgcgcacttactgaacttggcataaagctgatgttccctgaggcgcgtcaatacaatccgtaaatgctgagcatggtcttcttcattcttggaatatatcaagatatcatcaatgaagactaccacgaacttgtccaattcaggcatgaataccgagttcattaaataagtgaaatgggcaggagcatttgtgagcccaaaagacattaccaagtattcaaataatccataccgcgtagtaaacgcggtcttcggtatatcctcgggccgaatacggatctgatgatagcccgacctgagatcaattttagaaaataccctcgccccagttagttgatcaaataagatgtcgattcttggaagagggtacttattcttgatggtgacctcatttaggggtcgataatccacgcacattctcaaggtttgatccttcttcttaacaaagatggcgggacaaccccacggggacgagcttggccggataaatcccttattcagtaggtcttgtaattgaatcttcaattctgccaattcattagggggcatacggtacgatcttcgggaaatcggagccgtaccgggctttagctcaatcacaaattctacatctctttcagggggcagtccaggcaaatcttccggaaatacatctggaaactcacatactaccggaatgttcttgatctccggtaccatagcttcatagactctaccagaagctttggctggattggttgcggggagagtcaagagaatctcttcttggttataactcaacctgacagttctgaattcagtgttgaggattgccttgtattgggttaaccagttcatacccaagattacatctatatcctggcctttcagaacgatcatattagcaggaaagttccgtccggccattgttactggcactccataggccacttctttagtataaatgtgtcccccaggtgaatgaattttaaatccctcttttgattcatgacatgcaatatgatgttgctccacaaatgtcttgctaatgaaggtatgcgaagcaccagaatcaaaaagaattattgcagggtgactggccacagggaacgtacccatcatcaccggctctccctccggtgtggtagccacttgcgtataatatactcgccccgttttcctggtattcttgcccgaagtacttcccttgcctggagctgaatttcccgatccttgctgattattagtctgattttgccttggatagggacaatctttaataaaatgcccagatttgccacagttaaaacatccagttgaagaacttggcagcgcagggaatcgagtgcctggggcacccgactgttttggggtagtgggggcattgttggggcggataataataggttgcttgaagggaaatgaaggtggacgagaaaaagggcgattttggtttgagggtcgaatcacaaaccgtggtttcttcgcctggccctgattaggccgatcaccactgaatcccttagtctttccagaatttgcatatttggcctccacagataaggctgtgctgacagcctttccataagtaagatcaatacatgcagccatttttcgctgcatccggtcgttcagtcctctcataaaacaattcctctttttcaaatccgtattcacctgatcaattgcgtactgtgacaggtgattgaacttgttgagatactgattaacagtatctcccccttgcttcagtttcataaactcttcttgtttcatgtgcagcactccctcaggaatgtaatgctcgcggaatgctgctttgaactcgttccatgtaatttgatggttgtccggctggatggccacaaagttcccccaccaagtactggcaggtcctcggagttgctgtgctgcaaacagtggcttctgtacttccgaacagcgtagaaggccaaacttctgctctatgacccgtatccattcgtcggcctctaaaggatcttctgctttgacgaatagaggcggacgagtctcagagaaatccagataagtggtctcacggggaccttgttgaaatcctcttcctgcttgttgttgaagctgttgctgacccgccatctccctcaggaagcgggtgttgtcggctgtggcgttcaccaaggcagcaattgcctcggcaagcgtgggtggaacgggaggtggattcggggtaacgtcccgacccccagatgttccggctgcatcctgtccacgagtcctagtcggcatctgaggcaaaaacatttgaaataaacataatgtgccagagaaaaccttccattttacattactcaaagaaggaggaggctcaaaaaggtctaactccccacccagcgcacgtcccgcaacgtgagatggtccagcttgtgcctcagcaggtggtgcaggctcacttgggtgtagttgtgagtataatatatggacttcctcgtgcaaagtgttgcagtaaacctgcaggttatcaacagtcgagctaagttctttaactcgggcctgagcccttgcttccttagcacacattagcaaacgagactgaacggcccagtcaagagctaagtctcgatcagcgagttgatcctgcaagtgtcggatgtcccttcgtagttcgttgattcgatcaccgtcagcgacccaagcatcagtcctatgttgaagtgctgcttgaagtcgactcacacgagcttcaaggtctccgatcgggtcgttgcttccactgctgctactttcatgttggggagccaattgatgccgaggcaccccaattggtcccgtagacttgcgtgccgttagcctggtacgtggcggcat

SEQ ID NO: 4853 - DNA, 3461 bp, Zea mays
  unsure (1)..(3461): unsure at all n locations
  Clone ID: TF_ZmC119_1839
tcacctattcaccccccctctaggtgctctcaggaacgtacccatcatcaccggttcgccttccggtgttgtggccacttgagtgtaatagatccgtctcgttttccttgtatttttggccgcggtattggttgccgcatttcccttagaactcccagaactctgttgattatttgattgattctgcctcgggtatggacagtccttaataaaatgcccggactttccacagttgaagcagcctgttgatgagctgggaagagcagggaaacgagtgccaggggcacccgactgatttgtagaggtgggggcagcggtaggacggatgaaaactggttgcttgaaagggaaggagggtgggtgcaatgaagaacaattcggattgaaaggctggatgaccaacttttgtctcttttcaggcccctggttgggcctgtcgcctccaattccctttgatttgccggagcctgcatatttagcttctactgccagcgccgtgctgacagcccttccataggtaagatcgatgcaggtggccatctttctttgcatccgatcattcaagcctctcatgaagcaattcctcttctttatatccgtgttgacttgatcgattgcatattggtataagtggttgaatttattgagatactgggtgacagtatccccgccttgcttcagcttcataaactcctcctgcttcatatggaggactccttcaggtatataatgctctctgaaggccaacttgaactcatcccatgtgatttgatgaccagccggctgcaagttatcaacagctgagctaagctcttccacgcaagctcgagctctagcttcctttgcccaggctggtgaacgagagttcacagcccagtcgagcgctagatcctgatccactagctggtcttgcaggtggtggatttctgttctcaattcattggttctttcgccatccgcaacccatagatcgttcctatgtcggagttctgcacgaagctgatcaacttgtgcttctagatccccaatcggatcgttactaccactgctgctaccatgggaggcaaaaactcctccccaaatagatagtaaaaagtttttaatggggggccttccctccgcagccctagtcttggtgctcgtctttgggtaccacctttgaacagaagcaacaaaaatttgccgcttcctcaccgagagcacagatacaccaccgtccagcctcttgccacggagggtacactctactctcgccaccgctccacgcccatttcgtgttatcttattctggccttagtctgcccgaggcaaggcttacccatgacgaggcatgtgaccagttaaagggtccgcggttagcacaccntacatacacgttcaatctttaatcaacctgggtagaacatcactcgttcctaacccaagtcccgatttaagtatttccacccttaggattgtttgttttccttaggatgaaaagagcatcatagggaactttgcagtaagatcccaccatgctcccaatgaaaatataaccttgcaggtagaagtcatctttcctcaggataacccctgagcaaggccttaacgcaaaagacaacctctatccacaagatctaagcagggctaagcatttttgtaaatcaaattttgatacttccaaagaagtatctataacaggtatggatatcaaggaaggaaatgcatcaaagggtttcaagcaactcctataaacctaatgcacatttcactagacttaaagtgtgcgaaaagtatttaaaaacacaaggaaggggttgcatgcaccggggcttgcctgagtaacactaggttagtgtttgttaggcgaccacttgacgatcatccttatcctagcacttgatcaggcaggttcgttcatcagcatctccatgcagagtagtccgcgcttggggtcgacttggctcgtcttccgcattacgcgatcaattatcgtacctaattgagatgcacgatgcacatgaatgcatataaacaggaatattacaaacctaaatagtactatgcgatagcgaattaactcctagcggcgaggcgttgaacaatttcatacagagatacntaattatcgtcgtacaattaagcgcaataattacgcttcttgaacttatcgcaaacatcacgaacaacaaactatacacatgaaatacaattagcctaatcacaatttatcagttaattaattaaattctgaactaatcccttgccttataaattatactacatctttataaatgattaaaatattttatcattacacatgcctactaaaattctactcggttcactaattcagctaagtgaccagaatagcgaaataattcgccatagctgaatctggctcgataatcgcaagaactgcgaagtcgacgagagtttcgtgacttacgcaatttatcgagcaacttaatgagtatcacactagtacattaatttatttaatgattgaaccattctaaacaatttatcagcttagcgtttccacatcagacacgaatccgcgagatcggtagcgattttccgatccaggcaatttatcgagcgcttagggaatatcgcgctgctagcttcgtcttcacccgattcttgggttttcttgctgacgcgcggaacgacgatggtcctaattcaggcgttttgtcgagcaccaagcaagcattgcacggcatgatgacgtcgaggcgaggatcaaagatggacaaccggcacggcgcgatggcagcttgagccttgaacagagacgagaccgacggcgaggttgaagctggacggggagccgatggcgctggggcaagggggtgaggccgagcgccatggggcaagctggaggacgagctcgggcgtggagatagcagaggggcgagcaccacggccaggcgagcttcggcaagcgcagctggacgcgagcagaggcagggattcgagctgggggctggggcgagttcgccagggagcagaggaaatccgagcgcaaggaggaagaaacagctgggctgggcgcgcagagaaatcggctggggagtgagggggaagcagctgcgtgcagcgaggaggttccaggggcgcgcccgcgcggcaccagggggaagacgagggcgcagggagccatggagaggacgccgagaatctgagttgaggctggacaccgcgaggaagaagacgtgggcgcttggcttcggaacttctgccgacgagcagggtttttaacagtgcggcggctgagatcttttccaaagataagatcggctggaaaaatccaagctgcgggcggctggagtggaggataggatcgcgctggatttttccacggatccagaacggcggccggatgaagatgagcagaaaaatcacggcagaaaaaatcaaagggagggaagagagcccctgtaccaacacatgaacgaggaattttccccttttta

SEQ ID NO: 4854 - DNA, 4977 bp, Zea mays
  Clone ID: TF_ZmC119_769
ttacaatttacatgaggctaggaagcctgggaaattcttatctaaaaagtcttgggtttcccatgtagcctcatcttccgaatgttggttccactgtatcttgtagaacttgagagtctttcttcgggtgaccctgtccttttgatccagaactcgaagaggatgttccgagtatgttaagtctggttccaggacaacatcagtcacttcaacggttcgatcaggaacccgaagacatttctttaattgtgacacgtggaacacattgtgcacagcagacaatgtttcggggagctgaagtcgatacgccactggcccatatctttctagaataagaaaaggaccaatatatcgtggtgcaagttttcctttaactccgaaacgcgatacgcccttcattggtgagaccttcaagtagacatagtctccttccaggaaatataagggcattcgccgtttgtctgcataactcttttgccgtgcttgagctttcttcatattatggataattctctgaaccttttcttcaacctctttcaccatatcaggtctaaagaagtatctttctccaggttcagaccaatttaacggagttcgacaccgacgtccatataaagcttcaaagggtgccatcttgatactttcttggtaactgttattgtatgaaaattccgctaggggtaaacattcatcccattttggtgagaaatccaggacacatgcccgcagcatatcttctagtatttggttcaccctctcagtctgcccactggtttgaggatgataagccgaactgtggagtaatttagtacccaaggagttgtgaagtgcttcccaaaacttggctacaaattggggtccacgatccgacacaatggtcttcggaacaccatgcagactaagaatacgagcaatgtacaattgggcgtagacagtaaccggggaatttgtcttgaccggcagaaagtgagcaatctttgtaagtcgatcaacaatcacccagatagagtcatatccttttgcggtcctgggcaatcccacaatgaagtccatgcttatgtcttcccatttccatgttggtattgataatgactgcaatggaccggcagttttcatgtgtatggccttgacacgtctgcaggtgtcgcatttagccacatagcgtgcaatttcaatcttcatttttgtccaccagtaatgttgctttaagtcttgatacatcttagtgcttccgggatgaatagaataacgactaagatgtgcctcatccagaatttgctggcggagctcttcgttctttggcacaactatgcggtttttaaaccatatcacaccttgatcgtcttctttgaaacacttggctgttccagcccttatcttttctcgtatgtgcttcatacccagattatccttttgagcatcaattattctttgcaaaatgattgactcaagccttaactgatttagagtcccttgttgaatgatccccaggtttagcttttccatttcttgacacaaagtgttctcggaagtcttcgccataagacagtggcaggcaaccttacggctcagtgcatctgccaccacattggccttgcccgggtgataatggatctccagttcgtagtctttaatgagctcaagccatcgtctttgcctcatatttaactctgactgggtgaagatgtacttcaaacttttatgatctgtatatatatgacagatatttcccagcagatagtgacgccaaatctttagggcatgaaccacagcagctaactccagatcatgagttggatagtgctcctcatgtcggcgtaactgccttgaagcatacgcaatcactcggccctcttgcatcagtacacagccgagcccactgcccgatgcatcacaatatacgtcaaaaggtttagtgatgtccggttgagctaataccggagcagtggtcaatagtgtcttcagttgttcaaaggcttcattgcacttagaagaccaattgaacttagtatcattcttcaacaaacttgtgattggcttcacaagcttagaaaaatctggtatgaatctgcggtaatacccagctagtccaagaaaactccggacttggtgaacagttgttgggggtttccattccagaatatctttgaccttgctaggatctaccgcaattcctttagctgataatacgtgccccaaaaattgaatttcttccagccagaatgcgcacttactgaacttggcataaagctgatgttccctgaggcgcgtcaatacaatccgtaaatgctgagcatggtcctcttcattcttagaatatattaagatatcgtcgatgaagactaccacgaatttgtccaactcgggcatgaacaccgagttcattaaataagtgaaatgggcaggagcatttgtgagcccgaaagacatcaccaagtattcaaacaatccataccgcgtagtgaatgcggtcttcggtatatcctcgggccgaatacggatctgatgatagcccgacctgagatcaattttagaaaataccctcgccccagttagttgatcaaataagatgtcgattcttggaagagggtacttattcttgatggtgacctcattcaggggccgatagtccacgcacatacgcaaggtttgatccttcttcttcacaaagatggcgggacaaccccacggggacgagcttggccggataaatcccttattcagtagatcttgcaattgagtcttcagttccgccaattcatttgggggcatacggtacgatctgcgggagatgggagccgtaccgggctttagctcaattacgaattctacatctctttcagggggcaatccaggcaaatcttccggaaatacatctggaaactcacatactaccggaatgttcttgatctccggtacaatggcttcatagactctaccagaagttttggccggattggttgcggggagagtcaagagaatctcttcttggttataactcaacctgacggttctgaattcagtgttgaggattgccttgtattgggttaaccaattcattcccaaaattacatctatatcctggccctttagaacaatcatgttagcaggaaagttccgtccggccattattacgggcactccataggccacttctttagtaaaaatatgtcccccaggtgaatgaattttaaatccctcctttgattcatggtatgcaatatgatgttgttccacaaacttcttgctaataaatgtatgtgaagcaccagaatcaaaaagaattattgcagggtgactggccacagggaacgtacccatcatcaccggctctccctccggtgtggtagccacttgcgtataatatactcgccccgttttcttggtattcttgcccgaagtacttcccttgcctggagctgaatttcccgatccttgcgaagcattagattgattttgccttggatagggacaatctttaataaaatgcccagatttgccacagttaaaacatccagttgaagaacttggcaaggcagggaatcgagtgcctggggcacccggctgttttggggtagtgggagtattattggggcggataataataggctgcttgaagggaaatgaaggtggacgagaaaaagggcgattttggtttgagggtcgaatcacaaaccgtggcttcttcgcctggccctgattaggccgctcaccaccgaatcccttagtctttccggaatttgcatatttggcctccacagataaggctgtgctgacagcctttccataagtaagatcaatacatgcagccatttttcgctgcatccggtcgttcagtcctctcataaaacaattcttctttttcaaatccgtatttacctgatcaattgcgtactgtgacaggtgattgaacttgttgagatactgattaacagtatctcccccttgcttcagtttcataaactcttcttgtttcatgtgcagcactccctcaggaatgtaatgctcatggaatgctgctttgaactcgttccatgtaatttgatggttgtctggctggatggccacaaagttcccccaccaagtactggcaggtcctcggagttgctgtgctgcaaatagtggcttctgtacttccgaacagcgtagaaggccaaacttctgctctatgacccgtatccattcgtcggcctcgagcgggtcttctgctttgatgaagagaggcggacgagtctcggagaaatccagataagtggtctcacggggaccttgttggaatcctcttcctgcttgttggtgaagctgttgctgacccgccatctccctcaggaagcgggtgttgtcggctgtggcgtttaccaaggcagcaattgcctcggcaagcgtgggtggaacgggaggcggattcggggtaacgtcccgacccccggatgttccggctgcatcctgtgcacgagtcctcaaggaaggaggaggctcaaaaaggtctaactccccacccagcgcacgtcccgcaacgtgagatggtccagcttctgcctcagcaggtggtgcaggctcacttgggtgtagttgtgagtataatatatggacttcctcgtgcaaagtgttgcagtaaacctgcaggttatcaacagtcgagctaagttctttaactcgggcctgagcccttgcttccttagcacacattagcaaacgagactggacggcccagtcaagagctaagtctcgatcagcgagttgatcctgcagatgtcggatgtcccttcgtagttcgttgattctatcaccgtcagcgacccaagcatcagtcctatgttgaagtgctgcttgaagtcgactcacacgagcttcaaggtctccgatcgggtcgttgcttccactgctgctactttcatgtcggggagccaattgatgccgaggcaccccaattggtcccgtggacttgcgtgccgttagcctggtacgtggcggcat

SEQ ID NO: 4855 - DNA, 5433 bp, Zea mays
  unsure (1)..(5433): unsure at all n locations
  Clone ID: TF_ZmC119_785
ttacaatttacaagaggctaagaagcctgggaaattcttattcaaaaagtcttgggtttcccatgtagcctcatcttccgaatgctggttccactgtatcttgtagaacttgagagtctttcttcgggtgaccctgtccttttgatccagaactcgaataggatgctccgagtatgttaaatctggttccaggacaacatcagtcacttcaacggttcgatcaggaacccgaagacacttcttcagttgtgacacgtggaatacattatgcacagcagacaatgtttcggggagctgaagtcgatacgccactagcccatatctttccagaataagaaaaggaccaatatatcgtggtgcaagttttcctttaactccgaaacgcgatacgcccttcattggtgagaccttcaagtagacatagtctccttccaggaaatataagggcattcgccgtttgtctgcataactcttttgtcgtgcttgagctttcttcatattatggataattctctgaaccttttcttcaacctctttcaccatatcaggtctaaagaagtatctttctccaggttcagaccaatttagcggagtccgacaccgtcgtccatataaggcttcaaagggtgccatcttgatactttcttggtagctattattatatgaaaactccgctaaaggtagacattcatcccattttagtgagaaatccaggacacatgcccgtagcatatcttcaagtatttggttcaccctctcagtctgcccactggtttgaggatgataagccgaactgtggagtaatttagtacccaaggatttatgaagttcttcccaaaacttggatacgaattgaggtccacgatccgacactatggtctttggaacaccatgcagactaagaatacgagcaatgtacaattgggcgtagacagtcaccggggaatttgtcttgaccggcagaaagtgagcaatctttgtaagtcgatcaacaatcacccaaatagagtcatatccttttgcggtcctgggcaatcccacaatgaagtccatgcttatgtcttcccatttccatgttggtattgataatgactgcaatggaccggcagttttcatgtgtatggccttgacacgtctgcaggtatcgcatttagccacatagcgtgcaatttcaatcttcatttttgtccaccagtaatgttgctttaaatcttggtacatcttagtgcttccgggatgaatagaataacgactaagatgtgcctcatccagaatttgctggcggagctcttcgttctttggcacaactatgcggtttttaaaccatatcacaccttgatcgtcttctttgaaacacttggctgttccagcccttatcttttctcgtatgtgcttcatacccagattatccttttgagcatcaattattctttgcaaaatgattgactcaagccttaactgatttagagttccttgttgaatgatccccaggtttagcttttccatttcttgacataaagtgttctcgaagatctttgccataagacagtggcaggaagtcttacgactcaatgcatctgccaccacattggccttgcctgggtgataatggatctccagttcatagtctttgatgagctcaagccatcgtctttgcctcatatttaactctgactgggtgaagatgtacttcaaacttttatgatctgtatatatatgacagatatttcccagcagatagtgacgccaaatctttagggcatgaaccacagcagctaactccagatcatgagttggatagtgctcctcatgtcggcgtaactgccttgaagcatacgcaatcactcggccctcttgcatcagtacacagccgagcccactgcccgatgcatcacaatatacgtcaaaaggtttagtgatgtccggttgagctaataccggagcagtggtcaatagtgtcttcaattgctcaaaggcttcattgcacttagaagaccaattgaacttgatgtcatttttcaacaaacttgtgattggcttcacaagcttagagaaatctggtatgaatctgcgataatacccagctagtccaagaaaactccggacttggtgaacagttgttgggggtttccactccagaatatctttgaccttgctaggatctaccgcaattccttttgctgataatacgtgccccaaaaattgaatttcttccagccagaacgcgcacttgctgaacttggcatatagctggtgttcccttaggcgcgtcaatacaatccgtaaatgctgagcatggtcttcttcattcttggaatatatcaagatatcatcaatgaagactaccacgaacttgtccaattcaggcatgaatactgagttcattagataagtgaaatgggcaggagcatttgtgagcccgaaagacattaccaagtattcaaacaatccatatcgcgtagtaaacgcggtcttcggtatatcctcgggccgaatacggatctgatgatagcccgacctgagatcaattttagaaaataccctctccccagttagttgatcaaataagatgtcgattcttggaagagggtacttattcttgatggtgacctcatttaggggccgatagtccacgcacatgcgcaaggtttgatccttcttcttcacaaagatggcgggacaaccccacggggacgagcttggccggataaatcccttattcagcaggtcttgtaattgaatcttcaattctgccagttcattagggggcatacggtacgatcttcgggaaatcggagccgtaccgggctttagctcaatcacaaattctacctctctttcagggggtagtccaggcaaatcttccggaaatacatctggaaactcacatactaccggaatgttcttgatctccggtacaatggcttcatagactctaccagaagctttggctggattggttgcggggagagtcaagaaaatctcttcttggttatagctcaacctgacggttctgagttcagtgttgaggattgccttatattgggttagccaattcattcccaaaattacatctatatcctggcccttcagaacaatcatgttagcaggaaagttctgtccgaccattgttactggcactccataggccacttctttagtataaatgtgtcccccaggtgaatgaattttaaatccctcctttgattcatggtatgcaatatgatgttgttccacaaacttcttgctaataaatgtatgtgaagcaccagaatcaaaaagaataattgctgggtgactggccacgggaaacgtacccatcatcaccggctctccctccggtgtggtagccacttgcgtataatatactcgccccgttttcttggtattcttgcccgaagtacttcccttgcctggagctgaatttcccgatccttgcgaagcattagattgattttgccttggatagggacaatctttaataaaatgcccagatttgccacagttaaaacatccagttgaagaacttggcaaggcagggaatcgagtgcctggggcacccggctgttttggggtagtgggggcattgttggggcggataataataggctgcttgaagggaaatgaaggtggacgagaaaaagggcgattttgggttgagggtcgaatcacaaaccgtggtttcttcgcctggccctgattaggccgctcaccaccgaaccccttagtctttccagaatttgcatatttggcctccacagataaggctgtgctgacagcctttccataagtaagatcaatacatgcagccatttttcgctgcatccggtcgttcagtcctctcataaaacaattcttctttttcaaatccgtattcacctgatcaattgcgtactgtgacaggtgattgaacttgttgagatactgattaacagtatctcccccttgcttcagtttcataaactcttcttgtttcatgtgcagcactccctcggggatgtaatgttcacggaaagctgctttgaactcgttccatgtaatttgatggttgtccggctggatggccacaaagttcccccaccaagtactggcaggtcctcggagttgctgtgctgcaaatagtggcttctgtacttccgaacagcgtagaaggccaaacttctgctctatgacccgtatccattcgtcggcctcgagcgggtcttctgctttgatgaagagaggcggacgagtctcagagaaatccagataagtggtctcacggggaccttgttggaatcctcttcctgcttgttgttgaagctgttgctgacccgccatctccctcaggaagcgggtgttgtcggctgtggcgttcaccaaggcagcaattgcctcggcaagcgtgggtggaacgggaggcggattcggggtaacgtcccgacccccggatgttcctgctgcatcctgtccacgagtcctggtcggcatctgtggcaaaatcatttgaagtaaacataatgtgccagagaaaaccttccattttacattactcaaggaaggaggaggctcaaaaaggtctaactccccacccagcgcacgtcccgcaacgtgagatggtccagcttctgcctcagcaggtggtgcaggctcacttgggtgtagttgtgagtataatatatggacttcctcgtgcaaagtgttgcagtaaacctgcaggttatcaacagtcgagctaagttcattaactcgggcctgagcccttgcttccttagcacacattagcaaacgagactgtacagcccaatcaagtgctaagtctcgatcagcgagttgatcctgcagatgtcggatgtcccttcgtagttcgttgattctatcaccgtcagcgacccaagcatcagtcctatgttgaagtgctgcttgaagtcgactcacacgagcttcaaggtctccaatcgggtcgttgcttccactgctgctactttcatgtcggggagccaattgatgccgaggcaccccaattggtcccgtggacttgcgtgccgttagcctggtacgtggcggcatcttttctaaggaggaaaatgttattagtaagattcttagcatgatgcatgtataattacagaatcagccttagtcgattcaaccttctatatgttgcactcttcctatctggtctttaagatagactcttcagaatacttaggtaagaagagaaaagaatttttttttttttttagttaagacttttgaaaattcttttgaagatgcctcataatatctgcaaaaaagggctacgctccgataccagctgtgacggtacctcccaagtaattaggcccaccttcagttgtccttgtctaacggacatcaaacaaccctgtaggtgcccctgaactacttgacaagttaggtatccttcctttccttaccaggaacgtatancac

SEQ ID NO: 4856 - DNA, 1660 bp, Zea mays
  Clone ID: TF_ZmC119_832
ccatcatcaccggctctccctccggtgtggtagccacttgcgtataatatactcgccccgttttcttggtattcttgcccgaagtacttcccttgcctggagctgaatttcccgatccttgcgaagcattagattgattttgccttggatagggacaatctttaataaaatgcccagatttgccacagttaaaacatccagttgaagaacttggcaaggcagggaatcgagtgcctggggcacccggctgttttggggtagtgggggcattgttggggcggataataataggctgcttgaagggaaatgaaggtggacgagaaaaagggcgattttggtttgagggtcgaatcacaaaccgtggtttcttcgcctggccctgattaggccgctcaccaccgaatcccttagtctttccagaatttgcatatttggcctccacagataaggctgtgctgacagcctttccataagtaagatcaatacatgcagccatttttcgctgcatccggtcgttcagtcctctcataaaacaattcttctttttcaaatccgtattcacctgatcaattgcgtactgtgacaggtgattgaacttgttgagatactgattaacagtatctcccccttgcttcagtttcataaactcctcttgtttcatgtgcagcactccttcagggatgtaatgctcgcggaaagctgctttgaactcgttccatgtaatttgatggttgtccggctggatggccacaaagtttccccaccaggtactggcaggtcctcggagttgctgtgctgcaaacagtggcttctgtacttccgaacagcgtagaaggccaaacttctgctctatgacccgtatccattcgtcggcctcgagcgggtcttctgctttgatgaagagaggcggacgagtctcagagaaatctagataagtggtctcacagggaccttgttggaatcctcttcctgcttgttgttgaagctgttgctgacccgccatctccctcaggaagcgggtgttgtcggctgtggcgttcaccaaggcagcaattgcctcggcaagcgtgggtggaacgggaggcggattcggggtaacgtcccgacccccggatgttccggctgcatcctgtgcacgagtcctcaaggaaggaggaggctcaaaaaggtctaactccccacccagcgcacgtcccgcaacgtgagatggtccagcttctgcctcagcaggtggtgcaagctcacttgggtgtagttgtgagtataatatatggacttcctcgtgcaaagtattgcagtaaacctgcaggttatcaacagtcgagctaagttctttaactcgggcctgagcccttgcttccttagcacacattagcaaacgagactgcacggcccagtcaagtgctaagtctcgatcagcgagttgatcctgcaagtgtcggatgtcccttcgcagttcgttgattctatcaccatcagcgacccaagcatcagtcctatgttgaagtgctgcttgaagtcgactcacacgagcttcaaggtctccgatcgggtcgttgcttccactgctgctactttcatgtcggggagccaattgatgccgaggcaccccaattggtcccgtggacttgcgtgccgttagcctggtacgtggcggcat

SEQ ID NO: 4857 - DNA, 3022 bp, Zea mays
  Clone ID: TF_ZmC3310_2
atgtcggaagaacacgccaagaaggagatggaaaccggcgaaaagcccactacaagccacgggaaggcttcatcggaagagtcccgcaaaatgcgataatgtgagcagtagaaagactcaaatggagaacattctggtcactttaggtctccttatcctgttcggttaccaagaatgatggcatatttgttagtcccactgcttgcagcgacgaagcaggtaaaggagggtatatgtttccacaagatgggaaaccagatcatatatgcaggaactatgaaatactgaatgataaaaatgtctcatttaggtaccatccataggggatgaggattatgatgaggacaaggtggcccaaatcgagcacttcaactcccaagctacaaccatactcctcgcctctctaagtagggaggagtacaacaaggtgcaaggattaaaaagcgccaaggaagtttgggacgtgctcaagaccgcgcacgaaggtgatgaactaaccaagatcaccaagcgggaaacgatcgagggggagctcggtcactttcgtcttcgccaaggggaggagcctcaagacatgtacaaccggctcaaaaccttggtgaatcaagtgcgcaacctcgggagcaagaaatgggatgaccacgaggtggttaaggttattttaagatcacttattttccttaaccttactcaagtccaattaattcgtggcaatcctagatacacactaatgactcatgaggaagtaatcggaaattttgtgagctttgagtttatgattaaaggctcaaggaagatcaacgagcttgacggcccctccacgtccgaagcacaatcggtcgcatttaaggcgacggaggagaagaaggaggagtctacaccgagtagaacacccatcgacgcctccaagctcgacaacgaggaaatggcgcttgtcatcaaaagctttcgccaaatcctcaagcaaaggagggggaaagactacaaaccccgctccaagaaggtttgctacaagtgtggtaagcccggtcactttatagcaaaatgtcctatttctagtgacaggggcgacgacaagaaggggagaagaaaggagaagaagaaatactacaagaagaagggcggcaatgcccatgtttgtcgcgagtgggactccgacgaaagctctagcgactccttcgacgacgaggatgccgccaacatcgccatcaccaagggacttctcttccccaacgtcggccacaagtgcctcatggcaaaggacggcaaaaagaagaaggttaaatccaaatcctccactagatatgagtcttctagcgataataatgctagtgatgaggaagataatttgcgtactctttttgccaacttaaacatgcaacaaaaagagaaattaaatgaattgattagtgctatccatgagaaggatgatctcttggactcccaagaggacttccttattaaagaaaacaagaagcatgttaaggttaaaaatgcttattctctagaagtagaaaagtgcgaaaaattatctaggaaatgtgcccttgggtcatttctaagtattttggtgattgagtgccaacacaagtgcttaaatgtgaatctatgcccatggatgaacaaagtgcaaatcaagagtaaaggtgctctcacaattcccaatcttagaaatgataatgataatttgattgctaagattgaagaattaaacattactcttgctagccttaggaatgaaaatgaaaaattgcttgctaaggctaaagaacttgatgtttgcaatgctaccatttccgaccttagaagtaaaaatgacatgttacatgctaaggttgaagaattaaatgtttacaaaccctctacatctatcgttagtcatgtctctatttgcactagatgtagagatgttaatattgatgctatccatgatcacattgctatgattaaacaacaaaaagatcatatagcaaaattagatgctaaaattgccgagcatgaactagagaatgaaaaatttaaatttgctcgtagtatgctttatagtgggagacgtcctggcatcaaggatgtcattggcttccaacagggaggaaatgtcaagcttaatgcccctaaaagattgtctaattttgttaagggcaaggctcccatgcctcaggataacgagggctatattttatatcctgctggttatcctgaggataagattaggagaattcatgctaaaaagactcatcctatttctcaccatgcttttatttataagaatgaggcttctagctctaggcgttctacccatgttaaaatgcctaaaaagaaatctcctattgcatcaaataatcataacatttcatttaagacttttgatgcttcttatgtgcttactaacaaataaggcaaagtagttgccaaatatgttgggggcaaacacaaggggtcaaagacttgtgtttgggtacccaaagttcttgtttctaatgccaaaggacccaaaaccatttgggtttatgcatccgggggctcaagttggataatcgacagcgggtgcacaaaccacatgacaggggagaagaagatgttctcctcctacgagaaaaacgaagatccccaaagagcgatcacattcggggatggaaatcaaagtttggaaggattggataaaattgctatatctcctgaccattctatttctaatgtttttcttgtagattcattagattacaatttgctttccgtttctcaattatgtcaaatgggctacaactgtctttttactgatgtaggtgtcactgtctttagaagaagtgatgattcaatagcatttaagggagtgttagaaggtcagctatacttagtagattttgatagagctaaactcgacacttgcttaattgctaagactagtccatgttggctctggcaccgccgactagtccatgttgggatgaagaatcttcataagcttctaaagggagagcacattttaggattaacaaatgttcattttgagaaagacagg

SEQ ID NO: 4858 - DNA, 1647 bp, Zea mays
  Clone ID: TF_ZmC7465_22
atgtcgggagatcacgccaagaaggagatggagaccggcgaaaagcccactacaagccacgggagcacttcatcggaagagtcccgcaccaagaggaaggagaagaaggactcctcgaaacggaaggagaaaaagtcttcctcctctcaccacaaagagaagaaggaaaaatcttcttcccacaagccgcatcggaaaggcgacaagcacaagaggatgaggaaggtggtctactacgagaccgacacttcatcaacatcgacctccgactccgatgcgccctccgtcacttctaagcgccaagagcgcaagaagtatagggatgagaactatgatgaggatgaggtggcccaaatcgagcacttcaactctcaagcaacaacaatactcctagcctctttgagtagagaagagtataacaaagttcaagggttgaagaatgcaaaggagatttgggatttactcaagaccgcgcatgaaggtgatgagctcaccaagatcaccaagcgggaaacgatcgagggggagctcggtcggttccggcttcgcaaaggggaggagccacaacacatgtacaaccggctcaagacattggtgaatcaagtgcgcaacctcgggagcgtaaagtgggatgaccacgaggtggttaaggttattctaagatctcttattttccttaaccctactcaagttcaattaattcgtggtaatcctagatatactaaaatgacccccgaggaagttatcgggaattttgtaagttttgagtgcatgatcgaaggctcgaggaagatcaacgagcttgatgatgccaccacatccgaagctcaacccgttgcattcaaggcaacggaggagaagaaggaggagtctacaccaagtcgacaaccaatagacgcctccaagctcgacaatgaggaaatggcgctcgtcatcaagagcttccgccaaatcctcaagcaaaggagggggaaggattacaagtcccgctccaagaaggtttgctacaaatgtggtaagcccggtcattttattgctaaatgtcccatatctagtgacagtgaccgaggcgacgacaagaaggggagaagaaaggagaagaagagatactacaagaagaagggtggcgatgcccatatttgtcgggagtgggattccgacgaaagctcaagcgactcctccgacgacgaggacgccgccaacatcgccgtcaccaagggactcctctttcccaacgtcggccacaagtgcctcatggcaaaggacggcaaacggaagaagtgagagagctccaccgactcctcctccgacgaggacgccgccaacatcgctgtcaccaagggactcctcttccccaacgtcggccacaagtgcctcatggcaaaggacggcaaaaggaagaaggtaaaatcaagatcctccactaaatatgaaacctctagtgatgaggatgatgctagcaatgaggaggataacttgcgcgttctttttgccaaccttaacatggaacagaaggaaaaactaaatgagctaattagtgccatccatgaaaaggatgacctcttggactcccaagaggacttcctaatcaaagaaaataaaaagcatgttaaggttaaaaatgcttatgctctagagtcgacctgc

SEQ ID NO: 4859 - DNA, 1029 bp, Zea mays
  Clone ID: TF_ZmC7465_26
atggagaccggcgacaagcccactacaagccacgggagcacttcatcggaagagtcccgcaccaagaggaaggagaagaagaagagctcctccaacaaagggaaggagaagaaatcttcttctcaccacaaagagaagaaggaaaaatcttcttcccacaagccgcatcggagtggggacaagcacaagagaatgaggaaagtggtctactacgagaccgacacttcatcaacatcgacctccggctccgatgcgccctccgtaacttctaaacgccaagagcgggatgaggattatgatacggacgaagtggcccaaatcgagcacttcaactcccaagccacaaccatactcctcgcctctttaagcaaggaggaatacaacaaagtgcaagggttgaagaatgcaaaggagatttgggaccttctcaagaccgcgcacgagggtgatgaactcaccaagatcaccaagcgggaaacgatcgagggggagctcggtcgcttccgtcttcgccaaggggaggagccacaagatatgtacaaccggctcaaaaccttggtgaaccaagagcgcaacctcgggagcaaaaagtgggacgaccatgaggtggttaaggttattctaagagctctcatttttcttaaccccactcaagttcaattaattcgtggtaatcctagatacccactaatgacccccgaggaagttatcgagaattttgtgagctttgaatgtatgattaaaggatcaaagaagatcaacgagcttgacgaaccctccacgtccgaggcgcaaccagtggccttcaaggcgacggaggaaaagaaggaggagtctacaccaagtagacaaccaattgacgcctccaagctcgacaatgaggagatggctttaatcatcaaaagctttcgccaaatcctcaagcaacggagggggaaggactacaaaccccgctccaagaaagtgtgttacaaatgtggtaagcccggtcatttcattgcaaaatgtcctatatctagtgacagttga

SEQ ID NO: 4860 - DNA, 2691 bp, Zea mays
  Clone ID: TF_ZmC951_305
ttagtgggcccaggggatatctatcccccacactttggcattagaaacaagaactttgggtacccaaacacaagtcttggagcccttgtgtttgcccccaacaaacttggcaactaccttgccggatttgtcagtcaaaacataagatgcatcaaaagtcttaaatgaaatgctatgatcatttgatgcattaggagttttcttcttaggcaacttggcacgggttggttgcctagagctagatgtctcacccttatacataaaagcatgattagggccagagtgagacttcctagaatgagttctcctaattttgctctcgggataaccggcagggtacaaaatgtaaccctcgttatcctgaggcatgggagctttgcccttaacaaagttagacaagttcttagggggagcattaagtttgacattgtctcccctttggaagccaatgccatccttaatgccagggcgcctcccattatagagcatacttctagcaaatttaaacttttcattctctaagttatgctcggcaattttagcatctaataatgctatatgatcattttgttgtttaattaaagtcatgtgatcatgaatagcattgatatcaacatctctacatctagtacaaatagaagtgtgctcaacggtagatgtagagggtttgcaagattttagttctacaaccttagcatgcaacatatcattcttagttctaaggtcggaaatagtagtattgcaaacatcaaaatctttagccttagcaatcaaattttcattttctactctaaggctatcaagagaatcattcaattccttaatcttagcaagcaaatcatcattatcatttctaagatttggaattgagacatcacatacatgagaatcaaccttagcaattaatctagcattttcatttctaaggttgtcaatagtgtcatggcatgtgcttagcttactagataatttgttacatttttctacctctagagcataagcatttttaaccttaacatgctttttgttttccttaataaggaagtcctcttgagagtccaagagatcatccttctcatgaatagcactaatcaattcatttaatttttccttttgttgcatgttaagatcggcaaaaagggtacgcaaattattctcctcatcactagcattatcatcactagaggattcatatttagtagaggatttagatttaaccttcttccttttgccgtcctttgccatgaggcacttgtggccgatgttggggaagaggagtcccttggtgacggcgatgttggcggcgtcctcgtcggaagaggactcggtggagctctcgtcggagtcccactcccggcaaacatgggcatcgccgcccttcttcttgtagtacttcttcttttctctcctctttcccttcttgtcgttgcccctgtcactgtcactagatataggacattttgcaataaaatgaccgggcttaccacatttgtagcacactttcttggagcgaggtttgtagtccttccccctccgttgcttgaggatttggcgaaagcttttgatgattaaagccatttcctcattgtcgagcttggaggcgtcaattggttgtctactcggtgtagactcctccttcttctcctccgtcgccttaaatgccactggttgtgcttcggacgtggagggttcgtcaagctcgttgatcttctttgatcccttgatcatatattcaaagctcacaaaattcccgattacttcctcgggagtcattagtgtgtatctaggattaccacgaattaattgaacttgagtggggttaaggaaaataagagatcttagaataaccttaaccacctcgtggtcatcccacttcttactcccgaggttgcgcacttggttcaccaaggttttgagccggttgtacataccttgtggctcctccccttggcgaagacgaaagcgaccgagctccccctcgatcgtttcccgcttggtgatcttggtgagttcatcaccctcgtgcgcggtcttgagaaggtcccaaatttcctttgcattcttcaacccttgcaccttgttgtattcctccttgcttagagaggcgaggagtatggttgtagcttgggagttgatgtgctcgatttgggccacttcgtccgtatcataatcctcatcccctatggatggtacctgtgctccaaactcaacaacattccatatacttttgtggagtgaggttagatgaaatttcattaaatcactccacctagcataatcttcgccatcaaaagttggcggtttgcctaatggaacggaaagtaatggagtatgtctagatgtacgagaatagtgtgaggggatcttactgaacttcttgcgctcttggcgcttagaagttacggacggcgcatcggagtcggaggtcgatgttgatgaagtgtcggtctcgtagtagaccaccttcctcatcctcttgtgcttgtcgcctttccgatgcgacttgtgggaagaagatttttccttcttctctttgtggcgtgaggaagaagatcttttctccttccgtttggaggagtccttcttcttctccttcctcttggtgcgggactcttccgatgaagtgctcccttggctcgtagtgggcttgtcgccggtctccatctccctcttggtgtgatctcccgacat

SEQ ID NO: 4861 - DNA, 5031 bp, Zea mays
  Clone ID: TF_ZmC951_312
tcatttctccccctttttggcatgaatcgccaaaaacggaaccattagagccctcgaagtgctatcttcccctcccgtgtcgaggtcgagatgcccattagttcccatgggtgtcttgatgggtttggcatccttcatcccaaacttggttagaatgtcttgagtgtactttgtttggctaatgaaggtgccctcttggagttgtttgacttggaatcctagaaaatacttcaactcccccatcatagacatctcgaatttctgtgtcatgatcctactaaactcttcacatgtagactcgttagtagacccaaatataatatcatcaacataaatttggcatacaaacaagtcattttcaagtgttttagtaaagagtgtaggatcagctttgccgactttgaatccatttgcaataagaaaatctctaaggcattcataccatgctcttggggcttgcttgagcccataaagcgccttagagagcttatagacatggttaggatactcactgtcttcaaagccgggaggttgctcaacatagacttcttccttgattggtccattgaggaaggcacttttcacgtccatttgataaagcttaaagccatggtaagtagcataggctaataatatgcgaattgactcaagcctagctacgggtgcataggtttcaccgaaatccaaaccttcgacttgggagtaccctttggccacaagtcgagctttgttccttgtcaccacaccatgctcatcttgcttgttgcggaagacccatttggttcctacaacattttgattaggacgtggaactaaatgccatacctcatttctagtgaagttgttgagctcctcttgcatcgccaccacccaatccgaatcttgaagtgcttcctctaccctgtgtggctcgatagaggaaacaaaagagtaatgttcacaaaaatgtgcaacacgagatctagtagttacccccttatgaatgtcgcctaggatggtgtcgacggggtgatctcgttgaattgcttggtggactcttgggtgtggcggcctttgttcctcttcctccttgtcttcctcatttgcatctcccccttgatcattgccattatcttgaggtggctcatttgcttgatcttctacttcatcaacttgagcttcatcctcattttgagttggtggagatacttgcgtggaggaggaaggttgatcttgtgcatttggaggctcctcggattccttaggacacacatccccaatggacatgtttcttagtgcgatgcatggagcctcttcttcacctatctcatcaagatcaacttgctctacttgagagccgttagtttcatcaaacacaacgtcacatgagacttcaactagtccagtggacttgttaaagaccctatatgcccttgtgtttgagtcataaccaagaaaaaaaccttctacagtcttaggagcaaatttagattttctacctcttttaacaagaataaagcatttgctaccaaagactctaaaatatgaaatgttgggctttttaccggttaggagttcatatgatgtcttcttgaggattcggtgtagatataaccggttgatggcgtagcaagcagtgttgaccgcctcggcccaaaaccgatccgaagtcttgtactcatcaagcatggtccttgccatatccaatagagttctattcttcctctccactacaccattttgttgtggagtgtagggagaagagaactcatgcttgatgccctcctcctcaaggaagccttcgatttgagagttcttgaactccgttccgttgtcgcttcttattttcttgatccttaagccgaactcattttgagcccgtctcaagaatccctttaaggtttcttgggtttgagatttttccctgtctttctcaaaatgaacatttgttagtcctaagatgtgttctccctttagaagtttatgaagattcttcatcccaacatgagccagtcggcggtgccagagccaacccatgttagtcttagcgattaagcaagtgtcgagttcagctctatcaaaatctaccaagtatagctgaccctctaacactcccttaaatgctattgaatcatcacttcttctaaagacagtgacaccaatatcagtaaaaagacagttgtagcccatttgacataattgagatacagagagcaagttgtaatctttgaccaaaccttgatttccatccccgaatgtgatcgctctttggggatcttggtttttctcatatgaggagaacatctttttctccccagtcatgtggtttgtgcacccgctgtcgagtatccaacttgagcccccggatgcataaacccaaatggttttgggtcctttggcattagacacaagaactttgggtacccaaacacaagtcttggagcccttgtgcttgcccccaacgtatttggcaactaccttgccggatttgttagtcaaaacataagatgcatcaaaggttttaaatgaaatgctatgttcatttgatgcaataggagttttctttctaggcaactttgcatgggttggttgcctagagctagatgtctcacccttatacataaatgcatgattagggccagagtgagacttcctagaatgaattctcctaattttgctctcaggataaccggcagggtataaaatgtaaccctcgttatcctgaggcatgggagccttgcccttaacaaagttggacaatcttttaggaggggcactaattttgacattgtctcccctttggaagccaatgccatccttgatgcccgggcgtctcccgttataaagcatgctacgagcaaatttaaatttctcattttctaagttgtgctcggcaattttagcatctagttttgctatatgatcattttgttgtttaattaaagccatatgatcataaatagcattgatatcaacatctctacatctagtacaaatagatacatgctcaacaatagatgtagagggtttgcaagaattaagttcaacaatcttagcatgaagaatatcatttttatctctaagattggaaatggtagcattgcaaacatctagttctttagccttagcaattaaatcttcattttctactttaaggctagcaagagaaatgtttaattcttcaatcctagcaagcaaattatcattattatctctaggattgggaattgaaacattacaaacatgtgaatcaaccttagcatttaaactagcattttcattcctaaggttgtcaatcatctcacggcaagtgcttagctcacaagatagtttttcacatttttctacttctaaagcataagcctttttaaccttaacatgtttcttgttttctttaattagacaatcctcttgggaatccaagaggtcatccttttcatgaatagcactaattaattcatttaatttttccttttgttctatgttaaggttggcaaaaagagtacgcaagttatcctcctcatcactagcattatcatcactagaagactcatatttagtggaggagttggatttaaccttcttccgtttgacgtcctttgccatgaggcacttgtggccgacgttggggaagagaagtcccttggtgacggcgatgttggcggcgtcctcgtcgtcggaggagtcgctggagctttcgtcggaatcccattcccgacaaacatgggcatcgccgcccttcttcttgtagtacctcttcttctcctttcttctccccttcttgtcgtcgcctcggtcactgtcacttgatataggacatttagcaataaaatgaccgggcttaccacatttgtagcaaaccttcttggagcgggacttgtagtctttccccctcctttgtttgaggatttggcggaagctcttgatgacgagcgccatttcctcattgtcgagcttggaggcgtctattggttgtcgagttggtgtagcctcctccttcttttcttccgtcgccttgaatgcgacaggttgagcttcggatgtggatggatcatcaagctcgttgatcttcctcgagccttcgatcatgcactcaaaacttacaaaattcccgataacttcctcgggggtcattttagtatatctaggattaccacgaattaattgaacttgagtaggattaaggaaaatgagagatcttagaataaccttaaccatttcgtggtcgtcccactttacgctcccgaggttgcgcacttggttcaccaaggtcttgagccggttgtacatgtgttgtggctcctctcctttgcgaagccggaaccgaccgagctccccctcgatcgtttcgcgcttggtgatctttgtgagttcgtctccctcgtgcgcggttttgagcacatcccaaacttctttggcgctcttcaacccttgaactttgttatactcctctctacttaaagaggcgaggagtattgttgtcgcttgagagttgaagtgctcgatttgggccacctcatcctcatcataatctttgtcccctacggatggtacctgtgcaccaaactcaacaacatcccatatacttttgtggagtgaggttagatgaaatcgcattaaatcactccacctagcataatcttcaccatcaaaagttggtggtttgcctaatgggacggaaagtaaaggtgcatgtttagaaatgcgagggtagtgtagggggatcttactaaacttcttacgctcttggcgtttagaagttacggagggcgcgtcggagccggaggtcgatgttgatgaagtgtcggtctcgtagtagaccactttcctcatcctcttttgcttgtccttactccgatgcggcttgtgggaagaagacttttccttcttctctttgtggtgagaagaagatttcttctccttccctttgttggaggagatcttcttcttctccttcctcttggtgcgggactcttccgatgaagtgctcccttggcttgtagtgggcttttcgccggtctccatctccttcttggcgtgatctcccgacat

SEQ ID NO: 4862 - DNA, 4659 bp, Zea mays
  Clone ID: TF_ZmC951_325
tcacccccccccctctaggcgactatcacattcataccatgctcttggggcttgcttgagctcataaagcgccttagagagcttataaacatggttagggtactcactatcttcaaagccgggaggttgctcaacatagacctcttccttgattggtccattgaggaaggcacttttcacgtccatttgataaagcttgaagccatggtaagtagcataggccaataatatttgaattgactcaagcctagctacgggtgcataggtttcactgaaatccaaaccttcgacttgggagtatcccttggccacaagtcgagctttgttccttgtcaccacaccatgctcatcttgcttgttgcggaagacccatttggttcctacaacattttgattaggacgtggaactaaatgccatacctcattcctagtgaagttgttgagctcctcttgcatcgccaccacccaatccgaatcttgaagtgcttcctctaccctgtgtggctcaatagaggaaacaaaagagtaatgctcacaaaaatgtgcaacacgagatctagtggttacccccttatgaatgtcgccgagaatggtgtcgacggggtgatctcgttggattgcttggtggactcttgggtgtggcggccttggttcttcatcctccttgtcttgatcatttgcatctcccccttgatcattgtcgtcatcttgaggtggctcatttgcttgatcttctcctttatcaacttgagcctcatcctcattttgagtcggtggagatgcttgcgtagaggaggatggttgatcttgtgcatttggaggctcttcggattccttaggacacacatccccaatggacatgttccttagcgcgatgcatggagcctcttcaatacctatctcatcaagatcaacttgctctacttgagagccgttagtctcatcaaacacaacatcacaagaaacttcaacttgcctagaggacttgttaaagactctatatgcccttgtgtttgagtcatatcctagtaaaaagccttctacagtcttaggagcaaacttagattttctacctcttttaacaagtataaagcatttgctaccaaagactctaaaatatgaaatattgggctttttaccggttaggagttcatacgatgtcttcttgaggattcggtgaagatataaccggttgatggcgtaacaagcggtgttgaccgcctcggcccagaaccgatccgaagtcttgtactcatcaagcatggttcttgccatgtccaatagagttctattcttcctctccactacaccattttgttgtggggtgtagggagaagagaactcatgcttgatgccctcctcctcaaggaagccttcaatttgtgagttcttgaactccgtcccgttgtcgcttctaattttcttgatccttaagccgaactcattttgagcccgtctcaagaatccctttaatgtttcttgggtatgagatttttcttgcaaaaagaacacccaagtgaagcgagaataatcatccacaataacgagacagtacttactcccgtcgatgcttatgtaagcgatcgggccgaataggtccatgtgtaggagctccagtggcctgtcggtcgtcatgatgttcttgtgtggatgatgggcaccaacttgctttcctgcttggcatgcgctacatatcctgtctttctcaaaatgaacatttgttaatcctaaaatgtgttctccctttagaagcttatgaagattcttcatcccaacatgggctagtcggcggtgccagagccaacccatgttagtcttagcaattaagcaagtgtcgagttcagctctatcaaaatctaccaagtatagctgaccctctaacactcccttaaatgctactgaatcatcacttcttctaaagaaagtgacacctttgaccaaaccttggtttccatcctcgaatgtgatagctcgttggggatcctggtttttctcataggaggagaacatcttcttctcccctgtcatgtggtttgtgcacctgctgtcgataatccaacttgagcccccggatgcataaacccaaatggttttgggtcctttggcattagaaacaagaactttgggtacccaaacacaagtctttgaccccttgtgcttgcccccaacatatttggcaactactttgccggatttgttagttaaaacataagatgcatcaagagttttaaatgaaatgtcatgttcatttgatgcactaggagttttcttcttaggcaacttagcatgggttggttgcctagaactagatgtctcacccttatatataaaagcatggttagggccagagtgagacttcctagagtgaattctcctaattttgctctcgggataaccggcagggtataaaatgtaaccctcgttatcctgaggcatgggagtcttgcccttaacaaagttggacaatttcttaggaggggcattaagtttgacattgcctccctgttggaagccaatgccatccttaatgccagggcgtctccctctatagagcatgcttctagtaaatttaaatttttcattttctaagtcatgctcggcaatcctagcatctagttttgctatatgatcattttgttgtttaattaaagtcatgtgatcatgaataacattaacatcaacatctctacatctagtacatatagaagtgtgcttagcatgcaatatatcatttttagttctaaggtcggaaatagtagcattgcaaacatcaaaatccttagccttagcaagcaatttttcattctcaatcctaaggctagcaagagatatgttcaattcttcaatcttagcaagccaatcatcattatcattcttaagattgggaattgaagtatcacaaacatttgaatcaaccttagctaataaattagcattttcatttctaaggttgtcgattgtctcatggcaagtgcttagctcactagataatttttcacatttttcaacttctagagcataagcatttttaattttaacatgctttttgttttccttgattaggaagtcctcttgggagtccaagagatcatccttctcatggatggcactaattaattcatttaatttctccttttgttgtatgtttaagttgacaaaaagagtgcgcaagttatcttcctcatcactagcattttcatcactagaggattcatatctagtggaggatttagatttaaccttcttctttttaccgtcctttgccatgaggcacttgtggccgacgttggggaagagaagtcccttggtgacggcgatgttggcggcgtcctcgtcgtcggaggagtcgctagagctttcatcggagtcccactcacgacaaacatgggcatcgccgcccttcttcttgtagtacctcttcttctcctttcttctccccttcttgtcatcacccctgtcactagaaataggacatttagctataaagtgaccgggcttaccacatttgtagcaaaccttcttggagcggggcttgtaatccttccccctcctttgcttgaggatttggcgaaagcttttgatgacaagcgccatctcctcgttgtcgagcttggaggcgtcgatgggtgttctactcggtgtaggctcctccttcttctcttccgtcgctttgaatgcgaccggttgagcttcggacgtggaaggaccgtcgagctcgttgatcttccgtgagcccttgatcataaattcaaagctcacaaaattcccgattacttcctcgggagtcattagtgtatatcttggattaccacgaattaattgtacttgagtagggttaaggaaaataagagatcttagaataaccttaaccacctcgtggtcatcccactttttgctctcgaggttgcgcacttggttcaccaaggttttgagccggttgtacatgtcttgtggctcctccccttggcgtagacggaagcgaccgagctccccctcgatcgtttcccgcttggtgatcttggtgagttcatcaccctcgtgcgcggttttgagcacgtcccaaacttccttggcgctctttaatccttgcaccttgttgtactcctccctacttagagaggtgaggagtattgttgtggcttgggagttgaagtgctcgatttgggccacctcgtcctcatcataatcctcatcccctatggatggtacctgtgctccaaactcaacaacattccatatacttttgtggagtgaggttagatgaaatttcattaaatcactccacctagcataatcttcaccgtcaaaggttggcggtttgcctaatgaaacggaaagtaatggagtatgtttagaagtacgaggatagtgtaaggggatcttactaaacttctttcgctcatggcgcttagaagtcatggagggcgcgtcggagccggaggtggaaggtgatgaagtgtcggtctcgtagtagaccaccttcctcatcttctttatcttgtcgccactccgatgcgacttgtgggaagaagtcttcttttccttcttcttctccttcttcttctccttgttgcgggactctcccgatagagctttctcgttgcttgtagtgggcttttcgccggtctccatctccttcttggcgtgatctcccgacat

SEQ ID NO: 4863 - DNA, 4866 bp, Zea mays
  Clone ID: TF_ZmC951_330
ttagatggtggtgcggtccttttgctttgggctaatactttctccccctttggcatgaatcgccaaaaatggagtcattagagccctcagaattattctctcacccttttgatccacggaattaccttccgtgtcgaggtcgagatgcccatttgttcccatgggtgtcttgatgggtttggcatccttcatcccaaacttgcttagaatatcttgagtatacttcgtttggcttaggaaggtgccctcttggagttgcttcacttgaaatcctaagaaatacttcaactcccccatcatagacatctcgaactttcgtgtcatgatcctactaaactcttcacatgtagactcgttagtagacccaaatataatatcatcaacataaatttggcatacaaacaagtcattttcaagtgttttggtaaagagcgtaggatcgacttttccaactttgaagccattagtgataagaaaatctctaaggcattcataccatgctcttggggcttgcttgagcccataaagcgccttagagagtttatacacatggttagggtactcactatcttcaaagccggggggttgctcaacatagacctcttccttgattggtccattgaggaaggcacttttcaagtccatttggtaaagcttgaagccatggtaagtagcataggccaataatatacgaattgactcaagcctagctacgggtgcataggtttcaccgaaatccaaaccttcgacttgggagtatcccttggccacaagtcgagctttgttccttgtcaccacaccatgctcgtcttgctcattcctggtgaagttgttgagctcctcttgcatcgccaccacccaatccgaatcttgtagtgcttcctctaccctgtgtggctcaatagaggaaataaaagagtaatgctcacaaaaatgtgcaacacgagatctagtggttacccccttatgaatgtcgccgagaatggtgtcgacggggtgatctcgttggattgcttggtggactcttgggtgtggaggccttggttcatcatcctccttgtcttgatcatttgcatctcccccttgatcattgccgtcatcttgaggtggctcatttgtttgatcttctccttcatcaacttgagcctcatcctcattttgagttggtggacatgcttgcgtggaggaggatggttgatcttgtgcatttggaggctctttggattctttaggacacacatccccaatggacatgctccttagcgcgatgcacggagcctcttcatcacctatctcatcaagatcaacttgctctacttgagagccgttagtctcatcaaacacaacgtcacaagaaacttcaacttgtccagaggacttgttaaagactctatatgcctttgtgtttgaatcatatcctagtaaaaaaccttctacagtcttaggagcaaatttagattttctacctcttttaacaagaataaagcatttgctaccaaagactctaaaatatgaaatattgggctttttaccggttaggagttcgtatgatgtctttttgaggattcggtgtagatacaaccggttgatggcgtagcaagcggtgttaaccgcctcggcccaaaaccgatccgaattcttgtactcatcaagcatggttcttgccatgtccaataaagttctattcttcctttccactgcaccattttgttgtggcgtgtagggagaggataactcatgcttgatgccctcctcctcaaggaagccttcaatttgagagttcttgaactccgtcccgttgtcgcttctaatctttttgatcctcaagccgaactcattttgagcccgtctcaagaatccttttaaagtctcttgggtatgagacttttcctgtaaaaagaatacccaagtgaagcgagaataatcatccacaataactagacagtacttactcccgccgatgcttatgtaagcgatcgggccgaatagatccatgtgtaggagctctagtggcatgtcagtcgtcatgatgttcttatgtggatggtgagcaccaacttgcttccctgcttggcatgcgctacaaatcctgtctttctcaaaatgaacatttgttaatcttaaaatgtgttctccctttagaagcttatgaagattcttcatcccaacatgggctagtcggcggtgccatagccaacccatgttagtcttagcaattaagcatgtgtcgagttcagctctataaaaatctactaagtatagctgaccctctaacacacccttaaatgctattgaatcatcacttcttctaaagacagtgacaccttgatttccatccccgaatgtgatagctcgttggggatcttggtttttctcataggagaacattttcttatcccctgtcatgtggtttgtgcatccgctgtcgatgatccaacttgagcccccggatgcataaaccttgccggatttgttagtcaacacatatgatgcatcaaaagttttgaatgaaatatcatgatcatttgatgcactaggagttttcttcttaggcaacttagcacgggttggttgcctagaactagatgtctcacccttatacataaaagcatgattaggcccagagtgagacttcctagaatgaattctcctaattttgctctcaggatagccgacagggtataaaatgtaaccctcgttatcctgaggcatgggagccttgcccttaacaaaattagacaatttcttaggaggggcattaagtttgacattgtcccccttttggaagccaatgccatccttgatgccagggcgtctcccactataaagcatactacgagcaaatttaaaatttttattttcaagttcatgctcggcaattttagcatctaattttgctatatgatcattttgttgtttaattaaagccatgtgatcatgaatagcattaatatcaacatctctacatctagtacaaatagaagtgtgttcaacggtagatgtagaaggtttgcaagaattaagttcaacaatcttagcacgcaatatattatttttgtctctaagatcggaaatggaaatattgcaaacatctaattctttagccttagcaagcaatttttcattttcaatcctaaggctagcaagagatatgtttaattcttcaatcttagcaagcaaatcatcattatcatttctaagattgggaattgaaacattacaagcaatataatcaaccttagctaacaaattagaattctcatttctaaggttgtctatagtctcatggcaagtgcttagctcactagataatttttcacatttttcaacttctagagcataatcatttgtaactttaacatgttttttgttttccttgattaggaagtcctcttgagagtccaagagatcatccttctcatggatggcactaattaattcatttaatttatcttcttctttttgccgtcctttgccatgaggcattttgtggccgacgttggggaagagaagtcccttggtgacggcgatgttggcgccgtcctcgtcgtcggaagagtcgctagagctttcgtcggagtcccactcgcgacaaacatgggcatcgccgcccttcttcttgtagtacctcttcttctcctttcttctccccttcttgtcgtcgcccctgtcactgtcactagatataggacattttgcaataaagtgaccgggcttaccacacttgtagcaaaccttcttggagcggggcttgtaatctttccccctcctttgcttgaggatttggcgaaagcttttgatgacaagcgccatttcctcgttgtcgagcttggaggcgtcgatgtgtgttctactcggtgtagactcctccttcttctcttccgtcactttgaatgcgactggttgagcttcggacgtagaaggaccgtcaagctcgttgatcttccgtgagcccttgatcataaattcaaagctcacaaaattcctgataacttcctcgggggtcattagtgtatatcttgggttgccacgaattaattgtacttgagtagggttaaggaaaataagtgatcttagaataaccttaaccacctcgtggtcatcccatttcttgctcccgaggttgcgcacttggttcaccaaggttttgagccggttgtacatatcttgtggctcctccccttggcgaagacggaagcgaccgagctccccctcgatcgtttctcgcttggtgatcttggtgagttcatcaccctcgtgtgcggtcttgagcacgtcccacacttccttggcgctttttaatccttgcaccttgttgtactcctccctacttagagaggcgaggagtatggttgtggcttgggagttgaagtgctcgatttgggccacctcgtcctcatcataatcctcatccccgacggatggtacctgtgctccaaattcaacaacattccatatacttttgtggagtgaggttagatgaaatttcattaaatcactccacctagcataatcttcaccgtcaaaggttggcggtttgcctaatggaacggaaagcaatggagtatgtctagaggtgcgagggtagtgtaaggggatcttactaaacttcttgcgctcatggcgcttagaagttacggagggcgcgtcggagccggaggtggaaggtgatgaagtgtcggtctcgtagtagaccaccttcctcattttctttttcttgtcgccactccgatgcgacttgtgggaagaggctttcttctccttcccctttccctttttgcgggactcttcggatgaagccttcccgtggcttgtagcgggcttgtcgtcggtctccatctccttcttggcgtgttctcccgacat

SEQ ID NO: 4864 - DNA, 4122 bp, Zea mays
  Clone ID: TF_ZmC951_332
tcagctttggcagtagaaagagctatggaattttgcttctttgaagcccaagacaccagagaccttcccaagaactggcaagtccccgatgtgctctttcttttgatctacggatttacctcccgtgtcgaggtcgagatgcccattggttcccatgggtgtcttgatgggtttggcatccttcgtcccaaacttgtttgaaatgtcttgaatatactttgtttggctaatgaaggtgccctcttggagttgcttcacttgaaatcccaagaagtacttcaactcccccatcatagacatctcgaatttttgtgtcatgatcctactaaactcttcacatgtagattcgttagtagatccaaatatgatatcatcaacataaatttggcatacaaacaaaccattttcaagtgttttagtaaagagtgtaggatcggcctttccaactttgaagccattagtgataaggaaatctcttagacattcataccatgctcttggggcttgcttgagcccataaagcgccttagagagtttatatacatggttagggtactcactatcttcaaagccgggaggttgctcaacatagacctcctccttgattggtccattgaggaaggcacttttcacatccatttggtaaagctcattcctagtgaagttgttgagctcctcttgcattgccaccacccaatccgaatcttgaagtgcttcctctaccttgtgtggctcaatagaggaaacaaaagagtaatgttcacaaaaatgagcaacacgagatcgagtaattacccccttttgaatatcgccgaggatggtgtttacggggtgatctcgttggattgcttggtggactcttgggtgtggcggtctttgaacttgttcatcttcctcatcttgatcatgggcatctcccccttgatcattgctctcctcttgaggtggctcaacttcttgatcttctccttcatcattttgagcctcatcctcatcttgagttggtggagatgcttgcatggaggaagatggttgatcttgtgcttgtggaggctcttcggattccttaggacacacaacaccaatggacatgttccttagcgcgacgcacggagcctcttcatcatctagctcatcaagatcaatttgctctacttgagagccgttagtctcatcaaacacaatgtcacaagaaacttcaactagtccagtggacttgttaaagactctatatgcccttgtgtttgaatcatatcctagtaaaaagccttctacagtcttaggagcaaatttggattttctacctcttttaacaagaataaagcatttgctaccaaagactctaaaatatgaaacattgggctttttaccagttaggagttcgtatgatgtcttcttgaggattcggtgtagatataaccggttgatggcgtaacaggcggtgttgaccgcctcggcccaaaaccgatccgaagttttgtattcatcaagcatggttcttgccatgtccaatagagttcgattattcctattcactacaccattttgttgtggcatgtagggagaagagaactcatgcttgatgccctcctcctcaaggaagccttcgatttgtgagttcttgaactccgtcccgttgtcgcttcttattttcttgatccttaagtcaaactcgttttgagcccgtctcaagaatccctttaaggtctcttgggtatgagatttttcctgcaaaaagaacacccaagtgaagcgagaatagtcatccacaataactagacagtacttactcccgccgatgcttatgtaagcaatcgggccgaatagatccatgtgtaggagctcgagtggcctgtcagttgtcatgatgttcttgtgtggatgatgaacaccaacttgcttccctgtctgacatgcgctacaaaccctgtctttctcaaaatgaacatttgttagtcccaaaatgtgttctccctttagaagcttgtgaagattcttcattccaacatgtgctagtcggcgatgccagagccagcccatgttagtcttagcaattaagcaagtgtcgagttcagctctatcaaaatctactaagtatagctgaccctctaacactcccttaaatgctactgaatcatcacttcttctaaagacagtaacaccttgatttccatccccgaatgtgatagcttgttggggatcttggtttttctcataggaggagaacatcttcttctcccctgtcatgtggtttgtgcacccgctatcgatgatccaacttgagcccccggatgcataaaccctcgttatcctgaggcatgggagccttgcccttaacaaaattagacaatcttttaggagggcattaagtttgacattgtctcccttttggaagccaatgccatccttgatgccaaggcatctcccactatagagcatgcttctagcaaatttaaatttttcattttctaagtcatgctcattaagttttgcattaagttgagctatgtgattattttgtttcttaattaaagctaggtgatcatgaatagcatcaacattaatatctctacatctagtgcaaatgaaaacatgctcaacggtagatgtagagggtttgcaagattttagttcaacaatgttagcatgtaaaatgtcattttcatttctaagattggaaatggtaatattgcaaacatctaagttcttagccttagcaattaatttttcattctcatttctaaggctagcaagagagacattcaattcttcaatcttagcaagtaaactaacattatcatctctaagattgggaattgaaacatcacaaacatttgaatcaatcttagcaattattttagcattttcatttctaaggttggcaataatatcatggcaagtgcttagctcactagatagtttttcacatttctctagttctagagcgtaagcattcttaaccttaacatgcttcttgttttctttaattaggaagtcctcttgagagtccaagagttcatccttctcatgaatagaactaattaattcatttaatttttctttttgttgcatgtttaggttggcaaaaagggcgcgcaaattatcctcctcatcacaagagttatcctcatcacttcttccttttgccgtcttttgccatgaggcacttgtggccgacgttgggaagaggagccctttggtgacggcgatgttggcggcgtcctcgtcggaggaggagtcggaggagttctcatcagagttccactcgcggcacacatgggcatcgccacccttcttctcgtagtatctcttcttttctctcctctttcccttcttgtcatctcccctgtcactgtcacttgatattggacattttgcaataaagtgaccgggcttaccacacttgtagcacactttcttggagcgggacttgtagtccttccctctcctttgcttgagaatttggcggaagctcttgatgatgagcgccatttcctcgttgtcgagcttggaggcgtcgatggggagtctacttgatgtagacccttccttcttctcctccgtcgccttgaccatttcatggtcatcccattttttgctcccgaggttgcgcacttggttcaccaaggtcttgagccgattgtacatctcttgtggctcctccccttggcgaagccggaagcgaccgagctccccctcgatcgtctcccgcttggtgatcttggtcaccgcgtctccttcgtgcgcggtcttgttatactcctctcgacttagagaggtgaggagtatagtggtggcttgggagttgaagtgcacgatttgggccacctcgtcctcatcataatcttcatccctacggatggtactacacttcttgcgctcttggcgcttagaagtgacagacgcggtgtcggatccggatgtagagggcaaggaagaatcggtctcgtagtataccactttcttcattttcttcttcttctcgccactcttgtgcgatcgaatgcgtgaaggggatccatccttcttcttgttggcggactcccttgatggagccttcccgtggcttgtagcggacttatcatcgccgatcaccatcttcttggcgtgatctcccgacat

SEQ ID NO: 4865 - DNA, 5097 bp, Zea mays
  Clone ID: TF_ZmC951_334
ttagagtgtccggtgcgccagcatgggcgggtctgacttctgcgcgtgctggcgcgcatttaatgcgctgcaggtagccgttggcgccgaagtatccgttgtttcgatgtcacaccggacagtccggtgtacaccggacatgtccggtgaattatagcggactagccgttgcgaattcccgaagctggcgagttccagagccgctcttccttggagcaccggacactgtccggtgtacaccggacagtccggtgaattatagcggagcgcctctggattttcccgaaggtgacgagttcgacttggagtcctctggtgcaccggacactgtccggtggcacaccggacagtccggtgcgccataccagaggtgccttcggttgtccctttgctcttttgttgaacccaatacttggtctttttattggctaagtgtgaacctttgacacctccctcgtcgaggtcgagatgcccattggttcccatgggtgtcttgatgggtttggcatccttcattccaaacttgcttagaatatcttgagtgtactttgtttggcttaggaaggtgccttcttggtgttgcttcacttggaatcctaagaagtactttaactcccccatcatagacatctcgaatttttgtgtcatgatcctactaaattcttcacatgtagactcgttagtagacccaaatataatatcatcaacataaatttggcatacaaacaagtcattgtcaagagttttagtgaataaagtaggatcagcctttctgactttgaatccattagtgataaggaaatccctaaggcattcataccatgctcttggggcttgcttgagcccataaagcgccttagagagtttataaacatggttagggtactcactatcttcaaagccgggaggttgctcaacatagacctcttccttgattggtccattgaggaaggcacttttcacgtccattttataaagcttaaagccatggtaagtagcataggccaataatatacgaattgacttaagcctagctacgggtgcataggtttcaccgaaatccaaaccttcgacttgggaatatcctttggccacaagtcgagctttgttccttgtcaccacaccatgctcatctttcttgttgcggaagacccatttggttcctacaacattttgattaggacgtggaactaaatgccatacctcattcctagtgaagttgttgagctcctcttgcatcgccaccacccaatccgaatcttgtagtgcttcctctaccctgtgtggctcaatagaggaaacaaaagagtaatgctcacaaaaatgtgcaacacgagatctagtggttacccccttatgtatgtcaccgaggatggtgtcgacgggatgatctcgttggattgcttggtggactcttgggtgtggcggcctttgttcttcatcctccttgtcttgatcatttgcatctcccccttcatcctcattttgagtcggtggagatgcttgcgtggaggaggatggttgatcttgtgcatttggagactcttcggattcattaggacacacatccccaatggacatgttccttagcgcggtgcatggagcctcttcatcacctatctcatcaagatcaacttgctctacttgagagccgttagtctcatcaaacacaacgtcacaagaaacttcaacttgtccggaggacttgttaaagactctatatgttcttgtgtttgaatcatatcctagtaaaaagccttctacagtcttaggggcaaatttagattttctaccggttaggagttcataggatgtcttcttgaggattcggtgtagatataaccggttgatggcgtagcaggcggtgttgaccgcctcggcccaaaacattttgttgcggggtgtagggagaagagaactcatgcttgatgcctcctcctcaaggaagccttcaatttgtgagttcttgaactccgtcccgttgtcgcttctaattttcttgatccttaagtcgaactcattttgagctcgtctcaagaatccctttaaggtctcttgggtttgagatttttccctgtctttctcaaaatgaacattggttagtcctaaaatgtgctctccctttagaagcttatgaagattcttcatcccagcatgggctagtcggtggtgccagagccaacccatgttagtcttagcaattaagcaagtgtcgagttcagctctatcaaaatctaccaagtatagttgaccctccaacactcccttaaatgctattgaatcatcacttcttctaaagacagtgacacccaatcctttgaccacacattggtttccatccccgaatgtgatcgctcgttggggatcttgatttttctcgtaggaggagaacatttccttctccccagtcatgtggtttgtgcacccgctatcgatgatccaacttgagcccccggatgcataaacccaaacggttttgggtcctttggcattagaaacaagaactttgggtacccaaacacaagtcttggagcccttgtatttgcccccaacaaatttggcaactactttgccggatttgttagtcaaaacataggatgcatcaaaagttttaaatgaaatgtcatgatcatttgatgcactaggagttttccttttaggcaacttagcatgggttggttgcctagagctagatttctcacccttatacatgaaagcatggttagggccagagtgagacttcgtagagtgaatcctcctaattttgctctcgggataaccggaagggtacaaaatgtaaccctcgttatcctgaggtatgggagccttgccctttacaaaattagacaaccttttaggaggggcattaattttgacattgtctcccctttgtaagccaatgccatccttgatgccagggcgtctcccattataaagcatactacgagcaaatttaaacttttcattctctaagttatgctcggcaattttagcatctaattttgctatatgatcattttgttgtttaattaaagccatgtgatcatgaatagcattaacatcaacatctctacatctagtacaaatagcagtgtactcaacggtagatgtagagggtttgcaagattttaattctacaaccttagcatgtaatatatcattttcacttctaaggttagaaatagtaatattgcaaacattaaaatctttagccttagcaagcaatttctcattttcaatcctaaggctagcaagagaaacattcaactcatcaatcctagcaagtaaatcaacattatcatctctaggattggaagttgaagcattacaaacatgagaatcaaccttagcaattaatttgacattttcatttctaaggttgttaatagtttcatggcaagtgcttagctcactagatagtttttcacatttttctacttcaagagcataagcatttttaaccttaacatgcttcttattttctttaattaggaagtcctcttgggaatccaaaaggtcatccttctcatgaatgatactaattaattcatttaacttttccttttgttccatgttaaggttggcaaaaagggtacgcaaactatcttcctcatcactagaagattcatatttagtggaggattttgatttaaccttcttccttttgccgtcctttgccgtgaggcacttgtggccgacgttggggaagagaagtcccttggtgacagcgatgttggcggtgtcctcgtcggaggaggagtcggtggagctctcgtcggagtcccactcccggcaaacatgggcatcaccgcccttcttcttgtagtacctcttcttttctctcctcttgcccttcttgtcgtcgcccctgtcactgtcactagatattggacattttgcaataaaatgaccgggcttaccacatttgtagcacactttcttggagcggggcttgtaatctttccctctcctttgcttgaggatttgacggaagctcttgatgatgagcgccatctcctcgttgtcgagcttggaagcatcgatgggttgtctacttgatgtagactcctccttcttttcctccgtcgccttgaatgcgaccggttgtgcttcgggtgtgaaggaggtgccttgctcgatgattttctttgagcctttaatcattagctcaaagctcacaaattttcctataacttcctcgggagacattagcttatatctaggatcatctcgaattaattgaacttgtgtagggttaagaaatacgagggatctaagaataaccttgaccatctcatggtcatcccatttttcgctcccgaggttgcgcacttggttcaccaaggtcttcaagcggttgtacatagcttgtggatcctccccttggtgaagcatgaagcgaccgagctccccctcgatcgtttcccgcttggtgatctttgtcacctcgtctccttcgtgcgcggtcttgagtacgtcccaaatttccttcacactttttaacccttgcaccttattatactcctctcgacttagagaggcgaggagtatagtagtggcttgggagttaaagtggtgaatttgggccgcctcgtccgagtcgtggtcttcatcccctacggatggtacctgtacaccaaactcaacaacattccatatgcttgtgtggagtgaggttagatgatgcctcattttgtcactccacatattataatctccaccgtcaaaaactggtggtttgcctaatggaacggagagcaaaggagtacgttttgaaacatggggatagcgtagaggaatcttactatacttcttgcgctcttggcgcttagaagtaacggacggtgcatcggagtcggaggtcgatggtgatgaagagttggtctcgtagtagaccactttcctcatcctcttgtgtttgtcgcctctccgatccgacttgtgggaagaagatttcttctccttccccttccctttgttggaagagtttttcttctccttcctcttgttgcgggactcttccgatgaagtcgacccgtggcttgtagcgggcttgtcgccggtctccatctccctcttggcgagttctcccgacat

SEQ ID NO: 4866 - DNA, 5358 bp, Zea mays
  Clone ID: TF_ZmC951_337
tcatttctccccctttttggcatgaatcgccaaaaacggaatcattagagcccttgaagtaatttcttcccctttggtcataagaaaatgagttaagattataccaaagacgaggtccggtccttttgcttttgagcttttactctctccctcaaggatgaagtccttttccttgatgctcatttctcccccaaagaagagagagttgctcggagtgatggcgaagtatgagttacggagtggaagcctttttcttcgccgaagactccaattccctttcaatatacctatgacttggtttgaaatagacttttgatccacggacttacctcccgtgtcgaggtcgagatgcccatttgttcccatgggtgtcttgatgggtttggcatccttcatcccaaacttagcaagaatgtcttgagtgtacttcgtttgactaatgaaggtgccctcttggagttgcttgacttggaatcctagaaaatacttcaactcccccatcatcgacatctcaaatttctgtgtcatgatcctactaaactcttcacatgtagactcgttagtagacccaaatataatatcatcaacataaatttggcatacaaacaagtcattttcaagagttttagtaaagagtgtaggatcggccttgccaactttgaagccattagcaataaggaaatctcttaggcattcataccatgctcttggggcttgcttgagcccataaagcgccttagagagcctatagacatggttagggtactcactgtcttcaaagccgggaggttgctcaacatagacctcttccttgatcggtccgttgaggaaggcacttttcacgtccatttgataaagcttaaagccatggtaagtagcataggctaataatatgcggattgactcaagcctagctacgggtgcataggtttcaccgaaatccaaaccttcgacttgtgaataccctttggccacgagtcgagctttgttccttgtcaccacaccatgctcatcttgcttgttgcggaagacccatttggttcctacaacattttgattaggacgtggaactaaatgccatacctcgtttctagtgaagttgttgagctcctcttgcatcgccaccacccaatccgaatcttgaagagcttcctctaccctgtgtggctcaatagaggaaacaaaagagtaatgttcacaaaaatgagcaacacgagatctagtggttacccccttatgaatatcgccaaggatggtgtcgacggggtgatctcgttggattgcttggtggactcttgggtgtggcggtcttggttcttcctcatcctcctgttcttgatcatttgtatctcccccttgatcattgctatcatcttgaggtggcttgtcttcttgattttgctcttcatcattttgagcctcatcctcattttgagttggtggagatgcttgcatggaggaggatggttgatcttgtgtacttggaggctcttcggattccttaggacacacatccccgatggacatgttccttagcgcgatgcatggagcctgttcttcacctatctcatcaagatcaacttgctctacttgagagccgttagtttcatcaaacacaacgtcacaagagacttcaactagtccagtggacttgttaaagaccctatatgcccttgtgtttgagtcataaccaagtaaaaagccttctacagttttaggagcaaatttagattttctacctcttttaataagaatgaagcatttgctaccaaaaactctaaaatatgaaatgttgggctttttaccggttaggagttcatatgatgtcttcttgaggattcggtgaagatataaccggttgatggcgtagcaggcggtgtttaccgcttcggcccaaaaccggtccggtgtcttgtactcatcaagcatggttcttgccatgtccaatagagttcgattctttctctccactacaccattttgttgaggtgtgtatggagaagagaactcatgcttgatgccctcctcctcaaggaagctttcaatttgagagttcttgaactccgttccgttgtcgcttcttattttcttgatccttaaggcgaactcattttgagcctgtctcaagaatccctttaaggtctcttgggtttgagatttttcaagacaatacttactcccgccgatgcttatgtaggcaatcgggccgaatagatccatgtggagtagctcaagcggcctgtcggtcatcatgatgttcttgtgtggatgatggactccaacttgcttccccgcctggcatgcgctacaaatcctgtctttctcaaaatgaacatttgttaatcctaaaatgtgctctccctttagaagcttatgaagattcttcatcccaacatgggctagtcggcggtgccagagccaacccatattagtcttagcaattaagcaagtgtcgagttcagctctatcaaaatctaccaagtatagctgaccctctaacactcccttaaaagctattgaatcatcacttcttctaaagacagtgacaccttgatttccatccccgaatgtgatagctcgttggggatcttggtttttctcatatgaggagaacatccttttctcccctgtcatgtggtttgtgcacccgctgtcgagtatccaacttgagcccccggatgcataaacccaaactgttttgggtcctttggcattagatacaagaactttgggtacccaaacacaagtcttggagcccttgtgtttgttcccaacaaacttggcaacgaccttgccggatttgttagtaagcacataagaagcatcaaaagttttaaatgcaatgctatgttcatttgatgcattagaaattttctttctaggcaacttggcacgggttggttgcctagagctagatgtctcacccttatacataaaggcatgattggggccagagtgagacttcctagaatgaattttcctaattttgctctcgggataaccggcagggtacaaaatgtagccctcgttatcctgaggcatgggagctttgcccttaacaaagttagacaaatttttaggaggggcattaagtttgacattgtctcccctttggaagccaatgccatccttgatgccagggcgtctcccattataaagtatgctacgagcaaatttaaatttctcattttctaggttgtgctcggcaatttttgcatctaattttgctatatgatcattttgttgtttaattaaggccatatgatcaagaatagcattaacatcaatatctctacatttagtgcaaatagaaacatgctcaagattagatgtagagggtttgcaagatttaagttctacaaccttagcatgcaacatttcattcttagttctaaggtcggaaatagtagcattgcaaacatcaaaatttttagccttagcaattaaattttcattctctaatctaaggctagcaagagatgcattcaattcatcaatcttagcaagcaagtcaatgttatcatctctaagattgggaattgaaacattacaaacatgtgaatcaaccttagcatttaaaatagcattttcatttctaaggttgtcaatcatctcacggcaagtgcttagctcactagacaatttttcacatttttctacttctagtgcataagcctttttaaccttaacatgtttcttgttttctttaattagacaatcctcttgggagtccaaaaggtcatccttttcatgaatagcactaatcaattcatttagtttttctttttgctccatgttaagattggcaaagagaatacgcaaattatcctcctcatcactagcattatcatcactagacgattcatatttagtggaggagttggatttaaccttcttctttttgccgtcctttgccatgaggcacttgtggccgacgttggggaagaggagtcccttggtgacggcgatgttggcggcgtcctcatcgtcggaggagtcgcttgagctttcgtcggaatcccattcccgacaaacatgggcatcgccgcccttcttcttgtaataccttttcttctcctttcttcttcccttcttgtcgtcgcctcggtcactgtcactagatataggacatttagcaataaaatgaccgggcttaccacacttgtagcaaaccttcttggagcgggacttgtagtccttccccctcctttgcttgaggatttggcggaagctcttgatgacgagcgccatttcctcattgtcgagcttggaggcgtctattggttgtctacttggtgtagactcctccttcttctcctccgttgccttgaatgcaacgggttgggcttcggatgggtcgccaagctcgttgattttcctcgagccttctatcatgcactcaaaacttacaaaatgcccgataacttcctcgggggtcattttagtatatctaggattaccacgaatcaattgaacttgagtgggattaagaaaaatgagagatcttaaaataacatttaccacttcgtggtcatcccacttcttgctcccgaggttgcgcacttggttcaccaaagtcttgagccggttgtacatatgttgtggctcctcccctttgtgaagccggaaccgaccgagctccccctcgatcgtttcccgcttggtgatcttggtgagctcatctccctcgtgcgcggttttgagtacatcccaaatctcctttgcatttttcaacccttgcactttgttgtattcttccttgcttagagaggcaaggagtatggttgcggcttgagagttgaagtgctcgatttgggctacctcatcctcatcataattctcatcccctattgatggtacctgtacaccaaactcaacaacatcccatatacctttgtggagcgagattagatgaaattgcattaaatcgctccacctagcgtaatcttcaccatcaaaagttggtggtttgcctaatgggacggaaagtaaaggtgtatgtttggaaatgcgagggtagcgtagggggatcttactgtacttcttgcgctcttggcgcttagaagtgacggagggcgcatcggagtcggacgtagaagttgatgaagtgtcggtctcgtagtagaccactttcctcatccttttgtgcttgtcgcctttccgatgtggcttgtgggaagaagatttttccttcttctctttgtggtgagaagaagatttcttctccttccctttgttggaggagctcttcttcttctccctccttttggtgcgggactcttccgatgaagtgctcccgtagcttgtagtgggcttttcgccggtctccatctccttcttggcgtgatctcccgacat

SEQ ID NO: 4867 - DNA, 5139 bp, Zea mays
  Clone ID: TF_ZmC951_339
tcaatcaaaattccgagaatcaagaatatttagctcattcctaagtttgcaaaaggtcttctcatctaatggcttggtgaagatatcagctaattgatctttggtgttaatataggctatcttgatatcccccctttgttggtgatccctcaaaaagtgatactgaatgtcgatgtgtttagtgcggctgtgttcaacgggattctccgtcatgcggatagcactctcattgtcacataggagagggactttgctcaatttgtagccatagtccctgagggtttgcctcatccaaagcaattgcacacaataatggcctgcggcaatatactcggcttcggcggttgataaggctactgagttttgtttctttgaagcccaagaccccagggatctccccagaaactgacaaatccttgacgtgctcttcctatcaattttacatcctgcccaattggcatcggaatatcctcccgtgtcgaggtcgagatgtccatttgttcccatgggtgtcttgatgggcttggcatccttcattccaaacttcttaagaatgtcttgaatgtatttggtttggctgatgaaggtgccatcttggagttgcttgatttgaaatcctaagaaatatctcaactcccccatcattgacatctcaaatttctgtatcatgatcctactaaactcttcacaagtagatttgttagtagacccaaatataatatcatcaacataaatttggcatacaaacaaatcatttgcaacagttttagtaaagagcgtaggatcggcttttccgactttgaagccattagtgataaggaaatctcgcaagcattcataccatgctcttggggcttgcttgagcccataaagcgcctttgagagtttataaacatggttagggtactcactatcttcaaagccgggaggttgctcaacatagacctcttccttgattggtccattgaggaaggcactcttcacgtccatttgataaagcttgaagccatggtaagtagcataggctaataatatatgaattgactcaagcctagctacaggtgcataggtttcatcgaaatccaaaccttcgacttgggagtatcccttggccacaagtcgtgctttgttccttgtcaccacaccatgctcgtcttgcttgttgcgaaagacccatttggttcctacaacattttgattacgacgtggaactaaatgccatacctcattcctagtgaagttgttgagctcctcttgcatcgccaccacccaatccgaatcttgaagtgcttcctctatcctgtgtggctcaatagaggaaacaaaagagtaatgctcacaaaaatgtgcaacacgagatctagtggttacccccttatgaatgtcgccgaggatggtgtcgacggggtgatctcgttggattgcttggtggactcttgggtgtggcggcctttgctcttcatcctccttgtcttgctcatttacatctcccccttgattattgtcgtcatcttgaggtggcttatttgcttgatcttctccttcatcaacttgagcatcatcctcattttgtgttggtggagatgcttgcgtggaggaggatggttgatcttgtgcatttggaggctcttgggattccttaggacacacatccccaatggacatgttccttagcgcgatgcacggagcctcttcatcacctatctcatcaagatcaacttgctctacttgagagccgttagtctcatcaaacacaacgtcacaagaaacttcaacttgtccagtggacttgttaaagactctatatgcccttgtgtttgaatcatatcctagtaaaaagccttctacagtcttaggagcaaatttagattttctacctcttttaataagaataaagcatttgctaccaaagactctaaaatatgaaatgttgggctttttaccggttaggagttcatacaatgtcttcttgaggattcggtgtagatacaaccggttgatggcgtagcaggcggtgttgaccgcctcggcccaaaaccgatccgaagtcttgtactcatcaagcatggttcttgccatgtccaatagagttctattcttcctctccactacaccattttgttgtggcatgtagggagaagagaactcatgcttgatgccctcctcctcaaggaagccttcgatttgagagttcttgaactccgtcccattgtcgcttctaattttcttgatcctcaagccgaactcattttgagcccgtcttaagaatccctttaaggtctcttgggtgtgagatttttcatcagtgaatagacagttgtagcccatttgacataattgagatacggaaggcaaattgtaatctaaagaatcttgatttccatccccgaatgtgatagctcgctggggatcttggtttttctcgtaggaggagaacaacttcttctcccctgtcatgtggtttgtgcacccgctatcgataatccaacttgagcccccggatgcataaacccaaatggttttgggtcctttggcattagatataagaactttgggtacccaaacacaagtctttgaccccttttgcttgcccccaacatatttggcaactatcttgccggatttgttagttaaaatataagatgcatcaaaagttttaaatgaaaagttatgctcatttgatgcactaggagttttcttcttaggcaacttagcatgggtttgttgcctagaactagatgtctcacccttatacataaaagcatgattagggccagagtgagacttcctagagtgaattctcctaattttgctctcggaataaccggcagggtataaaatgtgaccctcgttatcctgaggcatgggagctttgcccttaacaaaattagacaacttcttaggaggggcattaattttgacattgcctccctgttggaagccaatgtcatccttaatgccagggcgtctcccactatagagcatacttctagcaaatttaaatttttcgttttctaaattatgctcagcaattttagcatctaattttgctatatgatcattttgttgtttaattaaagccatgtgatcatgtatagcatcaatgttaacatctctacatctagtacaaatggtagtatgttcaacggtagatgtagaggatttgcaagaattaagttcaacaatcttagaatgcaatatatcatttttgtctctaagatcggaaatagtagcattgcaaacatcaaaatctttagccttagcaatcaatttttcattttcatttctaaggctagcaagagaaatgtttagttcttcaatcatagcaagcaaatcatcattatcatttctaggattgggaattaaaacattacaagcatttgaatcaaccttagctaacaatttagtattttcatttctaaggttgtcaatagtttcatggcaagagcttagctcactagaaagtttttcacatttttctacttctagagcgtaagcatttttgaccttaacatgtttcttattttctttaataaggaagtcctcttgggtgtccaagagatcatccttttcatgaatggcactaatcaattcattaagtttctctttttgttgcatgttgaggttggcaaaaagagtgcgtaagttatcttcctcatcactagcattttcatcactagaagactcatatctagtggaggatttggatttaaccttcttctttttgccgtcctttgccatgaggcgcttgtggccgacattggggaagagaagtcccttggtgatggcgatgttggcggcgtcctcgtcgtcggaggagtcgctagagctttcgtcggagtcccactcccgacaaacatgggcatcgccgcccttcttcttgtagtacatcttcttctcctttcttctccccttcttgtcgtcacccctgtcactgtcactagaaataggacatttagctataaagtgaccgggcttaccacatttgtaacaaaccttcttggagcggggcttgtaatctttccccctcctttgtttgaggatttggcggaagctcttgatgacgagcgccatttcctcgttgtcgagcttggaggcgtcgatgggtgttctactcggtgtagactcctccttcttctcctccgtcgccttgaatgcgattggttgtgcctcggacgtggaggggccatcaagctcgttgatctttcgtgagccttggatcataaattcaaagctcacaaaattcctgataacttctttgggggtcattagtgtatatcttgggttgccacgaattaattgtacttgagtagggttaaggaaaataagtgatcttagaataaccttaaccacctcgtggtcatcccatttcttgctcccgaggttgcgcacttgattcaccaaggttttgagccggttgtacatatcttgtggctcctccccttgccgaagacggaagcgaccgagctccccctcgatcgtttcccgcttggtgatcttggtgagttcatcaccctcgtgcgcggtcttgagcacgtcccaaacttccttggcgctcttcaatccttgcaccttgttgtactcctccctacttagagaggcgaggagtattgttgtggcttgggagttgaagtgctcgatttgggccacttcatcctcatcataatcctcatcccctacggatggtacctgtgctccaaactcaacaacattccatatacttttgtggagtgaggttagatgaaatttcattaaatcactccacctagcataatcttcaccgtcaaaggttggcggtttccctaatggaacggaaagtaatggagtatgtctagaagtacgaggataatgcaaggggatcttactaaacttcttgcgctcatggcgcttagaagttatggagggtgcgtcggagccggaggtagatggtgatgaggtgtcggtctcatagtagaccaccttcctcatcttctttattttgtcaccactctgatgcgacttgtgagaagaagtcttcttctccttcttcttctccttcttcttctccttgttgtgggactctcccgatgaagccttcccgtggcttgtagcgggcttgtcgccggtctccatctccttcttggcgagttctcccgacat

SEQ ID NO: 4868 - DNA, 5784 bp, Zea mays
  Clone ID: TF_ZmC951_344
ctagcaaaagaaatttctagaatcaagaatattgagctcatgcctaagtctggtaaaagattgttcatcaagtggcttggtaaagatatcggctaattgatctttagtattaatgtaagaaatctcgatatcccccttttgttggtgatccctaagaaaatgataccgaatggctatgtgcttagtgcggctatgctcgacgggattgtcggccattttaattgcactctcattatcacatagcaaagggactttggttaatttgtaaccgtagtcccgcagggtttgcctcatccaaagcaattgcgcgcaacaatgtcctgcggcaatgtactcggcttcggcggtggaaagagcgaccgaattttgcttctttgaagcccaagacaccaaggatcttcccaagaactggcaagtccctgatgtgctcttcctattaattttgcaccccgcccaatcggcatccgaataaccaatcaaatcaaatgtggatccccgagggtaccaaagcccaaacttaggtgtataagccaaatatctcaaaattcgttttacggccgtaaggtgggattccttagggtcggattggaatcttgcacacatgcaaacagaaagcataatgtccggtcgagatgcacataaataaagcaatgagccaatcatcgaccggtataccttttgatccacggacttacctcccgtgtcgaggtcgagatgcccattagttcccatgggtgtcttgatgggtctggcatccttcatcccaaacttagcaagaatgtcttgagtgtacttcgtttggctaatgaaggtgccctcttggagctgcttgacttggaatcctagaaaatacttcaactcccccatcattgacatctcgaatttctgtgtcatgatcctactaaattcctcacaagtagattcgttagtagacccaaatatgatatcatcaacataaatttggcatacaaacaaatcattgtcaagagttttagtgaatagagtaggatcggccttgccaactttgaagccattagcaataaggaaatctcttaggcattcataccatgctcttggggcttgcttgagcccataaagcgccttagagagcctatagacatggttaggatactcactgtcttcaaagccgggaggttgctcaacatagacctcttccttgattggtccgttgaggaaggcacttttcacgtccatttgatagagcttaaacccatggtaagtagcataggccaataatatgcgaattgactcaagcctagctacgggtgcataggtttcaccaaaatccaaaccttcgacttgtgaataccctttggccacgagtcgagctttgttccttgtcaccacaccatgctcatcttgcttgttgcggaagacccatttggttcctacaacattttggttaggacgtggaactaaatgccagacctcattcctcgtgaaattgttgagctcctcttgcatcgccaccacccaatccgaatcttggagagcttcctctaccctgtgtggctcaatagaggaaacaaaagagtaatgttcacaaaaatgagcaacccgagatcgagtagttacccccttatgaatgtcgccgaggatggtgtcgacggggtgatctcgttggattgcttggtggactcttgggtgtggcggtcttggttcttcctcatcctccttttcttgatcatttgtatctcccccttgatcattgctatcatcttgaggtggctcgtcttcttgattttgctcttcatcattttgagcctcatcctcattttgagttggtggagatgcttgcatggaggaggatggttgatcttgtgtacttggaggctcttcggattccttaggacacacatccccgatggacatgttccttagcgcgatgcatggagcctgttcttcacctatctcatcaagatcaacttgctctacttgagagccgttagtttcatcaaacacaacgtcacaagagacttcaactagtccagtggacttgttaaagaccctatatgcccttgtgtttgagtcataaccaagtaaaaagccttctacagttttaggagcaaatttagattttctacctcttttaataagaatgaagcatttgctaccaaaaactctaaaatatgaaatgttgggctttttaccggttaggagttcatatgatgtcttcttgaggattcggtgaagatataaccggttgatggcgtagcaggcggtgttgaccgattcggcccaaaaccggtccggtgtcttgtactcatcaagcatggttcttgccatgtccaatagagttcgattcttcctctccactacaccattttgttgtggcgtgtagggagaggagaactcatgcttgatgccctcctcctcaaggaagccttcaatttgagagttcttgaactccgtcccgttgtcgcttcttattttcttgatccttaagccgaactcattttgagctcgtctcaagaatccctttaaggtctcttgggtttgagatttttcctgtaaaaagaatacccaagtgaagcgagaataatcatccacaataacaagacaatacttactcccgccgatgcttatgtaagcaatcgggccgaatagatccatgtggagtagctcaagcggcctgtcggtcgtcatgatgttcttgtgtgggtgatggactccaacttgcttccccgcctggcatgcgctacaaatcctgtctttctcaaaatgaacatttgttaatcctaaaatgtgctctccctttagaagcttgtgaagattcttcatcccaacatgggctagtcggcgatgccagagccaacccatgttagtcttagcaattaagcatgtgtcgagttcagctctattaaaatccactaagtatagctgaccctctaacacacccttaaatgctattgaatcatcacttcttctaaagacagtgacacctttgaccaacccttgatttccatccccgaatgtgatagctcgttggggatctttgtttttctcatatgaggagaacatccttttctccccggtcatgtggtttgtgcacccgctgtcgagtatccaacttgagcccccggatgcataaacccaaactgttttgggtcctttggcattagatacaagaactttgggtacccaaacacaagccttggagcccttgtgtttgcccccaacaaacttggcaacgaccttgccggatttgttagtcaaaacatatgatgcatcaaaagtcttaaatgaaatgctatgttcatttgatgcattaggaattttcttcttaggcaacttggcacgggttggttgcctagaactagatgtctcacccttatacatgaaagcatgattggggccagagtgagacttcctagagtgaattctcctaattttgctctcaggataactggcagggtacaaaatgtaaccctcgttatcctgaggcatgggagctttgcccttaacaaagttagacaaatttttaggaggggcattaagtttgacattgtctcccctttggaagccaatgccatccttgatgccagggcgtctcccattatagagcatacttctagcaaatttaaatttttcattttctaagttatgctcggcaattttagcatctagttttgctatatgatcattttgttgtttaattaaagccatatgatcatgaatagcatcaatatcaacatttctacatctagtacaaatagatacatgctcaacaatagatgtagatggtttgcaagaattaagttcaacaatcttagcatgaagaatatcatttttatctctaagattggcaatggtaactttgcaaacatcaaaatctttagccttagcaatcaaactttcattctctaatctaaggctagcaagggaaatgtttaattcttcaatcctagcaagcaaatcatcattattatctctaggattgggaattgaaacattacaaacatgagaatcaaccttagcatttaaactagtattttcatttctaaggttgtcaatcatctcacggcaagtgcttagctcactagataatttttcacatttttctacctctagagcataagcctttttaaccttaacatgtttcttgttttctttaattagacaatcctcttgggagtccaaaaggtcatccttttcatgaatagcactaactaattcatttaatttttctttttgagctatgttgaggttggcaaaaagggaacgcaaattatcttcctcatcactagcattgtcatcactagaggattcatatttagtggaggatttagatttaaccttcttctttttgccgtcctttgccatgaggcacttgtggccgacgttggggaagaggagtcccttggtgacggcgatgttggcggcgtcctcgtcgtcggaggagtcgcttgagctttcgtcggaatcccattcccgacaaacatgggcatcgccgcccttcttcttgtagtatcttttcttttcctttcttctccccttcttgtcgtcgcctcggtcactgtcactagatataggacatttagcaataaaatgaccgggcttaccacacttgtagcaaaccttcttggagcgggacttgtagtctttccccctcctttgtttgaggatttggcggaagctcttgatgacgagcgccatttcctcattgtcgagcttggaggcgtcgattggttgtcgacttggtgtagcctcctccttcttctcctccgttgccttgaatgcaacgggttgggcttcggatgagtcgccaagctcgttgattttcctcgagccttctatcatgcactcaaaacttacaaaatgcccgataacttcctcgggggtcattttagtatatctaggattaccacgaatcaattgaacttgagtgggattaagaaaaatgagagatcttaaaataacatttaccacttcgtgatcgtcccacttcttgctcccgaggttgcgcacttggttcaccaaagtcttgagccggttgtacatgtgttgtggctcctcccctttgtgaagccggaaccgaccgagctccccctcgatcgtttcccgcttggtgatcttggtgagctcatctccctcgtgcgcagttttgagcacatcccaaatctcctttgcatttttcaacccttgcactttgttgtattcttccttgcttagagaggcaaggagtatggttgtggcttgagagttgaagtgctcgatttgggccgcctcatcctcatcatagttttcatcccctacggatggtacctgcgcaccaaactcaacaacatcccatatgcttttgtggagcgagattagatgaaatcgcattaaatcgctccacctagcgtaatcttcaccatcaaaagttggtggtttgcctagtgggacggaaagtaaaggtgtatgtttggaaatgcgagggtagcgtagagggatcttactatacttcttgcgctcttggcgcttagaagtgacggagggcgcatcggagtcggaggtcgatgttgatgaagtgtcggtctcgtagtagaccaccttcctcatcctcttgtgcttgtcgcctttccgatgcggcttgtgggaagaagatttttccttcttctctttgtggtgagaagaagatttcttctccttccctttgttggaggagctcttcttcttctccctccttttggtgcgggactcttccgatgaagtgctcccgtagcttgtagtgggcttttcgccggtctccatctccttcttggcgtgatctcccgacat

SEQ ID NO: 4869 - DNA, 4233 bp, Zea mays
  Clone ID: TF_ZmC951_345
ttacttgacttgaaatcctaggaaatacttcaactccctcatcatagacatctcaaatttttgtatcatgatcccactaaactcttcacaagtggatttgttagtagacccaaatatgatatcatcaacataaatttggcatacaaacaaatcttttgcaatagttttagtaaagagtgtaggatcggctttttcgactttgaagccattagtgataaggaaatctcgcaggcattcataccatggtcttggggcttgcttgagaccataaagcgtctttgagagtttatacacatggttagggtactcactatcttcaaagccgggaggttgctcaacatagacctcttccttgattgatccattgaggaagacacttttcacatccatttggtaaagcttaaagccatggaaagtagcataggcaagtaatatacgaattgactcaagcctagctacgggtgcataagtttcaccaaagtccaaaccttcgacttgtgaataacctttggccacaagtcgggctttgttccttgtcaccacaccatgctcatcttgctcgttgcagaatacccactcattcctcgtgaagttttgagttcctctttcattgtcagcaccaaatctgaatctcttagtgcattctccaccccccttatgaatgtcaccgaggatggagttgatggggtgatctcgttgaattgcttgatggactcttgggtgtcgcgatctttgaccctgaatttcttgatcatctttcttgtcttgatcaacttcatctcccccttgatccttgtcctcctcttgaggtggctcatcctcttgatgttcatcttcattgtcttgagcctgatcctcatcttccgttggagatgcttggttggaagatgacggttgatcttgtgcttgagtgggctcttcggattccttaggacacacatccccaatggacatgttccttagcgcgacgcacggaacctcttcatcatctagttcatcaagatcaacttgctccacttggtagccattagtctcatcaaacacaatgtcacaagaaacctcaactaatccagtggatttgttgaagactctatatgcccttgtgtttgagtcatatcctagtaaaaagccttctacagtcttagaagcaaatttagattttctacatcttttaacaagaataaaacatttgcttccaaagaatttaaaatatgaaacattaggctttttactggtaaggagttcgtatgatgtcttcttgaggatttggtgaagatatagccggttgatggagtagcaagcagtgttgattgcttccgcccaaaaccgatccggtgtcttgtactcatcaagcatggtccttgccatatccagtagatttcgattcttcctctcaactacaccattttgttgaggtgtgtagggagaagataactcatgcttcatgccctcatcctcaagaaatccttctatttgagaattattgaactccatcccattttcgcttcttattttcttgatccttaatccgaactcattttgagcccgtctcaagagtccctttaaagtctcttgggtttgagatttttcatccccgaatgtgatagctcgttggggatcttcgtttttctcataggaggagaacattctcttctcccctgtcatgtggtttgtgcatccgctatcaattatccaacttgagcctccggatgcataaaccttgccggatttgttagttaacacataagatgcatcaaaagttttaaatgaaatgctatgttcatttgatgcactaggagttttcttcttaggcaacttagcacgtgttggttgcctagaactagatgtctcacccttatatttaaaagcatggttagggccatagtgagacttcctagaatgaattctcctaattttgctctcggggtaaccgacagggtacaaaatgtaaccctcgttatcctgaggcatgggagccttgcccttaacaaagttggacaatttcttaggaggggcattgagtttgacattgcctccctgttggaagccaatgccatccttaatgccagggcgtctccctctatagagcatactacgagcaaacttaaatttttcattttctagttcatgctcggcaattttagcatctagtttagctatatgatcattttgttgtttaattaaagccatgtgatcatgaatagcattaatatcaacatctctacatctagtgcaaatagtgacatgctccgtggtagatgtagagggtttgcaagattttaattctacaaccttagcatgtaatatatcatttttacttctaaggtcgaaaatggaagcattgcaaacatcaagttctttagccttagcaagcaattttttattttcatttctaaggctagcaagagtaatgtttaattcttcaatcttagcaagcaaattatcattattatttctaagattgggaattgaaacatcacaaacatttgaatcaaccttagctaacaaattagcattctcatttctaaggttgtctatagtctcatggcaagtgcttagctcactagatagtttttcacattttctacttctagagcgtaagcattttttaactttaacatgcttcttattttctttaataaggaagtcctcttgggcgtccaagagatcatccttttcatggatagcactaatcaattcatttaatttctctttttgttgcatgtttaagttggcaaaaagagtacgcaaattatcttcctcatcactagcattatcatcgctagaggactcatatctagtggaggatttggatttaaccttcttctttttgccgtcctttgccatgaggcacttgtggccgacgtttgggaagagaaggcccttgttgatggcgatgttggcggcgtcctcgtcggaggaggagtcggaggagctctcgtctgagtcccactcgcggcatacatgggcgtcgccacccttcttcttgtagtatttcttcttctcctttcttctccccttcttgtcgtcgcccctgtcactgtcactagaaataggacattttgctataaagtgaccgggcttaccacacttgtagcaaaccttcttggagcggggcttgtaatctttccccctcctttgcttaagaatttggcggaagctcttgatgacgagtgccatttcctcattgtcgagctttgaggcgtcgattggttgtctacttgatgtagactcctccttcttctcctccgttgccttgaatgcaaccgtttgtgcttcggatgtggagggatcatctagctcattgattttctttgagcccttgatcatatactcaaagctcacaaaattcccaattacttccgcgagagtcattagtatatatctaggattaccacgaattaattgaacttgagtagggttaaggaaaataagtgatctaagaataaccttaaccatctcgtggtcatcccactttttgctcccgaggttgcgcacttggttcaccaaggttttgagccggttgtacatgtcttgtggctcttcccctttgtgaagccggaagcgaccgagctccccctcgatcgtctcccgcttggtgatcttggttagttcatctccctcgtgcgcggtcttgagcacgtcccaaacttccttggccctctttaatccttgcacgttgttatactcctctcgacttagagaggcgaggagtatagttgtggcttgggagttgaagtgctcgatttgggctacctcgtcctcatcataatcctcatcccctacggatggtacctgtgctccaaactcaacaacattccatatacttttgtggagtgaggttaggtgaaatttcatcaaatcactccacctagcgtaatcttcaccgtcaaaggttgacggtttgcctaatggaacagaaagtaatggagtatgtttagaaatgcgagggtagcgtaggggaatcttactaaacttcttgcgctcatggctcttagaagtaatggatggcgcgtcggagccggaggtggaaggtgatgaagtgtcggtctcgtagtagaccaccttcctcatcttctttttcttgtcgccactctgatgcgacttgtgggaagaggctttcttctccttccccttccccttgttgtgggactcttccgatgaagctttctcgtggcttgtagtgggcttgtcgccggtcttcatctccttcttggcgtgatctcccgacat

SEQ ID NO: 4870 - DNA, 5304 bp, Zea mays
  Clone ID: TF_ZmC951_350
ctaatgatctcttttctcaattgtggaacttggagaggtttgaaagctttgaatgtgtcttggaatggattgctagctcttgtattgaatgttgaaggttggaatgcttggatgaagtgaatggaggtggttggggttgtatttatagccaccaaccacttcctagccgttgctccttttctgctgagcgcggacggtccgccctcctggtgcggacggtccgcccctatagatcaacggcgaccggacggtccgcgcctgaggccggacggtccgcgcgagggctcggacggtcttcgcttttcctccggacagtctgtagtggaaacttgtgtttttgcattggttctgtccgaggggtatcccgatgtcgcggacggtccgccgcaagagcccggacggtccgcgcttggcctgtttttccaaaaagcttctcctgtccggaataatcttttgatccacggacttacctcccgtgtcgaggtcgagatgcccattagtgcccatgggtgtcttgatgggtttggcatccttcatcccaaacttagcaagaatgtcttgagtgtacttcgcttggctaatgaaggtgccctcttggagttgcttgacttggaatcctagaaaatacttcaactcccccatcatcgacatctcgaatttctgtgtcatgatcctactaaactcttcacatgtagactcgttagtagacccaaatataatgtcatcaacataaatttggcatacaaacaagtctttttcaagagttttagtgaataaagtaggatcggccttgccgactttgaagccatttgcaataaggaaatctcttaggcattcataccatgctcttggggcttgcttgagcccataaagcgccttagagagcctatagacatggttagggtactcactgtcttcaaagccgggaggttgctcaacatagacctcttccttgattggtccgttgaggaaggcacttttcacgtccatttgatagagcttaaagccatggtaagtagcataggccaataatatgcggattgactcaagcctagctacgggtgcataggtttcaccgaaatccaaaccttcgacttgggagtatcctttggccacgagtcgagctttgttccttgtcaccacaccatgctcatcttgcttgttgcggaagacccatttggttcctacaacattttggttaggacgtggaactaaatgccagacctcattcctcgtgaaattgttgagctcctcttgcatcgccaccacccaatccgaatcttggagtgcttcctctaccctgtgtggctcaatagaggaaacaaacgagtaatgttcacaaaaatgtgcaacacgagatctagtggttacccccttataaatatcgccgaggatggtgtcgacggggtgatctcgttggattgcttggtggactcttgggtgtggcggtcttggttcttcctcatcctccttttcttgatcatttgtatctcccccttgatcattgctatcatcttgaggtggctcgtcttcttgattttgctcttcatcattttgagcctcatcctcattttgagttggtggagatgcttgcatgggggaggatggttgatcttgtgtacttggaggctcttcggattccttaggacacacatccccaatggacatgttcctaagcgctatgcatggagcctgttcttcacctatctcatcaagatccatttgctctacttgagagccgttagtttcatcaaacgcaacgtcacaagagacttcaactagtccagtggacttgttaaagaccctatatgcccttgtgtttgagtcataaccaagtaaaaagccttctacagttttaggagcaaatttagattttctacctcttttaataagaatgaagcatttgctaccaaaaactctaaaatatgaaatgttgggctttttaccggttaggagttcatatgatgtcttcttgaggattcggtgaagatataaccggttgatggcgtagcaggcggtgttgaccgcttcggcccaaaaccggtccggtgtcttgtactcatcaagcatggttcttgccatgtccaatagagttcgattcttcctctccactacaccattttgttgtggagtgtagggagaagagaactcatgcttgatgccctcctcctcaaggaagccttcaatttgagagttcttgaactccttcccgttgtcgcttcttattttcttgatccttaagccgaactcattttgagctcgtctcaagaatccctttaaggtctcttgggtttgagatttttcaagacaatacttactcccgccgatgcttatgtaagcaatcgggccgaatagatccatgtggagtagctcaagcggcctgtcggtagtcatgatgttcttgcgtggatgatggactccaacttgcttccctgcctggcatgcgctacaaatcctgtctttctcaaaatgaacatttgttaatcctaaaatgtgctctccctttagaagcttatgaagattcttcatcccaacatgggctagtcggcggtgccagagccaacccatgttagtcttagcaattaagcatgtgtcgagttcagctctatcaaaatccactaagtatagctgaccctctaacacacccttaaatgctattgaatcatcacttcttctaaagacagtgacaccttgatttccatccccgaatgtgatagctcgttggggatcttggtttttctcatatgaggagaacatccttttctcccctgtcatgtggtttgtgcacccgctgtcgagtatccaacttgagcccccggatgcataaaccttgccggatttgctagtaagcacataagatgcatcaaaagttttaaatgaaatggcatgatcatttgatgcattagtggttttctttctaggcaacttggcatgggttggttgcctagatctagatgtctcacccttatacatgaaagcatgattagggccagagtgagacttcctagaatgaattttcctaattttgtcctcgggatagccggcagggtataaaatgtaaccctcgttatcctgaggcatgggagccttgccctttacaaaatttgacaatcttttaggaggggcactaagtttgacattgtctcccctttggtagccaatgccatccttaatcccagggcgtctcccattataaagcatgctacgagcaaatttaaatttctcattttctaagttgtgctcggcaattttagcatctagtttagctatatgatcattttgttgcttaattaaaatcatgtgatcatgaatagcatcaacattaatgtctctacatctagtacaaatagtaacatgctcaatggtagatgtagagggtttgcaagaattaagttcaacgatcttagcatgaagtatgtcattcttatctctaagatcggcaattgtaactttgcaaacatcaaaatctttagccttagcaatcaaattttcattctctaatctaaggctagcaagagaaatgtttaattcttcaatcctagcaagcaactcatcattattatctctagaattgggaattgaaacattacaaacatgagaatcaaccttagcatttaaactagcattttcatttctaaggttgtcaatcatctcacggcaagtgcttagctcactagataatttttcacatttctcaacttctagagcataagcctttttcaccttaacatgtttcttgttttctttaattagacaatcctcttgggaatccaagaggtcatccttttcatgaatagcacttactaattcatttaatttttccttttgagctatgttaaggttggcaaaaagggaacgcaagctatcttcctcatcactagcattgtcatcactagaagattcatatttagtggaggagttggatttaaccttcttctttttgccgtcctttgccatgaggcacttgtggccgacgttggggaagaggagtcccttggtgacggcgatgttggcggcgtcctcgtcgtcggaggagtcgcttgagcttttgtcggaatcccattcccgacaaacatgggcatcgccgcccttcttcttgtagtattttttcttttcctttcttctccccttcttgtcgtcgcctcggtcactgtcactagatataggacatttagcaataaaatgaccgggcttaccacatttgtagcaaaccttcttggagcgggacttgtagtctttccccctcctttgtttgaggatttggcggaagctcttgatgacgagcgccatttcctcattgtcgagcttggaggcgtcgattggttgtcgacttggtgtagcctcctccttcttctcctccgttgccttgaatgcaacgggttgggcttcggatgagtcgccaagctcgttgattttcctcgagccttctatcatgcactcaaaacttacaaaatgcccgataacttccacttcgtggtcatcccacttcttgctcccgaggttgcgcacttggttcaccaaagtcttgagccggttgtacatatgttgtggctcctcccctttgagaagccggaaccgaccgagctccccctcgatcgtttcccgcttggtgatcttggtgagctcatctccctcgtgcgcggttttgagtacatcccaaatctccttggcgttcttcaacccttgtactttgttatactcctctttacttagagaggcgaggagtattgttgttgcttgagagttgaagtgctcgatttgggccacctcatcctcatcatagtcctcatcccctacggatggtacctgcgcgccaaactcaacaacatcccatatgcttttgtggagcgaggttagatgaaatcgcattaaatcgctccacctcgcgtaatcttcaccatcaaaagttggtggtttgcctaatgggacggagagtaaaggtgtatgtttggaaatgcgagggtagcgtagggggatcttactatacttcttgcgctcttggcgcttagaagtgacggagggcgcatcggagtcggaggtcgatgttgatgaagtgtcggtctcgtagtagaccaccttcctcatcctcttgtgcttgtcacctttccgatgcggcttgtgggaagaagatttttccttcttctctttgtggtgagaagaagatttcttctccttccctttgttggaggagctcttcttcttctccctccttttggtgcgggactcttccgatgaagtgctcccgtagcttgtagtgggcttttcgccggtctccatctccttcttggcgtgatctcccgacat

SEQ ID NO: 4871 - DNA, 7456 bp, Zea mays
  Clone ID: TF_ZmC951_351
cttcgacttgggagtatcccttggccacgagtcgagctttgttcctagtcaccacaccatgctcgtcttgtttgttgcggaagacccacttggttcctacaacattttggttaggacgtggaactaaatgccatacctcgttcctcaagaagttgttgagctcttcttgcatcgccatcacccaatccgaatcttgaagtgcttcctctatcctgtgtggctcaatagaggaaacaaaagagtaatgctcacagaaatgtgcaacccgagatcgagtggttacccccttatgaatgtcgccgaggatggtgtcgacggggtgatctcgttggattgcttggtggactcttgggtgtggcggccttggttgttcatcctccttgtcttgatcacttgcatctcccccttgatcattgccattatcttgaggtggctcatctctttgatcttctccttcatcaacttgagcctcgtcctcattttgagttggtggagatgcttgcgtggaggaggatggttgatcttgtgtatttggaggctcttcgaattccttagggcacacatccccaatggacatgttccttagcgcgatgcacggagcctgttcttcacctatctcatcaagatcaacttgctctacttgagagccgttagtttcatcaaacacaacgttacaagaaacttcaactagtcctgaggacttgttaaagactctatatgcccttgtgtttgaatcatatcctagtaaaaagccttctacagttttaggagcaaatttagattttctacctctcgcctcggcccaaaaccgatccggtgtcttgtactcatcaagcatggttctagccatgtccaatagagttcgattcttcctctccactacaccattttgttgtggcgtgtagggagaagagaactcatgcttgatcccctcctcctcaaggaaaccttctatttgtgagttcttgaactccgtcccgttgtcgcttcttattttcttgatccttaagccgaactcattttgagcccgtctcaagaatccctttaaggtctcttgggtttgagatttttccaagtatagctgaccctctaacactcccttaaatgctattgaatcatcacttcttctaaagacagtgacaccttgatttccatccccgaatgtgatagctcgttgggaatcttggtttttctcataagaggagaacatcttcttttcccctgtcatgtggtttgtgcacccgctgtcgagtatccaacttgagcccccggatgcataaaccttgccggatttgttagttaaaacatatgatgcatcaaaagttttaaaagaaatgtcatgctcatttgatgcactaggagttttcttcttaggcaacttagcacgggttggttgcctagagctagatgtctcacccttatacataaaagcatggttagggccagagtgagacttcctagagtgaattttcctaattttgctctcaggataaccggcagggtataaaatgtaaccctcgttatcctgaggcatgggagccttgcccttaacaaaatttgacaatcttttaggaggggcactaagtttgacattgtctcccctttggtagccaatgccatccttaatgccagggtgtctcccattatagagcatacttctagcaaatttaaacttttcattttctaagttatgctcggcaatttttgcatctaatattgctatatgatcattttgttgtttaatcaaagtcatgtgatcatgaatagcattaatatcaacatctctacatctagtacaaatggaaacatgctcaacactagatgtagagggtttgcatgaattaagttcaacgatcttagcacgcaagatatcattattatctctaagatcggaaattgtaacattgcaaacatctagttctttagccttagcaattaaattttcattttctactctaaggctagcaagagaaatgtttaattcttcaatcttagcaagcaaatcatcattatcatttctaagattgggaattgaaacattacaaacatgtgagtcaaccttagcatttaaactagcattttcatttctaaggttggtaatagtatcatggcaagtacttagctcactagataatttctcacatttttctacatgctttttattttccttgattaggaagtcctcttgggagtccaagaggtcatccttttcatggatggcactaattagctcatttagtttttccttttgttccatgttaaggttggcaaaaagggtacgcaaattattctcctcatcactagcattatcatcactagaggattcatatttcgtggaggacttagatttaaccttcttccttttgccgtcctttgccatgaggcacttgtggccgacgttggggaagagaagtcccttggtgacggcgatgttggcggcgtcctcgtcggaagaggactcggtggagctctcgtcggagtcccattcccggcaaacatgggcatcgccgcccttcttcttgtagtacttcttcttttctctcctctttcccttcttgtcgtcgcccctgtcactgttgaaagtcgccttttgatccacggacttacctcccgtgttgaggtcgagatgcccatttgttcccatgggagtcttgatgggcttggcatccttcattccaaacttggttagaatgtcttgagtgtactttgtttgacaaatgaaggtgccctcttggagttgcttcacttgaaatcctaagaaatacttcaactcccccatcatagacatctcgaatttctgtgtcatgatcctactaaattcaaacaaatcattgtcaagagtcttagtgaatagagtaggatcggccttgccgactttgaagccattagcgataaggaaatctctaaggcattcataccatgctcttggggcttgcttgagcccataaagcgccttagagagcttatagacatggttagggtacttactatcttcaaagccgggaggttgctcaacatagacctcttccttgattggtccattgaggaaagcacttttcacgtccatttgataaagcttaaagccatggtaagtagcataggctaataatatgcgaattgactcaagcctagctacgggtgcataggtttcaccgaaatccaaaccttcgacttgggagtatcctttggccacaagtcgagctttgttccttgtcaccacaccatgctcatcttgcttgttgcggaagacccatttggttcctacaacattttggttaggacgtggaactaagtgccatacctcgttccttgtgaaattgttgagctcctcttgcatcgccaccacccaatccgaatcttgtagtgcttcctctaccctgtgtggctcaatagaggaaacaaaagagtaatgctcacaaaaatgtgcaacacgagatcgagtggttacccccttatgaatgtcaccgagaatggtgtcgacggggtgatctcgttggattgcttggtggactcttgggtgtggcggccttggttgttcgtcctccttgtcttcatcatttgcatctcccccttgatcgttgccgtcatcttgaggtggctcatccttttgatcctctccttcatcaacttgagcctcgtcctcatcatgggttggtggagatgcttgcgtggaggaggatggttgatcttgtgtatttggaggctcttcgaattccttagggcacacatccccaatggacatgtttcttagcgcgatgcacggagcctgttcttcacctatctcatcaagatcaacttgctctacttgagagccgttagtctcatcaaacacaacgtcacatgagacttcaactagtccagtggacttgttaaagactctatatgcccttgtgtttgagtcatagccaagtaaaaggccttctacagtcttaggagcaaatttagattttctacctcttttaacaagaataaagcatttgctaccaaaaactctaaaataggaaatgttgggctttttaccggttaggagttcataggatgtcttcttgaggattcggtgtagatataaccggttgatggcgtagcaagcggtgttgaccgcctcggcccaaaaccgatccggtgtcttgtactcatcaagcatggttctagccatgtccaagagagttcgattcttcctctccacttctatttgtgagttcttgaactccgtcccattgtcgcttctaattttcttgatccttaagccgaactcattttgagcccgtctcaagaatccctttaaggtctcttgggtatgagatttgtcctgcaaaaagaatacccaagtgaagcgagaataatcatccacaataactagacagtacttactcccgccgatgcttatgtaagcaatcgggccgaatagatccatgtgtaggagctccagtggcctgtcggtcgtcatgatgttcttgtgtggatgatgagctccaacttgcttccctgcctggcatgcgctacaaatcctgtctttctcaaaatgaacatttgttaatcctaaaatgtgttctccctttagaagcttatgaagattcttcattccaacatgggctagtcggcggtgccagagccaacccatgttagtcttagcagttaagcaagtgtcgagttcagctctatcaaaatctactaagtatagctgaccctctaacactcccttaaatgctattgaatcatcacttcttctaaagacagtgacaccttgatttccatccccgaatgtgatagctcgttggggatcttggtttttctcatatgaggagaacatctttttctcccctgtcatgtggtttgtgcacccgctgtcgagtatccaacttgagcccccggatgcataaaccttgccggatttgttagtaagcatataagaagcatcaaaagttttaaatgaaatggcatgatcatttgatgcattaggagttttctttctaggcaacttggcacgggttggttgcctagagctagatgtctcacccttatacataaaagcatgattagggccagagtgagacttcctagaatgaattttcctaattttgctctcaggatagccggcagggtacaaaatgtagccctcgttatcctgaggcatgggagccttgcccttaacaaagttagacaagttcttaggaggggcattaattttgacattgtctcccctttggaagccaatgccatccttaatgccagggcgtctcccattataaagcatgctacgagcaaatttaaatttctcattttctaagttgtgctcggcaattttagcatctagttttgctatatgatcattttgttgtttaattaaagccatatgatcatgaatagcattaacatcaacatctctacatctagtacaaatagatacatgctcaacaatagatgtagagggtttgcaagaattaagttcaacaatcttagcatgaagaatatcatttttatctctaagatcggaaattgtaactttgcaaacatcataatctttagccttagcaattaaaattttattttctactctaaggctagcaagagaaatattcaattcttcaatcctagcaagcaaatcatcattattatctttaggattggaagttgaaacaatgcaaacatgagaatcaaccttagcatttaaactagcattttcattcctaaggttgtcaatcatctcacggcaagtgcttagctcactagataatttttcacatttttctacttctagagcataagcctttttaaccttaacatgtttcttgttttctttaattagacaatcctcttgggagtccaaaaggtcatccttttcatgaatagcactaatcaattcatttaatttttctttttgctccatgttaagattggcaaagagaacacgcaaattatcctcctcatcactatcattatcatcactagaagactcatatttagtggaggagttagatttaaccttcttccgtttgccgtcctttgccatgaggcacttgtggccgacgttggggaagagaagtcccttggtgacggcgatgttggcggcgtcctcgtcgtcggaggagtcgcttgagctttcgtcggaatcccactcccgacaaacatgggcatcgccgcccttcttcttgtagtacttctttttctcctttcttctccccttcttgtcgtcgcctcggtcactgtcacttgatataggacatttagcaataaaatgaccgggcttaccacatttgtagcaaaccttcttggagcgggacttgtagtctttccctctcctttgcttgaggatttggcggaagctcttgatgacgagcgccatttcctcattgtcgagcttggaggcgtctataggttgtcgacttggtgtagcctcctccttcttttcctccgtcgccttgaatgcgacgggttgagcttcggatgtggatggatcatcaagctcgttgatcttcctcgagccttcgatcatgcactcaaaacttacaaaattcccgataacttcctcgggggtcattttagtatatctaggattaccacgaattaattgaacttgagtggggttaaggaaaatgagagatcttagaataaccttaaccatttcgtggtcgtcccacttcgtgctcccgaggttgcgcacttggttcaccaaagtcttgagccggttgtacatgtgttgtggctcctcccctttgcgaagtcggaaccgaccgagctccccctcgatcgtttcccgcttggtgatctttgtgagctcatctccctcgtgcgcggttttgagcacatcccaaacctcctttgcgctcttcaacccttgaactttgttatactcctctctacttaaagatgcgaggagtattgttgtcgcttgagagttgaagtgctcgatttgggccacctcatcctcatcatagtctttatcccctacggatggtacctgtgcaccaaactcaacaacatcccatatacttttgtggagtgaggttagatgaaatcgcattaaatcactccacctagcataatcttcaccatcaaaagttggtggtttgcctaatgggacggaaagtaaaggtgcatttttagaaatgcgagggtaatgtagggggatcttactaaacttcttacgctcttggcgtttagaagttacggagggcgcatcggagccggaggtcgatgttgatgaagtgtcggtctcatagtagaccactttcctcatccttttgtgcttgtcccctctccgatgtggcttgtgggaggaagatctctccttcttctccttgtggtgcgaagaagatttcttctccttccctttgttggaggagctctttttcttctccttcctcttggtgcgggactcttccgatgaagtgctcccgtggcttgtagtgggcttttcgccggtctccatctccttcttggcgtgatctcccgacat

SEQ ID NO: 4872 - DNA, 5784 bp, Zea mays
  Clone ID: TF_ZmC951_359
ctagcaaaagaaattgcgtgaatcaagaatattgagctcatgcctaagtttggtaaaagtttgttcatcaagaggcttggtaaaaatatcggctaattgatctttagtgttaatataagaaatctcgatatcccccttttgttggtgatccctaagaaaatgatactgaatggctatgtgtttagtgcggctatgctcgacgggattatccgccatcttgattgcactctcattatcacatagcaaagggactttggttaatttgtaaccgtagtcccgcagggtttgcctcatccaaagcaattgcgcgcaacaatggcctgcggcaatgtactcggcttcggcggtggaaagagcgaccgaattttgcttctttgaagcccaagacaccaaggatcttcccaagaactgacaagtccccgatgtgctcttcctattgattttgcaccccgcccaatcggcatccgaataaccaatcaaatcaaatgtggatccccgagggtaccaaagcccaaacttaggagtataagccaaatatctcaagattcgttttacggccgtaaggtgggattccttagggtcggattggaatcttgcacacatgcaaacggaaagcataatgtccggtcgagatgcacataagtatagcaaggaacctatcattgaccggtataccttttgatccacggacttacctcccgtgtcgaggtcaagatgcccattggttcccatgggtgtcttgatgggcttggcatccttcatcccaaacttgtttagaatgtcttgagtgtacttcgtttggctaatgaaggtgccctcttggagttgcttcacttggaaccctaagaaatacttcaactcccccatcatagacatctcgaacttctgtgtcataatcctactaaactcttcacatgtagattcgttagtagacccaaatatgatatcatcaacataaatttggcatacaaacaaatcattttcaagcgttttagtaaagagtgtaggatcggcctttccgactttgaagccattagcaataaggaaatctctaaggcattcataccatgctcttggggcttgcttgagcccataaagcgccttagagagcttatagacatggttagggtactcactgtcttcaaagccgggaggttgctcaacgtagacctcttccttgattggtccattgaggaagacacttttcacgtccatttgataaagcttaaagccatggtaagtagcataggccaataaaatgcgaattgactcaagcctagctacgggtgcataggtttcaccgaaatccaaaccttcgacttgggagtatcctttggccacaagtcgagctttgttccttgtcaccacaccatgctcatcttgcttgttgcggaagacccatttggttcctacaacattttggttaggacgtggaactaaatgccatacctcattcctggtgaagttgttgagctcctcttgcatcgccaccacccaatccgaatcttgtagtgcttcctctaccctgtgtggctcaatagaggaaacaaacgagtaatgttcacaaaaatgtgcaacacgagatctagtggttacccccttatgaatgtcgccgaggatggtgtcgacggggtgatctcgttgtattgcttggtggactcttgggtgtggcggtctttgctcttcatcctccttgtcttgatcatttgcatctcccccttgatctatgccgtcatcttgaggtggctcatttgattgatcttcttcttcatcaacttgagcctcttcctcattttgagtgggtggagatgcttgcatggaggaggacggttgatcttgtgcttttggaggttcttcggattccttaggacacacatccccaatggacatgttccttagtgcgatgcatggaacctcttcaatacctatctcatcaagatcaacttgctctacttgagagccgttagtttcatcaaacacaacgtcacatgatacttcaaccagtccagtggacttgttaaagatcctatatgcccttgtgtttgagtcataaccaagtaaaaagccttctacagtcttaggagcaaatttagattttctacctcttttaacaagaataaaacatttgctaccaaagactctaaaatatgaaatattgggctttttaccggttaggagttcatatgatgtcttcttgaggattcggtgtagatataaccggttgatggcgtagcaagcggtgttgaccgcctcggcccaaaaccgatctgaagtcttgtactcatcaagcatagttctagccatgtccaatagagttctattcttcctctccactacaccattttgttgtggcgtgtagggagaagagaactcatgcttgatgccctcctcctcaaggaagccttcaatttgtgagtttttgaactccgttccgttgtcgcttcttattttcttgatccttaagccgaactcattttgagcccgtctcaagaatccctttaaggtctcttgggtttgagatttttcctgcaaaaagaatacccaagtgaagcgagaataatcatccacaataactagacagtacttactcccgccgatgcttatgtaagcaatcgggccgaataggtccatgtgtaagagctctagtggtctgtcggtcgtcattatgttcttgtgtggatgatgggcgccaacttgctttcctgcctgacatgcgctacaagtcctgtctttctcaaaatgaacattggttagtcctaaaatgtgctctccctttagaagcttatgaagattcttcatcccaacatgggctagtcggcggtgccagagccaacccatgttagtcttagcaattaagcatgtgtcaagttcagctctatcaaaatctactaagtatagctgaccctctaacacacccttaaatgctattgaatcatcacttcttctaaagacagtgacacctttgaccaaaccttgatttccatccccgaatgtgatagctcgttggggatctttgtttttctcgtaggaggagaacatctttttctcccctgtcatgtggtttgtgcacccgctgtcgagtatccaacttgagcccccggatgcataaacccaaatggttttgggtcctttggcattagacacaagaattttgggtacccaaacacaagtctttgaccccttgtgcttgcccccaacatatttggcaactactttgccagatttgttagtcaacacataagatgcatcaaaagtcttaaatgaaatgctatgttcatttgatgcattaggaattttcttcttaggcaacttagcacgggttggttgcctagagctagatgtctcactcttatacataaaagcatggttagaaccagagtgagacttcttagaatgaattttcctaattttgtcctcgggatagccggcagggtataaaatgtaaccctcgttatcctgaggcatgggagccttgcccttaacaaaattggacaatcttttaggaggggcactaagtttgacattgtctcccctttggaagccaatgccatccttaatgcccgggcgtctcccattatagagcatacttctagcaaatttaaatttttcattttctaagttatgctcggcaattttagcatctaattttgctatatgatcattttgttgtttaattaaagtcatgtgatcatgtatagcatcaatgttaacatctctacatctagtacaaatagaagtgtgctcaacggtagatgtagagggtttgcaagattttagttcaacaaccttagcatgcaatatttcatttttacttctaaggtcggaaatagtagcattgcaaacatcaaaatctttagccttagcaagtaatttttcattttcattcctaaggctagcaagagaatcattcatttccttaatcttagcaagcaaatcatcattatcatttctaagattgggaattgaagcatcacaaacatgagaatcaaccttagctaacaaattagcattttcatttctaaggttgtctattgtctcatggcaagtgcttagctcactagataatttttcacatttttccatttctagagcataagcatttttaaccttaacatgttttttattttccttgattaggaagtcctcttgggtgtccaagagatcatccttttcatggatggcactaatcaattcattaagtttttccttttgttgcatgttgaggttggcaaaaagagtacgcaaattgtcttcctcatcactagcattatcatcactagaggattcatatttagtggaggatttagatttaaccttctttttgtcgtcctttgccatgaggcatttgtggccgacgttggggaagagaagccctttggtgacggcgatgtgggcggcgtcctcgtcgtcggaggagtcgcttgagctttcgtcggagtcccactcccgacaaacatgggcatcgccgcccttcttcttgtagtatctcttcttctcctttcttctccccttcttgtcgtcgcctcggtcactgtcactagatataggacatttagcaataaaatgaccgggcttaccacatttgtagcaaaccttcttggagcgggacttgtagtctttccctctcctttgcttgaggatttggcggaagctcttgatgacgagcgccatttcctcattgtcgagcttggaggcgtctattggttgtcgacttggtgtagcctcctccttcttctcctccgtcgccttgaatgcaacgggttgagcttcggatgtggatggatcatcaagctcgttgatcttcctcgagccttcgatcatgcactcaaaacttacaaaattcccgataacttcctcggcggtcattttagtatatctaggattaccacgaattaattgaacttgagtggggttaaggaaaatgagagatcttagaataaccttaaccatttcgtggtcgtcccattttgtgctcccgaggttgcgcacttggttcaccaaagtcttgagccggttgtacatgtgttgtggctcctcccctttgcgaagtcgaaaccgaccgagctccccctcgatcgtttcccgcttggtgattttggtgagctcatctccttcgtgcgcggttttgagcacatcccaaacctccttggcgctcttcaacccttgaactttgttatactcctctctacttaaagaggcgaggagtattgttgtcgcttgagagttgaagttctcgatttgggccacctcatcctcatcataatctttatcccctacagacggtacctgtgcaccaaactcaacaacgtcccatatacttttgtggagtgaggttagatgaaatcgcattaaatcactccacctagcataatcttcaccatcaaaagttggtggtttgcctaatgggactgaaagtaaaggtgcatgtttagaaatgcgagagtagtgtagggggatcttactaaacttcttacgctcttggcgtttagaagttacggagggcgcatcggagtcgaaggtcgatgttgatgaagtgtcggtctcgtagtagaccactttcctcatcctcttttgcttgtctccgcttcgatgcggcttgtgggaagaagatttttccttcttctccttgtgatgagaagaagatttcttctccttccctttgttggaggagctcttcttcttctccctcctcttggtgcgggactcttccgatgaagtgctcccatggcttgtagtgggcttttcgccggtctccatctccttcttggcgtgatctcccgacat

SEQ ID NO: 4873 - DNA, 5679 bp, Zea mays
  Clone ID: TF_ZmC951_364
ctagcaaaagaaatttctagaatcaagaatattgagctcatgcctaagtctggtaaaagattgttcatcaagtggcttggtaaagatatcggctaattgatctttagtgttaatgtaagaaatctcgatatctcccttttgttggtgatccctaagaaaatgataccgaatggctatgtgcttagtgcggctatgctcgacgggattgtcggccattttgattgcactctcattatcacatagcaaagggactttggttaatttgtaaccgtagtcccgcagggtttgcctcatccaaagcaattgcgcgcaacaatgtcctgcggcaatgtactcggcttcggcggtggaaagagcgaccgaattttgcttctttgaagcccaagacaccaaggatcttcccaagaactggcaagtccccgatgtgctcttcctattaattttgcaccccgcccaatcggcatccgaataaccaatcaaatcaaatgtggatccccgagggtaccaaagcccaaacttaggtgtgtaagccaaatatctcaagattcgttttacggccgtaaggtgggattccttagggtcggattggaatcttgcacacaagcaaacggaaagcataatgtccggtcgagatgcacataaataaagcaatgaaccaatcatcgaccggtataccttttgatccacggacttacctcccgtgtcgaggtcgagatgcccattggttcccatgggagtcttgatgggcttggcatccttcattccaaacttggttagaatgtcttgagtgtacttcgtttggcaaatgaaggtgccctcttggagttgcttgacttggaatcctagaaaatacttcaactcccccatcatcgacatctcgaatttctgtgtcatgatcctactaaactcttcacatgtagactcgttagtagacccaaatataatatcatcaacataaatttggcatacaaacaagtcattttcaagagttttagtaaagagtgtaggatcggccttgccgactttgaagccattagcaataaggaaatctcttaggcattcataccatgctcttggggcttgcttgagcccataaagcgccttagagagcctataaacatggttaggatactcactgtcttcaaagccgggaggttgctcaacatagacctcttccttgatcggtccattgaggaaggcacttttcacgtccatttgataaagcttaaagccatggtaagtagcataggctaataatatgcgaattgactcaagcctagctacgggtgcataggtttcaccgaaatccaaaccttcgacttgtgaataccctttggccacgagtcgagctttgttccttgtcaccacaccatgctcatcttgcttgttgcggaagacccatttggttcctacaacattttggttaggacgtggaactaaatgccatacctcattcctcgtgaaattgttgagctcctcttgcattgccaccacccaatccgaatcttgaagtgcttcctccaccctgtgtggctcaatagaggaaacgaaagagtaatgctcacagaaatgtgcaacccgagatcgagtagttacccccttatgaatgtcgccgaggatggtgtcgacggggtgatctcgttggattgcttggtggactcttgggtgtggcggccttggttcttcctcatcctccttttcttgatcaattgcatctccccctggatcattgccatcatcttgaggtggctcatcttcttgattttgcccttcatcaacttgagcttcatcctcattttgagttggtggagatgcttgcttggaggaggacggttgatcttgtgcatttggaggctcttcggattccctaggacacacatccccaatggacatgttccttagcgctatgcatggagcctgttcttcacctatctcatcaagatcaacttgctctacttgagagccgttagtttcatcaaacacaacgtcacatgagacttcaactagtccagtggacttgttaaagaccctatatgcccttgtgtttgagtcataaccaagtaaaaagccttctacagttttaggagcaaatttagattttctacctcttttaacaagaataaagcatttgctaccaaaaactctaaagtatgaaatgttgggctttttaccggttaggagttcatatgatgtcttcttgaggattcggtgaagatataaccggttgatggcgtagcaggcggtgttgaccgcttcggcccaaaaccggtccggtgtcttgtactcatcaagcatggttcttgccatgtccaatagagttcgattcttcctctccactacaccattttgttgaggtgtgtagggagaagagaactcatgcttgatgccctcctcctcaaggaagctttcaatttgagagttcttgaactccgtcccgttgtcgcttcttattttcttgatccttaaggcgaactcattttgagcccgtctcaagaatccctttaaggtctcttgggtttgagatttttcctgtaaaaagaatacccaagtgaagcgagaataatcatccactattacaagacaatacttactcccgtcgatgcttatgtaagcaatcgggccgaatagatccatgtggagtagctcaagcggcctgtcggtcgtcatgatgttcttgtgtggatgatggactccaacttgcttccctgcctggcatgcgctacaaatcctgtctttctcaaaatgaacatttgttaatcctaaaatatgttctccctttagaagcttgtgaagattcttcatcccaacatgggctagtcggcggtgccagagccaacccatgttagtcttagcaattaagcaagtgtcgagttcagctctatcaaaatctaccaagtatagctgaccctctaacactcctttaaaagctattgaatcatcacttcttctaaagacagtgacaccttgatttccatccccgaatgtgatagctcgttggggatctttgtttttctcatatgaggagaacatccttttctccccggtcatgtggtttgtgcacccgctgtcgagtatccaacttgagcccccggatgcataaacccaaactgttttgggtcctttggcattagatacaagaactttgggtacccaaacacaagtcttggaacccttgtgtttgcccccaacaaacttggcaacgaccttgccagttttgttagtcaaaacatatgatgcatcaaaagttttaaatgaaatgctatgttcatttgatgcattagaaattttctttctaggcaacttggcacgggttggttgcctagagctagatgtctcacccttatacataaaagcatgattagggccagagtgagacttcctagaatgaattttcctaattttgctctcgggataaccggcagggtacaaaatgtaaccctcgttatcctgaggcatgggagccttgcccttaacaaagttagacaaatttttaggaggggcattaagtttgacattgtctcccctttggaagccaatgccatccttgatgccagggcgtctcccattatagagcatacttctagcaaatttaaatttttcattttctaagttatgctcggcaattttagcatctagttttgctatatgatcattttgttgtttaattaaagccatatgatcatgaatagcatcaatatcaacatttctacatctagtacaaatagatacatgctcaacaatagatgtagatggtttgcaagaattaagttcaacaatcttagcatgaagaatatcatttttatctctaagattggcaatggtaactttgcaaacatcaaaatctttagccttagcaatcaaactttcattctctaatctaaggctagcaagggaaatgtttaattcttcaatcctagcaagcaaatcatcattattatctctaggattgggaattgaaacattacaaacatgagaatcaaccttagcatttaaactagcattttcatttctaaggttgtcaatcatctcacggcaagtgcttagctcactagataatttttcacatttttctacctctagagcataagcctttttaaccttaacatgtttcttgttttctttaattagacaatcctcttgggaatccaaaaggtcatccttttcatgaatagcactaaccaattcattcaatttttccttttgagctacgttaaggttggcaaaaagggaacgcaaattatcctcctcatcactagcattatcatcactagaagattcatatttagtggaggagttggatttaaccttcttctttttgtcgtcctttgccatgaggcacttgtggccgacgttggggaagaggagtcccttggtgacggcgatgttggcggcgtcctcgtcgtcggaggagtcgcttgagctttcgtcggaatcccattcccgacaaacatgggcatcgccgcccttcttcttgtagtaccttttcttctcctttcttctccccttcttgtcgtcgcctcggtcactgtcactagatataggacatttagcaataaaatgaccgggcttaccacacttgtagcaaaccttcttggagcgggacttgtagtccttccccctcctttgcttgaggatttggcagaagctcttgatgacgagcgccatttcctcattgtcgagcttggaggcgtctattggttgtctacttggtgtagactcctccttcttctcctccgttgccttgaatgcaacgggttgggcttcggatgggtcgccaagctcgttgattttcctcgagccttctatcatgcactcaaaacttacaaaatgcccgataacttcctcgggggtcattttagtatatctaggattaccacgaatcaattgaacttgagtgggattaagaaaaatgagagatcttaaaataacatttaccacttcgtggtcatcccacttcttgctcccgaggttgcgcacttggttcaccaaagtcttgagccggttgtacatatgttgtggctcctcccctttgcgaagccggaaccgaccgagctccccctcgatcgtttcccgcttggtgatcttggtgagctcatctccttcgtgcgcggttttgagcacatcccaaatctccttagcactctcatcctcatcatagttctcatcccctaccgacggtacctgtgcaccaaactcaacaacatcccatatacttttgtggagcgaggttagatgaaatcgcattaaatcgctccacctagcgtaatcttcaccatcaaaagttggtggtttgcctaatgggacggaaagtaaaggtgtatgtttggaaatgcgagggtagcgtagggggatcttactatacttcttgcgctcttggcgcttagaagtgacggagggcgcatcggagtcggaggtcgatgttgatgaagtgtcggtctcgtagtagaccactttcctcatcctcttgtgcttgtcgcctttccgatgcggcttgtgggaagaagatttttccttcttctctttgtggtgagaagaagatttcttctccttccctttgatggaggagctcttcttcttctccctccttttggtgcgggactcttccgatgaagtgctcccgtggcttgtagtgggcttttcgccggtctccatctccttcttggcgtgatctcccgacat

SEQ ID NO: 4874 - DNA, 5772 bp, Zea mays
  Clone ID: TF_ZmC951_366
ctagcaaaagaaatttctagaatcaagaatattgagctcatgcctaagtttggtaaaagattgttcatcaagaggcttggtaaagatatcggctaattgatctttagtgttaatgtaagaaatctcgatatctcccttttgttggtgatccctaagaaaatgataccggatggctatgtgtttagtgcggctatgctcgacgggattgtcggccatttttattgcactctcattatcacatagcaagggaactttggtcaatttgtaaccgtagtcccgcagggtttgcctcatccaaagcaattgcgcgcaacaatggcctgcggcaatgtactcggcttcggcggtggaaagagcgaccgaattttgcttctttgaagcccaagacaccaaggatcttcccaagaactggcaagtccccgatgtgctcttcctattgattttgcaccccgcccaatcggcatccgaataaccaatcaaatcaaatgtggatcccctaggataccaaagcccaaacttaggagtataagctaaatatctcaagattcgttttacggccgtaaggtgggattccttagggtcggattgaaatcttgcacacatgcaaacggaaagcataatatccggtcgagatgcacataaataaagcaatgaaccaatcatcgaccggtataccttttgatcgacggatttacctcccgtgtcgaggtcgagatgcccattggttcccatgggtgtcttgatgggcttggcatccttcattccaaacttggttagaatgtcttgagtgtacttcgtttggcaaatgaaggtgccctcttggagttgcttgacttggaatcctagaaaatacttcaactcccccatcatcgatatctcgaatttctgtgtcatgatcctactaaactcttcacatgtagactcgttagtagacccaaatataatatcatcaacataaatttggcatacaaacaagtcattttcaagagttttagtaaagagtgtaggatcggccttgccgactttgaagccattagaaataaggaaatctcttaggcattcataccatgctcttggggcttgcttgagcccataaagcgccttagagagcctatagacatggttagggtactcactgtcttcaaagccgggaggttgctcaacatagacctcttccttgattggtccattgaggaaggcacttttcacgtccatttgataaagcttaaagccatggtaagtagcataggccaataatatgcgaattgactcaagcctagctacgggtgcataggtttcaccgaaatccaaaccttcgacttgtgaatacccttttgccacgagtcgagctttgttccttgtcaccacaccatgctcatcttgtttgttgcggaagacccatttggttcctacaacattttggttaggacgtggaactaaatgccatacctcgttccttgtgaaattgttgagctcctcttgcattgccaccacccaatccgaatcttgaagtgcttcctctatcctgtgtggctcaatagaggaaacaaaagagtaatgttcacaaaaatgtgcaacacgagatcgagtggttacccccttatgaatgtcgccgaggatggtgtcgacggggtgatctcgttggattgcttggtggactcttgggtgtggcggccttggttcttcctcatcctctttttcttgatcatttgcatctcccccttgatcattgccatcatcttgaggtggctcatcttcttgattttgcccttcatcaacttgagtctcatcctcattttgagttggtggagatgcttgcgtggaggaggatggttgatcttgtgtatttggagactcttcggattccttaggacacacatccccaatggacatgttccttagcgctatgcatggagcctcttcatcacctatctcatcaagattaacttgctctacttgagagccgttagtttcatcaaacacaacgtcacatgagacttcaactagtccagtggacttgttaaagaccctatatgcccttgtgtttgagtcataaccaagtaaaaagccttctacagttttaggagcaaatttagattttctacctcttttaacaagaataaagcatttgctaccaaagactctaaaatatgagatgttgggctttttaccggttaggagttcatatgatgtcttcttgagaattcgatgaagatataaccggttgatggcgtagcaggcggtgttgaccgcttcggcccaaaaccggtccggtgtcttgtactcatcaagcatggttcttgccatgtccaatagagttcgattctttctctccactacaccattttgttgtggcgtgtagggagaggagaactcatgcttgatgccctcctcctcaaggaagccttctatttgtgagttcttgaactccgtcccgttatcgcttctaattttcttgatccttaagccgaactcattttgagcccgtcttaagaatccctttaaggtctcttgggtttgagatttttcctgcaaaaagaatacccaagtgaagcgagaataatcatccactattacaagacaatacttactcccgccgatgcttatgtaagcaatcgggccgaatagatccatgtggagtagctcaagcggcctgtcggtcgtcatgatgttcttgtgtggatgatggactccaacttgcttccctgcctggcatgcgctacaaatcctgtctttctcaaaatgaacatttgttaatcctaaaatgtgctctccctttagaagcttatgaaggttcttcatcccaacatgggctagtcggcggtgccagagccaaccaatgttagtcttagcaattaagcatgtgtcaagttcagctctatcaaaatctactaagtatagctgaccctctaacacacccttaaatgctattgaatcatcacttcttctaaagacagtgacaccttgatttccatccccgaatgtgatagctcgttggggatcttggtttttctcatatgaggagaacatccttttctccccggtcatgtggtttgtgcacccgctgtcgagtatccaacttgagcccccggatgcataaacccaaactgttttgggtcctttggcattagaaacaagaactttgggtacccaaacacaagtcttggaacccttgtgtttgcccccaacaaacttggcaaccactttgccggatttgttagtaagcacataagaagcatcaaaagttttaaatgaaatggcatggtcatttgatgcattaggagttttctttctaggcaacttggcacgggttggttgcctagagctagatgtctcacccttatacataaaagcatgattagggccagagtgagacttcctagaatgaattctcctaattttgctctcaggatagccggcagggtacaaaatgtagccctcgttatcctgaggcatgggagccttgcccttaacaaagttagacaagttcttaggaggggcattaattttgacattgtctcccctttggaagccaatgccatccttaatgccagggcgtctcccgttataaagcatgctacgagcaaatttaaatttctcattttctaagttgtgctcggcaattttagcatctagttttgctatatgatcattttgttgtttaattaaagccatatgatcatgaatagcatgaatatcaacatctctacatctagtacaaatagatacatgctcaacaatagatgtagagggtttgcaagaattaagctcaacaatcttagcatgaagaatatcatttttatcgctaagatcggaaattgtaactttgcaaatatcaaaatctttagccttagcaattaaatcttcattctctaatctaaggctagcaagagatacattcaattcatcaatcttagcaagcaagtcaacattatcatctctaagattgggaattgaaatattacaaacatgtgaatcaaccttagcatttaaaatagcattttcatttctaaggttgtcaatcatctcacgacaagtgcttagctcactagatagtttttgacatttttctacttctagagcataagcatttttaaccttaacatgtttcttgttttctttaattagacaatcctcttgggcatccaaaaggtcatccttttcatgaatagcactaactaattcatttaatttttctttttgagctatgttaaggttggcaaaaagggaacacaaattatcctcctcatcactagcattatcatcactagaagattcatatttagtggaggagttggatttaaccttcttctttttgccgtcctttgccatgaggcacttgtggccgacgttggggaagaggagtcccttggtgacggcgatgttggcggcgtcctcgtcgtcggaggagtcgcttgagctttcgtcggaatcccattcccgacaaacatgggcatcgccgcccttcttcttgtagtaccttttcttctcctttcttctccccttcttgtcgtcgcctcggtcactgtcactagatataggacatttagcaataaaatgaccgggcttaccacacttgtagcaaaccttcttggagcgggacttgtagtccttccccctcctttgcttgaggatttggcggaagctcttgatgacgagcgccatttcctcattgtcgagcttggaggcgtctattggttgtctacttggtgtagactcctccttcttctcctccgttgccttgaatgcaacgggttgggcttcggatgggtcgccaagctcgttgattttcctcgagccttctatcatgcactcaaaacttacaaaatgcccgataacttcctcgggggtcattttagtatatctaggattaccacgaatcaattgaacttgagtgggattaagaaaaatgagagatcttaaaataacatttaccacttcgtggtcatcccacttcttgctcccgaggttgcgcacttggttcaccaaagtcttgagccggttgtacatgtgttgtggctcctcccctttgcgaagccggaaccgaccgagctccccctcgatcgtttcccgcttggtgatcttggtgagctcatctccttcgtgcgcggttttgagcacatcccaaatctccttagcgctcttcaacccttgtactttgttatactcctctctacttagagaggcgagaagtattgtcgttgcttgtgagttgaagtgctcgatttgggccacctcatcctcatcatagttctcatcccctaccgacggtacctgtgcaccaaactcaacaacatcccatatacttttgtggagcgagattagatgaaatcgcattaaatcgctccacctagcgtaatcttcaccatcaaaagttggtggtttgcctaatgggacggaaagtaaaggagtatgtttggaaatgccagggtagcgtaggggaatcttactatacttcttgcgctcttggcgcttagaagtgacggagggcgcgtcggagtcggaggttgatgttgatgaagtgtcggtctcgtagtagaccaccttcctcattcttttgtgcttgtctcctctccgatgcggcttgtgagaagaagatttttccttcttctctttgtggtgtgaagaggaagactttttctccttccgtttggaggagtccttcttcttctccttcctcttggtgtgggactcttccgatgaagtgctcccttggcttgtagtgggcttttcgccggtctccatctccttcttggcgtgatctcccgacat

SEQ ID NO: 4875 - DNA, 3414 bp, Zea mays
  Clone ID: TF_ZmC951_372
atgtcgggagatcacgccaagaaggaaatggtgaccggcgagaagcccactacaagccacgggaaagcttcatcggaagagtcccgcaacaaagggaaagggaaggagaagaaaccctcttcccacaaatcgcatcggagtggcgataagaaaaagaagatgaggaaggtggtctactacgagaccgatacttcatcaccttccacctccggctccgacgcgccatccattacttctaagcgccatgagcgcaagaagtttagtaagattcccttacgctatcctcgcactcctagacatacgcctctactttccgtcccattaggcaaaccaccaacatttgatggtgaagattatgctaggtggagtgatttaatgcgatttcatctaacctcactccacaaaagtatatgggatgttgttgagtttggtgtgcaggtaccatccgtaggggatgaagattatgatgaggatgaagtggcccaaatcgagcacttcaactcccaagccacaactatactcctcgcctctctaagtcgagaggagtataacaaggtgcaaggattaaagagcgccaaggaagtttgggacgtgctcaagaccgcgcacgaaggagatgagctaaccaagatcaccaagcgagagacgatcgagggggagctcggtcgcttccgtcttcgccaaggggaggagccacaagacatgtacaaccggctcaaaaccttggtgaaccaagtgcgcaacctcgggagcaaaaaatgggatgaccacgaaatggttaaggttattctaagatcacttgttttccttaaccctactcaagttcaattaattcatggtaatcctagatatacactaatgactcccgaggaagtaatcgggaattttgtgagctttgagttcatgatcaaaggctcaaggaagatcaacgagcttgatggtccctccacgtccgaagcacaaccggtcgcatttaaggcgacggaggagaaggaggagtctacatcgagtagaacacccatcgatgcctccaagctcgacaacgaggaaatggcgctccaaaggagggggaaagattacaagccccgctccaagaaagtatgctacaaatgtggtaagcccggtcactttatagcaaaatgtcctatttctagtgacagtgacaggggcaacgacaagaagggaagaagaaaggagaagaataaatactacaagaagaagggtggcgacgctcatgtatgccgcgagtgggactcggacgagagctcctccgactcctcctccgacgaggacgccacaaacatcgccatcaacaagggccttctcttccccaacgtcggccacaagtgccttatggcaaaggacgacaaaaagaagaaggttaaatctaaatcctctactaaatatgagacctctagtgatgataatgctagtgatgaggaagataatttatgtaccctttttgccaacctaaacatgcaacaaaaagaaaaattaaatgaattgattagtgtcattcatgagaaggatgatctcttagacactcaagaggacttcctaattaaagaaaacaaaaagcatgttaaggtgaaaaatgcttatgctctagaagtagaaaagtgcgaaaaattatctagtgagctaagcatttgcaatgagaccattgacaaccttagaaatgaaaatgctagtttaaatgctaaggttgattcaaatgtttgtaatgttttaattcccaatcttaaagatgataatgttgatttacttgctaagattgaagaattaaatgttactcttgctagccttaggattgaaaatgagaaattaattgctaaggctaaagaattagatatttgcaatgcttccatttccgaccttagaagtaaaaatgatatattacatgctaaggttgtagaattaaaaacttgcaaaccctctacatctaccgttgaacatactactatttgcactagatgtagagatgttaacattgatgctattcatgatcacatggctttaatcaaacaacaaaatgatcatatagcaaaattagatgctaaaattgccgagcatgacctagaaaacgaaaaatttaaatttgctagaaccatgctctatagagggagacgccctggcattaaggatggcattggcttccaacagggagacaatagccgaagtgaccgccgtcactccaccgctccactggccagtctgacagaaggacagcgccgcctgcgccactccgactgcagtgccactcgacagagtgagtctgacaggcagtcaggccttgccaaaggcaccacggcgaactccgccccgcccgaccccagggctcggactcgggctaagacccggaagacggcgaactccgctccgcccgaccccagggctcggactcgggctaagacccggaagacggcgaactccgctccgcccgaccccagggctcggactcgggctaagacccggaagacggcgaactccgctccgcccgaccccagggctcggactcgggctaagacccggaagacggcgaactccgctccgcccgaccccagggctcggactcgggctaagacccggaagacggcgaactccgctccgcccgaccccagggctcggactcgggctaagacccggaagacggcgaactccgctccgcccgaccccagggctcggactcgggctaagacccggaagacggcgaactccgctccgcccgaccccagggctcggactcgggctaagacccggaagacgacgaaactccgctccgcccgaccccagggctcggactcgggctaagacccggaagacgacgaactccgctccgcccgaccccagggctcggactcgggctcggtcccgaaagacgacgaactccgcctcgcccgaccccagggctcggactccgccctggcctctgccgaacgacttccgcctcgcccgacccggaggctcggactcggcctcggcaacggaagacagattcgaccccagcttcggaggagcccccacgtcgcccggcctcgggcgcgggcccgccacgtcaacagggagcgccatcaccactctaccccgagccgactcgggccgcagagaacaagaccggtgtcccatctgaccagctccgccagataggcaatgatggcgcctcccaagctccatgacggcggcagctctcagcttcgtcggcttagggaccccccgatctcgaaacgccgacagcgctggaggttgtactagctccgttccagcttttgcggagattttcgaggaaggcttcttctccggtggatccgctatacgatgcagaatcccttcttcgtctgccacggacgagatggttccgaagcaaaacacggatccagagcggagagcaatcttatgctggaaaatgatggccat

SEQ ID NO: 4876 - DNA, 3924 bp, Zea mays
  Clone ID: TF_ZmC951_395
ttattcttcatcaatttgagcctcatcctcattttgagttggtggagatgcttgcatggaggaggatggttgatcttgtgcatttggaggctcttcggattccttaggacacacatccccaatggacatgttccttaatgcgatgcacggagcctcttcatcacctatctcatcaagatcaacttgctctacttgagagccgttagtctcatcaaacacaacgtcacaagaaacttcaacttgtccagaggacttgttaaagactctatatgcccttgtgtttgaatcataccctagtaaaaagccttctacagttttaggagcaaatttagattttctacctcttttaacaagaataaagcatttgctaccaaaaactctaaaatatgaaatatttggctttttaccggttaggagttcgtatgatgtcttcttgaggattcggtgtagatataaccggttgatggcgtagcaagcggtgttgaccgcctcggcccaaaaccgatccgaagttttgtactcatcaagcatggtccttgccatgtccaatagagttctatttttcctctccactacaccgttttgctgtggcgtgtagggagaagagaactcatgcttgatgccctcctcctcaaggaagccttcgatttgagagttcttgaactccgttccgttgtcgcttcttattttcttgatccttaaggcgaactcattttgagcccgtctcaagaatccctttaaggtttcttgggtttgagatttttcctgcaaaaagaatacccaagtgaagcgagaataatcatccacaataactagacagtacttactcccgccgatgcttatgtaggcgatcgggccgaatagatccatgtgcaggagctccagtggcctgtcggtcgtcattatgttcttatgcggatgatgagtgccaacttgcttccctgcttggcatgcgctgcaaatcctgtctttctcaaaatgaacatttgttaatcctaaaatgtgttctccctttagaagcttgtgaagattcttcatcccaacatgggctagtcggtggtgccagagccaacccatgttagtcttagcaattaagcaagtgtcgagttcagctctatcaaaatctaccaagtatagctgaccttctaacactcccttaaatgctattgaatcatcacttcttctaaagacagtgacacctttgaccaaaccttgatttccatccccgaatgtgatcgctctttggggatcttggtttttctcatatgaggagaacatctttttctccccagtcatgtggttcgtgcacccgctgtcgagtatccaacttgagcccccggatgcataaaccttgccggatttgttagttaaaacataagatgcatcaaaagttttaaatgaaatgttatgatcatttgatgcactaggagttttctttctaggcaacttagcatgggttggttgcctagagctagatgtctcacccttatacataaaagcatgattagggccagagtgagacttcctagaatgaattctcctaattttgctctcgggataaccggcagggtataaaatgtaaccctcgttatcctgaggcatgggagccttgcccttaacaaagttggacaattttttaggaggggcattaattttgacattgtctcccttttggaagccaatgccttccttaatgcccgggcgtctcccattataaagcatgctacgagcaaatttaaatttctcattttctaagttgtgctcggcaattttagcatctagttttgctatgtgatcattttgttgtttaattaaagccatatgatcatgaatagcattaacatcaacatctctacatcttgtacaaatagatacatgctcaacaatagatgtagagggtttgcaagagttaagttcaacaatcttagcatgaagaatatcatttttatctctaagatcggagattgtagttttgcaaacatcaaaatctttagccttagcaagcaatttttcattctcaattctaaggctagcaagggaagcattcaactcatcaatcctagcatgtaaatcaacattatcatctctaggatttgaagttgaaatattgcaaacatgtgaatcaaccttagcatttaaactagcattttcattcctaaggttgtcaatcatctcacgacaagtacttagctcactagataacttttcacatttttcaatttcaagagcataagcccttttaaccttaacatgtttcttgttttctttaattagacaatcctcttgggaatccaaaaggtcatccttttcatgaatagcactaactaattcatttaatttttccttttgagctatgttaaggttggcaaaaagggaacgcaaattatcctcctcatcactagcattatcatcactagaagattcatatttagtggaggagttggatttaaccttctttcgtttgccgtcctttgccatgagacacttgtggccgacgttggggaagagaagtcccttggtgacggcgatgttggcggcgtcctcgtcgtcggaggagtcgcttgagctttcgccggaatcccactcccgacaaacatgggcatcgccgcccttcttcttgtagtacctcttcttttcctttcttctccccttcttgtcgtcgcctcggtcactgtcacttgttataggacatttagcaataaaatgaccgggcttaccacatttgtagcaaaccttcttggagcgggacttgtagtctttccctctcctttgcttgaggatttggcggaagcttttgatgacgagcgccatttcctcattgtcgagcttggaggcgtctattggttgtcgagttggtgtagcctcctccttcttttcctccgtcgccttgaatgcgacgggttgagcttcggatgtggatggatcatcaagctcgttgatcttcctcgagccttcgatcatgcactcaaaacttacaaaattcccgataacttcctcgggggtcattttagtatatctaggattaccacgaattaattgaacttgagtggggttaagaaaaatgagagatcttagaataaccttaaccacttcgtggtcgtcccactttacgctcccgaggttgcgcacttggttcaccaaggttttgagccggttgtacatgtgttgtggctcctctcctttgcgaagccggaaccgaccgagctccccctcgatcgtttcccgcttggtgatctttgtgagttcgtctccctcgtgtgcggttttgagcacatcccaaacttctttggcgctcttcaacccttgaactttgttatactcctctctacttaaaaaggcgaggagtattgttgtcgcttgagagttgaagtgctcgatttgggccacctcatcctcatcataatctttgtcccctacggatggtacctgtgcaccaaactcaacaacatcccatatacttttgtggagtgaggttagatgaaatcgcattaagtcactccacctagcataatcttcaccatcaaaagttggtggtttgcctaatgggacagaaagtaaaggtgcatgtttagaaatgcgagggtagtgtagggggatcttactaaacttcttacgctcttggcgtttagaagttacggagggcgcgtcggagccggaggtcgatgttgatgaagtgtcggtctcgtagtagaccactttcctcatcctcttttgcttgtccttactccgatgcggcttgtgggaagaagatttttccttcttctctttgtggtgagaagaagatttcttctccttccctttgttggaggagatcttcttcttctccttcctcttggtgcgggactcttccgatgaagtgctcccttggcttgtagtgggcttttcgccggtctccatctccttcttggcgtgatctcccgacat

SEQ ID NO: 4877 - DNA, 3216 bp, Zea mays
  Clone ID: TF_ZmC951_399
tcaccccccttctaggagactttcaattggtatcagagctctattcttcctctccactacaccattttgttgtggcgtgtagggagaagagaactcatgcttgatgccctcttcttcaagaaagccttcgatttgtgagctcttgaactccgtcccgttgtcgcttctaattttcttgatccttaagtcgaactcattttgagcctgtctcaagaatccctttaatgtctcttgggtataagatttttcctgtaaaaagaacacccaagtgaagcgagaataatcatccacaataactagacagtacttactcctgccgatgcttatgtaagctatcgcgccgaataggtccatgtgtaggagctcgagtggcctgtcagtcgtcatgatgttcttgtgtggatgatgagcaccaacttgcttccctgcttggcatgcgctacaaatcctgtctttctcaaaatgaacatttgttaatcctaaaatgtgctccccctttagaagcttatgaagattcttcatcccaacatgtgctagtcggagatgccagagccagcccatgttagtcttagcaattaagcaagtgtcgagttcagctctatcaaaatctactaagtatagctgaccctctaacactcccttaaatgctattgaatcatcacttcttctaaagacagtgacaccttgatttccgtccccgaatgtgattgctctttggggatcttggtttttctcataggaggagaacatctccttctcccatgtcatgtggtttgtgcacccgctgtcgatcacccaacttgagcccccggatgcataaaccttgccggatttgttagttaagacataagaggcatcaaaagttttaaaagaaatgttatggttatttgatgcactaggagttttctttttaggcaattttgcatgggttgattgcctagaactagatgtctcacccttatacataaaagcatgattagggccagagtgagacttcctagaatgaattctcctaattttgctctcgagataaccgacagggtacaaaatgtaaccctcgttatcctgaggcatgggagccttgcccttaacaaagttggacaatttcttaggaggggcattaagtttgacattgtctcccttttggaagccaatgtcgtccttaatgccagagcgtctcccattatagagcatgcttctagcaaatttaaatttttcattttctaagtcatgctcattaatcttagcattaagttgagctatgtgatcattttgttgtttaattaaagccatgtgatcatgaatagcatcaacattaatgtctctacatctagtacaaatggaagtgtgctcaacgatagatgtagagggtttgcaagattttaattctacaaccttagcatgcaatatatcatttttacttctaaggtcggaaatggaagcattgcaaacatctaattctttagccttagcaagcaatttttcattttcaatcctaaagctagcaagagaaatgtttaattcttcaatcttagcaagcaaatcaacattatcatctctaagattgggaattgaaacattacaagcatttgaatcaaccttagcaattaaactagcattttcatttctaaggttgtcaatagtctcatggcaagtgcttagctcactggaaagtttttcacatttctctacttctagagcgtaagcatttttaaccttaacatgcttcttattttctttaataaggaagtcctcttgggtgtccaagagatcatccttctcatggatagcactaatcaattcatttagtttttctttttgttgcatgttgaggttggcaaaaagaatgcgtaagttatcctcctcattgctagcattatcctcatcactagaggtttcatattttgtggaggatcttgattttaccttcttccttttgccgtcctttgccatgaggcacttgtggctgacgttggggaagagaagtcccttggtaacggcgatgtttgcggcgtcctcgtcggaggaggagtcggtggagctctcgtcggagtcccattcccggcaaacatgggcatcgtcgcccttcttcgtgtagtacttcttcttctcctttcttctccccttcttgtcgtcgcccctgtcactagaaataggacattttgctataaagtgaccgggcttaccacatttgtagcaaactttcttggagcggggcttgtaatccttccccctcctttgcttgaggatttggcggaagctcttgatgatgagcgtcatttcctcgttgtcgagcttggaggcatcgatgggtgttctactcgatgtagactcctccttcttctcctccgtcgcaaagttcccgattacttcctcgggagtcattagtgtatatctaggattgccacaaattaattggacttgagtagggttaaggaaaacaagtgatcttagaataaccttaaccatttcgtggtcatcccattttttgctcccgaggttgcgcacttgattcaccaaggttttgagccggttgtacatgtcttgtggctcctccccttggcgaagacggaagcgaccgagctccccctcgatcgtctcccgcttggtgatcttggttagctcatctccctcgtgcgcggtcttgagtacgtcccaaacttccttggcgctctttaatccttgcaccttgttgtactcctctctacttagagagccgaggagtatagttgtggcttgggagttgaagtgctcgatttgagcctcttcgtcctcatcataatcttcataccctacggatggtacctgtacaccaaactcaactacatcccatatacttttgtggagtgaggttagatgaaatcgcattaaatcactccacctagcataatcttcaccatcaaacgttggtggtttgcctaatgggacggaaagtaaaggcgtatgtttaggaatgcgaggatagcgtaaggggatcttactaaacttcttgcgctcatggcgcttagaagtgacggacggcgcgttggagccggaggtggaaggtgatgaagtatcggtctcgtagtagaccaccttcatcatcttctttttcttgtcgccactccgatgcgacttgtgggaagaggatttcttctccttccctttccctttgttgtgggactcttccgatgaagccttcccgtggcttgtagtgggcttgtcgccggtcaccat

SEQ ID NO: 4878 - DNA, 3645 bp, Zea mays
  Clone ID: TF_ZmC951_408
cttgttcctagtgaagttgttgagctcctcttgcatcgccaccacccaatccgaatcttgaagtgcttcctctaccctgtgtggctcaatagaggaaacaaaagagtaatgctcacaaaaatgtgcaacacgagatctagtggttacccccttatgaatgtcgccaaggatggtgtcgatgaggtgatctcgttggattgcttggtggactcttgggtgcggcggtcttggttcttcatcctccttgtcttgatcatttgcatctcccccttgatcattgtcgtcatcttgaggtggctcattctcttgatcttctccttcatcaacttgagcctcattctcattttgagttggtggagatgcttgcgtggaggaggatggttgatcttgtgcatttggaggctcttcggattccttaggacacacatccccaatggacatgttccttagtgcgatgcacggagcctcttcatcacctatctcatcaagataaacttgctctacttgagagccgttagtctcatcaaacacaacgtcacaagaaacttcaactagtcctgaggacttgttaaagactctatatgcccttgtgtttgaattatatcctagtaaaaagccttctacagtcttaggagcaaatttagattttctacctcttttaacaagaataaagcatttgctaccaaagactataaaatatgaaatattgggctttttaccggttaggagttcgtatgatgtcttcttgaggattcggtgtagatataaccggttgatagcgtagcaagcggtgttaaccgcctccgcccaaaaccgatccgacgtcttgtactcatcaagcatggttcttgccatgtccaatagagttctattcttcctctccactacaccattttgttgtggggtgtagggagaagagaactcatgcttgatgccctcctcctcaaggaagccttcgatttgtgagttcttgaactccgtcccgttgtcacttctaattttcttgatccttaagccgaactcgttttgagctcgtctcaagaatccttttaaggtctcttgggtatgagatttttccaagtatagctgaccctctaacactcccttaaatgttattgaatcatcacttcttctaaagacagtgacaccttgatttccatccccgaatgtgatcgctctttggggatcctggtttttctcataggaggagaacatcttcttctcccctgtcatgtggattgtgtacccgctgtcgatgatccaacttgagcccccggatgcataaaccttgccggatttgttagttaaaacataggatgcatcaaaagttttaaaggagatgtcatgatcatttgatgcactaggagttttcttcttaggcaacttagcacgggttggttgcctcgaactagatgtctcacccttatacataaaagcatggttagggccagagtgagactttctagaatgaattctcctaattttgctctcgggataaccggcagggtacaaaatgtaaccctcgttatcctgaggcatgggagccttgcccttaacaaagttggacaatttcttaggaggggcattaagtttgacattgcctccccgttggaagccaatgccatccttaatgccagggcgtctcccattataaagcatactacgagcaaacttaaattttttattttctagttcatgctcggcaattttagcatctaatttagctatatgatcattttgttgtttaatcatggaaaggtgatcatgtatagcattaacatcaacatctctacatctagtacaaatagtgacatgctcagtggtagatgtagagggtttgcaagaattaagttcaacaatcttagcacacaatatatcatttttatctctaagatcggaaattgtaatattgcaaacatcaagttctttagccttagcaagcaattttccattctcaatcctaaggctagcgagagaaatgtttaattcttcaatcttagcaagcaaatcatcattatcatttctaagattgggaattgaaacatcacaaacatttgaatcaaccttagctaacaaattagcattctcatttctaaggttgtctatagtctcatggcaagtgcttagctcactagatagtttttcacatttttctacttctagagcgtaagcatttttaaccttaacatgctttttgttctctttaataaggaagtcctcttgggtgtccaagagatcatccttctcatgaatagcactaatcaattcatttaatttttctttttgttgcatgtttaggttggcaaaaagaatgcgcaagttatcctcctcattgctagcatcatcctcatcactagaggtttcatatttagtggaggatcttgattttaccttcttctttttgtcgtcctttgccatgaggcacttgtggccgacgttggggaagagaagacccttggtgacggagatgtttgcggcgtcctcgtcggaggaggagtcggtggagctctcgtcggagtcccattcccggcaaacatgggcatcgccgcccttcttcttgtagtacttcttcttctcctttcttctccccttcttgtcgtcgcccctgtcactgtcactggaaataggacattttgctataaagtgtccgggcttaccacacttgtagcaaactttcttggagcggggcttgtaatctttccccctcctttgcttgaggatttgacggaagctcttgatgatgagtgccatctcctcgttgtcgagcttggaggcgtcgatgggtgttctacttggagtagattcctccttcttttcttccgtcgtcttgaatgcgaccggttgtgcttcggacgtggaggggccatcaagctcgttgatcttctttgagcctttgatcattaattcaaaactcacaaaattcccgattacttcctcgggagtcattagtgtatatctaggattgccacgaattaattgaacatgagtagggttaaggaaaacaagtgatcttagaataaccttaaccatttcgtggtcatcccattttttgctcccgaggttgcgcacttggttcaccaaggttttgagccggttgtacatgtcttgtggctcctccccttggcgaagtcggaagcgaccgagctccccctcgatcgtttcccgcttggtgattttagtcacctcatctccttcgtgcgcggtctttagtgtgtcccaaatctccttagcacctttcaacccttgcaccttattatactcctctcgacttagagaggcgaggagtatagttgaggcttgggagttgaagtgttggatttgggccacttcgtcctcatcatagtcttcatcccctacggatggtacctgtacaccaaactcaacaacgtcccatatacttttgtggagtgatgatagatgaaatcgcatcaaatcactccatctagcataatcttcaccatcaaacattggtggtttgcctaatgggatggaaagtaaaggcgtatgtttaggaatgcgaggatagcgtaggggtatcttactaaacttcttgcgctcatggcgcttagaagtaatggatgacgcgtcggagccggaggtagaaggtgatgaagtatcggtctcgtagtagaccaccttcctcat

SEQ ID NO: 4879 - DNA, 4990 bp, Zea mays
  Clone ID: TF_ZmC951_410
tcaatcaaagttccgagaatcaagaatgtttagctcattcctaagtttggtaaaggttttctcatctaaaggcttggtaaagatatcggctaattgatctttggtgttgatataggctatctcgatatccctcctttgttggtgatctctcaaaaagtgatactgaatggctatgtgcttagtgcggctgtgttcaacgggattatccgccatgcggattgcactctcattatcacataggagagggactttgctaaatttgtagccatagtccctaagggtttgcctcatccaaagtaattgcgcgcaacaatgacctgcggcaatgtactcggcttcggcggtagaaagagctactgagttttgtttctttgaagcccaagacaccagggatctccctagaaactgacaagtccctgatgtgctcttcctatcaattttacacactgcccaatcagcatcagaatatcctcccgtgtcgaggtcaagatgcccattggttcccatgggtgtcttgatgggcttggcatccttcattccaaacttggtgagtatgtcttgaatgtacttcgtttggctgatgaaggtgctctcttggagttgcttaacttgaaatcctaggaaatacttcaactcccccatcatagacatctcgaatttttgaaccattatcctactaaactcttcacaagtagatttgttagtagacccaaatatgttatcattaacataaatttggcatacaaacaaatcttttgcaatagttttagtaaagagagtaggatcgactttaccgactttgaagccattagtgataagaaaatctcttaggcattcataccatgctcttggggcttgcttgagcccataaagcgccttagagagtttataaacatggttaggatactcactatcttcaaagccaggaggttgctcaacatagacttcttccttgattggtccattgaggaaggcattcttcacgtccatttgatataactcattcctcgtgaagttgttgagatcctcttgcatcgccaacacccaatccaaatctttaagtgcatcctctaccctgtgtggtcttgggtgtggcggtcttggatcttgttcatcttccttgtcttgatcattgtcatctcccccttgatcattgctctccttttgagatggctcatcctcttgatcttcattttcatcatcttgagcttgatcctcatcttgagttggtggagatgcttgtgtggaagatgatggtcgatcttgtgcttgtggaggctcttcggattccttaggacacacatccccaatagacatgttcgttagcgcgacgcacagagcctcttcttcatctagctcatcaagatcaacttgccctacttgagagccgttagtctcatcaaacacaatgtcaaaagaaacttcaactagtccagtggacttgttaaagactctatatgcccttgtgtttgagtcataaccaagtaaaaagccttctacagccttaggagcaaatttagattttctacctcttttaacaagaataaaacatttgctaccgaagactctaaaatatgaaacattgggctttttaccggtgaggagttcatatgatgtcttcttgaggattcggtgaaggtataaccggttgatggcgtagcaagcggtgttgaccgcctcgacccaaaaccgatccgaagtcttgtactcatcaagcatggtccttgccatgtccaatagagttctattcttcctctccactacaccattttgttgtggcgtgtagggagaagagaactcatggttgatgccctcctcctcaagaaagccttctatttgtgagttcttgaactccatcccattgtcgcttctaatctttttgatccttaagccgaactcattttgagctcgtctcaagaatccctttaaggtctcttgggtttgtgattttctcccgccgatgcttatgtaagctatctggccgaataggtccatgtggagtagctcaagtggcctgtcggtcgtcatgatgttcttgtgtggatgatgaacgccaacttgcttccctgcttggcatgcactacaaatcctgtctttctcaaaatgaacatttgttagttccaaaatgtgttctccctttagaagcttatgaaggttcttcatcccaacgtgggctagtcggcggtgccagagccaacccatgttggtcttagcaattaagcaagtgtcgagttcagctctattgaaatcaactaagtatagctgaccctctaacactcccttaaatgctactgaatcatcacttcttctaaagacagtaacaccttggtttccatccccgaatgtgatagctctttggggatcttggtttttctcataggaggagaacatccttttctccccagtcatgtggtttgtgcacccgctatcaatgatccaacttgagcccccggatgcataaactttgcctgatttgttagtgagcacatatgaagcatcaaaagtcttaaatgaaatgttatgatcatttgatgcaataggagatttcattttaggcattttaacatgggtagaacgcctagagctagaagcctcattcttataaataaaagcatggtgagaaacataatgagtcttcttagcatgaattctcctaatcttatcctcaggataaccagcaggatataaaatatagccctcgttatcctgaggcatgggagccttgcccttaacaaaattagacaatcttttaggaggggcattaagcttgacattgtctccctgttggaagccaatgccatcattaatgtcagggcgtctcccactatagagcatgcttctagcaaatttaaatttttcattttccaagtcatgctcattgattttagcagttaatgtagctatgtgatcattttgttgtttaattaaagcaaggtgatcatgaatagcatctacattaacatctctatatctagtgcaaatagaaacatgatcaatcatagatgtagagggtttgcaatcatttaattcaacaatcctagcgtgtaaaatagcattctcatctctaagattggtaatagcatcattgcaaacatttaaatctttagccttagcaattaattgttcattaataatcttaaggctagcaagagaggcattcaatttatcaatcttagcaatcaaactagcattatcatttctaagattgataattgaatcatcacagatatttgacttctcaaccttagcaatcaaattagcattctcaattctaaggttagagatagtgtcatggcaaatgctaagctcactagttaatttttcacatttttctacttcctgagcataagcatttttgaccttgtcacaccaaaggtgggagttcatgaagtgtaaggctttacccacaagtcgtgttacccatttgccacggagttgatcagaccccatacacctcttaacatacttcttattttctttaattaggaagtcctcttggctatccaagagttcatccttctcatgaatagcactaatcaattcattcaatttttctttttgttgcatgtttaggttggcaaaaagggtgagcaagttatcctcatcatcactagaattatcctcatcactagaagttgcatacttagtggaggatctagattttaccttcttcttcttgtcgtcctttgccatgaggcacttgtggccgacgttgggaaagaggaggcccttgttgatggtgatgttggcggcgtcctcgtcgtcggaggagtcggtggagctctcgtcggagtcccactcccggcaaacatgggcatcaccgcccttcttcttgtagtatctcttcttctccttcttcttccccctcttgtcgtcgcccctgtcactgtcactagaaataggacattttgctataaagtgaccgggcttaccacacttgtagcaaactttcttggagcggggcttgtagtctttccccctcctttgcttgaggatttggcggaagctcttgatgatgagcgccatttcctcgttgtcgagcttggaggcgtcgatggggacactacttggtgtagagtctttcttttcttcttccgtcgccttgaatgcgacgggttgcacctcggatgttgaggtggtgccttgctcgatgattttcttagagcctttgatcatcaattcaaagctcacaatttttcctatcacttcctcgggagacattagtttgtatctaggatcaccacgaattaattgtacttgagtaggattaagaaaaactagtgatcttagaataaccttgaacatttcatggtcatcccatttggtgctcccgaggttgcgcacttggttcaccaaggtctttagccggttgtacatggcttgcagatcctctccttggttgagcatgaaacaaccgagctccccctcgatcgtctccctcttggtgatcttggtcacctcatctccttcgtgcgcggttttgagcacgtcccaaatctccttggcactcttcaacccttgcaccttgttatactcctctcgacttagagaggcgaggattatagcggtagcttgggagttgaagtgccggatttgggcaaccttgtccgaatcataatctttatcccccggtgatggtacctgtactccaatcttaacaacattccaaatgctagcgtggagtgaagttaggtgatgcctcattttatcactcaacatataataatcttcaccgtcaaaaatcggtggtttgctaaacttcttgcgctcatggcgcttagaagtgacatacggagtgtcggagccggaggtggatgatgatgaggaatcggtctcgtagtagaccactttcttcatcttctttttcttgtcgccgctccgatgtgacttggcatgtgaaggggatcccttcattttgttgtcagactctcccgatggagccttcccgtggcttgtagacttgtcaccaccggtcacgatctccttctta

SEQ ID NO: 4880 - DNA, 4728 bp, Zea mays
  Clone ID: TF_ZmC951_433
ctaagatggagagtggcttggagcgacggtaaaggatgagttacggagtggaagcctttgtcttcgccgaagactccaatttcctttcaatacacctatgacttggtttgaaataaccttttgatcgacggatttacctccttcgtcgagatcgagatgcccattggttcccatgggtgtcttgataggtttggcatccttcattccaaacttgcttagaatatcttgagtatacttcgtttggcttagaaaagtgccctcttgaagttgcttcacttgaaatcctaagaaatatttcaactcccccatcatagacatctcgaatttttgtgtcatgatcctactaaattcttcacatgtagactcgttagtagatccaaatataataccatcaacataaatttggcatacaaacaagtcattttcaagagttttagtgaagagtgtaggatcggcttttccgactttgaatccattagtgataagaaaatccctaaggcattcataccatgctcgtggggcttgcttaagcccataaagcgccttagagactttatacacatggttagggtactcactatcttcaaagtcggaaggttgctcaacatagacctcttccttgattggtccattgaggaaggcactcttcacgtccatttggtaaagcttgaagccatggtaagtagcataggctaataatattcgaattgactcaagcctagctacgggtgcataggtttcaccgaaatccaaaccttcgacttgggagtatcccttggccacaagtcgggctttgttccttgtcaccacaccatgctcgtcttgcttgttgcggaagacccatttggttcctacaacattttgattaggatgtggaactaaatgccatacctcattccttgtgaagttgttgagctcctcttgcatcgccaccacccaatccgaatcttgtagtgcttcctctaccctgtgtggctcaatagaggaaacaaaagagtaatgctcacaaaaatgtgcaacacgagatctagtggttacccccttatgaatgtcgccgaggatggtgtcgacggggtgatctcgttggattgcttggtggactcttgggtgtggcggtctttgttcttcatcctctttgtcttggtcatttgcatctcccccttgatcattgccgtcatcttgaggtggctcatttgcttgatcttctatttcatcaacttgagcttcatcctcgttttgagtcggtggagatgcttgcgtggagaaggatggttgatcttgtgcatttggaggctcttcggattccttaggacacacatccccaatggacatgttccttagcgcgatgcacagagcctcttcaatacctatctcatcaagatcaacttgctctacttgagagccgttagtctcatcaaacacaacgtcataagaaacttcaacttgtccagtggacttgttaaagactctatatgcccttgtgtttgagtcatatcctagtaaaaagccttctacagtcttaggagcaaatttagattttctacctcttttaacaagaataaagcatttgctaccaaagactctaaaatatgaaatgttgggctttttaccggttaggagttcataagatgtcttcttgaggattcggtgtagatataaccggttgatggcgtagcaagcggtgttgaccgcctcggcccaaaaccgatccaaagtcttgtactcatcaagcatggttcttgccatgtccaatagagttctattcttcctctccactacaccattttgttgtggtgtgtagggagaagagaactcatgcttgatgccctcctcctcaaggaagccttcaatttgagagttcttgaactccgtcctgttgtcacttctaattttcttgatccttaagccgaactcattttgagcccgtctcaagaatccctttaaggttttcccgccgatgcttatgtaagctatcgggccgaatagatccatgtgtaggagctctagtggcctgtcggtcgtcatgatgttcttatgtggatgatgaactccaacttgcttccctgcctgacatgcgctacaaatcctgtctttctcaaaatgaacatttgttagtcccaaaatgtgttctccctttagaagtttgtgaagattcttcattccaacatgtgctagtcggcgatgccagagccaacccatgttagtcttagcaattaagcaagtgtcgagttcagctctatcaaaatctactaagtatagctgaccctctaacactcccttaaatgctattgaatcatcactccttctaaagacagtaacacctacatcttgatttccatccccgaatgtgatagctctttggggatcctggtttttcttgtaggaggagaacatctccttctcccctgacatgtggtttgtgcacccgctatcgatgatccaacttgagcccccggatgcataaaccttgccggatttgttagttaaaacataagaggcatcaaaggtcttaaatgaaatgttagaatcatttgatgccttaggagttttcttcttaggcaattttgcatgggttgattgcctagaactagatgtctcacccttatatataaaagcatggttagggccagagtgagacttcctagaatgaattctcctaattttgctctcgggataaccggcagggtacaaaatgtaaccctcgttatcctgaggcatgggagccttgccctttacaaaattagacaatcttttaggaggggcattaagtttgacattgtctcccttttggaagccaatgccatcctttatgccagggcgtctcccactatagagcatgcttctagcaaatttaaatttttcatcttccaagtcatgctcactaattttagcattaagttgagctatgtgataattttgtttcttaattaaagctaggtgatcatggatagcatcaacattaatgtctttacatctagcacaaatggaagtatgttcaacggtagatgtagagggtttgcaagattttaattctacaaccttagcatgcaatatatcatttttacttctaaggtcggaaatagaagcattgcaaacatctaattctttagccttagcaagcaatttttcattttcaatcctaaggctagcaagagaaatgttcaattcttcaatcttagcaagcaaatcaacattatcatttctaagattgggagttgaaacatcacaatcatttgaatcaaccttagcaattaaatttgcattctcatttctaaggttggcaattaaatcatggcatgtgcttagctcactagttaatttttcacatttctcaacttctagagcataggcatttttaacgttaacatgttttttgttttccttgattaggaagtcctcttgggtatccaagagttcatccttttcatggatggcactaattagctcatttagtttttctttttgttgcatgttgaggtttgcaaaaagggtacgcaaattatcctcctcatcactagcattatcatcactagaggactcatatttagtggaggatttggatttaaccttcttctttttgccgtcttttgccatgaggcacttgtggccgacgttggggaagaggagtcccttgttgatggcaatgttggcggcgtcttcgtcggaggaggagtcggtggtgctctcgtcgaagtcccactcccggcaaacatgggcatcgccgcccttcttcttgtagtacctcttcttctcctttcttctccccttcttgtcgtcgcccctgtcactgtcactagaaataggacattttgctataaagtgaccgggcttaccacacttgtagcaaactttcttggagcgggatttgtagtccttccccctcctttgcttgaggatttggcggaagctcttgatgacgagcgccatctcctcattgtcgagctttgaggcgtcgattggttgtctacttgatgtagactcctccttcttttcctccgtcgccctgaatgcaaccggttgtgcttcggacgtggaggggccatcaagctcgttgatcttctttgagcctttgatcaataattcaaagctcacaaaattccctattaccttgaccatttcatggttatcccatttcttgctcccgaggttgcgcacttggttcaccaaggttttgagccggttgtacatgtcttgtggctcctccccttggcgaagtcggaagcgaccgagctccccctcgatcgtttcccacttggtgattttggtcacctcgtctccttcgtgtgcggtctgtacaccaaactcaacaacatcccatatacttttgtggagtgaggttagatgaaatcgcatcaaatcactccacctagcataatcctcaccatcaaaagttggtggtttgcctaatgggacggaaagtaaaggcgtatgtttaggaatgcgaggatagcgtaaggggatcttactaaacttcttgcgctcatggcgcttagaagtgacggacggcgtgtcggagccggaggtggatggtgatgaggtgtcggtctcgtagtagaccaccttcctcatcttcttcttcttatcaccgctccgacgcgagttgtgtgaaggggattccttttccttccccttccctttgttgtaggactctcccgatagagccttcccgtggcttgtagcgggcttctcgccggtcaccatttccttcttggcgtgatctcccgacat

SEQ ID NO: 4881 - DNA, 5067 bp, Zea mays
  Clone ID: TF_ZmC951_439
tcaatcaaatttccgagaatcaagaatgtttagctcattcctaagtttgataaaggttttctcatctaatggcttggtaaagatatcggctagttgttctttggtactaacataagcaatctcgatatcccccctttgttggtgatccctcaaaaagtgataccgaatggctatgtgcttagtgcggctgtgctcaacaggattatccgccatgcggattgcactctcattatcacataggagagagactttagttaatttgtagccatagtccctaagggtttgcctcatccaaagcaattgcgcgcaacaatggcctgcggtaatatactcggcttcggcggtagaaagagctcctgaattttgtttctttgaagtccaagacaccagggatcttcccaagaactgacaagtccctgatgtgctcttcctatcaattttacaccctccccaatcagcatctgaataacctattaaatcaaaggtgtatcccttggggtaccaaataccaaacttaggtgtatgaactaaatatctcaagattcttttcatggccctaaggtgaacttccttaggatcggcttgaaatcttgcacacatgcatacagaaagcataatatctcccgtgtcgaggtcgagatgcccattggttcccatgggtggcttgatgggcttggcatccttcattccaaacttggtgagtatgtcttgaatatacttggtttggctgatgaaggtgcccttttggagttgcttgacttgaaatcctaagaaatacttcaactcccccatcatagacatctcgaatttttgaatcatgatcctactaaactcttcacaagtagatttgttagtagacccaaatatgatatcatcaacataaatttggcatataaacaaatcatttgcaatagttttagtaaagagagtaggatcggctttgccgactttgaagccattagtgataagaaaatctcttaggcattcataccatgctctaggggcttgcttgagcccataaagcgccttagagagtttgtaaacatgattagggtactcactatcttcaaagccgggaggttgctcaacatagacctcttccttgattggtccatttaggaaggcacttttcacgtccatttggtaaagcttaaagccatggtaagtagcataggcaagtaatatatgaattgactcaagccttgctacgggtgcataggtttcaccgaaatccaaaccttcgacttgtgaatatcccttggccacaagtcgggctttgttccttgtcaccacaccatgctcatcttgcttgttgcggaagacccacttggttcctacaacattttgattaggatgtggaacaagatgccatacctcattcctcgtgaagttattgagttcctcttgcattgccaacacccaatctgaatcccttaatgcgtcttccaccctatatggctcaatagaagacacaaaggagtaatgttcacaaaaatgagcaacacgagatcgagtggttacccccttatgaatatcgccgaggatagtgttcacggggtgatctcgttgtattgcatggtggacgcttggttgtggcggtcttggaccctcatcatcttccttgtcttgatcatcgacatctcccccttgatcattgtcctcttcttgaggtggctcctcttgatctccattttcatcatcttgagcttgatcctcatcttgggtcggtggagatgcttgcatggaagatgaaggttgatcttgtgcatgtggaggctcctcggattccttaggacacacatccccaatggacatgttccttagtgcgacgcacgaggcctcttcatcatctagctcatcaagatcaacttgctccacttgggagccgttagtctcatcaaacaaaatgtcacaagaaacttcaactagtccagtggacttgttaaagactctatatgcccttgtgtttgagtcataaccaagtaaaaagccttctacaaccttaggagcaaatttagattttcttcctcttttaacaagaataaaacatttgctaccaaagactctaaaatatgaaacattgggctttttaccggtgaggagttcataggatgtcttcttgaggattcggtgaaggtagagacggttgatggcgtagcaagcggtgttgactgcttctgcccaaaaccggtccgaagtcttgtactcatcaagcatggtcctcgccatgtcaagtagagttctattcttcctctccactacaccattttgttgtggagtgtaggaagaagagaactcatgcttgatgccctcctcctcaagaaagccttctatttgtgagttcttgaactccgtcccattgtcgcttctaatctttttgatccttaagccgaactcattttgagcccgtctcaagaatccctttaaggtctcttgggtttgtgatttttccctgtctttctcaaaatgaacatcggttagtcccaaaatgtgttctccctttagaagcttgtgaagattcttcatcccaacatgggcttgatttccatccccgaatgtgatagctctttgaagatcatggtttttctcataggaggagaacattcttttctccctagtcatgtggtttgtgcacccgctatcagtgatccagcttgagcccccggatgcataaactcttatacataaaagcatgatgagagccagagtgagacttcctagagtgaattctcctaattttgtgctcgggataaccgacaggatataaaatgtaaccctcgttatcctgagccatgggagctttgctctaacaaagttagacaatcttttaggaggggtattaagcttgacattgtctccctgttggaagccaatgccatccttaatgccagggcgtctcccactatagagcatgcttctagcaaatttaaaattttcattttctaagtcatgctcatcaattttagcactaagttgagctatgtgatcattttgtttcttaattaaagctaagtgatcctgaatagtatcaacattaatgtctctacatctagtgcaaatagtaacatgctcaacgatagatgtagagggtttgcaagtatttaaatcaacaatcttagcatgtaagatagcattctcatctctaagattggaaatggaaacattgcaaacatttaagtctttagccttagcaattaatttttcatttgcaattttaagactagagagcgaagcattcaaattgtcaatcttagtaatcaaactagcattatcatttctaagactaataattgaatcatcacaaatgtctaacttctcaaccttagctattaatttagcattttcatctctaaggttggaaataacattatggcaagtacttagcttactagttaatttttcacatttttctacctctagagcataagcatttttagtcttaacatgctttttattttccttaataaggaagtcctcttggctatccaagagttcatccttctcatgaatagcactaatcaattcatttaatttctccttttgttgcatattaatattggcaaaaagggtaagcaagttatcctcatcatcactagaattatcctcatccctagaggttgtatacttagtggaggattttgattttaccttcttcttcttaccgtcctttgccatgaggcacttgtggccgacgttggggaagaggagtcccttgttgacggcgatgtttgcggcgtcctcgtcggaggagtcgatggagctctcgtcggagtcccactcccagcaaacatgggcatcaccgcccttctttttgtaatacttcttcttttctctcctctttcccttcttgtcgtcgcccctgtcactgtcactagaaataggacattttgctataaagtggccgggcttaccacatttgtagcaaaccttcttggagcggggtttgtaatccttccccctcctttgcttgaggatttggcggaagctcttgatgatgagcgccatttcctcattgtcgagcttcgaggcgtcgatgggaagcctactcgatgtacattcttccttcttctcctccgttgctttgaatgcgaccggttgcacttcgggtgtggagggggcgccttgctcgatgattttcttggagcctttgatcatcaattcaaagctcacaaattttcctatcacttcctcgggagacattagtttatatcttggatcaccacgaattaattgtacttgagtagggttaagaaatacgagtgatctaagaataaccttgaccatctcatggtcatcccattttgtgctcccgaggttgcgcacttggttcatcaaagtcttgagctggttgtacattgtttgtggctcctccccttggtgaagcatgaagcgactgagctccctctcgatcgtttccctcttggtgatcttggtcacctcgtctccttcgtgcacgatcttgagcacgtcccaaatctcttttgcgctcttcaacccttgcaccttattatactcctctcgacttagagaggtgaggagtatagtagttgcttgagagttgaagtgctcgatttgggccacctcgtcctcatcataatcttcatcccctacggttggtacctgtactccaaactcaacaacatcccatatgcttttgtggagtgaggttaggtgatatctcatcatatcactccacctagaataatcttcaccgtcaaacgtcggtggtttgcctaatgggaccgaaagtaatggagtatgtctaggaatgcgagggtagcgtagggggatcttactatacttcttgcgctcttggcgcttagaagtgatggacgcggcgtcggatcctgatgtagagggcgatgaagagtcggtctcgtagtagaccactttcttcattttcttcttctcaccactcttgtgcgtcctaatgcgtgaaggggatcccttcttctttttgttgccggactcctttgatggagccttcccgtggcttgtggccttggcggggcttgtaggcttgttcccgccgatcaccatctccttcttggcgtgatctcccgacat

SEQ ID NO: 4882 - DNA, 4660 bp, Zea mays
  Clone ID: TF_ZmC951_446
ttatagcggagcggcttccccaaattcccgaggctggcaagttcgagtgaatcctccctggtgcactggacactgtccggtggcacaccggacaatccggtgcgtcagaccagggttgccttcagtttgactttgctccttgttttgaaccctttcttttatctttgtattggtttgttgtgaacctttggcaccggcaaataccaatggagttgagtggaagcgccttctttgccgaatactccatttccctttcaattctatgactctcgtgtcgaggtcgagatgcccattagttcccatgggtgtcttgatgagcttggcatccttcattccaaacttggtgagtatatcttgaatgtacttcgtttggctgatgaaggtaccctcttggagttgctttacttgaaatcctagaaaatacttcaactcccccatcatagacatctcgaatttttgaatcatgattctactaaactcttcacaaatagatttgttagtagacacaaatatgatatcatcaacataaatttggcatacaaacaaatcattcttaatcgtcttagtaaagagagtaggatcggccttgccgactttgaagccattagtgataaggaaatctcttaggcattcataccatgctcttggggcttgcttgagccaataaaagcgccttagagagtttatacacgtgattaggatactcactatcttcaaagtcgggaggttgctcaacatagacctcttccttgattggtccattgaggaaggcacttttcacgtccatttggtaaagcttaaagccatggtaagtagcataggcaagtaatatgcgaattgattcaagcctagctacgggtgcataggtttcaccgaaatccaaaccttcgacttgtgaatatcctttggccacaagtcgggctttgttccttgtcaccacaccatgctcatcttgcttgttgcggaagacccactcgttcctagtgaagttgttgagctcctcttgcatcgccactacccaatccgaatcttgtagtgcttcctctaccctgtgtggctcaatagaggaaacaaaagagtaatgctcacaaaaatgtgcaacacgagatctagtggttacccccttatgaatgtcgccaaggatggtgtcgacggggtgatcttgttggattgcttggtggactcttgggtgtggcggcctttgttcttcatcctccttgtcttgatcatttgcatctcccccttgatcattatcgtcatcttgaggtggctcatttgcttgatcttctacttcatcaacttgagcttcatcatccccaatggacatgttccttagcgcgatgcacggagcctcttcatcacctatctcatcaagatcaacttgctctacttgagagccgttagtttcatcaaacacaacgtcacaagaaacttcaaccagtcccgaggacttgttaaagactctatatgcccttgtgtttgaatcatatcctagtaaaaagccttctacagtcttaggagcaaatttagattttctacctcttttaacaagtataaagcatttgctaccaaagactcggttgatggcgtagcaagcggtgttgaccgcttcggcccaaaaccgatccgaagtcttgtactcatcaagcatggttcttgccatgtccaatagagttctattcttcctctccactacaccattttgttgtggcgtgtagggagaggagaactcatgcttgatgccctcctcctcaaggaagccttcaatttgagagttcttgaactccgtcccattgtcgcttctaattttcttgatccttaagccgaactcattttgagcctgtcttaagaatccctttaaggtctcttgggtttgagatttttccctgtctttctcaaaatgaacattggttagtcctaaaatgtgttctccctttagaagcttgtgaagattcttcatcccaacatgggctagtcggcggtgccagagccaacccatgttagtcttagcaattaagcaaatgtcgagttcagctctatcaaaatctaccaagtatagctgaccctccaaaactcccttaaatgctattgaatcatcacttcttctaaagacagtgacaccttggtttccatccccgaatgtgatcgctcgttggggatctttgtttttctcgtaggaggagaacattttcttctccccagtcatgtggtttgtgcacccgctatcgatgatccaacttgagcccccggatgcataaacgatcatttgatgcactaggagttttccttttaggcaacttagcatgggttggttgcctaaactagatgtctcacccttatacataaaagcatgatttgggccagagtgagacttcctagagtgaattctcctaatcttgctctcgggataaccggcagggtacaaaatgtaaccctcgttatcctgaggcatgggagccttgcccttaacaaaattagacaatcttttaggaggggcattaagtttgacattgtctcccctgtggaagccaatgccatccttgatgccagggcgtgtcccattataaagcatactacgagcaaatttaaatttttcattctctaagttatgctcggcaattttagcatctaattttgctatatgatcattttgttgtttaattaaagacatgtgatcatgaatagcatcaatatcaacatctctacatctagtacaaatagatacatgctcaacgatagatgtagacggtttgcaagattttaattctacaacctttgcatgtaatatatcgttttcatttctaaggttagaaatagtaatattgcaaacatcaaaatctttagccttagcaagcaatttctcattttcaatcctaaggctagcaagagaaacattcaactcatcaatcctagcaagtaaatcaacattatcatctctaggattgaaagttgaaacattacaaacatgagaatcaaccttagtaattaatttcgcattttcatttctaaggttggcaatagtgtcatggcatgtgcttagctcactagataatttctcacatttttctacctctagagcataagcattcttaaccttaacatgctttttattttccttgattaggaagtcctcttgggagtccaagagatcatccttttcatggatggcactaattagctcatttagtttttccttttgttccatgttaaggttggcaaaaagggtacgcaaattatcttcctcatcactagcattatcatcactagaagattcatatttagtggaggattttgatttaaccttcttccttttgccgtcctttgccatgaggcacttgtggcctacattggggaagagaagtcctttagtgacggcgatgttggtggcgtcctcgtcgtcggaggagtcgctagagctttcgttggagtcccactcccgacaaacatgggcatcgccgcccttcttcttgtagtaccttttcttctcctttcttctccccttcttgtcgtcgcccctgtcactgtcactagatataggacattttgcaataaaatgaccgggcttaccacatttgtaacacactttcttggagcgaggtttgtaatccttccccctcctttgtttgaggatttggcggaagctcttgatgatgagcgccatttcctcattgtcgagcttggaggcgtcgattggttgtctacttgatgtagactcctccttcttctcctccgtcgccttgaatgcgaccggttgtgcttcgggtgtgtaggaggtgccttgctcgatgattttctttgagcctttaataattagctcaaagctcacaaattttcctatgacttcctcgggagacattagcttatatcttgaccatctcatggtcatcccattttcactcccgaggttgcgcacttggttcaccaaggtcttcaagcggttgtacatagcttgtggatcctccccttggtgaagcatgaagcgaccgagctccccctcgatcgtttcccatttggtgatctttgtcacctcgtctccttcgtgcgcggtcttgagtacatcccaaatttccttcgcactttttaacccttgcaccttattatactcctctcgacttagagaggcgaggagtgtagtagtggcttgggagttaaagtggtgaatttgggccacctcgtccgagtcgtagtcttcatcccctacggatggtacctgtacaccaaactcaacaacattccatatgcttgtgtggagtgaggttagatgatgcctcattttgtcactccacatattataatcttcaccgtcaaaaaccggtggtttgcctaatggaatgaaaagtaatggagtatgtctagaagtacgaggataatgtaagggaatcttactaaacttcttgcgctcatggcgcttagaagttatggagggcgcgtcggagccggaggtagaaggtgatgaagtgtcggtctcatagtagaccaccttcctcatcttcttaattttgtcgccactccgatgcgacttgtgggaagaagtcttcttttccttcttcttctccttcctcttctccttgttgcgggactctcctgatagagcattctcgttgcttgtagtgggcttttcgtcggtctccatctccttcttggcgtgatctcccgacat

SEQ ID NO: 4883 - DNA, 4938 bp, Zea mays
  Clone ID: TF_ZmC951_448
ttaggtggtggtgcggtccttttgctttgggctaatattctctccccctttggcatgaatcgccaaaaacggagtcattagagcccttagaattactctttcccccttttgatcgacggatttacctccttcgtcgaggtcgagaagcccattggttcccatgggtgtcttgatgggtttggcatccttcattccaaacttgcttagaatatcttgagtatactttgtttggcttaggaaggtgccctcttggagttgctttacttgaaatcctaagaagtacttcaactcccccatcatagacatctcgaatttttgtgtcatgatcctactaaactcttcacatgtagactcgttagtagacccaaatataatatcatcaacataaatttggcatacaaacaagtcattttcaagagttttagtgaataaagtaggatcggcctttccgactttgaagccattatctataagaaaatctctaaggcatccataccatgctcttggggcttgcttgagcccataaagcgccttagagagtttataaacatggttagggtactcactatcttcaaagccgggaggttgctcaacatagacctcttccttgattggtccattgaggaaggcacttttcacgtccatttggtaaagcttaaagccatggtaagtagcataggccaataatatacgaattgactcaagcctagctacgggtgcataggtttcaccgaaatccaaaccttcgacttgggagtatcctttggccacaagtcgagctttgttccttgtcactacaccatgctcatcttgcttgttgcggaagacccatttggttcctacaacattttgatttggacgtggaaaaaaatgtgcaacacgagatctagtagttacccccttatgaatgtcgccgaggatggtgtcgacggggtgatctcgttggattgcttggtggactcttgggtgtggcggcctttgttcttcatcctccttgtcttgatcatttgcatctcccccttgatcattgtcgtcatcttgaggtggctcatttgcttgattttctactgcatcaacttgagcttcatcctcattttgagttggtggagatgcttgagtggaggaggatggttgatcttgtgcatttggaggctcttcggattccttaggacacacatcctcaatggacatgttccttagcgcgatacacggagcctcttcaccacctatctcatcaagatcaacttgctctacttgagagctgttagtctcatcaaacacaacgtcacaagaaacttcaactagtccagaggacttgttaaagactctatatgcccttgtgtttgaatcatatcctagtaaaaagccttctacagtcttaggagcaaatttagattttctacctcttttaataagaataaagcatttgctaccaaagactcggttgatggcgtagcaggcggtgttgaccgcctcggcccaaaaccgatccgaagtcttgtactcatcaagcatggttcttgccatgtccaatagagttctattctttctctccactacaccattttgttgtggcatgtagggagaagagaactcatgcttgatgccctcctcctcaaggaagccttctatttgtgagttcttgaacttcgccccattgtcgcttctaatctttttgatccttaatccgaactcattttgagcctgtctcaagaatccctttaacgtttcttgggtgtgagatttttcctgcaaaaagaacacccaagtgaagcgagaataatcatccacaataactagacagtacttactcccgtcgatgcttatgtaagcgattgggccgaataggtccatgtgtaggagctccagtggcctatcagtcgtcatgatgttcttatgtggatggtgagcaccaacttgcttccctgcctggcatgcgctacaaatcctgtctttctcaaaatgaacatttgttaatcctaaaatgtgctctccctttagaagcttgtgaagattcttcatcccaacatgtgctagtcggcggtgccagagccaacccatgttagtcttagcaattaagcatgtgtcgagttcagctctatcaaaatctactaagtatagctgaccctctaacacacccttaaatgctattgaatcatcacttcttctaaagacagtgacaccttggttcccatccccgaatgtgatgactcgttgggggtcttggtttttctcataggaggagaacattttcttctcccctgtcatgtggtttgtgcacccgctgtcgatgatccaacttgagcccccggatgcataaatccaaatggttttgggtcctttggcattagatacaagaactttgggtacccaaacacaagtctttgaccccttgtgcttgcccccaacatatttggcaactactttgccggatttgttagttaacacataagatgcatcaaaagttttaaatgaaatgctatgatcatttgatgcattaggagttttcttcttaggcaacttagcacgggttggttgcctagaactagatgtctcacccttatacataaaagcatgattagggccagagtgagactttctagaatgaattctcctaattttgttctcagggtagccggcagggtacaaaatgtaaccctcgttatcctgaggcatgggagccttgcccttaacaaaatttgacaacttcttaggaggggcattaattttgacattgcctccctgttggaagccaatgccatcctcaatgccagggtgtctccctttatagagcatgcttctagcaaatttaaaattttcattttctaagtcatgctcggcaatcttggcatctagttttgctatatgatcattttgttgtttaattaaagccatgtgatcatgaatagcattaacatcaacatctctacatctagtacaaatagaagtgtgctcagcggtagatgtagagggtttgcaagattttaattctacaaccttagcatgcaaaatatcattcttagttctaaggtcggaaatagtagtattgcaaacatcaaaatttttagccttagcaagcaatttctcattttccatcctaaggctagcaagagacatgtttaattcttcaatcttagcaagtaaatcatcattatcatttctaagattggaaattgaaacattacaaatatttgaatcaaccttagctaacaaattagcattttcatttctaaggttgtctattgtctcatgacaagtgcttagctcactagataatttttcacatttctcaacttctagagcataagcatttttaactttaacatgttttttgttttccttgattaggaagtcctcttgggagtccaagagatcatccttctcatggatggcactaatcaattcatttaatttctctttttgttgcatgtttaagttggcaaaaagagtacgcaaattatcttcctcatcactagcattatcatcactagaggactcatatctagtggaggatttggatttaaccttcttctttttgccgtactttgccatgaggaatttgtggccgacgttggggaagaggagtcccttggtgatggcgatgttggcggcgtcctcgtcgtcggaggagtcgcttgagctttcatcggagtcccactcgcgacaaacatgggcatcgccgcccttcttcttgtagtacctcttcttctccttccttctccccttcttgtcatcgcccctgtcactgtcactagaaataggacattttgcaataaagtgaccgggcttaccacacttgtagcaaaccttcttggagcggggcttgtaatctttccctctcctttgcttgaggatttggcgaaagcttttgatgacaagcgccatttcctcattgtcgagtttggaggcgtcgatgggtgttctactcagtgtagactcctcctccttctcctccgtcgctttgaatgcgaccggttgagcttcggacgtagaaggaccgtcaagctcgttgatcttccgtgagcccttgatcatgaattcaaagctcacaaaattctcgattacttcctcgggagtcattagtgtgtatctaggattaccacgaattaattgtacttgagtagggttaagaaaaataagtgatcttagaataaccttaaccacttcgtggtcatcccatttcttgctcccgaggttgcgcacttggttcaccaaggttttgagccggttgtacatatcttgtggctcctctccttggcgaagacggaagcgaccgagctccccctcgatcgtttcccgcttggtgatcttggtgagttcatcaccctcgtgcgcggtcttgagcacgtcccaaacttctttggcgctcttcaatccttgcaccttgttgtactcctccctacttagagaggctaggagtattgttgtggcttgggagttgaagtgctcgatttgggccacctcgtcctcatcataatcctcatcccctacggatggtacctgtgctccaaactcaacaacattccatatacttttgtggagtgaggttagatgaaatttcattaaatcactccacctagcataatcttcacagtcaaaggttggcggtttgcctaatggaacggaaagtaatggagtatgtctagaagtacgaggatagtgtaaggggatcttactaaacttcttgcgctcatggcgcttagaagttatggagggcgcgtcggagccggaggtagatggcgatgaggtgtcggtctcgtagtagaccaccttcctcattttctttttcttgtcgccactccgatgcgacttgtgggaggaggccttcttgtccttccctttctttttgttgcgggattcttccgatgaagctttcccgtggcttgtagcgggcttttcgccggtttccatctccttcttggcgtgttctcccgacat

SEQ ID NO: 4884 - DNA, 5667 bp, Zea mays
  Clone ID: TF_ZmC951_449
ctagcaaaagaaatttctagaatcaagaatattgagctcatgcctaagtctggtaaaagattgttcatcaagtggcttggtaaagatatcggctaattgatctttagtgttaatgtaagaaatctcgatatcccccttttgttggtgatccctaagaaaatgataccgaatggctatgtgcttagtgcggctatgctcgacgggattgtcggccattttgattgcactctcattatcacatagcaaagggactttggttaatttgtaaccgtagtcccgcagggtttgcctcatccaaagcaattgcgcgcaacaatgtcctgcggcaatgtactcggcttcggcggtggaaagagcgaccgaattttgcttctttgaagcccaagacaccaaggatcttcccaagaactggcaagtccctgatgtgctcttcctattaattttgcaccccgcccaatcggcatccgaataaccaatcaaatcaaatgtggatccccgagggtaccaaagcccaaacttaggtgtataagccaaatatctcaaaattcgttttacgaccgtaaggtgtgattccttagggtcggattggaatcttgcacacatgcaaacggaaagcataatgtccggtcgagatgcacataaataaagcaatgaaccaatcatcgaccggtataccttttgatccacggacttacctcccgtgtcgaggtcgagatgcccattagttcccatgggtgtcttgatgggtttggcatccttcatcccaaacttggttagaatgtcttgagtgtacttcgtttggctaatgaaggtgccctcttggagttgcttgacttggaagcctagaaaatacttcaactcccccatcatcgacatctcgaatttctgtgtcatgatcctactaaactcctcacatgtagactcgttagtagacccaaatataatatcatcaacataaatttggcatacaaacaagtcattttcaagagttttagtaaagagtgtaggatcggccttgccgactttgaagccattagcaataaggaaatctctaaggcattcataccatgctcttggggcttgcttgagcccataaagcgccttagagagcctatagacatgattaggatactcactgtcttcaaagccgggaggttgctcaacatagacctcttccttgatcggtccattgaggaaggcacttttcacgtccatttgatagagcttaaagccatggtaagtagcataggccaataatatgcgaattgactcaagcctagctacgggtgcataggtttcaccgaaatccaaaccttcgacttgtgaataccctttggctacgagtcgagctttgttccttgtcaccacaccatgctcatcttgcttgttgcggaagacccatttggttcctacaacattttggttaggacgtggaactaaatgccagacctcattcctcgtgaaattgttgagctcctcttgcatcgccaccacccaatccgaatcttggagagcttcctctaccctgtgtggctcaatagaggaaacaaaagagtaatgttcacaaaaatgagcaacccgagatcgagtagttacccccttatgaatgtcgccgaggatggtgtcgacggggtgatctcgttggattgcttggtggactcttgggtgtggcggtcttggttcttcctcatcctccttttcttgatcatttgtatctcccccttgatcattgctatcatcttgaggtggctcgtcttcttgattttgctcttcatcattttgagcctcatcctcattttgagttggtggagatgcttgcatggaggaggatggttgatcttgtgtacttggaggctcttcggattccttaggacacacatccccgatggacatgttccttagcgcgatgcatggagcctgttcttcacctatctcatcaagatcaacttgctctacttgagagccgttagtttcatcaaacacaacgtcacaagagacttcaactagtccagtggacttgttaaagaccctatatgcccttgtgtttgagtcataaccaagtaaaaagccttctacagttttaggagcaaatttagattttctacctcttttaataagaatgaagcatttgctaccaaaaactctaaaatatgaaatgttgggctttttaccggttaggagttcatatgatgtcttcttgaggattcggtgaagatataaccggttgatggcgtagcaggcggtgttgaccgcttcggcccaaaaccggtccggtgtcttgtactcatcaagcatggttcttgccatgtccaatagagttcgattcttcctctccactacaccattttgttgtggcgtgtagggagaggagaactcatgcttgatgccctcctcctcaaggaagccttcaatttgagagttcttgaactccgtcccgttgtcgcttcttattttcttaatccttaagccgaactcattttgagctcgtctcaagaatccctttaaggtctcttgggtttgagatttttcctgtaaaaagaatacccaagtgaagcgagaataatcatccacaataacaagacaatacttactcccgccgatgcttatgtaagcaatcgggccgaatagatccatgtggagtagctcaagcggcctgtcggtcgtcttgatgttcttgtgtgggtgatggactccaacttgcttccccgcctggcatgcgctacaaatcctgtctttctcaaaatgaacatttgttaatcctaaaatgtgctctccctttagaagcttgtgaagattcttcatcccaacatgggctagtcggcgatgccagagccaacccatgttagtcttagcaattaagcatgtgttgagttcagctctattaaaatccactaagtatagctgaccctctaacagacccttaaatgctattgaatcatcacttcttctaaagacagtgacaccttgatttccatccccgaaggtgatagctcgttggggatctaggtttttctcatatgaggagaacatcttcttctcccctgtcatgtggtttgtgcacccgctgtcgagtatccaacttgagcccccggatgcataaaccttgccggatttgttagtcaatacataagatgcatcaaaagttttaaatgaaatggcatgatcatttgatgcattaggaattttcttcttaggcaacttagcatgggttggttgcctagaactagatgtctcacccttatacataaaagcatgattagggctagagtgagacttcctagaatgaatcttcctaattttgttctcaggatagccggcagggtataaaatgtaaccctcgttatcctgaggcatgggagctttgcccttaacaaagttagacaagttcttaggaggggcattaagtttgacattgtctcccctttggaagccaatgccatccttgatgccagggcgtctcccattataaagcatgctacgagcaaatttaaatttctcattttctaagttgtgctcggcaattttagcatctagtttagctatatgatcattttgttgcttaattaaaatcatgtgatcatgaatagcatcaatatcaacatttctacatctagtacaaatagatacatgctcaacaatagatgtagagggtttgcaagattttaattctacaaccttagcatgcagcatatcatttttagttctaaggtcagaaattgtaacattgcaaacatctagttctttagccttagtaatcaacttttcattttctactctaaggctagcaagagaaatgttcaattcttcaatcctagcaagcaaatcatcattattatctctaggagtggaaattgaaacatcacaaacatgagaatcaaccttagcatttaaaatagcattttcattcctaaggttgtcaattatttcacggcaagtgcttagctcactagataatttttcacatttttctacttctagagcataagcctttttaaccttaacatgttttttgttttctttaattagacaatcctcttgggaatccaaaaggtcgtccttttcatgaatagcactaaccaattcatttaatttttctttttgagctatgttaaggttggcaaaaagggaacgcaaattatcttcctcatcactagcattgtcatcactagaagattcatatttagtggaggatttagatttaaccttctttttgccgtcctttgccatgaggcacttgtggccgacgttggggaagaggagtcccttggtgacggcgatgttggcagcgtcctcgtcgtcggaggagtcgcttgagctctcgtcggagtcccactcgcgacaaacatgggcatcgccgcccttcttcttgtaatacctcttcttttcctttcgtctccccttcttgtcgtcacctcggtcactgtcactagatataggacatttagcaataaaatgaccgggcttaccacacttgtagcaaactttcttggagcgggacttgtagtctttccccctcctttgtttgaggatttggcggaagctcttgatgacgagcgccatttcctcattgtcgagcttggaggcgtcgattggttgtcgacttggtgtagcctcctccttcttctcctccgttgccttgaatgcaacgggttgggcttcggatgagtcgccaagctcgttgattttcctcgagccttctatcatgcactcaaaacttacaaaatgcccgataacttcctcgggggtcattttagtatatctaggattaccacgaatcaattgaacttgagtgggattaagaaaaatgagagatcttaaaataacatttaccacttcgtggtcatcccacttcttgctcccgaggttgcgcacttggttcaccaaagtcttgagccggttgtacatgtgttgtggctcctcccctttttgaagccggaaccgaccgagctccccctcgatcgtttcccgcttggtgatcttggtgagctcatctccctcgtgcgcagttttgagcacatcccaaatctcctttgcatttttcaatccttgcactttgttgtattcttccttgcttagagaggcaaggagtatggttgtggcttgagagttgaagtgctcgatttgggccacctcatcctcatcatagttttcatcccctacggatggtacctgcgcaccaaactcaacaacatcccatatgcttttgtggagcgagattagatgaaatcgcattaaatcgctccacctagcgtaatcttcaccatcaaaagttggtggtttgcctagtgggacggaaagtaaaggtgtatgtttggaaatgcgagggtagcgtagagggatcttactatacttcttgcgctcttggcgcttagaagtgacggagggcgcatcggagtcggaggtcgatgttgatgaagtgtcggtctcgtagtagaccaccttcctcatcctcttgtgcttgtcgcctttccgatgcggcttgtgggaagaagatttttccttcttctctttgtggtgagaagaagatttcttctccttccctttgttggaggagctcttcttcttctccctccttttggtgcgggactcttccgatgaagtgctcccgtagcttgtagtgggcttttcgccggtctccatctccttcttggcgtgatctcccgacat

SEQ ID NO: 4885 - DNA, 6142 bp, Zea mays
  Clone ID: TF_ZmC951_450
agtcaaaggtatatgaatagattgcaagatgcatattcatgttttgaagtttctccacctgtttcaaatgattgtcctttgactaaacaaaactcccccctgaatgaaattctcctcttatctttcaacagggttttaatgaatatcaattgcaaatatgtaatttattccaattatgaaaaataccgatttgaaagtaggcataccaatttgcaatatattaattaagaaaatttcgaaggatggtggtgcggtccttttgctttgggctaatactttctccccctttggcattaatcaccaaaaacggagactttgtgagccctctttactttctcccccattggtaaatgaaatgtgagtgaaagattataccaatgtgagagtcatgtggagtgacggcgaaggttaaatgataccgatagagtggagtggaagctttgtcttcgccgaaaaactccatttcccttacattagtcgtagtcatgaaagagatatgatctaaggtatataaatgagctatgtgtgcaatgtttcaatcaaagttccaagaatcatgaatatttagctcattcctaagtttgctaaaggttttctcatctaaaggcttggtaaagatgtcggttaattgttctttggtgctaacataagctatctcgatatccccattttgttggtgatccctcaaacagtgatgctgaatgtatatgtgcttagtgcggctgtgttcaacgggattatatgccatgcggattgcactctcattatcacattggagagggacttttctcaatttgtagccatagtccctaagggtttgcctcatccaaagtaattgcgcacaacagtggcctatggcaatgtactcggcttcggcggtggaaagtgctatggagttttgtttctttgaagcccatgacaccagggatctccccagaaactgacaagtccctgatgtgctcttcctatcaattttacatcgtgtccaatcggcatcgaaatatcctattaaatcaaaagtggatcccttggggtaccaaagcccaaacttaggagtgtaaactaaatatctcatgattctcttcacgaccctaaggtgaacttccttaggatctgcctggaaccttgcacacatgcatacagaaagcataatatccggtcgagatgcacataagtagagtaaagatcctatcatcgaccggtataccttttgatctacggatttacctcccgtgtcgaggtcgagatgcccattggttcccataggtgtcttgatgggtttgccatccttcattccaaacttcttaagtatgtcttgaatgtacttcgtttggctgatgaaggtgccctcttggagttgcttgatttgaaatcctaggaaatttttcaactcccccatcattgacatctcgaatttctgtatcatgatcctactaaactcttcacaagttgacttattagtagacccaaatataatatcatcaacataaatttggcatacaaacaaattatctttaaagccaggaggttgctcaacatagacctctttgttgataggtccattgaggaaggcacttttcacgtccatttgatagagcttaaagccatggtaagtagcataggaaagtaatatatgaattgactcaagcctagctatgggtgcataagtttcatcaaagtccaaatcttcgacttgtgaataacctttggccacaagtcgggctttgtttcttgtcgccacaccatgttcatcttgcttattgtggaatacccatttggtacctacaacattttggttaggacgtggaactatatgccatacctcattcctcgtgaagttgttgagctcctcttgcattgccaccacccaatccgaatcttgaagtgcttcctccaccctgtgtggctcaatagaggaaacaaaagagtaatgctcacaaaaatgtgcaacccgagatcgagtagttacccccttatgaatgtcgccgaggatggtgtcgacggggtgatctcgttggattgcttggtggactcttgggtgtggcagccttagttcttcctcatcctccttttcttgatcatttgtatctctcccttgatcattgccgtcatgttgaggtggctcatcttcatgatcttcttgttcaacatcttgagcctcatcctcattttgagttggtggagatgcttgcatggaagaggatggttgatcttgtgcacttggaggcttttcggattccttaggacacacatccccaatggacatgttccttagcgctatgcatggagcctcttcattacctatctcatcaagatcaacttgctctacttgagagccgttagtttcatcaaacacaacatcacatgagacttcaactagtccagtggacttgttaaagaccctatatgcccttgtgtttgagtcataaccaagtaaaaagccttctacagttttaggagcaaatttagattttctacctcttttaacaagaataaagcatttgctaccaaaaactctaaagtatgaaatgttgggctttttaccggttaggagttcataggatgttttcttgaggattcggtgaagatataaccggttgatggcgtagcaggcggtgttgaccgcttcggcccaaaaccggtccggtgtcttgtactcatcaagcatggttcttgccatgtccaatagagttcgattcttcctctccactacaccattttgttgtggcgtgtagggagaggagaactcatgcttgattccctcctcctcaaggaagccttcaatttgagagttcttgaactccgtcccgttgtcgcttcttattttcttgatccttaagccgaactcattttgagcccgtctcaagaatccctttaaggtctcttgggtttgagatttttcctgtaaaaagaatacccaagtgaagcgagaataatcatccactattacaagacaatacttactcccgccgatgcttatgtaagcaatcgggccgaatagatccatgtggagtagctcaagcggcctgtcggtcgtcatgatgttcttgtgtggatgatgggctccaacttgctttcccgcctggcatgcgctacaaatcctgtctttctcaaaatgaacatttgttaatcctaaaatgtgttctccctttagaagcttatgaagattcttcatcccaacatgagctagtcggcgatgccagagccaacccatgttagtcttagcaattaagcatgtgtcgagttcagctctatcaaaatctactaagtatagctgaccctctaacacacccttaaatgctattgaatcatcacttcttctaaagacagtgacaccttgatttccatccccgaatgtgatagctcgttggggatcttggtttttctcatatgaggagaacatctttttctccccagtcatgtggttcgtgcacccgctgtcgagtatccaacttgagcccccggatgcataaacccaaatggttttgggtcctttggcattagacacaagaactttgggtacccaaacacaagtcttggagcccttgtgcttgcccccaacatatttggcaactatcttgccggatttgttagtcaacacataagatgcatcaaaagtcttaaatgaaatgttatgctcatttgatgcaataggagttttcttaggcaacttagcacgggttggttgcctagagctagatgtctcacccttatacataaaagcatgattagggccagagtgagacttcctagaatgaattctcctaattttgctctcaggataaccggcagggtataaaatgtaaccctcgttatcctgaggcatgggagccttgcccttaacaaaattagacaagttcttaggaggggcattaagtttgacattgtctcccctttggtagccaatgccatccttaatgccagggcgtctcccattatagagcatacttctagcaaatttaaatttttcattttccaagttatgctcggcaattttagcatctagttttgctatatgatcattttgttgtttaattaaagccatatgatcatgaatagcatcaatgttaacatctctacatctagtgcaaatagatacatgctcaacgatagatgtagagggtttgcaagattttaattctacaaccttagcttgtaacatgtcatttttagttctaaggtcggaaattgtagcattgcaaatatcaagatctttagccttagtaagcaatttttcattttcaattttaaggctagcaagagaaatgtttaattcttcaatcctagcaagcaaatcatcattattatttctaggattgggaatattacaaacatgagaatcaaccttagtatttaaactagcattttcattcctaaggttgtcaatcatctcacggcaagtgcttagctcattagataacttttcacatttctcaatttcaagagcataagcctttttaaccttaacatgtttcttgttttctttaattagacaatcctcttgagaatccaaaaggtcatccttttcatgaatagcactaaccaattcatttaatttttccttttgagctatgttaaggttggcaaaaagggaacgcaaattatcctcctcatcactagcattatcatcactagaagattcatatttagtggaggagttggatttaaccttcttccgtttgccgtcctttgccatgaggcacttgtggccgacgttggggaagagcagtcccttggtgacggcgatgttggcggcgtcctcgtcgtcggaggagtcgcttgagctttcgtcggaatcccactcccgacaaatatgggcatcgccgcccttcttcttgtagtacctcttcttctcctttcttctccccttcttgtcgtcgcctcggtcactgtcactagatatgggacatttagcaataaaatgaccgggcttaccacatttgtagcagaccttcttggagcgggacttgtagtccttccccttcctttgcttgaggatttggcggaagctcttgatgacgagcgccatttcctcattgtcgagcttggaggcgtctattggttgtcgacttggtgtagactcctccttcttctcctccgttgccttgaatgcaacgggttgagcttcggatgtggtggcatcatcaagctcgttgatcttcctcgagccttcgatcatgcactcaaaactaacaaaattctcgataacttcctcgggggtcattttagtatatctaggattgccacgaattaattgaacttgagtagggttaaggaaaataagagatcttagaataaccttaaccacctcgtggtcatcccactttacgctcccgaggttgcgcacttggttcaccaaggtcttgagccgattgtacatgtgttgtggctcctcccctttgtgaagccggaaccgaccgagctccccctcaatcgtttcccgcttggtgatcttggtgagctcatcaccttcgtgcgcggtcttgagtaaatcccaaatctcctttgcgttcttcaacccttgaactttgttatactcctctctacttaaagaggctaggagtattgttgttgcttgagagttgaagtgctcgatttgggccacctcatcctcatcatagccctcatcccctacagacggtacctgcgcaccaaactcaacaacatcccatatacttttgtggagcgaggttagatgaaatcgcattaaatcgctccaccttgcataatcttcaccatcaaaagttggtggtttgcctaatgggacggaaagtaaaggtgtatgtttggaaatgcgaaggtaatgtagggggatcttactatacttcttgcgctcttggcgcttagaagtgacagatgccgcgtcggagccggaggtagatgtcgatgaagtgtcggtctcgtaatagacgactttcctcatcctcttgtgtttgtccccactccgacgtggcttgtgggaagaagatttctccctcctctccttgtgatgagaagaagacttcttctccttccctttgttggaggagctcttcttcttctctttccttttgatgcgggactcttccgatgaagtgctcccgtggcttgtagtgggcctttcgccggtctccatctccttcttggcgtgatctcccgacat

SEQ ID NO: 4886 - DNA, 5687 bp, Zea mays
  Clone ID: TF_ZmC951_451
tcattactatttcatcaaaatcaacttgctctacttgagagccgttagtttcatcaaacacaacgtcacatgagacttcaactagttcagtggacttgttaaagaccctatatgcccttgtgtttgagtcataaccaagtaaaaagccttctacagttttaggagcaaatttagattttctacctcttttaacaagaataaagcatttgctaccaaaaactctaaagtatgaaatgttgggctttttaccggttaggagttcatatgatgtcttcttgaggattcggtgaagatataatcggttgatggcgtagcaggcggtgttgacgcaccggacagtccggtgcacagcggacagtccggtgaattatagtggactagccgttggagtttcccgaagctggcgagttcctgaggccgacctcccttggcgcaccggacactgtccggtgtacaccggacagtccgatgaattataacgcgagtgcccctggaatttctcgaaggtggagagtttggcttggagttccctggtgcaccggacactgtccggtggcacaccagacagtccggtgcgccagaccaggggtgccttcggttatccattgctctttttgttgaacccatttcttggtctttttattggctaagtgtgaacctttggcaccttccgtgtcgaggtcgagatgcccattggttcccatgggtgtcttgatgggcttggcatccttcatcccaaacttgtttagaatatcttgagtgtactttgtttggctcaggaaggtgccctcttgaagttgctttacttgaaatcccaagaaatacttcaactcccccatcatagacatctcgattttttgtgtcatgatcctactaaattcttcacatgtagactcgttagtagacccaaatataatatcatcaacataaatttggcatacaaacaagtcattctcaagagttttagtgaataaagtaggatcgacctttccgactttgaagccattatctataaggaaatctctaaggcattcataccatgctcttggggcttgcttgagcccataaagcgtcttagagagtttataaacatgattaggatactcactatcttcaaagccgggaggttgctcaacatagacctcttccttgattggtccattgaggaaggcactcttcacgtccatttggtaaagcttgaagccatggtaagtagcataggctaataatatacgaattgactcaagcctagctacgggtgcataggtttcaccgaaatccaaaccttcgacttgggagtatcctttggccacaagtcgggctttgttccttgtcaccacaccatgctcgtcttgcttgttgcggaacacccatttggttcctaaaacattttgattaggacgtggaactaaatgccatacctcattcctcgtgaagttgttgagctcctcttgcatcgccactacccaatccgaatcttgtagtgcttcctctaccctgtgtggttcaatagaggaaacaaaagagtaatgcttacaaaaatgtgcaacatgagatctagtggttacccccttatgaatgtcgccgaggatggtgtcgacggggtgatctcgttggattgcttggtggactcttgggtgtggcagccttggttcttcatcctccttgtcttgatcatttgcatctcccccttgatcattgccatcatcttgaggtggctcatttgcttgatcttctccttcatcaacttgagcctcatcctcattttgagttggtggagatgcttgcgtggaggaggatggttgatcttgtgcatttggaggctcttcggattctttaggacacacatccccaatggacatgttccttagcgcgatgcacagagcctcttcatcacctatctcatcaagatcaacttgctctacttgagagctgttagtctcatcaaacacaacgtcacaagaaacttcatcttgtccagaggacttgttaaagactctatatgcccttgtgtttgaatcatatcctagtaaaaagccttctacagtcttaggagcaaatttagattttctaccccttttaacaagtataaagcatttgctaccaaagactctaaaatatgaaatattgggctttttaccggttaggagttcatatgacgtcttcttgaggattcggtgtagatataaccggttgatggcgtagcaggcggtgttgaccgcctcggcccaaaaccgatctgtagtcttgtactcatcaagcatggttcttgccatgtctaatagagttatattcttcctctccactacaccattttgttgtggcgtgtagggagatgagaactcatgcttgatgccctcctcctcaaggaagccttcatgttgagagttcttgaactccgtcccgttgtcgcttctaattttcttgatccttaagccgaactcattttgagcccgtctcaagaatccttttaaagtttcttgggtatgagatttttcctgcaaaaagaatacccaagtgaagcgagaataatcatccacaataactagacagtacttactccctccgatgcttatgtaagcaatcaggccgaatagatccatgtgtaggagttccagtggcctgtcagtcgtcatgatgttcttgtgtggatgatgagcaccaacttgcttccctgcttggcatgcgctacaaatcctgtctttctcaaaatgaacatttgttaatcctaaaatgtgctctccctttagaagcttatgaagattcttcatcccaacatgggctagtcggcggtgccagagccaacccatgttagtcttagcaattaagcaagtgtcgagttcagctctatcaaaatctactaagtatagctgaccctctaacactcccttaaatgctactgaatcatcacttcttctaaagacagtgacaccttggtttccatccccgaatgtgatcgctcgttggggatcttggtttttctcgtaggaggagaacatcttcttctcccctgtcatgtggtttgtgcacctgctgtcgatgatccaacttgagccctcggatgcataaacccaaatggttttgggtcctttggcattagacacaagaactttgggtacccaaacacaagtctttgaccccttgtgcttgcccccaacatacttggcaactaccttgccagatttgttagttaaaacatatgatgcatcaaaagttttaaatgaaatgtcatgatcatttgatgcactaggagttttctttttaggcaacttagcacgggttggttgcctagaactagatgtctcacccttatacataaatgcatggttagggcaagagtgagacttcctagtatgaattctcctaatcttgctctcaggataaccggcagcgtacaaaatgtaaccctcgttatcctgagccatgagagacttgcccttaacaaagttggataatttcttaggaggggcattaagtttgacattgtcccccttttggaagccaatgccatccttaatgccagggcgtctcccactataaagcatactacgagcaaacttaaatttttcattttctagttcatgctcggcaattttagcatctagtttagctatatgatcattttgttgtttaattaaagccatgtgatcatgaatagcattaatatcaacatctctacatctagtgcaaatagacgtatgttcaatggtagatgtagagggtttacaagattttaattctacaaccttagcatgcaatatatcatttttacttctaaggtcggaaattgtaatattgcaaacatcaagttctttagccttagcaagcaagtttttattttcattcctaaggctagcaagagtaatgtttaattcttcaatcttagcaagcaaattatcattatcatttctaagattgggaattgaaacattacaaacatttgaatcaaccttagctaacaaattagcattctcatttctaaggttgtctatagtctcatggcaagtgcttagctcactagatagtttttcacatttttctacttctagagcgtaagcatttttaactttaacatgctttttgttttctttaataaggaagtcctcttgggagtccaagagatcatccttctcatggatagcactaattaattcatttaatttttctttttgttgcatgtttatgttggcaaaaagagtacgcaaattatcttcctcatcactagcattatcatcgctagaggactcatatctagtggaggatttggatttaacctttttctttttgtcgtcctttgccatgaggcacttgtggtcgacgttggggaagagaagacccttgttgatggcgatgttggcggcgtcctcgtcgtcggaggagtcggaggagctctcgtccgagtcccactcgcggcaaacatgggcgtcgccacccttcttcttgtagtatttcttcttctcctttcttctccccttcttgtcgtcgcccctgtcactgtcactagaaataggacattttgctataaagtgaccgggcttaccacacttgtagcaaaccttcttggagcggggcttgtaatctttccccctcctttgcttgaggatttggcggaagctcttgatgacgagcgtcatttcctcgttgtcgagctttgaggcgtcgattggttgtctactcggtgtagactcctccttcttctcctctgtcgccttaaatgcgacaggttgtgcttcggatgtggagggatcatctagctcattgattttctttgagcccttgatcatgtactcaaagctcacaaaattcccgattacttcctcgggagtcattagtgtatatctaggattaccacgaattaattgaacttgagtagggttaaggaaaataagtgatctaagaataaccttaaccatctcgtggtcatcccactttttgctctcgaggttgcacacttggttcaccaaggttttgagccggttgtacatgtcttgtggctcttctcctttgcgaagccggaagcgaccgagctccccctcgatcgtctcccgcttggtgatcttggttagttcatcaccctcgtgcgcggtcttgagcacgtcccaaacttccttggcgctctttagtccttgcaccttgttgtactcctccctacttagagaggcgaggagtatggttgtggcttgggagttgaagtgctcgatttgggccacctcgtcctcatcataatcctcatcccctacggatggtacctgtgctccaaactcaacaacattccatatacttttgtggagtgaggttaggtgaaatttcatcaaatcactccacctagcataatcttcaccgtcaaaggttggcgatttgcctaatggaacggaaagtaatggagtatgtctagaagtgcgaggatagtgtaaggggatcttactaaacttcttgcgctcatggcgcttagaagttacggagggcgcgtcgaagccggaggtggaaggtgatgaagtatcggtctcgtagtagaccaccttcctcatcttctttttcttgtcaccactctgatgcgacttgtgggaagaggctttcttctccttccctttcccctttttgcgggactcttccgatgaagccttcccgtggcttgtagtgggcttatcgccggtctccatctccttattggcgtgttctcccgacat

SEQ ID NO: 4887 - DNA, 4884 bp, Zea mays
  Clone ID: TF_ZM3542.C1.o1.fg
atgccgccccgcacaaggctaacggcacgcaagtcaacgggaccaattggagtgcctcggcatcaactggcccctcgacatgaaagcagtagcagtggaagtaatgactccataggagatcttgaagcccgagtgagtcgacttcaagcagcgctgcaacacaggaccgatgcttgggtcgcagacgaagatagaatcaatgaactaagaagggacatccgtcacctgcaggatcagcttgctgatcgagacttagcacttgactgggcagtacagtctcgtttgctggcatgtgctaaggaagcaagggctcaggcccaaattaaagaacttagctcaactgtcgacaaccttaatgtaaaatggaaggtttctctggcacattatgtttacttcaaatgttatttgccacagatgtcgaccaggactcgaggacaggacgcagcaggaacttctgggggaagggatgttaccccaaacccacctccggttcctcccacattagccgaggcgattgccgccttggtgaatgccaccgcagacaatacccgcttccttagggaaaaggcgggtcaacagcaattccagcagcaggcaggaaggggttatcagcaaggcccccgtgaaaccacctatctggacttctctgaaacccatccacccctattcatcaaagctgaagatccattagaagctgatgagtggatacgggttattgaacaaaagtttggtcttctccgttgttcagaaacgcagaagccgttgttcgcagcacagcaactacgtggtcctgccagtacttggtggggaaattttgtggctactcaacctgtcaaccatcaagtcacctgggaagagtttaaagcagccttccgtgagcactacatacccgaaggagtgctgcatatgaaacaagaggaatttatgaagttaaaacaaggaggagataccgtcaatcagtatctcaacaagtttaatcacctgtcgcagtatgccatcgaccaggtgaatactgatttaaagaagaagaactgttttatgcggggtttaaatgatcggctacagaggaaaatggctgcctgtattgacttgacgtatggaaaggctgtcagcacagccttatctgttgaagcaaaatacgcaagttctgggaaaaacaagggattcggtggtgagaggcctaatcagggccaggcgaagaagcaacagtttgtgatccggccttcaagccaaaatcacactttttctcgtccacccttattccctttcaaacagccaatcattattcgccccaacaatacccccactactccaaatcagccgggtgccccaggcactcgattccctgccttgcctagttcttcaactgggtgttttaattgcggcaagtcgggacatttcatcaaagactgcccatatcctaagcaaaatcaatcaaatgctccgcaaggatctgggagatcagctcaacccaaaggaaatattgtggggaaaaatacaaagaagacggggcgtgtatattacacccaagtggccactacaccggaaggagagccggtgatgatgggtacgtttcccgtggccagtcaccctgcaattattctttttgattctggtgcttcgcatacattcattagcaagaaatttgtggagcaacatcatattgcatgccatgaatcaaaagagggatttaaaattcattcacctgggggacacatttttactagagaagtggcctatgaagtgccagtaacaatggccggacgaaactttcctgctaacatgattgttctgaaaggccaggatatagatgtaattttgggtatgaattggttaacccaacacaaggcaattctcaacactgaactcagaaccgtcaggttgagctataatcaagaagagattcttttgtctctccccgtaaccaatccagccaaagcttctggtagaatatatgaagccattgtaccggagatcaagaacattccggtagtatgtgagtttccagatgtatttccggaagatttgcctggactgccccctgaaagagatgtagaatgtgtaattgagctaaagcccggtacgactcccatctcccgaagatcgtaccgtatgccccctaatgagttggcggaattgaagattcaattacaagatctactgaataagggattcatccggccaagctcgtccccatggggttgtcccgccatttttgttaagaagaaggataaaaccttgcgaatgtgcgtggattatcgacccctgaatgaggtcaccatcaagaataagtaccctcttccaaggatcgacatcttatttgatcaactgactggggcgagggtattttccaaaattgatctcaggtcgggctatcatcaaatccgtattcggcccaaggatataccgaagaccgcgtttactacgcggtacggattgtttgaatacctgataatgtctttcgggctcaccaatgctcctgcccacttcacctatttgatgaactcagtgttcatgcccgagttggacaagttcatggtagtcttcattgacgatatcttgatatattctaaaaatgaagaggaccatgctcagcatctacggattgtattgacgcacctgagggaacatcagctatatgccaagttcagcaagtgcgcgttctggctggaggaaattcaatttttggggcacgtgttatcggctaaaggaattgcagtagatcctagcaaggtcaaagatattctggagtggaaacccccaaccactgttcaccaagtccggagttttcttggactagctggatattatcgcagattcataccagatttttctaagcttgtgaagccaatcacaagtttattgaagaatgacattaagttcaattggtcttctaagtgtaatgaagcctttgagcaattgaaggcattattaaccactgctccggtattggctcaaccggacatcactaagccttttgatgtatattgtgatgcatctggcagtgggctcggctgtgtactaatgcaagagggccgaataattgcgtatgcttcaaggcagttgcgccgacatgaggagcattacccaactcatgatctggagctagctgctgtggttcatgccctaaaaatttggcgtcactatctgctgggaaatatctgtcacatatatacagatcataaaagtttgaagtacattttcacccagtcagaattaaatatgaggcaaagacgatggcttgagcttattaaagactatgaactggagatccattatcacccaggcaaagccaatgtggtggcagatgcactgagccgtaagacttcctgccactgtcttatggtgaagacctccgagaacactttgtgtcaagagatggagaagctaaacctggggataatccaacaagggactctaaatcagctaaagcttgagtcaatcattttgcaaaggataattgatgctcaaaaggataatctgggtatgaagcacatacgagaaaagataagggctggagtagccaaatgtttcaaggaagacgatcaaggtgtgatatggtttaaaaaccgcatagtagtgccaaagaacgaagaactccgccagcaaattcttgatgaagcacatcttagtcgttattctattcatcccggaagcactaagatgtatcaagacttaaagcaacattactggtggacaaagatgaagattgaaattgcacgctatgtggctaagtgtgacacttgtagacgtgtcaaggccatacacatgaaaactgctggtccattacaatctttgccaatcccaacaaggaaatgggaagacataagtatggactttattgtgggactgcccaggacggccaaagggtatgattctatttgggttatcgttgatcgactcacaaagattgcccacttcttacccgtcagggccaaatatacagtagccacttatgcagcattatatatcggccgtattatcagtttgcatggtattccaaagaccatagtgtcggatcgtggacctcagttcgtatccaagttttgggaagaacttcataaatccttgggtaccaaattgctccacagttcggcctatcatcctcaaacaagtggacagactgagagggtaaatcagatactcgaggatatgctgcgggcatgtgttctggacttctcacagaaatgggatgaatgtttgcccctagcggagttttcatacaataacagttatcaagaaagtatcaagatggcaccttttgaagctttatatgggcgacggtgtcgaactccgctaaattggtctgaacctggagaaagatacttctttaggcctgatatggtgaaagaggtcgaagaaaaggttcataaaattattcataatatgaagaaagctcagactcgacaaaagagttatgcggaccgacgacgacaacccttatgctttctggtaggcgattatgtctacctgaaagtttcaccaatgaagggtgtatcgcgtttcggggttaaagggaagcttgcacccaggtacattggtccattcctggtgattgagcaatgtggaccagtggcgtaccgacttcaactacccgaaacattgtctgctgtgcataatgtgttccacgtgtcacaattgaagaagtgtcttcgggttcccgatcgaaccattgaagtaacagatgttgtccttgaaccagacttgacatactctaagcaccctatacgagtcttggatcaaaaggacagggttacccggagaaaaactctcaagttttataagatacagtggaaccagcattctgaagatgaagctacttgggaaactcaagacttcttgaataagaatttcccaggctttctagcctcatgtaatttgtaa

SEQ ID NO: 4888 - DNA, 1539 bp, Zea mays
  Clone ID: TF_ZM3655.C3.o1.fg
atgtcgggagatcacgccaagaaggagatggagaccggcgaaaagcccactacaagccaagggagcacttcatcggaagagtcccgcaccaaaaggagggagaagaagaagagctcttccatcaaagggaaggagaagaaatcttcttctcaccacaaagagaagaaggaaaaatcttattcccacaagccgcatcggaaaggcgacaagcacaagagaatgaggaaggtggtctactacgagaccgacacttcatcaacttctacctccgactccgatgcgccctccgtcacttctaagcgccaagagcgcaagaagtatattcaattgattcgtggtaatcctagatacactaaaatgacccccgaggaagttatcgggcattttgtaagttttgagtgcatgatagaaggctcgaggaaaatcaacgagcttggcgagcgatccgaagctcaacccgttgcattcaaggcgacggaagaaaagaaggaggagtctacaccaagtagacaaccaatagatgcctccaagctcgacaatgaggaaatggcgctcgtcatcaagagcttccgccaaatcctaaagcaaaggagggggaaggactacaagtcccgctccaagaaggtttgctacaagtgtggtaagcccggtcattttattgctaaatgtcctatatctagtgacagtgaccgaggcgacgacaagaaggggagaagaaaggagaagaaaaggtactacaagaagaagggcggcgatgcccatgtttgtcgggaatgggattccgacgaaagctcaagcgactcctccgacgacgaggacgccgccaacatcgccgtcaccaagggactcctcttccccaacgtcggccacaagtgcctcatggcaaaggacggcaaaaagaagaaggaaaaatctcaaacccaagagaccttaaaaggattcttgagacgggcccaaaatgagttcgccttaaggatcaagaaaataagaagcgacaacgggacggagttcaagaactctcaaattgaaagcttccttgaggaggagggcatcaagcatgagttctcctctccctacactccacaacaaaatggtgtagttgagaggaagaatcgaactctattggacatggcaagaaccatgcttgatgagtacaagacaccggaccggttttgggccgaagcggtcaacaccgcctgctacgccatcaaccggttatatctgcaccgaatcctcaagaagacatcatatgaactcctaaccgggaatccgaagagcctccaaatgcacaagatcaaccgtcctcctccatgcaagcatctccaccaactcaaaatgaggatgaggctcaagttgatgaagggcaaaatcaagaagatgagccacctcaagatgatgacaatgatcaagggggagatgcaaatgatcaagagaaggaggatgaggaagaaccaagaccgccacacccaagagtccaccaagcaatccaacgagatcaccccgtcgacaccatcctcggcgacattcataagggggtaa

SEQ ID NO: 4889 - DNA, 4560 bp, Zea mays
  Clone ID: TF_ZM3971.C1.o1.fg
atggcgctcgtcatcaagagctttcgccaaatcctcaagcaaaggagagggaaagactacaagtcccgctccaagaaggtttgctacaaatgtggtaagcccggtcattttattgctaaatgtcctatatcaagtgacagtgaccgaggcgacgacaagaaggggagaagaaaggagaagaagaggtactacaagaagaagggcggcgatgcccatgtttgtcgggagtgggactccgacgaaagctctagcgactcctccgacgacgaggacgccgccaacatcgccgtcaccaagggacttctcttccccaacatcggccacaagtgcctcatggcaaaggacggcaaaaggaagaaggtaaaatcaagatcctccactaaatatgaaacctctagtgatgaaaatgctagtgatgaggaggataacttgcgtattctttttgccaatcttaacatggaacaaaaggaaaaattaaatgaattaattagtgctattcatgaaaaggatgaccttttggattcccaagaggactgtctaattaaagaaaacaagaaacatgttaaggttaaaaatgcttatgctctagaaattgagaaatgtgaaaaattatctagtgagctaagcacttgccgtgagatgattgacaaccttaggaatgaaaatgctaatttaaatactaaggttgattcacatgtttgcaatgtttcaattcctaatcctaaagataataatgatgatttgctttctaggattgaagaattaaacatttctcttgctagccttagagtagaaaatgaaaatttaattgctaaggctaaagaactagatgtttgcaatgctaccatttccaatcttagagataaaaatgatattcttcatgctaagattgttgaacttaattcttgcaaaccctctacatctattgttgagcatgtatctatttgtactagatgtagagatgttgatgttaatgctattcatgatcatatggctttaattaaacaacaaaatgatcatatagcaaaactagatgctaaaattgccgagcataacttagaaaatgaaaaatttaaatttgctagaagtatgctctatagtgggagacgccctggcatcaaggatggcattggcttccaaaggggagacaatgtcaaacttagtgcccctcctaaaagattgtctaactttgttaagggcaaggctcccatgcctcaggataacgagggttacattttgtaccctgccggttatcctgaaagcaaaattaggagaactcattctaggaagtctcactctggccctaatcatgcttttatgtataagggtgagacatctagctctaggcaaccaacccgtgccaagttgcctagaaagaaaactcctagtgcatcaaatgatcatgacatttcattcaatacttttgatgcatcttatgtgttgactaacaaatccggcaaggtttatgcatccgggggctcaagttggatactcgacagcgggtgcacaaaccacatgacaggggagaagaagatgttctcctcctacgagaaaaaccaagatccccaacgagctatcacattcggggatggaaatcaaggtgtcactgtctttagaagaagtgatgattcaatagcatttaagggagtgttagagggtcagctatacttggtagattttgatagagctgaactcgacacttgcttaattgctaagactaacatgggttggctctggcaccgccgactagcccatgttgggatgaagaatcttcacaagcttctaaagggagaacacattttaggattaacaaatgttcattttgagaaagacaggatttgcagcgcatgccaagcagggaagcaagttggctctcatcatccgcataagaacataatgactaccgacaggccactggagctcctacacatggatctattcggcccgatcgcttacataagcatcggcgggagtaagtactgtctagttattgtggatgattattctcgctttacttgggtattctttttacaggaaaaatctcaaacccaagagaccttaaagggattcttgagacgggctcaaaatgagtttggcctaaggatcaagaaaataagaagcgacaacgggacggagttcaagaactctcaaatagaaagcttccttgaggaggagggcatcaagcatgagttctcttctccctacacgccacaacaaaatggtgtagtggagaggaagaatcgaactctattggacatggcaagaaccatgcttgatgagtacaagacttcggatcggttttgggccgaggcggtcaacaccgcctgctacaccatcaaccggttgtatcttcaccaaatcctcaagaagacatcgtatgaactcctaaccggtaaaaagcccaacatttcatattttagaatttttggtagcaaatgctttatccttgttaaaagaggtagaaaaactaaatttgctcctaaaactgtagaaggctttttacttggttatgactcaaacacaagggcatatagggtctttaacaagtccactggactagttgaagtctcatgtgacgttgtgtttgatgaaactaacggctctcaagtagagcaagttgatcttgatgagataggtgatgaagaggctccatgcatagcgctaaggaacatgtccattggggatgtgtgtcctaaggaatccaaagagtctccaagagcacaagatcaaacattttcctccatgcaagcatccccaccgactcaaaatgaggaagaggctcaagttgatgaagaagaagatcaatcaagtgagccacctcaagatgacggcatagatcaagggggagatgtaaatgatcaagacaaggaggatgaagagcaaagaccgccacatccaagagtccaccaagcaattcaacgagatcaccccgtcgacaccatcctcggcgacattcataagggggtaaccactagatctcgtattgcacatttttgtgaacattactcgtttgtttcctctattgagccacatagggtagaggaagcacttcaagattcggattggctggtggcgatgcaagaggagctcaacaacttcactaggaatgaggtatggcatttagttccacgtcctaaccaaaatgttgtaggaaccaaatgggtcttccgcaacaagcaagatgagcatggtgtggtgacaaggaacaaagctcgacttgtggccaagggatactcccaagtcgaaggtttggatttcggtgaaacctatgcacccgtagctagacttgagtcaattcgcatattattagcctatgctacttaccatggctttaagctttatcaaatggacgtgaaaagtgccttcctcaatggaccaatcaaggaagaggtctatgttgagcaacctctcggctttgaagacagtgagtatcctaaccatgtctataagctctctaaggcgctttatgggctcaagcaagccccaagagcatggtatgaatgccttagggatttcctcattgctaatggcttcaaagtcggtaaagccgatcctacactctttactaaaactcttgaaaatgacttgtttgtatgccaaatttatgttgatgatattatatttgggtctactaacgagtctacatgtgaagagtttagtaggatcatgacacaaaagttcgagatgtctatgatgggggagttgaagtattttctaggtttccaagtaaagcaactccaagagggcaccttcattagccaaacgaagtacactcaagacatcctaaccaagtttgggatgaaggatgccaaacccatcaagacacccatgggaactaatgggcatctcgacctcgacacgggaggtaagtccgtggatcaaaaggaataccggtcgatgattggttctttactttatttatgtgcatctcgaccggatattatgctttccgtatgcatgtgtgcaagattccaagccaaccctaaggaagctcaccttacggccgtaaaacgaatcttgagatatttggcttatactcctaagtttgggctttggtatcctaggggatccacatttgatttgattggttattcggatgccgattgggcggggtgtaaaatcaataggaagagcacatcggggacttgccagttcttgggaagatccttggtgtcttgggcttcaaagaagcaaaattcggtcgctctttccaccgccgaagccgagtacattgccgcaggccattgttgcgcgcaattgctttggatgaggcaaaccctgcgggactacggttacaaattaaccaaagtccctttgctatgtgacaatgagagtgcaatcaaaatggccgacaatcccgtcgagcatagccgcactaagcacatagccattcggtatcactttttgagagatcaccaacaaaagggagatatcgagatttcatacattaatactaaagatcaattagccgatatctttaccaagcctcttgatgaacaatcttttaccaaacttaggcatgagctcaatattcttgattcacgcaatttcttttgctag

SEQ ID NO: 4890 - DNA, 5772 bp, Zea mays
  Clone ID: TF_ZM3976.C13.o1.fg
atgtcgggagatcacgccaagaaggagatggagaccggcgaaaagcccactacaagccacgggagcacttcatcggaagagtcccgcaccaagaggaaggagaagaagaaggactcctccaaacggaaggagaaaaagtcttcctcttctcaccaccaagagaagaaggagaaatcttcttctcacaagccgcatcggaaaggcgacaagcacaagaggatgaggaaagtggtctactacgagaccgacacttcatcaacatcgacctccgactccgacgcgccctccgtcacttctaagcgccaagagcgcaagaagtatagtaagatccccctacactaccctcgcatttccaaacatacacctttactttccgtcccattaggcaaaccaccaacttttgatggtgaagattacgctaggtggagcgatttaatgcgatttcatctaatctcgctccacaaaagtatatgggatgttgttgagtttggtgcacaggtaccgtcggtaggggatgagaactatgatgaggatgaggtagcccaaatcgagcacttcaactctcaagcaacgacaatactcctcgcctctctaagtagagaggagtataacaaagtacaagggttgaagagcgctaaggagatttgggatgtgctcaaaaccgcgcacgaaggagatgagctcaccaagatcaccaagcgggaaacgatcgagggggagctcggtcggttccggcttcgcaaaggggaggagccacaacatatgtacaaccggctcaagactttggtgaaccaagtgcgcaacctcgggagcaagaagtgggatgaccacgaagtggtaaatgttattttaagatctctcatttttcttaatcccactcaagttcaattgattcgtggtaatcctagatatactaaaatgacccccgaggaagttatcgggcattttgtaagttttgagtgcatgatagaaggatcgaggaaaatcaacgagcttggcgacccatccgaagcccaacccgttgcattcaaggcaacggaggagaaaaaggaggagtctacaccaagtagacaaccaatagacgcctccaagctcgacaatgaggaaatggcgctcgtcatcaagagcttccgccaaatcctcaagcaaaggagggggaaggactacaagtcccgctccaagaaggtttgctacaagtgtggtaagcccggtcattttattgctaaatgtcctatatctagtgacagtgaccgaggcgacgacaagaaggggagaagaaaggagaggaaaaggtactataagaagaagggcggcgatgcccatgtttgtcgggaatgggattccgacgaaagctcaagcgactcctccgacgacgaggacgccgccaacatcgccgtcaccaagggactcctcttccccaacgtcggccacaagtgcctcatggcaaaggacggcaaacggaaaaaggttaaatctaactcctccactaaatatgaatcttctagtgatgataatgctagtgatgaggaggataatttgcgttccctttttgccaaccttaacatagctcaaaaagaaaaattaaatgaattagttagtgctattcatgaaaaggatgaccttttggactcccaagaggattgtctaattaaagaaaacaagaaacatgttaaggttaaaaaggcttatgctctagaggtagaaaaatgtgaaaaattatctagtgagctaagcacttgccgtgagatgattgacaaccttagaaatgaaaatgctagtttaaatgctaaggttgattctcatgtttgtaatgtttcaattcccaatcctagagataataatgatgatttgcttgctaggattgaagaattaaacatttcccttgctagccttagattagagaatgaaagtttgattgctaaggctaaagattttgatgtttgcaaagttaccattgccaatcttagagataaaaatgatattcttcatgctaagattgttgaacttaattcttgcaaaccatctacatctattgttgagcatgtatctatttgtactagatgtagaaatgttgatattgatgctattcatgatcatatggctttaattaaacaacaaaatgatcatatagcaaaactagatgctaaaattgccgagcataacttagaaaatgaaaaatttaaatttgctagaagtatgctctataatgggagacgccctggcatcaaggatggcattggcttccaaaggggagacaatgtcaaacttaatgcccctcctaaaaatttgtctaactttgttaagggcaaggctcccatgcctcaggataacgagggttacattttgtaccctgccggttatcccgagagcaaaattaggaaaattcattctaggaagtctcactctggccctaatcatgcttttatgtataagggtgagacatctagctctaggcaaccaacccgtgccaagttgcctagaaagaaaatttctaatgcatcaaatgaacatagcatttcatttaagacttttgatgcatcatatgttttgactaacaaatctggcaaggtcgttgccaagtttgttgggggcaaacacaagggttccaagacttgtgtttgggtacccaaagttcttgtatctaatgccaaaggacccaaaacagtttgggtttatgcatccgggggctcaagttggatactcgacagcgggtgcacaaaccacatgaccggggagaaaaggatgttctcctcatatgagaaaaacaaagatccccaacgagctatcacattcggggatggaaatcaaggtgtcactgtctttagaagaagtgatgattcaatagcttttaaaggagtgttagagggtcagctatacttggtagattttgatagagctgaactcgacacttgcttaattgctaagactaacatgggttggctctggcaccgccgactagcccatgttgggatgaagaatcttcacaagcttctaaagggagaacacattttaggattaacaaatgttcattttgagaaagacaggatttgtagcgcatgccaggcagggaagcaagttggagtccatcatccacacaagaacatcatgacgaccgacaggccgcttgagctactccacatggatctattcggcccgattgcttacataagcatcggcgggagtaagtattgtcttgtaatagtggatgattattctcgcttcacttgggtattctttttacaggaaaaatctcaaacccaagagaccttaaagggattcttgagacgggctcaaaatgagttcgccttaaggatcaagaaaataagaagcgacaacgggacggagttcaagaactctcaaattgaaagcttccttgaggaggagggcatcaagcatgagttctcttctccctacacacctcaacaaaatggtgtagtggagaggaagaatcgaactctattggacatggcaagaaccatgcttgatgagtacaagacaccggaccggttttgggccgaagcggtcaacaccgcctgctacgccatcaaccggttatatcttcaccgaatcctcaagaagacatcatatgaactcctaaccggtaaaaagcccaacatttcatactttagagtttttggtagcaaatgctttattcttgttaaaagaggtagaaaatctaaatttgctcctaaaactgtagaaggctttttacttggttatgactcaaacacaagggcatatagggtctttaacaagtccactggactagttgaagtctcatgtgacgttgtgtttgatgaaactaacggctctcaagtagagcaagttgatcttgatgagataggtgaagaacaggctccatgcatagcgctaaggaacatgtccattggggatgtgtgtcctagggaatccgaagagcctccaaatgcacaagatcaaccgtcctcctccatgcaagcatctccaccaactcaaaatgaggatgaagctcaagttgatgaagggcaaaatcaagaagatgagccacctcaagatgatggcaataatccagggggagatgcaattgatcaagaaaaggaggatgaggaagaaccaaggccgccacacccaagagtccaccaagcaatccaacgagatcaccccgttgacaccatcctcggcgacattcataagggggtaactactcgatctcgggttgctcatttttgtgaacattactcttttgtttcctctattgagccacacaggatagaggaagcacttcaagattcggattgggtggtggcaatgcaagaggagctcaacaatttcacgaggaacgaggtatggcatttagttccacgtcctaaccaaaatgttgtaggaaccaaatgggtcttccgcaacaagcaagatgagcatggtgtggtgacaaggaacaaagctcgactcgtggccaaagggtattcacaagtcgaaggtttggatttcggtgaaacctatgcacccgtagctaggcttgagtcaattcgcatattattggcctatgctacttaccatggctttaagctctatcaaatggatgtgaaaagtgccttcctcaacggaccaatcaaggaagaggtctatgttgagcaacctcccggctttgaagacagtgagtaccctaaccatgtctataggctctctaaggcgctttatgggctcaagcaagccccaagagcatggtatgaatgcctaagagatttccttattgctaatggcttcaaagtcggcaaggccgatcctacactctttactaaaactcttgaaaaagacttgtttgtatgccaaatttatgttgatgacattatatttgggtctactaacgagtctacatgtgaagagtttagtaggatcatgacacagaaattcgagatgtcgatgatgggggagttgaagtattttctaggattccaagtcaagcaactccaagagggcaccttcattagccaaacgaagtacactcaagacattctaaccaagtttggaatgaaggatgccaagcccatcaagactcccatgggaaccaatgggcatctcgacctcgacacgggaggtaagtccgtggatcaaaaggtataccggtcgatgattggttcattactttatttatgtgcatctcgaccggacattatgctttccgtttgcatgtgtgcaagattccaatccgaccctaaggaatcccaccttacggccgtaaaacgaatcttgagatacttggcttatacacctaagtttgggctttggtaccctcggggatctacatttgatttgattggttattcggatgccgattgggcggggtgtaagattaataggaagagcacatcagggacttgccaattcttgggaagatccttggtgtcatgggcttcaaagaagcaaaattcggtcgctctttctaccgccgaagccgagtatattgccgcaggccattgttgcgcgcaattactttggatgaggcagaccctgcgggactatggttacaaattaaccaaagtccctttgctatgtgataatgagagtgcaatcaaaatggccgacaatcccgtcgagcatagccgcactaagcacatagccattcggtatcattttcttagggatcaccaacaaaagggagatatcgagatttcttacattaacactaaagatcaattagccgatatctttaccaagcctcttgatgaacaatcttttaccagacttaggcatgagctcaatattcttgattctagaaatttcttttgctag

SEQ ID NO: 4891 - DNA, 4329 bp, Zea mays
  Clone ID: TF_ZM4318.C3.o1.fg
atggtgaaccaacgtcaaggacctaacaaccggaaccagcgtggacaacaagcaccaccaccaccgccaccaccaaatcccaatatggagcagttcatcgccgcccaaatgcagattctgcaaggactcactgctgtggttcaacaattacaacaaaaccaacagaatcagcaaccccagcagcagcagtatgcgcccccggccagagataagcaccgggacttcatgagtcatcacccgccgacattctctcatgcggttgagcccttggatgccgatgactggctcaaagtcattgggaagaagctggacataactcagtgcaacgaccgggagaaggtcttgtacgcctcgggaagactcgagggagctgcgtccgattggtgggatgccttcacagcggcacatcccaacgctgataccataacctggcaggagttccaagagaacttccgtgctcatcacatcccctctggaatcatgaagctgaagaagaaggagttcctttcccttactcaggggaatatgtctgtcagcgagtatcgtgatcgcttcactcagctttcacgttatgctcctgaagaagtggacactgatgagaagcgccaagagcgtttcctggaagggttgattggacctctgaactaccaacttcagagtcacacattccccaacttccagacactgctgaacaaggcaattggccttgagagcaaaaggaaagaattatctgaccataaaaggaagttccaaggtcagtcaagcaggaacactcgcccgaataatgctcaaggttcgcagttctgctctggaaatcagggtggaaacaattatcaagtgcaacgctctggacagcaaggccagagaaataatcagagtcagaatcaacaaaggagtaacccccagaccaaccagaggtctggtggaaattctcagaaccgtcaaggtggcaccaacaacactcaggccagaaacaacgcacctgtccaacccaacggctgtttcaagtgcggtgaactaggccactatgccaacaactgtccaaggcgcaaccagcaaacaccccagaaaggcaataatcagaggaatgaccagaacacccccgctcgtggatctgctcagaacaagactccacagaaccagagcagaggaagggtcaatcatgtcactgcggaatcagtgcctgaggatgccgacatagtgtatggaatagattttacagtcgacccagtggtcctaggatccaacgggattgatgtgattcttggatgcaattggttgaaaagttgtgatggagtgatacagtgtgccaatggaactattatgttgacaagtcctcaaggtgaaagaatccaagttaacatagacaagtcaacagatgaaaaagggaagacagtgatcaatcacttggaagaaaagcccttggaaaatatcaaagtagtgtgcgaatacccagacgtatttccggaggaattgccaggtatgccacctgaccgtgatatagagttttctattgaattagtacccggaatcgcacctatctcaaaaagaccatatagaatggatgtcaaggatttagtagaactgaagaaacaaatagaagaattactagaaaaaggtttcattcgcccaagttcatccccttggggagccccagtgctatttgtgaacaagaaggatggttcaaggagaatgtgtgttgattatagaagtttgaatgaagtaaccatcaaaaataaatacccgttacctcggattgaagatttattcgatcaaatgaagggagctaagatattctcaaaggtagatctaagatcgggatatcatcagttaaagattcgagcagaagacgtacccaagacagccttcacgacgagatatggattatatgagtttttggtcatgtcgtttggactgactaatgcaccagcatactttatgaacttgatgaataaagtattcatggaatatctggatcagtttgtggtcgtatttattgacgacatactgatatattctccgaatgaagaagcacatgaagatcatctaaggctagttctacaaaagcttcgtgacaaccaactgtacgcaaaattctcgaagtgtgatttttggttgaaagaagttgctttcttagggcatattgttaccaatggtggaattaaagtggacccaggaaagataagagagatactagattggaagcaaccaaaggatgcgtccaagatcagaagttttcttggattggcaggatactatagaagatttattgaaggtttctccaagttagtgaagcctcttacctcactactggagaaaggcaaagagttcaaatgggatgaagcttgccagaattgttttgaagaactcaagaagaggttaaccactgcaccaatactggtaatgccagacatccacaagggatttgatgtgtattgcgatgcatcacaccttggacttggatgtgtgctaatgcaagaaggaaaagtgattgcttatgcttcaagacagttgaggaaacatgagaagaattatcctacgcatgatttggaactagctgccgtagtacacgctttgaagatttggaggcactatatgattggaaacaagtgcaaaatcttcacggatcacaaaagcttgaaatatatattcactcagaaggaactcaacctcagacagagaagatggcttgagttgattaaagattatgatttggaaatacaatatcaccccggaaaagcaaatgtagtagctgatgctttgagccgtaagggtcaagtgaacaacatcactactcatttgatgtcacaagaattgtgctgggaaatggaacgactcaaccttggatttctcaataatgtagaagcaacagtgatggaagtcgaatctactttggaagaagagattcgtaaaggacaagaatctgatgagaagattaaggaaattaaaactttgattagtatgggtaaagccccagatttcacggaagatgaacaaggcacaatatggtttaagaagagaatatgtgtaccagaaatcgagcacttgcgccaacttattttgagagaagctcatgattcagcttactctattcaccctggaagtaccaagatgtaccaggaccttaaagaaaagtactggtggtacggattgaaaagagatgttgctactcatgttgcattatgtgacgtgtgtcagcgagttaaagccgaacaccaaagaccagcaggattgctacaacctctcaaggtaccggaatggaagtgggaagaaatcagtatggatttcatagttggactaccccgtactcgagatggctatgattcaatatgggtcatagtagacaggttaactaaggtagcacactttatacctgtgaagacaacacactcgggagcccagttagcagaattatacatgtcgaggattgtttgtctgcatggagtaccgaagaagattgtatcggatcgaggaacccagtttacctcgctcttttggaaaagacttcatgagtccatggataccaagctaaactttagttcagcttatcatcctcaaacggatgggcaaacggaaagaacaaaccaagtattggaagatatgctaagagcttgcgctctaaagcatggtagaagctgggataaaagtttgccttatgcagaattttcgtataacaacagttatcaagcaagtctcaaaatggcaccatttgaagcactatatggacgaaagtgtagaacaccgctttattggaatcagactggagaaagtcaagtatttggtccagaaattctccaggaggcagaaaagcaagtgcagattatcagagaaaatttgaagacagcacagtcaagacagaagagctatgctgataatagaagaagagaattgatgtttgaagtaggagacttcgtataccttaaagtttcaccgatgagaggaatgaaaaggtttaaggttaaaggaaaactatcacctcgctatattggcccgttcaagattttggaaagaaaaggtgaagtagcctaccagttagagctacccgatagattatcagatgtgcatgacgtatttcacgtgtcgcaactcaagaagtgcttaagggtaccaaaagaacagctacccatggaagaactgattgtgaatgaggatttgacttattcggagtatccagtcagaattttggaaacatctcgcagaattacacggagtaaagtcattaacatgtgcaaagttcagtggagtcatcattcggaagatgaggccacttgggaaagagaagatgaactcatagcagaattcccccagttattctcggaaagctcttaa

SEQ ID NO: 4892 - DNA, 4998 bp, Zea mays
  Clone ID: TF_ZM4330.C4.o1.fg
atgtcgggagatcacgccaagaaggagatggagactggcgaaaagcccactacaagcaacgggagcacttcatcggaagagtcccgcaccaaacggagggagaagaagaagaactcctccaacaaagggaaggagaagaaatcttcttctcaccacaaagagaagaaggaaaaatcttcttcccacaagccgcatcggagtggggacaaacaaaagaggatgaggaaggtggtctactacgagaccgacacttcatcaacatcgacctccggctccgacacgccctccgtaacttctaaacgccaagagcgtaagaagtttagtaagatccccctacactaccctcgcatttctaaacatgcatctttactttccgtcccattaggcaaaccaccaactttcgacggtgaagattatgctaggtggagtgatttaatgcgatttcatctaacctcactccacaaaagtatatgggatgttgttgagtttggtgcacaggtaccatcggtaggggataaggactatgatgaggatgaggtggcccaaatcgagcacttcaactctcaagcaacaacgatactcctcgcctctttaagtagagaggagtataacaaagtgcaagggttgaagagcgccaaggaggtttgggatgtgctcaaaaccgcgcacgagggagatgagctcaccaagatcaccaagcgggaaacgatcgagggggagctcggtcggttccggcttcgcaaaggggaggagccacaacacatgtacaaccggctcaagactttggagaaccaagtgcgcaacctcgggagcaagaagtgggacgaccacgaagtggtaaatgttatcttaagatctctcatttttcttaatcccactcaagttcaattgattcgtggtaatcctagatatactaaaatgacccccgaggaagttatcgggcattttgtaagttttgagtgcatgatagaaggctcgaggaaaatcaacgagcttggcgacccatccgaagcccaacccgttgcattcaaggcaacggaggagaagaaggaggtgtctacaccaagtagacaaccaatagacgcctccaagctcgacaatgaggaaatggcgctcgtcatcaagagcttccgccaaatcctcaagcaaaggagggggaaagactacaagtcccgctccaagaaggtttgctacaaatgtggtaagcccggtcattttattgctaaatgtcccatatctagcgacagtgaccgaggcgacgacaagaaggggagaagaaaggagaagaaaaggtactacaagaagaagggcggcgatgcccatgtttgtcgggaatgggattccgacgaaagctcaagcgactcctccgacaacgaggacgccgccaacatcgccgtcaccaagggacttctcttccccaacgtcggccacaagtgcctcatggcaaaggacggcaaacggaagaaggttagatctaactcctccactaaatatgagtcttctagtgatgacaatgctagtgatgaggaggatagtttgcgttccctttttgccaaccttaacatagctcaaaaggagaaattaaatgaattagttagtgctattcatgaaaaggatgaccttttggattcccaagaggacctcctcattaaggaaaataagaagcatgttaaggttaaaaagtcttatgctcttgaaattgagaaatgtgaaaagttatctagtgagctaagcacttgccgtgagatgattgacaaccttaagaatgaaaatgctagtttaaatgctaaggttgattctcatgtttgtaatgtttcaattcccaatcctagagataataatgatgatttgcttgctaggattgaagaattaaacatttctcttgctagccttaaggtagaaaatgaaagtttaattgctaaggctaaagattttgatgtttgcaaagttacaatttccgatcttagagataaaaatgatattcttcatgctaagattgttaaacttaattcttgcaaactgtctacatctattgttgaacatgtcactatttgtactagatgtagagatattgatatcaatgctatacatgatcacatgactctaattaaacaacaaaatgatcatatagcaaaactagatgctaaaattgccgagcacaacttagaaaatgagaaatttaaatttgctcgtagcatgctttataatgggagacaccctggcattaaggatggcattggcttccaaaggggagacaatgtcaaaattagtgcccctcctaagagattgtccaactttgttaagggcaaggctcccatgcctcaggataacgagggttacattttataccctgccggttatcccgagagcaaaattaggaaaattcattctaggaagtctcactctggccctaatcatgcttttatgtataagggtgagacatctagctctaggcaaccaacccatgctaaattgcctagaaagaaaactcctaatgcatcaaatgatcatgctatttcatttaaaacttttgatgcatcctatgttttgactaacaaatccggcaaggtcgttgccaagtttgttgggggcaaacacaaggggtcaaagacttgtgtttgggtacccaaagttcttgtgtctaatgccaaaggacccaaaacagtttgggtttatgcatccgggggctcaagttggatactcgacagcggatgcacaaaccacatgaccggggagaaaaggatgttctcctcatatgagaaaaatcaagatccccaacgagctatcacattcggggatggaaatcaaggtgtcactgtctttagaagaagtgatgattcaatagcatttaagggagtgttagagggtcagctatacttggtagattttgatagagctgaactcgacacttgcttaattgctaagactaacttgggctggctctggcaccgccgactagcccatgttgggatgaagaatcttcacaagcttctaaagggagaacacattataggattaacaaatgttcattttgagaaagacagggaaaaatctcaaacccaagagaccttaaagggattcttgagacgggctcaaaatgagttcggcttaaggatcaagaaaataagaagcgacaacgggacggagttcaagaactctcaaattgaaggctttcttgaggaggagggcatcaagcatgagttctcttctccctacacacctcaacaaaatggtgttgtggagaggaagaatagaactcttttagacatggcaaggaccatgcttgatgaatataagacttcggatcggttttgggccgaggcagtcaacaccgcctgctacgccatcaaccgattatatctacaccgaatcctcaagaagacatcatatgaactcctaatcggtaaaaagcccaacatctcatattttagagtctttggtagcaaatgctttattcttgttaaaagaggtagaaaatctaaatttgctcctaagactgtagaaggctttttacttggttatgactcaaacacaagggcatatagggtctttaacaagtccactggactagttgaagtctcatgtgacgttgtgtttgatgaaactaacggctctcaagtagagcaagttgatcttgatgagataggtgatgaagaggctccatgcatagcgctaaggaacatgtccattggggatgtgtgtcctaaggaatccgaagagtctccaaatacacaagatcaaccatcctcctccacgctagcaactccaccaactcaaaatgagaatgaagctcaagttgatgaagtagaagatcaagcaaatgagccacctcaagatgacggcaatgatcaagggggagatgcaaatgatcaagacaaggaggatgaagagcaaaggccgccacatccaagagtccaccaagcaatacaacgagatcaccccgtcgacaccatcctcggcgacattcataagggggtaactactcgatctcgtgttgcccatttttgtgaacattactcgtttgtttcctctattgagccacacagggtagaggaagcactccaagattcggattgggtggtggcgatgcaagaggagctcaacaacttcactaggaatgaggtatggcatttagttccacgtccgaaccaaaatgttgtaggaaccaaatgggtcttccgcaacaagcaagatgagcatggtgtggtgacaaggaacaaagctcgacttgtggccaagggatactcccaagtcgaaggtttggatttcggtgaaacctatgcacccgtagctaggcttgagtcaattcgcatattattggcctatgctacttaccatggctttaagctttatcaaatggacgtgaaaagtgccttcctcaatggaccaatcaaggaagaggtctatgttgagcaacctcccggctttgaagacagtgagtatcctaaccatatctataagctctctaaggcgctttatgggctcaagcaagccccaagagcatggtatgaatgccttagagatttccttattgctaatggcttcaaagttggaaaggccgatcctacactctttactaaaactcttgaaaatgacttgtttgtatgccaaatttatgttgatgatattatatttgggtctactaacgagtctacatgtgaagagtttagtaggatcatgacacagaaattcgagatgtctatgatgggggagttgaagtatttcttaggattccaagtaaagcaactccaagagggcaccttcatcagccaaacaaagtacactcaaggcattctaaacaagtttgggatgaaggatgccaaacccatcaagacacccatgggaactaatgggcatctcgacctcgacacgggaggggaagaaactacttcgcgggctctaatgattccgtttttggcgattcatgccaaaaagggggagaaaggagcccaaagcaaaaggaccgcaccaccaccaatttcaaaaactcagtgttga

SEQ ID NO: 4893 - DNA, 2880 bp, Zea mays
  Clone ID: TF_ZM4333.C1.o1.fg
atgtcgggagatcacgccaagaaggagatggagactggcgaaaagcccactacaagcaacgggagcacttcatcggaagagtcccgcaccaaacggagggagaagaagaagaactcctccaacaaagggaaggagaagaaatcttcttctcaccacaaagagaagaaggaaaaatcttcttcccacaagccgcatcggagtggggacaaacaaaagaggatgaggaaggtggtctactacgagaccgacacttcatcaacatcgacctccggctccgacacgccctccgtaacttctaaacgccaagagcgtaagaagtttagtaagatccccctacactaccctcgcatttctaaacatgcatctttactttccgtcccattaggcaaaccaccaactttcgacggtgaagattatgctaggtggagtgatttaatgcgatttcatctaacctcactccacaaaagtatatgggatgttgttgagtttggtgcacaggtaccatcggtaggggataaggactatgatgaggatgaggtggcccaaatcgagcacttcaactctcaagcaacaacgatactcctcgcctctttaagtagagaggagtataacaaagtgcaagggttgaagagcgccaaggaggtttgggatgtgctcaaaaccgcgcacgagggagatgagctcaccaagatcaccaagcgggaaacgatcgagggggagctcggtcggttccggcttcgcaaaggggaggagccacaacacatgtacaaccggctcaagactttggagaaccaagtgcgcaacctcgggagcaagaagtgggacgaccacgaagtggtaaatgttatcttaagatctctcatttttcttaatcccactcaagttcaattgattcgtggtaatcctagatatactaaaatgacccccgaggaagttatcgggcattttgtaagttttgagtgcatgatagaaggctcgaggaaaatcaacgagcttggcgacccatccgaagcccaacccgttgcattcaaggcaacggaggagaagaaggaggtgtctacaccaagtagacaaccaatagacgcctccaagctcgacaatgaggaaatggcgctcgtcatcaagagcttccgccaaatcctcaagcaaaggagggggaaagactacaagtcccgctccaagaaggtttgctacaaatgtggtaagcccggtcattttattgctaaatgtcccatatctagcgacagtgaccgaggcgacgacaagaaggggagaagaaaggagaagaaaaggtactacaagaagaagggcggcgatgcccatgtttgtcgggaatgggattccgacgaaagctcaagcgactcctccgacaacgaggacgccgccaacatcgccgtcaccaagggacttctcttccccaacgtcggccacaagtgcctcatggcaaaggacggcaaacggaagaaggttagatctaactcctccactaaatatgagtcttctagtgatgacaatgctagtgatgaggaggatagtttgcgttccctttttgccaaccttaacatagctcaaaaggagaaattaaatgaattagttagtgctattcatgaaaaggatgaccttttggattcccaagaggacctcctcattaaggaaaataagaagcatgttaaggttaaaaagtcttatgctcttgaaattgagaaatgtgaaaagttatctagtgagctaagcacttgccgtgagatgattgacaaccttaagaatgaaaatgctagtttaaatgctaaggttgattctcatgtttgtaatgtttcaattcccaatcctagagataataatgatgatttgcttgctaggattgaagaattaaacatttctcttgctagccttaaggtagaaaatgaaagtttaattgctaaggctaaagattttgatgtttgcaaagttacaatttccgatcttagagataaaaatgatattcttcatgctaagattgttaaacttaattcttgcaaactgtctacatctattgttgaacatgtcactatttgtactagatgtagagatattgatatcaatgctatacatgatcacatgactctaattaaacaacaaaatgatcatatagcaaaactagatgctaaaattgccgagcacaacttagaaaatgagaaatttaaatttgctcgtagcatgctttataatgggagacaccctggcattaaggatggcattggcttccaaaggggagacaatgtcaaaattagtgcccctcctaagagattgtccaactttgttaagggcaaggctcccatgcctcaggataacgagggttacattttataccctgccggttatcccgagagcaaaattaggaaaattcattctaggaagtctcactctggccctaatcatgcttttatgtataagggtgagacatctagctctaggcaaccaacccatgctaaattgcctagaaagaaaactcctaatgcatcaaatgatcatgctatttcatttaaaacttttgatgcatcctatgttttgactaacaaatccggcaaggtcgttgccaagtttgttgggggcaaacacaaggggtcaaagacttgtgtttgggtacccaaagttcttgtgtctaatgccaaaggacccaaaacagtttgggtttatgcatccgggggctcaagttggatactcgacagcggatgcacaaaccacatgaccggggagaaaaggatgttctcctcatatgagaaaaatcaagatccccaacgagctatcacattcggggatggaaatcaaggtgtcactgtctttagaagaagtgatgattcaatagcatttaagggagtgttagagggtcagctatacttg

SEQ ID NO: 4894 - DNA, 759 bp, Zea mays
  Clone ID: TF_ZM4336.C2.o2.fg
atgtcgggagatcacgccaagaaggatatggtgaccggcgagaagcccgccacaagccacgggaaggctccatcaggagagtcccacaacaagaagaaggaggaattacctcctcacaagtcgcatcggagtggcgacaagaaaaagaagatgaagaaggtggtctactacgagaccgattcttcgtcgccatccacctccggctccgacgcaccgtccgtcacttctaagcgccatgcgtgcaagaagtttagctccaagaaaatcatcgagcaagacacctcctccacacgcgaggcacaacccgtcgcattcaaagcgttggaggagaagaaagaagagtctacatcaagtaggcttcccattgacgcctccaagctcgacaacgaggaaatgacgctcatcatcaagatctttcgccaaatcctcaagcaaaggaaggggaaagattacaagccccgttccaagaaggtttgctacaagtgtggtaagcccggtcactttatagcaaaatgtcccatttctagtgacagtgacaggggcgacgacaagagggggaagaagaaggagaagaagaggtactacaagaagaagggtggtgatgcccatgtttgccgggagtgggactccgacgagagctccaccaactcctcctccgacgaggacaccgccaacatcgccatcaacaaaggcctcctcttctccaacgtcggccacaaatgcctcatggcaaaggacggcaagaagaagaaaaaatga

SEQ ID NO: 4895 - DNA, 3210 bp, Zea mays
  Clone ID: TF_ZM4353.C2.o6.fg
atgaaagcagcagcagtggaagtaatgacccccatcggagatcttgaagcccgtgtgagtcgacttcaaacagcgctgcaacacaggaccgatgcttgggtcgccgatggagatagaatcaatgaactgagaagggacatccgacatctgcaggatcagctcgctgatcgagacttagcacttgactgggtcgtacagtctcgtttgctaatgtgtgctaaggaagcaagggctcaggcccgaattaaagaacttagctcaacggttgataacctgcagatgccgaccaggactcgaggacaggacgcagccggaacttctgggggcagggatgttaccccaaacccacctccggttcctcccacgttagccgaggcgattgccgccttggtgaatgccaccgcagacaatacccgcttccttagggaaatggcgggtcagcagcaattccagcagcaggcaggaagaggttatccgcaaggtccccgggagaccacctatctggacttctctgaaacccgcccacctctattcgtcaaggcagaagatcccctagaagctgatgagtggattcgggttattgaacaaaagtttggtcttctccgttgctcagagacgcagaagtcgttgttcgcagcacaacaactccgtggtcctgccagtacctggtggggaaatttcgtggctattcaacctgtcaaccatcaagtcacctgggatgagtttaaagcagccttccgtgaacactacatccccgaaggagtgctgcatatgaaacaagaggaatttatgaagttacaacaaggtggagataccgtcaaccaatatctcaacaagtttaatcacctgtcgcagtatgccatcgaccaggtgaatactgatttaaagaagaagaactgttttatgcggggactgaatgatcggctacaaaggaaaatggccacatgcatagatctcacctatggaaaggctgtcagtacagccttatctgttgaagcaaaatacacaaattctgggaagaataagggattcggtggtgagaggcctagtcagggccaggcaaagaagcaacggtttgtgatccgaccttcaaaccaaaatcgcactttttctcgtccaccctcatttcccttcaaacaacctatcattatccgccccaacaataaccccactaccccaaatcagccgggtgcccgaggcactcgattccctgccttgcctagttcttcaactgggtgttttaattgcggcaagtcgggacattttatcaaagactgcccatatcctaggcaaaatcaatctaatgcttcgcaaggatctgggaaatcagctcagtctaaaggaaatgctatggggaaaaatacaaagaagacagggcgtgtatattacactcaagtggctactacaccggaaggagagccggtgatgatgggtacgtttcccgtggccagtcacccagcaattattctttttgattctggtgcttcacatacattcattagcaagaaatttgtggagaaacatcatattgcataccatgaatcaaaggagggatttaaaattcattcacctgggggacacatttatactagagaagtggcctatggagtgccagtaacaatggccgagcggaactttcctactaacatgattgttctgaagggccaggatatagatgtaattttgggtatgaattggttaacccaacacaaggcaattctcaacactgaactcagaaccgtcaggttgagctataaccaagaaaagattcttttgactctcctcgcaaccaatccagccaaaacttctggtagagtatatgaagccattgtaccggagatcaagaacattccggtagtatgtgagtttccagatgtatttccggaagatttgcctggactgccccctgaaagagatgtagaattcgtaattgagctaaagcccggtacggctcccatctcccgaaggtcgtaccgtatgccccctaatgagttggcggaattgaaaattcaatatcaagatctactgaataagggattcatccggccaagctcgtccccatggggttgccccgccatttttgttaagaagaaggatcaaaccctgcgaatgtgcgtggattatcgacccctgaatgaggtcactatcaagaataagtaccctcttccaaggatcgacatcttatttgatcaactgactggggcgagggtattttccaaaattgatctcaggtcgggctatcatcaaatctgtattcggcccgaggatataccgaagaccgcgtttactacgcggtatggattgtttgaatacctggtaatgtctttcgggctcacaaatgctcctgcccacttcacttatttgatgaactcggtgttcatgcccgagttggacaagttcgtggtggtcttcatcgacgatatcttgatatattctaaaaatgaagaggatcatgctcagcatctacggattgtattgacgcgcctgagggaacaccagctatatgccaagttcagcaagtgcgcgttctggctggaagaaattcaatttttggggcacgtgttatcggctaaaggaattgcggtagatcctagcaaggtcaaagatattctggagtggaaacccccaacaactgttcaccaagtccggagttttcttggactagctgggtattatcgcagattcataccagatttttctaagcttgtgaagccaatcacaagtttattgaagaatgacattaagtttaattggtcttctaagtgtaatgaagcctttgagcaattgaagacactattgaccactgctccggtattggctcaaccggacatcactaaaccttttgatgtatattgtgatgcatctggcagtgggctcagctgtgtactgatgcaagagggccgagtaattgcgtatgcttcaaggcaattgcgccgacatgaggagcattatccaactcatgatctggagctagctgctgtggttcatgccctgaagatatggcgtcactatctgctgggaaatatctgtcacatttatacagatcataaaagtttgaagtacatcttcacccagtcagaattaaatatgagacaaagacgatggcttgagctcattaaagactatgaactggagatccattatcacccaggcaaagccaatgtggtggcagatgcactgagtcgtaagacttcctgccactgtcttatg

SEQ ID NO: 4896 - DNA, 5478 bp, Zea mays
  Clone ID: TF_ZM4401.C1.o4.fg
atgtcgggagatcacgccaagaaggagatggagaccggcgaaaagcccactacaagccacgggagcacttcatcggaagagtcccgcaccaagaggaaggagaagaagaaggactcctccaaacggaaggggaaaaagtcttcctcttctcaccacaaagagaagaaggagaaatcttcttcccacaagccgcatcggaaaggcgacaagcacaagaggatgaggaaagtggtctactacgagaccgacacttcatcaacatcgacctccgactccgatgtgccctccgtcacttctaagcgccaagagcgcaagaagtatagtaagatccccctacactaccctcgcatttccaaacatacacctttactttccgtcccattaggcaaaccaccaacttttgatggtgaagattacgctaggtggagcgatttaatgcgatttcatctaatctcgctccacaaaagtatatgggatgttgttgagtttggtgcacaggtaccgtcggtaggggatgagaactatgatgaggatgaggtggcccaaatcgagcacttcaactctcaagcaacgacaatactcctcgcctctctaagtagagaggagtataacaaagtacaagggttgaagagcgctaaggagatttgggatgtgctcaaaaccgcgcacgaaggagatgagctcaccaagatcaccaagcgggaaacgatcgagggggagctcggtcggttccggcttcgcaaaggggaggagccacaacacatgtacaaccggctcaagactttggtgaaccaagtgcgcaacctcgggagcaagaagtgggatgaccacgaagtggtaaatgttattttaagatctctcatttttcttaatcccactcaagttcaattgattcgtggtaatcctagatatactaaaatgacccccgaggaagttatcgggcattttgtaagttttgagtgcatgatagaaggctcgaggaaaatcaacgagcttggcgacccatccgaagcccaacccgttgcattcaaggcaacggaggagaagaaggaggagtctacaccaagtagacaaccaatagacgcctccaagctcgacaatgaggaaatggcgctcgtcatcaagagcttccgccaaatcctcaagcaaaggagggggaaggactacaagtcccgctccaagaaggtttgctacaagtgtggtaagcccggtcattttattgctaaatgtcctatatctagtgacagtgaccgaggcgacgacaagaaggggagaagaaaggagaagaaaaggtactacaagaagaagggcggcgatgcccatgtttgtcgggaatgggattccgacgaaagctcaagcgactcctccgacgacgaggacgccgccaacatcgccgtcaccaagggactcctcttccccaacgtcggccacaagtgcctcatggcaaaggacggcaaaaagaagaaggttaaatccaactcctccactaaatatgaatcttctagtgatgataatgctagtgatgaggaggataatttgcgttccctttttgccaaccttaacatagctcaaaaagagaaattaaatgaattagttagtgctattcatgaaaaggatgaccttttggatgcccaagaggattgtctaattaaagaaaacaagaaacatgttaatgttaaaaatgcttatgctctagaagtagaaaaatgtcaaaaactatctagtgagctaagcacttgtcgtgagatgattgacaaccttagaaatgaaaatgctattttaaatgctaaggttgattcacatgtttgtaatgtttcaattcccaatcttagagatgataatgttgacttgcttgctaagattgatgaattgaatgtatctcttgctagccttagattagagaatgaagatttaattgctaaggctaaagattttgatgtttgcaaagttacaatttccgatcttagagataaaaatgatattcttcatgctaagattgttgagcttaattcttgcaaaccctctacctctattgttgagcatgtatctatttgtactagatgtagaaatattgatattaatgctattcatgatcatatggctttaattaaacaacaaaatgatcatatagcaaaactagatgctaaaattgccgagcacaacttggaaaatgaaaaatttaaatttgctcgtagcatgctttataatgggagacgcccgggcattaaggatggcattggcttccaaaggggagacaatgtcaaaattagtgcccctcctaagagattgtccaactttgttaagggcaaggctcccatgcctcaggataacgagggttacattttgtaccctgccggttatcctgagaacaaaattaggaaaattcattctaggaagtctcactctggccctaatcatgcttttatatataagggtgagacatctagctctaggcaaccaacccgcgccaagttgcctagaaagaaaactcctaatgcatcaaatgatcatgccatttcatttaaaacttttgatgcttcttatatgcttactaacaaatccggcaaagtagttgccaagtttgttgggggaaaacacaagggttccaagacttgtgtttgggtacccaaagttcttgtgtctaatgccaaaggacccaaaaccgtttgggtttatgcatccgggggctcaagttggatactcgacagcgagtgcacaaaccacttgaccggggagaaaaggatgttctcctcatatgagaaaaaccaagatccccaacgagctatcacattcggggatggaaatcaaggtgtcactgtctttagaagaagtgatgattcaatagcatttaagggagtgttagagggtcagctatacttggtagattttgatagagctgaactcgacacttgcttaattgctaagactaacatgggctggctctggcatcgccgactagcacatgttgggatgaagaatcttcacaagcttctaaagggagaacacattttaggattaacaaatgttcattttgagaaagacagggtttgtagcgcatgccaggcgggaaagcaggttggagctcatcatccacacaagaacataatgacgaccgacaggccactggagctcctacacatggatctattcggcccgatcgcttacataagcatcggcgggaaaaaatctcaaacccaagagaccttaaagggattcctgagacgggctcaaaatgagttcggcttaaggatcaagaaaataagaagcgacaacgggacagagttcaagaactctcaaattgaaggctttcttgaggaggagggcatcaagcatgagttctcttctccctacacgccacaacaaaatggtgtagtggagaggaagaataggactctattggacatggcaagaaccatgcttgatgagtacaagacttcggatcggttttgggccgaggcggtcaacaccgcttgctactccatcaaccggttatatcttcaccgaatcctcaagaaaacatcgtatgaactcctgaccggtaaaaagcccaacatttcatattttagagtctttggtagcaaatgctttatacttgttaaaagaggtagaaaatctaaatttgctcctaagactgtagaaggctttttacttggttatgactcaaacacaagggcatatagagtctttaacaagtcctcaggacttgttgaagtttcttgtgacgttgtgtttgacgaaactaacggctctcaagtagagcaagttgatcttgatgagataggtgaagaacaggctccatgcatagcgctaaggaacatgtccattggggatgtgtgtcctaaggaatccgaagagcctccaattgctcaagatcaaccatcctcctccatgcaagcatctccaccgactgaaaatgaggatgaagctcaagttgatgaagttgaagatcaagcaaatgagccacctcaagatgatagcaatgatcaagggggagatacaaatgaggaagacaaggaggatgaagagcaaaggccgccacacccaagagtccaccaagcaatccaacgagatcaccccgtcaacaccatcctcggcgacattcataagggggtaactactcgatctcgtgttgctcatttctgtgaacattactcgtttgtttcctctattgagccacacagggtagaggaagcacttcaagattcggattgggtggtggcgatgcaagaggaactcaacaacttcacgaggaatgaggtatggcatttagttccacgtcctaatcaaaatgttgtaggaaccaaatgggtcttccgcaacaagcaagacgagcatggtgtggtgacaaggaacaaagctcgacttgtggccaagggatactcccaagtcgaaggtttggatttcggtgaaacctatgcacccgtagctaggcttgagtcaattcgcatattattggcctatgctacttaccatggctttaagctttatcaaatggacgtaaaaagtgccttcctcaatggaccaatcaaggaagaggtctatgttgagcaacctcccggctttgaagacagtgagtatcctaaccatgtctataagctctctaaggcgctttatgggctcaagcaagccccaagagcatggtatgaatgccttagagatttccttattgctaatggcttcaaagtcggaaaggccgatcctactttgttcactaaaactcttaacaatgatttgtttgtatgccaaatttatgttgatgatatcatatttgggtctactaacgaatcaacttgtgaagaatttagtaggatcatgacacaaaaattcgagatgtctatgatgggggagttgaagtatttcttaggattccaagtaaagcaactccaagagggcaccttcatcagccaaacaaagtacactcaagacattctaaccaagtttgggatgaaggatgccaaacccatcaagacacccatgggaactaatgggcatctcgacctcgacacgggaggtaagtccgtagatcaaaagattattccggacaggagaagctttttggaaaaacaggccaagcgcggaccgtccgggctcttgcggcggaccgtccgcgacatggggatacccctcggacagaaccaatgcaaaaactcaagtttccactacagactgtccggaggaaaagcgaagaccgtccgagccctcgcgcggaccgtccggcctcaggcgcggaccgtccggtcgccgttgatctacaggggcggaccgtccggacctggctcgcggaccgtccgcgctcagcagaatggcccaacggctaggaagtggttggtggctataaatacaaccccaaccacctccattcacttcatccaagcattccaaccttcaacattcaatacaagagctagcaatccattccaagacacattcaaagcctccatctctccaagtttcacaattgagaaaagagatcattag

SEQ ID NO: 4897 - DNA, 1812 bp, Zea mays
  Clone ID: TF_ZM4404.C2.o1.fg
atgtcgggagaattcgccaagaaggagatggagaccggcgacaagcccactacaagccacgggaaggcttcatcggaagagtcccgcaacaaggagaagaagagggagaagaagaaggagaagaagacttcttctcacaagtcgcatcggagtggcgataagataaagaagatgaggaaggtggtctactacgagaccgacacctcatcgccatctacctccggctccgacgcaccctccataacttctaagcgccatgagcgcaagaagtttagtaagatccccctacgctaccttcgcattactaaacatacacctttactttccgtcccattaggcaaaccaccaacttttgatggtgaagattatgctaggtggagtgatttaatgcgatttcatctaacctcactccacaaaagtatatgggatgttgttgagtttggtgcacagcacttcaactcccaagccacaacaatactcctcgcctctctaagtagggaggagtacaacaaggtggaaggattaaagggcgccaaggaagtttgggacgtgctcaagaccgcgcacgagggtgatgaactcaccaagatcaccaagcgagaaacgatcgagggggagctcggtcgcttccgtcttcgccaaggggaggagccacaagacatgtacaaccggctcaaaaccttggtaaaccaagtgcgcaacctcgggagcaaaaagtgggatgaccacgaggtggttaaggttattctaagatctcttattttccttaaccctactcaagtacaattaattcgtggtaatcctagatatacactaatgacttccgaggaagtaatcgggaattttgtgagctttgaatttatgatcaagggctcacggaagatcaacgagcttgacggtccttctacgtccgaggctcaacccgtcgcattcaaagcgacgaaagacaagaaggaggagtacacaccgagtagaacacccatcgacgcctccaagctcgacaacgaggaaatggcgctcgtcatcaaaagctttcgccaaatactcaagcaaaggagggggaaagattacaagccccgctccaagaaggtttgctacaagtgtggtaagcccggtcactttatagctaaatgtcctatttctagtgatagtgacaagggtgacgacaagaaggggagaagaaaggagaagaagaggtactacaagaagaagggcggcgatacccatgtttgtcgggagtgggactctgacgaaagctctagcgactcctccgacgacgaggacgccgccaacatcgccgtcaccaagggactcttcttccccaacgtcggccacaagtgcgtcatggcaaaggacggcaaaaagaagaaggttaaatctaaatcctccactagatatgagtcttctagtgatgaaaatgctagtgatgaggaagataacttacgcactctttttgccaacttaaacatgcaacaaaaagagaaattaaatgaattgattagtgccatccatgagaaggatgatctcttggactcccaagaggacttcctaatcaagaaaaacaaaaagcatgttaaagttaaaaatgcttatgctctagaagttgagaagtgtgaaaaattgtctagtgagctaagcacttgccatgagaccattgacaaccttagaaatgaaaatgttagtttaaatgctaaggttgtttctcatgtttgtgatgttttaattcccaatcctagaaataatgatgatgatttacttgctaggattaaagaattaaacacttctcttgctagccttaggagtgaaaaatga

SEQ ID NO: 4898 - DNA, 5784 bp, Zea mays
  Clone ID: TF_ZM4404.C5.o1.fg
atgtcgggagatcacgccaagaaggagatggagaccggcgaaaagcccactacaagccaagggagcacttcatcggaagagtcccgcaccaagaggagggagaagaagaatatctcctccaacaaagggaaggaaaagaaatcttcttctcaccacaaagagaagaaggaaaaatcttcttcccacaagccgcatcggagtaaggacaagcaaaagaggatgaggaaagtggtctactatgagaccgacacttcatcaacatcgacctccggctccgacacgccctctgtaacttctaaacgccaagagcgtaagaagtttagtaagatccccctacactaccctcgcatttctaaacatgcacctttactttccgtcccattaggcaaaccaccaacttttgatggtgaagattatgctaggtggagtgactttatgcgatttcatctaacctcactccacaaaagtatatgggatattgttgagtttggtgcacaggtaccatccgtaggggacaaagattatgatgaggatgaggtggcccaaatcgagcacttcaactctcaagcgacaacaatactcctcgcctctttaagtagagaggagtataacaaagttcaagggttgaagagcgccaaagaagtttgggatgtgctcaaaaccgcgcacgagggagacgagctcaccaagatcaccaagcgggaaacgatcgagggggagctcggtcggttccggcttcgcaaaggggaggagccacaacacatgtacaaccggctcaagaccttggtgaaccaagtgcgcaacctcgggagcataaaatgggatgaccatgaaatggttaaggttattctaagatctcttattttccttaatcctactcaagttcaattaattcgtggtaatcctagatatactaaaatgacccccgaggaagttatcgggcattttgtaagttttgagtgcatgatcgaaggctcgaggaagatcaacgagcttgatgatccatctacatccgaggctcaacccgtcgcattcaaggcgacggaggacaagaaggaggaggctacaccaagtcgacaaccaatagacgcctccaagctcgacaatgaggaaatggcgctcgtcatcaagagcttccgccaaatcctcaagcaaaggagggggaaagactacaagtcccgctccaaaaaggtttgctacaagtgtggtaagcccggtcattttattgctaaatgtcctatctctagtgacagtgaccgaggcgacgacaagaagggaagaagaaaggaaaagaagaggtactacaagaagaagggcggcgatgcccatgtttgtcgggagtgggattccgacgaaagctcaagcaactcctcctccgacgaggacgccgccaacatcgccgtcaccaagggacttctcttccccaacgtcggccacaagtgcctcatggcaaaggacggcaagcggaagaaggttaaatctaactcctccactaaatatgagtcttctagtgatgataatgctagtgatgaggaggataatttgcgtaccctttttgccaatcttaacatggaacaaaaggaaaaattaaatgaattaattagtgctattcatgaaaaggatgaccttttggattcccaagaggattgtcttattaaggaaaacaagaaacatgttaaggttaaaaaggcttatgctcttgaaattgagaaatgtgaaaagttatctagtgagctaagcacttgccgtgagatgattgacaaccttagacatgaaaatgctagtttaaatgctaaggttgattcacatgtttgtaatgtttcaattcccaatcctagagataataataatgatttgcttgctaggattgaagaattaaacatttctcttgctagccttagaaatgaaaatgaaaacttgcttgctaaggctaaagattttgatgtttgcaaagttacaatttccgatcttagagataaaaataatattcttcatgctaagattgttgaacttaattcttgcaaaccctctacatctattgttgaacatatatctatttgtactagatgtagagatattgatgttaatgctattcatgatcacatgtccttaattaaacaacaaaatgatcatatagcaaaactagatgctaaaattgccgagcacaacttagaagatgagaaatttaaatttgctcgtagcatgctttataatgggagacgcccgagcatcaaggatggcattggattccaaaggggagacaatgtcaaacttaatgcccctcctaaaagattgtctaattttgtaaagggcaaggctcccatgcctcaggataacgagggttatattttgtaccctgccggatatcctgagagtaaaattaggagaattcattctaggaagtctcactctggccctaatcatgcatttatgtataagggtgagacatctagctctaggcaaccaacccgtgccaagttgcctaagaaaactcctaatacatcaaatgatcataacatttcatttaaaacttttgatgcatcttatgttttgactaacaaatccggcaaaatagttgccaaatatgttgggggcaagcacaagggctccaagacttgtgtttgggtacccaaagttcttgtttctaatgctaaaggacccaaaaccatttgggtctatgcatccgggggctcaagttggatactcgacagcgggtgcacaaaccacatgactggggagaaaaagatgttctcctcatatgagaaaaaccaagatccccaaagagcaattacattcggggatggaaatcaaggtttggtcaaaggtgtcactgtctttagaagaagcgatgattcaatagcatttaagggagtgttagagggtcagctatacttggtagattttgatagagctgaactcgacacttgcttaattgctaagactaacatgggttggctctggcaccgccgactagcccatgttgggatgaagaatcttcacaagcttctaaagggagaacacattttaggattaacaaatgttcattttgagaaagacaggatctgtagcgcatgccaggcaggaaagcaagttggagctcatcatccacacaagaacataatgacgaccgacaggccactggagctcctacacatggatctattcggcccgatcgcttacataagcattggcgggagtaagtattgtctagttgttgtggatgattattctcgcttcacttgggtattctttttacaggaaaaatctcaaacccaagagaccttaaagggattcttgagacgggctcaaaatgagttcggcttaaggatcaagaaaataagaagcgacaacgggacggagttcaagaactctcaaattgaaggcttccttgaggaggagggcatcaagcatgagttctcttctccctacacgccacaacaaaatggtgtagtggagaggaagaatagaactctattggacatggcaaggaccatgcttgatgagtacaagacttcggatcggttttgggccgaggcggtcaacaccgcttgctacgccatgaaccggttgtatctacaccgaatcctcaagaagacatcatacgaactcctaatcggtaaaaagcccaacatttcatattttagagtctttggtagcaaatgctttattcttgttaagagaggtagaaaatctaaatttgctcctaagactgtagaaggctttttacttggttatgactcaaacacaagggcatatagggtctttaacaagtccactggactagttgaagtctcatgtgacgttgtgtttgatgagactaacggctctcaagtagagcaagttgatcttgatgagataggtgaagaagaggctccatgcatcgcgctaaggaacatgtccattggggatgtgtgtcctaaggaatccgaagagcctccaaatgcacaagatcaaccttcctcctccacgcaagcatctccaccaactcaagatgaggatgaagctcaagttgatgaagtagaagatcaagcaaatgagccacctcaagataatggcaataatcaagggggagatgcaaatgaggaagacaaggcggaagaggaacaaaggccgccacacccaagagtccaccaagcaatccaacgagatcaccccgtcgacaccatcctcggcgacattcataagggggtaactactcgatctcgtgttgcacatttttgtgaacattactcgtttgtttcctctattgaaccacacagggtagaggaagcactacaagattcggattgggtggtggcaatgcaagaggagctcaacaacttcacgaggaatgaggtatggcatttagttccacgtcctaaccaaaatgttgtaggaaccaaatgggtcttccgcaacaagcaagacgagcatggtgtggtgacgaggaacaaagctcgacttgtggccaagggatactcccaagtcgaaggtttggatttcggtgaaacctatgcacccgtagctaggcttgagtcaattcgcatattattagcctatgctacttaccatggctttaagctttatcaaatggacgtgaaaagtgccttcctcaatgggccgatcaaagaagaggtctatgttgagcaacctcccggctttgaagacagtgagtaccctaaccatgtctataagctctctaaggcgctttatgggctcaagcaagccccaagagcatggtatgaatgccttagagatttccttattgctaatggcttcaaagtcggtaaagccgatcctacactctttactaaaactcttgaaaatgacttgtttgtatgccaaatttatgttgatgatattatatttgggtctactaacgagtctacatgtgaagagtttagtaggatcatgacacagaaattcgagatgtctatgatgggggagttgaagtatttcttaggatttcaagtaaagcaactccaagagggcaccttcatcagccaaacgaagtacactcaagatattctaaccaagtttgggatgaaggatgctaaacccatcaagacacccatgggaactaatgggcatctcgacctcgacacgggaggtaagtccgtggatcaaaaggtataccggtcgatgataggttctttactctatttatgtgcatctcgaccggacattatgctttccgtatgcatgtgtgcaagattccaagccgaccctaaggaagctcaccttacggccgtaaaacgaatcttgagatatttggcttatactcctaagtttgggctttggtatcctaggggatccacttttgatttaattggttattcggatgccgattgggcggggtgcaaaatcaataggaagagcacatcggggacttgccagttcttgggaagatccttggtgtcttgggcttcaaagaagcaaaattcggttgctctttccaccgccgaagccgagtacattgccgcaggccattgttgcgtgcaattgctttggatgaggcaaaccctgcgggactacggttacaaattaaccaaagttcctttactatgtgataatgagagtgcaatcaaaatggccgacaatccagtcgagcatagccgcactaagcacatagccattcggtatcattttcttagggatcaccaacaaaagggagatatcgagatttcttacattaatactaaagatcaattagccgatatatttaccaagcctcttgatgaacaatcttttaacaaacttaggcatgagctcaatattcttgattctaggaacttcttttgttaa

SEQ ID NO: 4899 - DNA, 2493 bp, Zea mays
  Clone ID: TF_ZM4442.C1.o1.fg
atgtcgggagatcactccaagaaggagatggagaccggcgacaagcccactacaagccacgagaaagcttcatcggaagagtcccgcaacaaggggaaggggaaggagaagaaagcctcttctcacaagtcgcatcggagtggcgacaagaaaaagaagatgaggaaggtggtctactacgagaccgacacttcatcaccttccacctccagctccgacgcgccatccattacttctaagcgccatgagcgcaagaagtttagtaagattcctctacgctaccctcgcattcctagacatactccattactttccgttccattaggcaaaccgccaacctttgacggtgaagattatgctaggtggagtgatttgatgaaatttcatctaacctcactccacaaaagtatatggaatgttgttgagtttggagcacaggtaccatctgtaggggatgaggattatgatgaggacgaggtggcccaaatcgagcacttcaactcccaagccacaactatactcctcgcctctctaagtcgagaggagtataacaaggtgcaaggattaaagagcgccaaagaagtttgggacatgctcaaaaccgcacacgagggagatgagctaaccaagatcaccaagagggagacgatcgagggggagctcggtcgcttccgtcttcgccaaggggaggagccacaagacatgtacaaccggctcaaaaccttggtgaatcaagtgcgcaacctcgggagcaaaaaatgggatgaccatgaaatggttaaggttattctaagatcacttattttccttaaccctactcaagttcaattgattcgtggtaatcctagatatacactaatgactcccgaggaagtaatcgggaattttgtaagctttgagttcatgatcaagggcttaaagaagatcaacgagcttgacgtcccctccacgtccgaagcacaaccggtcgcattcaaagcgacggaggagaagaaggagtctacatcaagtagaacacccatcgacgcctccaagctcgacaatgaggaaatggcgctagtcatcaagagcttccgccaaatcctcaagcaaaggagggggaaagattacaagccccgctccaagaaagtttgctacaagtgtggtaagcccggtcactttatagcaaaatgtcctatttctagtgacagtgacaggggcgacggcaagaaggggagaagaaaggagaagaagaaatactacaagaagaagggcggcgatgcccatgtttgccgggagtgggactccaacgagagctccaccgactcctcctccgatgaggacgccgcaaacatctccgtcaccaagggactcctcttccccaacgtcggccacaagtgcctcatggcaaaggacggtaaaaagaagaaggttaaatccaaatcctccactagatatgagtcctctagcgatgataatgctagtgatgaggaagataatttgcgtactctttttgccaacttaaacatgcaacaaaaagagaaattaaataaattgattagtgctatccatgagaaggatgatctcttggacacccaagaggacttccttattaaagagaacaagaagcatgttaaggttaaaaatgcttacgctctagaagtagaaaaatgtaagaaactatctagtgagctaagcacttgccatgagaccattgacaaccttagaaatgagaatggtaatttgttagctaaggttgattcaaatgtttgtgatgtttcaattccaaatcttagaaatgataatgttgatttacttgctaagattgaagaattgaacatttctcttgctagccttagaaatgaaaatgaaaaattgcttgctaaggctaaagatatagatgtttgcaatgcttcaatttccgatcttagagataaaaatgatatattgcgtgctaagattgttgaacttaattcttgcaaaccctctacatctaccactgagcatgtcactatttgcactagatgtagagatattaacattgatgctattcatgatcacatggctttaattaaacaacaaaatgatcatatagcaaaattagatgctaaaattgccgagcatgacttagaaaacgaaaaatttaaatttgctagaagcatgctctatagagggagacgccctggcattaaggatgacattggcttccaacagggaggcaatgtcaaacttaatgcccctcctaagaaattatccaactttgttaaaggcaaggctcccatgcctcaggataacgagggttacattttgtaccctgccggttatcacgagagcaaaattaggagaattcactctaggaagtctcactctggccctaaccatgcttttatgtataagggtgaggcatctagttctaggcaatcaacccatgcaaaattgcctaagaagaaaactcctagtgcatcaaatgaacatagcatttcattcaaaacttttgatgcatcaatgttttaa

SEQ ID NO: 4900 - DNA, 3291 bp, Zea mays
  Clone ID: TF_ZM4496.C2.o4.fg
atgtcgggagctcatgccaagaaggagatggtgaccggcgagaagcccgccacaagccacagaaaagctccatcgagagagtccggcaacaaaagggaggaatcacctccccgcgtcaagtcacaccggagtggcgacaagaagaagaaaatgaagaaggtggtctactacgagaccgactctttgtcgccttccacctccggctccgacgcgccgtccgtcacttctaagcgccatgagcgcaagaagtttagtaagatccccttacgctatcctcgcatttctaaacgcacttatttactttccgtcttactaggcaaaccaccggtttttaacggtgaaaattattgtatgtggagtgaaaaaatgaggcaccatctaacctcactccacgctagcatttgggacattgttgaatttgcagcgcaggaaccatccgtgggggatgaaggctatgactcggacgaggtagcccaaatccggcacttcaactcccaagccactactatactcctcgcctctctaagtcgagaggagtataataaggtgcaagggttgaagagtgccaaagaaatttgggacatactcaagaccgcgcacgaaggagatgaggtgaccaagatcaccaagcgggaaacgatcgaagaggagctcggtcaattcatgcttcaccaaggggaggagccacaagccatgtacaaccggctcaagaccttggtgaaccaagtgcgcaacctcaggagcaccaaatgggatgaccatgaaatggtcaaggttattcttagatcactcgtttttcttaaccctactcaagttcaattaattcgtggtgatcctagatataaactaatgtctcccgaggaagtgataggaaagtttgtgcaacctgtcgccctcaaagtgatggaggagaagaaggaagagtctacatcaagtaggctccccatcgacgcctccaagctcgacaatgaggagatggctttaatcatcaaaatctttcgccaaatcctcaatcaaaggagggggaaggattacaagccccgctccaaaaaagtttgctacaagtgtggtaagcccggtcactttatagcaaaatgtcctatttctagtgacagtgacaggggcaccaacaagaagggaagaaggaaggagaagaagaagtattacaaaaagaagggtggcgatgcccatgtttgtcgggaatgggactccgacgagggctccaccgactcctcctccgacgaggacgccgccaacatcaccgtcaataaaggccttctcttccccaacgtcggccacaagtgcctcatggcaaaggacggcaaaaagaaggtttatgcatccgggggctcaagttggatcattgatagcgggtgcacaaaccacatgacaggggagaagaagatgttctcctcctatgagaaaaaccatgatccccaaagagctatcacattcgtggatgaaaaatcacaaacccaagagacattgaagggattcttaagacgggctcaaaatgagttcggattgaggatcaaaaagattagaagcgacaacgggacggagttcaagaactcacaaatagaaggcttccttgagaatgagggcatcaagcatgagttctcttctcactacacaccacaacaaaatggtgtagtggagaggaagaatagaactctacttgacatggcgagaaccatgcttgatgagtacaagacttcgaaccggttttgggcggaagcagccaacaccgcctgctacgccatcaaccgtctctaccttcaccgaatcctcaagaagacatcgtatgaactcctcaccggtaaaaagcccaatgtttcatattttagagtctttggtagcaaatgctttattcttgtcaaaagaggtagaaaatctaaatttgctcctaaggctgtagaaggctttttacttgattatgattcaaacacaagggcatatagagtctttaacaagtccactagactagttgaagtttcttgtgacaatgtgtttgatgagactaacggctctcaagtagagcaagttgatcttgatgagctagatgatgaagaggctccgtgcgtcgcactaaggaacatgtccattggggatgtgtgtcctaaggaatccgaagatcctccacatgcacaagatcaaccatcatcttcaaatcaagcatctccaccaacccaagatgaggatcaagctcaagatgatgaaaataaagatcaagaagagtcacctctagaggaggacaatgatcaagggcgagatgccaatgatcaagacaaggaagatgatgagggtccaagaccgccacacccaagagtccaccaagcgatacaacgagatcaccccgtgaactccatcctcggcgatattcataagggggtaaccactcgatctcgtgtcgctcatttttgtgaacattactcctttgtgtcttctattgagccatacagggtggaagacgcattaagggattcagattgggtgttggcgatgcaagtggaactcaacaacttcacgaggaatgaggtatggcatttagttccacgtcctaatcaaaatgttctaggaaccaagtgggtcttccgcaacaagcaagatgagcatggtgtggtgacaaggaacaaagcccgacttgtggctaagggatattcacaagtcgaaggtttggatttcggtgaaacctatgcacccgtagttaggcttgagtcaattcgtatattacatgcctatgctacttaccatggctttaagctttaccaaatggacatgaaaagtgccttcctcaatggaccaatcaaggaagaggtctatgttgagcaacctcccagctttgaagacaagtttagtaggattatggttcaaaaattcgagatgtctatgatgggggagttgaagtatttcttaggatttcaagtcaagcaactccaagagggcaccttcatcagtcaaacgaagtacattcaagacatactcaccaagtttgggatgaaggatgccaagcctatcaagacacccatgggaactaatgggcatctcgacctcgacacgggaggtaaatccgtagatcaaaaggtataccggtcgatgataggatctttactctatttatgtgcatctcgaccggatattatgctttctgtatgcatgtgtgcaagattccaagtcgatcctaaggaagttcaccttagggccatgaaacgaatcttgagatatttagttcatactcctaagtttggcctttggtaccccaagggatccacttttgatttaataggatag

SEQ ID NO: 4901 - DNA, 3894 bp, Zea mays
  Clone ID: TF_ZM4496.C6.o2.fg
atggccacaagccacgggaaggctccatcaaaggagtccgacgccaaaggaagggaggaatcaccttcctgcgtcaagtcgcaccggagtggcgacaagaagaagaaaataaagaaagtggtctactacaagaccgattcttcgtcgccctccacctccggctccaatgcaccgtccgtcacttctaagcgccatgagcgcaagaagtttagggatgaaggatatgattcggacgaggtcgcccaaattcgtcactttgactcccaagaaactactatactcctcgcctccttgtgtcgagaggaatataacaaggtgcaagggctaaaaagtgccaaagagatttgggatgtactaaagaccgcgcacgaaggggatgaggtgaccaagatcaccaagagggagactatcgagggggagttcggtcgattcatcctcaaccaaggagaagagccacaagcgatgtacaaccggctcaagaccttggtcaaccaagtgcgcaacctcgggagcacaaaatgggatgaccatgaaatggtcaaagttattctaagatcactcgtttttcgtaatcctacgcaagttcaattaatatgtggtgatcctagatataagctaatgtctcccgaggagctcgacaacgagcaaatggcgctcatcatcaagagttttcgccaaatcctcaagcaaaggaaggggaaagactacaaaccctgttccaaaaaggtgtgctacaagtgtggtaagcccggtcattttattgcaaaatgtcctatttctagtgacagtgataggggcgacgacaagagagggaagaagaaggagaagaagagatattacaagaagaaggcggcgatgcccacggtctcctcttcccccaacgtcggccacaagtgtatcatggcaaaggacgacaagaaaaagaaggtacaagctagaaccacccccaagtatactacatctaatgatgagggtagttctagtgataatgaagataacttgcttagtctttttgccaaccttaacatgcaacaaaaggaaaaactaaatgaattgataagtgctattcatgagaaggatgaactcttggatagccaagaggaatttcttattaaggaaaataagaagcatgttaaggagcttagcatttgccatgacaccatttccaaccttagagatgagaacaatagtttaattgctaaggttgagaaatcaaaagtttgccatgattcaattgacaatcttagaaatgaaaatgctagtttatttgctaagattgataaattgaatgaatcaattgctagccttaaaactgagaatgataagttaatttctaaggctaaagatttgaatgtttgcaatatttatatttccaatcttagaaatgagaatgctattttacatactaagattgatgaattaaatgcttgcaaaccctctacatctactgttggtcatgttactatttgtactagatgtggagacattaatgttgatgctattcatgatcacctagctttaattaaacaacaaaatgatcacatagctcaactaactgccaaaatcaatgagcatgagatagaaaatgaaaaatttaaatttgctagaagcatgctctataatgggagacgccctggcatcaaggatggaattggtttccaacaaggaagcaatggcaaggctcccatggctcaagataatgagggttacattttatatcctgctggttatcctgagcacaaaattaggagaattcatgctaagaagtctcattctatttcccatcatgcttttatgtacaagaatgaggcatctagctctaggcattctacccatgttaaaatgcctaaaaagaaaactcctactgcatcaaatgagcctaatgcttcatctaagacttttgatgcaccttatgtgcttactaacaaatcaggcaaagtagttgccaaatatgttgggggaaacacaagggctccaagacttgtgtttggatacccaaggaataatagaactctattggacatggcgaggaccatgcttgatgagtacaagacatcggaccagttttgggtggaagcaatcaacactgcttgctactccatcaaccggctctaccttcaccgaatcctcaagaagacatcatatgaactcctcaccagtaaaaagcccaatgtttcatattttagagtctttggtagcaaatgctttattctttttaaaagaggtagaaaatccaaatttgctcctaaagttgtagaaggttttttacttggttatgactcaaacacaagggcatatagagtcttcaacaaatccactggattagttgaggtttcttgttacattatgtttgatgagactaacggctcccaagtggagcaagttgatcttgatgagctagatgatgaagaggctccgtgtgtcgcgctaaggaacatgtctattggggatgtgtgtcctaaggaatccaaagacctacacaagcgcaagatcaaccatcatcttccaatcaagcatctccacaaacccaagataaggatcaggctcaagacaatgaagatgaagatcaataggatgagccacctcaagaggaggacaatgatcaagggggagatgacaatgatcaagacaaggaagatgatcaaaattcagggaaccaagtgggttttccgcaacaagcaagatgagcatggtgtggtgacaaggaacaaagcccgacttgtggccaagggatattcacaagtcgaaggtttggattttggtgaaacctatgcacccgtagctaggcttgagtcaatttgtatattacttgcctatgctactcatcatggctttaagctttatcaaatggacgtgaaaagtgccttcctcaatggaccaatcaaggaagaggtctatgttgagcaacctcctggctttgaagatagtgagtaccctaaccatgtttataaactctcaaaggcgctttatgggctcaagcaagccccaagagcatggtatgaatgcctaagagattttctcatcactaatggattcaaattgaagtatttcctaggatttcaagtcaagcaactccaagaaggcaccttcatcagccaaacaaagtacattgaagatatacttaccaagtttagaatgaaggatgctaagcccatcaagacacccatgggaactaatgggcatctcgacctcgacatgggaggtaaatccgtagatcaaaaggtataccggtcgatgataggatctttactctatttatgtgcatatcgaccggacattatgctttccgtatgcatgtgtgcaaggttccaagccgatcctaaggaagttcaccttagatccatgaaaagaatcatgagatatttagtttacactcctaagtttggactttggtaccccaagggatccacttttgatttaaaaggatattcagatgttgattgggtagggtgtaaaattgatagaaaaagcacatcagagacttgtcagtttttggggagatcactggtgtcttgggcttcaaagaaacaaaactcagtagctctttctaccgccgaagccgagtacattgccgcaggccattgttgtgcgcaattactttgggtgagacaaactctcagggactatggctacaaattgagcaaagtccctctcctatgtgataatgagagtgcaatctgcatagcggataatcccgttgaacacagccgcattaagcacatagacattcggtatcactttttgagggatcaccaacaaaggggggatattgagatagcttatgttagcacaaaagaacaattagccgatatctttaccaaaccattagatgagaaaacctttaccaaacttaggaatgagctaaacattcttgattctcgaaattttgattga

SEQ ID NO: 4902 - DNA, 2872 bp, Zea mays
  Clone ID: TF_ZM4547.C1.o1.fg
atgtcgggagatcacgccaagaaggagatggagaccggcgaaaagcccactacaagccacgtgagcacttcatcggaagagtcccgcaccaagaggaaggagaagaagaagatctcctccaacaaagggaaggagaagaaatcttcttctcaccacaaagagaagaaggaaaaatcttcttcccacaagccgcgtcggagtggggacaagcaaaagaggatgaggaaggtggtctactacgagactgacacttcatcaacatcaacctccgactccgatgcaccctccgtaacttctaaacgccaagagcgtaagaagtttagtaagatccccctacactatcctcgcatttctaaacatgcacctttactttccgtcccattaggcaaaccaccaacttttgatggtgaagattatgctaggtggagtgatttaatgcgatttcatctaacctcactccacaaaagtatatgggatgttgttgagtttggtgcacaggtaccatccgtaggggacaaggattatgatgaggatgaggtggcccaaatcgagcacttcaactctcaagcgacaacaatactcctcgcctctttaagtagagaggagtataacaaagttcaagggttgaagagcgccaaggaggtttgggatgtgctcaaaaccgcgcacgaaggagatgagctcaccaagatcaccaagcgggaaacgatcgagggggagctcggtcggttccggcttcgcaaaggggaggagccacaacacatgtacaaccggctcaagactttggtgaaccaagtgcgcaacctcgggagcgtcaagtgggacgaccacgaaatggttaaggttattctaagatctctcatttttcttaaccccactcaagttcaattaattcgtggtaatcctagatatactaaaatgacccccgaggaagtaatcgggcattttgtaagttttgagtgcatgatcgaaggctcgaggaagatcaacgagcttgatgatccatctacatccgaagctcaacccgtcgcattcaaggcgacggaagaaaagaaggaggagtctacaccaagtagacaaccaatcgacgcctccaagcttgacaatgaggagatggcgctcgtcatcaagagcttccgccaaatcctcaaacaaaggagggggaaagactacaagtcctgctccaagaaggtttgctacaaatgtggtaagcccggtcattttattgctaaatgtcctatatcaagtgacagtgaccgaggcgacgacaagaaggggagaagaaaggagaaaaagaagtactacaagaagaagggcggcgatgcccatgtttgtcgggagtgggattccgacgaaagctcaagcgactcctccgacgacgaggacgccgccaacatcgccgtcaccaagggacttctcttccccaacgtcggccacaagtgcctcatggcaaaggacggcaaacggaagaaggttaaatctaactcctccactaaatatgagtcttctagtgatgataataatagtgatgaggaggataatttgcgtgttctctttgccaatcttaacatggagcaaaaagaaaaattaaatgaattgattagtgctattcatgaaaaggatgaccttttggactcccaagaggattgtctaattaaagaaaacaagaaacatgttaaggttaaaaaggcttatgctctagaagtagaaaaatgtgaaaaattatctagtgagctaagcacttgccgtgagatgattgacaaccttaggaatgaaaatgctagtttaaatactaaggttgattctcatgtttgcattgtttcaacttccaatcctagagataataatgatgatttgcttgctaggattgaaaaattaaacacttctcttgctagccttagagtagaaaatgataatttgattcctaaggctaaagattttgatgtttgcaatgtcactatttccgatcttagagataaaaatgatatattacgtgctaagattgttgaacttaattcttgcaaaccgtctacatctactattgagcatgtgtctatttgtgatagatgtagagatattgatgttaatgctattcatgatcacatgtctttaattaaacaacaaaatgatcatatagcaaaactagatgctaaaattgccgagcacaacttagaaaatgagaaatttaaatttgctcgtagcatgctttataatgggagacgccctggcattaaggatggcattggcttccaaagaggagacaatgacaaacttaatgcccctcctaagaacttgtctaactttgtcaaggacaaggctcccatgcctcaggataacgagggctacattttgtaccctgccggctatcctgagagcaaaataaggaaaattcattctaggaagtctcactctggccctaatcatgcttttatgtataagggtgagacatctagctctaggcaaccaacccgtgccaagttgcctagaaagaaaactcctaatgcatcaaatgatcataccatttcatttaaaacttttgatgcttcttatgtgcttactaacaaatccggcaagatagttgccaagtttgttgggggcaaacacaagggttccaaggcttgtgtttgggtacccaaagacattgtttctaatgccaaaggacccaaaaccgtttgggtttatgcatccgggggctcaagttggatactcgacagcgggtgcacaaaccacatgacaggggagaaaaagatgttctcctcatatgagaaaaaccaagatccccaacgagctatcacattcggggatggaaatcaaggtgtcactgtctttagaagaagtgatgattcaatagcatttaagggagtgttagagg

SEQ ID NO: 4903 - DNA, 2841 bp, Zea mays
  Clone ID: TF_ZM4553.C2.o1.fg
atggccacatgcatagatctcacgtatggaaaggctgtcagcacagccttatctgttgaagcaaaatacgcaagttctgggaagaataagggattcggtggtgagaggccaaatcagggccaggcgaagaagcaacgatttgtgatccggccttcaagccaaaatcgcactttttctcgtccaccctcattccccttcaaacagccaatcattattcgccccaacaatacccccactaccccaaatcagccgggtgccccaggcactcgattccctgccttgcctagttcttcaactgggtgttttaattgcggcaagtcgggacatttcatcaaagattgcccatatcctaggcaaaatcaatcaaatgctccgcaaggatctaggagatcagctcagcccaaaggaaatgctgtggggaaaaatacaaagaagacggggcgtgtatattacacccaagtggccactacaccggaaggagagccggttatgatgggtacgtttcccgtggccagtcacccagcaattattctttttgattctggtgcttcgcatacattcattagcaagaaatttgtggagcaacatcaccttgcatgccatgaatcaaaagagggatttaaaattcattcacctgggggacacatttttactagagaagtggcctatgaagtgccagtaacaatggctggacagaactttcctgctaacatgattgttctgaaaggccaggatatagatgtaattttgggtatgaattggttaacccaacacaaggcaattctcaacactaaactcagaaccgtcaggttgagctataatcaagaagagattcttttgtctctccccgcaaccaatccagccaaaacttctggtagagtatatgaagccattgtaccggagatcaagaacattccggtagtatgtgagtttccagatgtatttccggaagatttgcctggactgccccctgaaagagatgtagaattcgtaattgagctaaagcccggtacggctcccatctcccgaagatcgtaccgtatgccccctaatgagttggcagaattgaagattcaattacaagatctactgaataagggattcatccggccaagctcgtccccatggggttgccccgccatttttgttaagaagaaggatcaaaccttgcgaatgtgcgtggattatcgacccctgaatgaggtcaccatcaagaataagtaccctcttccaaggatcgacatcttatttgatcaactgactggggcgagggtattttccaaaattgatctcaggtcgggctatcatcaaatccgtattcggcccgaggatataccgaagaccgcgtttactacgcggtatggattgtttgaatatctagtaatgtctttcgggctcacaaatgctcctgcccacttcacctatttgatgaactcggtgttcatgcccgagttggacaagttcgtggtggtctgcatcgacgatattttgatatattctaaaaatgaagaggaccatgctcagcatctacggattgtattgacgcgcctgagggaacatcaactgtatgccaagttcagcaagtgcgcgttctggctggaggaaattcaatttttggggcacgtgttatcggctaaaggaattgcggtagatcctagcaaggtcaaagatatcctggagtggaaacccccaaccactgttcaccaagtccggagttttcttggactagctgggtattatcgcagattcataccagatttttctaagcttgtgaagccaatcacaagtttattgaagaatgacattaagttcaattggtcttctaagtgtaatgaagcctttgagcaattgaagacactattgacgactgctccggtattagctcaaccggacatcactaagccttttgatgtatattgtgatgcatctggcagtgggctcggctgtgtactgatgcaagagggccgagtaattgcgtatgcttcaaggcagttgcgccgacatgaggagcattacccaactcatgatctggagctagctgctgtggttcatgccctgaagatttggcgtcactatctgctgggaaatatctgtcacatatatacagatcataaaagtttgaagtacatcttcacccagtcagaattaaatatgaggcaaagacgatggcttgagcttattaaagactatgaactggagatccattatcacccaggcaaagccaatgtggtagcagatgcactgagtcgtaagacttcctgccactgtcttatggtgaagacctccgagaacactttgtgtcaagagatggaaaagctaaacctggggataatccaacaagggactctaaatcagctaaagcttgagtcaatcattttgcaaagaataattgatgctcaaaaggataatctgggcgattatgtctacttgaaagtttcaccaatgaagggtgtatcgcgtttcggggttaaagggaaaattgcacccaggtacattggtccattcctggtgcttgagcaatgtggaccaatggcataccgtctccaactacccgaaacattgtctgctgtgcataatgtgttccacgtgtcacaattgaagaagtgtcttcgggttctcgatcgaaccgttgaagtgacagatgttgtccttaaaccagacttgacatactctgagcaccctatacgagtcttggatcaaaaggacagggttacccggagaaaaactctcaagttttataagatacagtggaaccaacattctgaagatgaggctacatgggaaactcaagactttttagataagaatttcccaggctttctagcctcatgtaaattgtaa

SEQ ID NO: 4904 - DNA, 4615 bp, Zea mays
  Clone ID: TF_ZM4555.C2.o1.fg
caaacaaaggagggggaaggattacaagtcccgctccaagaaggtttgctacaagtgtggtaagcccggtcattttattgctaaatgtcctatatccagtgacagtgaccgaggtgacgacaagaaggggagaagaaaggagaagaaaaggtactacaagaagaagggcggcgatgcccatgtttgtcgcgagtgggactccgacgagagctcaagcgactcctccgacgacgaggacgccgccaacatcgccgtcaccaagggactcctcttccccaacgtcggccacaagtgcctcatggcaaaggacggcaaaaagaaggttaaatctaaatcctccactaaatatgaatcctctagtgatgacaatgctagtgatgaggaagataatttgcgttccctttttgccaaccttaacatagctcaaaaagaaaaattaaatgaattggttagtgctattcatgaaaaggatgaccttttggattcccaagaggattatctaattaaagaaaacaagaaacatgttaaggttaaaaatgcttatgctctagaagtagaaaaatgtaacaaattatctagtgagctaagcatgtgccatgacactattgccaaccttagaaatgaaaatgctaaattaattgctaaggtagattctcatgtttgcattgatcctagaaatgataatgttgatttgcttgctaggattgatgagttaaatgtttccattgctagccttagaaatgagaatgagaaactaattgctaaggctaaggatattgatgtttgcaatgctactatttccgaccttagaactaaaaatgatatgttgcatgctaaggttgttgaactaaaatcttgcaaaccctctacatctaatgttgagcatatttccatttgtactagatgtagagatattaatgttgatgctatacatgatcacctagccttaattaaaaaacaaaatgatcacatagctcaactaaatgctaagattagagagcatgactcagaaaatgaaaaatttaaattggctagaagcatgctctataatgggagacgccctggcatcaaggatggcattggcttccaaaggagagacaatgtcaaacttaatgcccctccaaagaacttatctaactttgttaagggcaaggctcccatgcctcaggataacgagggttacattttgtaccctgccggctatcctgagagcaaaattagaaagattcattctaggaagtctcactctggccctaatcatgcttatatgtataaggatgagacatctagctctaggcaaccaacccatgccaagttgcctagaaagaaaatttctaatgcatcaaatgaacatagcatttcatttaagacttttgatgcttcttatgttttgactaacaaatccggcaaggtcgttgccaagtttgttgggggcaagcacaagggttccaagacttgtgtttgggtacccaaagttcttgtatctaatgccaaaggacccaaaacagtttgggtttatgcatccgggggctcaagttggatactcgacagcgggtgcacaaaccacatgacaggggagaaaaggatgttctcctcatatgagaaaaaccaagatccccaacgagctatcacattcggggatggaaatcaaggtgtcactgtctttagaagaagtgatgattcaatagcttttaagggagtgttagagggtcagctatacttggtagattttgatagagctgaactcgacacttgcttaattgctaagactaatatgggttggctctggcaccgccgactagcccatgttgggatgaagaatcttcataagcttctaaagggagagcacattttaggattaacaaatgttcattttgagaaagacaggatttgtagcgcatgccaagcagggaagcaagttggcactcatcatccacacaagaacataatgacgactgacaggccactggagctcctacacatggatctattcggcccgatcgcctacataagcatcggcgggagtaagtactgtctagttattgtggatgattactctcgcttcacttgggtattctttttacaggaaaaatctcaaacccaagagaccttaaaaggattcttgagacgggctcaaaatgagttcggcttgaggatcaagaagattagaagcgataacgggacggagttcaagaactctcaaattgaaggctttcttgaggaggagggcatcaagcatgagttctcttctccctacactccacaacaaaatggtgtagtggagaggaagaatcgaactctattggacatggcaagaaccatgcttgatgagtacaagacaccggaccggttttgggccgaagcggtcaacaccgcctgctacgccatcaaccggttatatctgcaccgaatcctcaagaagacatcatatgaactcctaaccggtaaaaagcccaacatttcatattttagagtttttggtagcaaatgcttcattcttattaaaagaggtagaaaatctaaatttgctcctaaaactgtagaaggctttttacttggttatgactcaaacacaagggcatatagggtctttaacaagtccactggactagttgaagtctcatgtgacgttgtgtttgatgaaactaacggctctcaagtagagcaagttgatcttgatgaagtaggtgaagaacaggctccatgcatagcgcttaggaacatgtccattggagatgtgtgtcctagggaatccgaggagcctccaaatgcacaagatcaaccatcatcctccatgcaagcatctccaccaactcaaaatgaggatgaggctcaagttgatgaagggcaaaatcaagaagatgagccacctcaagataatggcaatgatcaagggggagatgcaaatgatcaagaaaaggaggatgaggaagaaccaagaccgccacacccaagagtccaccaagcaatccaacgagatcaccccgtcgacaccatcctcggcgacattcataagggggtaactactcgatctcgggttgctcatttttgtgaacattactcttttgtttcctctattgagccacacagggtagaggaagctctccaagattcggattgggtggtggcgatgcaagagcagctcaacaatttcacgaggaatgaggtctggcatttagttccacgtcctaaccaaaatgttgtaggaaccaaatgggtcttccgcaacaagcaagatgagcatggtgtggtgacaaggaacaaagctcgactcgtagccaaagggtattcacaagtcgaaggtttggatttcggtgaaacctatgcacccgtagctaggcttgagtcaattcgcatattattggcctatgctacttaccatggctttaagctctatcaaatggacgtgaaaagtgccttcctcaatggaccgatcaaggaagaggtctatgttgagcaacctcccggctttgaagacagtgagtatcctaatcatgtctataggctctctaaggcgctttatgggctcaagcaagccccaagagcatggtatgaatgccttagagatttccttattgctaatggcttcaaagtcggcaaggccgatcctacactctttactaaaactcttgaaaatgacttgtttgtatgccaaatttatgttgatgatattatatttggatctactaacgagactacatgtgaagagtttagtaggatcatgacacagaaattcgagatgtcgatgatgggggagttgaagtattttctaggattccaagtcaagcaactccaagagggcaccttcattagccaaacgaagtacactcaagacattcttgctaagtttgggatgaaggatgccaaacccatcaagacacccatgggaactaatgggcatctcgacctcgacacgggaggtaagtccgtggatcaaaaggtataccggtcgatgattggttcattgctttatttatgtgcatctcgaccggacattatgctttccgtttgcatgtgtgcaagattccaatccgaccctaaggaatcccaccttacggccgtaaaacgaatcttgagatatttggcttatactcctaagtttgggctttggtaccctcggggatccacttttgatttgattggttattcggatgccgattgggcggggtgtaagatcaataggaagagcacatcggggacttgccagttcttgggaagatccttggtgtcatgggcttcaaagaagcaaaattcggtcgctctttccaccgccgaagccgagtacattgccgcaggacattgttgcgcgcaattgctttggatgaggcaaaccctgcgggactacggttacaaattaaccaaagtccctttgctatgtgataatgaaagtgcaattaaaatggccgacaatcccgtcgagcatagccgcactaagcacatagccattcggtatcattttcttagggatcaccaacaaaagggggatatcgagatttcttacattaacactaaagatcaattagccgatatctttaccaagccacttgatgaacaatcttttaccagacttaggcatgagctcaatattcttgattctagaaatttcttttgctaa

SEQ ID NO: 4905 - DNA, 4824 bp, Zea mays
  Clone ID: TF_ZM4576.C2.o1.fg
acatctggcgtgtcacattgggacacgctaaagaccgcgcacaaaggagacgaggtgaccaaaatcaccaagcgggaaacgatcgagggggagctcggacgcttccaacttcgccaaggggaggagccacaagatatgtacaaccggctcaaaaccttggtgaaccaagtgcgcaacctcgggagcaagaaatgggatgaccatgagatggtcaaggaggtaataggaaactttgtgagctttaaattgatgatcaaaggctcaaagaagatcaacgagcttgatggcccctctacgtccgaagctcaaccagtcacattcaaagcgatggaggaaaagaaggaggagtctacttcaagtagacaaccaatcgacgcctcaaagctcgacaatgaggagatggcactcatcatcaagagcttccaccaaatcctcaagcaaaggagggggaaggattacaagccccgctccaagaaagtttgctacaagtgtggtaagcccggtcactttatagcaaaatgtcctatttctagtgacagtgacaggggcgacgacaagaagggaagaagaaaggagaagaatagatactacaagaagaagggtggcgatgcccatgtatgccgcgaatgggactcggacaagagctcctctgactcttccttcgacgaggacgccgccaacatcgccgtcaccaagggtcttctcttccccaacgtcggccacaagtgcctcatggcaaaggtcagcaaaaagaagaaggtaaaatcaagatcctccactaaatatgaaacctctagtgatgaggatgatgctagcaatgaggaggataacttgcgcattctttttgccaacctaaacatgcaacaaaaagaaaaattaaatgaattgattagtgctattcatgagaaggatgatctcttggacacccaagaggacttccttattaaagagaacaaaaagcatgttaaggttaaaaatgcttacgctctagaagtagaaaaatgtgaaaaactatctagtgagctaagcacttgccatgagactatagacaaacttagaaatgagaatgctaatttgttagctaaggttgattcaaatgtttgtgatgtttcaattcccaatcttagaaatgataatgatgatttgcttgataagattgaagaattaaacatttctcttgctagccttaggattgagaatgaaaaattgcttactaaggctaaagaacttgatgtttgcaatattacaatttccgatcttagagataaaaatgatatattgcgtgctaagattgttgaacttaattcttgcaaaccctctacatctaccactgagcatgtcactatttgtactagatgtagagatgttgatgttaatgctatacatgatcacctttccatgattaaacaacaaaatgatcatatagctaaattagatgctaaaattgccgagcatgaactagaaaatgaaaaatttaagtttgctcgtagtatgctttataatgggagacgccctggcattaaggatggcgttggcttccaacagggaggaaatgtcaaacttaatgcccctcctaaaaaattgtccaactttgtgaagggcaaggctcccatgcctcaggataacgagggttacattttgtaccctgccggttatcccgagagcaaaattaggagaattcattctaggaagtctcactctggctctaaccatgcttttatgtataagggtttatgcatccgggggctcaagttggatcatcgacagcgggtgcacaaaccacatgacaggggagaagaagatgttctcctcctacgagaaaaactaagaccccaacgagctatcacattcggggatggaaatcaaggtgtcactgtctttagaagaagtgatgattcagtagcatttaagggagtgttagagggtcagctatacttggtagattttgatagagctgaactcgacacttgcttaattgctaagactaacatgggttggctctggcaccgccgactagcccatgttgggatgaagaatcttcataagcttctaaagggagagcacattttaggattaacaaatgttcattttgagaaagacaggatttgtagcgcatgccaagcaggaaagcaagttggtgctcatcatccacacaagaatatcatgacgactgacaggccgctggagctcctacacatggacctattcggcccgattgcttacataagcatcggcgggagtaagtactgtctagttattgtggatgattattctcgcttcacttgggtattctttttgcaggaaaaatctcatacccaggaaaccttaaagggattcttgagacaggctcaaaatgagttcggcttaaggatcaagaaaattagaagcgacaatgggacggagttcaagaactctcaaattgaaggcttccttgaggaggagggcatcaagcatgagttctcttctccatacaccccacaacaaaatggtgtagtggagaggaagaatagaactctattggacatggcaagaaccatgcttgatgagtacaagacttctgatcggttttgggccgaggcggtcaacaccgcctgctacgccatcaaccggctgtatctacaccgaatcctcaagaagacatcatacgaactcctaaccggtaaaaagcccaaaatttcatattttagagtctttggtagcaaatgctttattcttattaaaagaggtagaaaatctaaatttgctcctaagactgtagaaggctttttactaggatatgattcaaacacaagggcatatagagtctttaacaagtcctctggacaagttgaagtttcttgtgacgttgtgtttgatgaaactcacggctctcaagtagagcaagttgatcttgatgagataggtgatgaagaggctctgtgcatcacgctaaggaacatgtccattggggatgtgtgtcctaaggaatccgaagagcctccaaatgcacaagatcaaccatcctcttccacgcaagcatctccaccaactcaaaatgaggatgaggctcaagttgatgaaggagaagatcaaagagacgagccacctcaagatgacgacaatgatcaagggggagatgcaaatgatcaagacaaagaggatgaagaactaagaccgccacacccaagagtccaccaagcaatccaacgagatcaccccgtcgacaccatcctcggcgacattcataagggggtaaccactagatcttgtgttgctcatttttgtgaacattactcttttgtttcctctattgagccacacagggtagaggaagcacttcaagattcggattgggtggtggcgatgcaagaggagctcaacaacttcactaggaacgaggtatggcatttggttccacgtcctaatcaaaatgttgtaggaaccaagttggtgttccgcaacaagcaagacgagcatggtgtggtgacaagaaacaaagcccgacttgtggccaagggatactcccaagtcgaaggtttggatttcggtgaaacttatgcacccgtagctaggcttgagtcaattcgtatattattggcctatgctacttaccatggcttcaagctttatcaaatggacgtgaagagtgccttcctcaatggaccaatcaaggaagaggtctatgttgagcaacctcccggctttgaagatagtgagtaccctaactatgtatacaaactctctaaggcactttatgggctcaagcaagccccaagagcatggtatgaatgccttagagatttccttatcactaatggattcaaagtcggaaaggccgatcctactcttttcactaaaacccttgacaatgatttgtttgtatgccaaatttatgttgatgatattatatttgggtctactaacgaatctacatgtgaggaatttagtaggatcatgacacaaaagttcgagatgtcaatgatggcggagttgaagtacttcttggaatttcaagtgaagcaactccaagagggcaccttcattagccaaacaaagtatactcaagatattctaagcaagtttgggatgaaggatgccaaacccatcaagacacccatgggaaccaatgggcatctcgacctcgacagggaaggtaaatccgtcgatcaaaaggtataccggtcgatgatagggtctttactctatttatgtgcatctcgaccggatattatgctttccgtatgcatgtgtgcaagattccaagccgaccctaaggaagctcaccttacggccgtaaaacgaatcttgagatatttagttcatactcctaagtttgggctttggtatcctcggggatccacatttgatttaattggttattcggatgccgattgggcggggtgtaaaattaatagaaagatcacatcggggacttgccagttcttgggaagatccttggtgtcttgggtttcaaagaagcaaaattccgtatctctttctaccgccgaagcagagtatattaccgcaggacattgttgcgcgcaactactttggatgaggcaaacccttagggactatggttacaaattaaccaaagttcgtcttctatgtgataatgagagtgcaatccgcatggcggataatcccgttgagcatagccgcactaaacacatagccattctgtatcatttcttaagggatcaccaacaaaagggagatatcgagattgcatatattaacactaaggaacaattagctgatatctttaccaagccactagatgaacaaacttttaacaaacttaggcatgagctaaatattcttgattctaggaatttcttttga

SEQ ID NO: 4906 - DNA, 3057 bp, Zea mays
  Clone ID: TF_ZM4589.C1.o2.fg
atgtcgggagatcacgccaagaaggaaatggagaccggcgaaaagcccactacaagcaacgagaaagctctatcaggagagtcccacaacaaggagaagaggaaggagaagaagaaggaaaagaagacttcttctcacaagtcgcatcggagtggcgacaaaattaagaagatgaggaaggtggtctactacgagaccgacacttcatcgccatctacctccggctccgacgcgccctccataacttctaagcgccatgagcgcaagaagtttagtaagattcccttacattatcctcgtacctctagacatactccattactttccattccattaggcaaaccgccaacctttgacggtgaagattatgctaggtggagtgatttaatgaaatttcatctaacctcactccacaagagtatatggaatgttgttgagtttggagcacaggtaccatccgtaggggatgaggattatgatgaggacgaggtggcccaaattgagcacttcaactcccaagccacatcaatactcctcgcctctctaagtagggaggagtacaacaaggtgcaaggactaaaaagcgccaaggaggtttgggacatgctcaagacggcgcacgaaggtgatgaactcaccaaaatcaccaagcgggaaacgatcgagggggagctcggtcgcttccgtcttcgccaaggggaggagccacaagacatgtacaaccggctcaaaaccttggtgaaccaagtacgcaacctcgggagcaaaaagtgggatgaccacgaggtggttaaggttattctaagatctcttattttccttaaccctactcaagttcaattaattcgtggtaatcctagatatacactaatgactctcgaggaagtaatcgggaattttatgagctttgaatttatgatcaaaggctcacgaaagatcaacgagcttgacagtccctccacgtccgaagctcaatcggtcgcattcaaagcgacggaagaaaagaaggaggagtctacaccaagtagacaaccaatcgacgcctccaagctcgacaacgaggagatggcgcttgtcatcaaaagctttcgccaaatcctcaagcaaaggaaggggaaggattacaagccccgctccaagaaggtttgctacaagtgtggtaagcccggtcactttattgcaaaatgtcctatttctagtgacagtgacaggggcgatgacaagaaggggagaagaaaggagaagaagaggtactacaagaagaagggcggcgatgcccatgtttgtcgagagtgggactccgacgaaagctctagcgactcctccgacgacgaggacaccgccaacatcgccgtcaccaagggacttctcttccccaacgtcggccacaagtgcctcatggcaaaggacggcaaaaagaaggttaaatccaaatcctccactagatatgagtcttctagtgatgaaaatgctagtgatgaggaagataatttacgtactctttttgccaacttaaacatgcaacaaaaagagaaattaaatgaattaattagtgccatccatgagaaggatgatctcttggactcccaagaggacttcctaatcaaggaaaacaaaaagcatgtgaaagttaaaaatgcttacgctctagaagtagagaaatgtgaaaaactatctagtgagctaagcacatgccatgaaactatagacaaccttagaaatgtgaattctaatttattagctaaggttgattcaaatatttgtaatgtttcaattcccaatcttagaaataataatgatgatttgcttgctaagattgaagagttgaacatttctcttgctagccttagagatgaaaatgaaaaattgcttgctaaggctaaagatttcgatgtttgcaataccactatttccgaccttagaagtagaaatgatatattacatgctaaggttgtagaattaaaatcttgcaaaccctctacatctaccattgagcacacttctatttgcactagatgtagagatgttaatattgatgctattcatgatcacatggctttaattaaacaacaaaatgatcacatagctcaacttaatgctaaaatcaatgagcatgacttagaaaatgaaaaatttaaatttgctagaagcatgctctatagtgggagacaccctggcattaaggatggcattggcttccaaaagggggacaatgtcaaacttaatgcccctcctaagaaattgtctaattttgttaagggcaaagctcccatgcctcaggataacgagggttacattttgtaccctgccggttatcccgagagcaaaattaggagaattcattctaggaagtctcactctggccctaatcatgctttcatgtataagggtgagacatctagctctaagcaaccaacccgcgctaagttgcctaaaagaaaaactcctagtgcatcaaatgaacatagcttttcattcaaaacttttgatgcaccatatgttttaactaacaaatccagcaaagtagttgccaaatatgttgggggcaagcacaaggggtcaaagacttgtgtttgggtacccaaagttcttgtgtctaatgccaaaggacccaaaaccatttgggtttatgcatccgggggctcaagttggattatcgacagcgggtgcacaaaccacatgacaggggagaagaagatgttctcctcctatgagaaaaaccaagatccccacgagccattacattcggggatggaaatcaagactaacatgggctggctctggcaccgccgactagcacatgttgggatgaagaatcttcataagcttctaaagggagagcacattttaggattaacaaatgttcattttgagaaagataggatttgtagcgcatgccaagcaggaaagcaagttggtgtccatcatccacacaagaacatcatgacgactgacaggccactggagctcctacacatggatctattcggcccgattgcttacataagtgaaagggaaatgtgcccttgggtcatttctaagtattttggtgattga

SEQ ID NO: 4907 - DNA, 4245 bp, Zea mays
  Clone ID: TF_ZM4623.C5.o1.fg
atgtcgggagaacacgccaagaaggagatggagactggcgacaagcccactacaagccacgggaaggctacatcgcaagagtcccgcaacaaagggaaggggaaggagaagaaagcctcttcccacaagtcgcatcggagtggcgacaagaaaaagaagatgaggaaggtggtctactacgagaccgacacttcatcaccttccacctccggctccgacgcgccctccataacttctaagcgccatgagcgcaagaagtttagggatgaggattatgatgaggacgaggtggcccaaatcgagcacttcaactcccaagccacaactatactcctcgcctctttaagtcgagaggagtataacaaggtgcaaggattaaagagcgccaaggaagtttgggacgtgctcaagaccgcgcacgaaggagatgagctaaccaagatcaccaagcgggagacgatcgagggggagctcggtcgctttcggcttcgcaaaggggaagagccacaagacatgtacaactggctcaaaaccttggtgaaccaagtgcgcaacctcgggagcaaaaagtgggatgaccacgagatggttaaggaagtaatcgagaattttgtgagctttgagtatatgatcaagggcttaaagaaaatcaacgagctagatgatccctccacatccgaagcacaatcgattgcattcaaagcaacggaggagaagaaggaggagtctacgtcaagtagacaaccaatcgacgcctcaaagctcgacaatgaggaaatggcgctcgtcatcaagagcttccgccaaatcctcaaacaaaggagggggaaggactataaaccccgctccaagaaagtgtgctacaagtgtggtaagcccggtcactttatagcaaaatgtcctatttctagtgacagtgacaggggcgacgacaagaaggggagaagaaaggagaagaagaagtactacaagaagaagggcggtgatgcccatgtttgccgggagtgggactccgacaagagctccaccgactcctcctccgacgaggacgccgcaaacatcgccatcaccaagggacttctcttccccaacgtcggccacaagtgcctcatggtcaaggacggcaaaaagaagaaggttaaatccaaatcctccactagatatgagtcctctagtgatgataatgctagtgatgaggaagataatttgcgtaccctttttgccaacttaaacatgcaacaaaaagagaaattaaatgaattgattagtgctatccatgagaaggatgatctcttggacacccaagaggacttccttattaaagaaaataagaagcatgttaaagttaaaaatgcttatgctctagaagtagaaaagtgcgaaaaattatctagtgagctaagcacttgccatgagactatagacaaccttagaagtgaaaatgctgatttgttagctaaggttgattcaaatgtttgcaatgtttcaattcccaatcttggaaatgataatgatgatttgcttgctaagattgaagaattaaacatttctcttgctagccttaggattgagaatgaaaaattaattgctaaggctaaagaattagatgtttgcaatgttacaaattctgatcttagagataaaaatgatatattgcatgctaagattgttgaacttaattcttgcaaaccctctacatctatcattgaacatactactatttgcactagatgtagagatgttaacattgatgctattcatgatcacatggctttaattaaacaacaaaatgatcatatagcaaaattagatgctaaaattgccgagcatgacttagagaatgaaaaatttaaatttgctagaagcatgctctatagagggagacgccctggcattaaggatggcattggcttccaacagggaggcaatgtcaaacttaatgcccctcctaagaaattgtctaactttgttaagggcaaggctcccatgcctcaggataacgagggttacattttgtaccctgccggttatcccgaggacaaaattaggagaattcactctaggaagtctcactctggacctaaccatgcttttatatataagggtgagacatctagttctaggcaaccaacccgtgctaagttgcctgaaaagaaaactcctagtgcatcaaatgatcatgacatttcatttaaaacttttgatgcatcttatgttttaactaacaaatccggcaaggtttatgcatccgggggctcaagttgggtaatcgaaagcggatgcacaaaccacatgacaggggagaaaaagatgttctcctcctacgagaaaaaccaagatccccaacgagctatcacattcggggatggaaatcaaggattaacaaatgttcattttgagaaagacaggatttgtagcgcatgccaagcagggaagcaagttggaacccatcatccacacaagaacatcatgacgaccgacaggccactggagctcctacacatggatctattcggcccgattgcttacataagcatcggcgggaaaaaatctcacacccaagagaccttaaagggattcttgagacgggctcaaaatgagttcggcttgagaatcaagaaaattagaagcgacaacgggacggagttcaagaactctcaaattgaaggcttccttgaggaggagggcatcaagcatgagttctcttctccctacaccccacaacaaaatggtgtagtagagaggaagaatagaactctattggacatggcaagaaccatgcttgatgagtacaagactttggatcggttttgggccgaggcggtcaacaccgcctgctacgccatcaaccgagtctttggtagcaaatgctttatacttgttaaaagaggtagaaaatctaaatttgctcctaagactatagaaggctttttactagtatatgattcgaacacaagggcatatagagtctttaacaagtcctctggacaagttgaagtttcttgtgacgttgtgtttgatgagactaacggctctcacgtagagcaggttgatcttgatgagataggtgttgaagaggctccgtgcatcgcgctaaggaacatgtccattggggatgtgtgtcctaaggaatccgaagagcctccaaatgcacaagatcaaccatcctcctccacgcaagcatctccaccaactcaaaatgaggatgaggctcaagttgatgaagggcaagatcaagaagatgagccacctcaagatgatggcaatgatcaagggggagatgcaaatgatcaagacaaggaggatgaagaaccaaggccgccacacccaagagtccaccaagcaatccaacgagatcaccccgtcgacaccatcctcggcgacattcataagggggtaactactagatctcgtgttgcacatttttgtgaacattactcttttgtttcctctattgagccacacagggtagaggaagcacttcaagattcagattgggtggtggcgatgcaagaggagctcaacaacttcactaggaatgaggtatggcatttggttccacgtcttaaccaaaatgttgtaggaaccaagtgggtttgccgcaacaagcaagatgagcatggtgtggtgacaaggaacaaagctcgacttgtggccaagggatactaccaagtcgaaggtttggatttcggtgaaacctatgcacccgtagctaggcttgagtcaattcgtatattattggcctatgctacttaccatggcttcaagctttatcaaatggacgtgaaaagtgccttcctcaatggaccaatcaaggaagaggtctatgttgagcaacctctcggctttgaagataagtttagtaggatcatgacacagaaattcgagatgtctatgatgggggagttgaagtatttcttgggatttcaagtgaagcaactccaagagggcaccttcattagccaaacgaagtatactcaaaacattctaaacaagtttgggatgaaggatgccaaacccatcaagactcccatgggaaccaatgggcatctcgacctcgacacgggaggtaaatctgtagatcaaaagaaagagcacatcggggacttgccagttcttgggaagatccttggtgtcttgggcttcaaagaagcaatattccgtagctctttcaaccaccgaagccgagtatattgccgcaggccattgttgcgcgcaattgctttggatgaggcaaacccttag

SEQ ID NO: 4908 - DNA, 5310 bp, Zea mays
  Clone ID: TF_ZM4628.C5.o1.fg
atgtcgggagatcacgccaagaaggagatggagaccggcgaaaagcccactacaagccgcgggagcacttcatcggaagagtcccgcaccaagaggaaggacaagaagaaggactcctccaaacggaaggagaaaaagtcttcctcttctcaccaccaagagaagaaggaaaaatcttcttcccacaagccgcatcggaaaggcgacaagcataagaggatgaggaaggtggtctactacgagaccgacacttcatcaacttctacctccgactccgatgcgccctccgtcacttctaagcgccaagagcgcaagaagtatagtaagatccccctacgctaccctcgcatttccaaacatacacctttactttccgtcccattaggcaaaccaccaacttttgatggtgaagattacgctaggtggagcgatttaatgcgatttcatctaacctcgctccacaaaagcatatggaatgttgttgagtttggtgcgcaggtaccatccgtaggggatgaggattatgatgaggatgaggtggcccaaatcgagcacttcaactctcaagctacaacaatactcctcgcctctctaagtaaagaggagtataacaaagtacaaggattgaagagcgccaaggagatttgggatttactcaagaccgcgcatgaaggtgatgagctcaccaagatcaccaagcgggaaacgattgagggggagctcggtcggttccggcttcgaaaaggggaggagccacaacacatgtacaatcggctcaagaccttggtgaaccaagcgcgcaacctcgggagcgtaaagtgggatgaccacgaggtggttaaggttattctaagatcacttattttccttaaccctactcaagttcaattaatccgtggtaatcctagatatactaaaatgacccccgaggaagttatcgggaattttgtaagttttgagtgcatgatcgaaggctcgaggaagatcaacgagcttgatgatgccaccacatccgaagctcaacccgttgcattcaaggcaacggaggaaaagaaggaggagtctacaccaagtcgacaaccaatagacgcctccaagctcgacaatgaggaaatggcgctcgtcatcaagagcttccgccaaatcctcaagcaaaggagggggaaggatcacaagtcccgctccaagaaggtttgctacaaatgtggtaagcccggtcattttattgctaaatgtcctatatctagtgacagtgaccgaggcgacgacaagaaggggagaagaaaggagaagaagaggtactacaagaagaagggcggcgatgcccatgtttgtcgcgagtgggactccgacgagagctcaagcgacttctccgacgacgaggacgccgccaacatcgccgtcaccaagggactcctcttccccaacgtcggccacaagtgcctcatggcaaaggacggcaaaaagaaggttaaatctaaatcctccactaaatatgaatcctctagtgatgacaatgctagtgatgaggaagataatttgtgttccctttttgccaaccttaacatagctcaaaaagaaaaattaaatgaattggttagtgctattcatgaaaaggatgaccttttggattcccaagaggattgtctaattaaagaaaacaaaaaacacgttaaggttaaaaaggcctatgctcttgaaattgagaaatgtgaaaaattatctagtgagctaagcacttgtcgtgagatgattgacaaccttagaaatgaaaatgctattttaaatgctaaggttgattcacatgtttgtaatgtttcaattcccaatcttagagatgataatgttgacttgcttgctaagattgatgaattgaatgtttctcttactagccttagaattgagaatgaaaaattgcttgctaaggctaaggactttgatgtttgcaatactaccatttccgaccttagaactaagaatgatatcttgcatgctaaggttgtagaattaaaatcttgcaaaccctctacatctattgttgagcatgtatctatttgtactagatgtagagatgttgatgttaatgctattcatgatcatatggctttaattaaacaacaaaatgatcatatagcaaaactagatgctaaaattgccgagcataacttggaaaatgaaaaatttaaatttgctagaagtatgctctataatgggagacgctctggcattaaggatggcattggctaccaaaggggagacaatgtcaaacttaatgcccctcctaagaacttgtctaattttgttaagggcaaggctcccatgcctcaggataacgagggttacattttataccctgccggttatcctgagagcaagattaggagaattcattctaggaagtctcactctggccctaatcatgcttttatgtataagggtgagacatctagctctaggcaaccaacccgtgctaagttgcctaagaaaactcctattgcatcaaataagcataacatttcatttaagacttttgatgcatcttatgtgttgactaacaaatccggcaagatagttgccaaatatgttgggggcaagcacaaaggctccaagacttgtgtttgggtacccaaagttcttgtgtctaatgccaaaggacccaaaaccatttgggtttatgcatctgggggctcaagttggatactcgacagcgggtgcacaaaccacatgaccggggagaaaaggatgttctcctcatatgagaaaaaccaagatccccaacgagctatcacattcggggatggaaatcaaggtgtcactgtctttagaagaagtgatgattcaatagcatttaagggtgtgttagagggtcagctatacttggtagattttgatagagctgaactcgacacatgcttaattgctaagactaacttgggttggctctggcaccgccgactagcccatgttgggatgaagaatcttcataagcttctaaagggagaacacattttaggattaacaaatgttcattttgagaaagacaggatttgtagcgcatgccaggcggggaagcaagttggagcccatcatccacacaagaacatcatgacgaccgacaggccgctagagctgctccacatggatctattcggcccgattgcttacataagcatcggcgggagtaagtattgtcttgaaaaatctcaaacccaagagactttaaagggattcttgagacgggctcaacatgagttcggcttaaggatcaagaaaataagaagcgacaacgggacggagttcaagaactctcaaattgaaggcttccttgaggaggagggcatcaagcatgagttctcttctccctacacacctcaacaaaatggtgtagtggagaggaagcatcgaactctattggacatggcaagaaccatgcttgatgagtacaagacaccggaccggttttgggccgaagcggtcaacaccgcctgctacgccatcaaccggttatatcttcaccgaatcctcaagaagacatcctatgaactcctaaccggtaaaaagcccaacatttcatactttaaagtttttggtagcaaatgctttattcttgttaaaagaggtagaaaatcaaaatttgctcctaaaacagtagaaggctttttacttggttatgactcaaacacaagggcatatagggtctttaacaagtccactggactagttgaagtctcatgtgacgttgtgtttgatgaaactaacggctctcaagtagagcaagttgatcttgatgagataggtaatgaagaggctccatgcatcgcgctaaggaacatgtccattggggatgtgtgtcctaaggaatccgaagagcctccaaatgcacaagatcaaccatcctcctccatgcaagcatctccaccaactcaaaatgaggatgaggctcaagttgatgaagggcaaaatcaagaagatgagccacctcaagataatggcaatgatcaagggggagatgaaaataatcaagaaaaggaggatgaggaagaaccaaggccgccacacccaagagtccaccaagcaatacaacgagatcaccccgtcgacaccatcctcggcgacattcataagggggtaaccactcgatctcgtgttgcacatttttgtgaacattactcttttgtttcctctattgagccacacagggtagaggaagcactacaagattcggattgggtggtggcgatgcaagaggagctcaacaacttcacgaggaatgaggtatggcacttggttccacgtcctaaccaaaatgttgtaggaaccaaatgggtcttccgcaacaagcaagatgagcatggtgtggtgacaaggaacaaagctcgacttgtggccaagggatactcccaagtcgaaggtttggatttcggtgaaacctatgcacccgtagctaggcttgagtcaattcgcatattattggcctatgctacttaccatggctttaagctttatcaaatggacgtgaaaagtgccttcctcaacggaccaatcaaggaagaggtctatgttgagcaacctcccggctttgaagacagtgagtaccctaaccatgtctataggctctctaaggcgctttatgggctcaagcaagccccaagagcatggtatgaatgcctaagagatttccttattactaatggcttcaaagtcggcaaggccgatcctactttattcactaaaactcttgacaatgatttgtttgtatgccaaatttatgttgatgatattatatttgggtctactaacgaatctacatgtgaagaatttagtaggatcatgacaaagaaattcgagatgtctatgatgggggagttgaagtattttctaggatttcaagtgaagcaactccaagagggcaccttcatcagccaaacgaagtacactcaagacatcctaagcaagtttggaatgaatgatgccaagcccatcaaaacacccatgggaacaaatgggcatctcgacctcgacacgggaggtaagtccgtggatcaaaagtctatttcaaaccaagtcataggtatattgaaagggaattggagtcttcggcgaagacaaaggcttccactccgtaactcatccttcgccatcactccaaccatctctctattctttgggggagaaatgagcatcaaagaaaaggacttcgtctttggtataatcttaacccatttatttatgaccaaagagaaagatagcaccaagagggctctaatgattccgtttttggcgattcatgccaaaaagggggagaaatga

SEQ ID NO: 4909 - DNA, 5112 bp, Zea mays
  Clone ID: TF_ZM4635.C5.o5.fg
atgtcgggagatcacgccaagaaggagatggagaccggcgacaagcccactacaagccacgggaaggcttcatcggaagagtcccgcaacaaagggaaggggaaggagaagaaatcctcttcccacaagtcgcatcggagtggcaacaacaaaaagaagatgaggaagatggtctactacgagaccgatacttcatcaccttccacctccggctcgaacgcgccatccattacttctaagcgccatgagcgcaagaagtttagtaagacccccctacactatcctcgcattcctaaacatacgcctttactttccgtctcattaggcaaaccaccaacgtttgatggtgaagattatgctaggtggagtgatttaatgcgatttcacctaacctcactccacaaaagtatatgggacattgttgagtttggtgtacaggtaccatctgtaggggatgaagattatgatgaggacgaagtggcccaaattcaacacttcaactcccaagcctcaactatactcctcgcctctctaagtcgagaggagtataataaggtgcaagggttgaaaggtgctaagaagatttgggacacgctaaagacctcgcacgaaggagacgaggtgaccaaaatcaccaagcgggagacgatcgagggggagcttgatcgcttccgacttcgccaaggggaggagccacaagacatgtacaaccggctcaaaaccttggtgaaccaagtgcgcaacctcaggagcaaaaaatgggatgaccacgagatagttaaggttattctaagatcacttgttttccttaaccctactcaagttcaattaattcgtggcaatcctcgatatacactaaggactcccgaggaagtaatcgggaattttgtgagctttgaattgatgatcaaaggctcaaagaagatcaacgagcttgacggcccctccacgtccgaagcacaaccggtcgcatttaaggcgacagaggagaagaaggaggagtctacatcgagcagaacacccatcgacgcctccaagctcgataacgaggaaatggcgctcatcatcaagagcttccgtcaaatcctcaagcaaaggagggggaagaactacaaaccctgctccaagaaagtttgctacaagtgtggtaagcccggtcactttattgcaaaatgtcctatttctaatgacagtgacaggggcgacgacaagaagggaagaagaaaggagaagaaaaagtactacaagaagaagggcgacgatgcccatgtatgtcgcgagtgggactccgacgaaagctctagtgactcctcctccgacgaggacgccgccaacatcgctgtcaccaagggtcttctcttccccaacgtcagccacaagtgcctcatggcaaaggacggcaaaaagaagaaggtaaaatcaagatcctccaccaaatatgaaacctctagcgatgaggataatgctagtaatgaggaggataacttacgcattctttttgccaacctaaacatgcaacaaaaagaaaaattaaatgaattgattagtgttattcatgagaaggatgatctcttggacacccaagaggacttccttattaaagaaaataagaagcatgttaaggttaaaaatgcttatgctctagaagtagaaaaatatgaaaaactatctagtgagctaagcacttgccatgagactattgacaaccttagaaacaacaatgctaaacttattgctaaggttgattcaaatgcttgtaatgtttcaattcccaatcctagaaatgataatgttgatttgcttgctaagattgaagaattgaacatttctcttgctagccttagggatgaaaataaaaaattgcttgctaaggctaaagaattagatgtttgcaatgcctccatttccgaccttagaagtaaaaatgatatattgcatgctaaggttgtagaattaaaatcttgcaaaccctctacatctatcgttgagcacacttccatatgtactagatgtagagacattaatgttgatgctatccatgatcacctagctttaattaaaaaacaaaatgatcacatagctcaactaaatgctaagattagtgagcatgacctagaaaacgaaaaatttaaatttgctagaagcatgctctatagcgggagacgccctagcatcaaggatggcattggcttccaaaagggggacaatgtcaaacttaatgcccctcctaaaagattgtctaattttgtaaagggcaaggctcccatgcctcaggataacgagggttatattttgtatcctgccggttatcccgagagcaaaattaggagaattcattctaggaagtctcactctggccctaaccatgcttttatgtataagggtgagacatctagttctaggcaaccaacccgtgctaagttgcctaagaagaaaactcctagtgcatcaaatgaccatagcatttcatttaaaacttttgatgcatcttatgtgttaactaacaaatccggcaaggtttacgcatccgggggctcaagttggatcatcgatagcgggtgcacaaaccacatgacaggggagaagaaaatgttctcctcctacgagaaaaaccaagatccccaacgagctatcacattcggggatggaaaccaaggtttagtcaaaggtgccactgtctttagaagaagtgatgattcaatagcatttaagggagtgttagagggtcagctatacttggtagattttgatagagctgaactcgacacttgcttaattactaagactaacatgggttggctctggcatcgccgactagcccatgttgggatgaagaatcttcataagcttctaaagggagagcacattttaggattaacaaatgttcattttgagaaagacaggatttgtagtgcatgccaagcagggaagcaagttggtgttcatcatccacacaagaacatcatgacgactgacaggccactggagatcctacacatggacctattcggcccgatagcttatataagcatcggcgggagtaagtattgtctagttattgtggatgattattctcgcttcacttgggtattctttttgcaggaaaaatctcatacccaagagaccttaaaaggattcttgagacgggctcaaaacgagttcggcttaaggatcaagaaaattagaagcgacaacgggacggagttcaagaactctcaaattgaaggcttccttgaggaggagggcatcaagcatgagttctcttctccctacaccccacaacaaaatggtgtagtggagaggaagaatagaactctattggacatggcaagaaccatgcttgatgagtacaagacttcggatcggttttgggccgaggcggtcaacaccgcctgctacgccatcaaccgagtctttggtagcaaatgctttattcttgttaaaagaggtagaaaatctaaatttgctcctaagactgtagaaggctttttactaggatatgattcaaacacaagggcatatagagtctttaacaagtcctctggacaagttgaagtttcttgtgacgttgtgtttgatgagactaacggctctcaagtagagcaagttgatcttgatgagataggtgatgaagaggctccgtgcatcgcgcttaggaacatgtccattggggatgtgtgtcctaaggaatccgaagagcctccaaatgcacaagatcaaccatccttctccacgcaagcatctccaccgactcaaaatgaggatggggctcaagttgatgaagaaagagatcaaaatgatgagccacctcaagatgacgacaatgatcaagggggagatgcaaatgatcaagacaaggaggatgaagaaccaaggccgccacacccaagagtccaccaagcaatccaacgagatcaccccgtcgacaccattctcggcgacattcataagggggtaacaactagatcttgtgttgcacatttttgtgagcactactcttttgtttcctctattgagccacccagggtagaggaggcacttcaagattcgaattgggtggtggcgatgcaagaggagctcaacaacttcactagcaacgaggtatggcatttggttccacgtcctaatcaaaatgttgtaggaaccaagtgggttttccacaacaagcaagacgagcatggtgtggtgacaaggaacaaagcccgacttgtggccaaaggatactcccaagtcgaaggtttggatttcggtgaaacctatgcacccgtagctaggcttgagtcaattcacatattattagcttatgctacttaccatggcttcaagccttaccaaatggacgtgaagagtgccttcctcagtggaccaatcaaggaaaaggtctatgttgagcaacctcccggctttgaagatagtgagtaccctaaccatgtttacaaactctctaaggcgctttatgggctcaagcaagccccaagagcatggtatgaatgccttagagatttccttatcactaatggattcaaagtcggaaaagccgatcctactttatttactaaaacacttgacaatgatttattcgtatgccaaatttatgttgatgatattatatttgggtctactaatgaatctacatgtgaggaatttagtaggatcatgacacaaaaattcgagatgtctatgatgggggagttgaagtatttcttgggatttcaagtaaagcaactccaagagggcaccttcattagccaaacaaagtatactcaagatattctaagcaagtttgggatgaaggatgccaagcccatcaagacacccatgggaaccaatgggcatctcgacctcgacacggaaggtgccaaaggttcacaaaaagccaataaaaagaccaagaaaagggttcaacaaaaaggagcaagggataaccgaagtgctccctggtctggcgcaccggactgtccggtgtgccaccggacagtgtccggtgcaccaccggacaatgaccggtgcaccagggaactccaagttgaattcaacaccttcgagaattctcagaggcactccgctataattcaccggactgtccggtgccctaggggagagcgactctga

SEQ ID NO: 4910 - DNA, 4950 bp, Zea mays
  Clone ID: TF_ZM4646.C5.o1.fg
atgccgccacgtaccaggctaacggcacgcaagtctacgggaccaattggggtgcctcggcatcaattggctccccgacatgaaagcagcagtagtgggagtaacgaccccatcggagaccttgaagctcgtgatcaactcgctgatcgagacttagcacttgactgggccgtacagtctcgtttgctaatgtgtgctaaggaagcaagggctcaggcccgagttaaagaacttagctcgactgttgatgacctacaggtttactgcaacacgttgcacgaggaagtccatgtattatactcacaactacacccaagtgagcctgcaccacctgctgaggcagaagctggaccatctcacgttgcgggacgtgcgctgggtggggagttagacctttttgagcctcctccttctttgagtaatgtaaaatggaaggttttctctggcacattatgtttacctcaaatgtttttgcctcagatgccgaccaggactcgtgcacaggatgcagccggaacatccgggggtcgggacgttaccccgaatccgcctcccgttccacccacgcttgccgaggcaattgctgccttggtgaacgccacagccgacaacacccgcttcctgagggagatggcgggtcagcaacagcttcaacaacaagcaggaagaggattccaacaaggtccccgtgagaccacttatctggatttctctgagactcgtccgcctcttttcatcaaagcagaagacccgctcgaggccgacgaatggatacgggtcatagagcagaagtttggccttctacgctgttcggaagtacagaagccactgtttgcagcacagcaactccgaggacctgccagtacttggtgggggaactttgtggccatccagccggacaaccatcaagtcacctggaacgagtttaaagcagctttccgtgaacattacatccctgagggagtgctgcacatgaaacaagaggagtttatgaagttacaacaaggcggagataccgtcactcaatacctcaacaagttcaatcacctgtcacagtacgcaattgatcaggtgaatacggatttgaaaaagaagaattgttttatgagaggactgaacgaccggatgcagcgaaaaatggctgcatgtattgatcttacttatggaaaggctgtcagcacagccttatctgtggaggccaaatatgcaaattctggaaagactaagggattcggtggtgagcggcctaatcagggccaggcgaagaaaccacggtttgtgattcgaccctcaagccaaaatcgccctttttctcgtccaccttcatttcccttcaaacagccaatcattatccgccccaacaatgcccccactaccccaaaacagccgggtgccccaggcactcgattccctgtgctgccaagttcttcaactggatgttttaactgtggcaaatctgggcattttattaaagattgtccctatccaaggcaaaatcaggctaataatcagcaaggatcgggaaattcagctccaggcaagggaagtactccgggcaagaataccaagaaaacggggcgagtatattatacgcaagtggctaccacaccggagggagagccggtgatgatgggtacgttccctgtggccagtcaccctgcaataattctttttgattctggtgcttcgcataccttcattagcaagacatttgtggagcaacatcatattgcataccatgaatcaaaggagggatttaaaattcattcacctgggggacatatttttactaaagaagtggcctatggagtgccagtaactatggccggacggaactttcctgctaatatgatcgttctgaaaggccaggatatagatgtaatcttgggtatgaactggttaacccaatacaaggcaattctcaacactgaattcagaaccgtcaggttgagttataaccaagaagagattctcttgactctccccgcaaccaatccagccaaagcttctggtagagtctatgaagccattgtaccggagatcaagaacattccggtagtatgtgagtttccagatgtatttccggaagatttgcctggactgccccctgaaagagatgtagaattcgtaattgagctaaagcccggtacggctcccatctcccgaagatcgtaccgtatgcccccaaatgaattggcggaactgaagactcaattgcaagatctactgaataaaggattcatccggccaagctcgtccccgtggggttgtcccgccatttttgttaagaagaaggatcaaaccttgagaatgtgcgtggattatcgacccctaaatgaggtcactatcaagaataagtaccctcttccaaggatcgacatcttatttgatcaactgactggggcgagggtattttccaaaattgatctcaggtcgggctatcatcaaatccgtattcggcccgaggatataccgaagaccgcgtttactacgcgatatggattgtttgaatacctggtaatgtcgttcgggctcacaaatgctcctgcccatttcacttatctaatgaactcggtattcatgcctgaattggacaagttcgtggtagtcttcatcgatgatatcttgatatattccaagaatgaagaagaccatgctcagcatttacggattgtattgacgcgcctaagggaacaccagctatatgccaagttcagcaagtgcgcgttctggctggaagaaattcaatttttggggcacgtattatcagctaaaggaattgcggtagatcctagcaaggtcaaagatattctggagtggaaacccccaacaactgttcaccaagtccggagttttcttggactagctgggtattatcgcagattcataccagatttctctaagcttgtgaagccaatcacaagtttgttgaaaaatgacatcaagttcaattggtcttctaagtgcaatgaagcctttgaacaactgaagacactattgaccactgctccggtattagctcaaccggacatcactaaaccttttgacgtatattgtgatgcatctggcagtgggctcggctatgtactgatgcaagagggccgagtgattgcgtatgcttcaaggcagttgcgccggcatgaggagcactatccaactcatgatctggagctagctgctgtggttcatgccctaaagatctggcgtcactatctgctgggtaatatctgtcacatatatacagatcataaaagtttgaagtacatcttcacccagtcagagttgaatatgagacaaagacgatggcttgagctcattaaagactacgaactggagatccattatcacccgggcaaggccaatgtggtggcagatgcactgagccgtaaggttgcctgccactgtcttatggcgaagaccttcgagaacactttgtgtcaagaaatggaaaagctaaacctggggatcatccaacaagggactctaaatcagttaaagcttgagtcaatcattttgcaaaggataattgatgctcaaaaggataatctgggtatgaagcacattcgagagaaggtaaaggctggaacagccaagtgtttcaaagaagacgatcaaggtgtgatatggtttaaaaaccgcatagttgtgccaaagaacgaagagctccaccagcaaattctggatgaagcacatcttagtcgctattctattcatcccggaagcactaagatgtaccaagatttaaagcaacattactggtggacaaaaatgaagattgagattgcacgctatgtggcgaagtgtgacacttgcagacgtgtcaaggccatacacatgaaaactgctggtccattgcaatctttgccaatcccaacatggaaatgggaagacattagtatggactttattgtgggattacccaggacggccaaagggtatgattctatttgggttatagttgatcgactcacgaagattgcccacttcttacctgttaaagtcacatatacaatagccacttatgcagcattatacattgcccgtattctcagtctgcatggtgttccgaaaaccattgtgtcggatcgtggacctcaattcgtatccaagttttgggaagaacttcataaattcctgggtactaaactgctccacagttcggcctatcatcctcaaaccagtggacaaactgagagggtgaaccaaatacttgaagatatgctgcgggcatgtgtcctggacttctcaccaaaatgggatgaatgtttgcccctagcggagttttcatacaataacagttaccaagaaagtatcaagatggcaccctttgaagctttatatggacgtcggtgtcgaactccgttaaattggtctgaacctggagaaagatacttctttagacctgatatggtgaaagaggttgaagaaaaggttcatagaattattcataatatgaagaaagcccaagctcgtcagaagagttatgcagaccgacgacgacaacccttatgctttctggtagacgattatgtctacttaaaggtttcaccaatgaagggtatatcgcgtttcgggattaaaggaaaacttgcacctaggtacattggtccatttttggtgcttgagcaatgtgggccagtggcgtatcgactccaactccccgaaacattgtctgctgtgcataatgtgttccacgtgtcacaactgaagaagtgtcttcgggttcctgatcgaacagtcgaagtggctgatgttgtcctggaaccagatttaacatactcggaacatcctattcgagttctggatcaaaaggacagggtcacccgaagaaagactctcaagttctacaagatacagtggaaccaacattcggaagatgaggctacatgggaaacccaagacttcttagataagaatttcccaggctttttagcctcatgtaaattgtaa

SEQ ID NO: 4911 - DNA, 2718 bp, Zea mays
  Clone ID: TF_ZM4678.C5.o1.fg
atgtcgggagatcacgccaagaaagagatggggaccggtgagaagcccattacaagccacggggaggctccatcgggagagtcctacaacaaagggaaggggaaggaaaaggaatccccttcacacaagtcacgtcggagcggtgacaagaagaagaagatgaggaaggtggtctactacgagaccgactcctcgtcgccatccaccaccggctccgacacgccgtccgtaacttctaagcgccatgagcgcaagaagtttagtaagatccccctacgctaccctcgcattcctaaacatacgccattactttccgtccctttgggaaaaccaccaacgtttgatggtgaagattatgctaggtggagtgatatgatgcgatatcacctaacctcactccacaaaagtatatgggatgttgttgagtttggtgtacatgtaccatccgtaggggatgaagactatgatgaggatgaagtagcccaaattgtgcacttcaactcccaagccaccactatactcctcacctctctaagtcgagaggagtataataaggtgcaagggttgaagagcgcaaaggagatttgggacgtgctaaagaccgcacacgaaggagacgaggtgaccaagatcaccaagcgggagacgatcgagggggagctcggtcgcttccggcttcgccaaggcgaagagccacaagaaatgtacaaccggctcaagaccttggtgaaccaagtgcgcaacctcgggaataagaaatgggatgaccatgagatggttaaggttattcttagatcacttgttttccttaaccctacacaagttcaattaattcgtggtaatcctagatatacactaatgtctcccgaggaagtaataggaaactttgtgagctttgaattgatgatcaaaggttcaaagaaaatcaacgagttagatggccccttcacggctgaagcacaaccggttgcattcaaggcaacagaggagaagaaggaggagtctacatcaagtagacaaccaatcgacgcctcaaagctcgacaatgagaagatgacgctcatcatcaagagctttcgccaaatcctcaagcaaaggagggggaaggactacaaatcccgctccaagaaagtttgctacaagtgtggtaagcccggtcattttattgcaaaatgtcctatatctagtgacagtgacaggggcgacgacaagaaggggagaagaaaggagaagaagaggtattacaagaagaagggcggcgatgcccatgtttgccaggaatgggactccgacgagagctccaccgactcctcctccgatgaggacgccgcaaacatcgccgtcaccaagggtcttctcttccccaacgtcggccacaagtgcctcatggcaaaggacgacaaaaggaagaaggtaaaatcaagatcctccactaaatatgaaacctctagtgatgaggataatgctagtgatgaggaggataacttgtgcaccctttttgccaaccttaacatgcaacaaaaagaaaaattaaatgaattaattagtgctattcatgagaaggatgatctcttggatacccaagaggacttccttattaaagaaaacaagaagcatgttaaggttaagaatacttatgctctagaagtagaaaaatgcgaaaaattatctaatgagctaagcacttgccatgatactattgccaaccttagaaatgaaaatgataaacttattgctaaggttgattctaatatttgtgatgattctatttccaatcttagagatgataaagctaatttgcttgctaagattgaaaagttgaatgattcacttgctagccttagaaatgagaatgaaaaattgattgctaaggctaaagattttgatgtttgcaatgttactatttctaaccttagaagtgaaaatgatatattacatgctaaggttgtagaattaaaattttgcaaaccctctacatctaccgttgagcatacttccatttgtactagatgtagagacattaacattgatgctattcatgatcatatggctttaattaaacaacaaaatgatcatatcgctaaattagatgctaaaattgccgagcatgacttagaaaatgaaaagtttaaatttgctagaagtatgctctatagtgggagacgccctggcatcaaggatggcattgacttccaaaagggagacaatgtcaaacttaatgcccctcctaaaagattgtctaattttgtaaagggcaaggctcccatgcctcaggataacgaggggtacattttgtaccctgccggttatcccgagagcaaaattaggagaattcactctaggaagtctcactctggccctaatcatgcttttgtgtataagggtgagacatctagctctaggcaatcaacccgtgcaaaattgcctaaaaggaaaactcctactgcatcaaatggtcataacatttcatttaaaacttttgatgcttcttatgttttaactaacaaatccggcaaggtttatgcatccgggggctcaagttggatcatcgatagcgggtgcacaaaccatatgacaggggagaagaagatgttctcctcctataagaaaaaccaagatccccaacgagctatcacattcggggatggaaatcaaggtttggtcaaaggattgggtaaaatagctatatctcctcactacacgacggttgatctttag

SEQ ID NO: 4912 - DNA, 5634 bp, Zea mays
  Clone ID: TF_ZM4683.C2.o1.fg
atgtcgggagatcacaccaagaaggagatggagaccggcgaaaagcccactacaagctacgggagcacttcatcggaagagtcccgcaccaaaaggagggagaagaagaagagctcctccaacaaagggaaggagaagaaatcttcttctcaccacaaagagaagaaggaaaaatcttcttcccacaagccgcatcggaaaggtgacaagcacaagaggatgaggaaggtggtctactacgagaccgacacttcatcaacatcgacctccgactccgatgcgccctccgtcacttctaagcgccaagagcgcaagaagtatagtaagatccccctacgctaccctcgcatttccaaacatacacctttactttccgtcccgttaggcaaaccaccaacttttgatggtgaagattacgctaggtggagcgatttaatgcaatttcatctaatctcgctccacaaaggtatatgggatgttgttgagtttggtgtacaggtaccgtcgataggggatgagaactatgatgaggatgaggtagcccaaatcgagcacttcaactcacaagccacaacaattctcctcgcctcactaagcaaagaggaatataacaaagtacaagggttgaagaacgccaaggagatttgggatgtactcaaaaccgcgcacgagggagatgagctcaccaagatcaccaagcgggaaacgatcgagggggagctcggtcggttccggcttcacaaaggggaggagccacaacatatgtacaaccggctcaagactttggtgaaccaagtgcgcaacctcgggagcaagaagtgggatgaccacgaagtggtaaatgttattttaagatctctcatttttcttaatcccactcaagttcaattgattcgtggtaatcctagatatactaaaatgacccccgaggaagttatcgggcattttgtaagttttgagtgcatgatagaaggctcgaggaaaatcaacgagcttggcgacccatccgaagcccaacccgttgcattcaaggcaacggaggagaggaaggaggagtctacaccaagtagacaaccaatagacgcctccaagctcgacaatgaggaaatggcgctcgtcatcaagagcttccgccaaatcctcaagcaaaggagggggaaggactacaagtcccgctccaagaaggtttgctacaagtgtggtaagcccggtcattttattgctaaatgtccgatatctagtgacagtgaccgaggcgacgacaagaagggaagaagaaaggagaagaaaaggtattacaagaagaagggcggcgatgcccatgtttgtcgggaatgggattccgacgaaagctcaagcgactcctccgacgacgaggacgccgccaacatcgccgtcaccaagagactcctcttccccaacgtcggccacaagtgcctcatggcaaaggacggcaaaaagaagaaggttaaatccaactcctccactaaatatgaatcgtctagtgatgataatgctagtgatgaggaggataatttgcgtattctctttgccaatcttaacatggagcaaaaagaaaaactaaatgaattgattagtgctattcatgaaaaggatgaccttttggactcccaagaggattgtctaattaaagaaaacaagaaacatgttaaggttaaaaaggcttatgcactagaagtagaaaaatgtgaaaaattgtctagtgagctaagcacttgccgtgagatgattgacaaccttagaaatgaaaatgctattttaaatgctaaggttgattcacatgtttgtaatgtttcaattcccaatcttagagatgataacattgacttgcttgctaagattgatgaattgaatgcatctcttgctagccttagattagagaatgaaaatttaattgctaaggctaaaaattttgatgtttgcaatgctactatttccgaccttagaactaagaatgaaatcaaaatagatgctaaaattgccgagcacaacctagaaaatgagaaatttaaatttgctcgtagcatgctttataatgggagacgccctggcatcaaggatggcattggcttccaaaggggagacaatgtcaagcttaatacccctcctaagaacttgtctaactttgttaagggcaaagctcccatgcctcaagataacgagggttacattttataccctgccggctatcctgagagcaaaattaggaagactcattctaggaagtctcactctggccctaatcatgcttttatgtataagggtgagacatctagctctaggcaaccaacccgtgccaagttgcctagaaagaaaatttctaatgcatcaaatgaacatagcatttcatttaagacttttgatgcttcttatgttttgactaacaaatccggcaaggtcgttgccaagtttgttgggggcaagcacaagggttccaagacttgtgtttgggtacccaaagttcttgtttctaatgccaaaggacccaaaaccgtttgggtttatgcatccgggggctcaagttggatactcgacagcgggtgcacaaaccacatgacaggggagaaaaggatgttctcctcatatgagaaaaaccaagatccccaaagagcaatcacattcggggatggaaatcaaggtttggtcaaaggtgtcactgtctttagaagaagtgatgattcaatagcatttaagggtgtgttagagggtcagctatacttagtagattttgatagagctgagctcgacacatgtttaattgctaagactaacatgggttggctctggcaccgccgactagcccatgttgggatgaagaatcttcataagcttctaaagggagagcacattttaggactaaccaatgttcattttgagaaagacaggatttgtagcgcatgccaagcagggaagcaagttggcactcatcatccacacaagaacataatgacgactgacaggccactggagctcctacacatggatctattcggcccgatcgcttacataagcatcggcgggagtaagtactgtctagttattgtggatgattactctcgcttcacttgggtattctttttacaggaaaaatctcaaacccaagagaccttaaagggattcttgagacgagctcaaaatgagttcgccttaaggatcaagaaaataagaagcgacaacgggacggagttcaagaactctcaaattgaaggcttccttgaggaggagggcatcaagcatgagttctcctctccctacacgccacaacaaaatggtgtagtggagaggaagaatcgaactctattggacatggcaagaaccatgcttgatgagtacaagacaccggaccggttttgggccgaagcggtcaacaccgcctgctacgccatcaaccggttatatcttcaccgaatcctcaagaagacatcatatgaactcctaaccggtaaaaagcccaacatttcatattttagagtttttggtagcaaatgcttcattcttattaaaagaggtagaaaatctaaatttgctcctaaaactgtagaaggctttttacttggttatgactcaaacacaagggcatatagggtctttaacaagtccactggactagttgaagtctcatgtgacgttgtgtttgatgaaactaacggctctcaagtagagcaagttgatcttgatgagataggtgaagaacaggctccatgcatcgcgctaaggaacatgtccatcggggatgtgtgtcctaaggaatccgaagagcctccaagtacacaagatcaaccatcctcctccatgcaagcatctccaccaactcaaaatgaggatgaggctcaaaatgatgaagagcaaaatcaagaagacgagccacctcaagatgatagcaatgatcaagggggatatacaaatgatcaagaaaaggaggatgaggaagaaccaagaccgccacacccaagagtccaccaagcaatccaacgagatcaccccgtcgacaccatcctcggcgacattcataagggggtaactactcgatctcgggttgctcatttttgtgaacattactcttttgtttcctctattgagccacacagggtagaggaagctctccaagattcggattgggtggtggcgatgcaagaggagctcaacaatttcacgaggaatgaggtctggcatttagttccacgtcctaaccaaaatgttgtaggaaccaaatgggtcttccgcaacaagcaagatgagcatggtgtggtgacaaggaacaaagctcgactcgtagccaaagggtattcacaagtcgaaggtttggatttcggtgaaacctatgcacccgtagctaggcttgagtcaattcgcatattattggcctatgctacttaccatggctttaagctctatcaaatggacgtgaaaagtgccttcctcaatggaccgatcaaggaagaggtctatgttgagcaacctcccggctttgaagacagtgagtaccctaaccatgtctataggctctctaaggcgctttatgggctcaagcaagccccaagagcatggtatgaatgcctaagagatttccttattgcaaatggcttcaaagtcggcaaggccgatcctactttattcactaaaactcttgaaaaagacttgtttgtatgccaaatttatgttgatgatattatatttgggtctactaacgagtctacatgtgaagagtttagtaggatcatgacacagaaattcgagatgtcgatgatgggggagttgaagtattttctaggattccaagtcaagcaactccaagagggcaccttcatttgccaaacgaagtacactcaagacattctaaccaagtttgggatgaaggatgccaaacccatcaagacacccatgggaactaatgggcatctcgacctcgacacgggaggtaagtccgtggatcaaaaggtataccggtcgatgattggttcattgctttatttatgtgcatctcgaccggacattatgctttccgtttgcatgtgtgcaagattccaatccgaccctaaggaatcacaccttacggccgtaaaacgaatcttgagatatttggcttatacacctaagtttgggctttggtaccctcggggatccacttttgatttgattggttattctgatgccgattgggcggggtgtaagatcaataggaagagcacatcggggacttgccagttcttgggaagatccttggtgtcatgggcttcaaagaagcaaaattcggtcgctctttccaccgccgaagctgagtatattgccgcaggtcactgttgcgcgcaattgctttggatgaggcaaaccctgcgggactacggttacaaattaaccaaagtccctttgctatgtgataatgagagtgcaatcaaaatggccgacaatcccgtcgagcatagccgcactaagcacatagccattcggtatcattttcttagggatcaccaacaaaagggggatatcgagatttcttacattaatactaaagatcaattagccgatatctttaccaagccacttgatgaacaatcttttaccagacttaggcatgagctcaatattcttgattctagaaatttcttttgctag

SEQ ID NO: 4913 - DNA, 7242 bp, Zea mays
  Clone ID: TF_ZM4782.C1.o2.fg
atgtcgggagaacacgccaagaaggagatggagaccggcgacaagcccgctacaagccacgggaaggcttcatcggaagagtcccgcaacaaaaagaaagggaaggagaagaaagcctcctcccacaagtcacatcggagtggcgacaagaaaaagaagatgaggaaggtggtctactacgagaccgacacctcatcgctatctacctccggctccgacgcgccctccataacttctaatcgccatgagcgcaagaagtttagtaagatccccttacactatcctcgtacttctagacatactccattactttccgttccattaggcaaaccgccaacctttgacggtgaagattatgctaggtggagtgatttaatgaaatttcatctaacctcactccacaaaagtatatggaatgttgttgagtttggagcacaggtaccatctgtaggggatgaggattatgatgatgacgaggtggcccaaatcgagcacttcaactcccaagccacaaccatactccttgcttccctaagtagggaggagtacaacaaggtgcaaggattaaagagcgccaaggaagtttgggacgtgctcaataccgcgcacgagggtgatgaactcaccaagatcaccaagcgggaaacgatcgagggggagctcggtcgcttccgtcttcgccaatgggaagagccacaagatatgtacaaccggctcaaaaccttggtgaaccaagtgcgcaatctcgggagcaagaaatgggatgaccacgaggtggttaaggttattttaagatcacttattttccttaaccctactcaagtacaattaattcgtggcaatccaagatatacactaatgactcccgaggaattaattgggaattttgtgagctttgaatttatgatcaagggctcacggaagatcaacgagcttgacggtccttctacgtccgaagctcaaccggtcgcattcaaagtgatgaaagaaaagaaggaggtgtctacaccgagtagaacacccatcgacgcctccaagctcgacaatgaggaaatgacgcttgtcatcaagagcttccgccaaatcctcaagcaatggagggggaaagattacaagccccgctccaagaaggtttgctacaaatgtggtaagcccggacattttattgcaaaatgtcctatatccagtgacagtgacaggggcgacgacaagaaggggagaagaaaggagaagaagaggtactacaagaagaagggcggcgatgcccatgtttgtcgcgagtgggactccgacgaaagctctagcgactcctccgacgacgaggacgccgccaacatcgccgtcaccaaaggacttctcttccccaacgtcggccacaagtgcctcatggcaaaggacggcaaaaagaagaaggttaaatctaaatcctccactagatatgagtcctctagtgatgataatgctagtgatgaggaagacaatttgcatactctttttgccaacttaaacatgcaacaaaaagagaaattaaatgaattaattagtgccatctatgagaaggatgatctcttggactcccaagaggacttcctaatcaaggaaaacaaaaagcatgttaaagttaaaaatgcttacgctctagaagttgaaaaatgtgaaaaattatctagtgagctaagcacttgccatgagactgtagacaaccttagaaatgagaattctaatttgttaactaaggttgattctgttgcttgtaatgtttcaattcccaatcttagaaatgataatgatgatttgcttgctaagattgaagaattaaacatgtctcttgctagccttaggattgaaaatgaaaaattgcttgctaaggctaaagaattggacgtttgcaatgctaccatttccgaccttagaagtagaaatgatatattacatgctaaggttgtacaattaaaatcttgcaaaccctctacatctaccgttgaacacactactatttgcactagatgtagagatgttgatattaatgctattcatgatcacatggctttacttaaacaacaaaatgatcatatagcaaaattagatgctaaaattgccgagcacgaacttgaaaatgaaaaatttaaatatgctcgtagtatgctttatagtgggagacgccctggcatcaaggatggcattggcttccaaaagggggacaatgtcaaacttaatgcccctcctaagaaattatctaactttgttaagggcaaggctcccatgcctcaagataacgagggttacattttgtaccctgccagttatcctaagagcaaaattaggagaattcattctaggaagtctcactctggccctaaccatgcttttatgtataagggtgagacatctagttctaggcaaccaacccgtgctaagttgcctaagaagaaaactcctagtgcatcaaatggtcataacatctcatttaaaacttttgatgcatcctatgttttaactaacaaatccggcaaggtagttgccaagtatgttgggagcaagcacaaggggtcaaagacttgtgtttgggtacccaaagttcttgtgtctaatgctaaaggacccaaaaccatttgggtttatgcatccgggggctcaagttggataatcgacagcgggtgcacaaaccacatgacaggggagaagaagatgttctcctcctacgagaaaaaccaagatccccaaagagcgatcactttcggggatggaaatcaaggtgtcactgtctttagaagaagtgatgattcaatagcatttaagggtgtgttagagggtcagctatacttggtagattttgatagagctgaactcgacacatgcttaattgctaagactaacatgggttggctctggcaccgccgactagcccatgttgggatgaagaatcttcataagcttctaaagggagagcacattttaggattaacaaatgttcattttgagaaagacaggatttgtagcgcatgccaaacagggaagcaagttggagcccaccatccacataagaacatcatgacgactgacaggccactggagctcctacacatggacctattcggcccgatagcttacataagcatcggcgggagtaagtactgtctagttattgtggatgattattctagcttcacttgggtattctttttgcaagaaaattctcatacccaagagaccttaaagggattcttgagacgagctcaaaacgagttcggcttaaggatcaagaagattagaagcgacaacgggacggagttcaagaactctcaaattgaaggcttccttgaggaggagggcatcaagcatgagttctcttctccctacacgccacaacagaatggtgtagtggagaggaagaatcgaactctattggacatggcaagaaccatgcttgatgagtacaagacttcggatcggttttgggccgaggcggtcaacacctcttgctacgccatcaaccgattatatctacaccgaatcctcaagaagacatcatacgaactcctaaccggtaaaaagccaaatatttcatattttagagtctttgatagcaaatgtttcattcttgttaaaagaggtagaaaatctaaatttgctcctaagactgtagaaggctttttactaggatatgattcaaacacaagggcatatagagtctttaacaagtccactggacaagttgaagtttcttgtgacgttgtgtttgatgagactaacggctctcaagtagagcaagttgatcttgatgagataggcgatgaagaggctccgtgcatcgcgctaaggaacatatccattggggatgtgtgtcctaaggaatccaaagagcctccaaatgcacaagatcaaccatcctcctccacgcaagcatctccaccgactcaaaataaggatgaggctcaaattgatgaaggagaagatcaagcaaatgagccacctcaagatgacgacaatgatcaagggggagatgcaaatgatcaagacaaggaggatgaagaaccatggccgccacacccaagaccacacagggtagaggaagcacttcaagattcggattgggtggtggcgatgcaagaggagctcaacaacttcactaggaatgaggtatggcatttagttccacgtcctaatcaaaatgttgtaggaaccaagtgggtcttccgcaacaagcaagacgagcatggtgtggtgacaaggaacaaagctcgacttgtggccaagggatactcccaagtcgaaggtttggattttggtgaaacctatgcacccgtagctaggcttgagtcaattcgtatattattggcctatgctacttaccatggcttcaagctttatcaaatggacgtgaagagtgccttcctcaatggaccaatcaaggaagaggtctatgttgagcaacctcccggctttgaagatagtgagtaccctaaccatgtttataaactctctaaggcgctttatgggctcaagcaagccccaagagcatggtatgaatgccttagagatttccttatcactaatggattcaaagtcagaaaagccgatcctacactctttaccaaaacacttgaaaatgatttgtttgtatgccaaatttatgttgatgatattatatttgggtctactaacgaatctacatgtgaagagtttagtaggatcatgacacaaaagttcgagatgtctatgatgggggagttgaagtatttcttaggatttcaagtaaagcaactccaagagggcaccttccttagccaaacaaagtatactcaagacattctaagcaagtttgggatgaaggatgccaaacccatcaagacacccatgggaaccaatgggcatctcgacctcgacgagggagcccatcgcgcccgcagtccgccctcccctcgccgcctccccagaccgcagtctctcctcaacctccctccccaaggagctggcggcagcgcggctgcgtcgggaggaggaggacgcagaggacgccgcgcgggggctgcggcaggagctcgactccgagcgggcctccccggagatggcagccagatccggccattgagccccctaaccgagcggatccaaggtactacacggtcttgccctcgcccttttgcttgctttgtcgtcctctcctcaccgcggggggacccgacgtacgagcaggaggtgttcctcgccacgcggtgcggcaggcgcatgctcgacctgtcccggttccgcgaccgcgaccgcgcgcggtgccgcgactggtgcttcgccgcgttcgtgctcgcctacgccacgtacctcgacgaccggctcaaagaacggatgcaggaccgcggagcaggcggggccagcccgggcaaatggcacgtcgacggcgaccctgtcgggatggcgtgccaggtggccgaggcctgggagctcgtgccgcggggaaggctggtgaaggagagcgcggcgatgtactgcgagctcacggaggtgatggtcgtgctcttggaccgcttcgccgacctgggcactcctgcctgcgtgcgcgtccactccatcttcaccagtactgcttggaatttgggtatgctgagttcacgcttcacagacagaactgcttggaatttggatagtgcactaaccacagttgagacattagcatcagcggctatttgtggcatcgtacattcaataataggtggacaaccactattgatcgtgggtgttgcagaaccgacaattatcatgtacacttatatctacaattttgccaaaaatcagccaaacctgggagaaaaaatgtttctgccatgggctacctgggtttacatctggacagctgttatgctgttcctcatggcaattttcaacgttgcagctattctaaacaaatttaccaggtttgcaggagaactttttgtaatgttaatcacagttttgtttatgcaagaggcgataaaggggatggttggtgaattcagtgcccctaacgcatggcaaaggagcttaattgcggactacggtgttccactaatggtgatactttggacatcattgtcatattcattgccaagcaggatcccttcaggggtccctaggaggctcttcaccccacttccttgggaacccaagtcgctccagcattggacagtagcaaaagatctgttttcagtccctacagtacatatattcctggctattgtgcctgccaccatggtcgcagggctctatttctttgaccacactgtagcttcccagatgagtcagcagaaggaatttaatttgaagaacccatcagcctaccattatgacattttggtcctaagcttgacattgcttcgcaagaagatggtccaaactgccaaggagggcatgatgaataatgctaccagttccgaagtttatgtcaaaatgcaagatgttttcataaaaatggaccacggaggcgacactgtttctgctcacaaagaaccgaaggacctgaaggatgcaattattccagaagggaatggatcaggaacagtgcctgaagtatttgatcctgaaaagcatgtagatgcttacttgcctgtccgggtgaatgagcagagagtaagcaatctgttgcagtccctgttgattgctggttgtattagagttacaccgctcattcagaagataccaacatcagtcctttggggttacttcgcctatatgtccatcgacagccttcctagaaaccagttctgggagaggatacaacttcttttcatcacgcctcaaagacgctacaaggttcttgaaggagcacatgcatccttcatggagtcagtgcctttcaacacaatatgcaccttcacactcttccagctaatctatctgttgatcgtctttgggatgacatggataccagtagcaggaatcctcttaccactgctcttcttcttcttcctcattatcatcaggcagcacttcatcccgaaatattttgatccgagccacctgagggaattagatgcagccgagtacgaagaactgaaaggttttacacctgatccatcagtgtgtgaggacgagtctgttcgcagcggagatgctcagcctggatatgcttccgaaatactcgaggaattcacgactcaccgtggagagctgaagcgcaggaactctaccttccatgatgggagactacttcagcttaactctgtcaagatgacgagagagctttctcgggttccttcttggcttacatga

SEQ ID NO: 4914 - DNA, 2869 bp, Zea mays
  Clone ID: TF_ZM4824.C1.o1.fg
atgtcgggagatcacgccaagaaggagatggagaccggcgaaaagcccactacaagccaagggagcacttcatcggaagagtcccgcaccaagaggaaggagaagaagaagatctcctccaacaaagggaaggagaagaaatcttcttctcaccacaaagagaagaaggaaaaatcttcttcccacaagccgcgtcggagtggggacaagcaaaagaggatgaggaaagtggtctactacgagaccgacacctcatcaacatcgacctccggctccgatgcgccctccgtaacttctaaacgccaagagcgtaagaagtttagtaagattcccctacactactctcgcatttccaaacatgcacctctactttccgtcccattaggcaaaccaccaacctttgatggtgaagattatgctaggtggagtgatttaatgcgttttcatctaacctcactccacaaaagtatatgggatgttgttgagtttggtgcacaggtaccatccgtaggggacaaagattatgatgaggatgaggtggcccaaatcgagcacttcaactctcaagcgacaacaatactcctcgcctctttaagtagagaggagtataacaaagttcaagggttgaagaacgccaaagaagtttgggatgtgctcaaaaccgcgcacgaaggagacgagctcacaaagatcaccaagcgggaaacgatcgagggggagctcggtcggtttcggcttcgcaaaggggaggagccacaacacatgtacaaccggctcaagaccttggtgaaccaagtgcgcaacctcgggagcgtaaagtgggacgaccacgaaatggttaaggttattctaagatctctcattttccttaaccccactcaagttcaattaattcgtggtaatcctagatatactaaaatgacccccgaggaagttatcgggaattttgtaagttttgagtgcatgatcgaaggctcgagaaagatcaacgagcttgacgaacccaccacatccgaagctcaacccgtcgcactcaaggcgacggaggaaaagaaggaggaggctacaccaagtcgacaaccaatagacgcctccaaactcgacaatgaggaaatggtgctcgtcatcaagagcttccgccaaatcctcaagcaaaggagggggaaagactacaagtcccgctccaaaaaggtttgctacaagtgtggtaagcccggtcattttattgctaaatgtcctatatctagtgacagtgaccgaggtgacgacaagaaggggagaagaagggaaaagaagaggtactacaagaagaagggcgacgatgcccatgtttgtcgggagtgggattccgacgaaagctcaagcgactcctccgacgacgaggacgccgccaacatcgccgtcaccaagggacttctcttccccaacgtcggccacaagtgcctcatggcaaaggacgacaagcggaagaaggttaaatctaactcctccactaaatatgagtcttctagtgatgataatgctagtgatgaggaggataatttgcgttccctttttgccaaccttaacatagctcaaaaggagaaattaaatgaattggttagtgctattcatgaaaaagatgacctcttggattcccaagaggacctccttattaaggagaataagaagcatgttaaggttaaaaaggcttatgctcttgaaattgagaaatgtgaaaagttatctagtgagctaagcacttgccgtgagatgattgacaaccttaaacatgaaaatgctagtttaaatgctaaggttgatttacatgtttgtaatgtttcaattcccaatcctagagataataatgatgatttgcttgctaggattgaagaattaaacatttctcttgctagtcttagagtagaaaatgaaagtttaattgctaaggctaaagaacttgatgtttgcaatactacaatttccgatcttagagataaaaatgatattcttcatgctaagatcgttgaacttaattcttgcaaaccctctacatctattgttgaacatgtatctatttgcactagatgtagagatattgatgttaatgctattcatgatcacatgtccttaattaaacaacaaaatgatcatatagcaaaactagatgctaaaattgccgagcacaacttagaagatgagaaatttaaatttgctcgtagcatgctttataatgggagacgcccgggcatcaaggatggcattggattccaaaggggagacattgtcaaacttagtgcccctcctaaaagattatctaattttgttaagggcaaggctcccatgcctcaggataccgagggttacattttataccctgccggttatcctgagagcaaaattaggagaattcattctaggaagtctcactctggccctaatcatgcatttatgtataagggtgagacatctagctctaggcaaccaacccgtgccaagttgcctaagaaaactcctaatgcatcaaatgatcataacatttcatttaagacttttgatgcatcttatgttttgactaacaaatccggcaaagtagttgccaaatatgttgggggcaagcacaagggttccaagacttgtgtttgggtacccaaagttcttgtgtctaatgccaaaggacccaaaaccatttgggtttatgcatccgggggctcaagttggatactcgacagcgggtgcacaaaccacatgacaggggagaaaaggatgttctcctcatatgagaaaaaccaagatccccaaagagcgatcacattcggggatggaaatcaaggtttggtcaaaggtgtcactgtctttagaagaagtgatgattcaatagcatttaagg

SEQ ID NO: 4915 - DNA, 5781 bp, Zea mays
  Clone ID: TF_ZM4868.C2.o1.fg
atgtcgggagatcacgccaagaaggagatggagaccggcgaaaagcccactacaagccacgggagcacttcatcggaagagtcccgcaccaaaaggagggagaagaagaagagctcctccaacaaagggaaggagaagaaatcttcttctcaccacaaagagaagaaggaaaaatcttcttcccacaagccgcatcggaaaggcgacaagcacaagaggatgaggaaggtggtctactacgagaccgacacttcatcaacatcgacctccgactccgatgcgccctccgtcacttctaagcgccaagagcgcaagaagtatagtaagatccccctacgctaccctcgcatttccaaacatacacctttactttccgtcccattaggcaaaccaccaactcttgatggtgaagattacgctaggtggagcgatttaatgcgatttcatctaacctcgctccacaaaagcatatgggatgttgttgagtttggcgcgcaggtaccatccgtaggggatgaggactatgatgaggatgaggtggcccaaatcgagcacttcaactctcaagcaacaacaatactcctcgcctctctaagtaaagaggagtataacaaagtacaagggttgaagagcgccaaggagatttgggatgtactcaaaaccgcgcatgagggagacgagctcaccaagatcaccaagcgggaaacgatcgagggggagctcggtcggttccggcttcacaaaggagaggagccacaacacatgtacaaccggctcaagactttggtgaaccaagtgcgcaacctcgggagcaagaagtgggacgatcacgaagtggtaaatgttattttaagatctctcatttttcttaatcccactcaagttcaattgattcgtggtaatcctagatatactaaaatgacccccgaggaagttatcgggcattttgtaagttttgagtgcatgatagaaggctcgaggaaaatcaacgagcttggcgactcatccgaagcccaacccgttgcattcaaggcaacggaggagaagaaggaggaggctacaccaagtcgacaaccaatcgacacctccaagctcgacaatgaggaaatggcgctcgtcatcaagagcttccgccaaatcctcaaacaaaggagggggaaagactacaagtcccgctccaagaaggtttgctacaagtgtggtaagcccggtcattttattgctaaatgtcctatatctagtgacagtgaccgaggtgacgacaagaaggggagacgaaaggaaaagaagaggtattacaagaagaagggcggcgatgcccatgtttgtcgcgagtgggactccgacgagagctcaagcgactcctccgacgacgaggacgccgccaacatcgccgtcaccaagggactcctcttccccaacgtcgaccacaaatgcctcatggcaaaggacggcaaaaagaaggttaaatctaaatcctccactaaatatgaatcctctagtgatgacaatgctagtgatgaggaagataatttgcgttccctttttgccaaccttaacatagctcaaaaagaaaaattaaatgaattggttagtgctattcatgaaaaggatgaccttttggattcccaagaagattgtctaattaaagaaaacaaaaaacatgttaaggttaaaaaggcttatgctcttgaaattgagaaatgtgaaaaattatctagtgagctaagcacttgtcgtgagatgattgacaaccttagaaatgaaaatgctattttaaatgctaaggttgattcacatgtttgtaatgtttcaattcccaatcttagaaatgataatgttgacttgcttgctaagattgatgaattgaatgtttctcttgctagccttagaaatgaaaatgaaaaattgcttgctaaggctaaggattttgatgtttgcaatactactatttccgatcttagagataagaatgatattcttcatgctaagattgttgaacttaattcttgcaaaccatctacatctattgttgagcatgtatctatttgtactagatgtagagatgttgatattaatgctattcatgatcatatggctttaattaaacaacaaaatgatcatatagcaaaactagatgcaaaaattgccgagcacaacttagagaatgagaaatttaaatttgctcgtagcatgctttataatgggagacgcccgggcattaaggatggcattggcttccaaaggggagacaatgtcaaaattagtgcccctcctaagagattgtccaactttgttaagggcaaggctcccatgcctcaggataacgagggctacattttgtaccctgccggttatcccgagagcaaaattaggaaaattcattctaggaagtctcactctggccctaatcatgcttttatgtataagggtgagacatctagttctaggcaaccaacccgtgctaaattgcctagaaagaaaactcctaatgcatcaaatgatcatgatatttcatttaaaacttttgatgcttcttatgtgcttacaaacaaatccggcaaagtagttgccaaatatgttgggggcaagcacaaggggtcaaagacttgtgtttgggtacccaaagttcttgtgtctaatgccaaaggacccaaaaccatttgggtttatgcatccgggggctcaagttggatactcgacagcgggtgcacaaaccacatgacaggggagaaaaggatgttctcctcatatgagaaaaaccaagatccccaaagagcaatcacattcggggatggaaatcaaggtttggtcaaaggtgtcactgtctttagaagaagtgatgattcaatagcatttaagggagtgttagagggtcagctatacttggtagactttgatagagctgaactcgacacttgcttaattgctaagactaacatgggctggctctggcatcgccgactagcacatgttgggatgaagaatcttcataagcttctaaagggagaacacattttgggactaacaaatgttcattttgagaaagacagaatttgtagtgcatgccaagcaggaaagcaagttggctctcatcatccacataagaacataatgacgaccgacaggccactggagctcctacacatggatcttttcggcccgattgcttacataagcatcggcgggagtaagtactgtctagttattgtggatgattattctcgcttcacttgggtattctttttacaggaaaaatcccaaacccaagagaccttaaagggattcttgagacgggctcaaaatgagtttgacttaaggatcaagaaaataagaagcgacaacgggacggagttcaagaactctcaaattgaaggcttccttgaggaggagggcatcaagcatgagttctcttctccctacacgccacaacaaaatggtgtagtggagaggaagaatagaactctattggacatggcaaggaccatgcttgatgagtacaaaacttcggatcggttttgggccgaggcggtcaacaccgcctgctacgccatcaaccgattgtatctacaccgaatcctcaagaagacatcatatgaactcctcaccggtaaaaagcccaacatttcatactttagagtttttggtagcaaatgctttattcttgttaaaagaggtagaaaatccaaatttgctcctaaaactgtagaaggctttttacttggttatgactcaaacacaagggcatatagggtctttaacaagtccactggactagttgaagtctcatgtgacgttgtgtttgatgaagctaacggctctcaagtagagcaagttgatcttgatgagataggtgaggaagaggctccatgcatcgcattaaggaacatgtccattggggatgtgtgtcctaaggaatccgaagagcctccaaatgcacaagatcaaccatcatcctccatgcaagcatctccaccaacccaagatcaggaagaggctcaagttgatgaagaaaaagatcaatcaaatgagccacctcaagatgatggcaatgatcaagggggagatacaaatgatcaagataaggaggatgaggaagaaccaaggccgccacacccaagagtccaccaagcaatccaacgagatcaccccgtcgatactatcctaggagacattcataagggggtaactactagatctcgggttgctcatttttgtgaacattactcttttgtttcctctattgagccaaacagggtagaggaagctctccaagattcggattgggtggtggcgatgcaagaggagctcaacaatttcacaaggaacgaggtatggcatttagttccacgtcctaaccaaaatgttgtaggaaccaaatgggtcttccgcaacaagcaagatgagcatggtgtggtgacaaggaacaaagctcgactcgtggccaaagggtattcacaagtcgaaggtttggatttcggtgaaacctatgcacccgtagctaggcttgagtcaattcgcatattattggcctatgctacttaccatggctttaagctctatcaaatggacgtgaaaagtgccttcctcaacggaccgatcaaggaagaggtctatgttgagcaacctcccggctttgaagacagtgagtatcctaaccatgtttataggctctctaaggcgctttatgggctcaagcaagccccaagagcatggtatgaatgccttagagatttccttattgctaatggcttcaaagtcggcaaggccgatcctacactctttactaaaactcttgaaaatgacttgtttgtatgccaaatttatgttgatgatattatatttgggtctactaacgagtctacatgtgaagagtttagtaggatcatgacacagaaattcgagatgtctatgatgggggagttgaagtattttctaggatttcaagtgaagcaactccaagagggcaccttcatcagccaaacgaagtacactcaagacatcctaagcaagtttggaatgaaggatgccaagcccatcaaaacacccatgggaacaaatgggcatctcgacctcgacacgggaggtaagtccgtggatcaaaaggtatatcggtcgatgattggttcattgctttatttatgtgcatctcgaccggacattatgctttccgtttgcatgtgtgcaagattccaatccgaccctaaggaatcccaccttacggccgtaaaacgaatcttgagatatttgacttacacacctaagtttgggctttggtaccctcggggatccacttttgatttgattggttattcggatgccgattgggcggggtgcaaaattaataggaagagcacatcggggacttgccagttcttgggaagatccttggtgtcttgggcttcaaagaagcaaaattcggtcgctctttccaccgccgaagccgagtatattgccgcaggtcattgttgcgcgcaattgctttggatgaggcaaaccctgcgggactacggttacaaattaaccaaagtccatttgctatgtgacaatgagagtgcaatcaaaatggccgacaatcccgtcgagcatagccgcactaagcacatagccattcggtatcattttcttagggatcaccaacaaaagggagatatcgagatttcttacattaatactaaagatcaattagccgatatctttaccaagcctcttgatgaacaaacttttaccagacttaggcatgagctcaatattcttgattctagaaatttcttttgctag

SEQ ID NO: 4916 - DNA, 1797 bp, Zea mays
  Clone ID: TF_ZM4871.C2.o2.fg
atggcgggtaatcaattccagcagcatggcagaagggctcctccacagggaccgcgtgaaacctcgtatctggacttttctgaaacgcgtcccccactctttgttaaagctgaagaccctcttgaagctgatgagtggataagggtaatagagcagaagttcggattaatccgttgcacagaaacacagaagtcgttgttcgtcgcccaacaactgagaggccctgccagtacctggtggggaaattttgtggcaattcaaccagccagacatcaggtcacttgggatgaatttaagttagcattccgtgaacactatattccagaaggagtgcttcacatgaaacaagaggaatttattcgactaaaacaaggaggggatactgtgatgcagtatctcaacaagtttaatcatttatcccaatatgcgattgaccaagtaaacactgacctaaagaagaaaaattgcttcatgagaggactcaacgactggctccaacggaaaatggccacctacctagaccttacgtacagcagagctgtcagcacggcgctggcagtagaagctaagaatacaggccaaggaaaatcaaagggatttggaggtgataggtccaatcagggacctgagaagcgaaccaggttggtaatccgaccatttaatcagaatcattcttctcctcgtccaccctcctatccattcaaacaacctgttttcattcgtcctaccactgcccccgcttctacaaatcagctgagtgcccctggtgctcgtttccccgcccaccctagttcctcaactggctgcttcaactgtggaaagtctggtcattttatcaaagattgtccatatccgaagctgaataagttcaacaatcagcagaactctgggacttccaatcaaggcaaaggaaacatggctaataattcagtgggcaaaaatgtcaagaagactgggcgaatttattatactcaagtggccactacaccggaaggagagccgataatgatggatctacctggattacctctagaaagggatgtagagtttgtgatcaacctgaagcccgatacagctcccatttctagaaggtcgtactggatgccaccaaatgaattggcggagctcaagatgaaactacaagacttgatggaaaagggattcattcggcccagttcatcaccgtggggatgtcccacaatttttgtcaagaagaaagatcaaacacttcgaatgtgcgtggactacagaccccttaatgaggaaatccaatttttgggacatgtattgtctgcaaatgggattgcggttgatcccagcaaggtcaaggatattctagagtggaaaccgccaaccactgtacatcaagtccgaagtttccttggactggctggctattaccgcagatttatcccagatttctccaagattgtgaaactaatcacaagtctgttgaagaatgatacaaaattcaactggtcctcaagatgcaacgaagccttcgagcagctgaagggcttcaaagggtgccatcttcaggctggattgataactgttgttatgagcaaactctgccaaagggagtctgggggtggtaagccaaacttcttattagcttggttcccaaagactcttgcaattgctcccaaaatctggcaactaattgggctcctcggaaccgccaatctgtcttcaagcctgtcggggaccataattaggggtaccctcaagacgcctaattctcagctggtaacccccatcagcataaagctgcaaaggcctgatgggtacgattaa

SEQ ID NO: 4917 - DNA, 1344 bp, Zea mays
  Clone ID: TF_ZM4889.C5.o1.fg
atgactcccgaggaagtaatcgggaattttgtgagctttgaatttatgatcaagggctcacggaagatcaacgagcttgacggtccctccacgtccgaagcacaaccggtcgcatttaaggcgacggaggagaagaaggaggagtctacaccgagtagaacacccatcgacgcctccaagctcgacaacgaggaaatgacgcttgtcatcaaaagctttcgccaaatcctcaagcaaaggagggggaaagactacaagccccgctccaagaaggtttgctacaaatgtggtaagcccggtcattttattgcaaaatgtcctatttctagtgacagtgacaggggcgacgacaaaaaggggagaagaaaggagaagaagaggtactacaagaagaagggcggcgatgcccatgtttgtcgtgagtgggactccaacgaaagctctagctactcctcctccgacgaggacgccgccaacatcgccgtcaccaagggactcctcttccccaacgtcggccacaaatgcctcatggcaaaagacggcaaaaagaagaaggtttatgcatctaggggctcaagttggataatcgacagcgggtgcacaaaccacatgacaggggagaagaaaatgttctcctcctatgagaaaaaccaggatccccaacgagctatcacattcggggatggaaaccaagattctttagattacaatttgctttccgtttctcaattatgtcaaatgggctacaactatctatttactgatgaaaaatctcatacccaagaaaccttaaagggattcttgagacgggctcaaaatgagttcggcttgaggatcaagaaaattagaagcgacaacgggacggagttcaagaacttacaaatcgaaggcttccttgaggaggagggcatcaagcatgagttctcctctccctacacgccacaacaaaatggtgtagtagagaggaagaatagaactctattggacatggcaagaaccatgcttgatgagtacaagacttcggatcggttttgggccgaggcggtcaacaccgcctgctacgccatcaaccggaatcggaagagcctccaaatgcacaagatcaaccatcctcctccacgcaagcatctccaccaactcaaaatgaggatgaggctcaagttgatgaaggagaagatcaagcaaatgagccacctcaagatgacggcaatgatcaagggggagatgcaaatgagcaagacaaggaggatgaagaaccaagaccgccacacccaagagtccaccaagcaatccaacgagatcaccccgtcgacaccatcctcggcgacattcataagggagtaa

SEQ ID NO: 4918 - DNA, 4719 bp, Zea mays
  Clone ID: TF_ZM4891.C1.o15.fg
atgaggagggtaaaggcaataagaaacaaaagcacaacaaaggatgaggttacaaactcgcgagccaaagaagaggatatgaccaagagaaagaagagtgtggatcacgttgccatagaaaatcgggagagaatgatgctccaatatgctctgtcagtcgctctgaatggggtgttcaccatgcatacccttgagagtcttttccttagtcgggtgaggaagcgacaaatttttgttgcttttgctccaaggtggtaccaaatgaggaaaaacaagactgaagtgcgggaggactcggtcctccacttaggatcttttgcttataacttatcgggaggagtttgtgcctcccttggtttgtataatattactactctgcactcacttttagctctggtttactgcaatacgttgcatgaggaagtccatatactatactcacaattacaccctagtgagcctccacatcctgctgaggcagaagccggaccatctcacgttgcgggatgcgcgctgggtggggagttagacctttttgagccccctccttccttgagatgccgaccaggactcgaggacaggacgcagccggaacttctggggggaagggatgttaccccaaacccacctccggttcctcccacgttagccgaggcgattgccgccttggtgaatgccaccgcagacaatacccgcttccttagggaaatggcgggtcagcagcaattccagcagcaggcaggaagaggttatccgcaaggtccccgtgagaccacctatctggacttctctgaaacccgtccacccctattcgtcaaagctgaagatccccttgaagctgatgagtggattcgggttattgaacaaaagtttggtcttctctgttgctcagagacgcagaagccgttgttcgcagcacaacaactccgtggtcctgccagtacctggtggggaaattttgtggctattcaacctgtcaaccatcaatatgccatcgaccaggtgaatactgatttaaagaagaagaactgttttatgcggggactgaatgatcggctacaaaggaaaatggccacatgcatagatctcacgtatggaaaggctatcagcacagccttatctgttgaagccaaatacgcaaattctgggaagaataagggattcggtggtgagaggcctaatcagggccaggcgaagaagcaacagtttgtgatccgaccttcaaatcaaaatcgtcctttttctcgtccaccctcattccccttcaaacagcctatcattattcgccccaacaatacccccactaccccaaatcagccgggtgccccaggcactcgattccctgccttgcctagttcctcaactgggtgttttaattgtggcaagtcgggacacttcatcaaagactgcccatatcctaggcaaaatcaatcaaatgcttcgcaaggatctgggaaatcagctcagcccaaaggaaatgctgtggggaaaaaatacaaagaagacggggcatgtatattacactcaagtggctactacaccggaaggagagccagtgatgatggcaagaaatttgtggagcaacatcatattgcataccatgaatcaaaggagggatttaaaattcattcacctgggggacacatttatactagagaagtggcctatggagtgccagtaacaatggccggacggaactttcctgctaacatgattgttctgaagggccaggatatagatgtaatattgggtatgaattggttaacccaacacaaggcaattctcaacactgaactcagaaccgtcaggttgagctataatcaagaagagattcttttgactctccccgcaaccaatccagccaaagcttctggtagagtctatgaagccattgtaccggagatcaagaacattccggtagtatgtgagtttccagatgtatttccggaagatttgcctggactgccacctgaaagagatgtagaatttgtaattgagctaaagctcggtacggctcccatctcccgaagatcgtaccgtatgccccctaatgaattggcggaattgaagattcaattacaagatctactgaataagggattcatccggccaagctcgtccccatggggttgtcccgccatttttgttaagaagaaggatcaaaccttgcgcatgtgcgtggattatcgacccctgaatgaggtcaccatcaagaataagtaccctcttccaaggatcgacatcttatttgatcaactgactggggcgagggtattttccaaaattgatcttaggtccggctatcatcaaatccgtattcggcccgaggatataccgaagaccgcgtttactacgcggtatggattgtttgaatacctggtaatgtctttcgggctcacaaatgctcctgcccacttcacctatttgatgaactcggtgtttatgcccgagttggacaagttcgtggtagtcttcatcgacgatatcttgatatattctaaaaatgaagaggaccatgctcagcatctacggattgtattgacgcgcctcagggaacatcagctatatgccaagttcagcaagtgcgcgttctggctggaagaaattcaatttttggggcacgtgttatcggctaaaggaattgcggtagatcctagcaaggtcaaagatattctggagtggaaacccccaaccactgttcaccaagtccggagttttcttggactagctgggtattatcgcaggttcataccagatttttctaagcttgtgaagccaatcacaagtttattgaagaatgacattaagttcaattggtcttctaagtgtaatgaagcctttgcgcaattgaagacactattgaccactgctccggtattggctcaaccggacatcactaaaccttttgatgtatattgtgatgcatctggcagtgggctcggctgtgtactgatgcaagagggccgagtaattgtgtatgcttcacggcagttgcgccgacatggggagcattacccaactcatgatctggagctagctgctgtgtcagaattaaatatgagacaaacacgatggcttgagcttattaaagactatgaactggagatccattatcacccaggcaaagccaatgtggtggcagatgcattgagtcgtaagacttcctgccactgtcttatggcgaagacctccgagaacactttgtgtcaagagatggaaaagctaaacctggggatcctccaacaagggactctgaatcagctaaagcttgagtcaatcattttgcaaaggataattgatgctcaaaaggataatctgggtatgaagcacatacgagagaagataagagctggagtagccaagtgtttcaaggaagacgatcaaggtgtgatatggtttaaaaaccgcatagtagtgccaaagaacgaagaactccgccagcaaattcttgatgaagcacatcttagtcgttattctattcatcccggaagcactaagatgtaccaagatttaaagcagcattactggtggacaaagatgaagattgaaattgcacgctatgtggctagatgtgacacttgcaaacgtgtcaaggccatacacatgaaaactgctggtccattacaatctttgccaatcccaacatggaaatgggaagacatcagtatggactttattgtgggactgcctaggacggccaaagggtatgattctatttgggttatcgttgatcgactcacaaagattgcccacttcttacccgtcagggccaaatatacagtagccacttatgcagcattatatatcgaccgtattctcagtttgcatggtattccaaagaccatagtgtcggatcgtggacctcagttcgtatccaagttttgggaagaacttcataaatccttgggtaccaaattgctccacagttcggcctatcatcctcaaaccagtggacagactgagagagtgaatcagatactcgaggatatgctgcgggcatgtgttctggacttctcgcaaaaatgggatgaatgtttgcccttagcggaattttcatacaataacagttatcaagaaagtatcaagatggcaccttttgaagctttatatggacgacagtgtcgaactccgctaaattggtctgaacctggagaaagatacttctttaggcctgatatggtgaaagaggtcgaagaaaaggttcagagaattattcataatatgaagaaagctcagactcgacaaaagagttatgcagaccgacgacgacaacccttatgctttctggtagacgactatgtctacttaaaagtttcaccaatgaagggtgtatcgtgtttcggggttaaagggaagcttgcacccaggtacattggtccattcctggtgattgagcaatgtggaccagtggcatatcgactccaactccccgaaacattgtctgctgtgcataatgtgttccacgtgtcacaattgaagaagtgtcttcgggttcctgatcgaaccgttgaagtgacagatgttgtcctagaaccagatttaacatactcggaacatcctattcgagttctggatcaaaaggacagggttacccggagaaaaactctcaagttctacaagatacagtggaaccagcattctgaagatgaggctacttgggaaactcaagacttcttgaacaagaatttcccaggctttttagcctcttgtaaattgtaa

SEQ ID NO: 4919 - DNA, 4623 bp, Zea mays
  Clone ID: TF_ZM4893.C6.o6.fg
atgccgccacgtaccaggctaacggcccgcaagtctacgggaccaattggggtgcctcggcatcaattggctccccgacatgaaagtagcagcagtggaagtaacgaccctattggagaccttgaagctcgtgatcaactcgctgatcgagacttagcacttgactgggccgtacagtctcgtttgctaatgtgtgctaaggaagtaagggctcaggcccgagttaaagaacttagctcgactgttgataacctgcagatgccgatcaggactcgaggacaggatgcagcaggaacttctgggggacgggatgttaccccaaacccacctccggttcctcccacgttagccgaggccatcgccgccttggtgaatgccaccgccgataatacccgcttccttagggaaatggcgggtcagcaacaattccagcagcaggcgggaagaggttatccgcagggtccccgtgtgaccacttatctggatttctcggaaactcgtccacctctattcgtcaaggcagaagatcccctagaagctgacgagtggattcgggttatcgagcaaaaatttggtcttctccgttgctcagagacgcaaaagccgttgttcgccgcacaacaactccgtggtcctgccagtacctggtggggaaattttatggctattcaacctgacaaccatcaagtcacctgggatgagtttaaagcagccttccgtgaacactacatccccgaaggagtgctgcatatgaaacaagaggagtttatgaagttacaacaaggtggagataccgtcaaccaatatctcaacaaattcaatcacctgtcgcagtatgccatcgaccaggtgaatacggatttaaagaagaagaactgttttatgcggggtctgaatgatcggctacaaaggaaaatggccacatgtatagatctcacatatggaaaggctgtcagcatggccttatctgttgaagccaagtacacaaattctgggaagaataagggattcggtgcctatcattatccgcccaataatacccccactaccccaaaacagccgggtgccccaggcactcgatttcctgccttgcctagttcttcaactgggtgctttaattgcggcaagtcgggacactttatcaaagactgcccatatcctaggcaaaatcaatctaatgcttcgcaaggatctgggaaatcagctcagcctaaaggaaatgctgtggggaagaatacaaagaagacagggcgtatatattacactcaagtggctactacaccggaaggagagccggtgatgatgggtacgtttcccgtggccagtcacccagcaattattctttttgattctggtgcttcacatacatttattagcaagaagtttgtggaacaacatcatattgcataccatgaatcaaaggagggatttaaaattcattcacctgggggacacatttatactaaagaagtggcctatggagtgccagtaacaatggccgaacggaactttcctgctaacatgattgttctgaaaggccaggatatagatgtaatcttgggtatgaattggttaacccaacacaaggcaatcctcaacactgaactcagaaccgtcaggttgagctataaccaagaagagattcttttgactctccccgcaaccaatccagccaaagcttctggtagagtctatgaagccattgtaccggagatcaagaacattccggtagtacgtgagtttccagatgtatttccggaagatttgcctggactgccccctgaaagagatgtagaatttgtaattgagctaaagcccggtacggctcccatctcccgaagatcgtaccgcatgccccctaatgagttggcggaactgaagattcaattacaagatctactgaataagggattcatccggccaagctcgtccccgtggggttgtcccgccatttttgttaagaagaaggaccaaaccttgagaatgtgcgtggattatcgacccctaaatgaggtcactatcaagaataagtaccctcttccaaggatcgacatcttatttgatcaattgactggggcgagggtattttccaaaattgatctcaggtcgggctatcatcaaatccgtattcggcccgaggatataccgaagaccgcgtttactacgcgatatggattgtttgaatacttggtaatgtctttcgggctcacaaatgctcctgcccatttcacttatttaatgaactcggtgttcatgcccgaattggacaagtttgtggtagtcttcatcgacgatatcttgatatattccaagaatgaagaggaccatgctcagcatttacggattgtattgacgcgcctaagggaacatcagctatatgccaagtttagtaagtgcgcattctggctggaagaaattcaatttttggggcacgtattatcagctaaaggaattgcggtagatcctagcaaggtcaaagatattctggaatggaaacctccaaccactgttcaccaagtccggagttttcttggactagctgggtattatcgcagattcataccagatttttctaagcttgtgaagccaatcacaagtttgttgaagaatgacattaagttcaattggtcttctaagtgcaatgaagccttcgagcaactgaagacactattgaccactgctccggtattagctcaaccggacatcactaaatcttttgatgtatattgtgatgcatctggcagtgggctcggctgtgtactgatgcaagagggccgagtgatcgcgtatgcttcgaggcagttgcgccgacatgaggagcactatccaactcatgatctggagctagctgctgtggttcatgccctaaagatttggcgtcactatctgctgggtaatatctgtcacatatatacagatcataaaagtctgaagtacatctttacccagtcagagttaaatatgagacaaagacgatggcttgagctcatcaaggactatgaactggagatccattatcacccaggcaaggccaatgtggtggcagatgcattgagtcgtaagacttcctgccactgtcttatggcaaagacctccgagaacactttgtgtcaagaaatggaaaagctaaacctggggatcatccaacaagggactctaaatcaactaaagcttgagtcaatcattttgcaaagaataattgatgctcaaaaggataatctgggtatgaagcacattcgagagaagataaaggctggagtagccaagtgtttcaaggaagacgatcaaggtgtgatatggtttaaaaaccgcatagtagtgccaaagaacgaagagctccgccagcaaattctggatgaagcacatcttagtcgctattctattcatcccggaagcactaagatgtatcaagacctaaaacaacattactggtggactaagatgaagattgaaattgcacgctatgtggctaagtgtgacacttgtagacgtgtcaaggccatacacatgaaaaccgctggtccattacaatctttgccaatcccaacatggaaatgggaagacatcagtatggactttattgtgggattacccaggacggccaaagggtatgattctatttgggttatagttgatcgactcacaaagattgcccacttcttacctgttaaggtcacatatacaatcgccacttatgcagcattatacattgcccgtattctcagtctgcatggtgttccgaaaaccattgtgtcggatcgtggacctcaatttgtagccaagttctgggaagcacttcacaactccttgggtactaaattactccacagttcggcttatcatcctcaaaccagtggacagactgagagggtgaaccaaatacttgaagatatgctgcgggcatgtgtcctggatttctcaccaaaatgggatgaatgtttgcccctagcggagttttcatacaataacagttatcaagaaagtatcaagatggcaccttttgaagctttatatggacgacggtgtcgaactccgctaaattggtctgaacctggagaaagatatttctttaggcctgatatggtgaaagaggtcgaagaaaaggttcagaaaattgttcataatatgaagaaagctcaggctcgacaaaagagttatgcagaccgacgacgacaacccttatgctttctggtagacgattatgtctacttaaaggtttcaccaatgaagggtatatcgcgtttcggggttaaagggaaacttgcacccaggtacattggtccatttttggtgcttgagcaatgtggaccagtggcataccgacttcagctccccgaaacattgtctgctgtgcataatgtattccacgtgtcacaattgaagaagtgtcttcgggttcctgatcgaaccgttgaagtgactgatgttgtcctggaaccagatttaacatactcggaacatcatattcgagttctggatcaaaaggacagggtcacccgaagaaagactctcaaattctataagatacagtggaaccagcattctgaagacgaggctacatgggaaacccaagacttcttagataagaatttcccaggctttctagcctcatgtaaattgtaa

SEQ ID NO: 4920 - DNA, 5610 bp, Zea mays
  Clone ID: TF_ZM4903.C4.o1.fg
atgtcgggagatcacgccaagaaggagatggagaccggcgaaaagcccactacaagccacgggagcacttcatcggaagagtcccgcaccaagaggaaggagaagaagaagagctcctccaacaaaggaaaggagaagaaatcttcttcgcaccacaaagagaagaaggagagatcttcctcccacaagccacatcggagaggggacaagcacaaaaggatgaggaaagtggtctactatgagaccgacacttcatcagcatcgacctctaactccgatgcgccctccgtaacttctaaacgccaagagcgtaagaagtttagtaagatccccctacattaccctcgcatttctaaaaatgcacatttactttccgtcccattaggcaaaccaccaactttcgatggtgaagattatgctaggtggagtgatttaatgcgatttcatctaacctcactccacaaaagtatatgggatgttgttgagtttggtgcacaggtaccatccgtaggggataaagactatgatgaggatgaggtggcccaaatcgagcacttcaactctcaagcgacaacaatactcctcgcctctttaagtagagaggagtataacaaagttcaagggttgaagagcgccaaggaggtttgggatgtgctcaaaaccgcacacgaaggagatgagctcaccaagatcaccaagcgggaaacgatcgagggggagctcggtcggttccggcttcgcaaaggggaagagccacaacacatgtacaaccggctcaagactttggtgaaccaagtgcgcaacctcgggagcgtcaagtgggacgaccacgaaatggttaagatatatactaaaatgacccccgaggaagttatcgggaattttgtaagttttgagtgcatgatcgaaggctcgaggaagatcaacgagcttgatgattccaccacatccgaagctcaacccgtcgcattcaaggcgacggaggaaaagaaggaggaggctacaccaagtcgacaaccaatcgacgcctccaagcttgacaatgaggagatggcgctcgtcatcaagagcttccgccaaatcctcaaacaaaggagggggaaagactacaagccccgctccaagaaggtttgctacaaatgtggtaagcccggtcattttattgctaaatgtcctatatcaagtgacagtgaccgaggcgacgacaagaaggggagaagaaaggagaaaaagaagtactacaagaagaagggcggcgatgcccatgtttgtcgggagtgggattccgacgaaagctcaagcgactcctccgacgacgaggacgccgccaatatcgccgtcaccaagggacttcttttccccaacgtcggccacaagtgcctcatggcaaaggacggcaaacggaagaaggttaaatctaactcctccactaaatatgagtcttctagtgatgataatgatagtgatgaggaggataatttgcgtgttctctttgccaatcttaacatggagcaaaaagaaaaattaaatgacttgattagtgctattcatgaaaaggatgaccttttggactcccaagaggattgtctaattaaagaaaacaagaaacatgttaaggttaaaaaggcttatgctctagaagtagaaaaatgtgaaaaattatctagtgagctaagcacttgccgtgagatgattgacaaccttaggaatgaaaatgctagtttaaatgctaagattgattctcatgtttgcattgtttcaactttcaatcctaagaataataatgatgatttgcttgctaagattgaagaattgaatatttctcttgctagccttagagtagaaaatgataatttgattactaaggctaaagattatgatgtttgcaaagttacaatttccgatcttagagataaaaatgatattcttcatgctaagattgttgaacttaattcttgcaaaccctctacatctattgttgagcatgtatctatttgtactagatgtagagatgttgatgttaatgctattcatgatcatatggctttaattaaacaacaaaatgatcatatagcaaaactagatgctaaaattgccgagcacaacttagaaaatgagaaatttaaatttgctcgtagcatgctttataatgggagacgccctggcattaaggatggcattggcttccaaaagggagacaatgacaaacttaatgcccctcctaagaacttgtctaactttgttaagggcaaggctcccatgcctcaggataacgagggctacattttgtaccctgccggctatcctgagagcaaaattaggaaaattcattctaggaagtctcactctggccctaatcatgcttttatgtataagggtgagacatctagctctaggcaaccaacccgtgctaagttgcctagaaagaaaactcctaatgcatcaaatgatcatgacatttcatttaaaacttttgatgcttcttatgtgcttactaacaaatccggcaaggtttatgcatccgggggctcaagttggatactcgatagcgggtgcacaaaccacatgactggggagaagaagatgttctcctcatatgagaaaaaccaagatccccaacgagctatcacattcggggatggaaatcaaggtgtcactgtctttagaagaagtgatgattcaatagcatttaagggagtgttagaggatcagctatacttagtagattttgatagagctgaactcgacacttgcttaattgctaagactaacatgggttggctctggcaccgccgactagcccatgttggaatgaagaatcttcataagcttctaaagggagaacacattttaggattaacaaatgttcattttgagaaagacaggatttgtagcgcatgtcaagccgggaagcaagttggaacccaacatccacacaagaacatcatgacgaccgacaggccgcttgagctactccacatggatctattcggcccgattgtgtacataagcatcggcgggagtaagtattgtcttgtaatagtggatgattattctcgcttcacctgggtattctttttacaggaaaaatctcaaacccaagagaccttaaagggattcttgagacgggctcaaaatgagttcggcttaaggatcaagaaaataagaagcgacaacgggacggagttcaagaactctcaaattgaaggcttccttgaggaagagggcatcaagcatgagttctcttctccctacactccacaacaaaatggtgtagtggagaggaagaatcgaactctattggatatggcaagaaccatgcttgatgagtacaagacttcggatcggttttgggcggaggcagtcaacaccgcttgctacgccatcaaccggttatatctacaccgaatcctcaagaagacatcatatgaactcctaaccggtaaaaagcccaacatttcatattttagagtctttggtagcaaatgctttattcttgttaagagaggcagaaaatctaaatttgctcctaagactgtagaaggctttttacttggttatgactcaaacacaagggcatatagggtctttaacaagtccactggactagttgaagtctcatgtgacgttgtgtttgatgaaactaacggctctcaagtagagcaagttgatcttgatgagataggtgaagaacaggctccatgcatagcgctaaggaacatgtccattggggatgtatgtcctaaggaatccgaagagcctccacatgcacaagatcaaccatcctcctccacgctagcatctccaccaactcaaaatgaggatgaagctcaagttgatgaagtagaagatcaagcaaatgagccacctcaagatgacgacaataatcaagggggagatgcaaatgatcaagacaaggaggatgaagagcaaaaaccgccacacccaagagtccaccaagcaatacaacgagatcaccccgtcgacactatcctcggcgacattcataagggggtaactactagatctcgtgttgcacatttttgtgagcattactcgtttgtttcctctattgagccacacagggtagaggaagcactacaagattcggattgggtggtggcgatgcaagaggagctcaacaatttcacaaggaacgaggtatggcacttagttccacgtcctaaccaaaatgttgtaggaaccaaatgggtcttccgcaacaagcaagatgagcatggtgtggtgacaaggaacaaagctcgacttgtggccaaaggatactcccaagtcgaaggtttggatttcggtgaaacctatgcacccgtagctaggcttgagtcaatccgcatattattagcctatgctacttaccatggctttaagctttatcaaatggacgtgaaaagtgccttcctcaatggaccaatcaaggaagaggtctatgttgagcaacctcccggctttgaaaacagtgagtatcctaaccatgtctataagctctctaaggcgctttatgggctcaagcaagccccaagagcatggtatgaatgccttagagattttcttattgctaatggcttcaaagtcggaaaggccgatcctacactctttacaaaaactctcaaaaatgacttgtttgtatgccaaatttatgttgatgatattatatttgggtctactaacgagtctacatgtgaagagtttagtaggattatgacacagaaattcgagatgtctatgatgggggagttgaagtatttcttaggattccaagtgaagcaactccaagagggcaccttcattagccaaaccaaatacactcaagacattctaaacaagtttgggatgaaggatgccaagcccatcaagacacccatgggaaccaatgggcatctcgacctcgacacaggaggtaagtccgtggatcaaaaggtataccggtcgatgataggttccttactctatttatgtgcttctcgaccggacattatgctttccgtttgcatgtgtgcaagattccaatctgaccctaaggaatcccaccttacggccgtaaaacgaatcttgagatatttggcttattctcctaagtttgggctttggtaccctcggggatccacatttgatttaattggttattcggatgccgattgggcggggtgtaagattaataggaagagcacatcggggacttgccagttcttggggagatccttggtgtcttgggcttcaaagaagcaaaattcagtcgctctttcaaccgccgaagccgagtatattgccgcaggtcattgttgcgcgcaattattatggatgaggcaaaccctgcgggactacggttacaaattaaccaaagtccctttgctatgtgatattgagagtgcaattaaaatggccgacaatcccgtcgagcatagccgcactaaacacatagccatacggtatcattttcttagggatcgccaacaaaagggggatatcgagatttcatacattaacactaaagatcaattagccgatatctttaccaagccacttgatgaacaaacttttaccaaacttaggcatgagctcaatattcttgattctagaaatttcttttgctag

SEQ ID NO: 4921 - DNA, 5766 bp, Zea mays
  Clone ID: TF_ZM4904.C2.o1.fg
atgtcgggagatcacgccaagaaggagatggagaccggcgaaaagcccactacaagccaagggagcacttcatcggaagagtcccgcaccaagagaaaggagaagaagaagatctcctccaacaaagggaaggagaagaaatcttcttctcatcacaaagagaagaaggaaaaatcttcttcccacaagccacatcggagcggtgacaagcacaagaggatgaggaaggtggtctactacgagaccgacacttcatcaccttccacctccggctccgacgcggcatccgtcacttctaagcgccaagagcgcaagaagtatagtaagattcccctacgctaccctcgcatttcaaagcatacacctttactttccgtcccattaggcaaaccaccaacttttgatggtgaagattatgctaggtggagcgatttaatgcgatttcatctaacctcgctccacaaaggtatatgggatgttgttgagtttggtgcgcaggtaccgtcagtaggggatcaagactatgatgaggatgaggtggcccaaatcgagcacttcaactcacaagccacaacaatactcctcgcctcactaagtagagaggaatataacaaagtacaagggttgaagaacgccaaggaggtttgggatgtactcaaaaccgcgcacgagggagacgagctcaccaagatcaccaagcgggaaacgatcgagggggagctcggacggttccggcttcacaaaggggaggagccacaacacatgtacaaccggctcaagactttggtgaaccaagtgcgcaacctcgggagcaagaagtgggacgaccacgaagtggtaaatgttattttaagatctctcatttttcttaatcccactcaagttcaattgattcgtggtaatcctagatatactaaaatgacccccgaggaagttatcgggcattttgtaagttttgagtgcatgatagaaggctcgaggaaaatcaacgagcttggagacccatccgaagcccaacccgttgcattcaaggcaacggaggagaagaaggaggagtctacaccaagtagacaaccaatagacgcctccaagctcgacaatgaggaaatggcgctcgtcatcaagagcttccgccaaatcctaaagcaaaggagggggaaagactacaagtcccgctccaagaaggtttgctacaagtgtggtaagcccggtcattttattgctaaatgtcctatatcaagtgatagtgaccgaggcgacgacaagaaggggagaagaaaggagaagaagaggtactacaagaagaagggcggcgatgcccatgtttgtcgcgagtgggactccgacgaaagctcaagcgactcctccgacgacgaggacgccgccaacatcgccgtcaccaagggactcctcttccccaacgtcggccacaagtgcctcatggcaaaggacggcaaaaagaaggttaaatctaaatcctccactaaatatgaatcctctagtgatgacaatgctagtgatgaggaagataatttgcgttccctttttgccaaccttaacatagctcaaaaggaaaaattgaatgaattggttagtgctattcatgaaaaggatgaccttttggattcccaagaggattgtctaattaaagaaaacaaaaaacatgttaaggttaaaaaggcttatgctcttgaaattgagaaatgtgaaaaattatctagtgagctaagcacttgtcgtgagatgattgacaaccttagaaatgaaaatgctattttaaatgctaaggttgattcacatgtttgtaatgtttcaattcccaatcttagagatgataatgttgacttgcttgctaagattgatgaattaaatgtatctcttgctagccttagattagagaatgaaaatttaattgctaaggctaaagattttgatgtttgcaaagttacaatttccaatcttaaagataaaaatgatattcttcatgctaagattgtggaacttgattcttgcaaaccctctacatctaccattgagcatgtcactatttgtgctagatgtagagatattgatgttaatgctattcatgatcacataatcttgattaagcaacaaaatgatcatatagctaaacttgatgctaaaattgccgagcacaacttagaaaatgagaaatttaaatttgctcgtagcatgctttataatgggagacgccctggcattaaggatggcattggcttccaaaggggagacaatgtcaaaattagtgcccctcctaaaagattgtcaaattttgttaagggcaaggctcccatgcctcaggataacgagggttacattttataccctgccggttatcccgaggacaaaattaggaaaattcattctaggaagtctcactctggccctaatcatgcttttatgtataagggtgagacatctagctctaggcaaccaacccgtgccaagttgcctagaaagaaaactcctaatgcatcaaatgatcatgccatttcatttaaaacttttgatgcttcttatgtgcttactaacaaatccggcaaagtagttgccaagtttgttgggggcaaacacaagggttccaagacttgtgtttgggtacccaaagttcttgtgtctaatgccaaaggacccaaaaccgtttgggtttatgcatccgggggctcaagttggatactcgacagcgggtgcacaaaccacatgaccggggagaaaaggatgttctcctcatatgagaaaaaccaagatccccaacgagctatcacattcggggatggaaatcaaggtgtcactgtctttagaagaagtgatgattcaatagcatttaagggtgtgttagagggtcagctatacttagtagattttgatagagctgagctcgacacatgcttaattgctaagactaacatgggttggctctggcaccgccgactagcccatgttgggatgaagaatcttcataagcttctaaagggagagcacattttaggattaacaaatgttcattttgagaaagacaggatttgtagcgcatgccaagcagggaagcaagttggcactcatcatccacacaaaaacataatgacgactgacaggccactggagctcctacacatggatctattcggcccgatcgcttacataagcatcagcgggagtaagtactgtctagttattgtggatgattattctcgcttcacttgggtattctttttgcaggaaaaatctcaaacccaagagaccttaaagggattcttgagacgggctcaaaatgagttcggcttaaggatcaagaaaataagaagcgacaacgggacggagttcaagaactctcaaattgaaagctttcttgaggaagagggcatcaagcatgagttctcttctccctacactccacaacaaaatggtgtagtggagagaaagaatagaactctattggacatggcaaggaccatgcttgatgagtacaagacttcggatcggttttgggcggaggcagtcaacaccgcttgctacgccatcaaccggttatatctacaccgaatcctcaagaagacatcatatgaactcctaaccagtaaaaagcccaacatttcatattttagagtctttggtagcaaatgctttattcttgttaaaagaggtagaaaatctaaatttgctcctaagactgtagaaggctttttacttggttatgactcaaacacaagggcatatagggtctttaacaagtccactggactagttgaagtctcatgtgacgttgtgtttgatgaaactaacggctctcaagtagagcaagttgatcttgatgagataggtgaagaacaggctccatgcatagcgctaaggaacatgtccattggggatgtgtgtcctaaggaatccgaagagcctccaaaagcacaagatcaaccatcctcctccacgcaagcatctccaccaactcaaaatgaggatgaaactcaagttgatgaagtagaagatcaagcaaatgagccacctcaagatattggcaatgatcaagggggagatgcaaatgaggaagacaaggaggaagaggaacaaaggccgccacacccaagagtccaccaagcaatccaacgagatcaccccgtcgacaccatcctcggcgacattcataagggggtaaccactcgatctcgtgttgcacatttttgtgaacattactcttttgtttcctctattgagccacacagggtagaggaagcacttcaagattcggattgggtggtggcgatgcaagaggagctcaacaacttcactagaaatgaggtatggcatttggttccacgtcctaaccaaaatgttgtaggaaccaaatgggtcttccgcaacaagcaagatgagcatggtgtggtgacaaggaataaagctcgactcgtggtcaaagggtattcacaagtcgaaggtttggatttcggtgaaacctatgcacccgtagctaggcttgagtcaattcgcatattattggcctatgctacttaccatggctttaagctttatcaaatggacgtgaaaagtgccttcctcaacggaccaatcaaggaagaggtctatgttgagcaacctcccggctttgaagacagtaagtatcctaaccatgtttataagctctctaaggcgctttatgggctcaagcaagccccaagagcatggtatgaatgccttagagatttccttattgctaatggcttcaaagtcggtaaagccgatcctacactctttactaaaactcttgaaaatgacttatttgtatgccaaatttatgttgatgatattatatttgggtctactaacgagtctacttgtgaagagtttagtaggattatgacacagaaattcgagatgtctatgatgggggagttgaagtatttcttaggattccaagtgaagcaactccaagagggcaccttcattagccaaacgaagtatactcaagacattctaaacaagtttgggatgaaggatgccaagcccatcaagacacccatgggaaccaatgggcatctcgacctcgacacgggaggtaagtccgtggatcaaaaggtataccggtcgatgattggttcattgctttatttatgtgcatctcgaccggacattatgctttccgtatgcatgtgtgcaagattccaagccgaccctaaggaagctcaccttacggtcgtaaaacgaatcttgagatatctggcttatactcctaagtttgggctttggtatcctaagggatccacatttaatttgattggttattcggatgccgattgggcggggtgcaaaatcaataggaagagcacatcggggacttgccagttcttgggaagatccttggtgtcttgggcttcaaagaagcaaaattcggtcgctctttccaccgccgaagccgagtacattgtcgcaggccattgttgcgcgcaattactttggatgaggcaaaccctgcgggactacggttacaaattaaccaaagtccctttgctatgtgataatgagagtgcaatcaaaatggccgacaatcccgtcgagcatagccgcactaagcacatagccattcggtatcactttttaagggatcaccaacaaaagggagatatcgagatttcatacattaatactaaagatcaattagccgatatctttaccaagcctcttgatgaacaatcgtttaacaaacttaggcatgagctaaatattcttgattctaggaatttcttttgttaa

SEQ ID NO: 4922 - DNA, 4803 bp, Zea mays
  Clone ID: TF_ZM4920.C3.o16.fg
atggagaccggcgacaagtccactacaagccacgagaaggcttcatcggaagagtcccgcaacaaagggaaagggaaggagaagaaatcctcttcccacaagtcgcatcggagtggtgacaagaaaaagaagatgaggaaggtggtctactacgagaccgatacttcatcaccttccacctccggctccgacgcgccatccattacttctaagcgccatgagcgcaagaagtttagtaagatccccctacgctaccctcgcatttctaaacatacacctttactttccgttccattaggcaaaccaccaacatttgatggtgaagattatgctaggtggagtgatttgatgcgatttcatctaacctcactccacaaaagtatatgggatgttgttgagtttggtgtacaggtaccatccgtaggggacaaagattatgatgaggatgaagtggcccaaatccaacacttcaacccccaagcctcaactatactcctcgcctctctaagtcgagaggagtataacaaggtgcaagggttgaaaggtgccaaggaaatttgggacacgctaaagaccgcgcacgaaggagatgaggtgaccaaaatcaccaagcgggaaacgatcgagggggagctcggtcgcttccgacttcgccaaggggaagagccacaagacatgtacaaccggctcaaaaccttggtgaaccaagtgcgcaacctcgggagcaagaaatgggatgaccacgaaatggttaaggttattttaagatcactcgttttccttaaccctactcaagttcaattaattcgtggcaatcctagatatacactaatgactcccgaggaagtaatcgggaattttgtgagctttgaattgatgatcaaaggctcaaagaagatcaacgagcttgacggcccctccacgtccgaagcacaaccggtcgcattcaaggcgacggaagaaaagaaggaggaatctactccatgtcgaacacccatcgacgcctccaagctcgacaacgaggaaatggcgctcgtcatcaagagctttcgccaaatcctcaagcaaaggagagggaaagattacaagccccgctccaagaaagtgtgctacaaatgtggtaagcccggtcactttatagcaaaatgtcctatttctagtgacagtgacaggggcgacgacaagaagggaagaataaaggagaagaagaaatactacaagaagaagggtggcgacgcccatgtatgccgcgagtgggattcggacgagagctcctccgactcctcctccgacgaggacgccgccaacatcgccatcaacaagggccttctcttcccaaacatcggccacaagtgcctcatgacaaaggacggcaaaaagaagaaggttaaatccaaatcctccactaaatatgagtcctctggtgatgataatgctagtgatgaggaggataatttacgtaccctttttgccaacctaaacatgcaacaaaaggaaaagttaaatgaattaattagtgccatccatgagaaggatgacctcctggacacccaagaggacttcctaatcaaggaaaacaaaaagcatgttaaggttaagaatgcttatgctctagaagttgaaaaatgtgagaaattaattagtgagctaagcacttgccatgatattatcaacaaccttaaaaatgaaaatgctagtttaattgctaaggttgattcaaatgcttgtaatatttcaattcccaatcttagaaatgataatgttgatttgcttgctaagattgaagaattgaacatttctcttgatagccttagaattgaaaatgaaaaattaattgctaaggctaaagaattagatgtttgcaatgcttcaatttccgaccttagaagtaaaaatgatatattacatgctaaggttgtagaattaaaatctagcaaaccatctacatctaccgttgaacatacttctatttgcactagatgtagagatgttgatattgatgctattcatgatcatatggtattaattaagcaacaaaatgatcatatagcaaaattagatgctaaaattgtcgagcatgaacttgaaaatgaaaaatttaaatttgctcgtagtatgctttatagtgggagacgccctggcattaaggatggcattggcttccaacagggaggcaatgtcaaacttaacgcccctcctaaaagattatctaattttgttaagggcaaggctcccatgcctcaagataacgagggttacattttgtaccctgctggttatcctgagagcaaaattaggagaattcactctaggaagtctcactttggccctaaccatgcttttatgtataagggtgagacatctagttctaggcaaccaacccaagctaagttgcctaagaagaaaactcctagtgcatcaaatgatcatgacatttcatttaaaacttttgatgcatcttatgttttaactaacaaatccggcaaggtttatgcatccgggggctcaagttggatcatcgacagtgggtgcacaaaccacatgacaggggagaagaaaatgttcccctcctacgagaaaaaccaagatccccaacgagctatcacattcgaggatggaaatcaaggtgtcactgtctttagaagaagtgatgattcagtagcatttaagggagtgttagagggtcagctatacttggtagattttgatagagctgaactcgacacttgcttaattgctaagactaacatgggttggctctggcaccgccgattggcccatgttgggatgaagaatcttcataagcttctaaagggagagcacattttaggattaacaaatgttcattttgagaaagacaggatttgtagcgcatgccaagcagggaagcaagttggtgttcatcatccacataagaacatgatgatgactgacagaccgctcgagctcctacacatggacctattcggcccgatagcttacataagcatcggcgggagtaagtactgtctagttattgtggatgattattctcgcttcacttgggtattttttttgtacgataaatctcatacccaagagaccttaaaaggattcttgagacgggctcaaaacgagttcggcttaaggatcaagaaaataagaagcgacaatggaacggagttcaagaactctcaaattgaaggcttccttgaggaggagggtatcaagcatgagttctcttctccctacaccccacaacaaaatggtgtagtggagaggaagaatagaactctgttggacatggcaagaaccatgcttgatgagtacaagacttcagatcggttttgggccgaggcagtcaacaccgcctgctatgccatcaaccggttgtatctacaccgaatcctcaagaagacatcatatgaactcctaaccggtaaaaagcccaatatttcatattttagagtctttggtagcaaatgctttattcttgttaaaagaggtagaaaatctaaatttgctcctaagactgtagaaggctttttactaggatatgattcaaacacaagggcatatagagtctttaacaagtccactggacaagttgaagtttcttgtgacgttgtgtttgatgagactaacggctctcaaatagagcaagttgatcttgatgatataggtgatgaagaggctccgtgcatcacgctaaggaacatgtccattggggatgtgtgtcctaagcaatacgaagagcctccaaatgcacaagatcaaccatcctcctccacgcaagcatctccatcgacccgaaatgaggatgaggctcaagttgatgaaggagaagaacaaagagatgagccacctaaagatgacggcaatgatcaagggggagatgcaaataaccaagacaaggaggatgaagaaccaaggccaccacacccaagagtccatgaagcaatccaacgagatcacctcgtcgacaccattctcggcgacatccataagggggtaaccactagatctcgtgttgcacatttttgtgagcattactcttttgtttcctctattgagccacacagggtagaggaagcacttcaagattcggattgggtggtggcgatgcaagaggagctcaacaacttcactaggaacgaggtatggcatttggttccacgtcctaatcaaaatgttgtaggaaccaagtgggttttccgcaacaagcaagatgagcatggtgtggtgacaagaaacaaagcccgacttgtggccaaggggtactcccaagtcgaaggttttgatttcggtgaaacctatgcacccgtagctaggcttgagtcaattcgtatattattagcctatgctacttaccatggcttcaagctttaccaaatggacgtgaagagtgccttcctcaatggaccaatcaaggaagaggtctatgttgagcaacctcctggctttgaagatagtgagtaccctaaccatgtttacaaactctctaaggcgctttatgggctcaagcaagctccaagagcatggtatgaatgccttagagatttccttatcactaatggattcaaagtcggaaaggccgatcctacactctttaccaaaacacttgaaaatgatttgtttgtatgccaaatttatgttgatgatattatatttgggtctactaacgaatctacatgtgaagagtttagtaggatcatgacacaaaaattcgagatgccaatgatgggagagttgaagtatttcttaggatttcaagtaaagcaactccaagagggcaccttcattagccaaacgaagtatacttaa

SEQ ID NO: 4923 - DNA, 5064 bp, Zea mays
  Clone ID: TF_ZM4923.C3.o1.fg
atggagaccggcgaaaagcccactacaagccacgggagcacttcatcggaagagtcccgcaccaagaggaaggagaagaagaatatctcctccaacaaagggaaggagaagaaatcttcttctcaccacaaagagaagaaggaaaaatcttcttccctcaagccgcatcgaagcggaaacaagcaaaagaggatgaggaaagtggtctactacgagaccgacacttcatcaacatcgacctccgactccgatgtgccctccgtaacttctaaacgccaagagcgtaagaagtttagtaagatccccctacactaccctcgcatttctaaacatgcacctttactttccgtcccattaggcaaaccaccaacttttgatggtgaagattatgctaggtggagtgatttaatgcgattccatctaacctcactccacaaaagtatatgggatgttgttgagtttggtgcacaggtaccatccgtaggggataaggattatgatgaggatgaggtggcccaaatcgagcacttcaactctcaagcaacaacgatactcctcgcctctttaagtagagaggagtataacaaagtgcaagggttgaagagcgccaaggaggtttgggatgtgctcaaaaccgcgcacgagggagacgagctcaccaagatcaccaagcgggaaacgatcgagggggagcttggtcggttccggcttcgcaaaggggaggagccacaacacatgtacaaccggctcaagaccttggtgaaccaagtgcgcaacctcgggagcgtaaagtgggatgaccatgaaatggttaaggttattctaagatctcttattttccttaaccctactcaagttcaattaattcgtggtaatccaagatatactaaaatgacccccgaggaagtaatcgggcattttagcttccgccaaatcctcaagcaaaggagagggaaagactataagtcccgctccaagaaggtttgctacaaatgtggtaagcccggtcattttattgctaaatgtcctatatcaagtgacagtgaccgaggcgacgacaagaaggggagaagaaaggagaagaagaggtactacaagaagaagggcggcgatgcccatatttgtcgggagtgggactccgacgaaagttcaagcgactcctccgacgacgaggacgccgccaacatcgccgtcaccaagggactcctcttccccaacgtcggccacaagtgcctcatggcaaaggacggcaaaaggaagaaggtaaaatcaagatcctccactaaatatgaaacctctagtgatgaaaatgctagtgatgaggaggataacttgcgtaccctttttgccaatcttaacatggaacaaaaagaaaaactaaatgagttaattagtgctattcatgaaaaggatgaccttttggattcccaagaggattgtctaattaaagaaaacaagaaacatgttaaggttaaaaatgcttatgctctagaaattgagaaatgtgaaaaattatctagtgagctaagcacttgccgtgagatgattgacaaccttaggaatgaaaatgctagtttaaatgctaaggttgattcacatgtttgtaatgtttcaatacctaatcctagagataataatgatgatttgtttgctaggattgaagaattaaacatttctcttgctagccttagagtagaaaatgaaaatttaattgctaaggctaaagaacttgatgtttgcaaagttacaatttccgatcttagagataaaaatgatattcttcatgctaagattgttgaacttaattcttgcaaaccatctacatctaccattgagcatgtcactatttgtactagatgtagagatattgatgttaatgctattcatgatcatatggctttaattaaacaacaaaatgatcatatagcaaaactagatgctaaaattgccgagcacaacttagaaaatgagaaatttaaatttgctcgtagcatgctttataatgggagacgcccgggcatcaaggatggcattggcttccaaaggggagacaatgtcaaacttagtgcctctcctaaaagattgtctaactttgttaagggtaagactcccatgcctcaggataacgagggttacattttgtaccctgccggttatcctgagagcaaaattaagaaaattcattctaggaagtctcactctggttctaaccatgcttttatgtataagagtgagacatctagctctaggcaaccaacccgtgctacgttgcctaagaagaaaattgctagtgcatcaaatgagcatgacatttcatttaaaacttttgatgcatcatatgtattaactaacaaatccggcaaagtagttgccaaatatgttgggggcaagcacaaggggtcaaagacttgtgtttgggtacccaaagttcttgtgtctaatgccaaaggacccaaaaccatttgggattatgcatccgggggctcaagttggatactcgacagcgggtgcacaaaccacatgacaggggagaaaaggatgttctcctcctacgagaaaaatcaagatccccaacgagctattacattcggggatgggaatcaagattacaacttgctttctgtatctcaattatgtcaaatgggctacaactgtctttttactgatattggtgtcactgtctttagaagaagtgatgattcaatagcttttaagggagtgttagagggtcagctatacttggtagattttgatagagctgaactcgacacttgcttaattgctaagactaacatgggttggctctggcatcgccgactagcccatgttgggatgaagaatcttcacaagcttctaaagggagaacacattttaggattaacaaatgttcattttgagaaagacaggatttgtagcgcatgccaggcagggaagcaagttggcacccatcatccgcacaagaacatcatgacgaccgacaggccactggagctcctacacatggatctattcggcccgatcgcttacataagcatcggcgggagtaagtactgtctagttattgtggatgattattctcgcttcacttgggtattcttcttacaggaaaaatctcaaacccaagagaccttaaagggattcttgagacgggctcaaaatgagttcggcttaaggatcaagaaaataagaagcgacaacggaacggagttcaagaactctcaaatcgaaggcttccttgaggaggagggcatcaagcatgagttctcttctccctacacgccacaacaaaatggtgtagtggagaggaagaatagaactctattggacatggcaaggaccatgcttgatgagtacaagacttcggatcggttttgggccgaggcggtcaacaccgcttgctacgccatcaaccggttatatcttcaccgaatcctcaagaagacatcatatgaactcctaaccgactgtagaaggtttttacttggttatgactcaaacacaagggcatatagggtctttaacaagtccactggactagttgaagtctcatgtgacgttgtgtttgatgagactaacggctctcaagtagagcaagttgatcttgatgagatagatgaagaagaggctccatgcatcgcgctaaggaacatgtccattggggatgtgtgtcctaaggaatccgaagagccttcaaatacacaagatcaaccgtcctcctccatgcaagcatctccaccaactcaaaatgaggatgaggctcaaattgatgaaggacaagttcaagaagatgagccacctcaagatgatggcaacgatcaagggggagatgcaaatgatcaagaaaaggaggatgagcaagaaccaatgccgccacacccaagagtccaccaagcaatccaacgagatcaccccgtcgacaccatcctcggcgacattcataagggggtaaccactagatctcgtgttgcacatttttgtgaacattactcgtttgtttcctctattgagccacacagggtagaggaagcactacaagattcggattgggtggtggcgatgcaagaggagctcaacaacttcactaggaatgaggtatggcatttagttccacgtcctaaccaaaatgttgtagggaccaaatgggtcttccgcaacaagcaagatgagcatggtgtggtgacaaggaacaaagctcgacttgtggccaaaggatactcccaagtcgaaggtttggatttcggtgaaacttatgcacccgtagctaggcttgagtcaattcgcatattattagcctatgctacttaccatggctttaagctttatcaaatggacgtgaaaagtgccttcctcaatggaccaatcaaggaagaggtctatgttgagcaacctcccggctttgaagactgtgagtaccctaaccatgtctataagctctctaaggcgctttatgggctcaagcaagccccaagagcatggtatgaatgccttagggatttccttattgctaatggcttcaaagttggaaaggccgatcctactctctttactaaaactcttgaaaatgacttgtttgtatgccaaatttatgttgatgatattatatttgggtctactaacgagtctacatgtgaagagtttagtaggatcatgacacagaaattcgagatgtctatgatgggggagttgaagtattttctaggattccaattcaaacaactccaagagggcaccttcattagccaaacgaagtacactcaagacattctaaccaagtttgggatgaaggatgccaagcccatcaagacacccatgggaaccaatgggcatctcgacctcgacacgggaggtaagtccgtggatcaaaaggaagagcacatcggggacttgccagttcttgggaagatccttggtgtcttgggcttcaaagaagcaaaattcggtcgctctttccaccgccgaagccgagtatattgccgcaggccactgttgcgcgcaattgctttggatgaggcaaaccctgcgggactacggttacaaattaaccaaagtccctttgctatgtga

SEQ ID NO: 4924 - DNA, 5688 bp, Zea mays
  Clone ID: TF_ZM4930.C2.o1.fg
atgtcgggagatcacgccaagaaggagatggagaccggcgaaaagcccactacaagccacgggagcacttcatcggaagagtcccgcaccaaaaggagggagaagaagaagagctcctccaacaaagggaaggagaagaaatcttcttctcaccacaaagagaagaaggaaagatcttcctcccacaagccgcaccggagtggggacaagcaaaagaggatgaggaaagtagtctactacgagaccgacacttcatcaacatctacctccgactccgatgcgccctccataacttctaaacgccaagagcgtaagaagtttagtaagatccccctacactatcctcgcatttctaaacatgcacctttactttccgtcccattaggcaaaccaccaacttttgatggtgaagattatgctatgtggagtgatttaatgcgatttcatctaacctcattccacaaaagtatatgggatgttgttgagtttggtgcacaggtaccgtccgtaggggataaggattatgatgaggatgaggtggcccaaatcgagcacttcaactctcaagcaacaacgatactccttgcctctttaagtagagaggagtataacaaagtacaagggttgaagagtgccaaggaggtttgggatgtgctcaaaaccgcacacgagggagacgagctcaccaagatcaccaagcgggaaacgatcgagggggagctcggtcggttccggcttcgcaaaggggaagagccacaacacatgtacaaccggctcaagactttggtgaaccaagtgcgcaacctcgggagcgtaaagtgggatgaccatgaaatggttaaggttattctaagatctcttattttccttaaccctactcaagttcaattaattcgtggaaatcctagatatactaaaatgacccccgaggaagtaatcgggcattttgtaagttttgagtgcatgatcgagggctcgaggaagatcaacgagcttgatgatccctccacatccgaagctcaacccgtcgcattcaaggcgacggaggacaagaaggaggagtctacaccaagtcgacaaccaatagacgcctccaagctcgacaatgaggaaatggcgctcgtcatcaagagcttccgccaaatcctcaagcaaaggagagggaaagactacaaatcccgctccaagaaggtttgctacaagtgtggtaagcccggtcattttattgctaaatgtcccatatctagtgacagtgaccgaggcgacgacaagaagggaagaagaaaggagaagaagaggtactacaagaagaagggcggcgatgcccatgtttgtcgcgagtgggactccgacgaaagctcaagcgactcctccgacgacgaggacgccgccaacatcgccgtcaccaagggacttctcttccccaacgtcggccacaagtgcctcatggcaaaggacggcaaaaggaagaaggtaaaatcaagatcctccactaaatatgaaacctctagtgatgaaaacgctagtgatgaggaggataacttgcgtactctttttgccaaccttaacatagctcaaaaggaaaaattgaatgaattagttagtgctattcatgaaaaggatgaccttttggattcccaagaggacctccttattaaggaaaataagaagcatgttaaggttaaaaatgcttatgctctagaaattgagaaatgtgaaaaattatctagtgagctaagcacttgccgtgagatgattgacaaccttaggaatgaaaatgctagtttaaatactaaggttaattctcatgtttgcaatgtttcaacttcaaatcctaaagataataatgatgatttgcttgctaggattgaagaattgaacatatctcttgctagccttagaatagaaaatgaaaatttaattgctaaggctaaagattttgatgtttgcaaagttgcaatttccgatcttagagataaaaatgatattcttcatgctaagattgttgaacttaattcttgcaaaccctctacatctattgttgagcatgtatctatttgtactagatgtagagatgttgatattaatgctattcatgatcatatggctttaattaaacaacaaaacgatcatatagcaaaactagatgctaaaattgccgagcacaacttagaaaatgagaaatttaaatttgctcgtagcatgctttataatgggagacgcccgggcatcaaggatggcattggcttccaaaagggagacaatgtcaaaaataatgcccctcctaaaagattgtccaactttgttaagggcaaggctcccatgcctcaggataacgagggttacattttgtaccctgccggttatcctgagagcaaaattaggagaattcattctaggaagtctcactctggccctaatcatgcttttatgtataagggtgagacatctagctctaggcaaccaacctatgctaagttgcctagaaagaaaattcctaatgcatcaaatgatcataacatttcattcaaaacttttgatgcatcttatgttttgactaacaaatccggcaaggtttatgcatccgggggctcaagttggatactcgacagcgggtgcacaaaccacatgacaggggagaagaagatgttctcctcatatgagaaaaaccaagatccccaaagagcgatcacattcggggatggaaatcaaggtttggtcaaaggtgtcactgtctttagaagaagtgatgattcaatagcatttaagggagtgttagagggtcagctatacttggtagtttttgatagagctgaactcgacacttgcttaattgctaagactaacatgggttggctctggcaccgccgactagcccatgttggaatgaagaatcttcataagcttctaaagggagagcacattttaggactaaccaatgttcattttgagaaagacaggatttgtagcgcatgccaagcaggaaagcaagttggctctcatcatccacataagaacataatgacgaccgacaggccactggagctcctacacatggatctattcggcccgatcgcttgcataagcatcggcgggagtaagtactatctagttattgtggatgattattctcgcttcacttgggtattctttttgcaggaaaaatctcaaacccaagagaccttaaagggattcttgagacgggctcaaaatgagttcggcttaaggatcaagaaaataagaagcgacaacgggacggagttcaagaactctcaaattgaaggcttccttgaggaggagggcatcaagcatgagttctcttctccctacactccacaacaaaatggtgtagtggagaggaagaatcgaactctattggacatggcaagaaccatgcttgatgagtacaagacaccggaccggttttgggccgaagcggtcaacaccgcctgctacgccatcaaccggttatatcttcaccgaatcctcaagaagacatcatatgaactcctaaccggtaaaaagcccaacatttcatactttagagtttttggtagcaaatgctttattcttgttaaacggggtagaaaatctaaatttgctcctaaaactgtagaaggctttttacttggttatgactcaaacacaagggcatatagagtctttaacaagtcctcaggactagttgaagtttcttgtgacgttgtgtttgatgagactaacggctctcaagtagagcaagttgatcttgatgagataggtgaaaaacaggctccatgcatagcgctaaggaacatgtccattggggatgtgtgtcctaaggaatccgaagagcctccacatacacaagatcaaccatcctcctccacgctagcatctccaccaactcaaaatgagaatgaagctcaagttgatgaagaagaagatcaatcaaatgagccacctcaagatgatggcaatgatcaagggggagatgcaaataatcaagaaaaggaggataagcaagaaccaaggccgccacacccaagagtccaccaagcaatccaacgagatcaccccgtcgacaccatcctcggcgacattcataagggggtaactacaagatctcgggttgcacatttttgtgaacattactcgtttgtttcctctattgagccacacaggatagaggaagcactccaagattcggattgggtggtggcaatgcaagaggagctcaacaacttcactagaaatgaggtatggcatttagtcccacgtcctaatcaaaatgttgtaggaaccaaatgggtcttccgcaacaagcaagacgagcatggtgtggtgacaaggaacaaagctcgacttgtggccaagggatactcccaagtcgaaggtttggatttcggtgaaacctatgcacccgtagctaggcttgagtcaattcgcatattattggcctatgctacttaccatggctttaagctttatcaaatggacgtgaaaagtgcctttctcaatggaccaatcaaggaagaggtctatgttgagcaacctcccggctttgaagacagtgagtatcctaaccatgtttataagctctctaaggcgctttatgggctcaagcaagccccaagagcatggtatgaatgccttagagatttccttattgataatggcttcaaagtcggtaaagccgatcctacactctttactaaaactcttgaaaatgacttgtttgtatgccaaatttatgttgatgatattatatttgggtctactaacgagtctacttgtgaagagtttagtaggattatgacacagaaattcgagatgtctatgatgggggagttgaagtatttcttaggattccaagtgaagcaactccaagagggcaccttcattagccaaacgaagtatactcaagacattctaaacaagtttgggatgaaggatgccaagcccatcaaaacacccatgggaaccaatgggcatctcgacctcgacacgggaggtaagtccgtagatcaaaaggtataccggtcgatgataggttctttactctacttatgtgcatctcgaccggatattatgctttccgtatgcatgtgtgcaagattccaagccgaccctaaggaagctcaccttacggccgtgaaacgaatcttgagatatttggcttatactcctaagtttgggctttggtatcctaggggatccacatttgatttgattggttattcggatgccgattgggcggggtgcaaaatcaataggaagagcacatcggggacttgccagttcttgggaagatccttggtgtcttgggcttcaaagaagcaaaattcggttgctctttccaccgccgaagccgagtacattgccgcaggccattgttgcgcgcaattgctttggatgaggcaaaccctgcgggactacggttacaaattgaccaaagttcccttgctatgtgataatgagagtgcaatcaaaatggccgacaatcccgtcgagcatagccgcactaaacacatagccatccggtatcattttcttagggatcaccagcaaaagggagatatcgagatttcttacattaacactaaagatcaattagccgatatctttaccaagcctcttgatgaacaatcttttaacaaacttaggcatgagctcaatattcttgattctagaaatttcttttgctag

SEQ ID NO: 4925 - DNA, 753 bp, Zea mays
  Clone ID: TF_ZM4932.C2.o20.fg
atgtcgggagctcacgccaagaaggagatggtgactggcgagaagcccgccacaagccacgggaaagctccatcgggagagtccggcaacaagaagagggaggaatcacctccccgtgtcaagttgcaccggagtggcgacaagaagaaaatgaagaaagtggtctactacgagaccaattcttcatcgccttccacctccaacttcgacacgccgtccgtcacttctaagcgccatgagcgcaagaagtttagctccaaacaaatcatcgagcgagacgccacctccacacccgaggtgcaacccgtcaccttcaaagcgatggaggagaagaaggaagagtcttcatcgagtaggcttcccatcgacacctccaagatcgataatgaggagatggcgctcatcatcaagagcttccgtcaaatcctcaaacaacggaaggggagagactacaagccccgttccaagaaggtttgctacaagtgtggtaagcccggtcactttatagcaaaatgtcctatttctagtgatagtgacaggggcgacgacaagagagggaagaaggagaagaagaggtactataagaagaaggacggtgatgcccatatttgtcgggagtgggactccaacgagagctccaccgactcctcctccgacgaggacgccgccaacatcgccgtcaacaagggtctcctcttccgcaacgtcggccacaagtgcctcatggcaaaggaaggcaaaaagaagccttaa

SEQ ID NO: 4926 - DNA, 2802 bp, Zea mays
  Clone ID: TF_ZM4948.C2.o1.fg
atgaagaaagtggtctactatgagaccgattcttcgtcgccctccacctccggctccgacgcaccgtccgtcacttctaagcgccgtgagcgcaagaagtttagtaagatccccttacgctatccccgcatttccaaacgcactcctttactttccgtcccattaggcaaaccaccagtttttgacggtgaagattattgtatgtggagtgataaaatgaggcatcatctaacctcactccacgctagcatttgggacattattgagtttggaacgcaggagtataataaggtgcaagggctaaaaagtgccaaagagatttggaacgtactaaagaccgcacatgaaggggatcaggtgaccaagatcaccaagcgggagacgatcgaggggaagctcggtcgattcatcctcaaccaaggagaggagccagaagcaatgtacaaacggctcaagaccttggtcaaccaagtgcgcaacctcaggagcacaaaatgggatgaccatgaaatggtcaaggttattctaagatcacttgttttttgtaatcctacacaagttcaattaattcgtggtgatcctagatataagctaatgtctcccgaggaagtgataggaaagtttgtgagctttgagttgatgatcaaaggctccaaacaaatcatcgagcaaggcggcacctccacacccgaggtgcaacccgtcgcattcaaagcgacagaagaaaagaaggaagagtctacgtcaagtaggctccccatcgacgcctccaagctcaacaacgaggaaatggcgctcatcataaagagcttccgccaaatcctcaaacaaaggacggggaaggattacaaaccccgctccaagaaagtatgctacaaatgtggtaagcccggtcactttattgctaaatgtcctatatctagtgatagtgacagggacaacaacaagagggggaagaagaaggagaagaagagatattataagaagaagggtggtgatgcccacgtgtgtagggaatgggactccgatgagagctccaccgactcctcctccgacgaggacgccacaaagatcaccgtcaacaaaggcctccttttccccaacgtcggccacaggtgcctcatgaccaaggacaacaaaaagaagaaggtaaaatctagagcctccagtaaatatacaacatctagtgatgagggtaactctagtgaagatgaggatgatttgcttaatgtttttgccaaccttaacatgcaacaaaaggaaaaactaaatgaactgataggtgctattcatgagaaggatgaactcttggatagccaagaggaattccttattaaggaaaacaagaagcatgttaaggtaaagaatgcttatgctcaggaagtagaaaagaatgaaaatttgactaaggagcttagcatttgccatgacaaaatttccaaccttagaaatgaaaacggtaatttatttgctaaggttgaaaaatcaaatgtctgtcatgattcaattgtcaatcttaaaaatgataatgctagtttgattgctaagattggtaaattgaatgaatcaatttctagccttaaaattgaaaacgctagtttaatttcaaaggctaaagatttaaatgtttgcaatgcttctatttccaatcttagaaatgagaatgctattttacatgctaagattgatgaattaaatgtttccaaaccctctacatccattgttgatcatgtttctatttgcatgagatgtagagacattaatgttgatgctattcatgatcacctagccttaattaaacaacaaaatgatcacatagctcaactaactagtaaaattaatgagcatgagatagagaatgaaaaaaataaatttgctagaagcatgctctataataggagacgccctggcattaaggatggcattggcttccagcagggagacaatgtcaagcttaatgcccctaagagattgtccaattttgttaagggtaaggctcccatggctcaggataacgagggttatattttatatcctgttggttatcctgagcacaagattaggagaattcatgcaaagaagtcccattctatttctcaccatgcttttatgtataagaatgaggcttctaggacttttgatgcatcttatgtgctgactaacaaatcaggcaaagtagttgccaaatatgttgggggcaaacacaagggctccaagagttgtgtttgggtacccaaggtttatgaatctgggggctcaagttggatcattgatagcggatgcacaaaccacatgacaggggagaaaaggatgttctcctcctacgagaaaacgatgatccccaaagagctatcacattcagggatggaaatcaaggaaaaatctcaaatccaagagaccttaaagggattcttgagacggactcaaaatgagtttggattaagaatcaagaagataagaaacgacaatggaacggagttcaagaactctcaaattgaaggcttccttgaggatgagggcatcaaacatgagttctcttctccctacacacctcaacaaaatggtgtagtggagaggaagaatagaactctacttgacatggcgaggaccatgcttgatgattacaagactccggaccgattttgggctgaggcaattaacgccgcctgctactccatcaaccggctctatcttcaccgaatcctcaagaagacatcatatgaactcctcaccggtaaaaagtccaatgtttcatattttagagtctttggtagtgaaagtcgcctagaggggggtgaatag

SEQ ID NO: 4927 - DNA, 8307 bp, Zea mays
  Clone ID: TF_ZM4949.C2.o4.fg
atgtcgggagatcacgccaagaaggagatggagaccggcgaaaagcccactacaagccacgggagcacttcatcggaagagtcccgcaccaagaggaaggagaagaaaaagagctcctccaacaaagggaaggagaagaaatcttcttcgcaccacaaggagaagaaggagagatcttcctcccacaagccacatcggagaggggacaagcacaaaaggatgaggaaagtggtctactatgagaccgacacttcatcaacatcgacctccggctccgatgcgccctccgtaacttctaaacgccaagagcgtaagaagtttagtaagatccccctacattaccctcgcatttctaaaaatgcacctttactttccgtcccattaggcaaaccaccaacttttgatggtgaagattatgctaggtggagtgatttaatgcgatttcatctaacctcactccacaaaagtatatgggatgttgttgagtttggtgcacaggtaccatccgtaggggataaagactatgatgaggatgaggtggcccaaatcgagcacttcaactctcaagcgacaacaatactcctcgcatctttaagtagagaggagtataacaaagttcaagggttgaagagcgcaaaggaggtttgggatgtgctcaaaaccgcgcacgagggagatgagctcacaaagatcaccaagcgggaaacgatcgagggggagctcggtcggttccgacttcgcaaaggggaggagccacaacacatgtacaaccggctcaagactttggtgaaccaagtgcgcaacctcgggagcacgaagtgggacgaccacgaaatggttaaggttattctaagatctctcattttccttaaccccactcaagttcaattaattcgtggtaatcctagatatactaaaatgacccccgaggaagttatcgggaattttgtaagttttgagtgcatgatcgaaggctcgaggaagatcaacgagcttgatgatccatccacatccgaagctcaacccgtcgcattcaaggcgacggaggaaaagaaggaggaggctacaccaagtcgacaacctatagacgcctccaagctcgacaatgaggaaatggcgctcgtcatcaagagcttccgccaaatcctcaagcaaaggagagggaaagactacaagtcccgctccaagaaggtttgctacaaatgtggtaagcccggtcattttattgctaaatgtcctatatcaagtgacagtgaccgaggcgacgacaagaaggggagaagaaaggagaaaaagaagtactacaagaagaagggcggcgatgcccatgtttgtcgggagtgggattccgacgaaagctcaagcgactcctccgacgacgaggacgccgccaacatcgccgtcaccaagggacttctcttccccaacgtcggccacaagtgcctcatggcaaaggacggcaaacggaagaaggttaaatctaactcctccactaaatatgagtcttctagtgatgataatgatagtgatgaggaggataatttgcgtgttctctttgccaatcttaacatggagcaaaaagaaaaattaaatgaattgattagtgctattcatgaaaaggatgaccttttggactcccaagaggattgtctaattaaagaaaacaagaaacatgttaaggttaaaaaggcttatgctctagaagtagaaaaatgtgaaaaattatctagtgagctaagcacttgccgtgagatgattgacaaccttaggaatgaaaatgctagtttaaatgctaaggttgattctcatgtttgcattgtttcaacttccaatcctaaagataataatgatgatttgcttgctaggattgaagaattgaatatttctcttgctagccttagagtagaaaataaaattttaattgctaaggctaaagattatgatgtttgcaaagttacaatttccgatcttagagataaaaatgatattcttcatgctaagattgttgaacttaattcttgcaaaccctctacatctattgttgagcatgtatctatttgtactagatgtagagatgttgatgttaatgctattcatgatcatatggctttaattaaacaacaaaatgatcatatagcaaaactagatgctaaaattgccgagcacaacttagaaaatgagaaatttaaatttgctcgtagcatgctttataatgggagacgccctggcattaaggatggcattggcttccaaaggggagacaatgtcaaaattaatgcccctcctaagaacttgtctaactttgttaagggcaaggctcccatgcctcaggataacgagggctacattttgtaccctgccggctatcctgagagcaaaattaggaaaattcattctaggaagtctcactctggccctaatcatgcttttatgtataagggtgagacatctagctctaggcaaccaacccgtgccaagttgcctagaaagaaaactcctaatgcatcaaatgatcatgccatttcatttaaaacttttgatgcttcttatatgcttactaacaaatccggcaaggtttatgcatccgggggctcaagttggatactcgacagcgggtgcacaaaccacatgacaggggagaaaaagatgttctcctcatatgagaaaaaccaagatccccaacgagctatcacattcggggatggaaatcaaggtgtcactgtctttagaagaagtgatgattcaatagcatttaagggagtgttagagggtcagctatacttagtagattttgatagagctgaactcgacacttgcttaactgctaagactaacatgggttggctctggcaccgccgactagcccatgttggaatgaagaatcttcataagcttctaaagggagaacacattttaggattaacaaatgttcattttgagaaagacaggatttgtagcgcatgccaggcagggaagcaagttggagctcatcatccacacaagaacatcatgacgaccgacaggccactggagctcctacacatggatctattcggcccgattgcttacataagcatcggcgggagtaagtactgtctagttattgtggatgattattctcgcttcacttgggtattctttttgcaggacaaatctcatacccaagagaccttaaagggattcttgagacgggctcaaaatgagttcggcttaaggatcaagaaaattagaagcgacaatgggacggagttcaagaactcacaaatagaagtggagaggaagaatcgaactctcttggacatggctagaaccatgcttgatgagtacaagacaccggatcggttttgggccgaggcggtcaacaccgcttgctacgccatcaaccggttatatctacaccgaatcctcaagaagacatcctatgaactcctaaccggtaaaaagcccaacatttcctattttagagtttttggtagcaaatgctttattcttgttaaaagaggtagaaaatctaaatttgctcctaagactgtagaaggccttttacttggctatgactcaaacacaagggcatatagagtctttaacaagtccactggactagttgaagtctcatgtgacgttgtgtttgatgagactaacggctctcaagtagagcaagttgatcttgatgagataggtgaagaacaggctccgtgcatcgcgctaagaaacatgtccattggggatgtgtgccctaaggaattcgaagagcctccaaatacacaagatcaaccatcctcctccacgcaagcatctccaccaacccatgatgaggacgaggctcaagttgatgaaggagaggatcaaaaggatgagccacctcaagatgacggcaacgatcaagggggagatgcaaatgatgaagacaaggaggacgaacaaccaaggccgccacacccaagagtccaccaagcaatccaacgagatcaccccgtcgacaccattctcggtgacattcataagggggtaaccactcgatctcgtgttgcacatttttgtgagcattactcttttgtttcctctattgagccacacagggtagaggaagcactacaagattcggattgggtggtggcgatgcaagaggagctcaacaatttcacaaggaacgaggtatggcacttagttccacgtcctaaccaaaatgttgtaggaaccaaatgggtcttccgcaacaagcaagatgagcatggtgtggtgacaaggaacaaagctcgacttgtggccaaaggatactcccaagtcgaaggtttggatttcggtgaaacctatgcacccgtagctaggcttgagtcaattcgcatattattagcctatgctacttaccatggctttaagctttatcaaatggacgtgaaaagtgctttcctcaatggaccaatcaaggaagaggtctatgttgagcaacctcccggctttgaagatagtaagtaccctaaccatgtctataagctctctaaggcgctttatgggctcaagcaagccccaagagcatggtatgaatgccttagagatttccttatcgctaatggcttcaaagtcggcaaggccgatcctactctattcactaagactcttgacaatgatttgtttgaatttagtaggatcatgacacagaaattcgagatgtctatgatgggggagttgaagtatttcttaggatttcaagtgaagcaactccaagagggcaccttcatttgtcaaacaaagtacactcaagacattctaaccaagtttggaatgaaggatgccaagcccatcaagactcccatgggaacaaatgggcatctcgacctcaacacgggaggtaagtccgtggatcaaaaggcgactttcaacagtgacaggggcgacgacaagaagggaaagaggagagaaaagaagaagtactacaagaagaagggcggcgatgcccatgtttgccgggaatgggactccgacgagagctccaccgagtcctcttccgacgaggacgccgccaacatcgccgtcaccaagggacttctcttccccaacgtcggccacaagtgcctcatggcaaaggacggcaaaaggaagaaggttaaatctaagtcctccacgaaatatgaatcctctagtgatgataatgctagtgatgaggagaataatttgcgtaccctttttgccaaccttaacatggaacaaaaggaaaaactaaatgagctaattagtgccatccatgaaaaggatgacctcttggactcccaagaggacttcctaatcaaggaaaataaaaagcatgtagaaaaatgtgagaaattatctagtgagctaagtacttgccatgatactattaccaaccttagaaatgaaaatgctagtttaaatgctaaggttgactcacatgtttgtaatgtttcaattcccaatcttagaaatgataatgatgatttgcttgctaagattgaagaattaaacatttctcttgctagccttagagtagaaaatgaaaatttaattgctaaggctaaagaactagatgtttgcaatgttacaatttccgatcttagagataataatgatatcttgcgtgctaagatcgttgaacttaattcatgcaaaccctctacatctagtgttgagcatgtttccttttgtactagatgtagagatgttgatattaatgctattcatgatcacatgactttgattaaacaacaaaatgatcatatagcaatattagatgcaaaaattgccgagcataacttagaaaatgaaaagtttaaatttgctagaagtatgctctataatgggagacaccctggcattaaggatggcattggctaccaaaggggagacaatgtcaaacttagtgcccctcctaaaagattgtcaaattttgttaagggcaaggctcccatgcctcaggataacgagggttacattttataccctgccggttatcctgagagcaaaattaggaaaattcactctaggaagtctcactctggccctaaccatgcttttatgtataagggtgagacatctagctctaggcaaccaacccgtgctaagttgcctaagaagaaaactcctagtgcatcaaatgagcatgacatttcttttaaaacttttgatgcatcatatgttttaactaacaaatccggcaaggtttatgcatccgggggctcaagttggatactcgacagcgggtgcacaaaccacatgacaggggaaaagaagatgttctcctcttatgagaaaaaccaagattcccaacgagctatcacattcggggatggaaatcaaggtgtcactgtctttagaagaagtgatgattcaatagcatttaagggagtgttagagggtcagctatacttggaaaaatctcaaacccaagagaccttaaagggattcttgagacgggctcaaaatgagttcggcttaaggatcaagaaaataagaagcgacaacgggacggagttcaagaactcacaaatagaaggtttccttgaggaggaggggatcaagcatgagttctcttctccctacacgccacaacaaaatggtgtagtggagaggaagaatcgaactctattggacatggctagaaccatgcttgatgagtacaagacaccggatcggttttgggccgaggcgagaggtagaaaatctaaatttgctcctaaaactgtagaaggctttttactaggatatgattcaaacacaagggcatatagagtctttaacaagtcctcaggactagttgaagtttcttgtaacgttgtgtttgatgaaactaacggctctcaagtagagcaagttgatcttgatgagataggtgaagaacaggctccgtgcatcgcgctaaggaacatgtccattggggatgtgtgccctaaggaattcgaagagcctccaaatacacaagatcaaccatcctcctccacgcaagcatctccaccaactcaaaatgaggacgaggctcaagttgatgaaggagaagatcaaagagatgagccacctcaagataatggcaatgatcaagggggagatgcaagtgatcaagacaaggaggatgaacaaccaaggccgccacacccaagagtccaccaagcaatccaacgagatcaccccgtcgacaccatcctcggcgacattcataagggggtaaccactcgatctcgggttgcacatttctgtgagcattactcttttgtttcctctattgagccacacaggatagaggaagcacttcaagattcggattgggtgatggcgatgcaagaagagctcaacaacttcttgaggaacgaggtatggcatttagttccacgtcctaaccaaaatgttgtaggaaccaagtgggtcttccgcaacaaacaagacgagcatggtgtggtgactaggaacaaagctcgactcgtggccaagggatactcccaagtcgaaggtttggatttcggtgaaacctatgcacccgtagctaggcttgagtcaattcgcatattattagcctatgctacttaccatggctccaagctttaccaaatggacgttaagagtgccttcctcaatggaccaatcaaggaagaggtctatgttgagcaacctcccggctttgaagacagtgagtatcctaatcatgtctataggctctctaaggcgctttatgggctcaagcaagccccaagagcatggtatgaatgccttagagatttccttattgcaaatggcttcaaagtcggcaaggccgatcctactttattcactaaaactcttgacaatgatttgtttgtatgccaaatttatgttgatgatatcatatttgggtctactaacgaatctacatgtgaagaatttagtaggatcatgacacaaaaattcgagatgtctatgatgggggagttgaagtattttctaggattccaagtcaagcaactccaagagggcacctttatttgccaaacaaagtatacacaagacattttaaccaagtttggaatgaaggatgccaagcccatcaagacacccatgggaaccaatggacatctcgacctcaacaagggaggccaagtgcggaccgtccgggcccttgcggcggaccgtccgcaccaccaggatgaccctcggacaggaccaatgcaaaaatctaagtctgcactatggaccgtccgaaggaaaagagcggaccgtctgggacctcgcgcggaccgtccggcctcaggcgcggaccgtccggcgcggaccgtccggaccaggcaggcggaccgtccgcggtcggcagaatggagcaacggctag

SEQ ID NO: 4928 - DNA, 3567 bp, Zea mays
  Clone ID: TF_ZM4960.C1.o10.fg
atgtcaggaaatcacgccaagaaggagatggagaccggcgacaagcccgctacaagccacgggaaggtttcatcggaagagtcccgcaacaaaaagaaagggaaggagaagaaagcctcctcccacaagtcgcatcggagtggggacaagaaaaagaagatgaggaaggtggtctactatgagaccgacacctcatcaccatctacctccggctccgacgcgccctccataacttctaagcgccatgagcgcaagaagtttagtaagatccccttacactaccctcgcacttctagacatactacattactttccgttccattaggcaaaccgccaacctttgacggtgaagattatgctaggtggagtgatttaatgaaatttcatctaacctcactccacaaaagtatatggaatgttgttgagtttggagcacatgtaccatccgtaggggatgaggattatgatgaggacgaggtggcccaaatcgagcacttcaactcccaagccacaacaatactcatcgcctctctaagtagggaggagtacaacaaggtgcaaggtctaaagagcgccaaggaagtttgggacgtgctcaaaaccgcgcacgagggtgatgaactcaccaagatcaccaagcgggaaacgatcgagggggagctcggtcgcttccgtctttgtcaaggggaggagccacaagacatgtacaaccggctcaaaaccttggtgaatcaagtgcgcaacctcgggagcaaaaagtgggatgaccacgaggtggttaaggttattttaagatcacttattttccttaaccctactcaagtacaattacttcatggcaatccaagatatacactaatgactcccgaggaagtaatcgggaattttgtgagctttgaatttatgatcaagggctcacggaagatcaacgagcttgacagtccttctacgtccgatgctcaaccggtcgcattcaaagcgacggaagagaagaaggaggagtctacaccaagtagaacacccatcgacacctcgaagctcgacaacgaggaaatgacgcttgtcatcaaaagctttcgccaaatcctcaagcaaaggagggggaaatattacaagccccgctccaagaaggtttgctacaagtgtggtaagcccggtcactttatagcaaaatgtcctatttctagtgacagtgacaggggcgacgacaagaagggaagaagaaaagagaagaagaggtactacaagaagaagggcggcgatgcccatgtttgtcgcgagtgggactccgacgaaagctctagtgactcctccgacgacgaggacaccgccaacatcgccgtcaccaagggacttctcttccccaacgtcggccacaagtgcctcatggcaaaggacggcaaaaagaaaaaggttaaatctaaatcctccactagatatgaatcctctagcgatgataatgctagtgatgaggaagataatttacgtaccctttttgccaacttaaacatgcaacaaaaagagaaattaaatgaattaattagtgccatccatgagaaggatgatctcttggactcccaagaggacttcctaatcaaggaaaacaaaaagcatgttaaagttaaaaatgcttattctctagaagttgaaaaatgcgaaaaattatctagtgagctaagcacttgccatgagactatagacaaccttagaaatgagaatgctaatttgttagctaaggttgattctattgcttgtaatatttcaatttccaatcctagaaatgataatgatgatttgcttgctaggattgaagaattgaatatatctcttgctagccttagagatgaaaatgaaaaattgcttgctaaggctaaagaactagatgtttgcaatgttacaatttccgaccttagaactaaaaatgatattttgcatgctaaggttgtagaattgaaatcttgcaaaccctctacatctaccgttgagcacactactatttgcactagatgtagagatgttgatattaatgctatacatgatcatatggctttaattaaacaacaaaatgatcatatagctaaactagatgcaaaaatcgccgagcatgaaattgaaaatgaaaaatttaaatttgctcgtagtatgctttataatgggagaggtcatggcattaaggatggcattggcttccaacagggaggcaatgtttatgcatcagggggctcaagttggatcatcgatagcgggtgcacaaactacatgacaggggagaaaaagatgttctcgtcctacgagaaaaaccaagatccccaaagagctatcacattcggggatggaaatcaaggtatcattgtctttagaagaagtgatgattcaatagcatttaagggagtgttagagggtcagctatacttggtagattttgatagagctgaactcgacacttgcttaattgctaagactaacatgggttggctatggcaccgtcgactagcccatgttgggatgaagaatcttcacaagcttctaaagggagagcacattttaggattgacaaatgttcattttgagaaagacaggatttgtagcgcatgccaagcagggaagcaagttggtgctcaccatccacacaagaacatcatgacgaccgacaggccactggagctcctacatatggatctattcggcccgatcgcttacaaaagcatcgacgggagtaagtactgtctagttattgtggatgattattctcgattcacttgggtgttctttttgcaggaaaaatctcacacccaagagaccttaaagggattcttgagacgggctcaaaatgagttcggcttaaggatcaagaaaattagaagcgacaacgggacgaagttcaagaactctcaaattgaaggctttcttgaggaggagggcatcaagcatgagttctcttctccctacacgccacaacaaaatggtgtagtggagaggaagaatagaactctattggacatggcaagaaccatgtttgatgagtacaagacttcggatcggttttgggccgaggcggtcaacaccgcctgctacgccatcaaccggttatatctacaccgaatcctcaagaagacgtcatacgaactccttaccggtaaaaatcccaatatttcatattttagagtctttggtagcaaatgctttattcttattaaaagaggtagaaattataaatttgctcctaagactgtagaaggctttttactaggatatgattcaaacacaagggcatatagagtctttaacaagtcctctagacaagttgaagtttcttgtgacgttgtgtttgatgagactaacggctctcaagtagagcaagttgatcttgatgagataggtgatgaagaggctccgtgcatcgcgctaaggaacatgtccattggggatgtgtgtcctaaggaatccaaagagcctccaaatgcacaagatcaaccatcctcctccacgcaagcatctccaccaactcaaaatgaggatgaagctcaagttgatgaaggagaagatcaagcaaatgagccatcttga

SEQ ID NO: 4929 - DNA, 4404 bp, Zea mays
  Clone ID: TF_ZM4981.C2.o9.fg
atgtcgggagatcacgccaagaaggagatggagaccggcgaaaagcccactacaagccacaggaaggcttcatcggaagagtcccgcaagaaaggaaaggggaaggagaagaaagcttcttcccacaagtcgcatcggagtggcgacaagataaagaagatgaggaaggtggtctactacgagaccgacacttcatcaccttccaccttcggctccgacgcgccctccgtaacttctaagcgccatgagcgcaagaagtttagtaaaattcccctacgctaccctcgcatttctaaacatacacctttacttttcgtcccattaggcaaaccaccaacttttgatggtgaagattatgctaggtggagtgatttaatgcgatttcatctaacctcactccacaaaagtatatgggatgttgttgagtttggtgtacaggtaccatccgtaggggatgaagactttgatgtggatgaagtggcccaaatcgagcacttcaactcccaagccacaaccatactcctcgcctctctaagtagggaggagtacaacaaggtgcaaggattaaagagcgccaaggaagtttgggacgtgctcaagaccgcgcacgagggtgatgagctcaccaagatcactaagcgggaaacgatcgagggggagctcggtcgctttcgtcttcgccaaggggaggagccacaagatatgtacaaccggctcaaaaccttggtaaaccaagtgcgcaacctcgggagcaagaaatgggatgatcacgaggtggttaaggttattctaagatcactcattttccttaaccctactcaagtacaattaattcgtggtaatcctagatatacactaatgactcccgaggaagtaatcgggaattttgtgagctttgaatttatgatcaagggctcacggaagattaacgagcttgacgatccttctacgtccgaagctcaaccggtcgcattcaaagcgacggaggaaaagaaggagtctacaccaagtagaacacccatcgacgcctccaagctcgacaacgaggaaatggcgctcgtcgtcaagagcttccgccaaatcctcaagcaaaggagggggaaagactacaaaccccgctccaagaaagtatgctacaaatgtggtaagcccggtcattttattgcaaaatgtcctatttctagtgacagtgacaggggcgatgacaagaaggggagaagaaaagagaagaagaggtactacaagaagaagggcggcgatgcccatgtttgtcgcgagtgggactccgacgaaagctcaagcgactcctccgacgacgaggacgccgccaacatcgccgtcaccaagggatttctcttcgccaacgtcggccacaagtgcctcatggcaaaggacggcaaaaagaagaaggttaaatccaaatcctccactagatatgagtcctctagtgatgataatgctagtgatgaggaagataatttgcgtactctttttgccaacttaaacatgcaacaaaaggagaagttaaatgaattaattagtgccattcatgagaaggatgatctcttggactcccaagaggacttcctaatcaaggaaaacaaacagcatgttaagggcaaggctctcatgcctcaggataacgagggttacattttgtaccctgccggttatcccgagagcaaaattaggagaattcactctaggaagtctcactctggccctaatcatgcttttatgtataagggtaagacatctagctctaggcaaccaacccgtgctaagttgcctaagaagaaaactcctaatgcatcaaatgatcatgacatctcatttaaaacttttgatgcatcatatgttttaactaacaaatccggcaaggtttatgcatccgggggctcaagttggataatcgacagcgggtgcacaaaccacatgacaggggagaagaaaatgttctcctcctatgagaaaaaccaaaatccccaacgagctatcacattcggggatggaaatcaaggtgtcactgtctttagaagaagtgatgattcaatagcatttaagggtgtgttagagggtcagctatacttggtagattttgatagagctaaactcgacacatgcttaattgctaatactaacatgggttggctctggcaccgccgactagcccatgttgggatgaagaatcttcacaagcttctaaagggagagcacattttaggattaacaaatgttcattttgagaaagacaggatttgtagcgcatgccaagcagggaagcaagttggtgcccatcatccacacaagaacatcatgacgaccgacaggccactggagctcctacacatggatctattcggcccgatagcttacataagcatcggcgggaaaacattaaagggattcttaagacgagctcaaaatgagttcgacttaaggatcaaaaagattagaagcgacaacgggacggagttcaagaactcacaaattgaaggctttcttgaggaggagagcatcaagcatgagttctcttctccctacaccccacagcaaaatggtgtagtggagaggaagaatagaactctattggacatggcaagaaccatgcttgatgagtacaagacttcggatcggttttgggccgaggcggtcaacaccgcctgctacgccatcaaccggttgtatctacaccgaatcctcaagaagacatcatacgaactcctaaccggtaaaaagcccaatatttcatattttagagtctttggtagcaaatgctttatacttgttaaaagaggtagaaaatctaaatttgctcctaagactgtagaaggctttttactaggatatgattcaaacacaagggcatatagagtctttaacaagtcctctggacaagttgaagtttcttgtgacgttgtgtttgatgagactaacggctctcaagtagagcaagttgatcttgatgagataggtgatgaagaggctccgtgcatcgcgctaaggaacatgtccattggggatgtgtgtcctaaagaatccgaagagcctccaaatgcacaagatcaaccatcctcctccacgcaagcatctccaccgactcaaaatgaggatgaggctcaaatggatgaaggagaagatcaagcaaatgagccacctcaagatgacggcaatgatcaagggggagatgcaaatgagcaagacaaggaggatgaagagcaaaggccgccacacccaagagtccaccaagcaatccaacaagatcaccctgtcgacaccatcctcggcgacattcataaggggggtagaggaagcactacaagattcggattgggtgatggcgatgcaagaggagctcaacaacttcacaaggaaggaggaaccaaatgggtgttccgcaacaagcaagatgagcatggtgtggtgacaaggaacaaagctcgacttgtggccaaaggatactcccaagtcgaaggtttggatttcggtgaaacctatgcacctgtagctaggcttgagtcaattcgtatattattggcctatgctacttaccatggcttcaagctttatcaaatggacatgaagagtgccttcctcaatggaccaatcaaggaagaggtctatgttgagcaacctcccggctttgaagatagtgagtaccctaaccatgtctataaactctcaaaggcgctttatgggctcaagcaagctccaagagcatggtatgaatgccttagagatttccttatcactaatggattcaaagtcggaaaagccgatcctacactcttcactaaaactcttgaaaatgacttgtttgtatgccaaatttatgttgatgatattatatttgggtctactaacgagtctacatgtgaagaatttagtaggatcatgacacaaaagtttgagatgtcaatgatgggggagttgaagtacttcttaggatttcaagtaaagcaactccaagagggcaccttcctaagccaaacgaagtatactcaagacattctaagcaagtttggaatgaaggatgccaaacccatcaagacacccatgggaaccaatgggcatctcgacctcgacgaaggaggtaaatccgtcgatcaaaaggggaggtgccaaaggttcatctacaactatactaaatcgactgtccggaataccgtagattattccggacaggagaagctttttgaaaaaacaggccaagcacggaccgtccgggcccttgcggtggaccgtccgcaacaccaggatgaccctcggacagaaccaatgcaaaaatccaagtctgtactacggaccgtccggaggaaaagcaaggaccgtctgagacctcgcgcggaccgtcctgtaggtaaggaaccgaaaaacccgaaggtgacaggttcggaaaaatga

SEQ ID NO: 4930 - DNA, 4845 bp, Zea mays
  Clone ID: TF_ZM4990.C2.o4.fg
atgtcgggagatcacgccaagaaggagatggagaccggcgaaaagcccactacaagccacgggagcacttcatcggaagagtctcgcaccaagaggaaggagaagaagaagatctcctccaacaaagggaaggagaagaaatcttcttctcaccacaaagagaagaaggaaaaatcttcttcccacaagcctcgtcggagtggggacaagcaaaagaggatgaggaaagtggtctactacgagaccgacacttcatcaacatcgacctccgactccgatgcgccctccgtaacttctaaacgccaagagcgtaagaagtttagtaagatccccctacactaccctcgcatttctaaacatgcacctttactttccgtcccattaggcaaaccaccaacttttgatggtgaagattatgctaggtggagtgatttaatgcgatttcatctaacctcactccacaaaagtatatgggatgttgttgagtttggtgcacaggtaccgtccgtaggggacaaggattatgatgaggatgaggtggcccaaatcgagcacttcaactctcaagcgacaacaatactcctcgcctctttaagtagagaggagtataacaaagttcaagggttgaagagcgccaaagaagtttgggatgtgctcaaaaccgcgcacgagggagacgagctcacaaagatcaccaagcgggaaacgatcgagggggagctcggtcggttccggcttcgcaaaggggaggagccacaacacatgtacaaccggctcaagaccttggtgaaccaagtgcgcaacctcgggagcgtaaagtgggacgaccacgaaatggttaaggttattctaagatctctcattttccttaaccccactcaagttcaattaattcgtggtaatactagatatactaaaatgacccccgaggaagttatcgggaattttgtaagttttgagtgcatgatcgaaggctcgaggaagatcaacgagcttgatgatccatccacatccgaagctcaacccgtcgcattcaaggcgacggaagaaaagaaggaggaggctacaccaactcgacaaccaatagacgcctccaagctcgacaatgaggaaatggcgctcgtcatcaagagcttccgccaaatcctcaaacaaaggagggggaaagactacaagtcccactccaaaaaggtttgctacaaatgtggtaagcccggtcattttattgctaaatgtcctatatctagtgacagtgaccgaggcgacgacaagaaggggagaagaaaggagaagaagagatattacaagaagaagggcggcgatgcccatgtttgtcgggagtgggattccgacgaaagctcaagcgactcctccgacgacgaggacgccgccaacatcgccgtcaccaagggacttctcttccccaacgtcggccacaggtgtctcatggcaaaggacggcaaacggaagaaggttaaatctaactcctccactaaatatgaatcttctagtgacgataatgctagtgatgaggaggataatttgcgttccctttttgccaaccttaacatagctcaaaaggaaaaattaaatgaattggttagtgctattcatgaaaaggatgaccttttggattcccaagaggacctccttattaaggaaaataagaagcatgttaaggttaaaaaggcttatgctcttgaaattgagaaatgtgaaaagttatctagtgagctaagcacttgccgtgagatgattgacaaccttaggaatgaaaatgctagtttaaatactaaggttgattcacatgtttgcaatgtttcaacttcaaatcctagagacaataatgttgatttacttgctaggattgatgagttgaatgcttccctagctagccttagaattgaaaatgaaaaattgcttgctaaggctaaagattttgatgtttgcaatgctacaatttccgaccttagaactaagaatgacatgttacatgctaaggttgttgaattaaaatcttgcaaaccctctacatctatcgttgagcatgtatctatttgcactagatgtagagatattaacattgatgctattcatgatcatatggctttaattaaacaacaaaatgatcatatagcaaaactagatgctaaaattgccaagcacaacttagaaaatgagaaatttaaatttgctcgtagcatgctttataatgggagacgcccgggcatcaaggatggcattggcttccaaaggggagacaatgtcaaaattagtgccccacctaaaagattgtccaactttgttaagggcaaggctcccatgcctcaggataacgagggttacattttgtaccctgccggttatcccgagagcaaaattaggagaattcattctaggaagtctcactctggccctaatcatgcttttatgggctcaagttggatactcgacagcgggtgcacaaaccacatgactggggagaagaagatgttctcctcctacgagaaaaaccaagatccccaacgagctatcacattcggggatggaaatcaaggtgtcactgtctttagaagaagtgatgattcaatagcatttaagggtgtgttagagggtcagctatacttagtagattttgaaagagctgaactcgacacatgcttaattgctaagactaacatgggttggctctggcaccgccgactagcccatgttggaatgaagaatcttcataagcttctaaagggagaacacattttaggactaacaaatgttcattttgagaaagacaggatttgtagcgcatgccaagcaggaaagcaagttggctcgcatcatccgcataagaacataatgacgaccgacaggccactggagctcctacacatggacctattcggcccgatcgcttacataagcatcggcgggagtaagtactgtcttgttattgtggatgattattctcgcttcacttgggtattctttttacaggaaaaatctcaaacccaagagaccttaaagggattcttgagaagggctcaaaatgagttcagcttaaggatcaagaaaataagaagcgacaacgggacggagttcaagaactctcaaattgaaggcttccttgaggaggagggcatcaagcatgagttctcttctccctacacgcctcaacaaaatggtgtagtggagaggaagaatcgaactctattggacatggcaagaaccatgcttgatgagtacaagacttcggatcggttttgggccgaggcggtcaacaccgcttgctacgccatcaaccggttgtatctacaccgaatcctcaagaagacatcttatgaactcctaaccggtaaaaagcccaacatttcatattttagagtctttggtagcaaatgctttattcttgttaaaagaggtagaaaatctaaatttgctcctaagactgtagaaggctttttactaggatatgattcaaacacaagggcatatagagtctttaacaagtcctcaggacaagttgaagtttcttgtgacgttgtgtttgatgagactaacggctctcaagtagagcaagttgatcttgatgagataggtattgaagaggctccgtgcatcgcgctaaggaacatgtccattggggatgtgtgtcctaaggaatccgaagagcctccaaatgcacaagatcaaccatcctcctccacgcaagcatctccaccgactcaaaatgaggatgaagctcaagttgatgaagaagaagatcaatcaaatgagccacctcaagatgacggcatagatcaagggggagatgcaaataatcaagacaaggaggatgaagagcaaaggccaccacacccaagagtccaccaagcaatccaacgagatcaccccgtcgacaccatcctcggcgacattcataagggggtaactactcgatctcgtgttgcacatttttgtgaacattactcgtttgtttcctctattgagccacacaggatagaggaagcactcctagattcggattgggtggtggcaatgcaagaggagctcaacaacttcactagaaatgaggtatggcatttagttccacgtcctaaccaaaatgttgtaggaaccaaatgggttttccgcaacaagcaagatgagcatggtgtggtgacaaggaacaaagctcgacttgtggccaaaggatactcccaagtcgaaggtttggacttcggtgaaacctatgcacccgtagctaggcttgagtcaattcgcattttattggcctatgctacttaccatggctttaagctttatcaaatggacgtgaaaagtgccttcctcaatggaccaatcaaggaagaggtctatgttgagcaacctcccggctttgaagacagtgagtatcctaaccatgtctataaactctctaaggcgctttatgggctcaagcaagccccaagagcatggtatgaatgccttagagattttcttattgcaaatggattcaaagtcggaaaggccgatcctacactctttaccaaaacacttgaaaatgacttgtttgtatgccaaatttatgttgatgatattatatttgggtctactaacgagtctacatgtgaagagtttagtaggatcatgacacaaaagttcaagatgtctatgatgggggagttgaagtatttcttaggattccaagtgaagcaactccaagagggcaccttcattagccaaacgaagtacactcaagacattctaaacaagtttgggatgaaggatgccaagcccatcaagacacccatgggaactaatgggcatctcgacctcgacacgggaggtcatactgtcaatgacttatag

SEQ ID NO: 4931 - DNA, 5046 bp, Zea mays
  Clone ID: TF_ZM4995.C3.o9.fg
atgtcgagagaactcgccaagaaggagatgaagaccgacgacaagcccgctacaagccacgggaaggcttcatcggaagagtcccgcaacaaaaagaaagggaaggagaagaaagcctcctcccacaagtcgcatcggagtggcgacaagaaaaagaagatgaggaaggtggtctactacgagaccgacacttcatcgccatctacctccggctccgacgcgccctccataacttctaagcgtcatgagcgcaagaagtttagtaagatccccttacactatcctcgtacttctagacatactcaattactttccgttccattaggcaaactgccaacctttgatggtgaagattatgctaggtggagtgatttaatgaaatttcatctaacctcactccacaaaagtatatggaatgttgttgagtttggagcacaggtaccatccgtaggggatgaggattatgatgaggacgaagtagcccaaatcgagcacttcaactcccaagccacaaccatacttctcgcttctctaagtagagaggagtacaacaaggtgcaaggattaaagagcgccaaggaagtttgggacgtgctcaaaaccgcgcacgagggtgatgaactcaccaagatcaccaagcgggaaatgatcgagggggagctcggtcgcttccgtcttctccaaggggaggagccacaagacatgtacaaccggctcaaaaccttggtgaatcaagtgcgcaaccttgggagcaaaaagtgggatgaccacgagatggttaaggttattttaagatcacttattttccttaaccctactcaagtacaattgattcgtggcaatccaagatatacactaatgactcccgaggaagtaatcgtgaattttgtgagctttgaatttatgatcaagggctcacggaagatcaacgagcttgatggtccctccacgtccgaagctcaaccggtcgcatttaaggcgacggaggagaaaaaggaggagtctacaccaagtagacaaccaatcgacgcctccaagctcgacaatgaggaaatggcgctcgtcatcaagagctcccgccaaatcctcaaacaaaggagggggaaggactacaaacctcgctccaagaaagtgtgttacaaatgtggtaagcccggtcactttattgcaaaatgtcctatttctagtgacagaggcgatgacaagaaggggagaagaaaggagaagaggtactacaagaagaagggcggcggtgcccatgtttgtcgggagtgggactccgacgaaagctctagcgactcctccgacgacgaggatgccgccaacatcgccgtcaccaagggccttctcttccccaacgttggccacaagtgcctcatggcaaaggatgacaaaaagaagaaggttaaatctaaatcctccactagatatgaatcctctagcgatgattatgctagtgatgaggaagataatttgcgtactctttttgccaacttaaacatgcaacaaaaagagaagttaaatgaattgattagtgccatacatgagaaggatgacctcttggacacccaagaggacttcctaatcaaggaaaacaaaaaacatgttaaggttaaaaatgcttatgctctagaagttgaaaaatgtgaaaaattatctagtgagctaagcacttgccatgagaccattgacaaccttagaaatgagaatgctaatttgttagctaaggttgagtcaaatgtttgtaatgtttcaattccaaatgataatattgagttgctttctaaaatagaagaattgaacatttctcttgctagccttaggattgaaaataagaaattaattgctagggctaaagattttgatgtttgcaatgttacaatttccgatcttagagataaaaatgatatattgtgtgctaagattgttgaacttaattcttgcaaaccctctacatctaccgttgaacatacttctatttgtactagatgtagagatgttgatattgatgctattcatgatcatatggtattaattaaacaacaaaatgatcatatagcaaagttagatgcaaaaattgccgagcatgaaattgaaaatgaaaaatttaaatttgctcgtagtatgctttatagtgggagacgccctggcattaagaatggcattggcttccaacagggaggcaatgtcaaacttaatgcccctcctaagaaattgtccaactttgttaagggcaaggctcccatgcctcaggataacgagggttacattttgtaccctgccggttatcctgagagcaaaattaggagaattcattctaggaagtctcactctggccctaaccatgcttttatgtataagggtgagacatctagctctaggcaaccgacccgtgctaagttgcctaaaaggaaaactcctagtgcatcaaatgatcatgacatctcatttaaaacttttgatgcatcttatgttttaactaacaaatctggcaaggtttatgcatccgggggctcaagttgggtaatcgacagcgggtgcacaaaccacatgacaggggagaagaagatgttctcctcctacgagaaaaaccaagattcccaaagagctatcacattcggggatggaaatcaaggtgtcactgtctttagaagaagtgatgattcaatagcatttaagggagtgttagagggtcagctatacttagtgaattttgatagagttgaacttgacacttgcttaattgctaagactaacatgagctggctctggcatcgccgactagcacatgttgggatgaagaatcttcataagcttttaaagggagagcacattttaggattaacaaatgttcattttgagaaagacaggatttgtagcgcatgccaagcaggaaagcaagttggtgctcaccatccacacaagaacatcatgacgaccgacaggccactggagctcctacacatggatctattcagcccaattgcttacataagcatcagcgggagtaagtgctatctagttattgtggatgattattctcgcttcacttgggtgttctttttgcaggaaaaatctcatacccaagagaccttaaagggattcttgagacgggctcaaaatgagttcggcttgaggatcaagaaaattagaagcgacaacgggacggagttcaagaactctcaaattgaaggcttccttgaggaggagggcatcaagcatgagttctcttctccctacacccctcaacaaaatggtgcagtggagaggaagaatagaactctattggacatggcaagaaccatgcttgatgagtacaagacttcggatcggttttgggccgaggcggtcaacaccgcctgctacgccatcaaccggttgtatctacaccgaatcctcaagaagacatcatatgaactctttaccggtaaaaagcccaatatttcatattttagagtctttggtagcaaatgctttattcttcttaaaagaggtagaaaatctaaatttgctcctaagactgtagaaggctttttactaggatatgattcaaacacaagggcatatagagtctttaacaagtcctctggacaagttgaagtttcttgtgacgttgtgtttgatgagactaacggctctcaagtagagcaagttgatcttgatgagaaaggaacatgtccgttggggatggtgtgtcctaaggaatccgaagagcctccaaatgcacaagatcaaccatcctcctccacgcaagcatctccaccaactcaaaatgaggatgaggctcaagttgatgaaggagaagatcaagcaaatgagccacctcaagatgacgacaatgatcaagggggagatgcaaattatctagacaaggaggatgaagaagcaaggccgccacacccaagagtccaccaagcaatccaacgagatcaccccgtcgacaccatcctcggcgacattcataagggggtaaccactagatctcgagttgcacatttttgtgagcattactcttttgtttcctctattgagccacacaggatagaggaagcactacaagatttggattgggtggtggcgatgcaagaggagctcaacaacttcactaggaatgaggtatggcatttggttccacgtcctaaccaaaatgttgtaggaaccaaatgggtgttccgcaacaagcaagatgagcatggtgtggtgacaaggaacaaagctcgacttgtggccaaaggatactctcaagtcgaaggtttggatttcggtgaaacctatgcacccgtagctaggcttgagtcaattcgtatattattggcctatgctacttaccatggcttcaagctttaccaaatggacgtgaagagtgccttcctcaatggaccaatcaaggaagaggtctatgttgagcaacctcccggctttgaagatagtgagtaccctaaccatgtctataaactctctaaggcgctttatgggctcaagcaagccccaagagcttggtatgaatgccttagagatttccttatcactaatggattcaaagtcggaaaagcagatcctacactcttcactaaaactcttgaaaatgacttgtttgtatgccaaatttatgttgatgatattatatttgggtctactaacgagtctacatgtgaagaatttagtaggatcatgacacaaaaattcgagatgtctatgatgggggagttgaagtacttcttaggatttcaagtgaagcaactccaagaaggcaccttcctaagccaaacgaagtatacccaagatattctaagcaagtttgggataaaggatgccaaacccatcaagacacccatgggaaccaatgggcatctcgacctcgacgaaggaggtaaacccgtcgatcaaaagaaagagcacatcggggacttgccagttcttaggaagatccttggtgtcttgggcttcaaagaagcaaaattccgtagctctttcaaccgccgaagccgagtatattgccgcaggatattgttgcgcgcaattgctttggatgaggcaaacccttag

SEQ ID NO: 4932 - DNA, 1764 bp, Zea mays
  Clone ID: TF_ZM5003.C1.o1.fg
atggagaccggcgacaagcccactacaagccacgggaaggcttcatcggaagagtcccgcaaaaagggaaaagggaaggagaagaaagcatcttcccacaagtcgcatcagagtggcgacaagaaaaagaagatgaggaaggtggtctactacgagaccgatacttcatcaccttccacctccggctccgacgcgccctccgtaacttctaagcgccatgagcgcaagaagtttagggatgaagattatgatgaggatgaagtggcccaaatcgagcacttcaactcccaagccacaacaatactcctcgcctctctaagtagagaggagtacaacaaggtgcaaggattaaagagcgccaaggaagtttgggacgtgctcaaaaccgcgcacgagggagatgagctaaccaagatcaccaagcgggagacgatcgagggggagctcggtcgcttccggcttcgcaaaggggaagagacacaagacatgtacaaccggctcaaaaccttggtgaaccaagtgcgcaacctcgggagtaaaaagtgggatgaccacgagatggttaaggttattcttagatcacttattttccttaaccctactcaagttcaattaattcgtggtaatcctagatatacactaatgactcccgaggaagtaatcgggaattttgtgagctttgagtatatgatcaagggctcaaagaaaatcaatgagctagatgatccctccacatctgaagcacaaccggttgcattcaaggcaacggaggagaagaaggaggagtctacatcaagtagacaaccaatcgatgcctcaaagctcgacaatgaggaaatggcgctcgtcatcaagagcttccgccaaatcctcaagcaaaggagcgggaaagattacaagccccgctccaagaaggtttgctacaagtgtggtaagcccggtcactttatagcaaaatgccctatttctagtgttagtgacaggggcgacgacaagaaggggagaagaaaggagaggaagaaatactacaagaataagggtggcgacacccatgtatgccgcgagtgggactcggacgagagctcctccgactcctcctccaaagaggacgtcgctaacatcgccgtcaccaagggacttctcttccccaacgtcggccacaagtgcctcatggccaaggacggcaaaaagaagaaggtttatgcatccgggggctcaagttggatcatcgatagcgggtgcacaaaccacatgacaggggagaagaagatgttctcctcctatgagaaaaatcaagatccccaacgagcaatcacattcggggatggaaatcaaggtgtcactgtctttagaaggagtgatgattcagtagcatttaagggagtgttagagggtcagctatacttggtagattttgatagagctgaactcgacacttgcttgattgctaagactaacatgggttggctatggcaccgccgactagcccatgttgggatgaagaattttcataagcttctaaagggagagcacattttaggattaacaaatgttcattttgagaaagacgggatttgtagcgcatgtcaagcagggaagcaagttggtgctcatcatccgcacaagaacatcatgacgactgacaggccactggaactcctacacatggatctattcggcccaattgcttacataagcatcgacgagagaaaaatctcatacccaagagacattaaagggattcttgagacgggctcaaaatga

SEQ ID NO: 4933 - DNA, 4848 bp, Zea mays
  Clone ID: TF_ZM5004.C2.o7.fg
atgtcgggagatcacgccaagaaggagatggagaccgacgaaaagcccactacaagcaacgggagcacttcatcggaagagtcccgcaccaaaaggagggagaagaagaagagctcctccaacaaagagaaggagaagaaatcttcttctcaccacaaagagaagaaggaaaaatcttcttcccacaagccgcatcggagtggggacaagcaaaagaggatgaggaaagtggtctactacgagaccgacacttcatcaacatcgacctccggctccgatgcgccctccgtaacttctaaacgccaagagcgtaagaagtttagtaagatccccctacactaccctcgcatttctaaacatgcacctttactttccgtcccattaggcaaaccaccaacttttgatggtgaagattatgctaggtggagtgatttaatgcgatttcatctatcctcactccacaaaagtatatgggatgttgttgagtttggtgcacaggtaccgtcggtaggggataaggactatgatgaggatgaggtagcccaaatcgagcacttcaactctcaagcgacaacgatactcctcgcctctttaagtagagaggagtataacaaagtgcaagggttgaagagcgccaaggaggtttgggatgtgctcaaaaccgcgcacgagggagatgagctcaccaagatcaccaagcgggaaacgatcgagggggagctcggtcggttccggcttcgcaaaggggaagagccacaacacatgtacaaccggctcaagaccttggtgaaccaagtgcgcaacctcgggagcataaagtgggacgaccacgaggtggttaaggttattttaagatcacttattttccttaaccctactcaagttcaattaattcgtggctcaaggaagatcaacgagcttgatgatcccaccacatccaaagctcaacccgtcgcattcaaggcgacggaggaaaagaaggaggagtctacaccaagtcgacaaccaatagacgcctccaagctcgacaatgaggaaatggcgctcgtcatcaagagcttccgccaaatcctcaaacaaaggagggggaaagactacaagtcccgctccaagaaggtttgctacaagtgtggtaagcccggtcattttattgctaaatgtcctatatctagtgacagtgaccgaggcgacgacaagaaggggagaagaaaggagaagaagagatactacaagaagaagggcggcgatgcccatgtttgtcgggagtgggattccgacgaaagctcaagcgactcctccgacgacgaggacgccgccaacatcgccgtcaccaaaggacttctcttccccaacgtcggccacaagtgcctcatggcaaaggacggcaaaaggaaaaaggttaaatctaactcctccactaaatatgaatcttctagtgatgataatgctagtgatgaggaggataatttgcgttccctttttgccaaccttaacatagctcaaaaggaaaaattaaatgaattggttagtgctattcgtgaaaaggatgacattttggattcccaagaggaccttcttattaaggaaaataagaagcatgttaaggttaaaaaggcttatgctcttgagattgaaaaatgtgaaaaattatctagtgagctaagcacttgctgtgagatgattgacaaccttaaacatgaaaatgctagattaaatgctaagaacatttctcttgctagccttagggtagaaaatgaaaatttgattgctaaggctaaagattttgatgtttgcaaagttacaatttccgatcttagagataaaaacgatattcttcatgctaagattgttgaacttaactcttgcaaaccctctacatctactgttgagcacacttctatttgcactagatgtagagatgttaacattgatgctatacatgatcacataaccttaattaaacaacaaaatgatcatatagcaaaactagatgccaaaattgccgagcataacttagaaaatgaaaagtttaaatttgctagaagtatgctctatagtgggagacgccctggcatcaaggatggcattggcttccaaaggggagacaatgtcaaacttagtgcccctcctaaaagattgtctaactttgttaagggcaaggctcccatgcctcaggataacgaaggttacattttgtaccctgctggttatcctgagagcaaaattaggagaattcattctaggaagtctcactctggcccaaatcatgcttttatgtataagggtgagacatctagttctaggcaaccaacccgtgctaagttgactaagaaaactcctagtgcatcaaatgaacatagtctttcatttaaaacctttgatgcatcttatgtgttaactaacaaatccggcaaggtttatgcatccgggggctcaagttggatactcgacagcgggtgcacaaaccacatgactggggagaaaaagatgttctcctcatatgagaaaaaccaagatccccaaagagcgatcacattcggggatggaaatcaaggtttggtcaaaggtgtcactgtctttagaagaagtgatgattcaatagcatttaagggagtgttagagggtcagctatacttggtagattttgatagagctgaactcgacacttgcttaattgctaagactaacatgggctggctctggcatcgccgactagcacatgttggaatgaagaatcttcacaaacttctaaagggtgaacacattttaggactaacaaacgttcattttgagaaagacagggagaaatctcaaacccaagagaccttaaagggattcttgagacgagctcaaaatgagttcggcttaaggatcaagaaaataagaagcgacaatgggacggagttcaagaactctcaaattgaaagcttccttgaggaggagggcatcaagcatgagttctcttctccctacacgccacaacaaaatggtgtagtggaaaggaagaatagaactctgttggacatggcaaggaccatgcttgatgagtacaaaacttcggatcggttttgggccgaggcagtcaacaccgcctgctacgccatcaaccggttatatcttcaccgaatcctcaagaagacatcatatgaactcctaaccggtaaaaagcccaacatttcatattttagagtctttggtagcaaatgctttattcttgttaaaagaggtagaaaatctaaatttgctcctaagactgtagaaggctttttacttggttatgactcaaacacaagggcatatagggtctttaacaagtccactggactagttgaagtctcatgtgacgttgtgtttgatgagactaacggctctcaagtagagcaagttgatcttgatgagataggtattgaagaggctccgtgcatcgcgataaggaacatgtccattgtggatgtgtgtcctaaggaattcgaagagcctccaaatgcacaagatcaaccatcctcctccatgcaagcatctccaccaactcaaaatgaggaagaggctcaagttgatgaagaagaagatcaatcaaacgagccaactcaagatgacggcatagatcaagggggagatgcaaatgatcaagacaaggaggatgaagagcaaaggccgccacacccaagagtccaccaagcaatccaacgagatcaccccatcgacaccatccttggcgacattcataagggggtaactactagatctcgggttgcacatttttgtgaacattactcgtttgtttcctctattgagccacacagggtagaagaagcactacaagattcggattgggtggtggcgatgcaagaggagctcaacaacttcactagaaatgaggtatggcatttagttccacgtcctaatcaaaatgttgtaggaaccaaatgggtcttccgcaacaagcaagatgagcatggtgtggtgacaaggaacaaagctcgacttgtggccaaaggatactcccaagtcgaaggtttggacttcggtgaaacctatgcacccgtagctaggcttgagtcaattcgcatattattggcctatgctacttaccatggctttaagctttatcaaatggacgtgaaaagtgccttcctcaatggaccaatcaaggaagaagtctatgttgagcaacctcccggctttgaagacagtgagtaccctaaccatgtctataagctctctaaggcgctttatgggctcaagcaagccccaagagcatggtatgaatgccttagagatttccttattgctaatggcttcaaagtcggaaaagccgatcctacactctttactaaaactcttaaaaatgacttgtttgtatgccaaatttatgttgatgatattatatttgggtctactaacgagtctacttgtgaagagtttagtaggatcatgacacaaaagttcgagatgtctatgatgggggagttcaagtatttcttaggattccaagtgaagcaactccaagagggcaccttcattagccaaacaaagtacactcaagacattctaaacaagtttgggatgaaggatgccaagcccatcaagacacccatgggaactaatgggcatctcgacctcgacacgggaggtaagtccgtggatcaaaagtctatttcaaaccaagtcataggtgtattgaaagggaattggagtcttcggcgaagacaaaggcttccactacgtaactcatccttcgccgacgcttcaagtctctctccattcttgggggagaaaagcatgagcatcaaagaaaaagactttgtctttgggggacaaagtaagagcccatggcaaaagaactag

SEQ ID NO: 4934 - DNA, 4473 bp, Zea mays
  Clone ID: TF_ZM5010.C1.o3.fg
atgtcgggagatcacgccaagaaggagatggagaccggcgaaaagcccactacaagccacgggagcacttcatcggaagagtcccgcaccaagagaaaggagaagaagaagagctcctccaacaaagggaaggagaagaaatcttcttctcaccacaaagagaagaaggaaaaatcctcttcccacaagtcgcatcggaaaggtgacaagcacaagaggatgaggaaggtggtctactacgagaccgacacttcatcaacatcaacctccgactccgatgcgccctccgtaacttctaaacgccaagagcgtaagaagtttagtaagatccccctacactaccctcgcatttccaaacatgcacctttactttccgtcccattaggcaaaccaccaacttttgatggtgaagattatgctaggtggagtgatttaatgcgattccatctaacctcactccacaaaagtatatgggatgttgttgagtttggtgcacaggtaccatccgtaggggatgaagactatgatgaggatgaggtggcccaaatcgagcacttcaactctcaagcgacaacaatactcctcgcctctttaagtagagaggagtataacaaagttcaagggttgaagagcgctaaggaggtttgggatgtgctcaaaaccgcgcacgagggagacgagctaacaaagatcaccaagcgggaaacgatcgagggggagctcggtcggttccggcttcgcaaaggtgaagagccacaacacatgtacaaccggctcaagaccttggtgaaccaagtgcgcaacctcgggagcaagaagtgggacgaccatgaaatggttaaggttattctaagatctctcattttccttaaccccactcaagttcaattaattcgtggtaatcctagatatactaaaatgacccccgaggaagttatcgggaactctgtaagttttgagtgcatgatcgaaggctcgaggaagatcaatgagcttgacgaacccaccacgtccgaagcacaacccgtcgcgttcaaggcgacgaaggaaaagaaggaggagtctacaccaagtagacaaccaatcgacgcctccaagctcgacaatgaggaaatggcgctcgtcatcaagagcttccgccaaatcctcaagcaatggaaggggaaggattacaagtcccgttccaagaaggtttgctacaaatgtggtaagcccggtcattttattgctaaatgtcccatatctagtgacagtgaccgaggcgacgacaagaaggggagaagaaaggagaagaaaaagtactacaagaagaagggcggcgatgcccatgtttgtcgggagtgggactccgacgaaagctcaagtgactcctccgacgacgaggacgccgccaacatcgccgtcaccaagggactcctcttccccaacgtcggccacaagtgcctcatggcaaaggacggcaaacggaagaaggttaaatctaactcctccactaaatatgagtcttctagtgatgataatgctagtgatgaggaggataatttgtgtaccctttttgtcaacctcaacatgcaacaaaaggaaaaattaaatgaattaattagtgccatccatgagaaggatgatctcttggactcccaagaggacttcctaatcaaggaaaataaaaagcatgttaaggttaaaaatgcttatgctctagaagttgagaaatgtcaaaaattatctattgagctaagcacttgccatgaaacaatagacaaccttagaaatgaaaatgctaatttgttagctaaggttgattctcatgtttgcaatgtttcaattcccaaccctagagataataatgatgatttgcttgctaggattgaagaattgaacatttctcttgctagtcttagattagaaaatgaaaatttgattgctaaggctaaagattttgatgtttgcaaaattacaatttccgatcttagagataaaaatgatattctacatgctaagattgttgaacttaattcttgcaaaccctctacatctaccgttgagcacacttctatttgtactagatgtagagatgttaacattgatgctatacatgatcacatgactttaattaaacaacaaaatgatcatatagctaaattagatgctaaaattgccgagcataacttagaaaatgaaaattttaaatttgctagaagtatgctctataatgggagacgaccgggcatcaaggatggcattggcttccaaaggggagacaatgttaaacttagtgcccctcctaaaagattgtcaaattttgttaagggcaaggctcccatgcctcaggataacgagggttacattttataccctgccggttatcccgaggacaaaattaggagaattcattctagaaagtctcactctggccctaatcatgctttcatgtataagggtgagacatctagctctaggcaaccaacccgtgctaagttgcctagaaagaaaactcctagtgcatcaaatgatcatgatatttcattcaaaacttttgatgcatcttatgttttaactaacaaatccggcaaggtttatgcatccgggggctcaagttggatactcgacagcgggtgcacaaaccacatgacaggggagaagaaaatgttctcctcctatgagaaaaaccaagatccccaacgagctatcacattcggggatggaaatcaaggtgtcactgtctttagaagaagtgatgattcaatagcatttaagggagtgttagagggtcagctatacttggaaaaatctcaaacccaagagaccttaaaaggattcttgagacgagctcaaaatgagttcggcttaaggatcaagaaaattagaagcgacaacgggacggagttcaagaactctcaaatcgaaggcttccttgaggaggagggcatcaagcatgagttctcctctccctacacccctcaacaaaatggtgtagtggaaaggaagaatcgaactctattggacatggctagaaccatgcttgatgaatacaagacttcggatcggttttgggccgaggcggtcaacaccgcttgctacgccatcaaccggttatatctacaccgaatcctcaagaagacatcatatgaactcctaaccgagcaagttgatcttgatgagataggtgaagaagaggctccatgcatcgcgctaaggaacatgtccattggggatgtgtgtcctaaggaatccgaagagcctccaaatgcacaagatcaaccatcctcctccacgcaagcatctccaccaactcaaaatgaggatgaggctcaagttgatgaagtagaggatcaagcaaatgagccacctcaagatgacgacaatgatcaagggggagatgcaaatgatcaagacaaggaggatgaagaaccaaggccgccacacccaagagtccaccaagcaatccaacgagatcaccccgtcgacaccatcctcggcgacattcataagggggtaactactagatctcgtgttgcacatttttgtgaacattactcgtttgtttcctctattgagccacacagggtagaggaagcactgcaagattcggattgggtggtggcgatgcaagaggagctcaacaacttcactaggaatgagcaagatgagcatggtgtggtgacaaggaacaaagctcgacttgtggccaagggatactctcaagtcgaaggtttggatttcggtgaaacctatgcacccgtagctaggcttgagtcaattcgcatattattggcctatgctacttaccatggatttaagctttatcaaatggacgtgaaaagtgctttcctcaatggaccaatcaaggaagaggtctatgttgagcaacctcccggctttgaagacagtgagtatcctaaccatgtctataagctctctaaggcgctttatgggctcaagcaagccctaagagcgtggtatgaatgccttagagatttccttattgctaatggcttcaaagtcggaaaggccgatcctacactctttactaaaacacttgaaaatgatttgtttgtatgccaaatctatgttgatgatattatatttgggtctactaacgagtctacatgtgaagagtttagtaggattatggcacagaaattcgagatgtctatgatgggggagttgaagtatttcttaggatttcaagtgaagcaactccaagagggcaccttcattagccaaacgaagtacactcaagacattctaaacaagtttgggatgaaggatgccaagcccatcaagacacccatgggaactacaggaattcacttaattcccgtcggccagaaaccgacgggaataagcatataccgacgggaattacttaattcccgtcggtttagggcttattcccgtcggttttcagccgccaggcgtcccttgtcggggatacgtttatccccgtcggcggccgacgggaattattaa

SEQ ID NO: 4935 - DNA, 5196 bp, Zea mays
  Clone ID: TF_ZM5012.C1.o12.fg
atgtcgggagatcacgccaagaaggagatggacaccggcgacaagcccgctacaagcctcgagaaagcttcatcgggagagtcccgcaacaaagggaaggggaaggagaagaaaccctcttcccacaagttgcatcggagtggggacaagaaaaagaagatgaggaaggtggtctactacgagaccgacacctcatcgccatctacctccggctccggcgcgccctccataacttctaagcgccatgagcgcaagaagtttagtaagatccccttacactaccctcgcacttctagacatactccattactttccgttccattaggcaaaccgctaacctttgacggtgaagattatgctaggtggagtgatttaatgaaatttcatctaacctcactccacaaaagtatatggaatgttgttgaatttggagcacaggtaccatccataggggatgaggattatgatgaggacgaggtggcccaaatcgagcacttcaactcccaagccacaaccatactcctcgcctctctaagtagggaggagtacaacaaggtgcaaggattaaagagcgccaaggaagtttgggacgtgctcaagaccgcgcacgaaggagatgagctaaccaagatcaccaagcgggaaacgatcgagggggagctcggtcgcttccgacttcgcaaaggggaagagccacaagacatgtacaaccggctcaaaaccttggtgaaccaagtgtgcaacctcgggagcaaaaagtgggatgaccacgagatgattaaggttattcttagatcacttatttttcttaaccctactcaagttcaattaattcgtggtaatcctagatatacactaatgactctcgaggaagtaatcaggaattttgtgagttttgagtacatgatcaagggctcaaagaaaatcaatgagctagatgatccctccacatccgaagcacaaccggtcgcatttaaggcgacggaggaaaagaaggaggagtctacactgagtagacaaccaatcgacgcctcaaagctcgacaacgaggaaatggcgctcgtcatcaagagcttccgccaaatcctcaagcaaaggagggggaaagattacaagccccgctccaagaaggtttgctacaagtgtggtaagcccggtcactttatagcaaaatgtcctatttctagtgacagtgacaggggcgacgacaagaaggggagaagaaaggagaagaagaagtactacaagaagaagggtggcgatgcccatgtttgtcgagagtgggactccgacgaaagctctagcgactcctccgacgacgaggacgccgccaacatcgctgtcaccaagggacttctcttccccaacgtcggccacaagtgcctcatggcaaaggacggcaaaaataagaaggttaaatccaaatcctccactagatatgagtcttctagcgatgataatgctagtgatgaggaagataatttgcttaccctttttgccaacctaaacatgcaacaaaaggaaaagttaaatgaattaattagtgccatccatgagaaggatgacctcttggacacccaagaggacttcctaatcaaggaaaacaaaaagcatgttaaggttaaaaatgcttatgctctagaagttgaaaaatgtgaaaaattatctagtgagctaagcacttgccatgaaactatagacaaccttagaaatgaaaatgataatttgtatgataatttgttagccaaggttgatttaaatggttgtgatgcttcaattcccaatcttagaaatgataatgataatttgcttactaagattgaagaattaaacattactcttggtagccttagaaatgaaaataaaaacttgcttgctaaggctaaagaacttgatgtttgcaacgcttccatttctgaccttagaagtaaaaatgatatattacatgctaaggttgtagaattaaaatcttgcaaaccctctacatctaccgttcaacatactactatttgcactagatgtagagatgttgatattaatgctattcatgatcacatgactttaattaaacaacaaaatgatcatatagcaaaattagatgctaaaattgccgagcatgacttagaaaacgaaaaatttaaatttgctagaagcatgctctatagagggagacgctctggcattaaggatggcattggcttccaacagggaggcaatgtcaaacttaatgcccctcctaagaaattgtctaactttgttaagggcaaggctcccatgcctcaggataacgagggttacattttgtaccctgtcggctatcctgagagcaaaattaggagaattcattctaggaagtctcactctggccctaaccatgcttttatgtataagggtgagacatctagttctaggcaaccaacccgtgctaagtttcctaagaagaaaactcctagtgcatcaaatgatcatgatatttcatttaaaacttttgatgcatcttatgtgttaactagcaaatccggcaaggttgttgctaaatatgttgggggcaagcacaaggggccaaagacttgtgtttgggtttatgcatccgggggctcaagttggatcatcgacagtgggtgcacaaaccacatgacaggggagaagaaaatgttctcctcctatgagaaaaaccaagatccccaacgagctatcacattcggggatggaaaccaaggtgtcactgtctttagaagaagtgatgattcagtagcatttaagggagtgttagagggtcagttatacttggtagattttgatagagctaaactcgacacttgcttaattgctaagactaacatgggctggctctggcaccgccgactagcacatgttgggatgaagaatcttcataagattctaaagggagagcacattttaggattaacaaatgttcattttgagaaagacaggatttgtagcgcatgccaagcaggaaagcaagttggtgctcaccatccacacaagaacatcatgacgactgacaggccactggagctcctacacatggacctattcggcccgatcgcttacataagcatcggcgggagtaagtactatctagttattgtggatgattattctcgcttcacttgggtattctttttgcaggaaaaatctcacacccaagagaccttaaagggattcttgagacgggctcaaaatgagttcggcttgaggatcaagaaaattagaagcgacaacgggacggagtttaagaactctcaaattgaaggcttccttgaggaggagggcatcaagcatgagttctcttctccctacacgccacaacaaaatggtgtagtggagaggaagaatcgaactctattggacatggcaagaaccatgcttgatgagtacaagacatcggatcggttttgggccgaggcggtcaacaccgcctgctacgccatcaaccgattagtctttggtagcaaatgctttattcttgttaaaagaggtagaaaatctaaatttgctcctaagactgtagaaggctttttactaggatatggttcaaacacaagggcatatagagtctttaacaagtcctctggacaagttcaagtttcttgtgacattgtgtttgatgaggctaacggctctcaagtagagcaagttgatcttgatgagataggtgatgaagaggctccatgcatcgcgctgaggaacatgtccattggggatgtgtgtcctaaggaattcgaagagcctccaaatgcacaagatcaaccatcctcctccacgcaagcatctccaccaactcaaaatgaggatgaggctcaagttgatgaagggcaagatcaagaagatgagccacctcaagatgacggcaatgatcaagggggagatgcaaatgatcaagacaaggaggatgaagaaccaaggctgccacacccaagagtccaccaagcaatccaacgagatcaccccgtcgacaccatcctaggcgacattcataagggggtaaccactatatctcgtgttgcacatttttgtgagcattactattttgtttcctctattgagccacacagggtagaggaagcactccaagattcggattgggtggtggcgatgcaagaggagctcaacaacttcactaggaacgagcaagacgagcacggtgtggtgacaaggaacaaagcacgacttgtggccaagggatactcccaagtcgaaggtttggatttcggtgaaacctatgcacccgtagctaggcttgagtcaattcgtatattattagcctatgctacttaccatggcttcaagctttatcaaatggacgtgaaaagtgccttcctcaatggaccaatcaaggaagaggtctatgttgagcaacctcccggctttgaggatagtgagtaccctaaccatgtttataaactctctaaggcactttatgggctcaagcaagccccaagagcatggtatgaatgccttagagatttccttgtagataatggcttcaaagtcggaaaggccgatcctactttattcactaaaactcttgaaaatgacttgtttatgtctatgatgggggagttgaagtatttcttaggatttcaagtgaagcaactccaagagggcaccttccttagccaaacgaagtatactcaagacattctaagcaagtttggaatgaaggatgccaaacccatcaagacacccatgggaaccaatgggcatctcgatctcgacacggaagggtgtaaaattaatagaaagagcacatcggggacttaccagttcttgggaagatccttggtgtcttgggcttcaaagaagcaaaattccatagctctttctaccgccgaggccgagtacattgccgcaggacacggttgcgtgcaactactttggatgaggcaaacccttagggactatggttacaaattaaccaaagttcctcttctttgtgataatgagagtgcaatccgcatggcggataatcccgttgagcatagccgcactaaacacatagccattcggtatcactttttaagggatcaccaacaaaagggagatatcgagattgcatacattaatactaaagatcaattagccgatatctttaccaagccactagatgaacaaacttttaacaaacttaggcatgagctaaatattcttgattctaggaatttcttttga

SEQ ID NO: 4936 - DNA, 2754 bp, Zea mays
  Clone ID: TF_ZM5029.C1.o1.fg
atggccatgatgggttcaacatcggaaaagctgtacctctgccaggtaccaaactttgggtttgaaatgataaagctgagaccagggttgcccaaggtccattggacaaggacaactgtaggtgggcctaatgacttgggaggttccgtcacagctggtatcggagcgaagcctatctcttcagatattataaaacatttcaaaaagaattttcaatacttatccaagaaaatttctttcattcttaccttgtcactttctggaagtactcatcttgtaataccagatatgccgcatacgaggaaaaccgcacataagtccactggacccattggcgtgcctcgtcatcagttggctccaagacatgaagggagcaacaacggcaacaacgatccaatcagagacttagaagcccaagtggaacagcttcggacggagctacatcaccaaaatagggtgtgggcagaagacagtcagtgtatagctgagttgtcagccgaagtcggccgcttgcggtactccgaacgagactcggccattgattgggccattaactcgcgctcgatcacttggcatcgtgaagcaaaagctcgagctcgtgtggatgagctcagcacgaccctttgtaacctgcaagtatattgtaatactctacatgagaaagtacatgtactgtatggtcgactacactcggacgtgcctgctgaccctattgcaatgggagccagaccatcggggacagcaggtgaaggacctgatgcggaactggatctttttaagccccctccttctacgaacctggctgatgagcgatgccatcaaggactcgtgcgcatgacggtgcgggtacttcccgtggccgggaagatactccaaatccaccacctgtaccaccaacgctggccgaggctatcgctgccttggttaacgcgactgtcgataatacccgctttttacgcgagatggcgggtaaccaattccagcagcaaggcagaagggctcctccatagggaccgtgtaaaacctcatacctggacttctctgaaacgcgtcccccacccactctttgttaaagctgaagatcctcttgaagctgatgagtggatcagggtaatagagcaaaagtttggattaatccgctgcaccgaaacacaaaagtcgttgttcgccgcccaacaactaagaggtcctgccagtacttggtggggaaattttgtggcgattcaacaagctggacatcaggtcacttgggatgaatttaaattggcattccgtgagcactatattccagaaggagtgcttcacatgaaacaagaagaattcattcgactaaaacaagcaggggatactgtgatgcagtatctcaacaagtttaatcatttatcccaatatgcgattgatcaagtaaacactgacctgaaaaagaagaattgcttcatgagaggactcaacaatcggctccaaaggaaaatggtcacctgcctagatcttacatacagcagggcagtcaccacggcgctggcagtggaagccaagaatacaggccaaggaaaatccaagggatttggaggtgacaggtccaatcagagacctaagaagcgaacaagttcctcaactggctgcttcaactgtgggaagtctggtcattttattaaagactgcccatatccgaggcagaataaatccaacaatcagcaaaactcggggagctcaaatcaaggcaaagggaacatggcaaataattcagcgggcaaaaatgtgaagaaaactgggcgaatttattacacgcaagtggccactacaccagaaggtgagccgatccgtgttcgacccaaggatatacccaagaccgcatttactacgcggtatggactattcaaatatttggttatgtccttcggattgacgaatgctcctgcccacttaacatatctgatgaactcggtatttatgcccgagttggacaaatttgtggtcttcattgatgatattttgatttattctaggaatgaagaggagcatgctaaacatttacggatcgtattaacgcgcttaagggaacatcaattatatgctaaattcagcaagtgcgcgttttggctggaggaaatccaatttttggggcatgtattgtctgcaaatgggattgcggttgaccccagcaaggtccaggatattctagagtggaaatcgccaaccattgtacatcaagttcgaagtttccttggactggctggctattaccgcagatttatcccggatttctccaagattgtgaagccaatcacaagcctattgaagaatgatattaaatttaactggtcctcaaaatgcaacgaagccttcgagcaactgaagttagaactaaacatgaggcagaggagatggcttgagctgattaaggattatgaattagaaattcattatcacccaggcaaggccaacgtggtggcagatgcactaagtcgcaaggcttcctgccattgtcttacagtaaagacctctgacaccaccttgtgtcaagaaatggagaagttaaacctgggaatgattcaacatggaaccttgatccaattgaagcttgagtcgattcttctgcaaagaattattgatgcacaaaggagtgataagggtatgaaacatattcatgagaaaatagaagccgacaaaacaaattgttttagaagggataatcaaggcatagtatggtttaataatcgcatagttgtgcctaaagatgatgaagtccactag

SEQ ID NO: 4937 - DNA, 2257 bp, Zea mays
  Clone ID: TF_ZM5029.C3.o7.fg
atggagcagttcatcgccgcccagatgcagattctgcaaggaatcactgcggctattcaacaaattcagcagaaccagcagaatcaacaacatcagcaacaacagcagtacgcacccccggccagagataagcaccgggacttcatgagtcatcactcgccgacattttctcatgcggttgatcctctggatgccgatgactggctcaaggtcattggaaagaagctggacatcactcagtgcaacgaccgagaaaaggtcttgtatgcctcgggaagactcgagggagctgcgtccgattggtgggatgccttcacagtggcacaccccaacgtggatactataacttggcaagaatttcaggagaacttccgcgctcaccatattccctcgggaattatgaagctgaagaagaaagagttcctttcccttactcaagggagtatgtctgtcagcgagtatcgtgatcgcttcactcagctttcacgctatgcccctgaagaagtggacacggatgagaagcgccaacagcgtttcctggaaggactaattggacctctgaactatcaacttcagagtcacacttttcccaacttccagacactattgaacaaggcaattggccttgaaagcaaaaggaaggaattatccgaccacaaaagaaagttccaaggtcagtccagcaggaacacctggcctaacaacgctcaaggttcgcagttccgctctggaaatcaaggcggaaacaattatcaagtacaacgctctggacagcaaggccagggaaataatcagaatcagaaccatcaaaggagcaactccaagaccaaccagaggtctggtgggagttcacaaaaccgtcaaggtggcgccagtaccacgcaggccagaaacaacgcacatgtacaacccaatggatgtttcaagtgcggtgagctaggccactatgctaacaactgcccaaggcgcaaccagcagaaaccccagaaaagcaataatcagaggaatgaccagaacacccccgctcgtggatctgctcagaacaagactcctcagaaccagagcagaggaagggtcaatcacgtcactgcagaatcagtgcctggggatgccgacatagtgtatggtatgtttcttgttaactccatacctgcatcggttttatttgactctggagcatcgcattcgtttataactgagtcatttgtggaaaaacacatcatacctaagtaccctcttaagaagatattacatattagttcaccgggaggtgacatgaaggccacacactcatgcccccatgttaatatcaagattcaaggaatagatttttcagtcaacccagtggtcctaggatccaacggtattgatgtgattcttggatgcaactggttgaaaagttgtgatggagtgatacagtgtgccaatggaacaattatgttgacaagtcctcaaggtgaaagaatccaagtcaacatagacaagtcaacagatgcaaaagggaaaatagtgatcaatcacttggaagaaaagcccttggaaaatatcaaagtagtgtgcgaatacccagacgtatttctggaggaattaccagtgctatttgtgaacaagaaggatggttcgaggagaatgtgcgttcattatagaagtttgaatgaagtaaccatcaagaataaatacccactacctcggattgaagatttattcgatcagatgaagggagctaagatattctcgaagatagatctgagatcgggatatcatcagttaaagattcgggcagaagatgtacccaagacagccttcacgacaagatatggattatatgagtttttggtcatgtcgtttggactgactaatgcaccagcatactttatgaacttgatgaataaagtattcatggaatatctggatcagtttgtggtcgtattcattgatgacatactgatatattctccgaatgaagaaacacacgaagatcatctaaggctagtcctacaaaaacttcgtaacaaccagctatatgcgaagttctcgaagtgtgaattttggcttaaggaagttgctttcttagggcatatcgttaccgatggtggaattaaagtggagccaggaaagataagtgagatactggattggaagcaaccaaaggatgcgtccaagatcagaagttttcttggattggctggatactatagaagatttattgaaggtttttccaagttagtgaaaccacttacctctctactggagaaag

SEQ ID NO: 4938 - DNA, 2232 bp, Zea mays
  Clone ID: TF_ZM5037.C4.o1.fg
atgtcgggagatcacgccaagaaggagatggagaccggcgaaaagcccactacaagctacgggagcacttcatcggaagagtcccgcaccaaaaggagggagaagaagaagagctcctccaacaaagggaaggagaagaaatcttcttctcaccacaaagagaagaaggaaaaatcttcttcccacaagccgcatcggaaaggcgacaagcacaagaggatgaggaaggtggtctactacgagaccgacacttcatcaacatcgacctccgactccgatgcgccctccgtcacttctaagcgccaagagcgcaagaagtatagtaagatccctctacgctaccctcgcatttccaaacatacacctttactttccgtcccactaggcaaaccaccaacttttgatggtgaagattacgctaggtggagcgatttaatgcgatttcatctaatctcgctccacaaaagcatatgggatgttgttgagtttggtgcgcaggtaccatccgtaggggatgaaaactatgatgaggatgaggtggcccaaatcgagcacttcaactctcaagccacaaccatactccttgcctctctaagcaaggaagaatacaacaaagtgcaagggttgaaaaatgcaaaggagatttgggatgtgctcaaaactgcgcacgagggagatgagctcaccaagatcaccaagcgggaaacgatcgagggggagctcggtcggttccggcttcaaaaaggggaggagccacaacacatgtacaaccggctcaaaactttggtgaaccaagtgcgcaacctcgggagcaagaagtgggatgaccacaaagtggtaaatgttattttaagatctctcatttttcttaatcccactcaagttcaattgattcgtggtaatcctagatatactaaaatgacccccgaggaagttatcgggcattttgtaagttttgagtgcatgatagaaggctcgaggaaaatcaacgagcttggcgacccatctgaagcccaacccgttgcattcaaggcaacggaggagaagaaggaggagtctacaccaagtagacaaccaatagacgcctccaagctcgacaatgaggaaatggcgctcgtcatcaagagcttccgccaaatcctcaagcaaaggagggggaaggactacaagtcccgctccaagaaggtttgctacaagtgtggtaagcccggtcattttattgctaaatgtcctatatctagtgacagtgaccgaggcgacgacaagaaggggagaagaaaggagaagaaaaggtactacaagaagaagggcggcgatgcccatgtttgtcgggaatgggattccgatgaaagctcaagcgactcctccgacgacgaggacgccgccaacatcgccgtcaccaagggactcctcttccccaacgtcggccacaagtgcctcatggcaaaggacggcaaaaagaagaaggttaaatccaactcctccactaaatatgaatcttctagtgatgataatgctagtgatgaggaggataatttgcgttccctttttgccaaccttaacatagctcaaaaagaaaagttaaatgaattagttagtgctattcatgaaaaggatgaccttttggactcccaagaggattgtctaattaaagaaaacaagaaacatgttaaggttaaaaaggcttatgctctagaagtagaaaaatgtgaaaaattgtctagtgagctaagcacttgccgtgagatgattaacaaccttagaaatgaaaatgctattttaaatgctaaggttgattcacatgtttgtaatgtttcaattcccaatcttagagatgataacattgacttgcttgctaagattgatgaattgaatgcatcccttgctagccttagattagagaatgaaaatttaattgctaaggctaaagattttaatgtttgcaatgctactatttccgaccttagaactaagaatgaaatgctgcatgctaaggttgtagaacttaaatcttgcaaaccctctacatctaatcttgagcatatttctatttgcactagatgtagagatattgatgttgatgctatccatgatcacttagccttaattaaaaaacaaaatgatcacatagcacaacttaatgctaagattagtgagcatgacttagtaaatgaaaaatttaaatttgctagaagtgaaagggaattaggcttacacctggttcctaaataa

SEQ ID NO: 4939 - DNA, 4920 bp, Zea mays
  Clone ID: TF_ZM5055.C5.o1.fg
atgtcgggagaacatgccaagaaggagatggagaccggcgacaagcccgctacaagccacgggaaagcttcatcggaagagtcccgcaaaaagggaaaggggaaggagaagaaagcctcttcccacaagttgcatcggagtggggacaagaaaaagaagatgaggaaggtggtctactacgagaccgacacctcatcgccatctacctccgactccgacgcgccctccataacttctaagcgccatgagcgcaagaagtttagtaagatccccttacattaccctcgcacttctagacatactccattactttccgttccattaggcaaaccgccaacctttgacggtgaagattatgctaggtggagtgatttaatgaaatttcatctaacctcactccacaaaagtatatggaatgttgttgagtttggagcacaggtaccatctgtaggggatgtggattatgatgaggacgaggtggcccaaatcgagcacttcaactcccaagccacaaccatactcctcgcctttctaagtagggaggagtacaacaaggtgcaaggattaaaaagcgccaaggaagtttgggacgtgctcaagaccgcacacgagggtgatgaactcaccaagatcaccaagcgggaaacgatcgagggggagctcggtcgcttccgtcttcgccaaggggaggagccacaagatatgtacaaccagctcaaaaccttggtgaaccaagtgcgcaacctcgggagcaagaaatgggatgaccacgaggtggttaaggttattctaagatcacttattttccttaaccctactcaagtacaattaattcgtggcaacccaagatatacactaatgacccccgaggaagtaatcgggaattttgtgagctttgaattcatgatcaagggctcacggaagatcaacgagcttgacggtccttctacgtccgaagctcaaccggtcgcattcaaagcgacagaagagaagaaggaggagtctacaccgagtagaacacccatcgacgcctccaagctcgacaacgaggaaatggcgctcgtcatcaagagcttccgccaaatcctcaagcaaaggagggggaaagattacaagccccgctccaagaaggtttgctacaaatgtggtaagcccggtcattttattgcaaaatgtcctatatccagtgatagtgacaggggtgacgacaagaaggggagaagaaaggagaagaggtactacaagaagaagggcggcgatgcccatgtttgtcgcgagtgggactccgacgaaagctctagcgactcctccgacgacgaggacgccaccaacatcgccgtcaccaagggacttctcttccccaacgtcggccacaagtgcctcatggcaaaggacggcaaaaagaagaaggttaaatctaaatcctccactagatatgagtcctctagtgatgataatgctagtgatgaggaagacaatttacgtactctttttgccaacttaaacatgcaacaaaaagagaaattaaatgaattaattagtgccatccatgagaaggatgatctcttggactcccaagaggacttcctaatcaaggaaaacaaaaagcatgttaaagttaaaaatgcttacgctctagaagttgaaaaatatgaaaaaatatctagtgagctaagcacttgccatgagactatagacaaccttagaaatgagaattctaatttgttagctaaggttgattctattgcttgtaatgtttcaattcccaatcttagaaatgataatgatgatttgcttgctaagattgaagaattaaacatgtctcttgctagccttaggattgaaaatgaaaaattgcttgctaaggctaaagaattagatgtttgcaatgctaccatttccgaccttagaagtagaaatgatatattacatgctaaggttgtagaattaaaatcttgcaaaccctctacatctaccgttgaacacactactatttgcactagatgtagagatgttgatattgatgctattcatgatcacatggttttaattaaacaacaaaatgatcatatagcaaaattagatgctaaaattgccgagcatgaacttgaaaatgaaaaatttaaatttgctcgtagtatgctctatagtgggagacgccctggcattaaggatggcattggcttccaaaagggggacaatgtcaaacttaatgctcctcctaagaaattgtctaattttgttaagggcaaggctcccatgtctcaggataacgagggttacattttgtaccctgccggttatcctgagagcaaaattaggagaattcactctaggaagtctcactctggccctaatcatgcttttatgtataagggtaagacatctagttctaggcaaccaacccgtgctaagttgcctaagaagaaaactcctagtgcatcaaatgatcatgacatttcatttaaaacttttgatgcatcatatgtattaactaacaaatccggcaaggtttatgcatccgggggctcaagttggataatcgacagcgggtgcacaaaccatatgacaggggagaagaagatgttctcctcctacgagaaaaaccaagatccccaaagagcgatcacattcgaggatggaaatcaaggtgtcactgtctttagaagaagtgatgattcaatagcatttaaaggtgtgttagagggtcagctatacttggtagattttgatagagctgaactcgacacatgcttaattgcaaagactaacatgggttggctctggcaccgccgactagcccatattgggatgaagaatcttcataagcttctaaagggagagcacattttaggattaacaaatgttcattttgagaaagacaggatttctagcgcatgccaagcagggaagcaagttggtgctcaccatccacataagaacatcatgacgactgacaggccactggagctcctacacatggatctattcggcccgatcgcttacataagcatcggcggaagtaagtactgtctagttattgtggatgattattcttgcttcacttgggtattctttttgcaggaaaaatctcacacccaagagaccttaaagggattcttgagacgggctcaaaatgagttcggcttaaggatcaagaaaattagaagcgacaacgggacggagttcaagaactctcaaattgaaggcttccttgaggaggagggcatcaagcatgagttctcctctccctacacgccacaacaaaatggtgtagtggaaaggaagaatagaactctattggacatggcaagaaccatgcttgatgagtacaagacttcggatcggttttgggccgaggcggtcaacaccgcctgctacgccatcaactggttatatctacaccgaatcctcaagaagacatcatacaaactccttatcggtaaaaagcccaatatttcatattttagagtctttggtagcaaatgctttatacttgttaaaagaggtagaaaatctaaatttgctcctaagactgtagaaggctttttactaggatatgattcaaacacaagggcatatagagtctttaacaagtccactggacaagttgaagtttcttgtgacgttgtgtttgatgagactaacggctctcaagtagagcaagttgatcttgatgagataggtgatgaagaggctccgtacatcgcgctaaggaacatgtccattagggatgtgtgtcctaaagaatccgaagagcctccaaatgcacaagatcaaccatcctcctccacgcaagcatctccaccaactcaaaatgaggatgaggctcaagttgatgaagggcaagatcaagaagatgagccacctcaagatgacggcaatgatcaagggggagatgcaaacgatcaggacaaggaggatgaagaacaaagacctccacacccaagagtccaccaagcaatccaacgagatcaccccgtcgacaccatccttggcgacattcataagggggtaaccactagatctcgaaccaaatgggtcttccgcaacaagcaagatgagcatggtgtggtgataaggaacaaagcccgacttgtggccacaggatactcccaagtcaaaggtttggatttcggtgaaacctatgcacccgtagctaggcttgagtcaattcgtatactattggcctatgctacttaccatggcttcaagctctatcaaatggacgtgaaaagcgccttcatcaatggaccaatcaaggaagaggtctatgttgagcaacctcccgactttgaagatagtgagtaccctaaccatgtttataaactctctaaggcgctttatgggctcaagcaagccccaagagcatggtatgaatgccttagagatttccttatcactaatggattcaaagtcggaaaggccgatcctacactctttaccaaaacacttgaaaatgatttgtttgtatgccaaatttatgttgatgatattatatttgggtctactaacgaatctacatgtgaagagtttagtaggatcatgacacaaaaattcgagatgtcaatgatgggggagttgaagtatttcttaggatttcaagtgaagcaactccaagagggcaccttcctaagccaaacgaagtatactcaagatattctaagcaagtttgggatgaaggatgctaaacccatcaagacacccatgggaaccaatgggcatctcgacctcgacgaaggaggtaaatctgtcgatcaaaagaaagagcacatcggggacttgccagttcttgggaagatccttggtgtcttgggcttcaaagaagcaaaattccgtagctctttctaccgccgaagccgagtacattgccgcaggccattgttgcgcgcaactactttggatgaggcaaacccttag

SEQ ID NO: 4940 - DNA, 1779 bp, Zea mays
  Clone ID: TF_ZM5105.C5.o1.fg
atgtcgggagatcactccaagaaggagatggtgaccggcgagaagcccgccacaagccatgggaaagctccatcgggggagtctggtaacaagatgaagggattcccttcacacaacaagtcgcattggagcggtgagaagaaaaagaagatgaagaaagtggtctactatgagaccgactctttgtcgccatccacctccggctccgacgcaccgtccgtcacttctaagcaccatgagcgcaagaagtttagggatgaatataatgatgcggacgaagtcgcccaaatccggcacttcaattcccaagcaactactatactcctcacctctctaagtcgagaggagtataataaggtgcaagggttgaagagtgctaaagagatttgggacgtactaaagaccacgcacgaaggagacgaggtgaccaagatcaccaagagggaaacgatcaaaggggagctcggtcggttcatgctcaaccaaggagaggagccacaagctatgtacaaccggctcaagatcttggtcaaccaagtgcgcaacctcgggagcacaaaatgggatgaccttgaaatggtcaaggaggttataggaaagtttgtgagctttgaattgatgatcaaaggctccaaacaaatcatcgagcaaggcaccacctccacacccgaggtgcaacccgttgccttcaaagcaacggaggagaagaaagaagagtctacatcaagtaggctccccatcgacgcctccaagctcgacaacgaggaaatgacactcatcatcaagagctttcgccaaatcctcaagcaaaggaaggggaaagactacaaaccccgttccaagaaggtttgctacaagtgtggtaagcccggtcactttatagcaaaatgtcctatttctagtgacagtgataggggcgacgacaagaagggaaagaggagggaaaagaagagatactacaagaagaagggcggcgatgcccatgtatgccgggagtgtgactccaatgagagatccaccgactcctcctccgacgaggacgccgcaaacctcgccatcaacaagggtctcctcttccccaatgtcggccataagtgcctcatggcaaaggacggcaaaaagaagaaggtaaaatctagagcttctactaaatatgcaacatctagtgatgaggctagctctagtgatgatgaggatgatttgctcacactttttgccaaccttaacatgcaagaaaaggagaaattgaatgaatggattagtgatattcatgagaaggatgaactcttggatagccaagaggacttcgttattaaagaaaacaagaagcatgttaaagtaaaaaatgcctatgttcaagaagtagaaaaatgtgaaaaattaactagtgagcttagcatttgccatgacactatttccaaccttagaaatgagaatgctaaattaattgctaaggttgcgaagttaaatgtttgtgatgattctcttgtcaacctcaaaaatgataatgctagtttgatttctaaaattgacaagttgaataaatcactttctagccttaagattgagaatgataatttaattgttaaggctaaggatttaaatgtttgcaatgattctattaccaatcttagaaatgagaatgccatgctacatgctaagattgatgaattaaatgcttgcaaaccctctacatctaatgttagccatgtttccatttgtactagatgtagagacattaatgttgatgctattgtcacacccggttttggaaggtaa

SEQ ID NO: 4941 - DNA, 4935 bp, Zea mays
  Clone ID: TF_ZM5107.C2.o4.fg
atgtcgggagatcacgccaagaaggagatggaaaccggcgaaaagcccactacaagtcacgggagcacttcatcggaagagtcccgcaccaaaaggagggagaagaagaagagctcctccaacaaagggaaggagaagaaatcttcttcccacaagccgcatcggagtgaggacaagccaaagaggatgaggaaagtggtctactacgagaccgacacttcatcaacatcgacctccggctccgatgcgccctccgtaacttctaaacgccaagggcgtaagaagtttagtaagattcccctacactactctcgcatttctaaacatgcacctctactttccgtcccattaggcaaaccaccaacttttgatggtgaagattatgctaggtggagtgatttaatgcgttttcatctaacctcactccacaaaagtatatgggatgttgttgagtttggtgcacaggtaccatccataggggataaggattatgatgaggatgaggtggcccaaatcaagcacttcaactctcaagcgacaacaatactcctcgcctctctaagtagagaggagtataacaaagtacaagggttgaagagtgccaaggaggtttgggatgtgctcaaaaccgcgcacgagggagacgagctcaccaagatcaccaagcgggaaacgatcgagggggagctcggtcggttccggcttcgtaaaggggaggagccacaacacatgtacaaccggctcaagaccttggtgaaccaagtgcgcaacctcgggagcgtaaagtgggatgaccatgaggtggttaaggttattctaagatctcttattttccttaaccctactcaagtacaattaattcgtggtaatccaagatatactaaaatgacccccgaggaagttatcgggcattttgtaagttttgagtgcatgatcgaaggctcgaggaagatcaacgagcttgatgatccatctacatccgaagctcaacccgtcgcattcaaggcgacggaagaaaagaaggaggagtctaccccaagtcgacaaccaatagacgcctccaagcttgacaatgaggaaatgacgctcgtcatcaaaagcttccgccaaatcctcaagcaaaggagagggaaagattacaagtcccgctccaagaaggtttgctacaagtgtggtaagcccggtcattttattgcaaaatgtcctatatctagtgacagtgaccgaggcgacgacaagaaggggagaagaaaggagaagaagagatactacaagaagaagggcggcgatgcccatatttgtcgcgagtgggactccgaagaaagctctagcgactcctccgacgacgaggacgccaccaacatcgccgtcaccaaagggcttctcttccccaacgtcggccacaagtgcctcatggcaaaggacggcaaaaggaagaaggtaaaatcaagatcctccactaaatatgaaacctctagtgatgaaaatgctagtgaggaggaggataacttgcgtaccctttttgccaatcttaacatggaacaaaaagaaaaattaaatgaattaactagtgctattcatgaaaaggatgaccttttggattcccaagaggactgtctaattaaagaaaacaagaaacatgttaaggttaaaaatgcttacgctctagaagtagaaaaatgtcaaaaactatctagtgagctaagcacttgccatgagatgattgacaaccttaaacatgaaaatgctagtttaaatgctaaggttgattcacatgtttgtaatgtttcaattcccaatcctagagataataatgatgatttgtttgctaggattgaagaattgaacatttctcttactagccttagagtagaaaatgaaaacttaattgctaaggctaaagaactagatgtttgcaatgctaccatttccaatcttagagataaaaatgatattctacatgctaagattgttgaacttaattcttgcaaaacgtctacatctactgttgagcatgtatctatttgtactagatgtagagatgttaacattgatgctattcatgatcatatggctttaattaaacaacaaaatgatcatatagcaaaattagatgctaaaattgccgagcataacttagaaaatgaaaaatttaaatttgctagaagtatgctctataatgggagacgccctggcatcaaggatggcattggcttccaaaaaggagacaatgtcaaacttaatgcccctcctaagaaactgtctaactttgttaagggcaaggctcccatgcctcaggataacgagggttacattttgtaccctgccggttatcctgagagcaaaattaggaaaattcattctaggaagtctcactctggccccaatcatgcttttatgtataagggtgagacatctagttctaggcaaccaacccgtgctaaggtgcctaagaaaattcctattgcatcaaatgatcatgacatttcatttaaaacttttgatgcatcatatgttttaactaacaaatccggcaagatagttgccaagtatgttgggggcaagcacaagggctccaagacttgtgtttgggtacccaaagttcttgtgtctaatgccaaaggacccaaaaccatttggggttatgcatccgggggctcaagttggatcatcgacagcgggtgcacaaatcacatgacaggggagaagaaaatgttctcctcctatgagaaaaaccaagatccccaacgagctatcacattcggggatggaaatcaaggtgtcactgtctttagaagaagtgatgattcaatagcatttaagggtgtgttagagggtcagctatacttagtagattttgatagagctgaactcgacacatgcttaattgctaagactaacatgggttggctctggcaccgccgactagcccatgttgggatgaagaatcttcacaagcttctaaagggagaacacgttttaggactaacaaatgttcattttgagaaagacaggatatgtagcgcatgccaggcaggaaagcaagttggcacccatcatccacacaagaacatcatgacgaccaataggccgcttgagctactccacatggatctattcggcccgattgcttacataagcatcggcgggagtaagtattgtcttgtaatagtggatgattattctcgcttcacttgggtattctttttgcaggaaaaatctcaaacccaagagaccttaaagggattcttgagacgggctcaaaatgagttcggcttaaggatcaagaaaattagaagcgacaacgggacggagttcaagaactctcaaatcgaaggttttcttgaggaagagggcatcaagcatgagttctcttctccctacacgccacaacaaaatggtgtggtggagaggaagaatcgaactctactggacatggcaagaaccatgcttgatgagtacaagacttcggatcggttttgggccgaggcggtcaacaccgcttgctacgccatcaaccggttatatctacaccgaatcctcaagaagacatcatatgaactcctaaccgagcaagttgatcttgatgagataggtgaagaagaggctccgtgcatcgcgctaaggaacatgtccattggggatgtgtgtcctaaggaatccgaagagcctccaaatgcacaagatcaaccttcctcctccacgcaagcatctccaccgactcaaaatgaggatgaagctcaagttgatgaagtagaagatcaagcaaatgagccacctcaagatgatggcattgatcaaggggaagatgcaaatgaggaagacaaggaggaagaggaacaaaggccgccacacccaagagtccaccaagcaatccaacgagatcaccccgtcgacaccatcctcggcgacattcataagggggtaactactagatctcgtgttgcacatttttgtgaacattactcgtttgtttcctataatgagccacacaaggtagaggaagcacttcaagattcggattgggtggtggcgatgcaagaggagctcaacaacttcactaggaatgaggtgtggcatttagttccacgtcctaaccaaaatgttgtaggaaccaaatgggtcttccgcaataagcaagatgagcatggtgtggtgacaaggaacaaagctcgacttgtggccaagggatactcccaagtcgaaggtttggatttcggtgaaacctatgcacccgtagctaggcttgagtcaattcgtatattattagcctatgctacttaccatggctttaagctttatcaaatggacgtgaaaagtgccttcctcaatggaccaatcaaggaagaggtctatgttgagcaacctcccggctttgaagacagtgagtatcctaatcatgtctataagctctctaaggcgctttacgggctcaagcaagccccaagagcatggtatgaatgccttagagatttccttattgctaatggcttcaaagtcggaaaggccgatcctacactctttactaaaactcttgaaaatgacttgtttgtttgccaaatttatgttgatgatattatatttgggtctactaacgagtctacatgtgaagagtttagtaggatcatgacacagaaatttgagatgtctatgatgggggagttgaagtatttcttaggatttcaagtgaagcaactccaagagggcaccttcattagccaaacgaagtacactcaagatattcttagcaagtttggaatgaaggatgccaaacccatcaagacacccatgggaactaatgggcatctcgacctcgacacgggaggtaagtccgtggatcaaaagtctatttcaaaccaagtcataggtatattgaaagggaatttgagtcttcggcaaagacaaaggcttccactccgtaactcatccttctga

SEQ ID NO: 4942 - DNA, 3367 bp, Zea mays
  Clone ID: TF_ZM5109.C6.o2.fg
atgtcgggagatcacgccaagaaggagatggagaccggcgacaagcccactacaagccacgggaaggcttcatcggaagagtcccgaaacaaggggaaggggaaggagaagaaatgctcttcccacaagtcacatcggagtggcgacaagaaaaagaagatgaggaaggtggtcaagtacgagaccgatacttcatcaccttccacctccggctccgacgcgccatccgtcagttctaagcgtcatgggcgcaagaagtttagtaagatccccttacgctatcctcgcattcctaaacatacacctttactttccgtcctattaggcaaaccaccaacgtttgatggtgaagattatgctaggtggagtgatttgatgcgatttcatctaacctcactccacaaaagtatatgggatgttgttgagtttggtgtacaggtaccatccgtaggggatgaagattatgatgaggacgaagtggcccaaatccaacacttcaactcccaagcctcaactatactcctcgcctctctaagtcgagaggagtataataaggtgcaagggttgaaaggtgccaaggagatttgggacacgctaaagaccgcacacgaaggagacgaggtgaccaaaatcaccaagcgggaaacgatcgagggggagctcggtcgcttccgacttcgccaaggggaggagccacaagacatgtacaaccggctaaaaaccttagtgaaccaagtgcgcaacctcgggagtaagaaatgggatgaccacgaaatggttaaggttattcttagatcacttgtttttcttaaccctactcaagttcaattaatttgtggcaatcctagatatacactaatgacccccgaggaagtaatcgggaattttcacaaccggtcgcattcaaaggcgacggaagagaagaaggcggaatctactccaagtcgaacacccatcgatgcctccaagctcgacaacgaggagatggtgctcatcatcaagagcttccgtcaaatcctcaatcaaaggagggggaaggattataagccccgctccaagaaagtttgctacaaatgtggtaagcctggtcattttattgcaaaatgtcctatttctagtgacagtgacaggggcgacgacaagaaggggagaagaaaggagaagaagaagtactacaagaagaagggcggcgatgcccatgtttgccgggaatgggactccaacgagagctccaccgactcctccgacgaggacgccgcaaacatcgccgtcaccaagggacttctcttccccaacgtcggccacaagtgcctcatggcaaaggacggcaaaaggaagaaggatgatctcttggacacccaagaggacttccttattaaagaaaacaaaaagcgtgttaaggttaaaaatgcttatgctctagaagtagaaaaatgtgaaaactatctagctaaagaactagatgtttgcaatgttacaatttccgatcttagagataaaaatgatatattgcgtgctaagattgttgaacttaattcttgcaaaccttctacatctaccactgagcatgtcactatttgcactagatgtagagatgttgatgttaatgcaatacatgatcacctttccatgattaaacaacaaaatgatcatatagctaaattagatgctaaaattgccgagcatgaactagaaaatgaaaaatttaagtttgctcgtagtgtcactgtctttagaagaagtgatgattcaatagcatttaaaggagtgttagagggtcagctatacttggtagattttgatagagttgaactcgacacttgcttaattgctaagactaacatgggttggctatggcaccgccgactagcccatgttggaatgaagaatcttcataagcttctaaagggagagcacattttaggattaacaaatgttcattttgagaaagacaggatttgtagcgcatgccaagcaggaaagcaagttggtgctcatcatccacacaagaacatcatgacgactgacaggccgctggagctcctacacatggacctattcggcccgatagcttacataagcatcggcgggagtaagtattgtctagttattgtggatgactattctcgcttcacttgggtattctttatgcaggaaaaatctcatacccaagatactttaaaggaattcttgagacgagctcaaaacgagttcggcttaaggataaagaaaattagaagcgacaacaggacggagttcaagaactctcaaattgaaggcttccttgaggaggagggcatcaagcatgagttctcttctccctacacgccacaacaaaatggtgtagtggagaggaagaatagaactctattggacatggcaagaaccatgcttgatgagtacaagacttcggatcggttttgggccgaggcggtcaacaccgcctgctatgccatcaaccggttgtatctacaccgaatcctcaagaagacatcatatgagctcctaaccggtaaaaagcccaatatttcatattttagagtctttggtagcaaatgctttatacttgttaaaagaggtagaaaatctaaatttgctcctaagactgtagaaggctttttactaggatatgattcaaacataaggtcatatagagtctttaacaagtcctctggacaagttgaagtttcttgtgacgttgtgtttgatgagactaacggctctcaagtagagcaagttgatcttgatgagataggtgatgaagaggctctgtgcatcgcgctaaggaatatgtcctttggggatgtgtgtcctaaggaatccgaagagcctccaaatgcacaagatcaaccatcctcctccacgcaagcatctccaccaactcaaaatgaggatgaggctcaagttgatgaaggagaagttcaagaaaatgagccacctcaagatgacggcaatgatcaagggggagaggcaaatgatcaagacaaggaggatgaagaaccaagacctccacacccaagagtccaccaagcaatccaacaagatcaccccatcgaaaccatccttggagacattcataagggggtaaccactagatcttgggttgcacatttttgtgagcattactcttttgtttcctctattgagccacatagggtagaggaagcactacaagattcggattggatggtggcgatgcaagaggagctcaacaacttcactaggaacgaggtatggcatttggttccacgtcctaatcaaaattttgtaggaaccaagtgggttttccgcaacaagcaagacgagcatggtgtggtgacaaggaacaaatcccgacttgtggccaagggatattcacaagtcgaag

SEQ ID NO: 4943 - DNA, 1784 bp, Zea mays
  Clone ID: TF_ZmC11815_3
atggggatgatccgcaagattaatctaatgggtgtgcccttgcaggtcgaagatattctctttaacattgataggaaaaagcaaagaaagagaggatgcctcgcatgtggggagaagggccactttagggacagctgtccaactatggccaaacccaaaaaggagaggagcagaggcaaggcgctaacaagtgttagaacttgggatgattcttcaagtgaagatgaacctccaaggacgcgcagccactggtcctcatcacgctcatcacgatcatcacacaaatgccttatggcaagaggtaacaaaagcattccatcctctagtgatgaaaatagtagtgatgatgaaggtttgctagaaaattttgaaacttttgcaaacttaaatagtgagttgtcaactaaaattgagctattagagtctagtgttccatccaatactgctgatgatgaccttattaaaaagaatgaaaaacttaaggctaagttagctagctcccaaaatactattgaaaatttgctagagaaaatggaaattcttagcatacataatgatgagctaactactaagctagaaaacattggtagcaccccaggagcatctttagttaaaattctcgaaattattaaaaaggatgcttctacttcttgctttgatttaatggatgatactaacccctgcaaccaagttcttgttgagaatattgttatagaaacatgttcggatgaggttgcaaaggaaaatgagcaattaaggcaagaagtggctcgtcttggcaaggctttgtatgacaagaaaggcaaagccaaacaaatccaacttccacagtataacactactgcgggagtgaacaagcctatggagggagaaactgtgatttgtaggttatgtcacaaggaaggccacaagtctttccaatgcaagacgatgaccggggataagccaaggcaaaagctcaagcaaaagccatcaagcaaaatctccaacacctacatcaaaaaggtggacaaaaagactgctacaccatatttgatcaagaagaaaaagaatggaaaggtgatagcaatcaaggccaacaagcaagccaacaaaggaaagggggccaaacgcatctgggtgccaaaggaaataatttcaaccatgaaaagcaccaagaaggtttggatcccgaaagggaattcacaggatgcaagaattacttggactaagggattgaggaaagcaacacctcaaaagaagacattaagaacatcaagaaagcaccggactgtccggcggcacaccggactgtccggtgtccacacgccggactgtctgatgcaccagggaacagcagcccaacagctagttccaggtggcacccagagagaagaccaccggactgtccggtgtgaggaccggactgtccggtgtggaaagcctgcggcgccaacggtcacctgctctgacaaggcaacggctaggcgcaccggataggctacagtgcgctgtccggtgcaccaccggactgttcggtgtgccgcaaagaactgcagcttttctctaacggctagaattgagttggggcctatatatatttcacccaaccggccatttgaaggtgtgggagcccaagcaacatactgaaagtcgcctaaaggggggtgaatagggcaaaactgaaatttacaaagttaatcccaactacaagctaggttagcgttagaaatagaaatgagttcgaagagagggtgcaaaacaaatcgcaagcgaataaagagtatgacacgcggatttgtttt

SEQ ID NO: 4944 - DNA, 1794 bp, Zea mays
  Clone ID: TF_ZmC4916_353
atggatcctaagggaaaggggatggtggtcgacaacaacgagaaggagtctatcttcaacgagccgaagaatgacaagtctaccgacttgggctcaagccacaagcgcaaagatgggaagaagaagaagacaaggcgcatcaaggagatcgtctactacgacagcgacgaatcttcttcttcccaaaaggacgacgacgacgactacaggaagacggtcaattcgaacttttcatttgattattctcgtattccacatagttcgaattcgcatttgctttccattcctcttggcaaacctccacactttgatggggaggactacagattttggagtcacaaaatgcgtagtcatttattctctctccatccaagcatatgggagattgtagagaatggaatgaaatttgatagctcggatagccctatgtttattaatgaacagattcataaaaatgcacaagctactactgtgttgctagcctctttgtgcagggacgagtacaataaggtgagcggcttggacaatgccaagcagatatgggacaccctcaagatttctcacgaggggaacgacatcaccatgctcactaaaatggagttggtggagggcgagcttggaaggtttgcgatgataaggggcgaggagccaacccaaacatacaaccggctcaagacccttatcaacaaaataaggagctatggaagcacgcgatggacggaccatgacgtcgtccgactattactaaggtcctttaccattcttgatcctcatttggtgaataatattcgtgagaatcccaggtacaccaagatgtcgcccgaagaagtcctaggaaaattcgtcagcgggcgaatgatgattaaggaagcaaggtacgtggacgacgccttgaatggaccgatcaacgagccgcaacctcttgctctcaaagcaacaagaagcaaggaggcgctacctagcaaggtggcacaaattgaggcggccggacttaatgatgaagagatggctctcatcatcaaacgcttcaaaacggtgctaaagggtcacaaggggcagccaagcaagaccaagacaaaggggaagcgctcatgcttcaaatgcggtaagattggtcattttattgctaactgtaccgataatgaaagtgaccaggaacacgggagcaaaagggaaaagaagaaaaattacaagaaggccaagggcgaggcacatctaggaaaggagtgggactcggattgctcctcttccgactccgacaatgagggactcgccgccaccgccttcaacaaatcagccctcttccccaacgagcgtcacacatgccttatggcaagggagaagaaggtatgtactcggaactctacctatgcttcttcaagtgaggacgaatctagtgatgaggatgaagtagattactcatgtttgtttaagggcctagatagaaccaaggtagacaaaattaatgagttgattgatgccttgaatgataagaatatgcttttagaaaagcaagaggatttgttgtatgaagaacatgataaatttgtagaagctcaacgatctcatgctctagaagttaaaagaaatgaaatgctttcttgtgaattatcttcttgccatgagacaatttctaaattaaggagcattaatgatgatttgaatgctaagttagagattgctagtaaatctacctcttgtgtagaaaatgttgtaacgtgcactaggtgtaaagatattaaccttgatgcttatagtgaacacctagcttgcatttctaaattaaatgaagag

SEQ ID NO: 4945 - DNA, 2550 bp, Zea mays
  Clone ID: TF_ZmC4916_433
atggagttggtggaaggcgagctaggaagatttgctgtgatcaggggagaggagccaactcagacctacaacaggctcaagaccctcatcaacaagattagaagctatggaagcacaagatggacggaccacgacgttgtccgactcatgctaaggtcattcacgataattgacccccatcttgtcaatcttattcgtgaaaatcccaggtacaccaagatgacacccgaggagattcttggaaaattcgtgagcaggcgcatgatggtgaaagaagcacgatatgtagacgatgcgcttaatggtccactacccgtctacgagccacaacccgttgctctcaaagcaacaagcagcaaggaggcgctacaaagcaaggtggcacaagttgaggctgccgggctaaacgaagatgagatggccctaatcatcaagcgcttcaagaccgcactgaaaggacgcaaggagtaccctagcaagaacaaagcaaagggaaagcgctcctgttttaaatgcggtaagactggtcatttcatagatcaatgccccgataatgataatgaccaggaacaagaaaagtatgggaagaaaaagaagaagaagaattacaagaaggcgaagggtgaggcacatcttggaaaggaatggaacttcaactgctcttcatccgactctgatgatgaaggattggctgcctcagccttcgacaaatcttcgctcttccccaacgaacaccatatgtgccttatggctaaggaaaagaagggatgccaacactatggtagacactcctctattaaggatggacttggttttcgaaaggaaaccaagaacttaacaagccaaaaggctcccgttctcaacaaggagaaagggaaggctcctatggctagtagttctcaaaagtgtcatgcctacatttatgatagaaaattttctaggaatgctcataggagtaatgatcatgatgcttttaattcacatgctatgtttgcctctagctctacttttgttcatgatagaagtaggcctaggagaaatcatgttgtgcatcatgtgcctaggaaagtttatgcatccgggggctcaagctggattatcgacagcggatgcacaaaccacatgacaggggagaagaagatgttcacctcctacgtcaagaacaaggattcccaggattcgatcatctttggagatgggaaccaaggcaaggtcaaaggattggggaagatagccattacatccgagcattctacctccaatgtgttcttagttgaatcgctcgggtacaacttattgtatgataaatcagaaacccaagggaccctaaagcgctttctaaggagggctcaaaacgaatttgagctaaaggtgaaaaagataaggagcgacaacgggtccgagttcaagaacctacaagttgaagagtatcttgaggaggaaggcatcaagcacgagttctccgctccctacacaccacaacaaaatggtgtggtagagaagaagaacaggacgcttatcgacatggcaaggacgatgctaggagagttcaagacgcccaagcggttttggtcggaagctatgaacacatcttgccacgccattaaccggctctatatgcatcgcctcctcaagaagacctcatacgaacttctgaccagtaagaaacccaacgttttttactttcgtgtatttgggagcaaatgttacattctggtgaagaaagaacaagttgatcttgatgacatagatgaagatgatgttccaacagccgcaatgcgcacgatggcgataggagaggtccctcgagaagaggcgcgtgatcaagggggagcacaagaagaacaagttatggaggaagaagcaccactggcccctccaactcaagtccgagcgacgatccaaagaaatcaccccgtcgatcagattctgggtgacataagcaagggagtaacaactcgctcacgtttagctaatttttgtgagcattactcgtttgtctcttctattgagcctttcagggtagaagaggccctgcaggatctggactgggtgttggctatgcaggaagaactcaacaactttaagaggaacgaagtttggagcctggtgccacgtccaaagctaaatgttgtgggaaccaagtgggtgttcggcaacaagcaagacgagcatggagtggtgacaagaaacaaggctcgacttgtggaaaaaggttatgcccaagtcgcgggtttggatttcgaggagacttttgctcctgtggctaggctagagtctattcgaatattattagcatatgccgctcaccactctttcaggttgtttcaaatggatgtgaagagcgctttcctcaatgggtcaatcaaggaggaggtatacgtggatcaaccccctggctttgaggatgacaggtaccccgaccatgtgtttaagctctcaaaggcgctctatggacttaagcaagccccaagagcatggtatgaatgccttagagatttcttaattgctaatgctttcaaggttgggaaagccgatcccactctttga

SEQ ID NO: 4946 - DNA, 4659 bp, Zea mays
  Clone ID: TF_ZM3616.C2.o3.fg
atgtcgcgagaacacgccaagaaggagatggagaccggcaacaagcccgctacaagccacgggaaagcttcatcggaagagtcccgcaacaaagggaaggggaaggagaagaaaccctcttcccacaagtcgcatcggagtggggacaagaaaaagaagatgaggaaggtggtctactacgagaccgacacctcatcgccatctacctccggctccgacgcgccctccgtaacttctaagcgccatgagcgcaagaagtttagtaagatccccttacactatcctcgtacttctagacatactccattactttctgttccattaggcaaaccgccaacctttgacggtgaagattatgctaggtggagtgatttaatgaaatatcacctaacctcactcaacaaaagtatatggaatgttgttgagtttggagcacaggtaccttccgtaggggatgaggattatgatgaggacgaagttgcccaaatcgagcacttcaactcccaagccacaaccatactcctcgcctctctaagtagggaggagtacaacaaggtgcaaggattaaagagcgccaaggaagtttgggacgtgctcaagaccgcgcacgagggggagctcggtcgcttccatcttcgccaaggggaggagccacaagacatgtacaatcggctcaaaaccttggtgaatcaagtgcgcaacctcgggagcaagaaatgggatgaccacgaggtggttaaggttattctaagatcacttattttccttaaccctactcaagtacaattaattcgtggcaatcctcgatatacactaatgactcccgaggaagtaatcgggaattttgtgagctttgaatttatgatcaagggctcacggaagatcaacgagcttgacggtccctccacgtccgaagcacaaccggtcgcattcaaagcgacgaaggagaagaaggaggagtctacaccaagtagaacacccatcgacgccttcaagctcgacaacgaggaaatggcgcttgtcatcaaaagcttccgccaaatcctcaagcaaaggagggggaaagattacaagccccgctccaaaaacgtttgctacaagtgtggtaagcccggtcactttatagcaaaatgtcctatttccagtgacagtgacaggggcgatgacaagaaggggagaagaaaggagaagaaaagatactacaaaaagaagggcggcgatgcccatgtttgtcgcgagtgggactccgacgaaagctctagcgactcctcctccgacgaggacgccgccaacatcgccatcaccaaggcacttccaacgtcggccacaagtgcctcatggcaaaggacggcaaaaagaaaaagtgccatccatgagaagtacgatctcttggactcccaagaggacttcctaatcaaggaaaacaaaaggcatgttaaagttaagaatgcttatgctctagaagttgaaaaatgtgaaaaattatctagtgagctaagcacttgccatgagactatagacaaccttagaaatgagaatgctaatttgttagctaaggttgattctattgcttgtaatgtttcaattcccaatcttagaaatgataataatgatttgcttgctaagattgaagaattgaacatttctcttgctagccttagagatgaaaatgaaaaattgcttgctaaggctaaagattttgatgtttgcaatgctaccatttccgaccttagaagtaaaaatgatatattgcatgctaaggttgtagaattaaaatcttgcaaaccatctatatctaccgttgagcacactactatttgcactagatgtagagatgttgatatcaatgctatacatgatcacatggctttaattaaacaacaaaatgatcatatagctaaactagatgcaaaaattgccgagcatgaaattgaaaatgaaaaatttaaatttgctcgtagtatgctttatagtgggagacgccctggcattaaggatgacattggcttccaacagggaggcaatgtcaaaattaatgcccctcctaagaaattgtccaactttgttaagggcaaggctcccatgcctcaagataacgagggatactttttgtaccctgtcggttatcctgagaacaagattaggagaattcattctaggaagtctcactctggccctaatcattcttttatgtataagggtgagacatctagctttaggcaaccaacccgtgctaagttgcctaagaagaaaactcctagtgcatcaaatgatcatgacatctcatttaaaacttttgatgcatcttatgttttaactaacaaatccggcaaggtttatgcatccgggggctcaagttggatcatcgacagcgggtgcacaaaccacatgacaggggagaagaaaatgttctcctcctacgagaaaaaccaagatccccaacgagctatcacattcggggatggaaatcaaggtgtcactgtctttagaagaagtgatgatttaatagcatttaagggagtgttagagggtcaactatacttagtgaattttgatagagctgaactcgacacttgcttaattgctaagactaacatgggctggctctggcatcgccgactagcacatgttgtgatgaagaatcttcataagcttctaaagggagagcacattttaggattaaccaatgttcattttgagaaagacaggatttgtagcgcatgccaagcagggaagcaagttggtgcccatcatccacacaagaacatcatgacgaccgataggccactggaggtcctacacatggatctattcggcctgatagcttacataagcatcggcgggagtaagtattgtctagttattgtggatgattattctcgcttcacttgggtattctttctgcaggaaaaaactcatacccaagagacattaaagggattcttgagacgggctcaaaatgagttcggcttaaggatcaagaaaattagaagcgacaacgggacggagttcaagaactcacaaattgaaggcttccttgaggaggagggcatcaagcatgagttctcctctccctacacgccacaacaaaatggtgtagtggagaggaagaatagaactctattagacatggcaagaaccatgcttgatgagtacaagacttcggatcggttttgggctgaggcggtcaacaccgcttgctacgccatcaaccgattatatctatatcgaatcctcaagaagacatcatacgaactccttaccggtaaaaggcccaatatttcatattttagagtctttggtagcaaatgctttattcttgttaaaagaggtagaaaatctaaatttcctcctaagaccgtagaaggctttttactaggatatgattcaaacacaagggcatatagagtctttaacaagtcctcgggactagttgaagtttcttgtgacgttgtgtttgatgagactaacggctctcaagtagagcaagttgatcttgatgagataggtgatgaagaggctccgtgcatctctctaaggaacatgtccattggggatgtgtgtcctaaggaattcgaagagcctccaaatgcacaagatcaaccatccccctccacacaagcatctccaccaactcaaaatgaggttgaggctcaagttgatgaaggagaagatcaagcaaatgagccacctcaagacgacggcaatgatcaagggggagatgcaaatgatcaagacaaggaggatgatgaagaacaaaggccgccacacccaagagtccaccaagcaatccaacgagatcaccccgtcgacaccatcctcggcgacattcataagggggtaaccactcgatctcgtgttgcacatatttatgagcattactcttttgtttcctctattgagccacacagggtagaagaagcactccaagattcggattgggtagtggcgatgcaagaggagctcaacaacttcactaggaacgaggtatggcatttggttccacgtcctaatcaaaatgttgtaggaaccaaatgggtcttccacaacaagcaagacgagcatggtgtggtgacaaggaacaaagcccgacttgtggccaaaggatactcccaagtcgaaggtttggatttcggtgaaacctatgcacccgtagctaggcttgagtcaattcgtatattattggcctatgctacttaccatggcttcaagctttaccaaatggacgtgaagagttccttcctcaatggaccaatcaaggaagaggtctatgttgagcaacctcccgcctttgaagatagtgagtaccctaaccatgtgtataaactctctaaggtgctttatgggctcaagcaagccccaagagcatggtatgaatgccttagagatttccttatcactaatggattcaaagtcggaaaggccgatcctacactcttcactaaaactcttgaaaatgacttgtttgtatgccaaatttatgttgatgatattatatttgggtctactaacgagtctacatgtgaagaatttagtaggatcatgacacaaaagttcgagatgtctatgatgggggagttgaagtacttcttaggatttcaagtgaagcaactccaagagggcaccttcctaagccaaacgaagttcaagacattctaa

SEQ ID NO: 4947 - DNA, 5091 bp, Zea mays
  Clone ID: TF_ZM4499.C1.o6.fg
atgtcgggagaacacgccaagaaggagatggagaccggcgaaaagcccactacaagccacgggagcacttcatcggaagagttccgcaccaagaggagggagaagaagaagagctcctccaacaaagggaaggagaagaaatcttcttctcaccacaaagagaagaaggaaaaatcttcttcccacaagccgcatcggagtggggacaagcaaaagaggatgaggaaagtggtctactacgagaccgacacttcatcaacatcgacctccggctccgatgcgccctccgtaacttctaaacgccaagagcgtaagaagtttagtaagatccccctacactaccctcgcatttctaaacatgcacctttactttccgtcccattaggcaaaccaccaacttttgatggtgaagattatgctaggtggagtgatttaatgcgatttcatctaacctcactccacaaaagtatatgggatgttgttgagtttggtgcacaggtaccgtctgtaggggataaagattatgatgaggatgaggtggcccaaatcgagcacttcaactctcaagcgacaacaatactcctcgcctctttaagtagagaggagtataacaaagttcaagggttgaagagcgccaaggaggtttgggatgtgctcaaaaccgcgcacgaaggagatgagctcaccaaaatcaccaagcgggaaacgatcgagggggagctcggtcggttccgacttcgcaaaggggaggagccacaacacatgtacaaccggctcaagactttggtgaaccaagtgcgcaacctcgggagcacgaaatgggacgaccacgaaatggttaaggttattctaagatctctcattttccttaaccccactcaagttcaattaattcgtggtaatcctagatatactaaaatgacccccgaggaagttatcgggaattttgtaagttttgagtgcatgatcgaaggctcgaggaagatcaacgagcttgatgatccatctacatccgaagctcaacccgtcgcattcaaggcgacggaggagaagaaggaggaggctacaccaagtcgacaaccaatagacgcctccaagctcgacaatgaggaaatggcgctcgtcatcaagagcttccgccaaatcctcaagcaaaggagagggaaagaccacaagtcccgctccaagaatgtttgctacaaatgtggtaagcccggtcattttattgctaaatgtcctatatctagtgacagtgaccgaggcgacaacaagaaggaaagaagaaaggagaagaagaggtactacaagaagaagggcggcgatgcccatgtttgtcgggagtgggactccgacgaaagctcaagcgactcctccgacgacgaggacgccgccaacatcgccgtcaccaagggactcctcttcccaaacgtcggccacaagtgtctcatggccaaggacggcaaaaagaaggttaaatctaaatcctccactaaatatgaatcctctagtgatgataatactaatgatgaggaagataacttgcgctctctttttgccaacctcaacatgcaacaaaaagaaaaacttaatgaattgattagtgccatccatgaaaaggatgatctcttggacacccaagaggacttcctaatcaaggaaaataaaaagcatgttaaggttaaaaatgcctatgctctagaaattgagaaatgccaaaaattatctagtgagctaagcacttgccatgaaacaatagacaaccttagaaatgaaaatgctaatttgttagctaaggttgattctcatgtttgcaatgtttcaattcccaaccctagagataataatgatgatttgcttgctaggattgaagaattgaacatttctcttgctagccttagaattgagaatgaaaaattgcttgctaaggctaaagattttgatgtttgcaatactaccatttctgaccttagaactaagaatgatatcttgcatgctaaggttgtagaattaaaatcttgcaaaccctctacatctaccattgagcacgtttccatttgtactagatgtagagatgttaacattgatgctatacatgatcacatggctttaattaaacaacaaaatgatcatatagctaaattagatgctaaaattgctgagcataacttagagaatgaaaaatttaaatttgctagaagtatgctctataatgggagacgccctggcatcaaggatggcattggcttccaaaggggagacaatgtcaaacttagtgcccctcctaaaagattgtctaattttgtaaagggcaaggctcccatgcctcaggataacgagggttacattttgtaccctgccagttatcctgagagcaaaattaggagaattcattctaggaagtctcactctggccctaaccatgcttttatgtataagggtgagacatctagctctaggcaaccaacccgtgctaagttacctagaaagaaaactcctaatgcatcaaatgatcatgacatttcatttaaaacttttgatgcatcttatgtattgactaacaaatccggcaaagtagttgccaaatatgttgggggcaagcacaaggggtcaaagacttgtgtttgggtacccaaagttcttgtgtctaatgccaaaggacccaaaaccatttgggtttatgcatccgggggctcaagttggatactcgacagtgggtgcacaaaccacatgacaggggagaaaaagatgttctcctcatatgagaaaaaccaagatccccaacgagctatcacattcggggatggaaatcaaggcttggtcaaaggtgtcactgtctttagaagaagtgatgattcaatagcatttaagggtgtgttagagggtcagctatacttagtagattttgatagagctgaactcgacacatgcttaattgctaagactaacatgggttggctctggcatcaccgattagcccatgttgggatgaagaatcttcacaagcttctaaagggagagcacattttaggactaaccaatgaaaaatctcaaacccaagaaaccttaaagggattcttgagacgggctcaaaatgagtttgacttaaggatcaagaaaataagaagcgacaacgggacggagttcaagaattctcaaattgaaggcttccttgaggaggagggcatcaagcatgagttctcttctccctacacgcctcaacaaaatggtgtagtggagaggaagaatcgaactctattggacatgggtagaaccatgcttgatgagtacaagacctcggatcggttttgggcggaggcggtcaacaccgcttgctacgccatcaaccggttgtatctacaccgaatcctcaagaagacatcatacgaactcctaaccagtaaaaagcccaatatttcatattttagagtctttggtagcaaatgctttattcttgttaaaagaggtagaaaatctaaatttgctcctaagactgtcgaaggctttttacttggctatgactcaaacacaagggcatatagggtctttaacaagtccactggactagttgaagtctcatgtgacgttgtgtttgatgaaactaacggctctcaagtagagcaagttgatcttgatgagataggtgatgaagaggctccgtgcatcgcgctaaggaacatgtccattggggatgtgggtcctaaggaatccgaagagcctccaaatgcacaagatcaaccatcctcctccatgcaagcatctccaccaactcaaaatgaggaagaggctcaagttgatgaagaagaagatcaatcaaatgagccacctcaagatgacggcatagatcaagggggagatgcaaatgatcaagacaaggaggatgaagagcaaagaccgccacacccaagagtccaccaagcaatccaacgagatcaccccgtcgacaccatcctcggcgatattcataagggggtaaccactagatctcgtgttgctcatttttgtgaacattactcttttgtttcctctattgagccacacagggtagaggaagcacttcaagattcggattgggtggtggcaatgcaagaggagctcaacaacttcactaggaatgaggtatggcatttagttccacgtcctaaccaaaatgttgtaggaaccaaatgggtcttccgcaacaagcaagatgagcatggtgtggtgacaaggaacaaagctcgacttgtggccaagggatactcccaagtcgaaggtttggatttcggtgaaacctatgcacccgtagctaggcttgagtcaattcgcatattattggcctatgctacttaccatggctttaagctttatcaaatggacgtgaaaagtgccttcctcaatggaccaatcaaggaagaggtctatgttgagcaacctcccggctttgaagacagtgagtaccctaaccatgtctataagctctctaaggcgctttatgggctcaagcaagccccaagagcatggtatgaatgccttagagatttccttattgctaatggcttcaaagtcggaaaggccgatcctacactctttactaaaactcttgaaaaggacttgtttgtatgccaaatttatgttgatgatattatatttgggtctactaacgagtctacatgtgaagagtttagtaggatcatgacacaaaagttcgagatgtctatgatgggggagttgaagtatttcttaggatttcaagtgaagcaactccaagaaggcaccttcattagccaaacgaagtacactcaagacattctaaacaagtttgggatgaaggatgccaagcccatcaaaacacccatgggaactaatgggcatctcgacctcgacacgggaggaacttcttttgttaaattgcacacattgctcttctatatacctttgatcatgtctctttcatatgctatgactaatgtgtttttcaagtctatttcaaaccaagtcataggtgtattgaaagggaattggagtcttcggcgaagacaaaggcttccactccgtaactcatccttcgccgacgctccaagtcactctccattcttgggggagaaagcatga

SEQ ID NO: 4948 - DNA, 5310 bp, Zea mays
  Clone ID: TF_ZM4893.C2.o5.fg
atgtcgggagaacacgccaagaaggagatggagaccggcgaaaagcccactacaagccacgggagcacttcatcggaagagttccgcaccaagaggagggagaagaagaagagctcctccaacaaagggaaggagaagaaatcttcttctcaccacaaagagaagaaggaaaaatcttcttcccacaagccgcatcggagtggggacaagcaaaagaggatgaggaaagtggtctactacgagaccgacacttcatcaacatcgacctccggctccgatgcgccctccgtaacttctaaacgccaagagcgtaagaagtttagtaagatccccctacactaccctcgcatttctaaacatgcacctttactttccgtcccattaggcaaaccaccaacttttgatggtgaagattatgctaggtggagtgatttaatgcgatttcatctaacctcactccacaaaagtatatgggatgttgttgagtttggtgcacaggtaccgtctgtaggggataaagattatgatgaggatgaggtggcccaaatcgagcacttcaactctcaagcgacaacaatactcctcgcctctttaagtagagaggagtataacaaagttcaagggttgaagagcgccaaggaggtttgggatgtgctcaaaaccgcgcacgaaggagatgagctcaccaaaatcaccaagcgggaaacgatcgagggggagctcggtcggttccgacttcgcaaaggggaggagccacaacacatgtacaaccggctcaagactttggtgaaccaagtgcgcaacctcgggagcacgaaatgggacgaccacgaaatggttaaggttattctaagatctctcattttccttaaccccactcaagttcaattaattcgtggtaatcctagatatactaaaatgacccccgaggaagttatcgggaattttgtaagttttgagtgcatgatcgaaggctcgaggaagatcaacgagcttgatgatccatctacatccgaagctcaacccgtcgcattcaaggcgacggaggagaagaaggaggaggctacaccaagtcgacaaccaatagacgcctccaagctcgacaatgaggaaatggcgctcgtcatcaagagcttccgccaaatcctcaagcaaaggagagggaaagaccacaagtcccgctccaagaatgtttgctacaaatgtggtaagcccggtcattttattgctaaatgtcctatatctagtgacagtgaccgaggcgacaacaagaaggaaagaagaaaggagaagaagaggtactacaagaagaagggcggcgatgcccatgtttgtcgggagtgggactccgacgaaagctcaagcgactcctccgacgacgaggacgccgccaacatcgccgtcaccaagggactcctcttcccaaacgtcggccacaagtgtctcatggccaaggacggcaaaaagaaggttaaatctaaatcctccactaaatatgaatcctctagtgatgataatactaatgatgaggaagataacttgcgctctctttttgccaacctcaacatgcaacaaaaagaaaaacttaatgaattgattagtgccatccatgaaaaggatgatctcttggacacccaagaggacttcctaatcaaggaaaataaaaagcatgttaaggttaaaaatgcctatgctctagaaattgagaaatgccaaaaattatctagtgagctaagcacttgccatgaaacaatagacaaccttagaaatgaaaatgctaatttgttagctaaggttgattctcatgtttgcaatgtttcaattcccaaccctagagataataatgatgatttgcttgctaggattgaagaattgaacatttctcttgctagccttagaattgagaatgaaaaattgcttgctaaggctaaagattttgatgtttgcaatactaccatttctgaccttagaactaagaatgatatcttgcatgctaaggttgtagaattaaaatcttgcaaaccctctacatctaccattgagcacgtttccatttgtactagatgtagagatgttaacattgatgctatacatgatcacatggctttaattaaacaacaaaatgatcatatagctaaattagatgctaaaattgctgagcataacttagagaatgaaaaatttaaatttgctagaagtatgctctataatgggagacgccctggcatcaaggatggcattggcttccaaaggggagacaatgtcaaacttagtgcccctcctaaaagattgtctaattttgtaaagggcaaggctcccatgcctcaggataacgagggttacattttgtaccctgccagttatcctgagagcaaaattaggagaattcattctaggaagtctcactctggccctaaccatgcttttatgtataagggtgagacatctagctctaggcaaccaacccgtgctaagttacctagaaagaaaactcctaatgcatcaaatgatcatgacatttcatttaaaacttttgatgcatcttatgtattgactaacaaatccggcaaagtagttgccaaatatgttgggggcaagcacaaggggtcaaagacttgtgtttgggtacccaaagttcttgtgtctaatgccaaaggacccaaaaccatttgggtttatgcatccgggggctcaagttggatactcgacagtgggtgcacaaaccacatgacaggggagaaaaagatgttctcctcatatgagaaaaaccaagatccccaacgagctatcacattcggggatggaaatcaaggcttggtcaaaggtgtcactgtctttagaagaagtgatgattcaatagcatttaagggtgtgttagagggtcagctatacttagtagattttgatagagctgaactcgacacatgcttaattgctaagactaacatgggttggctctggcatcaccgattagcccatgttgggatgaagaatcttcacaagcttctaaagggagagcacattttaggactaaccaatgttcattttgagaaagacaggatttgtagcgcatgtcaagcagggaagcaagttggctctcatcatccgcataagaacataatgacgaccgacaggccgcttgagctactacacatggatctattcggcccgattgcttacataagcatcgacgggagtaagtactgtctagttattgtggatgattattctcgcttcacttgggtattctttttacaggaaaaatctcaaacccaagaaaccttaaagggattcttgagacgggctcaaaatgagtttgacttaaggatcaagaaaataagaagcgacaacgggacggagttcaagaattctcaaattgaaggcttccttgaggaggagggcatcaagcatgagttctcttctccctacacgcctcaacaaaatggtgtagtggagaggaagaatcgaactctattggacatgggtagaaccatgcttgatgagtacaagacctcggatcggttttgggcggaggcggtcaacaccgcttgctacgccatcaaccggttgtatctacaccgaatcctcaagaagacatcatacgaactcctaaccagtaaaaagcccaatatttcatattttagagtctttggtagcaaatgctttattcttgttaaaagaggtagaaaatctaaatttgctcctaagactgtcgaaggctttttacttggctatgactcaaacacaagggcatatagggtctttaacaagtccactggactagttgaagtctcatgtgacgttgtgtttgatgaaactaacggctctcaagtagagcaagttgatcttgatgagataggtgatgaagaggctccgtgcatcgcgctaaggaacatgtccattggggatgtgggtcctaaggaatccgaagagcctccaaatgcacaagatcaaccatcctcctccatgcaagcatctccaccaactcaaaatgaggaagaggctcaagttgatgaagaagaagatcaatcaaatgagccacctcaagatgacggcatagatcaagggggagatgcaaatgatcaagacaaggaggatgaagagcaaagaccgccacacccaagagtccaccaagcaatccaacgagatcaccccgtcgacaccatcctcggcgatattcataagggggtaaccactagatctcgtgttgctcatttttgtgaacattactcttttgtttcctctattgagccacacagggtagaggaagcacttcaagattcggattgggtggtggcaatgcaagaggagctcaacaacttcactaggaatgaggtatggcatttagttccacgtcctaaccaaaatgttgtaggaaccaaatgggtcttccgcaacaagcaagatgagcatggtgtggtgacaaggaacaaagctcgacttgtggccaagggatactcccaagtcgaaggtttggatttcggtgaaacctatgcacccgtagctaggcttgagtcaattcgcatattattggcctatgctacttaccatggctttaagctttatcaaatggacgtgaaaagtgccttcctcaatggaccaatcaaggaagaggtctatgttgagcaacctcccggctttgaagacagtgagtaccctaaccatgtctataagctctctaaggcgctttatgggctcaagcaagccccaagagcatggtatgaatgccttagagatttccttattgctaatggcttcaaagtcggaaaggccgatcctacactctttactaaaactcttgaaaaggacttgtttgtatgccaaatttatgttgatgatattatatttgggtctactaacgagtctacatgtgaagagtttagtaggatcatgacacaaaagttcgagatgtctatgatgggggagttgaagtatttcttaggatttcaagtgaagcaactccaagaaggcaccttcattagccaaacgaagtacactcaagacattctaaacaagtttgggatgaaggatgccaagcccatcaaaacacccatgggaactaatgggcatctcgacctcgacacgggaggaacttcttttgttaaattgcacacattgctcttctatatacctttgatcatgtctctttcatatgctatgactaatgtgtttttcaagtctatttcaaaccaagtcataggtgtattgaaagggaattggagtcttcggcgaagacaaaggcttccactccgtaactcatccttcgccgacgctccaagtcactctccattcttgggggagaaagcatga

SEQ ID NO: 4949 - DNA, 4389 bp, Zea mays
  Clone ID: TF_ZM5043.C4.o1.fg
atggatcctaagggcaaggggattgtgatcaatgataaggagaaggagtctttcgtcaacgagcctaaagatgacaagtctaccgactcgggctcgggccacaaacgaaaagatgggaagaagaagaagacgaggcgcatcaaggagatcgtctactacgacgacagcgacgagtcctcttcctcccaaaaagacgacgacaacgaccatgaaaaaaagaagacggttaattcaaacttctcttttgattattctcgtattcctcaaagtatcaatgctaatttactcttcattccacttggtaaacctcctcattttgatggagaggactacgaattttggagtcacaaaatgcgtagtcacttgttctctctccatcctagtatatgggagttagtagagagtggaatgaaatttgatagctcggatagtcctttgtttatcaatgaacagattcataaaaatgcacaagctactactgtgttgttagcctcactgtgcagggacgagtaccataaggtgagcggattggacaatgccaagcagatctgggacaccctcaagatctcacatgaggggaacgacgtcaccatgctcaccaagatggagttggtggaaggcgaactcgggagatttgcgatgataagaggggaggagtcaacccaaacgtacaacaggctcaagaccctcatcaacaagataaggagctatggaagcacgcgatggacggaccacgacgttgtccgcctaatgctaaggtcctttactatacttgatccacatctggtaaacaatattcgtgaaaatcctatgtacaccaagatgtcgcccgaagaaattcttgggaaatttcggttcaagacggcgctaaagggtcgcaaggagcaccccaacaagaacaagacgaaggggaagcgctcctgcttcaaatgtggtaagattggtcattttatcgctaattgtaccgataatgatagtgaccaggaaaagaagagtggaaagtgggaaaagaagaagaactacaagaaggcgaagggcgaggcacatcttggaaaggagtgggattcggattgctcctcgtccgactccgacaacgaaggactcgccgccaccgccttcaacaagtcatccctcttccccaacgagcatcacacttgcctcatggcaagggaaaagaaggtaagcactcgtaatactagtacttatgcttcttcaagtgaggatgagtctagtgatgatgatgaaatagattattcatgtttattcaaaggcctagatagaaccaaggttgataaaattaatgaattaattgatgccttgaatgataagaataggttattagaaaagcaagaggatcttttgtatgaagagcatgataaatttgttagtgcacaaaattctcttgctctagaagttaaaaggaatgaaatgctttcttgtgaactatctacttgtcatgaaaccatttctactttaaaaggtgttaatgatgatttaaatgctaaactagtagtagcgaataaatctaactcttgtgtagaacatgttatgatttgcaataggtgcaaagattttaatgttgatgcttgtagtgaacacctagcttgcatttctaaattaaatgatgaagtggctagtcttaatgcccaacttaagactagcaagagtgaatttgacaagctaaaatttgcaagggatgcctacacgattggtagacacccctcaattaaggatggtcttggcttcaagagggaagtcaagaacttaacaagccataaggctcccatctccgccaaggagaaagggaaggcccctatggctagaagtgctcaaaagaaccatgccttcatgtatcatgataggagacattctagaaatgtttatagaagttatgatgcttttgattctcatgctatggttgcttctagttcttctattatgcatgatagaaatttagctaggagaaatgctattaatcacatgcctagaagaaatattgttcatgtgcctaggaaaacaaatagtgaaccttctacaatttatcatgctttaaatgcttcctttgctatttgtagaaaggataggaagataattgctagaaaattaggggcaaaatgcaagggagataaaacttgcatttgggtccctaaggctatttgtactaaccttgtaggacccaacatgagttgggtttatgcatccgggggctctagctggattatcgacagcggatgcacaaaccacatgacgggggaaaagaggatgttctcttcctacgtcaagaacaaggatccccaagattcaatcatattcggtgacgggaatcaaggcaaggttaaaggcttaggcaagattgcaatctcaaatgagcactctatttctaatgtattcttagttgagtcgcttggatataatttgttatccgtaagtcaattatgtaatatgggatataattgtctattcacaaatgtagatgtgtctgtctttagaagaagtgatggttcactagcttttaagggtgtattagacgacaaactctatttagttgattttgtaaaagaggaggccggtctagatgcatgcttaattgctaagactagcatgggctggctgtggcatcgccgcttagcacatgtggggatgaagaaccttcacaagcttctaaagggagaacacgtaataggtctagctaatgttactttcgaaaaagatagaccttgtgcagcttgtcaagcagggaaacaggtgggaagctctcatcatgccaaaaatgtgatgacaacatcaagacccctagagttacttcatatggacctcttcggacccgtcgcctatttaagcataggaggaattaagtatggtcttgttatagttgatgatttttcccgcttcacatgggtattctttttgcaggataaatctgaaacccaagggaccctcaagcgcttcctaaggagagctcaaaacgagtttgagctcaaggtgaaaaagataaggagcgacaatgggtccgagttcaagaaccttcaagtggaggagtatcttgaggaggaaggaatcaagcatgagttctccgctccctacacaccacagcaaaatggtgtagtacagaggaagaacaggacgcttatagacatggcgaagacaatgcttggagagttcaagaccccagagcgcttttggtcggaagccgtgaacacggcttgccacgccatcaaccgggtctaccttcattgcctcctcaagaagacttcgtatgagctactaaccggtaacaaacccaatgtttcgtatttccgagtttttgggagcaaatgctacattctagtgaagaagggtaggaattccaaatttgctcccaaagccgtagaagggtttttgttaggttatgactcaaatacaaaggtgtatagggtcttcaacaaatcatcgggtttggttgaagtctctagcgacgttgtatttgatgagactaatggctctccaagagagcaagttgttgatcttgatgatatagatgaagaagacgttccaacggccgcaatgcgcaccatggcgattggagatgtacggccacaggaacaaaaggagcaagatcaaccttcttcctcaacaatggtgcatcccccaactcaagacgatgaacaggttcatcaagaggaggcgtatgatcaagggggagcacaagatgttcatgtgatagaggaagaagcacaaccggcacctccaactcaagtccgagcgatgattcaaagggatcatcccgtcgaccagattttgggtgacattagcaagggagtaactactcggtctcgattagttaatttttgtgagcattactcttttgtctcttctattgagcctttcagggtagaggaggccttgctagatccggactgggtgttggccatgcaagaggagctcaacaacttcaaaaggaatgaagtttggacactggtgcctcgtcccaagcaaaatgttgtgggaaccaagtgggtgttccgcaacaaacaagacaagcacggggtggtgacaaggaacaaggcacgacttgtggcaaaaggttatgcccaagtcgcaggtttggactttgaggagacttttgctcctgtggctaggctagagtccattcgtattttgctagcatatgccgctcaccattctttcaggttgttccaaatggatgtgaagagcgctttcctcaacgggccaatcaaggaggaggtgtacgtggagcaaccccctggcttcgaggatgaacggtaccccgaccacgtctgtaagctctctaaggcgctctatggacttaagcaagccccaagagcatggtatgaatgccttagagactttttaattgctaatgctttcaaagttgggaaagccgattga

SEQ ID NO: 4950 - DNA, 4064 bp, Zea mays
  Clone ID: TF_ZmC119_1836
ttacaatttacatgaggctaggaagcctgggaaattcttatttaaaaagtcttgggtttcccatgtagcctcatcttccgaatgctggttccactgtatcttgtagaacttgagagtctttcttcgggtgaccctgtccttttgatccagaactcgaataggatgttccgagtaggttaaatctggttctaggacaacatcagttatttcaacggttcgatcaggaacccgaagacacttctttagttgtgacacgtggaacacattgtgcacagcagacaaggtttcggggagttggagtcgatacgccactggcccatatctttccagaataagaaaaggaccaatatatcgtggtgcaagttttcctttaactccgaaacgcgatacgcccttcattggtgagaccttcaagtagacatagtctccttcaagaaaatataagggcattcgccgtttgtctgcataactcttttgccgtgcttgagctttcttcatattatggataattctctgaaccttttcttcaacctctttcaccatatcaggtctaaagaagtatctttctccaggttcagaccaatttagcggagtccgacaccgtcgtccatataaagcttcaaagggtgccatcttgatactttcttggtagctattattatatgaaaactccgctaaaggtaaacattcatcccattttagtgagaaatccaggacacatgcccgcagcatatcttcaagtatttggttcactctctcagtttgtccactggtttgaggatgataggccgaactgtggagcagtttagtacccaggaatttatgaagttcttcccagaatttagatacgaattgaggtccacgatccgacactatagtctttggaacaccatgcaaactgagaatacgggtaatgtataactccgcataggtaatgacgggatatttaactttgaccgggagaaagtgggcgatctttgtaagtcgatcgatgataacccagatggagtcaaagccttttgcggttctgggcaatcccacaatgaagtccatgctgatgtcttcccatttccatgttgggattggcaaagattgtaatggaccagcagttttcatgtgtatggccttgacacgtctgcaggtgtcacacttagccacatagcgtgcaatttcaatcttcatttttgtccaccagtaatgttgctttaaatcttggtacatcttagtgcttccgggatgaatagaatagcgactaagatgtgcttcatcaagaatttgttggcggagctcttcggtctttggtactactatgcggtttttgaaccatatcacaccctgatcgtcttccttgaaacacttggctactccagcctttatcttttctcgaatgtgcttcatacccagattatccctttgagcatcaattatcctttgcaaaatgattgactcaagctttaactgatttagagtcccttgttggatgatcgccaggtttagcttttccatttcctgacacaaagtgttcttggaagtcttcgccataagacagtggcaggaagtcttacgactcaacgcatctgccaccacattggccttgcctgggtgataatggatctccaattcatagtctttgatgagctcaagccatcgtctttgtctcatattcaactctgactgggtgaagatgtacttcaaacttttgtggtccgtataaatgtgatagacattccccagcagatagtgacgccatattttgaggccatgaaccaccgcaactaactccaggtcatgagttggataatgttcttcatgctggcgtaactgccttgaagcataagctattactcggccttcttgcattaaaacacagccgagaccactgcctgatgcgtcacaatacacatcaaagggcttttcaatatccggttgagccaataccggagcagtggttaataatagtttaagctgctcaaaagcttcattacatttcgaagaccaattgaatttaatatcactcttcaataaacttgtgattggtttcacaagcttagaaaaatctggaatgaatcggtggtaataaccagccagcccaaggaaatttcggacttgatgtatagtggttgggggtttccactccaaaatatccttgactttgctgggatctaccgcaatccccttagcagataatacatgtcccataaattgaatctcctctagccagaatacgcacttactgaacttagcatataattgatgttcccttaagcgcgtcaatacgatccgcaagtgctgagcatgctcctcttcattcttggagtatatcaagatatcatcaatgaataccaccacaaacttgtccaactcgggcataaataccgacttcatcagatatgtgaagtgggcaggagcattcgtcagtccgaaagacataactagatattcaaataatccataccgcatggtgaatgcggtctttggtatatttttgggtcggatacggatctgatgataacccgacctgaggtcaatcttggagaatacccgagctccggtaagttgaccaaatagaatgtcaatccggggaagagggtacttattttttatggtgacctcattaaggggtctataatccacgcacatccgcagtgtttgatccttcttcttgacgaagatggctggacaaccccaatgtgaagaacttggccggataaatcctttttcaagtagatcttgcaattgggtcttgagttctgccagttcatttggaggcattcggtacgaccttctagaaataggagccataccgggcttcaactcaatcacaaattctacatctctttttagaggcaatcccggcagatcttctggaaagacgtctgggaactcacatactaccggaatatcttggatctccggtatgatagctccatacactctgccaattggtccagctggaatggctatggggatagacaaaagaatctcttcttggccataactcaaccagattgttctcagatcagtgttgaggattgctttatgatctatgtcttggccttttagaacaatcatgtttgttggaaagtcccgttcagccaatgttacgggcacttggtaagccacttctttagtaaatatttgtcccccaagcgaatgaatagtaaacccttcccttgattcagtatatggaatgcaatgtttttccacaaatttcttgcttatgaaagtatgcgaagcaccagaatcaaagagaataactgcagggtgattggccacgaggaacgtacccatcatcaccggttcgccttccggtgttgtggccacttgagtataatagatccatcctgttttccttgtatttttgcccgcagtactgtttgccgcatttcccttggaactctcggacctctgttgattatttgattgattctgcctcgggtatggacagtccttaataaaatgaccaaactttccacagttgaagcagccagttgaagaactaggtagggtggggaaacgagcaccaggggcactcggctgatttgtagaagtgggggcaatggtaggatgaatgaaaacaggctgtttgaacggataggacggtggacgaggcgaagaacgattctgattaaaaggtcggattaccaacctggttcgcttctcaggtccctgattggacctgtcacctccaaatctctttaattttccttggcctgtattcttggcttctactaccagtgccatgctgacagctctactgtaagtaagatctaggcaggtggccattttccgttggagccggtcgttgagtcctctcatgaagcaattcttcttcttcaggtcagtgtttacttggtcaatcgcatattgggataaatgattaaacttgttgagatactgcatcacagtatccccaccttgttttaatcgaataaactcctcttgtttcatgtgaagcactccctctggaacatagtgttcactgaatgctagattaaattcatcccaagtgatccgatgtccggctggttgaactgctacaaaatttccccaccaggtactcg

SEQ ID NO: 4951 - DNA, 1269 bp, Zea mays
  Clone ID: TF_ZmC143274_1
cttcgcccctacagatcgaaccaaggaggcagcaaccagcgcacgccactgcggcgctaggagctcgcagaagcgccgccccacgagagggagtccagagcatggaagagatccggtggcagagcaggtcggtcggagatgggagtcccggcgttctaccggtggctggcggaccgctacccgctgacggtgtctgacgcggaggaggaggagcccgtggagctcgagcccggcgccttcgtccccgttgacctccgccgccccaatcccaacggcctcgagtttgacaacctctacctcgacatgaatggtatcatccacccatgcttccaccccgagggccggccggcgcccaccacctacgacgaggtgttcaagtcgatttttgattacatcgaccacctcttcggcctcatccgccccaggaagcttctctacatggccattgatggtgttgctccaagggcaaaaatgaaccagcagaggtccaggcgattccgggctgctaaggacgcggctgatgcggcagcggaggaagagaggctgaggaaggagtttgaggcagagggtaggactctagcccagaaagagaagtcggaggcaattgactccaatgtcattactccagggacggagttcatgtttgtactatctacggcgcttcagtactacatacagctgaggctgaatcacacgcttggatggcagtctgtaaagataatactgtctgattccaatgtccctggagagggagagcacaaaattatgtcatacatccgcctgcagcgcaatcttcctggctttgatcccaatacacgccattgcttatatggcctggacgctgatttgattatgcttgctctagcgactcacgaggttcacttctcaattttaagagaggtgatctccatgccagggcaacatgaaaaatgttttctttgtggtcaagttgggcatttggctgctgaatgcagaggtcctagtcagcctgataattctgtggagctacctcctattcataaaaagaaataccagtttcttaacatatgggtgttgcgtgaatacctggcaaaggatttggaaattatagatgctcccttcaagataaactttgaacgtcttattgatgattttgtgtttatgtgtttctttgttggcaatgactttcttcctcatatgccaactttggaaattcgtgagggtgccattaatcttctcatgagtatctacaggtcggagttcacatcaatggggtgttacctaactgat

SEQ ID NO: 4952 - DNA, 4209 bp, Zea mays
  Clone ID: TF_ZmC951_336
ttacaggttctctggaggaaatggttgctggcataacttggccgtccaccttgccaccgggttggactgtcgagtgggaccctgcctcggcttttgatccacggacttacctcccgtgtcgaggtcgagatgctcattagttcccatgggtgtcttgatgggcttggcatccttcatcccaaacttgtttagaatgtcttgagtatactttgtttggctaatgaaggtgccttcttggagttgcttcacttgaaatcccaagaagtacttcaactcccccatcatagacatctcgaaattttgtgtcatgatcctacatgctcttggagcttgcttgagcccataaagcgccttagagagtttatagacatggttagggtactcaccatcttcaaagccgggaggttgctcaacatagacctcttccttgattggtccattgaggaaggcacttttcacgtccatttgataaagcttaaagccatggtaagtagcataggccaataatatgcgaattgactcaagcctagctacgggtgcataggtttcaccgaaatccaaaccttcgacttgggagtatcccttggctacaagtcgagctttgttccttgtcaccacaccatgctcatcttgcttgttgcggaagacccatttggttcctacaacattttgattaggacgtggaactaaatgccatacctcattcctagtgaagttgttgagctcctcttgcatcgccaccacccaatccgaatcttggagtgcttcctctaccctgtgtggctcaatagaggaaacgaaggagtaatgctcacaaaaatgtgcaacacgagatctagtagttacccccttatgaatgtcgccgaggatggtgtcgacggggtgatctcgttggattgcttggtggactcttgggtgtggcggcctttgctcttcatcctccttttcttgattatttgcatctcccccttgatcattgccgtcatcttgaggtagctcatttgcttgatcttctacttcatcaacttgagcttcatcctcattttgagtcggtggagatgcttgcgtggaggaggacggttgatcttgtgcatttgaaggctcttcgggttccttaggacacacatccccaatggacatgttccttagagcgatgcacggagcctcttcaatacctatctcatcaagatcaacttgctctacttgagagccgttagtctcatcaaacacaacgtcacaagaaacttcaacttgtccagtggacttgttaaagactctatatgcccttgtgtttgaatcatatcctagtaaaaagccttctacagtcttaggagcaaatttagattttctacccttaaattctattgaatcatcacttctcctaaagatagtgacacctatatcagtgaatagacagttgtagcccattttgcataattgagatacagaaagcaaattgtaatctaatgaatcttgatttccatccccgaatgtgatagctcgttggggatccttgtttttctcgtaggaggagaacatcttcttctcccctgtcatatggtttgtgcacccgctatcgatgatccaacttgagcccccagatgcataaacccaaacggttttgggtcctttggcattagaaacaagaactttgggtacccaaacacaagtcttggagcccttgtgtttgcccccaacaaacttggcaactactttgccggatttgttagtcaaaacataagatgcatcaaaagttttaaaagaaagactatgttcatttgatgcactaggagttttcttcttaggcaacttagcacgggttggttgcctagagctagatgtctcacccttatacataaaagcatggttagggccagagtgagacttcctagagtgaattctcctaattttgtcctcgggataaccggcagggtataaaatgtaactctcgttatcctgaggcatgggagccttgcccttaacaaagttagacaatcttttaggaggggcattaagtttgacattgtctcccctttggaagccaatgccatccttgatgccagggcctctcccattatagagcatacttctagcaaatttaaaattttcattttctaagtaatgctcggcaatttttgcatctaattttgatctagtacaaatagatacatgctcaacgatagatgtagagggtttgcaagattttaattctacaaccttagcatgtaacatgtcattcttagttctaaggtcggaaatagtagcattgcaaacatcaaaatctttagccttagcaagcaatttttctttttcaatcctaaggctagcaagagagatgttcaattcttcaatcctagcaagtaaatcatcatcattatttctagaattggtaattgaaacattacaaacatgagaatcaaccttagctaacaaattagcattttcatttctaaggttgtatattgtcacatggcaagtgcttagctcactagataatttttcacatttctcaatttctagagcataagcatttttaaccttaacatgtttcttattttccttaattaggaagtcctcttgagaatccaaaaggtcatccttttcatgaatagcactaattaattcatttaatttttccttttgttccatgttaaggttggcaaaaagggtacgcaaattatcttcctcatcactagcattatcatcactagaggactcatatgtagtggaggatttagatttaaccttcttctttttgccgtcctttgccatgaggaacttgtggccgacgttggggaagaggagtcccttggtgacggcgatgttggcggcgtcctcgtcggaggaggagtcggtggagctctcgtcggagtcccattcgcggcacacgtgggcatcgccgcccctcttcttgtggtacctcttcttttctctcctcttgcccttcttgtcgttatccctgtcactgtcacttgataatggacatttggcaataaagtgaccgggcttaccacacttgtagcaaacctccttggagcgggacttgtagtctttccccctcctttgtttgaggatttggcggaagctcttgatgacgagcgccatttcctcattgtcgagcttggaggcgtcgattggttgtctacttggtgtagactcctccttcttttcctccgtcgccttgaatgcgacgggttgagcttcggatgtggagggatcatcaagcttgttgatcttcctcgagccttcgatcatgcactcaaaactcacaaaattcccgattacttcctcgggggtcattagtgtatatcttgggttgccacgaattaattgtacttgagtagggttaagaaaaataagagatcttagaataaccttaaccattttgtggtcatcccatttcttgctcccgaggttgcgcacttgattcaccaaggtcttgagccggttgtacatattttgtggctcctcccctttgcgaagccggaaccgaccgagctccccctcgatcgtctcccgcttggtgatctttgtaagctcatctccttcgtgtgcggttttgagcacatcccaaacctccttggcgctcttcaacccttgtactttgttatactcctctctacttagagaagcgaggagtattgttgttgcttgagagttgaagtgctcgatttgggcaacctcgtcctcatcataatcttcatcccctacggatggtacctgtgcaccaaactcaacaacatcccatatacttttgtggagtgaggttagatgaaatcgcattaaatcactccacctagcgtaatcttcaccatcaaatgttggtggtttgcctaatgggacggaaagtaaaggtgtatgtttggaaatgcgagggtagcgtaggggaatcttactatacttcttacgctcttggcgcttagaagtgacggacgtcgcgtcggagccggaggtggatgccgatgaagaatcggtctcgtagtaaaccaccttcctcatcctctttttcttgtcctcactccgatgcggcttgtgggaagaggacttctccttccctttggaggagtccttcttcttctccttccttttggaggagtccttcttcttctccttcctcttggtgcgggactcttccaatgaaacactcccgtggcttgtagtgggcttttcgccggtctccatctccttcttggcgtgatctcccgacat

SEQ ID NO: 4953 - DNA, 1296 bp, Zea mays
  Clone ID: TF_ZM3617.C9.o1.fg
atggctctcatcatcaagagcttccgccaaatcctcaagcaaaggagggggaaggactataaacctcgctccaagagagtgtgctacaaatgtggtaagtccggtcattttattgctaaatgtccaatgtctaatgatagtgacaggggcaacgacaagaaggggaagaagaaggaaaagaagaggtactacaagaagaagggcggcgatacccacatgtgtcgggaatgggactccgacgagagctccaccgactcctccgacgacgaggatgccaccaacatcgccgtcaacaagggactcctcttccccaacgtcggccacaagtgcttcatggcaaaagacggcaaaaagaagaaggtacaatctagagccaccaaatatacaacatctagtgatgaaggtagctctagtgaagatgaagatgatttgcttactctttttgccaaccttaacatgcaacaaaaggaaaaattaaataaattaataggagccattcatgagaaggatgaacttttggatagccaagaggaattccttattaaagaaaataagaagcatgttaaagttgaaaagttaaatgcttgtaatgattcaattgtcagtcttagaaatgagaatgctagtttaattgctaagattgataaattgaatgaatcaatttctagccttagagatgaaaatgctagattaatttctaaggctaaagatttaaatgtttgcaatgattctatttccagtcttagaaatgagaatgctattttacatgctaagattgatgaattaaatgtttgcgaaccctctacatctactgttgatcatgtttccatttgcactagatgtagagatgtcaatgttgatgctataaatgatcaccttgctttaattaaacaacaaaatgatcatatagctcaattaactactaaaattaatgagcatgaaattgaaaatgaaaagtttaaatttgctagaagcatgctctataatgggagatgccctggcatcaagaatgacattggtttccaacagggaagcaatgtcaagcttaatacccctaagaaactgtctaattttgttaagggggagaagagaatgttctcctcctatgagaaaaacgaagatccccaacaagctatcacattcagggatggaaatcaagattctttagattataacttgctttcagtttctcaattatgcaaaatgggttacaactgtctttttagcgatgtaggtgttactgtctttagaaggagtgatgattcaatagcatttaagggagtgttagagggtcag

SEQ ID NO: 4954 - DNA, 366 bp, Zea mays
  Clone ID: TF_ZM4405.C3.o3.fg
atggctctcatcatcaagagctttcgccaaatcctcaagcaaaggaggggggaagactacaagtcccactccaagatggtttgctacaagtgtggtaagcccggtcatttcattgctaaatgtccattatctagtgatagtgacaggggcgacgacaagaagggaaagagaagagaaaagaagagatactacaagaagaagggcggcgatgcccatgtttgccgggagtgggactccaacgagagctccaccgactcctcctccgacaaggacgccgccaacatcgtcgtcaacaaaggcctcctcttccccaacgtcggccacaagtgcctcatggcaaaggatggcaagaagaagaagaaatga

SEQ ID NO: 4955 - DNA, 2259 bp, Zea mays
  Clone ID: TF_ZM5034.C4.o1.fg
atggctctcatcatcaagagcttccgccaaatcctcaagcaaaggagggggaaggactataaacctcgctccaagagagtgtgctacaaatgtggtaagtccggtcattttattgctaaatgtccaatgtctaatgatagtgacaggggcaacgacaagaaggggaagaagaaggaaaagaagaggtactacaagaagaagggcggcgatacccacatgtgtcgggaatgggactccgacgagagctccaccgactcctccgacgacgaggatgccaccaacatcgccgtcaacaagggactcctcttccccaacgtcggccacaagtgcttcatggcaaaagacggcaaaaagaagaaggtacaatctagagccaccaaatatacaacatctagtgatgaaggtagctctagtgaagatgaagatgatttgcttactctttttgccaaccttaacatgcaacaaaaggaaaaattaaataaattaataggagccattcatgagaaggatgaacttttggatagccaagaggaattccttattaaagaaaataagaagcatgttaaagttgaaaagttaaatgcttgtaatgattcaattgtcagtcttagaaatgagaatgctagtttaattgctaagattgataaattgaatgaatcaatttctagccttagagatgaaaatgctagattaatttctaaggctaaagatttaaatgtttgcaatgattctatttccagtcttagaaatgagaatgctattttacatgctaagattgatgaattaaatgtttgcgaaccctctacatctactgttgatcatgtttccatttgcactagatgtagagatgtcaatgttgatgctataaatgatcaccttgctttaattaaacaacaaaatgatcatatagctcaattaactactaaaattaatgagcatgaaattgaaaatgaaaagtttaaatttgctagaagcatgctctataatgggagatgccctggcatcaagaatgacattggtttccaacagggaagcaatgtcaagcttaatacccctaagaaactgtctaattttgttaagggggagaagagaatgttctcctcctatgagaaaaacgaagatccccaacaagctatcacattcagggatggaaatcaagattctttagattataacttgctttcagtttctcaattatgcaaaatgggttacaactgtctttttagcgatgtaggtgttactgtctttagaaggagtgatgattcaatagcatttaagggagtgttagagggtcaggtatacttagttgattttgatagagctgaacttgacacttgcttaattgctaagactaatatgggttggctctggcatcgccgactagcccatgttgggatgaagaatcttcacaagcttctaaagggagaacacattttgggaataacaaatgttcattttgagaaagacaagttcagcttaaggatcaaaaagataagaagcgataatgggacagagtttaagaattctcaaatagaaggatttcttgaggatgaggggatcaagcatgagttctcttctccctacacacctcaacagaatggtgtagtggagagaaagaatagaactctactagacatggcaaggactatgcttgatgagtacaagacaccggaccggttttgggctgaggcgattaacaccgcctgctactccatcaaccggttatatcttcaccgaatccttaagaagacatcttatgaactcctcaccggtaaaaagtccaatgtttcatattttagagtctttggtagcaaatgttttattcttgttaaaagaggtagaaaatctaaatttactcctaaggctgtagaaggctttttactaggatatgattcaaacacaagggcatatagagtctttaacaagtccactggactagttgaagtttcttgtgacattgtgtttgatgagactaatggctcccaagtggagcaagttgatcttgatgaattatatgatgaagaggctccgtgcgtcgcactaaggaacatgtccattggggatgtgtgtcctaaggaatccgaagagcctccacaagcacaagatcaaccgtcatcttccaatcaagcatctccaccaacccaaaatgaggaacatgctcaaggtgatgaagaagaagatcaagaagatgagccacctcaagaagaggtcaatgatcaagggggagatgaagataatcaagacaaggaagatgattaa

SEQ ID NO: 4956 - DNA, 4113 bp, Zea mays
  Clone ID: TF_ZM4939.C1.o6.fg
atgctgaatattgcacaatgcactgatcgggagaaggttttatatgcttctggacgtctgacaggtcctgctgctgactggtgggattcatatactgctgcccacgatgctgctgatactatcacttgggcagagttcagtacacaattcaggaactaccatattccagctggtatgataaagatcaagaagaaggagtttctgtcgctaaagcaaggaagtatgtcagtcagcgagtaccgcgacaagtttattcagttatccagatatgcccctgaagaagttgctgaagacgagaggaagcaggagcattttattgaaggacttaatggaccactgcagtatgctctagtggcacacacatttccatcatttcagagactgttagataaggctcttgctattgaacacaagcgtgttcagctgggagatttgaagagaaaggcaatatctcaaggacaaggaagcagcagtgttcgtcctcgctacagttcaccacagagtacaccgactcgaccaggaggaccacgcccagttcagcaatcaccactgaggactccacctcctcgacaggctacccctactggcaccccgacgaagttttcaggacagagtccaggcaccacatgtttcaagtgtgggaagaatggtcattatgcaaatgtctgcccacagaggatggctactactccagttcagaacaggcagcaaacaccaggttctggcaagggatattctattgccaaggttaatcaagtcagcgttgatgctactccggatggaggggacctcgtaattggtatgttttatgttaatgcaattcctgcaaccatattatttgattctggtgctacacattcattcatgtctgctcgttatgccaacacaaatgaaataccactgctaaatatgagaaaaccaatgatagtagtcacacctaaagggcctgttgaggcgaatcaaatgacacgtagattgacattgaccattatgggtagagaatttggagctactgctataatattagagtcaagcagtatagatctgatccttggtatgtcatggctaagaaaggcaaaggccgttatagcatgtggtagaggtaccgtagaactcactactactaagggagaaaggtttcaagttaacattgcagtaacctcctcacccatgcgtgcaatgttctttatacctaaggagtttgttggtaacaacatccgggtggttagagattttccggatgtctttccagaggagttaccagggatgccacctgagagagaagttgagtttgttattgacctcttacctggaaccgcccctatttctaaacggccctataggatgtccgtagaggagttgaaggaacttaagaagcagttaactgagttacaagaggctgggtacattcgtccgagttcctcaccttggggagcaccggtcttgtttgtacagaagaaggatgaatcgcagcggatgtgtgtggattatagatctcttaatgatgttacagtgaagaacaagtatccgttgccccgtattgaggatttatttgatcagatgagaggtgcaagagtattttcgaagattgatctccgatcgggataccatcagatgaggattagaccatcagatattcccaagacggctttctcgactcgatatggattatatgagtttactgttatgtcgtttggattaaccaatgcaccagcttattttatgaacttaatgaacaaggtgtttatggagtatttggacagattcgtcgtggtattcatcgacgatattcttatctattctaagagtgatagtgatcacgaggaacatctaaggatggtgctacagaaactacgagataaccagctatatgccaagttcagcaagtgcgagttttggattgacgaggtgccatttcttggtcatattatttccaatggaggaatttcagtggatcctgctaaggttaaggagataatggagtggagagtacccactacagttactgagattcgaagtttcttgggattagcaggctattatcggagatttattgaaggattttctaagattgctaaacctatgacttcacttttggagaagggaaaagaatttaagtgggacgagaagtgtcaagacagctttgatctattgaagaagaggttgatgtcgccaccagtattggttatgccagacctacagaaaggatttgatatctattgcgatgcatgtggccaaggcttaggatgtgtgctcatgcaagaaggacatgtgattgcctatgcatctcgtcagttgcggaagcatgaactgaactaccccactcatgacttggaactagcagcagttgtgcatgcacttaagatttggagacactacattatggggactaagtgccaagtatatacggatcataagagtttgaagtatatattcactcagaaggatctcaaccttaggcaacgccgttggttggagcttattaaggattatgatttggagattcactatcacccgggcaaggcgaatttggttgcagatgccttgagtcgcaaggagcatgttcattcagctattgttgcccagctacctgatgagattgttgaggatttcaggagacttaacctggggatagttactcatactgaaggagttactattgatgtggaacctactttggagcaggagatccgcaaaggacaaattggtgatgctaaaataaaagagattaaggatctgattactgaaggccgagttccggaattcacggaagatgagcaaggcattgtatggttcaaggatagaatgtgtgttcctgatattaaaagccttcgagagattatattgaaagaggcccatgactcggattactctattcatcctggtagtactaagatgtatcaggatttgaagcggaagtattggtggtatggattgaaaagagatgtagctgcacatgtggctatgtgtgatgtatgtcaaagagttaaggctgaacatcagaggccagctggactattgcatccactgaagatacccgagtggaagtgggaagagattggtatggattttatcactggattgcctcgcacccagaaaggatatgatgctatatgggtgattgtggatagattgactaaagtggctcacttcattcctgtgaagactacttataaaggttctcagctagcagagttatatatggctcggattgtgtgtttacatggagtaccaaagaagatcgtgtctgatcgaggttcacagtttacctcaagattttggagaagctttcatgagaatatgagtacaaagttgaattttagtacggcttatcaccctcagactgatggacagactgaaaggactaatcaagtattggaagatatgttgagagcttgtgcccttcagcatggaggaagttgggataagagtctgccttatgctgagttctcatataacaatagctatcaggccagtctgaagatgtcaccttttgaagctctatatgggaggaagtgcaggactcctttgtattgggatcagactggagagagacagttctttgggcctgaattgattcaagaagcagaagaacaagtccgtataattcgagagaatttgagagtggctcaaaccaggcaaaagagttatgctgataatagaaggaggccactggaatttgaagaaggagattatgtgtacctcaaggtgtcaccactgcgtggaatgaggagattcaaagttaagggcaaattgtcccctcgctatattggaccattcttgatctttaggcgagttggggagatggcataccaactcgagttacctgctagtctatcggatgtgcataatgtgttccatgtgtctcaactgaagaaatgtctccgtgtccctgaggaacagttaccgatggaagagctcagtgttcaaggtgatttgacttacacggagtacccgatcaagattttggatactttgactcgggttacgagaaataaggtgataaagatgtgcaaagttcaatggagccaccacggtgaagatgaagcaacttgggaaagagaagaagagcttcgcgtagattttccccaccttttccctagatcttcttag

SEQ ID NO: 4957 - DNA, 1206 bp, Zea mays
  Clone ID: TF_ZmC31816_33
ttatttttccttaataaggaattcctcttggctatccaagagttcatccttctcatgaataacccctatcaattcatttagtttttccttttgttgcatgttaaagttggcaaaaagactaaggaagtcatcttcatcatcactagaactaccctcatcactagatgtagtatgcttgggggtggttctagcttgtaccttctttttcttgtcgttctttgccatgaagcatttgtggccgacgttggggaagagaagtcccttgttaacggcgatgttagcggcgtccccgtcggaggaggagttagtggagctcatgtcggagtcccattcctgacacatgtgggcatcaccgcccttcttcttgtagtacttcttttcctttctctttcccctcttgtcatcgccactgtcactatcacttgacataggatatttagcaataaaatgaccgggcttaccacacttgtagcacaccctcttggagcggggtttgtagtccttccccctcttttgcttgaggatttggcgaaagctcttaatgatgagtgtcatttcctcgttgtcgagcttggaggcatcgatggggagcctacttgatgtagactcttctttcttctcctccatcgctttgaatgcgacgggttgcacctcgggtgtggaggtgtcaccttgctccaagttgactatttgtttggagctaaacttcttgcgctcatggcgcttagaagtgacggacggagcgtcggagccggaggtggagggtgacgaagaatcggtctcgtagtagaccactttcttcattttcttcttcttgtcgccactctggtgtgacttgacgcggggaggtgattcctcccttcctttggcgtcggacgcccttgatagagccttcccgtggcttgtggtcgtttctatctccctcttggcggatcctcgcgacatcgtcggagtcccactcccggcaaacatgggcatcgccgcccttcttcttgtagtatctcttcttttccttcctctttcccttcttgtcatcgcccctgtcactatcactagataatggacatctagcaataaaatgaccgggcttaccacacttgtagcaaactttcttggagcggggcttgtagtccttccccctcctttgcttgaggatttggtggaaaattttgctgatgagcgccatcttctcattgtcgagcttgg

SEQ ID NO: 4958 - DNA, 5073 bp, Zea mays
  Clone ID: TF_ZmC951_280
ttacggccgtaaggtgagcttccttagggtcggcttggaatctcccgtgtcgaggtcgagatgcccattggttcccatgggtgtcttgatgggcttggcatccttcattccaaacttggttagaatgtcttgagtgtacttcgtttggcaaatgaaggtgccctcttggagttgcttgacttggaatcctagaaaatacttcaactcccccatcatcgacatctcgaatttttgtgtcatgatcctactaaactcttcacatgtagactcgttagtagacccaaatataatatcatcaacataaatttggcatacaaacaagtcattttcaagagttttagtaaagagtgtaggatcggccttgccgacatgctcttgggcttgtttgagcccataaagcgccttagagagcctatagacatgattaggatactcactgtcttcaaagccaggaggttgctcaacatagacctcttccttgattggtccgttgaggaaggcacttttcacgtccatttgataaagcttaaagccatggtaagtagcataggctaataatatgcgaattgactcaagcctagctacgggtgcataggtttcaccgaaatccaaaccttcgacttgggaatatcccttggccacaagtcgtgctttgttccttgtcaccacaccatgctcatcttgcttgttgcggaagacccatttggttcctacaacattttggttaggacgtgaaactaaatgccatacctcgttcctcgtgaaattgttgagctcctcttgcatcgccaccacccaatccgaatcttgaagtgcttcctctatcctgtgtggctcaatagaggaaacaaaagagtaatgttcacaaaaatgtgcaacacgagatcgagtggttacccccttatgaatatcgccgaggatggtgtcgacggggtgatctctttgtattgcttggtggactcttgggtgtggcggccttggttcttcctcgtcctccttttcttgatcatttgcatctcccccttgatcattgccgtcatcttgaggtggctcatttgcttgatcttctacttcatcaacttgagcttcatcctcattttgagttggtggagatgctagcgtggaggaggatggttgatcttgtgtagttggaggctcttcggattccttaggacacacatccccaatggacatgttccttagcgctatgcatggagcctgttcttcacttatctcatcaagatcaacttgctctacttgagagccgttagtttcatcaaacacaacgtcacatgagacttcaactagtccagtggacttgttaaagaccctatatgcccttgtgtttgagtcataaccaagtaaaaagccttctacagttttaggagcaaatttagattttctacctcttttaacaagaataaagcatttgctaccaaaaactctaaaatatgaaatgttgggctttttaccggttaggagttcatatgatgtcttcttgaggattcggtgaagatataaccggttgatggcgtagcaggcggtgttgactgcttcggcccaaaaccggtccggtgtcttgtactcatcaagcatggttcttgccatgtccaatagagttcgattctttctctccactataccattttgttgtggcgtgtagggagaggagaactcatgcttgatgccctcctcctcaaggaagccttcgatttgagagttcttgaactccgtcccgttatcgcttctaattttcttgatccttaagccgaactcattttgagcccgtctcaagaatccctttaaggtctcttgggtttgagatttttcctgcaaaaagaatacccaagtgaagcgagaataatcatccacaataacaagacaatacttactcccgccgatgcttatgtaagcaatcgggccgaatagatccatgtggagtagctcaagcggcctgtcggtcgtcatgatgttcttgtgtggatgatggactccaacctgcttccctgcctgacatgcgctacaaatcctgtctttctcaaaatgaacatttgttaatcctaaaatgtgctctccctttagaagcttatgaagattcttcatcccaacatgggctagtcggcggtgccagagccaacccatgttagtcttagcaattaagcatgtgtcaagttcagctctatcaaaatctactaagtatagctgaccctctaacacacccttaaatgctattgaatcatcacttcttctaaagacagtgacaccttgatttccatccccgaatgtgatagctcgttgaggatcttggtttttctcatatgaggagaacatccttttctcccctgtcatgtggtttgtgcacccgctgtcgagtatccaacttgagcccccggatgcataaacccaaacggttttgggtcctttggcattagacacaagaactttaggtacccaaacacaagtctttgaccccttgtgtttgcccccaacaaacttggcaacgaccttgccggatttgttagtcaaaacataggatgcatcaaaagtcttaaatgaaatgttatgttcatttgatgcattaggagttttctttctaggcaatttagcatgggttggttgcctagagctagatgtctcacccttatacatgaaagcatgattagggccagagtgagacttcctagagggaattctcctaattttgctctcgggataaccggcagggtataaaatgtaaccctcgttatcctgaggcatgggagccttgcccttaacaaagttggacaatctcttaggaggggcactaattttgacattgtctcccctttggaagccaatgccatccttaatgccagggcgtctcccattataaagcatgctacgagcaaatttaaatttctcattttctaagttgtgctcggcaattttagcatctagttttgctatatgatcattttgttgtttaattaaagccatgtgatcatgaatagcattaacatcaatatctctacatctagtacaaatagatacatgctcaacaatagatgtagagggtttgcaagattttaattctacaaccttagcatgcaacatatcatttttagttctaaggtcggaaattgcaacattgcaaacgtctagttctttagccttagtaatcaatttttcattttctactctaaggctagcaagagaaatgtttaattctttaatcctagcaagcaaatcatcattattatctctaggattgggaattgaaacattacaaacatgagaatcaaccttagcatttaaactagcattttcacttctaaggttgtcaattatctcacggcaagtgcttagctcactagataatttttcacatttttctacttctagagcataagcctttttaaccttaacatgtttcttgttttctttaattagacaatcctcttgggagtccaaaaggtcatccttttcatgaatagcactaactaattcatttaatttttctttttgagctatgttaaggttggcaaaaagggaacgcaaattattttcctcatcactagcattatcatcactagaagattcatatttagtggaggagttagatttaacctttttccgtttgccgtcctttgccatgaggcacttgtggccgacgttggggaagaggagtcccttggtgacggcgatgttggcggcgtcctcgtcgtcggaggagtcgcttgagctctcgtcggaatcccattcccgacaaacatgggcatcgccgcccttgttcttgtagtaccttttcttctcctttcttctccccttcttgtcgtcgcctcggtcactgtcactagatataggacatttagcaataaaatgaccgggcttaccacatttgtagcaaaccatcttggagcgggacttgtagtctttccccctcctttgtttgaggatttggtggaagctcttgatgacgagcgccatctcctcattgtcaagcttggaggcgtctattggttgtcgacttggtgtagactcctccttcttctcctccgttgccttgaatgcaacgggttgggcttcggatgagtcgccaagctcgttgattttcctcgagccttctatcatgcactcaaaacttacaaaatgcccgataacttcctcgggggtcattttagtatatctaggattaccacgaatcaattgaacttgagtgggattaagaaaaatgagagatcttaaaataacatttaccacttcgtggtcatcccacttcttgctcccgaggttgcgcacttggttcaccaaagtcttgagccggttgtacatgtgttgtggctcctcccctttgtgaagccggaaccgaccgagctccccctcgatcgtttcccgcttggtgatcttggtgagctcatctccttcgtgcgcggttttgagcacatcccaaatctccttagcgctcttcaacccttgtactttgttatactcctctctacttagagaggcgaggagtattgtcgttgcttgtgagttgaagtgctcgatttgggccacctcatcctcatcatagttctcatcccctaccgacggtacctgtgcaccaaactcaacaacatcccatatacttttgtggagcgagattagatgaaatcgcattaaatcgctccacctagcgtaatcttcaccatcaaaagttggtggtttgcctaatgggacggaaagtaaaggtgtatgtttggaaatgcgagggtagcgtaaggggatcttactatacttcttgcgctcttggcgcttagaagtgacggagggcgcatcggagtcggaggtcgatgttgatgaagtgtcggtctcgtagtagaccaccttcctcatcctcttgtgcttgtcgcctttccgatgcggcttgtgggaagaagatttttccttcttctctttgtggtgagaagaagatttcttctccttccctttgttggaggagctcttcttcttctccctccttttggtgcgggactcttccgatgaagtgctcttgtagcttgtagtgggcttttcgccggtctccatctccttcttggcgtaatctcccgacat

SEQ ID NO: 4959 - DNA, 4704 bp, Zea mays
  Clone ID: TF_ZM4452.C2.o1.fg
atgtcgggagatcacgccaagagggagatcgtaaccagcggtgacaagtccgcaagctcgggaagaactcattcgagggagtccggccacaagcacaaggaggaatcctcttcctccaccaagtcacaacggagaggtgacaagaagaagatgaagaaagtggtctactacgagaccgactctttgtcaccctccacctccggcttcgaatcggcgtccgtcacttctaagcgccttgagcgcaagaacatatgggatattgttgagtatggagcacaggtaccgaaggtaggagacaaggactacgattcggacaaggccgaccaaattcggcactttaactcccaagccacaactatactcctcacctccttgtgtcgagaggagtataataaggtgcaagggttaaagatgggcaaagaaatttgggacgtcctcaagacagcgcacgaaggggacgaggtgaccaagatcaccaaacaagagacgatcgagggggagctcggtcgattcatcctcaaccaaggagaggagccacaagcaatgtacagccggctcaaaaccttagtcaaccaagtgcgcaacctcaagagcaccaaatgggatgaccatgaaatggtcaaggttattcttagatcactcatatttcgtaatcctactcaagttcaattaatacgtggtgatcctagatacaagctaatgtctcccgaggaagtgataggaaagtttgtgagctttgagttgatgatcaaaggctccaaacatatcgtcaacttggagcaaggcggcacctttacacccaaggtgcaacccgtcgcattcaaggcaatagaagaagaaaagaaggaacctatgccaagtaggattcccatcgacgcctccaagcttgacaacgaggagatggcgctcatcatcaagagcttccgccaaatcctcaagcaaaggagggggaaggactacaaaccccactccaaaagggtgtgctacaagtgtggtaagctcggtcatttcattgctaaatgtcctatgtcaagtgatagtgacaggggcgacgacaagaagggaaatagaaaggaaaagaaaaggtactacaagaataagggcggtgatgcccacgtgtgtcgggaatgggactccgacatgagctccaccgacacctcctccgacgaggatgccgcaaacatcaccgtcaacaagggacttctcttccccaacgtcggccacaagtgtttcatggcaaaggacggcaagaaaaagaaggttgaactcttggatagccaagaggaattccttattaaggaaaacaaaaagcatgttaaggtgaagaatgcttatgctcaggagatagaaaaatgtgaaaacttgactaaagagcttagcatttgccatgacactatctccaaccttagaactgagaatgttagtttaattgctaaggttgaaaaatcgaatgtttgtcatgattcaattgtcaatcttaaaaatgataatgctagattaattgctaagattgataaattgaatgaatcaattgctatccttaaaactgagaatgaaaagttaatttctaaggctaaagatttaaatgtttgcaatgtttatatttccaatcttagaaatgagaatgttattttacatgctaagattgatgaattaaatgcttgcaaaccctctacatctactgttgatcatgtcactatttgtactagatgtagagacattaatgttgatgctattcatgatcacctagcttcaattaaagaacaaaatgatcacatagctcaactaacggctaaaattaatgagcatgaaattgaaaatgaaaaatttaaatttgctagaagcatgctctatagtgggagacgccctggcattaaggatggcattggtttccaacagggaggcaatatcaaacttaatgctcccaaaagattgtctaattttgttaagggcaaagctcccatggctcaggataacgagggttacattttatatcctgctggttatcctgagcataagattaggagaattcatgctaggaaacctcataatgtttcacatcatgcttttatgtataaaaatgaggcttctagctctaggcaatcaacccatgttaaattgcctaaaaagaaaactcctactgcatcaaatgaacctaatgtttcatttaagacttttgatgcttcttatgtgcttactaacaaatcaggcaaagtagttgccaaatatattgggggcaaacaaaagggctccaagacttgtgtttgggtacccaaggattatgcatccgggggctcaagttggatcattgatagtggatgcacaaaccacatgacaggggagaaaaggatgttctcctcctacgagaaaaacgaagatccccaacgagctatcacattcggggatggaaatcaagatttaggtgttactgtctttagaagaagtgatgattcagtagcatttaagggagaaaaatcacaaacccaagagaccttaaaaggattcttgagacgggctcaaaatgagttcggtttaaggatcaagaaaataagaagcaataatgggatggagttcaagaactctcaaattgaaggctttcttgaggaggagggcatcaagcatgagttctcttctccctacacaccgcaacaaaatggtgtagtggagaggaagaatagaactctattggacatggcaaggaccatgcttgatgagtacaagactctggactggttttgggctgaggcaattaacaccgcctgctactccatcaaccggctctaccttcaccgaatcctcaagaaaacatcatacgaactccttaccggtaaaaagcccaatgtttcatattttagagtctttggtagcaaatgttttattcttgttaaaagaggtagaaaatctaaatttgctcctaaggttgtagaaggctttttactaggatatgattcaaacacaagggcatatagagtcttcaacaaatccactggattagttgaggtttcttgtgacattgtgtttgatgagactaatggctcccaagtggagaacatgtccatcggggatatgtatcctaaggaatccgaagagcctccacaagcacaagatcaaccatcatcttacatgcaagcatctccaccaactcaagatgaggatcaggctcaagataatgaagatgaagatcaagaggatgagccacctcaagaggaggacaatgatcaagggggagatgaccatgacaaagacaaggaagatgatcaagaaattcagggtcaacaaccgccacacccaagagtccaccaagcaattcaaagagatcaccccgtgaactccatcctcggcaatattcataagggggtaaccactcgatctcgagtcgctcatttttgtgaacattactcttttgtgtcctctattgagccatacagggtggaggatgtagtaagagactcgaattgggtgttggcaatgcaagaggagctcaacaacttcacgaggaatgaggtatggcatttagttccacgtcctaaccaaaatgttgtaggaaccaagtgggtattccgcaacaagcaagatgagcatggtgtggtgacaaggaacaaagcccgacttgtggccaaaggatattcacaagtcgaaggtttggatttcggtgaaacctatgcacccatagctaggcttgagtcaattcacatattacttgcctatgctacttaccatggctttaagctttatcaaatggacgtgaaaagtgccttcctcaatggaccaatcaaggaagaggtctatgttgagcaacctccaggctttgaagatagtgagtaccctaaccatgtttacaaactctcaaaggcgctttatgggctcaagcaagccccaagagcatggtacaaatgccttagagatttccttatcactaatggcttcaaagtcggaaaagccaatcctactctctttactaaaactattgcaaaagatttgtttgtatgccaaatttatgttgatgatatcatatttgggtctactaacaaatcaacttgtgaagagtttagtaggatcatgattcaaaaatttgagatgtctatgatgggggagttgaagtgttttctaggatttcaagtcaagcaactccaagaagacaccttcaccagccaaacacagtacattcaagacattcttaccaagtttggaatgaaggatgccaaacccatcaagacacccatgggaacaaatgggcatctcgacctcgacacgggagggtgtaaaattgataggaagagcacatcagggacttgtcagtttctggggagatccctggtgtcttgggcttcaaagaaacaaaactcagtagctctttctaacgccgaagccgagtatattgtcgtaggtcattgttgtgcacaattactttggatgaggcaaaccctcagggactatggctacaaattgagcaaattccctctcctgtgtgacaatgagagtgcaatccgcatggcggacaatcccgttgaacacagtcacactaagcacatagccattcggtatcactttttgagggaatcaccaacaaagggtggatatcgaggtgccaaaggttcaacacaaaccaataaaaagatcaaagttggggttcaaaagaaaggagcaaaagaatttgaagagaaccctggtctggtgcaccagattgtccggtgtgccacctaa

SEQ ID NO: 4960 - DNA, 4819 bp, Zea mays
  Clone ID: TF_ZmC6115_1
tgggtacccccgggggtccccgggaaaagccccgtccaccaaaacccgcatccataaacaagaaaaagaaaagaaaacccctgttgccagcgacagaagaagaaggggccccttctccttggttgcgttgcgcctccctcctgtctgcgtgcgtgcaatcgacgcagaggcgcgggcgctcgcaccaccacaaccacgacccgatggctttcatgcgctcccgctcaaatgcatcttctggcatgggagttgctcctaacattagggagacattcgttgagcttcaaatgaagaaggcattccgatatgttatcttcaaaatcgaagagaagcaaaagcaggtggttgtggagaagacaggggctactactgaaagctatgatgattttttggcctctctcccagagaatgactgccgatatgcgctgtatgattttgattttgttactggggagaatgtgcagaaaagcaagattttcttcattgcctggtccccatcgacatcccgcatacgtgctaagatgctgtactccacgtcgaaggaccgcatcaagtacgagcttgacgggttccactacgaaatccaggcgaccgacccatcggaggtggacatcgaggttctccgggagcgggctcactgaagctggttctccttttgaagggacctgtggaggacctaaacctccaaccaataaacaaggcaaggagccgggcggccccacaccaaaacccgcatccataaacaagaaaaagaaaagaaaacccccgctgccagcgacagaagaagaaggggtcccttctccttggttgcgttgcgcctccctcctgtctgcgtgcgtgcaatcgacgcagaggcgcgggcgctcgcaccaccacgaccacgacccgatggctttcatgcgctcccgctcaaatgcatcttctggcatgggagttgctcctaacattagggagacattcgtcgagcttcaaatgaagaaggcattccgatatgttatcttcaaaatcgaagagaagcaaaagcaggtggttgtggagaagacaggggctactactgaaagctatgatgactttttggcctctctcccagagaatgactgccgatatgcgctgtatgattttgattttgttactggggagaatgtgcagaaaagcaagattttcttcattgcctggtccccatcgacatcccgcatacgtgctaagatgctgtactccacgtcgaaggaccgcatcaagtacgagcttgacgggttccactacgaaatccaggcgaccgacccatcggaggtggacatcgaggttctccgggagcgggctcactgaagctggttctccttttgaagggacctgtggagggccgtgaaccttcagccagatgcaaattcaattatcaacgatgaagctcccgccgtggtgtttgttaataagttcctgtaagcatatcatttagtcgctatgcatgacactagctgaagcgctatctaagctctattggtatgaggtttggttgccgtgttgccgagcctgtaaacgaagcaagatttgcaaacttgttatattgtggtattgatgatactggattactggctgtgggttgttcgggaaaaaaaaaaaaaaaaaaaaaaaagtgggttcaacagccaagagtagtggtattcagtgcttcaagtgtggaggtcgtggtcatgtcataaaagagtgtccaaataatcgtgtgatccttgtgactgatgatggagaatatacatcagctagtgaagaagaagctgaagcaggaaatgaagatgacattgataaatctgaagaacatacgggatgtgaatttgagcatggtactactcttgtggttacacaaatcttgagtgttcaaatgaaagaagctgaaattggacaacgacataatctttttcaaacgcgagcaaaagtgcaagacaaagtagtaaaggtgatcattgatggagggagctgccataatcttgcaagtcgtgagatggttgaaaagcttgatatcaagattggttataaggtgaaagtttcgttcaagattggagagtatgttgacacagtggagtgcgatgttgcacccatgtctgtgtgtcacatgctgctaggaagaccttggcaatatgaccgatattctcagcattgtggaagaacaaatcaatacacgctagatctgaaagggagaaagtttgtactcaagcctatgacccctcaacaaatcatggttgaacatttacaaaagaaaactgaaattagtgcagcaagtagaggaggagaagagcaaaataaattgagtgccatccacaattcggactttgaagacgtgtttccacaagaaacaccggctggactacctccaattcgagggattgagcatcaaatcgatcttattctaggggctgcacttcctaaccgtccaccatatcgaaccaatcctgaagaaactaaggaaatacaaaggcaagtgcaagaacttcttaataaaggttttgttcgtgaaagcttaagcccttgtgttgttcctgtgattttagtacctaagaaagatggatcttggaggatgtgtgttgattgtagagctataaataatattaccgttcgctatcctattccacagctagatgatatgcttgatgaattaagtggttccacattttttactaaaattgatttgagaagtggataccatcaaataagaatgaaaactggagatgaatggaagactgcatttaaaacaaaatttgggttgtatgaatggttagtgatgccctttgggttgactaatgctcctagtacttttatgagattaatgaaccatgtcttaagaactttcattggaaaatttgttgttgtctacttcgatgatattctaatttacagcaagtcttttgatgaacatgtgaaacacattcgacaagttttagatgagcgtagaaaggagaaattatttgctaatcttgagaagtgcagtttttgcacagaccatgttgtgtttcttagctttgttgtttcagcaaaaggaatagaggtggatgaatccaaggtgaaagccatcaaggattggccagctccaacgaatgtaagtcaagtaagaagttttcatggtcttgctggtttttatagaagatttgtgcgagattttagtaccatcgcttcccctttaaatgaattgacaaagaaatgtgttgaatttaaatggggaaactcacaagaagatgcttttcaagaattgaagaaacgtttgactgaagcacctgtacttattcttcctgatttcactaaaacttttgaagtagaatgtgatgctagtgggattgggataggaggagttttaatgcaacaaggaaaacctatagcatattttagtgaaaaattgggaggtgctcaattaaattattctgtgtatgacaaagaattgtatgctttggtccgagcgcttgaaacatggcagcactacttatggccaaaagagtttgttattcattccgatcatgaagctttgaagtatttgaaaggacaagccaaactgaaccgtcgccatgccaaatgggttgagtttatcgaaacatttccatacattgtgaaatataagaaaggtaaggacaatgtggtcgctgatgccttgtctcgaaggaatgtgttgttgaatcaactagaggagtcacatggaggcggtctaacaggtcattttggacaaaagaagacttatgaaatgctcagtgatcatttctattggccaaagatgaggagagacgtcatcagatttgtggagcgttgtgtcacctgtcacaaagctaaattttcaaaaatggctcattttatcccatgcaacaagagcgacaatgcttcacatgttgccaatttgtttttcagagaaatcttgaggctacatggagtgcccaagaccatcgtatctgaccgtgatgtgaagtttgtgagctatttttggaaaacaatgtgggcaaagcttgggactaaacttttgttctccacaacatgccacccccaaactgatggacaaactgaagtggtgaatcgtacattatcaatgctgctgcgaacaatggtaaagaagaacttgaaggattgggaggaatgtttgccacacgtggagtttgcttataatagggcagtacattctacaactaatttatgcaccttcgaaattgtatatgggttcaaatctattgctccgatagatttgttgccccttccattgcaggaaagaactaatatagaagcttccaagtgtgctgcctatataaaaaagatacatgagaagactaaggaagcaattgagctcaaagcagtgcgcaaggctacaagcatgaacaagcataggaagaaagtgttatttgaaccgggggacttggtttggattcacttgcgcaaggagcgttttcctgagcagcgcaaatccaaattgatgccacgaggggatggtctatttcgtgtttttgccaagatcaatgataatgcatacaagatagatcttccaccaagctatggcgtgagcaacacgttcaatgttgctgacctcttaccatatacaagtgaagacacttcagagtcgaggacgactccttttcacggggaggaggatgatacgaccacgacattaagaaacacgttacaacccccaaggcatactacatcaactcaggtcccatcgacatcccgcatccgtgctaagatgttgtactcgacctcgaaggaccgcatcaagtatgagctcgatgggttccactacgagacccaggcgaccgacccatccgaggtggacattgaggtcctgcgggagtgggctcactga

SEQ ID NO: 4961 - DNA, 3381 bp, Zea mays
  Clone ID: TF_ZM4618.C1.o5.fg
atgtccggtggggatggacctcctcccgttttttatggtgacgattttccatattggaaaatttgtatggaagcatatttagaggctatagacattggtgtctacaaaaacgccacacaaggattccccgaacctagagatcccacaaatcttgtaggtgaagagtttaattatgagaaatggaatgtgaaggccaaaaacaccctttttagaggcctttgcaaagatgtgttcaatagagttagaaatcataaaaatgctcatgatttgtggatggacatttgtgctctacatgaaggaactaggagtgagcgtgaggagagatatcatattgctatgagaaagttaaattcttttgaaatgcttgctaatgaaaattccaatgctatttactcacgtctcaatattcttatagaggaagtgaatggcttggggcttactcaaatctcacaaccggatgttgtgaggaagattcttagtgtcctcccaattgacaaatatggacacattgtcactgttctgcatcaaatggatatttcagttaccacacctacacagatattgggaaagatcaatgctcatgagatgtacatgcacatcaatgacaaggaagagtcatcttccaagataaaggatttagctctcaaagcaaatcaagaaagaaaaggaaaagctaaagtacaaattgaggaagaatcatcaagtgatgatgaccttgatgctaacattaccttgatgcctaagaagaacaagttcaagggcaagaaagaagatgacatcgatgatgagaaaaaggaaaagagattcttcaagaggaaggatgggaagcacaagaggttccataaaaagaaaaatggaaaggcatatattgttggtgactggctcactgacattgagtcatcaagtggatcttcttcaagtgaagaagagaatgatgaaaaagttgccgccatcgccggggacttctcttcaccaccaccatcgccatcatcgacttctcacctatgcctcatggctagaggtgaatggaaggtacaaaatgatattcatataactgatgatagtgatagtgatagtgatgaggaatttgcttcaccttcctatgatgaactagctgacttgcttgaagaatacaatcaaatcattaggaagtcaaaagctaaatgtgataagttgaaaaatgaaaatgaatctttgaatgccaaatatgacatagttatgaaagctaatgctaaggataaatgtgacaagttaaatgaagctaatagggagttaaaagatagactagtgaaaatcaaggaagactatactaagattaaatttgatcatgataatcttcttgttgaaaatgaacttttatcttgtaatacacatgaggctattaaccctgttgttaagattgatgtagcaacctcatgtgatgatttgagtcaaggagagcaaactagtctacatgatgaattgaccgaaaaagttgaagtcttgactttagacaaccaaaaattgaagagatacttgactgatgcaactactagaggaaaggttgccattgagaacaatgatttcaataatgagttggcagtggataatgaaaggcttaaaaatgaggtcaagaaacttaagagtgaaaatgaacatcttgcaacaagtgtgcaaaagttcaacaagggccaatacctccaaaatgaattgctcatgaacactgtcatgaaaaacaacaatagtggtattggatacaatgcttttgtgcaaaagaaagttactactcaatacaagccaaagcagactcataggcctatcaaatgctttgagtgtggaaaagaaggtcactttgcccacaactgcaaatccaaaccaccaactcccttgcctaagcactcaagaccatttgctttcaatgctcattatgttctaagaaaagttgcaaatggaaaggtgaactacaagaccggtgggagccattgggttattgacagtggatgcacacaacatatgacaggcaacccacggatgttcacctcacttgatgagaatgttgatggacaagacaaaatcacatttggggacaattcaaaagagaaagttcaaggacttggcaaggtggcaatttcaaatgatctatcaatttcaaatgttctcttggttgcacctttgagcttcaatttattatcagtgggtcaactctgtgatcttggacttcaatgtttattcactccaatagaggttattgtatcaaaaatggatgatgaatcaatggtgttcaaagggtttagatacaacaatctctacttagtggatttcacctcagaagatgcagacttaagaacttgcctcttcaccaaagcatcacttggatggctttggcataggaggcttgcacatgttgggatgagcacactcaagaaggtattaaagaaggacatggttagaggattaaaggatgttgtatttgaaaaggacaagccttgtagtgcatgtcaagctgggaagcaagttgctaacacacatcttacaaaagctttcatgccaacatcaaggccactagaactacttcatttagatttatttggacctacaaattataagtttgccaagaaagctcaaaatgaatttgattgcaagatcaagaagattagaactgataatggtaaagaatttgacaacaccaacattcatgagtactgtgatgagattgggatcaagcatgaagtatctgcaacatatacacctcaacaaaatggagttgttgaaaggaaaaacaggaccttgttcacacttgcaagaacaatgattgatgagtataacacaccggagaggttttgggccgaagctgtcaacactgcatgttttgcatcaaacaggttatttcctcaccggctacttgcgaagactccctatgaactgctaaatgggaaaaagccagacgtctccttccgggtgttcagatgcaaatgctacatctacaagaaacgccatcacctagggaagtttcaaagatgttgtgatattggttttctattgggttattcattaaagtccaaagcatatcgagtattcaatcatgccactggcgtggtagaagaaacatatgatgtggaatttgatgagactaatggctcccaaggagcacttgaaaatcttgatgatgtaggtgatgagccacttagggaagcaatgaagaacatgccaattggagctatcaaaccaaaagaagatgaagaagaggtgcaaaacattgacatgccttcttcatcaaatgtaccacaagacgatgaaaaagatgagaggcatgcaaatgaagatacatttgtctctcatgaacaagcaagggtactgtcacacccgggttttaggggcaccaagacccaggcgcgaacataa

SEQ ID NO: 4962 - DNA, 3756 bp, Zea mays
  Clone ID: TF_ZM4900.C4.o1.fg
atgtcgggagatcacgccaagaagatggtgatcggcggagagaagtccgctacaagccacgggaaggctccatcaaattataatatgtggagtgataaaatgaggcatcatctaacctcactccacactagcatttgggatgttgttgagattggagtacaggtaccatcaccgggggatgaagactatgattcggacgaggtcgcccaaattcggcacttcaactctcaagccaccactatactcctcgcctctctaagtcgagaggagtataacaaggtgcaaggattgaagagcgccaaggaaatttgggacgtgctaaagaccgcgcacgaaggagacgaggtgaccaagatcaccaagcaggagacgatcgagggggagctcggtcgcttccggcttcgccaaggggaggagccacaagatatgtacaaccggctcaaaaccttggtgaaccaagtgcgcaacctcgggagcaaaaaatgggatggccatgaaatggtcaaggttattcttagatcactcgtttttcttaaccctacgcaagttcaattaattcgtggtgatcctagatatacactaatgtctcccgaggaagtgataggaaaatttgtaagctttgagttaatgatcaaaggctcaaagaaaatcatcgagcaagacggcccctccacgcccgaagcacaaccggtcgcattcaaggcaacagaggagaagaaggaggagtctacctcaagtagactacccatcgacgcctccaagctcgacaacgaggaaatggcgctcatcatcaagagtttccgccaaatcctcaagcaaaggagggggaaggactacaagccccgctccaagaaagtgtgctacaaatgtggtaagactggtcattttattgcaaaatgtccactatctagtgacagtgacaggggcgacgacaagaaaggcaagaggagagaaaagaggaggtactacaagaagaagggcagcgatgcccatgtgtgccgcgagtgggactccgacgagagttcctccgacgaggacgccgcccacatcgccgtcaccaagggactcctcttccccaacgtcggccacaagtgcctcatggcaaaggacggcaaaagaaagaaggtaaaatcaagatccttcactaaatatgcatcctctagtgatgaagatcattttagtgatgaggaagataatttgcgtattctttttgccaaccttaacatgcaacaaaaggaaaaattaaatgaattaattagtgctattcatgagaaggatgaactcttggactcccaagaggactttctaattaaggaaaataagaagcatgtcaaggttaaggatgcttatgctctagaagtagaaaaatgtgaaaaattatctagtgagctaagcaagtgccatgatattattaccaaccttagaaataagaatgctagtttaatagctaagattgattcaaatgtttgtgataattcaatttccaatcttagagatgataatgcaaatttgcttgctaggattgaaaaattgaatgattctcttactagccttagaaatgaaaatgaaaatgaaaatttgattactaaggctaaagacttagatgtttgcaatgttaccatttctaaccttagaagtgaaaatgatatattgcatgctaagaaaatgaaaaaaattaaatttgctagaagtatactctatagtgggagacgccctggcatcaaggatggcattggcttccaaagaggagacaatgtcaaagttaatgcccctcctaaaagattgtctaattttgttaagggcaaggctcccatggctcaggataacgaaggttacattttgtaccctgtcggttatcccgaacacaagattaggagaattcactctaggaagtctcactctggccctaatcatgcttttatgtataagggtgagacatctagctctaggcaatcaacccgtgcaaaattgcctaaaaggaaaactcctattgcatcaaatgattctaacatttcatttaagacttttgatgcatcttatgttttaactaacaaatccggcaaggtttatgcattcgggggctcaagttggatcatcgacagcgggtgcacaaaccatatgacaggggagaaaaagatgttctcctcctacgagaaaaaccaagatccccaacgagctatcacattcggggatggaaatcaaggtgttactgtctttagaagaagtgatgattcaatagcatttaatggagtgttagagggtcagctatacttggaaaaatctcatacccaagagaccttaaagggattcttgagacaggctcaaaacgagttcggcttaaggatcaagaaaattagaagcgacaacgggacggagttcaagaactctcaaattgaaggcttccttgaggagaagggcatcaagcatgagttctcttctccctacacaccacaacaaaatggtgtagtggagaggaagaatagaactctattggacatggcaaggaccatgcttgatgaatacaagacttcggatcggttttgggccgaggcggtcaacaccgcctgctatgccatcaaccgagtctttggtagcaaatgttttattcttgttaaaaaaggtagaaaatctaaatttgctcctaaggttgtagaaggctttttactaggatatgactcaaacacaagggcatatagagtcttcaacaagtcctctgggcaagttgaagtttcttgtgacattgtgtttgatgagactaacgactctcaagtagagcaagttgatcttgatgagataggtgatgaagaggctccgtgcgtcgcgctaaggaacatgtccattggggatgtgtgtcctaaggaatccgaagagccaccacatgcacaagatcaaccatcttcctcaatgcaagcatctccaccaactcaagatgaggatgaggctcaagataatgaaggagaagatcaagaagttgagccacctcaagaggagagcaataatcaagggggagatgcccatgatcaagacgaggaagatgaacaagctccgagaccgccacacccaagagtccaccaagcaatccaacaagatcaccccgtgaacaccatcctcggcgatattcaaaagggggtaactactcgatctcgtgttgctcatttttgtgaacattactcttttgtttcctctattgagccacacagggtagaggaagaactacaagattcggattgggtggtggcgatgcaagaggagctcaacaacttcactaggaacgaggtatgtcatttggttccacgtcctaatcaaaatgttgtaggaaccaagtgggtcttccgcaacaagcaagacgagcatggtgtggtgacaaggaacaaagcccgacttgtggccaagggagattcacaagtcaaaggtttggattttggtgaaacctatgcacccgtagctaggctagaatcaattcgcattttacttgcctatgctacttaccatggctttaagctttaccaaatggacgtgaaaagtgccttcctcaatggaccaatcaaggaagaggtctatgttgagcaacctcccggctttgaagatagtgagtaccctaactatgtatataaactctctaaggcgctttatgggctcaagcaagccccaagagcatggtatgaatgcctaagagactttcttatcactaatggcttcaaagttggaaaggtcgatcctactttatttactaaaactcttgacaatgatttgttt

SEQ ID NO: 4963 - DNA, 1983 bp, Zea mays
  Clone ID: TF_ZM4987.C1.o15.fg
atggtggtcaacgacaaggaaaaggagtccttcctcaacgagcctagagacgacaagccaaccgactcaggctcaagtcacaagaaaagagacgggaagaagaagaggcgcatcaagaagatcatctactacgacagcgatgcctcgtcttcttcaccacacgacgacgacgatgactcctcatcaaaaaagaaaccggttaatcaaaactattcatttgattattctcgtattccgtacaattctaatgctcatttgctatcaattcctcttggaaaacctccccactttgatggagaagactattctttctggagtcataaaatgcgtagtcatttattttctctccatcctagtatctgggagattgttgaaaatggaatgcactttgatagtattaacaatgccatgtttattaatgaacaaattcataaaaatgcccaagccactgctgttttgctagcatctctgtgcagggatgaatacaataaggttagcggcttggacaatgcaaagcagatctgggacacccttaagatatctcatgagggaaacgacaccaccatgatcaccaaaatggagttggtggaaggcgagctagggagattcgccatggtcaggggtgaagagccaatacaaacctacaacaggctcaagaccctggtcaataagattagaagctatggaagcacaagatggacggatcacgacgtcgtccgactcatgctcaggtcctttacagttattgacccccatcttgtgaaccttatccgtgaaaatcccaggtacacaaagatgacgcccgaggagatactcggaaaatttgtaagcggacgcatgatggttaaggaggcaaggtatgtagatgacgccttaaatggccctctgtccgtctacgagccgcagcccgttgcgctcaaggcaactagcagcaaggaggcactaccaagcaaggtagctcaagtggaggctgccggcctcaacgaagatgagatggcgcttatcatcaagcgcttcaagaccacatttaaagaacgcaaggagtaccccaacaagaataaaacaaggggaaagcgctcctgcttcaaatgcggtaagaatggtcattttattgctcaatgtcccgataatgaaaatgaccagggacaagaaagacatgggatgaaggagaagaagaaaagctataggaaggcgaaaggcgaggctcatcttggaaaagaatgtgattccgactgctccttatccgactccgacgatgagggactggcggccttggccttcgacaagtcgtcgttcttccccaatgaacgccacactttcctcatggccaaggagaagaagagaaaagaaatgttatcctctgaattgtctgtttgccatgaatcggtctctagtttaaagagtttaaatgatgaactaaatgctaagctagaggaagttaataaatctagttcctgtgtagaacatgttgttatttgcaatagatgcaaggactttgatgttaattcttgtgatgaacaccttatttctattgctaaactaaatgatgaggtggcaagtcttaatgctcaacttaagacttgcaaaattgattttgataagttaaaatttgctagggatgcctacaccattggtagacacccctcaattaaggatggacttggttttcgaaagaaagccaagaacttaacaagccaaaggctcccattcccaacaaggagaaagggaaggcccctatggctagtagtactcaaaggaatcatgctttcatttataataggaaaattgctagtcattccaattataataggagttatgatcatgatgcttttgattcacatgctatgtttgcctctagttctacttttgttcacggtttatgcatccgagggttcaagctggattatcgacagcggatgcacaaaccatatgacaggggagaagaagatgttcacctcctacgtcaagaacaaggattcctag

SEQ ID NO: 4964 - DNA, 3589 bp, Zea mays
  Clone ID: TF_ZmC4855_1
tttctttctggacccatgaaataaactttccatgaccaagagattgttctagcataataaattttatagattaaattgatactaaatttgtctaaacagaaatacccataaacaaaatagggactaaacgtctgtcttcaatgaatatttctggtgggctatgtgctcccccatcgtagtatcaaaaacaataatctaacggccctccaccatagtgagacttgtatcatttacggacaattccctgtggacaccttcgtttccaggattgtagtcccgaagtgcaaaatctttaggttgcttcggtgttggcagtggtgttgctttgttctccagcatggacacaactgttgacatgagtggcctgcaactcggattgtcttgagcgcacaggagtcctatatggatgcatcgtgaaacttcatcgagggagcaactctccgttacagatgagtcaagaaaatcttctggtttcccatctttccacatgttccatgcaaatgttataaggttagaaaaatccatgataagatatggtgagcttatctttaatccacttacaatctccaatataagaacaccaaagctgtaggtgtcagacttaactgaaaatgcacctttcattgcatattcaggagacatgtagccatatgtccctacaactcggttagtatttgcttggagctgatcaccagagaatatcctagccatgccgaaatctgatatctttgggttcatctccttatctagcaagatgttgcttgcttttagatctcgatgaattacagttaatcttgagtcatgatggagatacataattcctctagcaaccccctggattatcttgaaccttgttggccactgaagcattgattttcttgcagaagctaataagaataatataaaacagggcatatcagcaggcacacaggacatttatttgttggacatcattaacagtatcaaaaactggaatttcaaaataccaaagaggaagtaatccaagcttttgttgggtaagtactcataaactaacagcttctcatcttcatgaatacaacaaccgagaagcttaactaggttcttgtgctgcaactttgcaattaggactacttcatttttgaactcctccttgccttggccggaacccgtgctaagtctcttgacagctacttcctttgtgccttccaacattcccttgtacactttgccaaaacctcctttcccaagcaaattagattcagagaaattatctgttgctgtgacaatgttttcaaagctaataaatgggaagtttatgttcttgtccccagcgtcatcagtagaactcaagtattctagcatccttctcttttgaactctcttcttttgccgtttgcctctgcttttacatgtccagacaagggctccaagcatgagtagcagcacacacagtataattgggagtaaaattttcagcaaactgctcttccttcgaacttttttatacatgcaccaggaggggaagcgcccctaccagaaaacgacatggtatccagagctaggttttggcgccgccgctgcccgtaggctctgtccgtcgcctgagccgcatcacgtggccggcagatccggcgttggcggacaagctcggaggtggcagatcggtggcggggaagggcagagcgcgtgtggtgatcgagggaggattcagccgctcgccttctcttcttcctttcgtcctcctcctgctgttttgctcctctgcagctagcttgcggcgctctctgcaggtgcagggaggggagaggccggagggtcgaggaggatcgtggcgcgtgctgctgccaccagtcttgtgcggcgcgggagaagagggacagcagcaggtcgacgtctcacaggaaggcttgctcccttgccctcttgagatccgccgtccaagatgtgttgccccaccgagcggcagtccagcagatgggtctgggggcggtgattacaaagagagcgggctgttgctacgactagtgaggttggaggtactgcagattaattgagagaggggaaggaagcctggttcgtcttagtgtttgcaggcagtgatgatgatgagttcagaggagactgaagcaaaaaggttagaggaagaggctgaaaaaaggacaatgattcatggtgacaagaaagaagaggatccactaatcacaaaaagtgagatgagaaatgagatgaggagtatggttcaggaactcatgggactaggtatgattggccccaaggctttgcctatctcatctgaattaaaattagaactcgttccaaatgatgtgaagctagaaggaagcaagaattatttgagttggtctaggagagtgcgagtgctcttagaaggtaaatgagtggagcactatttagaagagggctgtgttgaacctgttgataggctcagccctgaatagagggtttggtataccaccaactcagttattgtgacgtggttgttagcatccatgtcttcgtctgtaagtaagatggtcgaagccatgcgtgctgttgcacaaatttggaagaccttgaacaatatgtattcgagaaaggagaatgtgatgatgatgatggagatccgaagtaaggcagatgcagtgaaacatacagggagaccagtggaacaatatgctagtgaaattcagtacttgtggagagaactagatcactacgctcctctgcaaatggtttgccctcaggatgcacaggttgtccacaagtgggtagaggacaggagagtaactcactttctaaagaatttggacccggagtttgagagcaggagagatgccttttgtcaccaagaaagtcttcctaccatggatgaagctgtgtcagcaatgattaatgaggaaagcaggctccgggtaatgacatctaatgatcctgcgaaatcagcctacaccgcaaatgatgatagagactgctataattgtggtgagaagggacacttgagctacaattgtcctcatcctcgtggcagtggtgaacgaggtggtggaactcgtggagccacttgtagtacctatggaagaggtcgtggaggttatggaagggggcgtggtggccgtgccaggggcagaggtcgtggtggccctcatgtcaatgtagcggttactgaagacaccccctcaatcaccctgactagggaacaagctaaacggtgggaagaatggcataagggcaaagaatccgagtgtccaaccagcactcctcttggttctgtggcaactacatccacccagcacttcggagaagagaactgggaagaggattgggactgaagtcaagcgtaatgggctatggttcatcaatcaagaggagcaagctttgtcagcaacaacagaaggaaataaaagggaaatcatgctgctacatcatcgattaggacatgtatcttttgagagcttgagtaaattgtaccctgattcctttaagggaatggagaaaggaactcttgtgtgtgatgcatgtgagcttgccaagcataccagatctacttaccctagtgttggacttcgtagcagtgattcatttatgttaatacattctgatgtttggggtt

SEQ ID NO: 4965 - DNA, 556 bp, Zea mays
  unsure (1)..(556): unsure at all n locations
  Clone ID: TF_6101958
ctctggcagctacatccaacaccactcggtgttgagtcatccagtcagctccgagaatgatgtccataccttctaatcccaaaatcaggagtgtggttttgaagattttacttcccagtgagataggcacatttcgatttaattggttcgttgcaatttttcccccaggcgttgctatcagaaaagacccttttgcatgatagaaaggcagntggcatttaatgctgaacttctagctaatgaagctatgagatgcactagaatcaaatagaattaatgcaggttgattaaaaactggaaagataccagtcatgatgggggctccttcaggtaactcctctacagtagtgaaattgagcttcccttgcctgacttgcaccttctgcttccttcctctatcttgatttggtgctggcatctgcctctactgattccttgggcaattcttggcataatgacccacatttccacaagtgaagcacttgttcccatttccctggtggaactattgctgctgctgaggttgattgttccttgaagcgggagctggaaagcg

SEQ ID NO: 4966 - DNA, 2063 bp, Zea mays
  Clone ID: TF_ZmC14166_340
atgtcgggaggtcacgccaagaaggagatggtgaccggcgagaagcccgccacaagccatgggaaggctccattcggggagtccggcaacaaggtgaagggatccccttcacacgacaagtcgcgtcagagcggtgaaaagaaaaagaagatgaagaaggtagtctactacaagaccgactcttcatcgccatccacctctggctccgacacgccgtccatcacttataagcgccatgagcgcaagaagtttagtaagatccccttacgctatcctcacatttcaaaacacacccctttactttccgtcccactaggcaaaccactgatttttgacggtgaagattattgtatgtggagtgataaaatgaggcaccatctaacctcactccacgctagcatttgggacattgttgagtttggtgcacatgaaccatccgtgggggatgaaggctatgactcggacgaagtagcccaaatccagcacttcaactcacaagccaccactatactcctcgcctctctaagtcgagaggagtataacaaggtgcaagggttgaagagcaccaaagagatttgggatgtactcaagaccgcgcacgaaggagatgaggtgaccaagatcatcaagagggaaatgattgaggcggagctcggtcacttcatgcttcaccaaggggaggatccacaagccatgtacaaccgactcaagaccttggtgaaccaagtgcgcaacctcgggagcactaaatgggatgaccatgaaatggtcaaggttattcttaggacactcgtatttcttaatcctactcaagttcaattaaatcgtgatccaagatacaaactaatgtctcccgaggaagtaataggaaaatttgtgagctttgagttgatgatcaaatgctccaagaaaatcatcgagcaaggcgcctcctccacacccgatgtgcaacccgtggcatttaaggcaactgaggagaataaagaagactctacacctagtagggtccccatcgacgcctccaagctcgacaacgaggaaatgacgctcatcatcaagagctttcgccaaatccttaagcaaaggagggggaaggactacaagccccgctccaagaaagtttgctacaactgtggtaagtccggtcattttattgcaaaatgtccattgtctagtgatagtgacaggggcgacaacaagaatggaagagaaaagaagaggtactacaagaagaagggcggcgatgcccatgtttgccaggagtgggactccgacgagagctccaccgactcctcctccgacaaggatgccgccaacatcgccgtcaccaaaggcttcctcttccccaacgtcggccacaagtgtctcatggctaaggacggcaagaagaagaaggtacattctagagatacccccaaatacactacatctgatgatgagcgtagctctaatgataataatgatgatttaatttctctctttgccaaccttaccatggaccaaaagaaaaaattaaatgaattaatagaaaccattaacgagaaggatgatctcttggaatgccaagaggacttgctcgttaaggaaaataaaaaatttgttaagttgaaaaatgcttatgctctagaagtagaaaagtgtgaaaacttatctaaagagcttagcatttgcaatgattcaatttcctgtcttatagatgagaatgctagtttaaatgctaagatagaagaattgaatgtttgcaaaccctttccatctattgttgaacatgtcactatttgtactagatgtagagatattaatgttgtagctattgatgatcaccttgccatgattaaagaacaaaatgatcacatagctaaattaaatgctaaaattgtcgagcatggactagaaaatgaaaatttcaaatttgctcaaagcatgctttataatgggagacaccctggcattaaggatggtattggtttccaacaagggagccaaagcaacaccaaacttaatgccccaaagaacaaattgtctaattttgttaagggtaaggctcccatggttcaggatag

SEQ ID NO: 4967 - DNA, 4031 bp, Zea mays
  Clone ID: TF_ZmC74_151
tgcagtatgcacaagccttcaacgacttatgccagtatgcagggtatcatgctgattctgatgagaagaagagggatcgcttccgcaggggtctcaataccaagctgcgggaacgactcaacactgtccgggctgatagcttcaatgagttggtcaacatggccatctcccaggaggattgcattgttgctcactgggcagagaagaagagaaaggcaccaatggcagcaccatccgctcaggctcagaggttccggactgtttctcacaatcagagcaggggttttcagcagcaggcaggcagatgggtgatcaggccacctcagcagcagcagcagctggcacccaaccgctatccagctcccgccccaaggaacaatcagcctccgcagcagcagcagttccgccagggcaacgggaacaagtgtttcacttgtggcaatgtgggccactatgccaagaattgtcccaggaaccagcagagacagatgccagcaccgaatcaagacaagggaagaaagcagaaggtgcaagtcaggcaagggaagctcaacttcactgctctagaggaagtgccagaaggagctcctatcatgaccggtaccttttcagtttataatcaacctgctttaattctgtttgattctggtgcatctcatagtttcattagccaaaagttcagtgctaattgcaaactgccattctctcactcaaaagggtcattcatgatagtcacacctgggggtaaaattgcaactaaccaattaaaccaaagtgtgcctattcaactgggaagccacattgtcaaaaccactcttcttgtgttgggattggaaaatgtggacattattctaggagcaaattggatgaccttgcaccaagttgtgcttgatgtagccagtcgtaccgtggaagttaattctcctttctgcgggaatttcactttgattctgcctagtcagggttcttctcagtcatgtgctttctctatgacggagttacccctgaagaagatcccagtggtctgtgagtatgcagatgtctttcctgatgaattgccagggatgccaccggaccgggatattgaattcgccatcgagttgcaaccgggaacggccccaatttccaagaggccctaccgaatgccacccgctgagttggcagagttgaaaaagcagttgcaagagttgctggataagggatttattcgcccaagcacttcgccttggggatgtccagcgctatttgtgaagaagaaggatgaaagcttgaggctgtgtatagattaccaccctcttaatgcggtaactatcaagaacaagtatcctttgcctcgtattgacgttctctttgaccagttggtcggggccaaggtgttttccaagatagaccttcgctctggctaccatcagatcaaaatacgagcaagtgatattccgaagacggcattctcaaccagatatgggctgtatgaattcttggtgatgtcattcgggctgacaaatgcaccagcatacttcatgtatctgatgaattctgttttcatgccggaattggacaagttcgtagtggttttcatcgatgatattctggtgtactcgaagaacgaagaagaacatgccgggcatttgcatgtagtgcttcaacgtctgcgagagcaccacctttatgccaagctatccaagtgtgatttttggctaaaggaaatcaaattcttgggtcacactatctctcaggagggaatagttgttgatcctgataaagtgcaagaggtaatgaactggaggccaccaacgtctgttcgccagattcggagttttctgggattggccggttattaccgaagatttattccggacttctctcggattgcgaagcctattactgagttgctgaagaaagaagtcaagtttgcgtggagtcagaagtgcgaagatgccttccatgcattgaggcagcatctgaccaccgcaccagttttggcgcaacccgacagcagcaagccttttgatgtgtattgcgatgcctctggcaccgggctaggttgtgtcttgatgcaagacaaccgagtcattgcttatgcctcaagagcactcaggcctcatgagcaaaattatcctactcatgaccttgagttagcagcagtggctgatcttaacatgaggcagagaagatggctagagctgatcaaggattatgacctggaggtacattatcacccagggaaagctaatgtggtagctgatgccttgagtcggaagttgcaatgcaactgcattctgatggattctcgcgttaacaccttgtgtgatgagttgagcaagatgcaaattgaaatgattccttctggttctttgtctcacatttctgttgagccagctttgcaagaccagattatcatggcccagctcagtgacaagggagtgcagattatcaagaagaatctccatcagaaggttgagaagtatgattgtttccgccaggatgagaagggtgtgttatggttcaaaagcagattggtaattcctaaggaccgggatcttaagaagaaaattttggatgaggctcatctctccaaattctctatgcatccgggaagcaccaagatgtaccatgatctgaagcttttgtactggtggaccagaatgaagagggagatagcccagtatgtatcagagtgtgacacctgtcagagggttaaggcaagccacttgaagtccgctggagctttgcgaccactgtccgtaccttcgtggaagtgggacgatatcagcatggatttcattgtgggtctgcccaacacctctcgtcatcatgatttaatttgggttattgtggaccgattgacgaaggtggcacattttcttcctatgcacaccactgataaggctcagaagtatgcagaattgtatatcgaccggatcgtgtgtttgcatggattacctcggaccattgtttctgaccgaggagctcaatttgttgccagattttgggaacaattgcaagagtctttgggaaccaagctaatcaggagttcagcttaccacccacagactaatggtcagacggaaagggtaaaccagattctggaagatatgctgagagcttgtgcgatcgattgtggcaagaactgggataagcacctctccttggcagagtttgcttataacaatagttatcagtccagcctaaagatggcaccttttgaagctctctatgggagaaggtgcaggacaccactcaattggtctcagcctggtgaaagagaagtttttggacctgatttggtgactgaagccgaaaggaaggtcaagctgatcaggaagaatctagaagctgctcaggccaggcagaagagctatcatgacaaaagaaggaaacctctccagttcgaggtgggaagttttgtatacctcaaggtatcacccaccaagggagtgcagaggtttggaatcaaaggcaagctagcccctcgttacattggaccttatgagatcgttgaagcatgtggacccgtggcatacaagctgaagttaccttcaaagatgtctgccattcacagcgtattccatgtatctcagctaaagaagtgtgttcgattgccgactgagattctagcagagccagaattggagatagagccagatctctcgtaccaagagtacccctccaagattctggattgcaaggaaagatcaactcgggctaaatcgatcaagatgttcaaggtccagtggagtaatcactcagaggaggaagctacttgggaaaccgaggaattcttaagatccaacttccccgattgcctacctaaggaagctgtggtagtagaaagcacctatttggctagaaaccttaagaaaaccataggaaaagaattaaaagattgtaatcttgccgacggagagtacgtgctcatccccgagcaaggacctgtccaagaggaggaccaggagcaggcttcagaggctgctattgaggatctccccgcagccccagcagttgaaggcaagccccggttctatgcataa

SEQ ID NO: 4968 - DNA, 5418 bp, Zea mays
  Clone ID: TF_ZmC74_196
atgaattcacctacccccgccagtggaggagactctcgtttcagttctgacttcctttctcgcgatggctttccttccatcttgtgggaagtgcttaactccgccggttaccctacgccccctatgtacacggtgcagttgtatgaggagcatcgggtacctcgttgtcgggtctggctaactttggaggctcatccccttcagccgggttggcgttctcttgactctgagacgattggactcaggacggacgacaccgttgaggcagcagccatgaagactctgacgactttctgtggctaccatcccctggagatggtgatgcaccccttgggactcttccctactgaaaagaaggatgatcccatgtggtgtaaccgcgtgagccatgtgaaggatgtatgggcaatgtatcctgacttggttgggagggtcactgttcagtgcatgagtgcgctgtaccgccttcaggcccttcagagcgatgctatgacacttcttgctaacactgctcaggctgccaagctcactctcgatagtcgggaagattttgtggtcgacctatccacagagttggtggagaaggatctgcaggtggaaaggctgagccagcgtattaccaccctggagcagcaagtggagatccgagataacactattgatgtcttggagaaccagctccacgacgtgcagagggaactcgaggaagccaatgaccacttggacatgcaccacctggagatggaggccaatgaagcaggaagcgagggagaagaggctcccgaggagctaggaccagcccctggtgccaatgggactacctccgcgatgcctccttcacccatggcagcgaggcagcgtcgcgggcagaatgagcaagctcccccgccacctcctccagctcccacagtgcaggagctgatggcccagcagaatgagattctgcgacagctcttgcagcgccagccccaccaacagcatcatggtggaggccagcatcagcgacctccggctatggcaacataccaggagtttctgagcacgcagccgcccttgttcaccaaggcagaggatccgttggacgccgacgtgtggcttcgcgtcgtcgagtccaagtttcccctcctcacgggagactgccctgatgaggccaaggctcgcttcgccgcacagcagcttcgcggcccagctcggacttggtgggaccacttccgtgctatgctccccgctgatcatgaagtatcttgggaggaattcaagaccgccttcagaggacaccacattccagctggcattcttgatcggaagttgaatgaattcctggccctcaatcaaggaacccgcacggtactgcagtatgcgcaagccttcaacgacttatgccagtatgcagggtatcatgctgattctgatgaaaagaagagggatcgcttccgcaggggtctcaataccaagctgcgggaacgactcaacactgtccgggccaatagcttcaatgagttggtcaacatggccatctctcaggaggattgcattgttgctcaccgggtagagaagaagaggaaggcaccaatggcagcaccatccgctcaggctcagaggttccggattgtttctcacaatcagagcaggggttttcagcagcaggcaggcagatgggtgatcaggccacctcagcagcagcagcagccggcacccaaccgctatccagctcccgccccaaggaacaatcagcctctgcagcagcagcagttccgccagggcaatgggaacaagtgtttcacttgtggcaatgtgggccactatgccaagaattgtcccaggaaccagcagaggcagatgccagcaccaaatcaagacaagggaagaaagcagaaggtgcaagtcaggcaagggaagctcaacttcactgctctagaggaagtgccagaaggagctcctatcatgaccggtaccttttcagtttataatcaacctgctttaattctgtttgattctggtgcatctcatagtttcattagccaaaagttcagtgctaattgcaaactgccattctctcactcaaaagggtcattcatgatagtcacacctgggggtaaaattgcaactaaccaattaaaccaaagtgtgcctattcaactgggaagccacattgtcaaaaccactcttcttgtgttgggattggaaaatgtggacattattctaggagcaaattggatgaccttgcaccaagttgtgcttgatgtagccagtcgtaccgtggaagttaattctcctttctgcgggaatttcactttgattctgcctagtcagggttcttctcagtcatgtgctttctctatgacggagttacccctgaagaagatcccagtggtctgtgagtatgcagatgtctttcctgatgaattgccaggaatgccaccggaccgggatattgaattcgccatcgagttgcaaccgggaacggccccaatttctaagaggccctaccgaatgccacccgctgagttggcagagttgaaaaagcagttgcaagagttgctggataagggatttattcgcccaagcacttcgccttggggatgtccagcgctatttgtgaagaagaaggatgaaagcttgaggctgtgtatagattaccgccctcttaatgcggtaactatcaagaacaagtatcctttgcctcgtattgacgttctctttgaccagttggtcggggccaaggtgttttccaagatagaccttcgctctggctaccatcagatcaaaatacgagcaagtgatattccgaagacggcattctcaaccagatatgggctgtatgaatttttggtgatgtcattcgggctgacaaatgcaccagcatacttcatgtatctgatgaattctgttttcatgctagaattggacaagttcgtagtggttttcatcgatgatattctggtgtactcgaagaacgaagaagaacatgccgggcatttgcatgtagtgcttcaacgtctgcgagagcaccacctttatgccaagctatccaagtgtgatttttggctaaaggaaatcaaattcttgggtcacactatctctcaggatggaatagctgttgatcctgataaagtgcaagaggtgatgaaatggaggccaccaacgactgttcgccagattcggagttttctgggattggccggttattaccgaagatttattccggacttctctcggattgcgaagcctattactgagttgctgaagaaagaagtcaagtttgtgtggagtcagaagtgcgaagatgccttccatgcattgaggcagcatctgaccaccgcaccagttttggcgcaacccgacagcagcaagccttttgatgtgtattgcgatgcctctggcaccgggctaggttgtgtcttgatgcaagacaaccgagtcattgcttatgcctcaagagcactcaggcctcatgagcaaaattatcccactcatgaccttgagttagcagcagtggttcatgcattgaagatgtggaggcactacctgatgggaacccactgcaacatcttcactgatcataagagccttaagtacatttttactcaggctgatctcaacatgaggcagagaagatggctagagctgatcaaggattatgacctggaggtacattatcacccagggaaagctaatgtggtagctgatgccttgagtcggaagttgcaatgcaactgtattctgatggattctcgtgttaacaccttgtgtgatgagttgagcaagatgcaaattgaagtgattccttctggttctttgtctcacatttctgttgagccagctttgcaagaccagattatcatggcccagctcagtgacaagggagtgcagattatcaagaagaatctccatcagaaggttgaaaagtatgattgtttccgccaggatgagaaaggtgtgttatggttcaaaagcagattggtaattcctaaggaccgggatctcaagaagaaaattttggatgaggctcatctctccaaattctctatgcatccgggaagcaccaagatgtaccatgatctgaagcttttgtactggtggaccagaatgaagagggagatagcccagtatgtatcagagtgtgacacctgtcagagggttaaggcaagccacttgaagtccgctggagctttgcgaccactgtccgtaccttcgtggaagtgggacgatatcagcatggatttcattgtgggtctgcccaacacctctcgtcatcatgattcaatttgggttattgtggaccgattaacgaaagtggcacattttcttcctgtgcacaccactgataaggctcagaagtatgcagaattgtatatcgaccggatcgtgtgtttgcatggattacctcggaccattgtttctgaccgaggagcccaatttgttgccagattttgggaacaattgcaagagtctttgggaaccaagctaatcaggagttcagcttaccacccacagactgatggtcagacggaaagggtaaaccagattctggaagatatgctgagagcttgtgcgatcgattgtggcaagaactgggataagcacctctccttggcagagtttgcttataacaatagttatcagtccagcctaaagatggcaccttttgaagctctctatgggagaaggtgcaggacaccactcaattggtctcagcctggtgaaagagaagtttttggacctgatttggtgactgaagccgaaaggaaggtcaagctgatcaggaagaatctagaagctgctcaggccaggcagaagagctatcatgacagaagaaggaaacctctccagttcgaggtgggaagttttgtatacctcaaggtatcacccaccaagggagtgcagaggtttggaatcaaaggcaagctagcccctcgttacattggaccttatgagatcattgaagcatgtggacccgtggcatacaagctgaagttaccttcaaagatgtctgccattcacagcgtattccatgtatctcagctaaagaagtgtgttcgattgccgactgagattctagcagagccagaattggagatagagccagatctctcgtaccaagagtacccctccaagattctggattgcaaggaaagatcaactcgggctaaatcgatcaagatgttcaaggtccagtggagtaatcactcagaggaggaagctacttgggaaaccgaggaattcttaagatccaacttccccgattgcctacctaaggaagctgaagatggcattgggacgcgagccctagacacgacaaaacttgggatttgcctcgggtttgggcagggagacagaccagatttcctggctccatatctcctcaccggccagccaccgttccttagctccggcaagcgtatttccgcccgccat

SEQ ID NO: 4969 - DNA, 4347 bp, Zea mays
  Clone ID: TF_ZmC951_333
tcaatcaaagttccgagaatcaagaatgtttagctcattcctaagtttcgtaaaggttttctcatctaatggcttgacaaagatatcggcgagttgttctttggtgctaacataagcaatctcgatatcccccttttgttggtgatctctcaaaaagtgataccgaatggctatgtgcttagtgcggctgtgttcaacgagattatccaccatgcagattgcactctcattatcacataagagagggactttgcttaatttgtagccatagtcccgaagggtttgcctcatccaaagtaattgcgcgcaataatggcctgcggcaatatactcggctttgacagtagaaagagctactgagttttgtttctttgaagcccaagacaccagggatcttcccaacaactgacaagtccctgatgtgctcttcctatcaattttacaccctgcccaatcaacatcggaatatcctattaaatcaaaggtggatcccttggggtaccaaagaccaaacttaggtgtatgaactaaatatctcaagattcttttcacggccctaaggtgaacttccttaggatcgacttgaaatcttgcacacatgcatacagaaagcataatatccggttgagatgcacataaatagagtaaagatcctatcatcgaccggtataccttttgatctatggatttacctcccgtgtcgaggtcgagatgcacattggttcccatgggtgtcttgatgggtttggcatccttcattccaaacttggtgagtatgtcttgaatatacttggtttggctgatgaaggtgccctcttggagttgctttacttgaaatcctaggaaatactttaactcccccatcatagacatctcgaatttttgaatcatgatcctactaaactcttcacatgtagatttgttagtagacccaaatatgatatcatcaacataaatttggcatacaaacaaatcatttgcaatggttttagtaaagagtgtaggatcagcttttccaactttgaaaccattagtgataagaaaatctcttaggcattcataccatgctcttggggcttgcttgagcccgtaaagcgccttagagagtttatacacgtggttagggtactcactatcttcaaagccgggaggttgctcaacatagacctcttccttgattggtccattgaggaaagcactcttcacgtccatttgataaagctcattcctcgtgaagttgttgagttcctcttgcattgccaatacccaatccgaatctcttaatgtgtcttccaccctgtatggctcaatagaagacacaaaagagtaatgttcacaaaaatgagcgacacgagatcgagtggttacccccttatgaatatcgccgaggatggagttcacggggtgatctcgttgtatcgcttggtggactcttgggtgacgcggtctttgaccctgtacttcttgtccatcttccttgtcttgatcatcattatctcccccttgatcattgtcctccttttgaggtggctcatcttcttgatcttcattttcatcatcttgagcttgatcctcatcttgggttggtggagatgcttgctctacttgagagccattagtctcatcaaacacaatgtcacaagaaacctcaactaatccagtggatttgttgaagactctatatgcccttgtgtttgagtcatagccaagtaaaaagccttctacagccttatgagcaaatttaaattttctacctcttttaacaagaataaaacatttgctaccaaagactcggtccggcgtcttgtactcatcaagcatggtcctcaccatgtcaagtagagttctattcttcgtctccactacaccattttgttgaggtgtgtagggagaagagaactcatgcttgatgccctcctcctcaagaaagccttctatttgagagttcttgaactccgtcccattgtcgcttcttatctttttgattctcaatccgaactcattttgagctcgtctcaagaatccctttaaagtctcttgggtttgtgatttttccaaaccttgatttccatccccgaatgtgatagctctttgggcatcttcgtttttctcgtaggaggagaacattcttttcgcccctgtcatatggtttgtgcacccgctatcaattatccaacttgagcccttggattcataaaccttgggtacccaaacacaagtcttgcagcccttgtgtttgtccccaacatatttggcaactattttgcctgatttgttagttaaaacataagaagcatcaaaagtcttaaatgaaatgttatgatcatttgatgcaacaagagatttctttttaggcattttaacatgggtagaatgcctagagctagaagcttcactcttatacataaaagcatgatgggaaatagagtgagtcttcttagcatgaattctcctaatcttgtgctcaggataaccagcaggatataaaatgttaccctcgttatcctgagccatgggatccttgcccttaacaaaattagacaatattttagggggattaagcttgacattgtctccctgttggaagccaatgccatcattaatgccagggcgtcttccattatagagcatgctcctagcaaatttaaatttttcattttctatttcatgctcattgattttactagttagttgtgttatgtgatcattttgttgtttaattaaagctaggtgatcatagatagcatcaacattaatgtctctacatctcatgcaaatggaaacatgatcgacagtggatgtagagggtttgcaagcatttaattcatcaatcttagcatgtaacatggcattctcatttctaagattggaaatagaaacattgcaaacatttaaatctttagccttagaaattagtttatcattctcaatcttaaggctagaaattgattcattcaatttgtcaatcttagcaatcaaactagcattatcatttttaaggttgacaagagaatcatcacaaacatttaatttctcaaccttagcaattaatttggcattttcaattctaaggttggagatagtgtcatggcaaatgctaagctcactaattaatttttcacatttctctaattcctgagcataagcattttttaccttaacaagctttttgttttccttaataaggaattcctcttggctatccaagagttcatccttctcatgaatagcacctatcaattcattcaatttttccttttgttgcatgtttaggttggcaaaaagagcaagtaaatcatcctcatcttcactagagctaccctcatcactagatgttgtatatttagtggaggctctagattttaccttcttctttttgccgtcctttgccatgaggcacttgtggccgacgttggggaagaggaggcctttggtgacggcgatgttggcggcgtcctcgttggatgaggagtcggtggtgctttcgtccgaatcccattcccgacacacgtgggcatcgccgcccttcttcttgtagtacttcttcttttccttcctccttaccttcttgtcatcgcccctgtcactggcactagaaataggacattttgctataaagtgaccggtcttaccacacttgtaacacaccttcttggaacggggtttgtagtctctccccttcctttgcttgaggatttggcaaaagctcttgatgatgagcgccatttcctcgttgtcgagcttggaggcatcgatggggagcctacttgaggtagactcttctttcttctcctctgtcactttaaatgcgacgggttgcacctcgggtgtggaggtgccgccttgctcgacaatttgtttggagcctttgatcatcaactcaaagctcacaaactttcctataacctcctcgggacacattagcttatatctaggatcaccacgaattaattgaacttgtgtaggattacaaaaaacaagtgatcttagaatagccttgaccatttcatggtcatcccatttggtgctcctgaggttgcgcacttggttgaccaaggtctttatccggttgtacatggcttgtggctcctctctaaacttcttgcgctcatggcgcttagaagtgacggacggagtgtcggagccggaggtagaaggcgacgaggaatcagtctcatagtagaccacctttttcatcttctttttcttatcgccgctccgatgtgacttggcatgtgaaggggatcccttcatcttgttgccggactcccccgatggagccttcctgtggcttgtagacttgtcaccgccggtcatgatctccttcttggcgtgttctcccgacat

SEQ ID NO: 4970 - DNA, 666 bp, Zea mays
  Clone ID: TF_ZM3970.C1.o1.fg
atgtcgggaggtcacgccaagaaggagatggtgaccggcgagaagcccgccacaagccatgggaaggctccattcggggagtccggcaacaaggtgaagggatccccttcacacgacaagtcgcgtcagagcggtgaaaagaaaaagaagatgaagaagaaaatcatcgagcaaggcgcctcctccacacccgatgtgcaacccgtggcatttaaggcaactgaggagaataaagaagactctacacctagtagggtccccatcgacgcctccaagctcgacaacgaggaaatgacgctcatcatcaagagctttcgccaaatccttaagcaaaggagggggaaggactacaagccccgctccaagaaagtttgctacaactgtggtaagtccggtcattttattgcaaaatgtccattgtctagtgatagtgacaggggcgacaacaagaatggaagagaaaagaagaggtactacaagaagaagggcggcgatgcccatgtttgccaggagtgggactccgacgagagctccaccgactcctcctccgacaaggatgccgccaacatcgccgtcaccaaaggcttcctcttccccaacgtcggccacaagtgcctcatggcaaaggacggcaagaagaagaaggttgtcggggaccataattag

SEQ ID NO: 4971 - DNA, 2502 bp, Zea mays
  Clone ID: TF_ZM4272.C5.o5.fg
atgaagactctgacgactttctgtggctaccatcccctggagatggtgatgcaccccttgggactcttccctgctgagaagaaagatgaccccatgtggtgtaactgcctcactctcgacagtcgagaagattttgtggtcgatttatcctccgagttggtggagaaggatctgcaggtggaaaagctgagccagcgcattaccaccttggagcagcaggtggaggtccgagacaacactattgatgtcttggagaaccagctctacgatgtgcagagggaactcgaagaagcaaatgaccacctggacatgcaccacttggagatggaggccaatgaagccggaagagagggagaagaggctcccgaggagctaggaccaacccctggtgccaatgggactacctccgcgatgcctccttcacccctcttgcagcgccagccccaccctcagcagcatggtggaggccagcatcagcgacctccggcagtggcaacctaccaggagttcctgagtacgcagccacccttgttcaccaaggtagatgatccgttggacgccgacgtgtggctccgcgtcgttgagtccaagtttcccctcctcacgggagactgccctgatgaagccaagtctcgcttcgccgcacagcagcttcgcggccctgctcggacttggtgggaccactttcgtgctatgctccccgctgatcgtgaagtgtcttgggaggaattcaagactacttttagaggacaccacatcccagctggcatccttgatcgcaagctgaatgagtttctggcgcttaatcaaggaacccgtacgtatgcagggtaccatgctgattctgatgagaagaagagagaccgctttcgcaggggtcttaacaccaagctacgggaacgactcaacactgtccgggctgatagcttcaatgagttggttaacctggccatctcccaggaggattgcattgtagctcaccggacagagaagaagaggaaggcaccaatggcagcaccatccgctcaggcccagaggttcaggattgtttctcacaatcagagcaggggtttccagcagcagacaggaagatgggtgatcaggccacctcagcagcagcagccgacacccaaccgctttctagctcccgctccaaggaacaatcagcctccgcagcagcagcagttccgccagggcaatgggaacaagtgtttcacttgtggcaatgtgggccactatgccaagaattgtcccaggaaccagcagaggcagatgtcagcaccaagtcaagacaagggaagaaagcagaaggtacaagtcaggcaagggaagctcaacttcactactctagaggaagtacctgagggagctcctatcatgaccggtatcttttcagtttataatcaacctgctttaattatgtttgattctggtgcatctcatagtttcattagccaaaagttcagtgctaaatgtgaactgccattctctcactcaaaagggtcatttatgatagtcacacctgggggtaaaatttcaactaatcaattaaaccaaagtgtgcctattcaactgggaagccacattgtcaaaaccacccttcttgttttgggtttggaaaatgtggacattattctgggagctaattggatgaccttgcaccaagttgtgcttgatgtagccagccttaccgtggaaatcaattctccgttctgtgggaacttcaccttaattctgctcagtcaaggttctactcagtcatgtgctttctctatgatagagttacctctgaagaaaaccccagtggtctgtgagtatgcagatgtcttccgtgatgaattgccaggaatgccaccagaccgggatattgaatttgccatggagttgcaaccgggaacgacaccaatttccaagaggccctaccgaatgccacccgttgagttggcagaattgaagaagcaattgcaggagttgctggataagggatttattcgcccaagtacttcaccttggggatgtccagcactgtttgtgaagaagaaggatgaaagcttgaggctgtgtatagattaccgccctcttaatgcggtaactatcaagaacaagtatcctttgcctcgtattgatgttctttttgaccagttggtcggggccaaggtgttttccaagatagaccttcgctccggctatcatcagatcaagatacgagcaagcgatattccgaagacgacattctcaaccagatatgggctatatgaattcttggtgatgtcattcgggctgacaaatgcaccaacatatttcatgtatttgatgaattctgttttcatgcctgaattggacaaattcatagtggtgttcatcgatgatatcttggtgtactctaagaacgaagaagaacatgtcgggcatttgcatgtagtgcttcaacgtctgcgagagcaccacctttatgccaagttgtcaaaatgcaagacaactgagtcattgcttatgccttaa

SEQ ID NO: 4972 - DNA, 5274 bp, Zea mays
  Clone ID: TF_ZM4326.C1.o11.fg
atgaattcacccacccccgccagtggaggagactctcgtttcagttctgacttcctttctcgcgatggctttccttccatcttgtgggaagtgcttaactccgccggttaccctacgccccctttgtacacggtgcagttgtatgaggagcatcgggtacctcgttgtcgggtctggctaactttggaggctcatccccttcagccgggttggcgttctcttgactctgagacgattggactcaggacggacgacaccgttgaggcagcagccatgaagactctgacgactttctgtggctaccatcccctggagatggtgatgcaccccttgggactcttccctgctgagaagaaggatgatcccatgtggtgtaaccgcgtgagccatgtgaaggatgtgtgggcaatgtatcctgacttggttgggagggtcactgtccagtgcatgagtgcgctgtaccgccttcaggcccttcagagcgatgctatgacacttcttgctaacaccgctcaggctgccaagctcactctcgacagtcgggaagattttgtggtcgacctatccacagagttggtggagaaggatctgcaggtggagaggctgaaccagcgtattaccaccctggagcagcaagtggagatccgagacaacactattgatgtcttggagaaccagctccacgacgtgcagagggaactcgaggaagccaatgaccacttggacatgcaccacctggagatggaggccaatgaagcaggaagcgagggagaagaggctcccgaggagctaggaccagcccctggtgccaatgggactacctccgcgatgcctccttcacccatggcagcgaggcagcgtcgcgggcagaatgagcaagctcccccgccacctcctccagctcccacagtgcaggagctgatggcccagcagaatgagattctgcgacagctcttgcagcgccagccccaccaacagcatcatggtggaggccagcatcagcgacctccggctatggcaacataccaggagtttctgagcacgcagccgcccttgttcaccaaggcagaggatccgttggacgccgacgtatggcttcgcgtcgtcgagtccaagtttcccctcctcacgggagactgccctgatgaggccaaggctcgcttcgccgcacagcagcttcgcggcccagctcggacttggtgggaccacttccgtgctatgctccccgctgatcatgaagtatcttgggaggaattcaagactgccttcagaggacaccacattccagctggcattcttgataggaagttgaatgaattcctggccctcaatcaaggaacccgcacggtactgcagtatgcgcaagccttcaacgacttatgccagtatgcagggtatcatgctgattctgatgaaaagaagagggatcgcttccgcaggggtctcaatactaagccgcgggaacgactcaacactgtccgggccaatagcttcaatgagttggtcaacatggccatctctcaggaggattgcattgttgctcaccgggcagagaagaagaggaaggcaccaatggcagcaccatccgctcaggctcagaggttccggattgtttctcacaatcagagcaggggttttcagcagcaggcaggcagatgggtgatcaggccacctcagcagcagcagcagccggcacccaaccgctatccagctcccgccccaaggaacaatcagcctccgcagcagcagcagttccgccagggcaatgggaacaagtgtttcacttgtggcaatgtgggccactatgccaaaaattgtcccaggaaccagcagaggcagatgccagcaccaaatcaagacaagggaagaaagcagaaggtgcaagtcaggcaagggaagctcaacttcactgctctagaggaagtgccagaaggagctcctatcatgaccggtaccttttcagtttataatcaacctgctttaattctgtttgattctggtgcatctcatagtttcattagccaaaagttcagtgctaattgcaaactgccattttctcactcaaaagggtcattcatgatagtcacacctgggggtaaaattgcaactaaccaattaaaccaaagtgtgcctattcaactgggaagccacattgtcaaaaccactcttcttgtgttgggattggaaaatgtggacattattctaggagcaaattggatgaccttgcaccaagttgtgcttgatgtagccagtcgtaccgtggaagttaattctcctttctgcgggaatttcactttgattctgcctagtcagggttcttctcagtcgtgtgctttctctatgacggagttgcccctgaagaagatcccagtggtctgtgagtatgcagatgtctttcctgatgaattgccaggaatgccaccggaccgggatattgaattcgccatcgagctgcaaccgggaacgaccccaatttctaagaggccctaccgaatgccacccgctgagttggcagagttgaagaagcagttgcaagagttgctggataagggatttattcgcccaagcacttcgccttggggatgtccagcgctatttgtgaagaagaaggatgaaagcttgaggctgtgcatagattaccgccctcttaatgcggtaactatcaagaacaagtatcctttgcctcgtattgatgtcctctttgaccagttggtcggggccaaggtgttttccaaaatagaccttcgctctggctaccatcagatcaaaatacgagcaagtgatattccgaagacggcattctcaaccagatatgggctgtatgaattcttggtgatgtcattcgggctgacaaatgcaccagcatatttcatgtatctgatgaattctgttttcatgccagaattggacaagttcgtagtggttttcatcgatgatattctggtgtactcgaagaacgaagaagaacatgccgggcatttgcatgtagtgcttcaacgtctgcgagagcaccacctttatgccaagttatccaagtgtgatttttggctaaaggaaatcaaattcttgggtcacactatttctcaggatggaatagctgttgatcctgataaagtgcaagagatgatgaattggaagccaccaacgactgttcgccagattcggagttttctgggattggccggttattaccgaagatttattccggacttctctcggattgcgaagcctattactgagttgctgaagaaagaagtcaagtttgtgtggagtcagaagtgcgaagatgccttccatgcgttgaggcagcatctgaccacagcaccggtattggcgcaacccgacagcagcaagccttttgatgtgtattgcgatgcctctggcaccgggctaggttgtgtcttgatgcaagacaaccgagtcattgcttatgcctcaagagcactcaggcctcatgagcaaaattatcccactcatgaccttgagttagcagcagtggttcatgcattgaaaatgtggaggcactatctaatgggaacccactgcaacatcttcactgatcataagagccttaagtacatttttactcaggctgatctcaacatgaggcagagaagatggctagagctgatcaaggattatgacctggaggtacattatcacccagggaaagctaatgtggtagctgatgccttgagtcggaagttgcaatgcaactgtattctgatggattcccgtgttaacaccttgtgtgatgagttgagcaagatgcaaattgaagtgattccttctggttctttgtctcacatttctgttgagccaactttgcaagaccagatcatcatggcccagctcagtgacaagggagtgcagattatcaagaagaatctccatcagaaggttgaaaagtataattgtttccgccaggatgagaaaggtgtgttatggttcaaaagcagattggtaattcctaaggaccaggatctcaagaggaaaattttggatgaggctcatctctccaaattctctatgcatccgggaagcaccaagatgtaccatgatttgaagcctttgtactggtggaccagaatgaagagggagatagcccagtatgtatcagagtgtgacacctgtcagagggttaaggcaagccacttgaagtccgctggagctttgcgaccactgtccgtaccttcgtggaagtgggacgatatcagcatggatttcattgtgggtctacccaacaccttccgtcatcatgattcaatttgggttattgtggaccgattgacgaaagtggcacattttcttcctgtgcacaccactgataaggctcagaagtatgcagaattgtatattgaccgaatcgtgtgtttgcatggattacctcggaccattgtttctgaccgaggagcccaatttgttgccagattttgggaacaattgcaagagtctttgggaaccaagctaatcaggagttcagcttaccacccacagactgatggtcagacggaaagggtaaaccagattctagaagatatgctgagagcttgtgcgaacgattgtggcaagaactgggataagcacctctccttggcagagtttgcttataacaatagttatcagtccagcctaaagatggcaccttttgaagctctctatgggagaaggtgcaggacaccactcaattggtctcagcctggtgaaagagaagtttttggacctgatttggtgactgaagccgaaaggaaggtcaagctgatcaggaagaatctagaagctgctcaggccaggcagaagagctatcatgacagaagaaggaaacctctccagttcgaggtgggaagttttgtatacctcaaggtatcacccaccaagggagtgcagaggtttggaatcaaaggcaagttagcccctcgttacattggaccttatgagatcatagaagcatgtggacccgtggcatacaagctgaagttaccttcaaagatgtctgccattcacagcgtattccatgtatctcagctgaagaagtgtgttcgattgccgactgagattctagcagagccagaattggagatagagccagatctctcgtaccaagagtacccctccaagattctggattgcaaggaaagatcaactcgggctaaatcgatcaagatgtttaaggtccagtggagtaatcactcagaggaggaagctacttgggaaaccgaggaattcttaaggtccaacttccccgattgcctacctaaggaagctggtatgtaa

SEQ ID NO: 4973 - DNA, 1908 bp, Zea mays
  Clone ID: TF_ZM4326.C1.o12.fg
atgaagactctgacgactttctgtggctaccatcccctggagatggtgatgcaccccttgggactcttccctgctgagaagaaggatgatcccatgtggtgtaaccgcgtgagccatgtgaaggatgtgtgggcaatgtatcctgacttggttgggagggtcactgtccagtgcatgagtgcgctgtaccgccttcaggcccttcagagcgatgctatgacacttcttgctaacaccgctcaggctgccaagctcactctcgacagtcgggaagattttgtggtcgacctatccacagagttggtggagaaggatctgcaggtggagaggctgaaccagcgtattaccaccctggagcagcaagtggagatccgagacaacactattgatgtcttggagaaccagctccacgacatggcagcgaggcagcgtcgcgggcagaatgagcaagctcccccgccacctcctccagctcccacagtgcaggagctgatggcccagcagaatgagattctgcgacagctcttgcagcgccagccccaccaacagcatcatggtggaggccagcatcagcgacctccggctatggcaacataccaggagtttctgagcacgcagccgcccttgttcaccaaggcagaggatccgttggacgccgacgtatggcttcgcgtcgtcgagtccaagtttcccctcctcacgggagactgccctgatgaggccaaggctcgcttcgccgcacagcagcttcgcggcccagctcggacttggtgggaccacttccgtgctatgctccccgctgatcatgaagtatcttgggaggaattcaagactgccttcagaggacaccacattccagctggcattcttgataggaagttgaatgaattcctggccctcaatcaaggaacccgcacggtactgcagtatgcgcaagccttcaacgacttatgccagtatgcagggtatcatgctgattctgatgaaaagaagagggatcgcttccgcaggggtctcaataccaagctgcgggaacgactcaacactgtccgggccaatagcttcaatgagttggtcaacatggccatctctcaggaggattgcattgttgctcaccgggcagagaagaagaggaaggcaccaatggcagcaccatccgctcaggctcagaggttccggattgtttctcacaatcagagcaggggttttcagcagcaggcaggcagatgggtgatcaggccacctcagcagcagcagcagccggcacccaaccgctatccagctcccgccccaaggaacaatcagcctccgcagcagcagcatttccgccagggcaatgggaacaagtgtttcacttgtggcaatgtgggccactatgccaaaaattgtcccaggaaccagcagaggcagatgccagcaccaaatcaagacaagggaagaaagcagaaggtgcaagtcaggcaagggaagctcaacttcactgctctagaggaagtgccagaaggagctcctatcatgaccggtaccttttcagtttataatcaacctgctttaattctgtttgattctggtgcatctcatagtttcattagccaaaagttcagtgctaattgcaaactgccattttctcactcaaaagggtcattcatgatagtcacacctgggggtaaaattgcaactaaccaattaaaccaaagtgtgcctattcaactgggaagccacattgtcaaaaccactcttcttgtgttgggattggaaaatgtggacattattctaggagcaaattggatgaccttgcaccaagttgtgcttgatgtagccagtcgtaccgtggaatcagggttcttctcagtcgtgtgctttctctatgacggagttgcccctgaagaagatcccagtggtctgtga

SEQ ID NO: 4974 - DNA, 3537 bp, Zea mays
  Clone ID: TF_ZM4448.C1.o5.fg
atggcaacctaccaggagtttctgagcacgcagccacccttgttcaccaaggcagaggatccgttggacgccgacgtgtggcttcgcgtcgttgagtccaagtttcccctcctcacgggagactgccctgatgaggccaaggctcgcttcgccgcacagcagcttcgcgaccctgctcggacttggtgggaccacttccgtgctatgctccccgctgatcgtgaagtgtcttgggaggaattcaagactgccttcagaggacaccatatcccagctggcattcttgatcggaagttgaatgaatttctggcccttaatcaaggaacccgcacggtactgcagtatgcgcaagccttcaacgacttatgtcagtatgcagggtaccatgctgattctgatgaaaagaagagggaccgcttccgcaggggtctcaataccaagctgcgggaacgactcaacactgtccgggcagatagcttcaatgagttggtcaacatggccatctcccaggaggagtgcattgtagctcaccgggcagagaagaagagaaaggcaccaatggcagcaccatccactcaggctcagagtttccagattgtttctcacaatcagagcaggggttttcagcagcaggcaggcagatgggtgatcaggccacctccgcagcagcagccggcacccaaccgctttccagctcccgctccaaggaacaatcagcctctgcaacagcagcagttccgccagggcaatgggaacaagtgtttcacttgtggcaatgtgggccactatgccaagaattgtcccaggaaccagcagaggcagatgccagcaccaaatcaagacaagggaagaaagcagaaggtgcaagtcaggcaagggaagctcaacttcactactctggaggaagtacctgaaggagctcctatcatgaccggtatcttttcagtttataatcaacctgctttaattctgtttgattctggtgcatctcatagtttcattagccaaaagttcagtgctaaatgtgaactgccattctctcactctaaagggtcattcttgatagtcacacctgggggtaaaatttcaactaatcaattaaaccaaagtgtgcctattcaactgggaagccacattgtcaaaaccactcttcttgtgttgggtttggaaaatgtggacattattctgggagctaattggatgaccttgcaccaagttgtgcttgatgtagccagtcgtaccgtggaagttaattctctgttctgtgggaacttcaccttaattctacccagtcgaggttctactcagtcatgtgctttctctatgacggagttacctctgaagaagatcccagtggtctgcgagtatgcagatgtctttcctgatgaattgccaggaatgccaccagaccgggatattgaatttgccatcgagttgcaaccaggaacagccccaatttccaagaggccctaccgaatgccacccgctgagttggcagaattgaagaagcaattgcaggagttgctggataagggatttattcgcccaagtacttcgccttgggggtgtccagcactgtttttaaagaagaaggatgaaagcttgaggctgtgtatagattaccgccctcttaatgcggtaactatcaagaacaagtatcctttgcctcgtattgatgttctttttgaccaattggttggggccaaggtgttttccaagatagaccttcgctctggctaccatcagatcaagatacgagcaagtgatatcccaaagacggcattctcaaccagatatgggctatatgaatttttggtgatgtcattcgggctgacaaatgcaccagcatatttcatgtatctgatgaattctgttttcatgcctgaattggacaaattcgtagtggtgttcatcgatgatattttggtgtactcaaagaacgaagaagaacatgtcgggcatttgcatgtagtgcttcaacgtatgcgagagcaccacctttatgccaagttatccaagtgtgacttttggctaaaggaaatcaaattcttgggtcacactatctctcaggcaggaatagttgttgatcctgataaagtgcaagaggtgatgaactggaagccaccaacgactgtccgtcagattcagagttttctgggattagctggttattaccgaagatttattccggatttctctcgaattgcgaagcctataactgagttgctgaagaaagaagccaagtttgtttggagtcagaagtgcgaagatgccttccatgcattaaggcagcatctgaccacagcactagtattggcgcaacccgacaacagcaagccttttgatgtgtattgcgacgcctctggcactgggctaggttgtgtcttgatgcaagacaaccgagtcatcgcttatgcctcaagagcactcaggcctcatgagcaaaactatcccactcatgacctcgagttggcagcagtggttcatgcactaaaaatgtggaggcactatttaatgggaacccactgcaacatcttcactgatcataagagccttaagtacatttttactcaggctgatctcaacatgaggcagagaagatggctagaactgatcaaggattatgatctggaggtacattatcacccaggaaaagctaatgtggtagcagattccttgagtcggaagttgcaatgcaattgtattctgatggattctcgcattaacaccttgtgtgatgagttgagcaagatgcaaattgaagtgattccttctggttctttgtctcacatttttgttgagccagctttgcaagaccagattatcatggcccagctcagtgacaagggagtgcagtttatcaagaagaatctccatcagaaggttgagaagtataattgtttccgccaagatgaaaagggagtcttgggaaccaagctaatcagaagttcagcttaccacccacagactgatggccagacggaaagggtaaaccaaatcctggaggatatgctgagagcttgtgcaatcgattgtggcaagaactgggatgagcccctctccttggcagagtttgcttataacaacagttatcaatccagcctaaggatggcaccttttgaagctctctatggaagaaggtgtaggacaccactcaattggtctcaacctggagaaagaggagtttttggacctgacttagtaaatgaagccgaaaggaaggtcaaactaatcaggaagaatctagaagctgctcaggccaggcagaagagttaccatgatagaagaaggaaacctctccagttcgaggtgggaagttttgtatacctcaagccgaagaagtgtgttcgattgccgaccgagatcatagcagagccagaattggagatagagccagatctatctaccaagaatacccttccaagattctggatagcagagaaagatcaactcgggctaaatcgatcaagatgtacaaggtccagtggagtaatcactcagaggaagaagctacttgggaaaccgaggaattcttga

SEQ ID NO: 4975 - DNA, 4068 bp, Zea mays
  Clone ID: TF_ZM4550.C1.o14.fg
atggcaacttaccaggagtttctgagcacgcagccacccttgttcaccaaggcagagaatccgttgaacgccgacgtatggcttcgcatcgtcgagtccaagtttcccctcctcaccgaagactgccctgatgaggccaaggctcgcttcgccgcacagcagcttcgcggttctgctcggacttggtgggaccacttctgtgctatgctccccgctgatcgtgaagtatcttgggaggaattcaagactgccttcagaggacaccacatcccagctggcattcttgatcggaagttgaatgaatttctggtccttaatcaaggaacccgcacggtactgcagtatgcgcaagccttcaacgacttatgccaatatgtagggtatcatgctgattctgatgaaaagaagaggggtcgcttccgcaggggtctcaataccaagctgcgggaacgactcaacactgtccgggctgatagcttcaatgagttggtcaacatggccatctcccaggaggattgcattgttgctcaccgggcagagaagaagagaaaggcaccaatggcagcaccatccgctcaggctcagaggttccagattgtttctcacaatcagagcaggggttttcagcagcaggcagacagatgggtgatcaggccacctcagcagcaacagcagccggcacccaaccgctttccagctcccgccccaaggaacaatcagcctccgcagcagcagcagttccgccagggcaatgggaacaagtgtttcacttgtggcaatgtgggccactatgccaagaattgtcctaggaaccagcagaggcagatgccagcaccaaatcaagacaagggaagaaagcagaaggtgcaagtcaggcaagggaagctcaacttcactactctggaggaagtacctgaaggagctcctatcatgatcggtatcttttcagtttataatcaacctgctttaattctgtttgattctggtgcatctcatagtttcattagccaaaagttcagtgctagatgtaaactgccattctctcactcaaaagggtcattcatgatagtcacacctggggccatccatatcgtggaagttaattctccgttctgcgggaacttcaccttagttctgcctagtcaaggttctactcagtcatgtgctttctctatgacggagttacctctgaagaagatcccagtggtctgtgagtatgcagatgtcttccctgatgaattgccaggaatgccaccagaccgggatattgaattcaccatcgagttgcaaccgggaacggccccaatttccaagaggccctaccgaatgccacccgctgagttggcagaattgaagaagcaattgcaagagttgctggataagggatttattcgcccaagcacttcgccttggggatgtccagcactgtttgtgaagaagaaggatgaaagcttgaggctgtgtatagattaccgccctcttaatgcggtaactatcaagaacaagtatcctttgcctcgtattgatgttctttttggccagttggtcggggccaagatcaagatacgagcaagtgatattccgaagacgacattctcaaccagatatgggctatatgaattcttggtgatgtcattcgggctgacaaatgcaccagcatatttcatgtatctgatgaattctgttttcatgccggaattggacaagttcgtagtggttttcatcgatgacattttggtgtactcaaagaacgaacaagaacatgctgggcatttgcatgtagtgcttcaacgtctgcgagagcatcacctttatgccaagttatccaagtgtgatttttggctaaaggaaatcaaattcttgggtcacactatctctcaggctggaatagctgttgatcctgataaagtgcaagaggtgatgaactggaagccaccaacaactgtccgtcagattcagagttttctgggattagctggttattaccgaagatttattccggacttctctcgaattgcgaagcctataactgagttgctgaagaaagaagtcaaatttgtttggagtcagaagtgcgaagatgccttccatgcattgaggcagcatctgaccacagcaccagtattggcgcaacctgacaacagcaagccttttgatgtatattgcgatgcctctggcaccgggctaggttgcgtcttgatgcaagacaaccgagtcattgcttatgcctcaagagcactcaggcctcatgagcaaaactatcccactcatgacctcgagttggcagcagtggttcatgcattaaagatgtggaggcactatctaatgggaacccactgcaacatcttcactgatcataagagccttaagtacatttttactcaagctgatctcaacatgaggcagagaagatggctagagctgatcaagaattatgacctggaggtacattatcacccaggaaaagctaatgtggtagcagatgccttgagtcggaagttgcaatgcaattgtattctgatatattctcgcattaacaccttgtgtgatgagttgagcaagatgcaaattgaagtgattccttctggttctttgtctcacatttctgttgagccagctttgcaagaccagattatcatggcccagctcagtgacaagggagtgcagattatcaagaagaatctccatcagaaggttgagaagtataattgtttccgccaggatgaaaagggtgtgttatggttcaaaagcagattggtaattcctaaagatcaggacctcaagaggaaaattttggatgaggctcatctctccaaattctctatgcatccgggaagcaccaagatgtaccatgatctgaagcctttgtactggtggaccagaatgaagagggagatagcccagtatgtatcagaatgtgacacctgtcagaggataaatgcaagccacttgaaatcagctggagctttgcaacccctgtccataccttcgtggaagtgggacgacatcagcatggatttcattgtgggtctgcccaacacctctcgtcatcatgattcgatttgggttattgtggaccgactgacaaaagtggcacattttcttcctgtgcacaccactgataaggctcagaagtatgcagaattgtatattgaccggatcgtgtgtttgcacggattacctcggaccattgtttctgaccgaggagcccaatttgttgccagattttgggaacaattgcaagagtctttgggaaccaagctaatcaggagttcagtttatcacccacagactgatggtcagacggaaagggtaaaccaaattctggaggatatgctgagagcttgtgcaatcgattgtggcaagaactgggataagcacctctccttagcagagtttgcttataacaatagttatcaatccagcctaaagatggcaccctttgaagctctctatggaagaaggtgtaggacaccactcaattggtctcaacctggagaaagagaagtttttggacctgacttagtgactgaagccgaaaggaaggtcaaactaatcaggaagaatctagaagctgctcaggccaggcagaagagttaccatgacagaagaaggaaacctctccagttcgaggtgggaagttttgtatacctcaaggtatcacccaccaagggagtgcagaggtttgggatcaaatgcaagctagcccctcgttacattggaccttatgagatcatagaagcatgtggacccgtggcatataagctgaagttaccttcaaagatgtctgccattcacagtgtattccatgtatctcagctaaagaagtgtgttcgattgccgaccgagatcatagcagagccagaattagagatagagccagatctatcgtaccaagagtacccctccaagattctagattgcaaagaaagatcaactcgggctaaatcgatcaagatgtacaaggtccagtggagtaatcactcagaggaggaagctacttgggaaaccgaggaattcttgagatccaacttccccgattgcctacctagggaagctggtacgtaa

SEQ ID NO: 4976 - DNA, 2844 bp, Zea mays
  Clone ID: TF_ZM4641.C1.o4.fg
atgggcaaccaaaaatttgctaagtccatgatgagaagatcatacacctttgaagttgtaatttctaaaagcacatatcatatcatgcatatatcttacgccttgcattcattagattgcaatcttgccgacggagagtacgtgctcatccccgagcaaggacctgtccaagaagaggaccaggagcaggcttcagaggctgccattgaggatctccccgcagccccagcaattgaaggcaagccccgctatggtgggtacaagtgcggtcactgcacggcggcagccggggtcagtggagcagtgtatgccaaggcgatgaattcacccacccccgccagtggaggagactctcgtttcagttctgacttcctttctcgcgatggctttccttccatcttgtgggaagtgcttaactccgccggttaccctacgccccctttgtacacggtgcagttgtatgaggagcatcgggtacctcgttgtcgggtctggctgactttggaggctcatccccttcagccgggttggcgttctcttgactctgagacgattggactcaggacggacgacaccgttgaggcagcagccatgaagactctgacgactttctgtggctaccatcccctggagatggtgatgcaccccttgggactcttccctgctgagaagaaggatgatcccatgtggtgtaaccgcgtgagccatgtgaaggatgtgtgggcaatgtatcctgacttggttgggagggtcactgttcagtgcatgagtgcgctgtaccgccttcaggcccttcagagcgatgctatgacacttcttgctaacaccgctcagactgccaagctcactctcgacagtcgggaagattttgtggtcgacctatccacagagttggtggagaaggatctgcaagtggaaaggctgagccagcgtatcaccaccctggagcagcaagtggagatccgagacaacactattgatgtcttggagaaccagcttcacgatgtgcagagggaacttgaagaagcaaatgaccacttggacatgcaccacctggagatggaggccaatgaagcaggaagcgagggagaagaggctcccgaggagctaggaccagcccctggtgctaatgggactacctccgcgatgcctccttcacccatggcagctaggcagcgtcgcgggcagaacgagcaggttcccccgccacctcctccagctcccacagtgcaggagctgatggcccagcagaatgagattctgcgacagctcttgcagcgccagccccacccccagcagcatggtggaggccagcatcagcgacctccggctatggcaacataccaggagtttctgagcacgcagccgcccttgttcaccaaggcagaggatccgttggacgccgacgtgtggcttcgcgtcgtcgagtccaagtttcccctcctcacaggagactgccctgatgaggccaaggctcgcttcgccgcacagcagcttcgcggccctactcggacttggtgggaccacttccgtgctatgctccccgctgatcgtgaggtatcttgggaggaattcaagactgccttcagaggacaccacatcccagctggcattcttgatcggaagttgaatgaatttctggcccttaatcaaggaacccgcacggtactgcagtatgcgcaagccttcaacgacttatgccagtatgcagggtatcatgctgattttgatgaaaagaagagggatcgcttccgcaggggtctcaataccaagctgcgggaacgactcaacactgtccgggctaatagcttcaatgagttggtcaatatggccatctctcaggaggattgcattgttgctcatcgggcagagaagaagaggaaggcaccaatggcagcaccatccgctcaggctcagaggttccggattgtttctcacaatcagagcaggggttttcagcagcaggcaggcagatgggtgatcaggccacctcagcagcagcagcagccggcacccaaccgctaccctgctcccgccccaaggaacagtcagcctctgcagcagcagttccgccagggcaatgggaacaagtgtttcacttgtggcaatgtgggccactatgccaagaattgtcccaggaaccagcagaggcagatgccagcaccaaatcaagacaagggaagaaagcagaaggtgcaagtcaggcaagggaagctcaacttcacggctctggaggaagtcccagaaggagctcctatcatgaccggtaccttttcagtttataatcaacctgctttaattctgtttgattctggtgcatctcatagtttcattagccaaaagttcagtgctaaatgcaaactgccattctctcactcaaaagggtcattcatgatagtcacacctggaggtaaaattgcaactaatcaattaaaccaaagtgtgcctattcaactgggaagccacattgtcaaaaccactcttcttgtgttgggattggaaaatgtggacattattctaggagcaaattggatgaccttgcaccaagttgtgcttgatatagccagccgtaccgtggaagttaattctcccttctgcgggaacttcactttaattctgcctagtcagggttctactcagtcatgtgctttctctatgacagagttacccctgaagaagattccagtggcaaacacaaagcctgagggagacctcgcagtacctgcaaacgaagctcaagctgtgatctctatgcggccgactgaggagatgaaaagaatcaaccttgggttcgctgatgcacgcagggctgccatcatcaactccagccttgacgacaaatag

SEQ ID NO: 4977 - DNA, 1218 bp, Zea mays
  Clone ID: TF_ZM4714.C6.o4.fg
atgtcgggaggtcacgccaagaaggagatggtgaccggcgagaagcccgccacaagccatgggaaggctccattcggggagtccggcaacaaggtgaagggatccccttcacacgacaagtcgcgtcagagcggtgaaaagaaaaagaagatgaagaaggtagtctactacaagaccgactcttcatcgccatccacctctggctccgacacgccgtccatcacttataagcgccatgagcgcaagaagtttagctatgactcggacgaagtagcccaaatccagcacttcaactcacaagccaccactatactcctcgcctctctaagtcgagaggagtataacaaggtgcaagggttgaagagcaccaaagagatttgggatgtactcaagaccgcgcacgaaggagatgaggtgaccaagatcatcaagagggaaatgattgaggcggagctcggtcacttcatgcttcaccaaggggaggatccacaagccatgtacaaccgactcaagaccttggtgaaccaagtgcgcaacctcgggagcactaaatgggatgaccatgaaatggtcaaggttattcttaggacactcgtatttcttaatcctactcaagttcaattaaatcgtgatccaagatacaaactaatgtctcccgaggaagtaataggaaaatttgtgagctttgagttgatgatcaaatgctccaagaaaatcatcgagcaaggcgcctcctccacacccgatgtgcaacccgtggcatttaaggcaactgaggagaataaagaagactctacacctagtagggtccccatcgacgcctccaagctcgacaacgaggaaatgacgctcatcatcaagagctttcgccaaatccttaagcaaaggagggggaaggactacaagccccgctccaagaaagtttgctacaactgtggtaagtccggtcattttattgcaaaatgtccattgtctagtgatagtgacaggggcgacaacaagaatggaagagaaaagaagaggtactacaagaagaagggcggcgatgcccatgtttgccaggagtgggactccgacgagagctccaccgactcctcctccgacaaggatgccgccaacatcgccgtcaccaaaggcttcctcttccccaacgtcggccacaagtgcctcatggcaaaggacggcaagaagaagaaggttgtcggggaccataattag

SEQ ID NO: 4978 - DNA, 4989 bp, Zea mays
  Clone ID: TF_ZM5061.C1.o2.fg
atgaagactctgacgactttctatggctaccatcccctggagatggtgatgcaccccttgggactcttccctgctaagaagaaggatgatcccatgtggtgtaaccgcgtgagccaggtaaaggatgtgtgggcgatgtatcctgacttggttgggagggtcaccgttcagtgcatgagtgcgctgtaccgccttcaggcccttcagagcgatgctatggcactccttgctaacaccgctcaaactgccaagctcactctcgacaatcgggaagattttgtggtcgatctatccactgagttggtagagaaggatctgcaagtggagaggctgagccagcgcatcaccaccttggagcagcaggtggagatccgagacaacactattgatgtcttggaaaaccagcttcacgatgtgcagagggaactcgaggaagcaaatgaccacttggacacgcaccacctggagatggaggccaatgaagccggaagcgagggagaagaggctcccgaggagctaggaccagcccctggtgcccatgggactacctccgcgatgcctccttcacccgagtttctgagcacgcagccgcccttgttcaccaaggcagaggatccgttggacgccgacgtgtggcttcgcatcgtcgagtccaagtttccccttctcacgggagactgccctgatgaggccaaggctcgcttcgctgcacagcagcttcgcggccctgctcggacttggtgggaccacttccgtgctatgctccccgctgatcgtgaagtgtcttgggaggaattcaagactgccttcagaggacaccacatcccagctggtattcttgatcggaagttgaatgaatttctggcccttaatcaaggaacccgcacggtactgcagtatgcgcaagccttcaacgacttatgccagtatgcagggtaccatgctgattctgatgaaaagaagagagaccgcttccgctggggtcttaataccaagctgcaggaacgactcaacactgtccgggctgatagcttcaatgagttggtcaacatggccatctcccaggaagattgcattgtagctcaccgggcagagaagaagagaaaggcaccaatggcagcaccatccgctcaggctcagaggttctggattgtttctcacaatcagagcaggggttttcagcagcaggcaggcagatgggtgatcaggccacctcagcagcagcagccggcacccaaccgctttccagctccagccccaggaaacaatcagcctccgcagcagcagcagttccgccagggcaatgggaacaagtgtttcacttgtggcaatgtgggccactatgccaagaattgtcccaggaaccaacagaggcagatgccggcaccaaatcaagacaagggaagaaagcagaaggtgcaagtcaggcaagggaagctcaacttcactactctggaggaagtacctgagggagctcctatcatgaccggtatcttttcagtttataatcaacctgctttaattctgtttgattctggtgcatctcatagtttcattagccagaagctcagtgataaatgtgaactgccattctctcactcaaaaggtgtgcctattcaactgggaagccacattgtcaaaaccactcttcttgtgttgggtttggagaatgtggacattattctgggagctaattggatgaccttgcaccaagttgtgcttgatgtagccagccgtaccgtggaagttaattctccgttctacggaaacttcaccttaattctgcctagtcaaggttctactcagtcatgtgctttctctatgacggagttacctctaaagaagatcccagtggtctgcgagtatgcagatgtctttcctgatgaattgccaggaatgccaccagaccgggatattgaattcgccaccgagttgcaaccgggaacgacaccaatttccaagaggccctaccgaatgccacccgttgagttggcagaattgaagaagcaattgcaagagttgctggataagggatttattcgcccaagtacttcgccttggggatgtccagcactgtttgtgaagaagaaggatgaaagcttgaggctgtgtatagattaccgccctcttaatgcggtgactatcaagaacaagtatcctttgcctcgtattgatgttctttttgaccagttggtcgaggccaaggtattttccaaaatagaccttcgctctggctaccatcagatcaagatacgagcaagtgatattccgaagacgacattctcaaccagatatgggctatatgaatttttggtgatgtcgttcgggctgacaaatgcaccagcatatttcatgtatctgatgaattctgttttcatgcctgaattggacaaattcgtagtggttttcatcgatgatattttggtgtactcaaagaacgaagaagaacatgccgggcatttgcatgtagtgcttcaacgtctgcgagagcaccacctttatgccaagttatccaagtgtgatttttggctaaaggaaatcaaattcttgggtcacactatctctcaggtaggaatagctgttgatcctgataaagtgcaagaggtgatgaactggaagccaccaccaactgtccgtcagattcggagttttctgggattagctggttattaccgaagatttattccggatttccctcgaattgcgaagcccataactgagctgctgaagaaagaagccaaatttgtttggagacagaagtgcaaagatgccttccatgcattaagacagcatctgaccacagcaccagtattggcgcaacccgacaacagcaagccttttgatgtatattgcgatgcctctggcaccgggctaggttgtgtcttgatgcaagacaaccgagtcatcgcttatgcctcaagagcactcaggcctcatgagcaaaactatcccactcatgacctcgagttggcagcagtggttcatgcattaaaaatgtggaggcactatctaatgggaacccactgcaacatcttcactgatcatacgggccttaagtacatctttactcaggctgatctcaacatgaggcagagaagatggctagagctgatcaaggattatgacctagaggtacattatcacccaagaaaagctaatgtggtagcagatgccttgagtcggaagttgcaatgcaattgcattctgatggattctcgcattaacaccttgtgtgatgagttgagcaagatgcaaattgaagtgatcccttctggttctttgtctcacatttctgttgagccagctttgcaagaccagattatcatggcccagctcagtgacaagggagtgcaaattatcaagaagaatctccatcagaaggttgagaagtataattgtttccgccaagatgaaaagggtgtgttatggttcaaaagcagattggtgattcctaaagaccaggacctcaagaggaaaattttggatgaggctcatctctccaaattctctatgcatccgggaagcaccaagatgtaccatgacctgaagcctttgtattggtggaccagaatgaagagggagatagcccaatatgtattagaatgtgacatctgtcagaggataaaggcaagccacttgaaatcagctggagctttgcaacccctgtctataccttcgtggaagtgggatgacatcagcatggatttcattgtgggtctgcccaacacctctcgtcatcatgattcgatttgggttattgtggaccgactgacaaaagtggcacattttcttcctgtgcacaccactgataaggctcaaaagtatgcagaattgtatattgaccggatcgtgtgtttgcacggattacctcggaccattgtttctgaccgaggagcccaatttgttgccagattttgggaacaattgcaagagtctttgggaaccaagctaatcaggagttcagcttaccacccacagactgatggtcagacagaaagggtaaaccaaattctggaggatatgctgagagcttgtgcaatcgattgtggcaagaactgggataagcacctctccttggcagagtttgcttataacaatagttatcaatctagcctaaggatggcaccttttgaagctctctatggaagaaggtgcaggacaccactcaattggtctcaacctggagaaagagaagtttttggacctgacttagtgactaaagctgaaaggaaggtcaaactaatcaggaagaatctagaagctgctcaggccaggcagaagagttaccatgatagaagaaggaaacctctccagttcgaggtgggaagttttgtatacctcaaggtatcacccaccaagggagtgcagaggtttgggatcaaaggcaagctagcccctcgttacattggaccttatgagatcttagaagcatgtggacccgtggcatataagctgacgttaccatcaaaaatgtctaccattcacagtgtattccatgtatctcagctgaagaagtgtgttcgattgccgaccgagatcatagcagagccagaattggagatagagccagatctatcgtaccaagagtacccctccaagattctggattgcaaagaaagatcaactcgggctaaatcgatcaagatgtacaaggtccagtggagtaatcactcagaggaagaagctacttgggaaaccgaggaattcttgagatccaacttcctcgattgcctacctaaggaaactgttgcaaagagaatgacattcgaagagcagttttaccttaataataacaataatcacccatttcctataagtctcacccttcgcttcaccctgggaggactctggcccaaatctcgggacaaaattcctttaaggggggaaggctgtgacacctcagtgtcacctagggtttctctcaaaatgccaaaccaaggaccatcattttatgtgaaccaaattaagcatgagcatcaattgacttaa

SEQ ID NO: 4979 - DNA, 2640 bp, Zea mays
  Clone ID: TF_ZM5066.C9.o8.fg
atgaaggctattaaccctgttgttaagattgatgtagcaacctcatgtgatgatttgagtcaaggagagcaaactagtctacatgatgaattgaccgaaaaagttgaagtcttgactttagacaaccaaaaattgaagagatgcttgactgatgcaactactagaggaaaggttgctattgagaaaaatgatttcaacaatgagttggcagcagataatgaaaggcttaaaaatgagagtggtattggatacaatgcttttgtgcaaaagaaaacaactactcaatacaagccaaagcagactcatatgcctatcaaatgctttgagtgtggaaaagaaggtcactttgcccacaactgcaaagccaaaccaccaactcccttgcctaagcactcaagaccatttgctttcaatgctcattatgttctaagaaaagttgcaaatggaaaggtgaactacaagaccgatgggagccattgggttattgatagtggatgcacacaacatatgacaggcaacccacggatgttcacctcacttgatgagaatgttgatggacaagacaaaatcacatttggagacaattcaaaagggaaagtgcaaggacttggcaaggtggcaatttcaaatgatttatcaatttcaaatgttctcttagttgcacctttgagcttcaacttattatcagtgggtcaactctgtgatcttggacttcaatgcttattcactccaacagaggttattgtatcaaaatggatgatgaatcaatggaggcttgcacatgttgggatgagcacactcaagaaggtattaaagaaggacatggttagaggattaaaggatgttgtatttgaaaaggacaagccttgtagtgcatgtcaagctgggaagcaagttgctaatacacatcctacaaaagctttcatgtcaacatcaaggccactggaactacttcatatggatttatttggacctacaaattatgtaagtgttggtggcaaccactactatctggtgattgttgatgatttctcaagatacacttgggtgttctttctccatgacaaatctgaagttgcgtctatattcaagaagtttgccaagaaagctcaaaatgaatttgattgcaagatcaagaagattagaagtgataatggtaaagaatttgacaacaccaacattcatgagtactgtgatgaaattgggatcaagcatgaagtatctgcaacatatacacctcagcaaaatggagttgttgaaaggaaaaacaggaccttgatcacacttgcaagaacaatgattgatgagtataacacaccagagaggttttgggctgaagctgacaacactgcatggtatgcatcaaacaggctatttcctcatcggctgcttgcgaagaccccctatgaactgctaaatgggaaaaagccagacgtctccttccggtccaaagcatatcgagtattcaatcatgccactggcgtggtagaagaaacatatgatgtggaatttgatgaggctaatggctcccaaggagcaattgaaaatcttgatgatgtaggtgatgagccacttagggaagcaatgaagaacatgccaattggagctatcaaaccaaaagaagatgaagaagaggtgcaaaatattgacaggccttcttcatcaaatgtaccacaagatgatgacaaagatgagaggcatgcaaatgaagatacatttgtctctcatgaacaagcaaggaccctggagaagcccccacaagatgcaagaatcattggaacaaagtgggtgttcagaaataaacaagatgatcaaggcttgattgtaaggaacaacgcaagacttgttgcaaagggattctctcaagttgaaggcttagattttggagagacctttgcaccggttgctcgactggaagccatccatatcctacttgcatatgcatcatgctatgatataaaactttatcaaatggatgtaaaaagtgcatttttaaatagcttcataaatgaacttgtatatgttgagcaaccacctggatttgaagaccctagatatcctaaccatgcttacaggttgtccaaggcactatatgggctaaagcaagctccaagggcttggtatgagcgtcttcgtgacttcctcatcgaaaagggtttcaagatcgggaccgtcgacacaactctattcacaaagaaacataacagtgatattttcatttgtcaagtatatgttgatgacataatctttggctcgacaaatgactatcattgcaaggaatttggtgagttgatgtcgaaggagttcgagatgtcaatgattggtgagctgacgtacttcctcggctttcaagtcaagcaaatgaaagatggtaactttctctcacaagagaagtataccaaagacttgttgaaaaggttcaacatggaaaagtgcaaaccaatcaagacacctatgccaactaatggaaatctcgacctagatgagggaggtaacccggttaatcaaactctctaccgttctatgattggtagtttattgtaccttaccgcatctaggcccgatatcatgtttagtgtctgcatgtgtgctagatttcaatctaatcctaagaaagctcatcttcgcgctgttaaataa

SEQ ID NO: 4980 - DNA, 990 bp, Zea mays
  Clone ID: TF_ZmC2309_2
ctcgaggcggcgggaaaattacaaaactcgcccgcccaaagccccaattcaccacccaaatcctctctgccgcccgccgatggccaccgccgccgccatggccgatgacgacgacttcgcctcgccgccgctcgccccgcgtgcgcgggaggaaggaggaggcagaggcgtgtaccaggtgggcggcgtgccggtggagttcccctacaagccctacgggacgcagctggcgttcatgggacgggtcatcgcgacgctcgaccgtgcccggcggcaggggcgctcccacgcgctcctcgagtcgcccacaggcaccggaaagtcgctctccctcctctgctccgcgctcgcctggcagcggcactacccgctccgttcccctcccgcctctcgttatgaacgtggtcgtgactatggtggtgggcgtgcaccgcgaggtggtggtggtggtggtggtggtgaccgcttcaagtgtgggaaacctggtcattttgctagagagtgcccatctggggatggtgggagaggggacagatatggtgggagagatgacaggtatggtggcggtggcggtggcggtggcggtcgttatggttctgaccgtggtggtgaccgatactctggccgtagccgagatggcggcagctatgggggtggcgatcgctacagccgtgaccgatcaggtccttactgatggccttagttcttgattgagaagtatgtgccatccaggtatgaaagtctatctactattataaggcttgttattgtgtctggaactttgttatcctgtagttggagtcgacatgtaccgtgagaaatcagctgctttgttatagaccgtattactgaccggtttattatcgtttcctgcttgccaggcatatgacttggtcatagtgcttggcgcttggatcctgcatgtttgcttgatgtgctatttggctattaaaagatggattttgtccaaaaaaaaaaaaaaaagcggcc

SEQ ID NO: 4981 - DNA, 5184 bp, Zea mays
  Clone ID: TF_ZmC36592_155
ctaggtggcttcctcttctccttctctgctccactgaactttacagagcttcacttctgaggtgcgggtctttctgactgctgaatcaagaatcttcactggtttctcacgatattgaagatctttctgaatctgcactgtttcttcttcgaggtgactttctggtgcttgcaggcacttgcggagctgggataagtggaacacattgtggatgtcggacatggattctggtagttccaggcggtatgcggcgggtcctaccttgccaatgatgggatagggacctacaaaacgtggggctagcttccctttgacttggaaccttctgaccccacgcattggagaaaccttaaggtagacgaagtctccttcctcaaatcggagttccctccgcctgttatctgcgtaactcttctgtcgactctgagcttcaagcaaccttctgcggatcagtgcaactttctcctctgcctccttgacaaaagcaggtccttctagtgctttttcccccacgttggaccacatgagaggggtctggcattttcgtccgtacagagcttcgaatggtgacatcttgatgctggactgatagctattgttgtaggagaactctgcgtaaggtagactggactcccaacttctatcaaaagctaaaacacatgctcttaacagatcttcaaggactttgttgaccctttctgtctgcccatctatctgagggtggtacgcggtgctgaaatctagcttggtgcccatagctttctgaaggcttgtccagaatttggatgtgaactgggttcctctgtctgatactatcttccttgggatgccatggagtctgactatctccttgaggtagatccgggcaagggtggctcctccaaaggtagttttcactggaatgaaatgggctaccttggtgaggcgatctattattacccagatggagtcattccctttctgcgtccggggtagtccggtcacgaagtccatgcctatttcttcccacttccattcaggtatcgggaggggttgcagtaggccagcaggtttttggtgttcggccttcgtccgttggcagatgtcacatcgggccacatactgagctatttctttcttcatccccttccaccagtatctggtcttgaggtccaggtacatcttggtagttccggggtggatggagtaggccgagtcgtgagcttccttgagtaggacttctcgggcctccccttttggtacacacagacggtgtttgaaccaaaggactccttggtcatctgtcctgagatccgggagttgttccttgcgggctttctccacaagccttgccgtctctgggtctagatgttgagctttgcagatgatgtcttctagcattggcttgacttcgagactgtcgttgtttcccagacaggcatttagttgtgccgattcttccttccagtcttctagaaagttagtcccttttattccgaatggctttcgactgagagcgtcggctaccacattggccttcccggggtgatagtggatttctaggtcataatccttgatcagttctaaccatcttcgctgaaggaggttgagatcaggttgagtgaatatgtacctcagactcttgtgatcggtgaaaatatggcatttgtttccgattaggtaatgcctccatatctttaaggcatgcactatggctgccaattccagatcatgggtggggtaattctgctcatgcggcttgagtaggcgtgatgcgtaagcaatgactctctcgttctgcattagtacacaccctaagccttgcctcgaagcatcacagaagacaacaaaatcttgatgaatatctggcagtgatagaacgggtgccgttgtgagtttcttttttatgatttggaaactttcttcacattttggggtccacacaaatttgtgatctttcttgagaagttctatcattggtcttgctatgctggagaatcctttgatgaagcggcggtaataccctgccattcctaggaagcttcgaacttcactgacgttggttggttgcctccattttgacactgcttctactttggaggggtccacttctattccttctgcggttaagatatgcccaaggaaggctatcttttccaaccagaattcacatttactgagtttggcatacagctggtgtgctctgagtttcccaaggacgatccgaaggtgacgcttatggtcttcgcggttcttggagtaaataaggatgtcgtcgatgaagactacgacaaacttatctagctcttccataaacactttattcatgaggttcatgaaaaaggcgggtgcgtttgtcagtccgaacggcattactgtgaattcatattgcccgtaccgagtgacaaatgcagtcttttggatgtccgcttccttgatcctcaattgatggtatccagacctcaggtctatcttggagaagtacttggctccttgaagctgatcgaagaggtcgtcgatccgagggagtgggtatttgttcttgatagtcaccgcattgagagggcggtagtcaacacacatcctcaaactctcatcctttttctttacaaataaagctggacatccccatggtgaagtacttggacgaataaaccccttgtctaacaattcttgcaattgcttcttcaattctgccaattccgcgggaggcatcctatagggtctcttggagataggagcagtcccgggttgcaattcgatggcgaactcaatatctcggtcaggtggcatccctggcaactcatctgggaaaacatctgggtagtcacagaccactgggatcttttccaccggggattctatcataacaaaggcacaagatcgggtacaaccctggtcgggtaaatacaaaacagtctcgccataagcaggggaatggatttcaatggctctggctgcaatgtccaagactgcctgatgcctggtcaaccagtcagttcccaaaataatatccacgctatccaatcctaaaatgagaagggtggttctaatcaccagactaccaaattttataggcacttgcctgttgatttgataagtggcaactctgcctccgggtgttgaaattgtaatgcccccatcggtatggtgaaagggaaactggcatttggcactaaacttggcactgataaaactatgtgaagcaccggaatcaaacagaacaatagcgggaaaatttaaaactgtaaagataccagtcatgacgggtgctccctctggaatatcagccatggtggtgaagttcagcctgccctgcctcacttgcaccttctgcctcttgccttggttctgattgacattctgcccctgcctctgctggttcctggggcaattcttggcataatgcccagtgttgccacacgtgaagcatcttttgtcatttgcctggcggtactgctgctgctgctgattgcccctctgagctggaaattgggtgcggttgggtgcctgctgctgttgctgctgcggtcggatcacccatcgcccttgctgctgctgcggtcccctgccctgggtgtcggacacaatcctgaagcgctgtggctgagctgagggtcctgccacaggggtcttcctcttcttctctgcctgtctagctgtaatgcagtcctcctgggagatagccatgttgaccaactcattgtaactgttggccctgacggtgttgagacgatcacggagcttagtgatgagccccctcctgaacctatccctcttcttctcatctgtatctgcatgatatcccgcatactggcacaaatcattaaaagcctgggcatactgcaacactgtcctgtttccctgagtgagtgccaaaaactcattgagcttcctgtccatgatcccggctggtatatggtgtcctctaaaagctgccttgaactccctccactccacctctcggtcctctggctgcatagcaagaaaatgatcccaccaagtccttgcaggtccgcgaagttgctgggtggcgaacctgactttggtgacctctgagcaaactccatgtagcagtgggaatttggattccaccactcgcagccacacatctgcgtcgagtgggtcctccgccctcgtgaacaatggaggctgggtgctaaggaattcctggtatgtagccgccgcggggtgacgctgatggtctccaccaccataatgctgaggtggtggctgacgttgagccagctgcctcaggatctcattctgctgagccatgagctcctgcagagtgggaggtggtggcggcggtggaggaacgcgctcgttctggccacgacgctgcctcccggccatctgaaaaaccatatacatacttaacaccacatcagcagtgtccacactggaggcaggctcatctcctccctcgatgtcgacatcctcgttggcctcctggtcttggatctcctggtgatgcatgtccaggtgctcgttagcctcagcgagctgctgctgagtgttaatgagctgatcctctagaacctcgatggtgttctccctggtgcccactagctcctccaactcctgaatatcagtggatagctgctccacctgcaagtccttctccaccatttcttgagacaagtcaaccacgagttcctctctgttatccaacgtaatctttgttgcctccagcagcgccatcagatgggacattgcctcaccgcgcatcacctgcagatggtacagggcattcatgcaccgtacagtcaagtgcgcggtctgtcctgggtagatggcccagatatccttggcatgctccacccgatccttccacattgggtcgtcctccctctcagcggggaacaagccaatggggtgggtagccagctccaaaggatggaatccgcagaaggtagtcagtccatgcagagcgatcgcctcgatcgtgtcctctgctcggtatccgaaagactcggagtccaaagagcgccagcctggctgcaggggatgaggctccaaagtcatccacactctacagcgaggcactcggtgcttctcgaactgctgcaccgcgtactgagggggtgtcgtgtatccagccccctgaagtacctcccacaaaatgcggggaaagccctctcgtgcaagtccgtcagtgtgggtcagtgcatttccgtcattagaggatccgtgggaagtcat

SEQ ID NO: 4982 - DNA, 6224 bp, Zea mays
  Clone ID: TF_ZmC24054_2
atgcgctcgcgctcccgtgcggcgctccgccgccgctcgctcgccttgggccgccgatcttcctctgccgccacccgccagccatcccgccccgcagttctgcccaccgctccagctccagccccatcctccggcggcatcgccgctgcagccacccccgtcctcacaatcgcctcaacatctggtttggaagctggggaggggaactaccatagtttccccctcacggtaagccctacaaagggggatttttgcttgcaggagcagatcaaggatgctttgccccatgtttttcattcccgcagagacaaagttccgtcagatttggatctgcagaagcacgccgcaactgctaatggcacgtctctgcttgctgcgtcagcttcagcgccaaaatcaacaaggaagttttattcagagacatcttcaatcggagatcctgtagatctattggcaccggcccgaatcccggtcttagagaagaggaaatgggcagtgggcagctcgccggtttttccgcctgactgcaatgaagttgatttcaatttcaatgcgagcaatgctacttcacatcagctggctgtggacggcggacatgacttgagaagttatggccgacttcatttcggtcagcacaaggctgacgccccggtactggaagaaggtggatggagtgtggtgaggcctaaattctggtggcgcaagactgttgaaaatcttaagagatctccgactcagcagcaacatgacacgaaaggtaccagcaccttcaagacaaagcttcagggtaaatgctacaactgcctctcgccagatcacttcgcttttcgttgctcggcgcttactcgttgctggcagtgcctacattttggccatagggctagggcatgcccagggatttactacagaagcaggcacaattcaactcctccccaacctgaaccagtgcagcattcaatgcagtacaccagcaatgtcaactccaggcaccaacaacaccagcgacagctcaactctcttcttaaggaacagaaacaggcccctgaacctgtgctcaacttttctccagttcaacacaacaaatcctacctccgtgcagctcaggagggccagaacatggaggctcgctacccaggtgacccaagggcaagaccgtcgcgcgccttctgtgcagtttcggcgactggctcaatccgtcgtcgcagggatgatctcatcagcaaggcggtggtgtgctcattcgatggaaatagccatgaggttgacaccattgtggcaggagacatgttgagagagaagttcaatctctgccatggtcagtatcaacttgtcaaacatttcccagaacagttttttattatctttcctgatgcaagaaccaagcaatgggctattgatagaagatcagtttcttatcgtgggcgtgagtttcatttcggtgactggtcagaagagagctatgctagaaagaccagctgggagtttagagttaaggtccgggtggaagggattcctgttcactgctggggtgaggaggtggcatcaagggccttaggcaggagctgcactattcattatgttcaggagcgctctaggcgtagagagcgtacccgttcttttgacctttgggcatggtgctctgacccctgtgaaatccctaaggaggtgtggctaacggtgtctgaacccgaccctgaattaccacctataagtacccctctgcctcttgtgggtgctcaccatgctgaaccgacagatctgaaaaaaggccatgtgtacacgcttcgcaaccatattgaagtggttgaggatctctgcttcattcatgggaggaacactaggggtgggcctatgaatcggaagcctcgcagagagttcgtgtggagctatggtgtttctgactctgctggtgaaaagcgggagcgttcagaggagttcagaggcagggagaccatgcgtcgggactgggaccatgatgatgatgaagattttcaccagcataggcatcagggcactcgtcggcagcgtagcctctctgggtgggcgcgttcctcgcgatgccgtggtggtgtggaggactgctacagctcgagtggaagatacaggccatccactcctttccggcgtagggggatggggatggggcagccagggcgctggactcccaagataaagaacaaaaaggtctcttttgcagatcctgtcatcactgctatctggcctacagatgtttctaaagggcacatctctgctgaaaattccatttcactgggaggtatggatcttggcactcaagctatggaggaataccaatgttctgcacatcccaaggtatctgtcccaattgcatcatattctgttaatgctctaatccattcatggtcgactagggggacagattctgctccagtccctattattagtggtagtcatcttgcaaatgaaacaatacaaggagatttatgtatccagaatgtgcaagtcgagtccaatttttccaattctgaaccaaacagtcaaaggaatgtcgttgctaatgaagatcgacaatgcattttacctactaatgaggttccacctattggacacgaatcatcaacacattccacccctcggccactagaaaatcagctgaactcaaatgataggttgcagattttcattgaatcaatcacaaacacaccagaaccgcccctcatcctgtcccctccgaacagcaacacacttgccacatcaccagtactaggggggtcagataatctagatgctaatgtaactataaatgctggcacacctgccatacaatatcaaggttcaagtgcgtcgatctccaataaccatgtaaattcttttgaacagattgaaggccttttctcaagacctctcaacaaggatcagatggagtggagaaatggttactatccaatgaatacaaattgctgtattttttcttggaatgtgagaggtctgaatgatcccgctaagcgagaaagtgtgaggcaaacaattctttctacgcacgcaactttagtttgtcttcaagagacaaaaattatgaactggactaacgatttattaaaggacactgtgggttacaagcttgcaaagcagactgcgcacttgccctctattggagcatcgggtggaattcttattgcttgtgatgaggacttttttgatattactccagttacttacgcttcaacctactcattatcagttcgactcctagaactggaccttatcggtaaaaagttcacttggtcaaatgaacaggatgatcctacgatgtctaggattgatagattgatggcaactactgagtggcatgggctctatccagcggctaatttgcaggcattgtgttccatgacttcggaccactctccgttattaatgcagggccactctccttgtaatttctataaggggttccgttttgaatcctactgggtacacattgacgggttcaaagatgtagtccaacaagcttggacgaccacagttaactcctctgatgccattcttcggttacatgttaaaatggtccgcacggccaaagctcttaaagcttggagacgacgcacggtcggtaacatcaaagtgcaattggctatcattaagattgtccttaccatgctggaaaaggcacaggaaaatagaacactttctagtgaggaacttgacttcaggagaaggctaaaaatcaaaattcttggccttgcaggcatccaattatctattgctagacaacattccagacagacctgggtgcggttgggtgatgcgaacacaaatttttttcatttgatggccaatcacagaaaaagaaaaaactttatcagatccttgaattgtggagactgcctgttaactagtcaggaagataagctacgagaggctcatagacatttcctagagatccttggcactagaggcgggaggactagtgttgttcgttgggaaaatctaggctactcgccttttgagttatccgagttggacaccatgatcaatgatgatgagattaggaatgcggttatgggcatgcattcagagaaagcgcctggacctgatggttttatagggcttttctacaaggaatgttttgaggtgattagagaagacctttccaaagcgatcaatgatttttatcatcataaatgcaaaagtttgcatttggtcaatgaggcaaacattgttcttctaccaaaaagggagaaccctgacaggatagatctatttagaccaatcagccttatcaatagttgcatgaagattataaccaaaataatggcaacaaggctggcgccgcgtatgaatgaaattgtctccactacccaaaatgccttcattcaaaagcgatcaattcatgataacttcctctacgtccagaaagtgattaaaaaacttcacaagagcaaacaagcagccctatttgtcaagctagacatatcaaaggcttttgactctcttaattgggcatatcttctagacgtcttaaaagccctaggcttcacccaaaaatggagagattggattgctaccatccttggatcatcttcatccaaaatcatcattaatggccagcaaaccaaagaaatcaagcacatgagaggggtgcgtcagggtgacccactatcgccttttctcttcatccttgcaatggatcccctacaacgaatgattgaaagggcagctcatgaggggctactgggccaggtattacccaatggggcaaagtttcgttgttctctttatgcagacgatgcgggggtgtttgttagagcagacaaactagatctcaaagttctaaaaagaattctagaagctttcgaatggtgttcaggtctgaagatcaattttgagaaaacagagattttcccaatacgttaccctgaatctttatggtcaaatttaatggaagtttttccaggcaagtactctaacttccctggcaagtatctcgggctaccgcttcacttcaggaatattaaaagaatagagtttcaacctctaattgagaaaataaataaaaggcttgctgggtggaaagatgtcgatctatttaatgcatctacgattgtaacaattggtgatggcaaaatggctgatttctggagatcaagctggattcagggtcaggccccaaagaacattgcgccaaccttattcatgaaagcaaagaggaaaaatatctcagtgtgccaagcccttacaaacaatcgctggatgcacttttgttctccttacacacatgaggatgagataaaagaattcatttccctctggcaaggttctcgtgtcccatgccaaagcacaggtctaaggcccgaccttaatcgtggtgaaaacggtcggaaacaaccgaaagctgctgtgtattttcgaacttggagaggccatcttcagaatctacttggatatgctttgtctgtatattgtgtttataagatgctcaagtccttgcagagcgcagtctttaagaagtcaggttctgttgatcctgtaacaataacgataacgattttcttgagacattttgacattggcattgatgttgcgctgttatctcagtacatatctttgatgttcattgggatgttagttgtcatatctgttcgaggtttcttggcaaatgttatgaaattcttcttcgctagttctagagttgggagtcggtctacaaccaatgttgtccttgtcctatcagagatcatggccaggtacttcatatcttccattctcctcataagaaaaagcctggcaaatgaatataggtattccggtgatcattactgcggtgttttgggtggtgatatccaatttgacttctaccaccgctggtttgatgctatatttttggctagtgcgttcctctccttgcttcttatatctgcccaatacaccaccaggcaaacagacaagcatccgattgattgatgcatcttgcccacaatgtgtgcatgttgtctttttaaccagtattcatccaagtgacgggacacgggattcattgtaatgcagtctgcacgatactactttttgactaggacaattgtggaagcccatattaggaattgattatgactttgtaaaatagcttgaaactagtgtcgtagcaccgtagcacggtatgttggtgtatcttatatatttttttggctgtttcatgtataacacacttcgcgacaactctgaatggtagatagatctgtttcttc

SEQ ID NO: 4983 - DNA, 5301 bp, Zea mays
  Clone ID: TF_ZmC36592_119
ttatgcataaaaccggggcttgccttccaaagcagtggcaggcaggtcctctggtgcaggctcgggggctggatctggggctacctcctgagcagctccttgctccggcacgaggatgtactctccgtcagcaagattacagtcgactcctttgggtagaaagtcggggaagcgagagcgtagaaaatcctcagtctcccatgtagcttcttctgctgaatggtgactccactgaaccttatacattctgaccgaccttgcccgagttgatctttccttctgatctaataccttgacggggtactcttggtaggacaagtctggttctatctcaatggctggttctggtagcacttcagtgggtaggcgaacgcatttccgcagttgagatacatggaacacattgtgaactgacgacatgtgaggtggtaattccaattgataggccacgggtccacaacttgccttgatctcatagggtccaatgtagcgaggagctaacttgcccttgatcccgaatctctgaacacccttggtgggtgataccttaagatagacatgatctcccacctcaaattgtaggggcttccgcctcttatcatgatagctcctttgcctggcctgagcagcttccaagtttttggtaataaccctgacttttgcctcagcctcgagtactaaatctggcccaaaaatttccctttctcctgcttgagaccaatttagtggggtcctacaccttctcccatatagggcctcaaaaggtgccatcttcagactggattgataactgttattgtaagaaaactccgccaaagacagacacttatcccaatccttcccataatgtagtgcacatgctcgcaacatgtcttccaaaatctgattcaccctttctgtttggccatctgtttgagggtgatatgctgagcttcggatgacatgggtcccaagtgactcttgcaattgctcccaaaatcgtgccacaaatggtgctcctctgtcagatataatggttttgggaataccatgcaaccttattatctgatcaacataaatttcagcgtacttctctgccctgtgggtggtatgcactggcaagaaatgagcagtcttggtcaacctgtccacaataacccaaatagaatcatggtgcctggaggtattgggtaatcccactatgaagtccatacaaatgtcctcccatttccaagatggtatgggaaggggttgcaaagggcctgctgccttcaagtgactagctttaattctctggcaggtgtcacactcggatatgtacttggcaatttctcttttcattctagtccaccaatatagagatctgagatcatggtacatcttgttgctaccagggtgcatggagaatttagagaggtgagcttcatctagtatcttctttctaagctcagggtcctgaacacccttatccccaacatgtgccctgactatctgttcttgcagtgtgggctccatagagatatagcttaggtcacccgaagaaacaacttccaggttcagcttgcacaactcatcacacagggtggtcactcccacatccatgctcatacaattgcactggacctttctgctcaaggcatctgccacaacattggccttccctgggtggtaatgcacctccaaatcatagtccttgattaactccaaccatctcctttgcctcatgttcagatctgcttgagtgaagatgtatttgagactcttgtgatcagtgtagatgttacagtgagctcccatcaagtagtgtctccatatctttagagcatggactaccgctgccaattctagatcatgtgtagggtagttctgctcatggggcctgagtgcccgggaagcataagcaatcactctattctcttgcatcaagacgcatcccaatccggtaccggaagcgtcacaataaacttcaaatggcttggtgctgtcaggttgggccagcactggggctgttgtcaaatgctgcctcaaggcatgaaaggcatcttcacacttttggctccactcaaatttgactccctttttcaacagtttagtcattggcttggccattctggagaaatccggaataaatcgtcgataataccctgccaatcccaggaaactccgaatctgctttactgtagtcgggggcttccaatccatcacctcctgcaccttctcaggatcaacggatatcccatcctgggaaattgtgtgacccaagaatttaatctccttcagccagaactcacatttagacaacttagcataaagatgatgctcgcgcagtcgctgaagcacaatgtgcaggtgctcagtatgttcgtcctcattcttggaatagaccagaatatcatcaatgaaaacgagcacgaacttgtccaattctggcataaacactgagttcatcaggtacatgaaataagccggggcattggtcagcccaaaagacatcaccagaaactcatacagtccatatctggtagagaaagctgtcttgggaatatcgctagcacggatcttgatctgatggtaccctgagcgaaggtctatcttggagaataccttggctcctaccaactgatcaaacagaacatcaatgcggggcagtgggtatttgttcttaatagttaccgcattgagagggcggtagtcaacacacatcctcaaactctcatcctttttcttcacaaataaggctggacatccccatggtgaagtgcttggacgaataaaccccttgtccaacaattcttgcaattgtttcttcaattccgccaattccgcgggaggcatcctatagggcctcttggagataggagcagtcccgggttgcaattcgatggcgaactcaatatctcggtcaggtggcatccctggcaattcgtctgggaaaacatctgggtagtcgcagaccactgggatcttttccaccggggattctatcataacaaaggcacaagatcgggtacaaccctggtcgggtaaatataaaacagtctcgccataagcaggggaatgaatttcaatggctctggctgcaatgtccaatactgcctgatgcctagtcaaccagtcagttcccaaaataatatccacgctatccaatcctaagatgagaagggtggttctaatcaccagactaccaaattttataggcacttgcctgttgatttgataagtggcaactctgcctccgggtgttgaaattgtaatgcccccatcggtatggtgaaagggcaactggcatttggcactaaacttggcactgataaaactatgtgaagcaccggaatcaaacagaacaatagcgggaaaatttgaaactgtaaagataccagtcatgacgggtgctccctctggaatatcagccatggtggtgaagttcagcctgccttgcctcacttgcaccttctgcctcttgccttggttctgattagcattctgcccctgcctctgctggttcctggggcaattcttggcataatgcccagtgttgccacacgtgaagcatctgttgtcatttgcctggcggtactgctgctgctgttgattgcccctctgagctggaaattgggtgcggttgggtgcctgctgctgctgctgaggtcggatcacccatcgcccttgctgctgctggggtcccctgccctgggtgtcggacacaatcctgaagcgctgtggctgagctgagggtcctgccacaggggtcttcctcttcttctctgcctgcctagcagtaatgcagtcctcttgggagatagccaggttgaccaactcattgtagctgttggccctgacggtgttgagacgatcacggagcttagtgctgagccccctcctgaatctgtctctcttcttctcatctgtatctgcatgatatcccgcatactggcacaagtcattaaaggcctgggcatactgcaacactgtcctgttgccctgagtgagtgccaagaactcattgagcttcctgtccatgatcccggcaggtatatggtgtcctctaaaagctgccttgaactccctccactccacctctcggtcctctggctgcatagcaagaaaatgatcccaccaagtccttgcgggtccgcgaagctgctgggtggcgaacctgactttggtgacctctgagcaagccccatggagtagtgggaatttggattccaccactcgcagccatacatctgcgtcaagtgggtcctccgcccttgtgaacaatggaggctgggtgctgaggaattcctgataggtggccgccgcggggtgacgctgatggtctccaccaccataatgctgaggtggtggctgacgctgagccagctgcctcaggatctcattctgctgagcaatgagctcctgcagagtgggaggtggtggcggcggtggaggaacgcgctcgttctggccacgacgctgcctttcggccatactcgactcaggggaaggtggtcttcccgagccggcagtgtccacactggaggcaggctcatctcctccctcgatgtcgacgtcctcgttggcctcttggtcctggatctcctggtgatgcatgtccaggtgctcgttagcctcaacaagctgccgctgagtgttaatgagctgatcctctaggacctcgatggtgttctccctggtgcccaccagctcctccaattcctgaatatcagtggatagctgctccacctgcaagtccttctccaccatttcttgagataaatcaaccacgagctcctctctgttatccagcgtgatctttgttgcctccagtagtgccatcagatgggacattgcctcaccgcgcatcacctgcagacggtacagagcattcatgcaccgtactgtcaagtgcgcagtctgacctgggtagatggcccagatatccttggcgtgctccacccgatccttccacattgggtcgtcctccttctcagcggggaacaagccaatggggtgggtagccagctccaagggatggaatccgcagaaggtagtcaatccatgcagagcgatcgcctcgatcgtgtcctctgcccggtacccgaaagactcggagtccaaggagcgccatcctggctgcaggggatgaggctccaaggtcatcctcaccctacagcgaggcactcggtgcttctcgaactgctgcaccgcgtactgagggggtgttgcgtacccggccccctgaagtacttcccacaagatgcggggaaagccctctcgtgcaagtctgtcagtgtgggtcagtgcatttccgtcatcggaggatccgtgggaagtcat

SEQ ID NO: 4984 - DNA, 4554 bp, Zea mays
  Clone ID: TF_ZmC36592_137
ttatgcataaaaccggggcttgccttccaaggcagtggcaggcgggtcctctggtgcagactcgggtgctggatctggggctacctcctgagcagctccttgctccggcacgaggatgtactctccgtcagcaagattacagtcgactcctttgggcagaaagtcggggaagcgagagcgtagaaaatcctcagtctcccatgtagcttcttctgctgaatggtgactccactgaaccttgtacattctgaccgaccttgcccgagttgatctctccttttgatctactaccttgacggggtactcttggtaggacaagtctggttctatctcaatgtctggttccggtagcacttcagtgggtagacgaacacatttccgcagctgagatacatggaacacattgtgaactgctgacaggtgaggtggcaattccacttgataggctatgagtccacaagcctccttgatctcgtagggtccaatatagcgaggagctaacttgcccttgatcccgaatctctgaacacccttggtgggtgataccttaagatagacatgatctcccacctcaaactgtagaggcttccacctcttatcatgatagctcctttgtctggcctgggcagcttctaggttcttcttgataattctgacctttgcttctgcttcaagtactaaatcgggcccaaaaatttccctttctcctgcttgagaccaattgagtggggtcctacaccttctcccatataatgcctcaaaaggtgccatcttcaaactggactgatagctgttattgtaagaaaactccgccaaagacagacacttgtcccaatcctttccataatgtagtgcacacgctcgcaacatgtcttccaaaatttgattcaccctttctgtctggccatcagtttgggggtggtatgctgagcttcggatgacatgggtcccaagtgactcttgcaattgctcccaaaatcgtgccacaaatggtgctcctctgtcagatataatggttttgggaataccatgcaaccttactatctgatcaacataaatttcagcgtacttctctgccctgtgggtggtatgcactggcaagaaatgagcagtcttggtcaacctgtccacgataacccaaattgaatcatggtgcctggaggtattgggtaatcccactatgaagtccatacaaatgtcctcccatttccaagatggtatgggaaggggttgtaaatggcctgctgccttcaagtgactagccttaattctctggcaagtgtcacattcggatatgtacttggcaatttcccttttcattctagtccaccaatatagagatctgagatcatggtacatcttgttgctaccagggtgcatggagaattttgaaaggtgagctccatccaatatttgctttctgagctcagggtccttgggaacaaccaatcgatctccaaaccatagaattcccttgctgtcctgtcggaaacacttgtatttttctgtcttttgcttgatcatatctttgataacctgaacacccttatcctcaacctgtgccctgactatctgttcttgcaatgtgggctccaccgagatatagcttaggttacccgaagaaacaacttccaggttcagcttgcacaactcatcacacagggtggtcactcccacatccatgctcatacaattacactgggcctttctgctcaaggcatctgccacaacattggccttaccagggtggtaatgcacctccaaatcatagtccttgattaactccaaccatctcctttgcctcatgttcagatctgcctgagtgaagatgtatttgagactcttgtgatcagtatagatgttacagtgagctcccatcaagtagtgtctccatatcttaagagcatgaactacagctgccaattctagatcatgtgtagggtagttctgctcatggggcctgagtgcccgggaagcataagcaatcactctgctctcttgcatcaagacacatcccaaaccagtaccagaagcatcacaataaacttcaaatggcttggtgttgtcaggttgggccagcactggggctgttgtcaaatgctgcctcaaggtatgaaaagcatcttcacactttcggctccactcaaatttgactcccttctttaacagttcagtcattggcttggcaattctggagaaatccggaataaatcgtcgataataccctgccaatcccagaaaactccgaatctgcttcactgtagtcgggggtttccaatccattacctcttgcaccttctcaggatcaactgatatcccatcctgagaaattgtgtgacccaagaatttgatttccttcagccagaactcacatttagacaacttagcatacaattgatggtcacgcagtctctgaagtacagtatgcaagtgtttggtgtgctcggcttcattcttggaataaaccagaatatcatcaatgaaaacgaccacgaacttgtctaactctggcatgaatactgagttcatcaagtacataaaataagccggggcattggtcagcccaaaagacatcaccagaaactcatacagtccatatctggtagagaaagccgtcttgggaatatcgctagcacggatcttgatctgatggtatcctgagcgaaggtctatcttggagaataccttggctcctaccaactgatcaaacagaacatcaatgcggggcaatgggtatttgttcttaatagttaccgcattgagaggacggtagtcaacacacatcctcaaactctcatcctttttcttcacaaataatgctggacatccccatggtgaagtgcttggacgaataaaccccttgtcgaacaactcttgcaattgcttcttcaattctgccaattccacgggaggcatcctatagggtctcttggagataggagcagtcccgggttgcaactcaattgcgaactcaatgtctcggtcaggtggcatccctggtaattcttccggaaacacatccgggtaggcacagactactgggatctctttcactggggactctaacataacaaaggcacaagatcgggtacaaccctggttgggtaaatacaaaacagtctcgccataagcaggggaatggatttcaatggctctggctgcaatgtccaatactgcctgatgcctggtcaaccagtcagctcccaaaataatatccacgctatccaatcctaagatgagaagggtggttctaatcaccagactaccaaattttataggcacttgcctgttgatttgataagtggcaactctgcctcctggtgttgaaattgtaatgcccccatcggtatggtgaaagggcaactggcatttggcactaaacttggcactgataaaactatgtgaagcaccggaatcaaaaagaacaatagcgggataatttaaaattgtaaagatacaagtcatgacgggtgctccctctggaatatcagccatggtggtgaagttcaacctgccttgcctcacttgcaccctctgcctcttgccttggttctgattagcattctgcccctgcctctgctggttcctggggcaattcttggcataatgcccagtgttgccacaagtgaagcacctgttgtcatttgcctggcggtactgctgctgctggttattcctctgagctggaaactggttgcggttgggtgcctgctgctgctgctgctgaggtcggattacccatcgcccttgctgctgctggggtcccctgccctgggtgtcggacacaatcctgaagcgctgtggctgagctgagggtcctgccacaggggtcttcctcttcttctctgcctgcctagctgtaatgcagtcctcttgggagatagccatgtttaccaactcattgtagctgttggccctgacggtgttgagacgatcccggagcttagtgctgagcccccttccgaatctgtccctcttcttctcatctgtatccgcatgatatcccgcgtactggcacaagtcattaaaggcctgggcatactgcaacactgtcttgttgccctgagtgagtgccaagaactcattgagtttcctgtccatgatcccggcgggtatatggtgtcctctaaaagctgccttgaactccctccactccacctctcggtcctctggctgcatagcaagaaaatgatcccaccaagtccttgcgggtccgcgaagctgctgggtggcgaacctgactttggtgacctctgagcaagccccatggagtagtgggaatttggattccaccactcgcaaccatacatctgcgtcaagtgggtcctctgcccttgtgaacaatggaggctgggtgctgaggaattcctgataggtggccgccgcggggtgacgctggtggtctccaccaccataatgctggggtggtggctgacgttgagccagctgcctcaggatctcattctgctgagccatgagctcctgcagagtgggaggtggtggcggcggtggaggaacgtgctcgttctggccacgacgctgcctcccggccat

SEQ ID NO: 4985 - DNA, 5034 bp, Zea mays
  Clone ID: TF_ZmC36592_140
ttacataccgactcctttgggtagaaagtcggggaagtgagagcgtagaaaatccttagtctcccatgtagcttcttctgctgaatggtgactccactgaactttatacattctgaccgaccttgcccgagttgatctctccttttgatctaataccttgtcggggtactcttgataggataagtctggttctatctcaaggtctggttccggtagcacttcagtgggtaggcgaacacatttccgcagctgagatacatggaacacattgtgaactgctgacatgtgaggtggcaattccaattggtaggccacgggtccacaacttgctttgatctcatagggcccgatgtagcgaggagctaacttgcccttgatcccgaatctctggacacccttggtgggtgataccttaagataaacatggtctcccacctcaaactgtagaggcttccgcctcttgtcatgatagctcttttgcctagcctgagcagcttctaagttctttgtaataactctgaccttttcctctgcttcaagtaccaaatctggcccaaaaatttccctctctcctgcttgagaccaattcagtggggtcctacaccttctcccatataatgcctcaaaaggtgccatcttcagactagactgatagctgttattgtaagaaaactctgccaaagacagacacttgtcccaatcctttccgtagtgtagtgcacatgctcgcaacatgtcttccaaaatctgattcaccctttctgtctggccatctgtttgtggatggtatgctgagcttcggattacttgtgtcccaagtgattcttgtagcttctcacaaaagcgtgccacaaacagtgctcctctgtcggatataatggtctttggaataccatgcaatcttactatctgatcaatgtaaatttccgcatacttttctgtcttgtgggtggtgtgtactggcaagaaatgagcggtcttggtcaacctgtccacaataacccaaatagaatcatggtgcctggaggtattgggtaatcctacgataaaatccatgcaaatgtcctcccatttccaagatggtatgggaaggggttgcaaagggcctgctacctttaagtgactggccttgattctctggcaggtgtcacactcggatatgtactcggcaatttccctcttcattctggtccaccaatatagagatctgagatcatggtacatcttgttgctaccagggtgcatggagaatttggaaaggtgagcttcatccagtatcttctttctgagctcagggtccttgggaacaaccaatcgatctccaaaccatagaattcccttgctgtcctgtcggaaacacttgtatttttctgccttttgcttgatcatatctttgataacctgaacacccttatcctcaacctgtgccctgactatagggtggtaactcccacatccatgttcatacaattgcactgggcctttctgctcaaagcatttgagactcttgtgatcagtgtagatgttacagtgagctcccatcaagtagtgtctccatatcttaagagcatgaactacagctgccaattctagatcatgtgtagggtagttctgctcatggggcctgagtgctcgggaagcataagcaatgactctgttctcttgcatcaagacacaccccaatcctgtaccagaagcatcacaataaacttcaaatggcttggtgttgtcaggttgagccagcactggggctgttgtcaaatgctgcctcaaggtatgaaaagcatcttcacacttttggctccactcatacttgactcctttcttcaatagttcagtcattggtttggcaatccctgccaaacccagaaaacttcgaatctgccttactgtagccgggggtttccaatccattacctcttgcaccttctcaggatcaactgatatcccatcctgagaaattgtgtgacccaagaatttgatttccttcagccagaactcacacttagacaacttagcatacaactgatggtcacgcagtctctgaagtacagtatgcaaatgtttggtgtgctcggcttcattcttggaataaaccagaatgtcatcaatgaaaacgaccacgaacttgtctaactctggcataaatactgagttcatcaagtacatgaaataagccggggcattggtcagcccgaaagacatcaccaaaaactcatacagcccatatctggtagaaaaggtcgtcttgggaatatcgctggcacggatcttgatttgatggtaacctgagcgaaggtctatcttggagaataccttggctcctaccaactgatcaaacagaacatcaatacggggcagtgggtatttgttcttgatagtcaccgcattgagagggcggtagtcaacacacattctcaaactctcatcctttttcttcacaaataaagctggacatccccatggtgaagtacttgggcgaataaaccccttgtccaacaactcttgcaattgcttcttcaattctgccaattccacgggaggcatcctatagggtctcttggagataggagcgatctcgggttgcaattcgatggcgaactcaatatctcggtcaggtggcatccctggcaattcatccggaaaaacatccgggtagtcacggaccactgggatcttttccactggggactctatcataacaaaggcacaagaacgggtgcatccctggccaggtaaatacaaaacagtctcgccataagcaggggaatgaatttcaatggccctggctgcaatatccaatactgcctgatgcctggtcaaccagtcagctcccaatataatatccacgttatccaatcctaagatgagaagggtggttctaatcacaaggctaccgaattttataggcacttgcctgttgatttgataagtggcaaccctgcctcctggggttgaaattgtaatgcccccatcggtgtggtgaaagggcaactggcacttggcactaaatttggcactgataaaactatgcgatgcaccagaatcaaatagaataatagcaggataattcaaaactgtaaagataccagtcatgacgggtgctccctcgggaatatcagccatggtggtgaagttcagcctgccctgcctcacttgcaccttctgcctcttgccttggttctgattgacattctgcccctgcctctgctggttcctggggcaatttttggcataatgcccggtgttgccacaggtgaaacacctgttatcatttgcctggcggtactgctgctgctgctggttggtcctctgagctggaaactgggtacggttgggtgcctgctgctgttgctgctgtggtcggatcacccatctcccttgctgttgttggggtcccctgttctgagtgtcggacacaatcctgaagcgttgtggctgagcggaaggtcctgccacaggggtcttcctcttcttttctgcctgtcgagctgtaatgcagtcctcctggaagatagccatgttgaccaactcattgtagctgttggccctgacggtgttgagacggtcatggagcttagtgctgagccccctcctgaacctgtctctcttcttctcatctgtatccgcgtggtatcccgcatactggcacaagtcattaaaagcctgggcatactgcaacactgtcctgttgccctgagtgagtgccaaaaactcattgagcttccggtccataatcccggctggtatatggtgtcccctgaaagctgccttgaactccctccattccacctctcgatcctctggctgcatggcaagaaaatggtcccaccaagtccttgtgggtccgcgaagctgctgggtgacgaacctgactttggtaacctctgagcaagctccatggagtagcgggaatttggattccaccactcgcaaccacacatctgcatcaagtgggtcctctgccctggtgaacaatggaggctgggtactaaggaactcctggtaggtagctgccgcggggtgacgctgatggtctccaccaccatagtgctgaggtggtggctgacgctgagctagctgcctcaaaatctcattctgctgagccatgagctcctgcagagtgggaggtggtggcggcggtggaggaacgcgctcgttctggcccgacgctgcctcccggccatttgactcgggggaaggtggtctccctgaaccagcagtgtccacactagaggcaggctcctctcctccctcgatgtcgacgtcctcgttggcctccatgtcctggatctcctgatgatgcatgtccaagtgctcattagcctcggcaagctgctgctgggtgttaatgagctgatcctcgagaacttctatggtgttctccctggtgcccactagctcctccaactcttggatatcagtggatagctgctccacctgcaagtccttctccaccatttcagtggacaaatcaaccacgagctcctctctgttgtccaacgtaatctttgttgcctccagcagtgccatcagatgggacatcgcctcaccgcgcatcacctgcagacggtacagagcattcatgcaccgtacggtcaagtgcgcagtctgtcctgggtagatggcccagatatccttggcatgctccacccgatccttccacattgggtcgtcctccctctcggtggggaacaagccaatggggtgggtagccagctccaaaggatggaatccgcagaaagtggtcaacccatgcagagcgattgcctcgatcgtgtcctcagctcggtatccaaaagactcggagtccaaggagcgccagcctgactgcaggggatgaggctccaaggtcatcctcaccctacagcgaggtactcggtgcttctcgaactgctgcaccgcgtactgagggggtgtcatgtatccggccccctgaagtacctcccacaaaatgcggggaaagccctctcgtgcaagtccgtcagtgtgagacagtgcattcccgtcgtctgaggatccgtgggaagtcat

SEQ ID NO: 4986 - DNA, 5127 bp, Zea mays
  Clone ID: TF_ZmC36592_141
ttatgcataaaaccggggcttgccttccaaagcagtggcaggcaggtcctctggtgcaggcccgggtgctggatctggggctacctccttagcagctccttgctccggcacaaggatgtactctccgtcagcaagattacagtcgactcctttgggcagaaagtcggggaagcgagagcgcagaaaatcctcagtctcccatgtagcttcttctgctgaatggtgactccactgaaccttgtacattctgaccgaccttgcccgagttgatctttccttttgatctaataccttgacggggtactcttggtaagacaagtctggttctatctcaatgtctggctccggtagtacttcagtgggtagacgaacgcatttccgcagctgagacacatggaacacattatgaactgctgacatgtgaggtggcaattctacttgataggccacgggcccacaacttgccttgatctcatagggtccaatgtagcgaggagctaacttgcccttgatcccgaatctctggacacccttggtgggtgataccttaaggtagacatgatctcccaccacaaactgtagaggcttccgcctcctatcatgatagctcctttgcctggcctgagcagcttctaagttcttggtaataaccctgacctttgcctctgcctcgagtaccaagtctggtccaaaaatttccctttctcctgcttgagaccagtttagtggtgtcctgcaccttctcccatacaaagcctcaaaaggtgccatcttcagactggattggtagctgttattgtacgaaaactctgccaaagacagacacttgtcccaatccttcccgtagtgtagtgcacatgctcgcaacatgtcttccaaaatctgattcaccctttcggtctggccatctgtttgtgggtgatatgctgagcttcggattacttgggttccaagtgattcttgcagtttttcccaaaagcgtgccacaaacagtgctcctctgtcagatataatggtcttgggaataccatgcaatctcactatctgatcaacataaatttcagcatacttctctgtcttgtgggtggtgtgcactggcaagaaatgagcagtcttggtcaacctgtccacgataacccaaatagaatcatggtgcctggaggtattgggtaatcccactatgaagtccatgcaaatgtcctcccatttccaagatggtatgggaaggggttgtaaagggcctgctgccttcaagtgactagcctttattctctggcaagtatcacactcggatatgtacttggcaatttctcttttcattctagtccaccaatataaagatctgaggtcatggtacatcttggtgctaccagggtgcatggagaatttggaaaggtgagcttcatctagtatcttctttctgagctcagggtccttaggaacaaccaatcgatctccaaaccatagaattcccttgctgtcctgtcggaaacacttgtatttctctgccttttgcctgatcataaccttgataacctgaacacccttatcctcaacctgtgccataactatcagctcttgcaatgtgggctccaccgagatatagcttaggttacccgaataaacaacttccaggctcagcttgcacaacttatcacacagggtggtaactcctacatccatgctcacacaattgcactgggcctttctgctcaaggcatctgccacaacatttgccttccctgggtggtaatgcacttctaaatcataatccttgatcaactctaaccatctcctttgcctcatgttcagatctgcctgagtgaaaatgtacttgagactcttgtgatcagtgtagatgttacagtgagctcccatcaagtagtgtctccatatcttaagagcatgaactacagctgccaattctagatcatgtgtagggtagttctgctcatggggcctgagtgcccgggaagcataagcaatcactctgttctcttgcatcaagacacatcccaaaccagtaccagaagcatcacaatagacttcaaatggcttggtgttgtcatgttgagctagcactggggctgttgtcaaatgttgcctcaaggtatgaaaggcaccttcacacttttggctccactcaaatttgactcccttcttcaacagttcagtcattggcttggcaattctggagaaatccggaataaatcgtcgataataccctgccaatcccagaaaactccgaatctgcttcactgtagtcgggggtttccaatccatcacttcctgcaccttctcaggatcaactgatatcccatcctgagaaattgtatgacccaagaatttaatctccctcagccagaactcacacttagacaacttagcataaagatgatgatcacgcagtcgctgaagcacaatgtgcaggtgctcagtatgttcgtcctcattcttggaatagaccagaatatcatcaatgaaaacgaccacgaacttgtccaattctggcataaacactgagttcatcaggtacatgaaataagccggggcattggtcagcccaaaagacatcaccagaaactcatatagtccatatctggtagagaaagccgtcttgggaatatcgctggcacggatcttgatctgatggtatcccgagcgaaggtctatcttggagaatactttggctccaaccaactgatcaaacagaacatcaatgcggggcagtgggtatttgttcttgatagtcaccgcattgagagggcggtaatcaacacacatcctcaaactctcgtcctttttcttcacaaatgaagctggacatccccatggtgaagtgcttggacgaataaaccccttgtccaacaattcttgcaattgtttcttcaattctgccaattccgcgggaggcatcctatagggtctcttggagataggagcagtcccgggttgcaattcgattgcgaactcaatgtctcggtcaggtggcatccctggcaattcgtccggaaaaacatccgggtagtcacggaccactgggatcttttccactggggattctatcatgacaaaggcacaagaccgggtacaaccctggtcaggcaaatatagtgtggttccaccacaagttggtgagtgcacctcaatggctctagctgcaatatctatcacagcctgatttctggtcaaccaatcagttcccaatataatatccacactctccaaacccaaaatgagaaggttggttttaattatcagactaccaaactttataggcacattcttgttaatttgataagtggcaaccctgcctcctggggttgaaattgtgatacctccattggtgtggtgaaaaggcaattggcacttggcactaaattttgcgctgataaaactatgcgatgcaccagaatcaaatagaataatagcaggataattcaaaacggtaaagataccagtcatgacgggtgctccctctggaatatcagccatggtggtgaagttcagcctgccctgcctcacttgcaccttctgcctcttgccttggttctgattagcattctgcccctgcctctgctggttcctggggcaattcttggcataatgcccagtgttgccacaagtgaagcatcggttgtcatttgcctggcggtactgctgctgctggttattcctctgagctggaaactggttgcggttgggtgcctgctgctgctgctgaggtcggattacccatcgcccttgctgctgctggggtcccctgccctgggtgtcggacacaattctgaagcgctgtggctgagctgaaggtcctgccacaggggtcttcctcttcttctctgcctgtctagctgtaatacagtcctcttgggagatagccatgttgaccaactcattatagctgttggccctgacggtgttgagacgatcccggagcttagtgctgagccccctcctgaacctatccctcttcttctcatctgtatctgcatggtatccagcatactggcacaagtcattaaaggcctgggcatactgcaacactgtcctgttgccctgagtgagtgccaagaactcattgagtttccggtccatgatcccggcaggtatatggtatcctctaaaagctgccttaaactctctccactccacctctcggtcctctggctgcatagcaagaaaatgatcccaccaagtccttgcaggtccgcgaagctgctgggtggcgaacctgactttggtgatctctgagcaaactccatggagtagtgggaatttggattccaccactcgcagccatacatctgcgtcaagtgggtccttggaggcaggctcatctcctccctcaatgtcgacgtcctcgttggcctcctggtcctggatctcctggtgatgcatgtccaggtgctcgttagcctcagcaagctgctgctgagtgttaatgagctgatcctcgaggacctcgatggtgttctccctggtacctaccagctcttccaactcctgaatatcagtggatagctgctccacctgcaagtccttctccaccatttcctgagataggtcaaccacgagctcctctctgttatccagcgtgatctttgttgcctccagcagtgccatcaggtgggacattgcctcaccgcgcatcacctgcagacggtacagagcattcatgcaccgtactgtcaaatgcgcagtctgacctgggtagatggcccagatatccttggcatgctccacccgatccttccacattgggtcgtcctccttgtcagcggggaacaagccaatggggtgggtagccagctccaagggatggaatccgcagaaggtagtcaatccatgcagagcgatcgcctcgatcgtgtcctctgcccggtatccaaaagactcggagtccaaggaacgccagccgggctgcaggggatgaggctccaaggtcatcctcacccgacagcgaggcactcggtgcttctcgaactgctgcaccgcgtactgagggggtgtcgtgtatccagccccctgaagtacctcccacaaaatgcggggaaagccctctcgtgcaagtccgtcagtgtgggtcagtgcatttccgtcatcggaggatccgtgggaagtcat

SEQ ID NO: 4987 - DNA, 5265 bp, Zea mays
  Clone ID: TF_ZmC36592_144
ttacataccgactcctttgggcagaaagtcggggaagcgagagcgtagaaaatcctcagtctcccatgtagcttcttctgctgaatggtgactccactgaaccttgtacattctgaccgaccttgcccgagttgacctctccttttgatctaataccttcacggggtactcttggtaggacaagtctggttctatctcaatgtctggttccggtagcacttcagtgggtaggcgaacacatttccgcagctgagatacatggaacacattatggactgctgacatgtgaggtggtaattccaattggtaggctacgggtccacagcttgccttgatcttatagggtccaatgtagcaaggggctaacttgcccttgatcccgaatctctggacacccttggtgggtgataccttaagatagacatgatctcccacctcaaaccgtagaggtttccgcctcttatcatgatagctcctttgcctggcctgagcagcttccaagttcttggtaataaccctgacctttgcctctgcctcgagtactaaatccggcccaaaaatttccatttctcctgcttgagaccaatttagtggggtcctacaccttctcccatataatgcctcaaaaggtgccatcttcagactggactgatagctgttattgtaagaaaactctgccaaggaaagacacttgtcccaatcctttccgtagtgtagtgcacatgcccgcaacatatcttccaaaatctggttcaccctttctgtctggccatccgtttgagggtgatatgctgagcttcggattacttgggtcccaagtgattcttgcagtttctcccaaaagcgtgccacgaacagtgctcctctgtcagatataatggtctttggaataccatgcaatcttactatctgatcaacataaatttcagcgtacttctctatcttgtgggtggtgtgcactggcaagaaatgagcggtcttggtcaacctgtccacaataacccaaatagaatcatggtgcctggaggtattgggtaatcccactatgaagtccatacaaatgccctcccatttccaagatggtatgggaaggggttgcaagggacctgctgccttcaagtgactagcctttatcctctggcaagtgtcacactcggatacgtacttggcaatttcccttttcattctagtccaccaatatagagatctgagatcatggtacatcttgttgctgcccgggtgcatagagaatttggaaaggtgagcttcatctagtatctgctttctgagctcagggtccttgggaacaaccaatcgatctccaaaccatagaattcccttgctgtcctgtcggaagcacttgtatttttctgccttttgcttgatcatatctttgataacctgaacacctttatcctcaacctgtgccctgactatctgctcttgcaacgtgggctccaccgagatatagcttaggtcacccgaagaaacaacttccagattcaatctgcacaactcatcacacagggtggtcactcccacatccatgctcatacaattgcactgggcctttctgctcaaggcatctgccacaacattggccttaccagggtggtaatgcacttccaaatcatagtccttgatcaactctaaccatctcctttgcctcatgttcagatctgcctgagtgaagatgtatttgagactcttgtgatcagtatagatgttacagtgagctcccatcaagtagtgtctccatatcttaagagcatgcaccacagccgccaattccagatcatgagtggggtagttctgctcatggggcctgagtgcccgggaagcataagcaatgactctgttttcttgcatcaagacacatcccaatccggtaccagaagcatcacaataaacttcaaatggcttggtgttgtcaggttgggccagcactggggctgttgtcaaatgttgcctcaaggtatgaaaggcatcttcacacttttggccccactcaaatttgactcccttcttcaacagttcagtcattggtttggcaattttggagaaatccagaataaatcgtcgataataccctgctaatcccagaaaactccgaatttgcttcactgtagtcgggggttcccaatccgttacctcttgtaccttctcaggatcaactgatatcccatcctgagaaattgtgtgacccaagaatttaatctccttcagccagaactcacacttactcaacttagcatacaactgatgatcacgcagtctctgaagtacagtatgcaagtgtttggtgtgctcggcttcattcttggaataaaccagaatgtcatcaatgaaaacgaccatgaacttgtctagttctggcatgaatactgaattcatcaagtacataaaataagccggggcattggtcagcccaaaagacatcaccaaaaactcatagagcccatatctggtagagaaagccgtcttgggaatatcgctggcacggatccggatctgatggtatcctgagcgaaggtctatcttggagaataccttggctcctaccaattggtcgaacagaacatcaatgcggggcagcgggtatttgttcttgatagtcaccgcattgagaggacggtagtcaacacacatcctcaaactctcatcctttttcttcacaaatagtgctggacatccccatggtgaagtgcttggacgaataaaccccttgttcaacaactcttgcaattgcttcttcaattctgccaattccgcgggaggcatcctatagggtctcttggagataggagcagtcccgggttgccattcgatggcgaactcaatatctcggtcaggtggcatccctggtaattcatctgggaaaacatctgggtagtcacagaccactgggatcttttccactggggactctaacatcacaaaggcacaagatcgggtacaaccctggttgggtaaatacaaaacagtctcgccataagcaggggaatggatttcaatggctctggctgcaatatccaatactgcctgatgccgggtcaaccagtcagctcccaaaataatatccacgctatccaatcctaagatgagaagggtggtcctaatcacaagactaccaaattttataggcacttgcctgttgatttgataagtggcaactctgcctcctggtgttgaaatggtaatgcccccattggtgtggtgaaaaggcaactggcacttggcactaaatttggcactgataaaactatgcgatgcactagaatcaaaaagaataatggcaggataacttaaaactgtaaagataccagtcatgacgggtgctccctctggaatatcagccatggtggtgaagtttagcctgccctgcctcacttgcaccttctgtctcttgccttgggtctgattgacattctgcccctgcctctgctggttcctggggcaatttttggcataatgcccagtgttgccacatgtgaagcacctgttgtcatttgcctggcggtactgttgctgctgctgattgttcctctgagctggaaattgggtgcggttgggtgcctgctgctgctgcggtcggatcacacatcgcccttgttgctgctggggtcccctgccctgggtgtcggacacaatcctgaagcgctgtggctgagctgagggtcctgccacaggggtcttcctcttcttctctgcctgtctagctgtaatgcagtcctcctgggagatagccatgttgaccaactcattgtaacggttggccctgacggtgttgagacggtcacggagcttagtgctgagccccctcctgaacctatccctcttcttctcatctgtatctgcatgatatcccgcatactggcacaaatcactaaaagcctgggcatactgcaacactgtcctgttgccctgagtgagtgccaaaaactcattgagcttcctgtccatgatcccggctggtatatggtgtcctctaaaagctgccttgaactccctccactccacctctcggtcctctggctgcatagcaagaaaatgatcccaccaagtccttgcaggtccacgaagctgctgggtggcgaacctgactttggtgacctctgagcaagctccatggagcagtgagaatttggattccaccactcgcaaccatacatctgcatcaagtgggtcctccgcccttgtgaacaatggaggctgggtgctaaggaattcctggtatgtagccgccgcggggtgacgctgatggtctccaccaccataatgctgaggtggtggctgacgttgagccagctgcctcaggatctcattctgctgagccatgagctcctgcagagtgggaggtggtggcggcggtggaggaacgcgctcgttctggccacgacgctgcctcccggccatactcgactcgggggaaggtggtcttcctgagccagcagtgtccacactggaggcaggctcatctcctccctcaatgtcgacgtcctcgttggcctcctggtcctggatctcctggtgatgcatgtccaggtgctcgttagcctcagcaagctgctgctgagtgttaatgagctgatcctctagaacctcgatggtgttctccctggtgcctaccagctcctccaactcctgaatatcagtggatagctgctccacctgcaagtccttctccaccatttcttgagacaagtcaaccatgagttcctctctgttgtccaacgtaatctttgttgcctccagcagtgccatcaggtgggacattgcctcaccgcgcatcacctgcagacggtacagggcattcatgcatcgtacagtcaagtgcgcggtctgtcctgggtagatggcccagatatccttggcatgctccacccgatccttccacattgggtcgtcctccctctcagcggggaacaagccaatggggtgggtagccagctccaaaggatggaacccgcagaaggtagtcaatccatgcagagcgattgcctcgatcgtgtcctctgctcggtatccgaaagactcggagtccaaagagcgccatcctggctgcaggggatgaggctccaaggtcatcctcactctacagcgaggcactcggtgcttctcgaactgctgcaccgcgtactgagggggtgtcgtgtatccggccccctgaagtacctcccacaaaatgcggggaaagccctctcgtgcaagtccgtcagtgtgggtcagtgcatttccgtcatcggaggatccgtgggaagtcat

SEQ ID NO: 4988 - DNA, 1894 bp, Zea mays
  Clone ID: TF_ZmC36592_146
ctactggttcctggggcaattcttggcataatgcccagtgttaccacaagtgaagcatctgttgtcatttgcctggcggtactgctgctgctggttattcctctgagctggaaactggttgcggttgggtgcctgctgctgctgcggtggtctgatcacccatctcccttgctgctgctgggggcccctgccctgggtgtcggacacaatcctgaagcgctgtggctgagctgagggtcctgccacaggggtcttcctcttcttctctgcctgcctagctgtaatgcagtcctcttgggagatagccatgttgaccaactcattgtagctattggccctgacggtgttgagacgatctcggagcttagtgctgagcccccttctgaatctgtccctcttcttctcatctgtatctgcatgatatcccgcgtactggcacaagtcattaaaagcctgggcatactgcaacactgtcctgttgccctgagtgagtgccaagaactcatttagcttcctgtccatgatcccggcaggtatatggtgtcctctaaaagctgccttaaactctctccactccacctctcggtcctctggctgcatagcaagaaaatgatcccaccaagtccgtgcaggcccgcgaagctgctgggcggcgaacctgactttggtgacctctgagcaagctctatggagtagtgggaatttggattccaccactcgcaaccacacatctgcgtcaagtgggtcctccgcccttgtgaacaatggaggctgggtgctaaggaattcctgataggtggccgccgcggggtgacgttggtggtctccaccaccataatgctgaggtggtggctgacattgagccagctgcctcaggatctcattctgctgagccatgagctcctgcagagtgggaggtggtggcggcggtggaggaacgcgctcgttctggccacgacgctgcctcccggccatctgaaaaaccacatacttacttaacaccacagttccaaatcctggacacctagtgagcgaacgaagcaacactcgactcgggggaaggtggtcttcccgagccagcagtgtccacactggaggcaggctcatctcctccctcaatgtcgacgtcctcattggcctcctggtcctggatctcctggtgatgcatgcccaggtgctcgttagcctcagcaagctgctgctgagtgttaatgagctgatcctcgagaacctcgatggtgttctccctggtgcctaccagctcctccaactcctgaatatcagtggatagctgctccacctgcaagtccttctccaccatttcctgagataggtcaaccaccagctcctctctgttatccagcgtgatctttgttgcctccagcagtgccatcagatgggacattgcctcaccgcgcatcacctgcagacggtacagagcattcatgcaccgtactgtcaagtgcgcagtctgacctgggtagatggcccagatgtccttggcatgctccacccgatccttccacattgggtcgtcctccttctcagcggggaacaagccaatggggtgggtagccagctccaagggatggaatccgcagaaggtagtcaacccatgcagagcgatcgcctcgatcgtgtcctctgcccggtacccgaaagactcggagtccaaggagcgccagcctggctgcaggggatgaggctccaaagtcatcctcaccctacagcggggcactcggtgcttctcgaactgctgcaccgcgtactgagggggtgtcgtgtatccggccccctgaagtacttcccacaaaatgcggggaaagccctctcgtgcaagtccgtcagtgtgggtcagtgcattttcgtcatcggaggatccatgggaagtcat

SEQ ID NO: 4989 - DNA, 4788 bp, Zea mays
  Clone ID: TF_ZM4508.C4.o1.fg
atggctatctcccaagaggactgcattacagctagacaggcagagaagaagaggaagacccccgtggcaggaccctcagctcagccacagcgcttcaggattgtatccgacacccagggcaggggaccccagcagcaacaagggcgatgggtaatccgacctcagcagcagcagcaggcacccaaccgcaaccaatttccagcacagcggaataatcagcagcagcagtaccgccaagccaatgacaacaggtgcttcacttgtggcaacactgggcattatgccaagaattgccccagaaaccagcagaggcaggggcagaatgctaatcagaaccaaggcaagaggcagaaggtgcaagtgaggcaaggcaggctgaacttcaccaccatggctgatattccagagggagcacccgtcatgactggtatctttacagtattaaattttcctgctattgttctttttgattccggtgcttcacatagttttatcagtgccaagtttagtgccaaatgccagttgccctttcaccacaccgatgggggcattacaatttcaacaccaggaggcagggttgccacctatcaaatcaacagacacgtgcccataaagtttggtagtctaataattaaaaccaccctcctcattttggggttggatagtgtggatattatattgggaactgactggttaaccaggcatcgagcagttattgatattgcagccagggccattgaggtgcactcaccaacctgtggtgaaactacattatatttgcccgatcagggatgcacccgttcttgtgctttcgttatgatagattccccagtggaaaggatcccagtggtctgtgactacccagatgttttcccagatgaattgccaggaatgccacctgaccgagatattgagttcgccatcgaattgcaacccggggctgctcctatctccaagagaccctataggatgcctcccgcggaattggcagaattgaagaaacaattgcaagagttgttggacaaggggtttattcgcccaagcacttcaccatggggatgtccagcactatttgtgaagaaaaaggatgagagtttgaggatgtgtgttgactaccgtcctcttaatgcggtgactatcaagaacaaatacccgctgccccgtattgatgttctgttcgatcaattggttggagccaaggtattctccaagatagaccttcgctcaggataccatcagatcaagatccgtgccagtgacattcccaagacagctttctctaccagatatgggctgtatgagtttttggtgatgtctttcgggctgaccaatgccccggcttattttatgtacttgatgaactcagtattcatgccagagttagacaagttcgtggttgtttttattgatgatattttggtctattccaagaatgaagatgagcatactgagcacctgcacatcgtacttcaacgactgcgcgatcatcatctttatgctaagttgtccaaatgtgagttttggctgaaggagatcaaattcttgggtcacacaatttctcaagatgggatatcagttgatcctgaaaaggtacaagaggtaatggattggaaacccccgactacagtgaagcagattcggagttttctgggactggcagggtattatcgacgatttattccggatttctccagaattgccaaaccaatgactgaactgttaaagaagggagtcaaatttgagtggagtcaaaagtgtgaagatgccttccataccttgaggcagcatttgacaacagccccagtgctagctcaacctgacaacaccaagccatttgaagtttattgtgatgcttctggtactggattgggatgtgtcttgatgcaagagagcagagtgattgcttatgcttctcgggcactcaggccccatgagcagaactaccctacacatgatctagaattggcagctgtagttcatgctcttaagatatggagacactacctgatgggagctcactgtaacatctacactgatcacaagagtctcaaatacatcttcactcaggcagatctaaacatgaggcaaaggaggtggttagagttgatcaaggattatgatttggaagtgcattaccatccagggaaggccaatgttgtggcagatgccttgagcagaaagacccagtgtaattgtatgggcatggatgtgggagtgaccaccctgtgtgatgagttgtgcaagctgaacttggaagttgtttcttcgggtaacctaagctatatctcggtggaacccacattgcaagagcagataatcagggcacaagttgaggataagggtgttcaggttatcaaggatatgatcaagcaaaaggcagagaaatacaagtgtttccgacaggacagcaagggaattctatggtttggagatcgattggttgttcctaaggaccctgagctcagaaagaagatactagatgaagctcacctttccaaattctctatgcaccctggtagcaccaagatgtaccatgacctcagatctttatattggtggactagaatgaaaagagaaattgccaagtacatatctgaatgtgatacttgccagaggataaaggctagtcacttgaaggcagcaggccctttgcaaccccttcccataccatcttggaaatgggaggacatttgcatggactttatagtgggattacccaatacttctaggcaccatgattctatttgggttatcgtggacagattgaccaagactgctcatttcttgccagtgcataccacccacagggcagaaaagtacgctgaaatttacgttgatcagatagtaaggttgcatggtattcccaagaccattatatctgacaggggagcaccatttgtggcacgattttgggagcaattgcaagagtcacttgggacccatgtcatccgaagctcagcatatcacccccaaacagatggccagacagaaagggtgaatcaaattttggaagacatgttgcgagcatgtgcactacattatggaaaggattgggacaagtgtctgtctttggcggagttttcttacaataacagctatcagtccagtttgaagatggcaccttttgaggctttgtatgggagaaggtgcaggacaccactaaactggtctcaagcaggagaaagggaaatttttgggccagacttggtactcgaggcagaggcaaaggtcagggtgattaccaagaacttggaagctgctcaggctaggcaaaggagctatcatgataagaggcggaagcctctacagtttgaggtgggagatcatgtctatcttaaggtatcacccaccaagggtgttcagagattcgggatcaagggcaagttagctcctcgctatattggaccctacgagatcaaggaggcttgtggacccgtagcctatcaagtggaattgccacctcacatgtcggcagttcataatgtgttccatgtatctcagctgcggaaatgcgttcgtctacccactgaagaactcccagaaccagaccttgagatagaaccagatttatcctaccaagagtaccccgtcaaggtgctagatcaaaaggaaagatcaactcgggcaaggtcggtcaggatgtataaggttcaatggggtcaccattcagcagaagaagctacatgggagactgaggattttctacgctctcgcttccccgactttctacccaaaggagtcgactgtaatcttgctgacggagagtacatcctcgtgccggagcaaggagctgctcaggagtggactttacccctcacgcgacctgagacgaggtctctcattccggttatggtgggtacaagtgcggtcactgcacgacggccagtcggggtcagtgaggcattgtacgccaaggcgatgacttcccacggatcctccgatgatggaaatgcactgacccacactgacgggcttgcacgagagggctttccccgcattttgtgggaagtacttcagggggctggatacacgacaccccctcagtacgcggtgcagcagttcgagaagcaccgggtgccccgctgtagggtgaggatgaccttggagcctcatcccctgcagccaggctggcgctccttggactcagagtctttcgggtaccgggcagaggacacgatcgaggcgatcgctctgcatggattgactaccttctgcggattccatcccttggagctggctacccaccccattggcctgttccccgctgagaaggaggacgacccaatgtggaaggatcgggtggagcatgccaaggatatctgggccatctacccaggtcagactgcgcatttgacagtgcggtgcatgaatgctctgtaccgtctgcaggtgatgcgcggtgaggcaatgtcccacctgatggcactgctggaggcaaccaagatcatgctggataacagagaggagctcgtggttgacctatctcaggaaatggtggagaaggacttgcaagtggagcagctatccactgacattcaggagttggaggagctggtaggtaccagggagaacaccattgaggtccttgaggatcagctccttaacactcagcagcagcttgctgaggctaacgagcacctggacatgcaccaccaggagatccaggaccaggaggacaacgaggacgttgacattgagggaggggatgagcctgcctccagtgtggacactgctggctcgggaagaccaccttcccccgagtcaagtgttgcttcgttcgctcactag

SEQ ID NO: 4990 - DNA, 987 bp, Zea mays
  Clone ID: TF_ZM4508.C4.o2.fg
atggccgggaggcagcgtcgtggccagaacgaacgcgttcctccaccgccgccaccacctcccactctgcaggagctcatggctcagcagaatgagatcctgaggcagctggctcagcgtcagccaccaccccagcattatggtggtggagaccaccagcgtcaccccgcggtggccacctatcaggaattcctcagcacccagcctccactattcacaagggcggaggacccacttgacgcagatgtatggctgcgagtggtggaatccaaatttccactgctccatggagtttgctcagaggtcaccaaagtcaggttcgccacccagcagcttcgcggacctgcaaggacttggtgggatcactttcttgctatgcagccagaggaccgagaggtggagtggagggagtttaaggcagcttttagaggacaccatatacccgccgggatcatggacaggaagctcaatgagtttttggcactcactcagggcaacaggacaatgttgcagtatgctcaggcctttaatgacttgtgccagtatgcgggatatcatgctgatacagatgagaagaagagggacagattcagaagggggctcagcactaagctccgggatcgtctcaacaccgtcagggccaacagctacaatgagttggtcaacatggcttttttccccaagaggactgcattaaagctagacaagcagagaagaagaggaagacccccgtggggaccccagcagcaacaagggcgatgggtaatccgacctcagcagcagcagcaggcacccaaccgcaaccaatttccagcacagcggaataatcagcagcagcagtaccgccaagccaatgacaacaggtgcttcacttgtggcaacactgggcattatgccaagaattgccccagaaaccagcagaggcaggggcagaatgctaatcagaaccaaggcaagaggcagaaggtgcaagtgaggcaaatttaa

SEQ ID NO: 4991 - DNA, 2226 bp, Zea mays
  Clone ID: TF_ZM4508.C5.o1.fg
ctcagcacccagcctccactattcacaagggcggaggacccacttgacgcagatgtatggctgcgagtggtggaatccaaatttccactgctccatggagtttgctcagaggtcaccaaagtcaggttcgccacccagcagcttcgcggacctgcaaggacttggtgggatcactttcttgctatgcagccagaggaccgagaggtggagtggagggagtttaaggcagcttttagaggacaccatatacccgccgggatcatggacaggaagctcaatgagtttttggcactcactcagggcaacaggacagtgttgcagtatgctcaggcctttaatgacttgtgccagtatgcgggatatcatgctgatacagatgagaagaagagggacagattcagaagggggctcagcactaagctccgggatcgtctcaacaccgtcagggccaacagctacaatgagttggtcaacatggctatctcccaagaggactgcattaaagctagacaagcagagaagaagaggaagacccccgtggtaggaccctcagctcagccacagcgcttcaggattgtatccgacacccagggcaggggaccccagcagcaacaagggcgatgggtaatccgacctcagcagcagcagcaggcacccaaccgcaaccaatttccagcacagcggaataatcagcagcagcagtaccgccaagccaatgacaacaggtgcttcacttgtggcaacactgggcattatgccaagaattgccccagaaaccagcagaggcaggggcagaatgctaatcagaaccaaggcaagaggcagaaggtgcaagtgaggcaaggcaggctgaacttcaccaccatggctgatattccagagggagcacccgtcatgactggtatctttacagtattaaattttcctgctattgttctttttgattccggtgcttcacatagttttatcagtgccaagtttagtgccaaatgccagttgccctttcaccacaccgatgggggcattacaatttcaacaccaggaggcagggttgccacctatcaaatcaacagacacgtgcccataaagtttggtagtctaataattaaaaccaccctcctcattttggggttggatagtgtggatattatattgggaactgactggttaaccaggcatcgagcagttattgatattgcagccagggccattgaggtgcactcaccaacctgtggtgaaactacattatatttgcccgatcagggatgcacccgttcttgtgctttcgttatgatagattccccagtggaaaggatcctagtggtctgtgactacccagatgttttcctagatgaattgccaggaatgccacctgaccgagatattgagttcgccatcgaattgcaacccggggctgctcctatctccaagagaccctataggatgcctcccgcggaattggcagaattgaagaaacaattgcaagagttgttggacaaggcactatttgtgaagaaaaaggatgagagtttgaggatgtgtgttgactaccgtcctcttaatgctgtgactatcaagaacaaatacccgctgccccgtattgatgttctgttcgatcaattggttggagccaaggtattctccaagatagaccttcgctcaggataccatcagatcaagatccgtgccagtgacattcccaagacagctttctctaccagatatgggctgtatgagtttttggtgatgtctttcgggctgaccaatgccccggcttattttatgtacttgatgaactcagtattcatgccagagttagacaagttcgtggttgtttttattgatgatattttggtctattccaagaatgaagatgagcatactgagcacctgcacatcgtacttcaacgactgcgcgatcatcatctttatgctaagttgtccaaatgtgagttttggctgaaggagatcaaattcttgggtcacacaatttctcaagatgggatatcagttgatcctgaaaaggtacaagaggtaatggattggaaacccccgactacagtgaagcagattcggagttttctgggactggcagggtattatcgacgatttattccggatttctccagaattgccaaaccaatgactgaactgttaaagaagggagtcaaatttgagttgagtcaaaagtgtgttaaagacttccatagtagaggcagcctctga

SEQ ID NO: 4992 - DNA, 4335 bp, Zea mays
  Clone ID: TF_ZM4589.C1.o8.fg
atggccgggaggcagcgtcgtggccagaacgagcgcgttcctccaccgccaccaccacctcccactctgcaggagctcatggctcagcagaatgagatcctgaggcagctggctcaacgtcagccaccacctcagcattatggtggtggggaccaccaacgtcaccccgcggcggccacctatcaggaattcctcagcacccagcctccactattcacaagggcggaggacccacttgacgcagatgtatggctgcgagtggtggaatccaaattcccactactccatggagtttgctcagagatcaccaaagtcaggttcgccacccagcagcttcgcggacctgcaaggacttggtgggatcattttcttgctatgcagccagaggaccgagaggtggagtggagagagtttaaggcagcttttagaggacaccatatacctgccgggatcatggaccggaaactcaatgagttcttggcactcactcagggcaacaggacagtgttgcagtatgcccaggcctttaatgacttgtgccagtacgcgggatatcatgcagatacagatgagaagaagagggacagattcagaagggggctcagcactaagctccgggatcgtctcaacaccgtcagggccaacagctacaatgagttggtcaacatggctatctcccaggaggactgcattacagctaggcaggcagagaagaagaggaagacccctgtggcaggaccttcagctcagccacaacgcttcaggattgtgtccgacacccaaggcagggggccccagcagcagcaagggcgatgggtaatccgacctcagcaacagcagcagcaggcacccaaccgcaatcaatttccagcacagcggaataatcagcagcagcagtaccgccaagccaatgacaacaggtgcttcacttgtggcaacactgggcattatgccaagaattgccccaggaaccagcagaggcaggggcagaatgcaaatcagaaccaagggaagaggcagaaggtgcaagtaaggcaaggcaggctgaacttcaccaccatggctgacattccagagggagcacccatcttgactggtatctttacagttttgaattatcctgctattgttctttttgattctggtgcatcacacagttttatcagtaccaaattttgtgccaagtgccaattgccttttcaccacaccaatgggggtattacaatctcaacaccaggaggcagggttgcctcctatcagatctgtaggcacgtaccaattaagctgggtagtctcatattcaaaactaccctaatgataatggggttggatagtgtggatattatattgggagctgactggttgaccaggcaccaagcagttatggatattgcagccagagccattgaggtgcactcaccaacttgcggtgagaccacactgtatttgcgtgaccggggttgtacccgaccttgtgcttttgttatgttagaatccccagtggaaaagatcccagtggtctatgactatccggatgtttttccggatgaattgccaggaatgccacctgaccgagatattgagttcgccatcgaattgcaacccgggactgctcctatctccaagagaccttataggatgcctcccgcggaattggcagaattaaagaaacaattgcaagagttgttggacaaggggtttattcgtccaagcacttcaccatggggatgtccagcattatttgtgaagaaaaaggatgagagtttgaggatgtgtgttgactaccgtcctctcaatgcggtgactattaagaacaaatacccgctgccccgcattgatgttctgtttgatcagttggttggagccaaggtgttctccaagatagaccttcgctcgggataccatcagatcaagatccgtgccagcgacattcccaagacggctttctctaccatatatggactgtatgagtttctggtgatgtcttttgggctgaccaatgccccggcctatttcatgtacctgatgaactcagtgtttatgccagaattggataagttcgtggttgttttcattgatgatatactgagactgcgtgatcatcagttgtatgctaagctgagtaagtgtgagttttggctaaaagagatcaaattcttgggtcacacaatttctcaggatgggatatcagttgatcctgagaaggtacaagaggtaatggattggaaacccccgactacagtgaagcagattcggagttttctgggattggcagggtattaccgacgatttattccggatttctccagaattgccaaaccaatgactgaattgttgaagaagggagtcaaatttgagtggagccaaaagtgtgaaggtgcctttcataccttgaggcagcatttgacaacagccccagtgctagctcaacctgacaacaccaagccatttgaagtctattgtgatgcttctggtactggtttgggatgtgtcttgatgcaagagaacagagtgattgcttatgcttcccgggcactcaggccccatgagcagaactaccctacacatgatctagaattggcagctgtagttcatgctcttaagatatggagacactacttgatgggagctcactgtaacatctacactgatcacaagagtctcaagtacattttcactcaggcagatctgaacatgaggcaaaggagatggttagagttgatcaaggattatgatttagaagtgcattaccacccagggaaggcaaatgttgtggcagatgccttgagcagaaaggcccagtgcaattgtgtgagcatggatgtaggagttaccaccctgtgtgatgagttgtgcaagctgaacctggaagttgtttattcgggtaacctaagctatatctcggtggagcccacattgcaagagctgatagtcagggcacaggttgaggataagggtgttcaggttatcaaggatatgatcaagcaaaaggcagagaaatacaagtgtttccgacaggacaacaagggaattctatggtttggagatcgattggttgttcctaaggaccctgagctcagaaagaagatactggacgaagctcacctttccaaattctccatgcaccctggtagcaacaagatgtaccatgatctcagatctctgtattggtggactagaatgaaaagggaaattgccaagtacatatccgagtgtgatacttgccagaggataaaggctagtcacttgaaggcagcaggccctttgcaaccccttcccataccatcttggaaatgggaggacatttgcatggacttcatagtgggattacccaatacctccaggcaccatgattctatttgggttatcgtggacaggttgaccaagactgctcatttcttgccagtgcacaccacccacaagacagagaagtatgctgaaatttatgttgatcagatagtgagattgcatggtattcccaagaccattatatctgacagaggagcactgtttgtggcacgcttttgggaaaaactgcaagaatcacttggaacccaagtaatccgaagctcagcatatcacccacaaacagatggccagaccgaaagggtgaatcagattttggaagacatgttgcgagcatgtgcactacactacgggaaggattgggacaagtgtctgtctttggcagagttttcatacaataacagctaccagtccagtctgaagatggcaccttttgaggctttgtatgggagaaggtgcaggaccccactaaactggtctcaagcaggagaaagggaaatttttgggccagacttggtactcgaggcagaggcaaaggtcagggttcttaccaagaacttagaagctgctcaggccaggcaaaggagctatcatgataggaggcggaagcctctacagtttgtggtgggagatcatgtctaccttaaggtatcacccaccaagggtgtccagagattcgggatcaagggcaagttagctcctcgctacattggaccctatgagatcaaggcaagttgtgggcccgtggcctatcaagtagaattgccacctcacatgtcagcagttcataatgtgttccatgtgtctcagctgcggaaatgcgttcgtctacccactgaagtactaccggagctagacattgagatagaaccagacttgtcttaccaagagtaccccgtcaaggtattagatcaaaaggaaagatcaactcgggcaaggtcggtcagaatgtacaaggttcagtggagtcaccattcagcagaagaagctacatgggagactgaggattttctgctgatagtcgcctag

SEQ ID NO: 4993 - DNA, 4644 bp, Zea mays
  Clone ID: TF_ZM4783.C4.o3.fg
atgacttcccatggatcctccgatgacgaaaatgcactgacccacactgacggacttgcacgagagggctttccccgcattctgtgggaggtacttcagggggctggatacacgacaccccctcagtacgcggtgcagcagttcgagaagcaccgggtgccccgctgtagggtgaggatgaccttggagcctcatcccctgcagccaggctggcgctccttggactccgagtcttttgggtaccgggcagaggacacgatcgaggcgatcgctctgcatgggttgactaccttctgcggattccatcccttggagctggctacccaccccattggcttgttccccgctgagaaggaggacgacccaatgtggaaggatcgggtggagcacgccaaggacatctgggccatctacccaggacagactgcgcatttgacagtacggtgcatgaatgccctgtaccgtctgcaggtgatgcgcggtgaggcaatgtcccatctgatggcactgctggaggcaacaaagatcacgctggataacagagaggagctcgtggttgacctatcacaagaaatggtggaaaaggacttgcaggtggagcagctatccactgatattcaggagttggaggagctggtaggcaccagggagaacaccatcgaggttctcgaggatcagctcattaacactcagcagcagcttgctgaggctaacgagcacctggacatgcatcaccaagagatccaggaccaggaggccaacgaggacgtcgacattgagggaggagatgagcctgcctccagtgtggacaccgctggctcgggaagaccaccttcccccgagtcaaatggccggaaggcagcttttagaggacaccatataccagccgggatcatgtacaggaagctcaatgagttcttggcactcactcagggcaacaggacagtgttgcagtatgcccaggcctttaatgacttgtgccagtacgcgggatatcatgcagatacagatgagaagaagagggacagattcagaagggggctcagcactaagctccgggatcgtctcaacaccatcagggccaacagctacaatgagttggtcaacatggctatctcccaagaggactgcattacagctaggcaggcagagaagaagaggaagacccctgtggcgggaccctcagctcagccacagcgcttcaggattgtgtccgacacccagggcagggggccccagcagcagcaagggcgatgggtaatccgacctcagcagcagcagcagcagggacccaaccgcacccaatttccagctcaaaggggcaatcaacagcagcagcagtaccgccaagccaatgacaacaggtgcttcacttgtggcaacactgggcattatgccaagaattgccccaggaaccagcagaggcaggggcagaatgtcaatcagaaccaaggcaagagacagaaggtgcaagtgaggcaaggcaggctgaacttcaccaccatggctgatattccagagggagcacccgtcatgactggtatctttacagttttaaattatcccgctattgttctttttaattccggtgcttcacatagttttatcagtgccaagtttagtgccaaatgccagttgccctttcaccataccgatgggggcattacaatttcaacaccaggaggcagagttgccacttatcaaatcaacaggcaagtgcctataaaatttggtagtctggtgattagaaccacccttctcgtcttaggattggatagcgtggatattattttgggagctgactggttgaccaggcatcaggcagtattggacattgcaaccagagccattgaaatccattcccctgcttatggcaagactgttttgtatttacccaaccagggttgtacccgttcttgtgcctttgttatgatagaatccccagtggaaaagatcccagtggtctgtgactatccggatgtttttccggatgaattgccaggaatgccacctgaccgagatattgagttcgccatcgaattgcaacccgggaccgctcctatctccaagagaccctataggatgcctcccgcggaattggcagaattgaagaaacaattgcaagagttgttggacaaggggtttattcgtccaagcacttcaccatggggatgtccagcattatttgtgaagaaaaaggatgagagtttgaggatgtgtgttgactaccgccctctcaatgcggtgaccataaagaacaaatacccgttgcctcgcattgatgttctgtttgatcaattggttggagccaaggtattctccaagatagaccttcgctcaggataccatcagatcaagatccgcgctagcgatattcccaagacggctttctctaccagatatggactgtatgagtttctggtgatgtcttttgggctgaccaatgccccggcttatttcatgtacctgatgaattcagtgtttatgccagaattggataagttcgtggttgtcttcattgatgatattctggtttattccaagaatgaagccgaacacaccaaacacttgcatactgtacttcagagactgcgtgatcatcagttgtatgctaagctgagtaaatgtgagttctggctgaaggagattaaattcttgggtcacacaatttctcaggatgggatatcagttgatcctgagaaggtgcaagaggtaatggaatggaaacccccggctacagtgaagcagattcggagttttctgggattggcagggtattatcgacgatttattccggatttctccagaattgccaagccaatgactgagctgttgaagaagggagtcaaatttgagtggagccaaaagtgtgaagatgccttccataccttgaggcagcatttgacaatagccccagtgctggcccaacctgacaacaccaagccatttgaagtttattgtgatgcttctggtactggtttgggatgtgtcttgatgcaagagagcagagtgattgcttatgcttctcgggcactcaggccccatgagcagaactaccctacacatgatctagaattggcagttgtagttcatgctctgaagatttggagacactacctgatgggagctcactgtaacatctacactagtcacaagagtctcaaatacatcttcactcaggcagatctgaacatgaggcaaaggagatggttagagctgatcaaggactatgatttagaagtgcattaccacccgggtaaggccaatgttgtggcagatgccttgagcagaaaggcccagtgtaattgtatgagcatggatgtgggagtaaccaccctgtgtgatgagttgtgcaaactgaacctggaagttgtttcttcgggtaaactaagctatatctcggtggagcccacattgcaagaacagattgtcagggcacaggttggggataagggtgttcaggttatcaaagatatgatcaagcaaaaggcagaaaaatacaagtgtttccgacaggatagcaagggaattctatggtttggagatcgattggttgttcccaaggaccctgagcttagaaagaagatactagatgaagctcacctttcaaaattctccatgcaccctggtagcaacaagatgtaccatgatctcagatctctatattggtggactagaatgaaaagggaaattgccaagtacatatccgagtgtgatacttgccagaggataaaggctagtcacttgaaggcagcaggccctttgcaaccccttcccataccatcttggaaatgggaggacatttgtatggacttcatagtgggattacccaatacctccaggcaccatgattctatttgggttatcgtggacaggttgaccaagactgctcatttcttgccagtgcataccacccacagggcagagaagtacgctgaaatttatgttgatcagatagtaaggttgcatggtattcccaaaaccattatatcggacagaggagcaccatttgtggcacgattttgggagcaactacaagagtcacttgggacccatgtcatccgaagctcagcataccacccccaaacagatggccagacagaaagggtgaatcaaattttggaagacatgttgcgagcttgtgcactacattatggaaaggattgggacaagtgtctgtctttggcagaattctcttacaataacagctatcagtccagtttgaagatggcaccttttgaggcactatatgggagaaggtgtaggaccccacttaattggtctcaagcaggagaaagggaaatttttgggccagacttggtactcgaggcagaggcaaaggtcagggtgattaccaaaaacttggaagctgctcaggctaggcaaaggagctatcatgataagaggcggaagcctctacagtttgaggtgggagatcatgtctatcttaaggtatcacccaccaagggtgttcagagattcgggatcaagggcaagttagctcctcgctatattgggccctacgagatcaaagaggcttgtggacccgtagcctatcaagtggaattgccacctcacatgtcagcagttcataatgtgttccatgtatctcagctgcggaaatgcgttcgtctacccacctaa

SEQ ID NO: 4994 - DNA, 1050 bp, Zea mays
  Clone ID: TF_ZM4853.C2.o5.fg
atggccgggaggcagcgtcgtggccagaacgagcgcgttcctccaccgccaccaccacctcctactctgcaggagctcatggctcagcagaatgagatcctgaggcagctggctcaacgtcagccaccacctcagcattatggtggtggggaccaccaacgtcaccccgcggcggccacctatcaggaattcctcagcacccagcctccactgttcacaagggcggaggacccacttgacgcagatgtgtggctgcgagtggtggaatccaaatttccactgctccatggagtttgctcagaggtcaccaaagtcaggttcgccacccagcagcttcgcggacctgcaaggacatggtgggatcattttcttgctatgcagccagaggaccgagaggtggagtggagggagtttaaggcagcttttagaggacaccatatacccgccgggatcatggacaggaaactcaatgagttcttggcactcactcagggcaacaggacagtgttgcagtatgcccaggcctttaatgacttgtgccagtatgcggggtatcatgcagatacagatgagaagaagagggacagattcagaagggggctcagcactaagctccgggatcgtctcaacaccgtcagggccaacaactacaatgagttggtaaacatggctatctcccaagaggactgcattacagctaggcaggcagaaaagaagaggaagacccccgtggcaggaccctcagctcagccacagcgtttcagaattgtgtccgacacccagggcaggggacctcagcagcagcaagggcgatgggtaatccgacctcagcagcagcagcaggcacccaaccgcatccaatttctagctcagaggggcaatcagcagcagcagcagtaccgtcaagccaatgacaacaggtgcttcacttgtggcaacactgggcattatgccaagaattgccccaggaaccagcagaggcaggggcagaatgcaaatcagaaccaaggcaagagacagaaggtgcaattttatcagtaccaaatttag

SEQ ID NO: 4995 - DNA, 4410 bp, Zea mays
  Clone ID: TF_ZM4906.C5.o3.fg
atgacttcccacggatcctcagacgacggaaatgcactgtcccacactgacaggcttgcacgagagggctttccccgcattttgtgggaggtacttcagggggccggatacacgacacctcctcagtacgcggtgcagcagttcgagaagcaccgagtgccccgctgtagagtgaggatgaccctggagcctcatcccctacagccaggctggcgttcactggactctgagtcctttggataccgggctgaggacacgatcgaggcaattgctctgcatgggttgaccactttctgcggattccatcccttggagctgtctacccaccccattggcttgttccccgtagaaagggaggacgacccgatgtggaaggatcgggtggagcacgccaaggacatctgggctatctacccaggtcagactgctcacttgacagtacggtgcatgaatgccctgtaccgtttgcaagtgatgcgtggtgaggcaatgtctcatctgatggcattattggaggcaacaaagatcaccttggacaacagaaaagagcttgtggttgatttgtccactgagatggtggaaaaggacttacaggtggagcagctatccaatgagatccaagagctggaggaattagtgggtaccagagagaacaccatcgaggttctcgaggatcagctcattaacacccagcagcagcttgccgaggctaatgagcacctggatatgcatcgccaggagatccaagacatggaggccaacgaggacgtcgacattgagggaggagaggagcctgcctccagcttggacactgcgggctcagggagaccaccttcccccgagtcgagtatggccgggagagcgcgtcgtggccagaatgagcgcgttcctccaccgccgccaccgcctcccactctgcaggagctaatggctcagcagaatgagatcttgaggcagctagctcagcgtcagccaccacctcagcactatggtggtggagaccatcagcgtcaccccgcggcagctacctaccaggagttcctcagtacccaacctcctttgttcactagggcagaggacccacttgatgcagatgtgtggttgagagtagtggaatccaaattcccgctactccatggagtttgctcagaggtcacaaaagtcaggttcgctacccagcagcttcacggacccgcaaggacttggtgggatcattttcttgctatgcagccagatgaccgagagggcaacaggacagtgttgcagtatgctcaggcttttaatgacctgtgccagtatgctgggtatcatgcagatacggacgagaagaagagagacaggttcaggagggggctcagcactaagctctgtgaccgtctcaacaccgtcagggccaacagctacaatgagttggtcaacatggccatctcccaggaggactgtatcacagctcgtcaggcagaaaagaagaggaagacccctgtggcaggaccctcagctcagccacagcgcttcaggattgtgtctgacactcagagcaggggacctcagcagcagcaagggcgatgggtgatccgaccagagcagcagcaacaacaggcacccaaccgcacccagtttccagctcaagggaacaatcagcagcagcagtatcgccaggcaaatgacaacaggtgtttcacatgcggcaacaccggacattatgccaagaattgccccaggaaccaacagaggcaggggcagaatgtgaatcagaatcaaggcaagatacagaaggtgcaagtgaggcagggcaggctgaacttcaccaccatggctgatattccagagggggcacccgtcatgactggattggatagcgtggatattatattgggagctgactggttgaccaggcatcaggcagtattggatattgcagccagggccattgaaattcattcccctgcttatggcgagactgttttatatttgcccgaccagggatgcacccgttcttgtgccttcgttatgatagaatccccagtggaaaagatcccagtgagaccttataggatgcctcccgcagaattggcagaactgaaaaagcaattgcaagagttgttggacaaggggtttattcgcccaagtacttcgccttggggatgtcctgctttattcgtaaagaaaaaggatgaaagtttgagaatgtgtgttgattaccgccctctcaatgcggtgactatcaagaacaaatacccactgccccgcattgatgtattgttcgatcagttggtgggagccaaggtcttctccaaaatagaccttcgctcgggttaccatcagatcaagatccgtgccagtgatattcccaagacggctttctctaccagatatgggctctatgaatttttggtgatgtcttttgggctgaccaatgccccggcttattttatgtacttgatgaactcagtattcatgccagagttggacaagttcgtggtcgttttcattgatgatattctggtctattccaagaatggagacgaacatactgagcatctgcacatcgtgcttcagcgactgcgcgatcatcgtctttatactaagttgtctaaatgtgaattctggctgaaggaaattaaattcttgggtcacacaatttctcaggatgggatatcagttgatcctgagaaggtacaagaggtaatggattggaaacccccgactacagtgagaattgccaaaccaatgactgaactgttaaagaagggagtcaagtatgattggagccaaaagtgcgaagatgcctttcatactttgaggcagcatttgaccacagccccagtgctggctcaacctgacaacaccaagccctttgaagtttattgtgatgcttctggcactggtttgggatgtgtcttaatgcaagatgacaaggtaattgcttatgcctcccgagcactcagaccccatgagcagaactaccctacacatgatctggagttagcagctgtggttcatgctctcaaaatatggagacactacttgatgggagctcactgtaacatttacacggatcacaagagcctcaaatacattttcactcaggcagatttaaacatgaggcagaggatatggttggaattaatcaaggactatgatttggaagtacattaccacccgggcaaagccaatgttgtggcagatgccttgagcagaaaagcccagtgcaattgtatgagcatagatgcaagagttaccaccctgtgtgatgagttgtgcaagctgaacctggaagttgtttcttcaggtgccttaagttatatctcggtagagcccacattgcaagagcaaatagtcagggcacagattaaggataagggtgttcaggttatcaaagacatgatcaagcagaaggcagaaaaatacaagtgcttccgtcaggacaacaagggaattttatggtttggagatagattggttgttcccaaggaccctgagctcagaaagaagatactagatgaagctcacctttcaaaattctacatgcacccgggcagcaacaagatgtaccatgatctcagatccttatactggtggaccaggatgaagagggaaattgccaagtacatatccgagtgtgacacctgccaaaggattaaagccagtcatttgaaggcagcatgccctttacaaccccttcccataccatcttggaaatgggaggacatttgcatggactttatcgtgggattgcccaatacctccaggcaccatgattccatttgggttattgtggacaacttgaccaagaccactcatttcttgccagtacacaccacccacaggacagagaagtatgcagaaatctacattgaccagatagttcgtctgcatggaataccaaggactatagtctcagacagaggagcaccatttgtggcacgattttgggaacaattgcaggaatcacttaggacctatgtcatacgaagctcagcataccatccccaaacagatggccagacagaaagggtaaaccagattttggaagacatgttgagggcatgtgtactgcactacggaaaagattgggacaagtgtctttctttagcagagttttcttataataacagctaccagtccagtctaaagatggcactttttgaagctttatatgggagaagatgtagaaccccgctgaattggtctcaagcaggagagagggaaatatttgggccagatttggtacttgaagcagaggcaaaggtcagagtcatcaagaagaacttagaagctgctcaggccaggcaaaagagctatcatgacaagaggaggaagcctctgcagtttgaagtgggagaccatgtttatcttaaggtgtcacccaccaagggtgtccagagattcggatcaagggcaagttag

SEQ ID NO: 4996 - DNA, 4266 bp, Zea mays
  Clone ID: TF_ZM4995.C3.o8.fg
atggatcctaagggaaaggggatggtggtcaacgacaaggagaaggagtccatcttcaacgagccaagagatgacaagcccactgactcaggctcgagtcataagaagaaggacgggaagaagaagaggcgcatcaagaagatcatctactacgacagcgatgcatcttcttcttcaccaaaagacgatgacgatgaagattcttcgtcaaagaaaaagacggttaatcaaaactattcttttgattattcccgcatgctgtacaattcgaatgctcatttgctatcaattccacttggtaaacctccacactttgatggagaagactactctttctggagtcataaaatgtgtagctatttattttctctccatcctagcatctgggaaattgttgaaaacggaatgcactttgataacactgacaatgccgtttttataaatgagcaaattcataagaatgcccaagctactactgtgttgctagcatctctttgcagggatgagtacaataaggtgagtggcttggacaatgccaagcaaatctgggacaccctcgagatatctcatgagggaaacgacgccaccatgatcaccaaaatggagttggtggaaggcgagctaggaagattcacgatgatcagggcagaggagccaacacaaacctacaacaggctcaaggccctggtcaacaagattcgaagctatggaagcacaagatggacggatcatgatgtcgtccgactcatgctaaggtcatttactgtaattgacccccatcttgtcaatcttattcgtgagaatcctaggtacaccaagatgacgcccgaggagattcttggaaaatttgtgagcgggcgcatgatggtgaaggaggctcgatacgtggacgatgctctaaatggtacactacccgtctacgagcttcaacctgttgctcttaaggcaaccagtagcagggaggcgcttccaagcaaggtggcacaagtagaggctgctggcctcaacgaggatgagatggcgcttatcatcaagcgcttcaagaccgcgcttaaaggacgcaaggagtaccccaacaagaacaaaacaaggggaaagcgctcctgctttcaatgcggtaagactggtcactttattgcaaattgtcccgataatgatagtgaccagggacaagaaaagagcgagaagaaggagaaaaagaagaactacaggaaggcaaagggcgaggcgcaccttggaaaggaatgggactcggactgctcctctttcgactctgacgacgaaggacttgctgcctcagccttcaacaaatcctcactcttccccaacgaacgccatacatgtcttatggccaaggagaaaaaggtatgtgttcgggacacacccaagtacacttcatctagtgatgaagaatcctccgatgatgaagtagattactctagtttatttaaagataaattgctagagaagcaagaagatattttgtatgaagagcatgacaaatttattagtgttcaaaaatctcttgctctagaaattaagagaaatgaaatgctatcctctgagttgtctgcttgccatgaatctgtttctagtttaaggagtttaaatgatgatttaaatgctaagctagaagaagttaataaatctagttcatgtgtagagcatgctgttatttgtaatagatgtaaggattttgatgttgatgcatataatgaacatattgtttctattacaaaatcaagtaatgaggtggcaagtcttaatgctcaacttaagacttgcaaggacgattttaataaattgaaatttgttagggatgcctacactattggtagacacccttcaattaaggatggacttggttttcgaaaggaaaccaagaacttaacaagccaaaaggatcacgttctcaacaaggagaaagggaaggcccctatggtttatgcatccgggggttcaagctggattatcgacagcagatgcacaaaccacatgacgggggagaagaagatgttcacctcctatgtcaagaacaaggattcccaggatacgatcatctttggagatgggaaccaaggcaaggtcaaaggcttgggcaagatagccatcaccaacgagcactccatatcgaatgtatttctagtagggtcgcttggttacaaccttctgtatggaggacatgtgttaggactaaccaatgtttgtttcgataaagataggccttgtgcagcatgtcaagcagggaaacatgtgggaagtactcatcatagcaagaatatgatgacaacatcaagaccactggagcttcttcacatggacctcttcggacccgttgcctaccttagcatcgggggaagtaagtatggtcttgtaatcattgatgatttttcccgcttcacttgggtgttctttttgcaagataaatcagaaacccaagggaccctaaagcgctttctaaggagggctcaaaacgaatttgagctaaaggtgaaaaagataaggagcgacaacgggtccgagttcaagaatctgcaagttgaggagtatcttgaggaggaaggcgtcaagcacgagttctccgctccctacacaccacaacaaaatggtgtggtagataggaaaaacacgacacttatccacatggcgagaacgatgcttggagagttcaagatgcccgagcggttttggtcggaagctgtgaacacagcttgccacgccataaaccggctctatctgcatcaccttctcaagaagacctcctacgaactccttaccggtaacaaacccaacatctcaaactttcgtgtatttgggagcaaatgttacattctggtgaagaaaggtagacattctaaatttgctcccaaggcagtagaagggtttttactagggtatgactcaaatacaaaggcgtatagagtcttcaacaaatcatcgggtttggttgaagtctctagcgacgttgtatttgatgagactaatggctctccaagagagcaagttgatcttgatgacatagatgaagatgatgttccaaaggccgcaatgcgcatgatggcgattggtgatgtgcgaccacaggaacaacaggagcaagatcagccatcgtcctccacaatggtgcatcctccaactcaagacggtaaacaggaagagctcaacaacttcaagagaaatgaagtttggagtctggtgccacgtccaaagcaaaatattgtgggaaccaagtgggtgttccacaacaagcaagacgagcatggggtggtgacaagaaacaaggctcgacttatggcaaaatgttacgcccaagtcgcaggtttggatttcgaggagacttttgctcctgtggctaggctagagtctattcaaattctattatcctatgtcgctcaccactctttcaggctatttcaaatggatgtgaagagcgctttcctcaatgggccaataaaggaggaggtatacgtggaacaaccccctggctttgaggatgacaggtaccccgactatgtgttcaagctctctaaggcgctctatggacttaagcaagccccaagagcatggtatgaatgccttagagatttcctaattgttaatgccttcaaggttgggaaagccgatcccactctttttacaaagacttgtgatggtgatctttctgtgtgccaaatttatgtcgatgacataatatttggttctactaatcaaaagtcttgtgaggagtttagcagggtgatgacacaaaagtttgagatgtcgatgatgggagagttgacctacttccttgggttccaagtaaagcaactcaaggacgacaccttcatctcccaaacgaagtacacacaagatcttctcaagcggtttgggatgaaggacgccaagcccgtgaagactccgatgggaaccgacgggcatgttgacctcaacaaaggaggtaagtccgttgatcaaaaggcataccggtctatgatagggtcattactttatttatgtgcaagtagaccagacattatgctaagtgtatgcatgtgtgctagatgtaaatccgaccccaaggaatgtcaccttgtggccgttaagcgaattcttagatatttagtttctacgccttgtttcgggatctggtatccaaaggggtctacctttgacttgattggatactcagactccgattatgccgggttcaaggttgataggaagagcacatcggggacgtgccaatttctaggaaagtccctggtgtcctggagttctaagaaataa

SEQ ID NO: 4997 - DNA, 1026 bp, Zea mays
  Clone ID: TF_ZM4997.C1.o9.fg
atgtggaaggatcgggtggagcatgccaaggatatctgggccatctacccaggacagactgcgcacttgactgtacggtgcatgaatgccctgtaccatctgcaggtgatgcgcggtgaagcaatgtcccatctgatggcgctgctggaggcaacaaagattacgctggataacagagaggagctcgtggttgacttatctcaagaaatggtggagaaggacttgcaggtggagcagctatccactgatattcaggagttggaggagctggtgggcaccagggagaacaccatcgaggttgtagaggatcagctccttaacactcagcagcagcttgctgaggctaacgagcacctggacatgcatcaccaggagatccaggaccaggaggccaacgaggacgtcgacatcgagggaggagatgagcctgcctccaatacagatgagaagaagagagacaggttcaggagggggctcagcactaagctccgtgatcgtctcaacaccgtcagggccaacaactacaatgagttggtcaacatggctatctcccaagaggactgcattacagctaggcaggcagagaagaagaggaagacccctgtggcaggaccctcagctcagccacagcgcttcaggattgtgtccgacacccagggcaggggaccccagcagcagcaagggcgatgggtgatccgacctcaggagcagcagcaggcacccaaccgcacccaatttccagctcagaggagcaatcagcagcagcagcagtaccgccaggcaaatgacaacaggtgcttcacatgtggcaacactgggcattatgccaagaattgccccaggaaccagcagaggcaggggcagaatgtcaatcagaaccaaggcaagagacagaaggtgcaagtgaggcagggcaggctgaacttcaccaccatgactgatattccagagggagcacccgtcatgactggtatctttacagttttgaattatcctgctattattctatttgattctggtgcatag

SEQ ID NO: 4998 - DNA, 668 bp, Zea mays
  Clone ID: TF_20507166
gatggctgatcagtcttctggtcagatgtttggggtgcgggagagatacgcacccaaactgacttcttcttctttggaggagcagcactcccagctctgcactgcggggggggggaccttatgagaagatagcctcttgaacaccgagaggcgtttgccgggctcttctaaacgatgccaaactgacctcttgcccaccgggtatgacctgtcaaattccagacggtcacgcaagcgacctggggtcttcagctgcagagggccggcctgaatggcagggcaccgagaggcttgatgtccgagcttgaaacacctaaaacagcgaggggggcaccgacacgaagccacgagatggtttggagagagacagttgaagcatctcccgcggaggttcacactggtccctctccgcgccgaagcacaacgagactgctttctgctcttcaccacctgccagccatcctccttgtcgaccggcaccaggtcttcacgccggcacagcctcctctccttgtcacagagcttcggccttgctatggtagaagtgcgtacttccaactccagggaggtggcgctagaagaggaaaggagggcctctttataggagtgcaccgtaccaccagaggaggaacccgaagcgttgtcatcccatcgctggaacttggacc

SEQ ID NO: 4999 - DNA, 5292 bp, Zea mays
  Clone ID: TF_ZM5054.C12.o3.fg
atggatcctaaagggaagggaatcgtgatcaacgacaaggagaaggagtccttcgtcaacgagccaagggatgacaagtccaacgactcaggctcgggccacaggcgcaaagatgggaagaagaagacaagacacatcaaggagatcgtctactacgacagcgatgagtctacttcctcccaaaaggacgacgaccacaacgagtacgagagaaagaaaccggtcaattcgaacttttcttttgattactctcgtattcctcaaagtactaatgctcatttattatctattccacttggtaaacctcctcattttgatggagagtactacggattttggagtcacaaaatgcgtagtcacttgttctctctccatcctagcatatgggagattgtagaaagtggaatgcactttgatagtacggatagtcccatgtttattaatgaacagattcataaaaatgcacaagctactactgtgttgctagcctctttgtgcagggacgagtaccataaggtgagcggcttggacaatgccaagcagatctgggacaccctcaagatctctcatgaggggaatgatgtcaccttgctcaccaagatggagttggtggagggcgagcttggacggtttgcaatgataaggggcgaggagccaactcaaacatacaaccggctcaagacccttatcaacaaaataaggagctacggaagcacgcgatggacggatcacgacgtcgtccgcctaatgctaaggtcctttaccgttcttgatcctcatttggtgaacaatattcgtgaaaatcctaggtacaccaagatgtcgcccgaagaagttctggggaagttcgtaagcgggcgaatgatgatcaaggaggcaagatatgtggacgacgcgttgaacggtcctattcatgagcctcaacccattgctctcaaggcaacgaggagcaaggaggcgctaccgagcaaggtggcgcaagttgaggcggtcgggctaaataatgaggagatggccctcatcattaagcgcttcaagacggcgcttaaaggtcgcaagggacagacaagcaagaccaagacaaaggagaagcgctcgtgcttcaaatgtggtaagattggtcatttcattgctaaatgtcccgataatgaaagtgaccaggaaaaggggaacaaaagggagaagaagaagcattacaagaaggccaagggcgaggcacatatcggaaaggagtgggattcggattgctcttcctccgactccgacaatgaaggactcgccgccaccgccttcagcaagtcatccctcttccccaacgagcgtcacacttgcctcatggcaagggagaagaaagtaagcactcatgatactagtacttatgcttcttcaagtgaggatgagtctagtgatgatgatgagatagattactcatgcttattcaagggattagatagatctaaaattaataagattaatgagttgattgatgctttgaatgacaagaatagattactagaaaaacaagaggatcttttatatgaggagcatgataaatttgttagtgcacaaaattctcttgctctagaaattaaaaggaatgaaatgctctctagtgaattatctacttgtcatgaatccatctctaaattaaaaagtgttaatgatgatttgaatgctaagttagaaatagctagtaaatcaacatcttgtgtagaaattgttgaaacttgcaataggtgtaaagattttgacattgatgcttgtagtgaacacctagtttcaatttccaaacttaatgatgaattggctagtcttaatgctcaacttaagactagcaagagtaattttgataagctaaaatttgcaagggatgcctacacaattggtagacacccctcaattaaggatggacttggctacaagaaggaagccaagaacttcacaagccataaggctcccatctccgccaaggagaaagggaaggcccctatggctagtagtgagcaaaagaaccatgcctttatgtaccatgataggagacaatctagaaatgcttataggagatgtaacgcatatgatgcttttgattctcatgacatgtttgcttctagttcttcttatgtgcatgatagaaatgttggttatgcatccgggggttcaagctggattatcgacagcggatgcacaaaccatatgacgggggagaagaagatgttcacctcctacgtcaagaataaggattcccaagattcaattatattcggtgatgggaatcaaggcaaggtaaaagggttagttgagtctcttggttacaatttgctatctgttagtcaactatgcaatatgggatataattgtctttttacaaatgtagatgtgtctgtctttagaagaagtgatggttcactagcctttaagggtgtattagacggcaagctttacttagttgattttgcaaaagaagaggccggtctagatgcatgcttaattgctaagactagcatgggctggctgtggcatcgccgcttagcacatgtggggatgaagaaccttcacaagcttctaaagggagaacacgtgataggtttgactaacgtacaattcgaaaaagatagaccttgtgcagcttgtcaggcaggtaaacaggtgggaggagcgcatcacagcaagaatgtgatgaccacatcaagacccctggagctgctacatatggacctcttcggacccgtcgcctatctaagcataggaggatgtaagtatggtttagttattgttgatgacttttcccgcttcacttgggtgttctttttgcaggataagtctgaaacccaagggaccctcaagcgcttcctcaggagagctcaaaatgagtttgagctcaaggtgaagaagataaggagcgacaacgggtccgagttcaagaaccttcaagtggaggagttccttgaggaggaagggatcaagcacgagttctccactccctacacaccacagcaaaatggtgtggtagagaggaagaacaggacgctaatcgatatggcgaggacgatgcttggagaattcaagacccccgagcgtttttggtcggaagccgtgaacacggcttgccacgccatcaacagggtctaccttcatcgcctcctcaagaagacttcgtatgagctactaaccggtaacaaacccaatgtatcttactttcgtgtatttgggagcaggtgctacattctagtgaagaagggtagaaattctaaatttgctcctaaagctgtagaagggtttttgttaggttatgactcaaatacaaaggcgtatagagtcttcaacaaatcatcgggtttggttgaagtctctagcgacgttgtatttgatgagactaatggctctccaagagagcaagttgttgattgtgatgatgtagatgaagaagatgttccgacggccgctatacgaaccatggcgattggagaagtgcggccacaggaacaagatgaacgagatcaaccttcttcctcaacaacggtgcatcccccaactcaagacgatgaacaggttcatcaaaaggaggcgtgtgatcaagggggagcacaagatgatcacgtgatggaggaagaagcgcaaccggcacctccaacccaagttcgagcggtgattcaaagggatcatcccgtcgaccaaattttgggtgacattagcaagggagtaactactcgatctcgattagttaatttttgtgagcattactcctttgtctcttctattgagcctttcagggtagaggaggccttgctagatccggattgggtattggccatgcaggaggaactcaacaacttcaagcgcaatgaagtttggacactggtgcctcgtcccaagcaaaatgttgtgggaaccaagtgggtattccgcaacaaacaggacgagcacggggtggtgacgaggaacaaggctcgacttgtggcaaaaggttatgcccaagtcgcaggtttggactttgaggagacgtttgctcctgtggctaggctagaatcaattcatatcttgctagcatatgtcgctcaccattctttcaggttgtaccaaatggatgtgaagagcgctttcctcaatgggccaatcaaggaggaggtgtacgtggagcaaccccttggcttcgaggatgaacggtaccccgaccacgtgtgtaagctctctaaggcgctctatggacttaagcaagccccaagagcatggtatgaatgccttagagacttcttaattgctaatgctttcaaggttgggaaagccgatccaactctttttactaagacttgcgacggtgatctttttgtgtgccaaatttatgtcgatgacataatatttggttctactaaccaaaagtcttgtgaagagtttagcagggttatgatgcagaaattcgagatgtcgatgatgggcgagttgaactacttccttgggtttcaagtgaagcaactcaaggacggcaccttcatctcccaaacaaagtacacgcaagacttgctgaagcggtttgggatgaaggacgccaagcccgcaaagactccgatggggaccgacggacacaccgacctcaacaaaggaggtaagtccgttgatcaaaaagcataccggtcaatgatagggtctttactttatttatgtgctagtagaccggatattatgcttagcgtatgcaagtgtgctagatttcaatccgatcctaatgagtgtcacttagtggcggtgaagcgaattcttagatatttggttgctacgccttgcttcgggctctggtatctaaaggggtctacctttgacttggttggatactcagattccgactatgctggatgtaaggtcgataggaagagtacatcagggacgtgccaattcttaggaaggtccctggtgtcgtggaactctaagaaacaaacctccgttgccctatccaccgctgaggccgagtatgttgccgcagggcagtgttgcgcgcaactactttggatgaggcaaaccctcagggactttggctacaatctgagcaaagtcccactcctatgtgacaatgagagcgctatccgcatggcggaaaatcctgttgaacacagccgcacaaagcacattgacatccggcatcactttttgagagaccatcagcaaaagggcgatatcgaagtgtttcatgttagcaccgagaaccagctagccgatatctttaccaagcctctagatgagaagaccttttgcaggctgcgtagtgagctaaatgtcttagattcgcggaacttggattga

SEQ ID NO: 5000 - DNA, 5567 bp, Zea mays
  Clone ID: TF_ZmC19623_3
atgcggagttcatcgtcttccggggctgagcccgagtccgagccctggggtcgggcgaagcggagttcgtcgtcttccggggctgagcccgagtccgagccctgggtcgggcaaagcggagttcgtcgtcttccggggctgagcccgagtccgagccctgggtcgggcgaggcggagcttcctatggcgctcgaggacggacttggctgctgtcagccgcactctgccgagtggcgcagcagtcggagcggcgcaggcagcgctgtccttttgtcaggccggtgtttcacttgtggtaacaccggacattatgccaagaattgcccaagaaaccagcagaggcaggggccgaatgccaaccagaaccaaggcaacaggcagaaggtgcaagtgaggcaaggcaggctgaacttcaccaccatggctgatatttcagagggagcacccattatgactggtatcttttcagttttgaattatcctgcaattattctttttgattctggtgcatcacatagttttatcagtgccaaatttagtgccaagtgccaattacctttccatcataccaataggggtattacaatttcaacaccaggaggcagggttgccacctaccaaatcaacaagaatgtgcctataaagtttggtagtttgataatcaaaaccaacctcctcattttgggtttggatagtgtggatatcatattgggaactgactggttaaccaaacatcaggccacgatggatattgcagctagggccattgaggtgcactcaccgacttgtggtgaaaccacattatatttgcctgaccagggttgtacccgttcttgtgccttcgttatgatagggtccccagtggaaaggatcccagtggtctgtgactacccagatgttttttcgaatgaattgccatggatgccacctgaccgagacatcgagttcgcgattgagttgcaacccgggactgctcctatctccaagagaccctataggatgcctcccgcggaattggcagaactgaagaagcaactgcaagagttgttggacaaggggttcattcgcccaagcacttcaccgtggggatgtccggccttatttgtgaagaaaaaggatgagagtttgaggatgtgtgttgactaccgccctctcaatgcggtgaccatcaagaacaaatacccgccgccccgcatcgatgttctgttcgatcagttggtgggagccaaggtattctccaagatagaccttcgctcaggataccatcagatcaagatccgtgccagcgatattcccaagacggctttctctaccagatatggactctatgagtttctggtgatgtcttttgggctgaccaatgccccggcttatttcatgtacttgatgaactcagtatttatgccagaattggacaagttcgtggtcgttttcattgatgatatcctagtctattccaagaatgaagatgaacatactgagcacctgcacatcgtgcttcaacgactgcgcgatcatcatctttatgctaagttgtctaagtgtgagttctggctgacggagattaaattcttgggtcacacaatttctcaggatgggatatcagttgatcctgagaaggtacaagaggtaatggattggaaacccccgactacagtgaggcagattcggagttttctgggattggcagggtattatcgacgatttattccggatttctccagaattgccaagccaatgactgaactgttgaagaagggagtcaaatttgagtggagccaaaagtgtgaagatgccttccataccttgaggcagcatttgacaacagccccagtgctggctcaacctgacaacaccaagccatttgaagtttattgtgatgcttctggtactggtttgggatgtgtcttgatgcaagagaacagagtgattgcttatgcttcccgagcactcaggccccatgagcagaactaccctacacatgatctagaattggcagctgtagttcatgctcttaagatatggagacactacttgatgggagctcactgtaacatctacactgatcacaagagtctcaaatacatcttcactcaggcagatctgaacatgaggcaaaggagatggttagagttgatcaaggactatgatttggaggtgcattaccatccaggcaaggccaatgttgtggcagatgccttgagcagaaaggcccagtgtaattgtatgagcatggatgtgggagtcaccaccctgtgtgatgagttgtgcaagctgaacctggaagttgtttcttcgggtgacctaagctatatctcggtggagcccacattgcaagagcaaatagtcagggcacaggttgaggataagggtgttcaggttatcaaggatatgatcaagcaaaaggcagaaaaatacaaatgtttccgacaggacagcaagggaattctatggtttggagatcgattggttgttcccaaggaccctgagctcagaaagaagatactggatgaagctcacctttcaaaattctccatgcaccctggtagcaacaagatgtatcatgatctcagatctctatattggtggactagaatgaaaagggaaattgccaagtacatatccgaatgtgacacctgccagagaatcaaggccagtcacttgaaggcagcaggccctttgcaaccccttcccataccatcttggaaatgggaggacatttgcatggactttatagtgggattacccaatacctccaggcaccatgattctatttgggttatcgtggacagattgaccaagacggctcatttcttgccagtacacaccacccacaagacggagaagtatgctgaaatttatgttgatcagatagtgaggttgcatggtattcccaagaccattatatcggacagaggagcactgttcgtggcacgcttttgggagaaactgcaagaatcacttgggacccatgtaatccgaagctcagcataccaccctcaaacagatggccagacagaaagggtgaatcagattttggaagacatgttgcgagcatgtgcactacattatggaaaggattgggacaagtgtctgtctttggcagagttttcctacaataacagctaccagtccagtctgaagatggcaccttttgaggcattatatgggagaaggtgtaggaccccactgaattggtctcaagcaggagaaagggaaatttttgggccagacttggtactcgaggcagaggcaaaggtcagggtcattaccaagaacctggaagctgctcaggccaggcaaaggagctatcatgacaagaggcggaagcctctacagtttgaggtgggagatcatgtctatcttaaggtatcacccaccaagggtgtccagagattcgggatcaagggcaagttagctcctcgctacattggaccctacgagatcaaggcaacttgtggacccgtagcctaccaattggaattgccacctcacatgtcagcagttcataatgtgttccatgtatctcagctgcggaaatgcgttcgcctacccactgaagtgctaccggaaccagacattgagatagaaccagacttatcctaccaagagtaccccgtcaaggtattagatcagaaggagagatcaactcgggcaaggtcgatcagaatgtataaggttcagtggagtcaccattcagcagaagaagctacatgggagactgaggattttctacgctctcgcttccccgactttctgcccaaaggagtcggtatgtaacctcgctgacggagagtacatcctcgtgtcggagcaaggagctgctaaggaggtagccccggatccagcacccgagcctgccccagaggatctgcctgccccagctttggaaggcaagccccggttttatgcaaaacttagataacaaggatagtctaagttgtggatttaatttaagaagggcttccttctgaagttgcaaagagaatgacattcgaagagcagttaacaagagaaacttgagtataaagaaagagtagcaccaacacaccttccagcaccctccaagggacgctacctaaatctcgggacgagattcctttaaggggggagggctgtaacaccccaggtgttactcagggtgtccatacaggagtttccccttttacccattatcacatgaagattaaattgggcaaagtgtaccacacttgagattctaggtcctaagcaagagtaatccactttggatgtcatgccctagcttatcatgcacatctaagtggggatctcccaaaaccctagagcaaaacccccataggtaattataaccctaattgaagccatgatcaaaagagcatgtaaacatcaagaccatggcttggacccaatataaaggttgtaatacactcaataacctaccattaatagtaaggaagtacccacaaaaagtttgcagaaaagtcctaaaaagatcaccaaaggttgaaaacaagggagaaatgcagattttgcctaagttaaaaaccaacccttgagcaaagatccctcatgttcaccttgatccccttttcaaaatctgtcgacccaattgacaaaaaggcgccaaactaaccctagaacaccctggaaagagatgacacctaccctagggcgctagacacgacttgacaccccttttgtctcggtttggaccctgctgacacagcaaacttctcccctctctatctctctgtccagaccaaatctcgacttggaacccacaacaaaaaggtaggatttggagcagagaagtgaccgtacacagtgaccttgccgagatatgcacgccatggcgctcaaaccggccgttgaaccttggcagacgcaaccatccacgtgttcgacgcatgctggcacccgggggcgcgctcagtgcacgccggtgcgcgaacccccgcgcgcccgcggccacccgtgaccacgcccgcgccaaggctataaagcccgccccagcgctcggttgcttcccccgttgcctcgtccgtacttcgccggacttgcccgagccagccgttgcctccggcgacctccccgcgacccgccagtgccgcccgaacgccaccgccgtggccaacccctctccagccatcctccgttcgatccaagcccccagaaagtttcctggtgaagccgtgaaccttgctcaagctttacccgggagcccgcgtcaccggagaggccaaatcgcgctcaccggagttaaagaactcgccggcgcacgtggaccgggtaaaccccttcgccattttccgattcctcgcgcgtatggcctctgtgtcatcccgtggagctcctcgtgcccattaattgaactcccccgccgtggtttggccggagcaggcatcgccgtcgacctccgccgcctgcgcacgtggaccgagcagctgctcgcaccatccccgtcgcctgtttcgtttcagactcccccccagtatattccttcccgatcagagaccccccgcacgtaatgtcatttgtattgccgtcatatttgtagctgatatatatagtgtatatttaagatc

SEQ ID NO: 5001 - DNA, 2102 bp, Zea mays
  Clone ID: TF_ZmC951_442
ttatgtagtgatccttgatgcaccataactcttcttaactcgatcaaccttgactttgcaagtcttcttcttcacccctggctttgggatcctggtctccttgaccttctcccgtgcactcggtacctcgaacctcttcttgcctccatccttggcttgatcgattgtctcactattcaccattaagataccgattttaaagcgccagaaccacatgaatatctttaccatgttatggtgtactttccatctaagtaggcggagttcctttacacttatgtctgatcctttatcctgaccttttcttgttgcaattactcgacttgtggaggtacccaagtcctgatcgctccatttcttgctcatcttcccttttccaccttgagacttaggtagatgaccatgcttaccacacatgtagcagaagcgtcgctcaacctgacttgacacttgttgtttgtctttttgcttagtgagggtcatcttggagggtgcacgtctttgattcttcatgagcggacatgaagtgatcatatggtccttatcgttgcatccaaagcatctcctcattccttcatccttgtctttgtgtggacaagacgcaatgaagtgacctaattccttgcacttgaagcacctcctttttcctctcccctttttgctcttggatgacatagagagatgatcagtgcaaacaacatgactaattgaatttttacctttttccttgttcatgttgatttcttcatttattgctttaggagcatccttcttatggagtttaacacttgctgcggtttctcccgtctcaagcttcttcaccatgcgtccgtggatatcttgaggaggttgagcaatgcgtcttctccttagttgctttgctttcttgttcccgcacaatttcttttgtgaccctgcagcttgatgcttattcaaacattggctttcttttgacaagcaggggttagcacatggtgatgaaatatctgaatgtgtacttgtgcaagaatgaagttcacatgaatttaagttcgtaattacgacctcatgagcaacttcaagcatgatatgcctatccaagagattatcatgataacaagacaataagtcatatttttgagtcagagcaaggttatcatgactcaacaattctactttattcctaagcatagaattttcaattttaagttgagcaacatcagataatacatcatgattatttctttgctcaaataaaatagattcataccgttggaccaaattatcatgagagcactttagctcctcatgttctttggtcatcttctccaggctgtcgttggttttgatgagagtctcctctagcctgagaagcgtctcgccttgttccttgttcctactcaacaacttaaccaagagcactttgtcttctttgttgagattggtgtagaaccgacgaatctcctcttcttccgcatcaccggtctcattttccctgtcattattattagtggaagcaatacaggaaaatgtaccttgtggtgatgaagactcatcctcgctatcatcctcatattcctcctcatcatcgctttcgtctccactatcattgttagcaataagacatttataactagtggaagacaaacctgtcggtgaggtggattcatcgtttggttgccatcgtttttcctctccctttgaaaggttagtaccacaagcaacatagggagtagaagtagtacaattggactcagaatattttattttaattctagtccatagatcatgagcatcaacaaataaatcactatcactactcatgatggcaaaataagcacctctagaaagagagtcaactaagatgttgcaagcatggtgattaagagatagacatcttagttcagtattagaagggtttttactaatattagagggaaaaatacttctactaaagatctgtctcaaatcaggatcaatatgcatgaaagcattataaatagagacagaccaagatttataattagaaccatcgcctaaaagaagttctagagttacctcttgtgacgacatcgtcatctccggacggctaagcccacacggagaggcatagctcgtatacc

SEQ ID NO: 5002 - DNA, 721 bp, Zea mays
  Clone ID: TF_LIB5117-011-Q1-PF1-F3
tgccgaggccgaaccaccaggcgcgacgagcactcccaggattggtcgccctaccatcagcgtggtcgcggccgcgatcgggattgccgttcctcgccccgcctttctcggtcgccggcccggtctggtcgcaccgagcaatccccaccttggtgttacaatccaccatagcgacatgctcaatttcccgcaccggcccccaacaaccgcaataccagggaagcatttgcagaagaagaaagccggccagcgccccggcggtgcggctgggcaagcatcctcggtcaccaacccccaccagcacccacaaccgtggctgctgctcctccgggggctacgcccgtggtgtgtttcaactgtggcgaggaggggcattgccaagtggagtgcaagcaacccccgacgtgcttcaaatgcaagaggatggaccatccgacattgctttgcccagaccagtcgacggaggggagctcatgctctttggctatgccctggatgatttgggcttcctccagatggacttgtcggagccggcggctacaccctccctgaccgccctcgtctcggccttggggggtaagacggcctctccggcgatcatcatggacgagcttcgacacctcttccgtccggattgggattgggaggtgactccgatctccgatcacgatttcacggcagtgtacccggacctggttagcctccgctaccacactcacag

SEQ ID NO: 5003 - DNA, 5064 bp, Zea mays
  Clone ID: TF_ZmC363_1
atcctgaggacggatgatttctacctgcaagaatatttttattgggagcatggtgggatcttactgcaaagttccttataatgctctttgaaagggaattaggcttacacctagttcctaaataattttggtggttgaattgcccaacacaaatctttggactaactagtttcccccgcggccggccgggcaccccggcgctgcctgcgcccgccgccgacggggagaccatccgctgggtccaatgggcggcgaatgccgcgccctcaatccaagttatgcgaatctaagacatttagctcactgcacagcctgcaaaaggtcttctcatctaaaggcttggtaaagatatcggctagctggttctcggtgcaaacataaaacacttcgatatctcccttttgctggtggtctctctgaaagtggtgacggatggctatgtgcttagtgcggctgtgttcaacaagattatccgccatgcggattgcactctcattgtcacataggagtgggacttcgctcaaattgtagccaaagttccgaagggtttgcctcatccaaagtagttgcgcgcaacactgacctgcggagacataatcggcctcagcggtggataggggaacggaagtatgtttcttatacctccaagacaccagggaccttcctaggaatttgcacgtccctgatggactcctcctaccacccctgaattcggcaaaatcagagactattcgagtaaggtggtaacgcaccttggtgaaccagctcaaaccttgtatgacaccatgatgcaccctcatccaccggacactgtagtggctgttgctggatcaggtgatgcagcttttatcgaggagatgggagtcctggaactcaacacgtcatatgagctggtttgtggaatacctctcgtttaccactgcgatcaatgttgaatatgtttcgcaagagatttgtgtagtagaattgttcaacaggcatgttgcagtggcctgggtttcgggtctgtttgcactgaaacttgctgacgacgagatcatacccttcaattacgtctcttatgcctccgaactggaggagtgcacaaaagatatcgtagataaatgtaaaggatttcctgtcagtttctctcctttgcagaactccatcaagcagctcgagagtgctgccaccaaaatttacaaagagaagaagttgctgcaagcagaaaactggagcctaaagacaagtaagtatacgctgaaagtcagggagataaacgaccggttgatgatggccgagcgagcgttcaccaaccgagaaggactggtcgggagaccatggtacaagcatatgatatatgcatcatcggatcaagacgactgggggaccaaagccttccctggtatagtctcggccatggacaaggctaagaagtccaacacaaccgagacgtggcgactgctgcagcacgagatttacagggttgccagggctgtgtccaaggcttctgcagtcctggatggtaaactaacatgatgtgcacgtgcactgcagattttcattctattctacatagatcgaagtacccgatggattcagtttccatttcgtttcttgaaagctgaagtgcgtggaatacctgtcaggcatcattggataattgtgtaaataatgaagaaatatgctcaagttagtgtcctatgaataaagaatagtggaatcatctctcacgatgattcccttgagagtatcgccaatcattttactggggtcataatctaacaaaaacccttctacagctttgggagcaaatttggaattcctacctttcttcacgttttgctgtggtgtgtagggagtggagaaatcgtgcttgattccttcctcctcaaggtactcctccacttgaagattcttgaactcggacccgttgtcgctccttatcgttttcaccttgagttcaaattcgttttgagctctccttaggaagcgctttagggtcccttgggtttccgttttatcctgcaaaaagaatgcccaagtgaagcgggaaaaatcatcaacaataacaagaccatacttacttcccccgatgttgaggtaggcgacgggtccgaagaggtccatgtgaagtagctccaaaggtcttgatgtggtcatcacattcttgctatgatgagaacttcccacctgtttacctacttgacaagcttcacaaggtctatcttttttgaaagttacattggttagacctaacacatgttctccctttagaagtttatgaaggttcttcatcctaacatgtgctagacggtgatgccacaaccagcccatgctagtcttagcgattaagcatgcatctagaacagcctcctccgaaaaatcaactaaatagagtttgtcgtctagtacacccttaaaagctaatgaaccatcactccttctaaagacagacacatctacattggtaaataagcaattgtaacccatattacatagttgactaacggacaacaagttatacccgagcgattcaactaagaacacattagatatggaatgctcggatgaaatagctatttttcctagtcctttaaccttgccttgattcccgcctccaaagatgatcgaatctttggaatctttgttcttgacgtaggaggtgaacatcttcttctcctctgtcatctggtttgtgcatccgcagtcgacaatccagcttgagccctcggatgcataaacccaactcttgttgggtcctacaaggttagtaacaatagccttagggacccaaatgcaagtcttgtctcccttgcatttggcccccaatttcctagcaaccactttcttatttttgcatgagagtacaaaatcagtgttgcaggcatgaaagacagtagcagattcattttgcattttcctaggcacatgatgaacaacattgtttctaggcatattcctactatgcacaaaggaagaacttgaaacaatcatggcatgtgaatcataagcattataactcctattataatgagcattcctagaaaattttctatcataaataaatgcatgattcttttgactactactatccataggagccttccctttctccttgttgagaatgggagccctttgacttgttaagttcttggcttcccttcgaaagccaagcccatccttaattgagggatgtctaccaatggtgtaggcatccctagcaagttttaatttgtcaaagtcatctttgcaagtcttaagttgggcattaatactttccacttcatcatttaattttgcaatagaattaaggtgctcaacacatgcatcaatattgaaatccttacacctattacaaatcacaacgtgctctacacaaggactagatttattaactacttctagcttagcatttaaatcatcattcaaaatcttcaagctagaaatagattcattgcaaatagataactcagaagatagtaattcattccttttaatctctaaggcaagagacttttgaacactaacaaatttgtcatgttcctcatacaagatgtcctcttgcctctctagcagtctatctttttcattcaatgcatcaatcaactcattaatcttttctactttagccctatctaatcctttgaacaagctagtgtaatctacttcatcatcactagagtcctcatcactagaagtagagtacttaggagtttctcgagcgtttaccttcttctcctttgccattaggcaagtatggcgctcgttggggaagagcgacgatttgttgaaggccgaggcggcgagtccttcatcatcggagtcagacgaagaacaatccgattcccactctttgccaaggtgcgcctcgcccttcgccttcttgtaggccttctttttctccctcttcccatgtctttcgtcttcctggtcattttcattatcgggacattgagcaataaaatgacctgtcttaccgcacttgaagcaggaacactttccttttgccttgttcttgtttgagtactccttgcgtcccttcaatgctatcttgaagcgcttgataatgagggccatttcatcctcgtttagcccggccgcctcaacttgcgccaccttgctaggtagcgcctccatgctacttgttgctttgagagcaacggtttgaggctcgtagatgggcattggaccattcaatgcctcatcaatgtatcttgcttccttgatcatcatacgcccgcttacaaactttccgagtatttcctcgggcgtcatcttggtgtacctaggattctcacggattgagttcacaagatgaggatcaagtacagtgaaggacctgagcataagtcggacgatgtcgtggtctgtccatctcgtgcttccaaggctcctaatcttgttgaccagggtctttagcctgttgtacatttgggttggctcctcccccctgatcattgcgaaccttcccagttcgccttccaccaactccatcttggtgatcatggtggcgtcattcccctcatgagaaatcttgagggtgtcccaaatttgcttggcattatctaagccgctcaccttgtggtactcgtccctgcacaaggatgctagcaaaacagttgtagcttgtgcatttttatggatttgctcattaatgaaaacggggttgtcagtgctatcaaaaagcatttcgttttcaacgatctcccaaatacttggatggagagagaataggtgactacacattttgtgactccaaaatgagtagtcttctccatcaaagtgcggaggtttcccaagtggaattgaaagtaaatgagcattggagttaaacggaatacgagaataatcaaaagaaaagtttgagttaaccgatttctttttctcgtcgtcgtcgtctctttgggaagaagaagattcgtcgctgtcgtagtagactatcttcttgatacgcctcttcttcttcccgtccttcttcttatgatttgagccagagtcagtgggcttgtcttcccttggctcattgaggaaggactccttatccttgtcattgaccaccgtcccctttcccttaggattcat

SEQ ID NO: 5004 - DNA, 4125 bp, Zea mays
  Clone ID: TF_ZM4793.C2.o5.fg
atggagttggtggagggtgagctgggaagattcgcgatgatcaggggagaggagccaacacaaacgtacaataggttcaagaccctggtcaacaagattaggagctatggaagcacaagatggacggaccacgacgtcgtccgacttatgctcaggtcttttaatgttattgaccctcatcttgtgaacctcatccgtgaaaatctcaagtacataaagatgacgcccgaggagatactcggaaagtttgtgagcgggagcatgatggtgaaagaagcccgatatgtagacgacgcacttaatggtccattacccgtctacgagcctcaacccgttgctctcaaagcaacaagcagcagggaggcgctaccaagcaaggtggcacaagttgaggcggtcgggctaaacgaagatgagatggctctaatcatcaagcgtttcaagaccgcgctaaaaggtcgcaaggagtatcccaacaagagcaaagcaaagggaaagtgctcctgttttaaatgcggtaagactggtcattttatagcacaatgccccgataataacaatgaccaggaacaagaaaagcatgggaagagggagaagaagaaggcctacaagaaggcaaagggtgaggcgcaccttggcaaagaatgggatttggactgctcttcttccgactccgacgaagaagaacttgctgcctcagccttcaacaagtcctctctctttcccaatgaacgccacacttgcctcatggcaaaggagaaaaaggtaagcgttcgagaaacccctaagtatactacttcaagcgatgatgattctagtgatgatgaagtagattataccgattcatttaagggtttagatagagcaaaagtagataaaattaatgagttaattgatgctctaaatgaaaaagatagattgctagagaagcaagagggcattttatatgaagaacatgacaaatttgttagtgtacaaaagtctcttgctttagaaactaaaagaaataaaatgttatcgtctgaactgtctgtgtgccatgaatcaatatctagtttaaagattttgaataatgatttaaatgttaagctagaggtagccaataaatctagttcatgtgtagaacatgttgccatttctaataggtgtaaggattttgatgttgatgcttgcgttgaacaccttacttctattaccaaattaaatgataaggtggcaagtcttaatactcagcttaagacttgcaaaaatgattttgataagctaaaatttgctagggatgcctacaccattggtagacaccactcaattaaggatgggcttggttttcgaaaggaagccaagaacttaacaagccaaaaggctcccattctcgccaaggagaaagggaagggccctatggctagtagcgttcaaaagaatcatgctttcctgtataatagaaaaattgctagtcataataggagatatgatcatgatgcttgtttatgcatccgggggctcaagctggattatcgacagcggatgcacaaaccacatgacgggggagaagaagatgttcacctcctacgtcaagaacaaggattcccaggatacaatcatatttggagatgggaatcaaggcaaggtcaaagaaggagcgatggttcattagcgtttaagggtgtactagatggcaaactctacttagttgatttttcgaaagaggaggccgatctagatgcatgcttaatctctaagactagtatgggctggttgtggcatcgccgtctagcacatgttgggatgaaaaacgttcacaaacttctaaagggagagcatgtgttaggactaaccaatgtatgtttcgaaaaagatagaccttgtgcagcttgtcaagcagggaaacaggtgggaagcactcatcacaacaagaatgtgatgacatcatcaagaccactggagctactacatatggacatctttggacccgtcgcctaccttagcatcgggggaacaaaatggtgtggtagagaggaagaacaggacgctcatcgacatggcgaggacaatgcttggagagtccagacgcctgagcggttttggtcagaagttgtgaacacagcttgccacgccataaaccggctctaccttcatcgcctcctcaagaagacctcgtatgaacttcttaccggtaacaaacccaatgtctcttactttcgtgtatttgggagcaaatgctacattttggtgaagaaatgtagacattccaaatttgctcccaaagttgtagaagggtttttactagggtatgactcaaatacaagggcatatagagtcttcaacaaatcatcgggtttggttgaagtctctagcgacattgtatttgatgagaataatggctctccaagagagcaagttgatcttgatgatatagatgaagatgatgttccgacggccgcaatgcgcgccatggcgattggagatgtgcgaccacaggaacaacaaaagcaagatcaaccttctacctcaatgatggtgcaaccccaactcaagatgatgaacaggttcctcaagaagaggcgtgtgatcaagggggagcacaagaagaacaaacctttcagggtagaagaggccttgcaagatccggactgggtgttggccatgcaggaagagctcaacaactttgagaggaatgaagtttggagcctggtgccacgtccaaagcaaaactttgtgggaaccaagtgggtgttccgcaacaagcaagacgagcacggggtggtgacaagaaacaaggctcgacttgtggcaaaaggttatgcccaagtcgcaggtttggaattcgaggagacttttgctcctgtggctaggttagagtctattcgaatattattagcctatgttgctcaccactctttcaggttgtttcaaatggatgtgaagagcgctttcctcaacgggccaatcaaggaggaggtttacgtggaacaaccccctggctttgaggatgacaggtaccccgaccacgtttttaagctctctaaggcgctctatggacttaagcaagccccaagagcatggtatgaatgccttagagatttcttaattgctaatgctttcaaggttgggaaagccaatcccactcttttcactaagacttgtgacagtgacctctttgtgtgccaaatttatgtcgatgacataatatttggttctactaatcaaaagtcttgtgaggagtttagcagggtgatgacacagaaatttgagatgtcgatgatgggagagttaacgtacttccttgggttccaagtgaagcaacttaaggatggcactttcctctcccaaacgaagtacacacaagatcttctcaagcggtttgggatgaaggacgccaagcccgcgaagacaacaatgggaaccgatggacatgtcgacctcaagaaaggaggtaagtccgttgatcaaaaggcataccgatctatgatagggtcattactttatgtatgtgctagtagaccggatattatgcttagcgtatgcatgtgtgctagatttcaatccgatccaagggaatgtcaccttgtggccgttaagcgaattcttagatatttagttgctacgccttgcttcgggatctggtatccaaaggggtctacctttgacttgattggatactcagactccgattatgctggatgcaaggttgataggaagagtacatcagggacgtgccaattcttaggaaggtccctggtgtcttggagttctaagaaacaaacctccgttgccctatccaccactgaggccgagtatgttgccgcaggacagtgttgcgcgcaactactttggatgaggcaaaccctctcggactttggctacaatctgagcaaagtcccactcatatgtgacaatgagagtgcaatctgcatggcggataatcctgttgaacacagccgcactaagcatatagacatccggcatcactttttgagacaccaccagcaaaagggagatatcaaagtgttctatattagcaccgagaaccagctagccgatatctttaccaagcttttagatgagaaaaccttttgcaggctgcgaagtgagctaaatgttctagatttgcgtaacttggattga

SEQ ID NO: 5005 - DNA, 4683 bp, Zea mays
  Clone ID: TF_ZM5106.C2.o13.fg
atggatcctaagggaaaggggatggtggtcaacgataaggagaaggaatccgtcttcaacgagccaagagacgataagcccactgactctggctcaagtcacatgaaaaaggacgagaagaagaagagggacgagtaccacaaggtgagcggcttgtataatgccaagcaaatttgggacaccctcaagatctctcatgaggggaatgacgccaccatgatcaccaaaatggagttggtggaaggcgaactaggaaggtccttcactatacttgatcctcatcttgtgaattctatccgtgaaaatcctaggtacaccaagatgacgcccgaggaaatactcggaaagtttgtaagcgggcgtataatgatcaaggaagcaagatacattgatgaggcattgaatgcaacaagtagcagggaggcactacctagcaaggtggcgcaagttgaggcggccgggctaaataaggatgaaatggccctcattatcaagcgcttcaagaccgcattgaagggttgcaaggagtactcaaacaagaacaaggcaaagggaaagtgttcctgcttcaagtgcggtaagacaggtcattttattgctcaatgtcccgataatgaaaatgaccagggagacgaaagacatgggaagagagagaacaagaaggtttacaagaaggcgaagggcgaggcacaccttggcaaagagtgggactcggattgttcttcgtccgactccgacgacgaaggactcgccgcctcggccttcaacaaatcgtcgctcttccccaacgagcgccatacttgcctaatggcaaaggagaagaaggtaaatgctcaagaaactcctaagtactctacttctagtgatgatgactctagtgatgatgaagtagattacactagcttgttcaaaggattagatagagctaaagtagaaaagattaatgagttgattgatgcattgaatgaaaaagatagactgctagagaggcaagaggacatcttgtatgaggaacatgacaaatttgttagtgttcaaaagtctcttgccttagagattaaaaggaatgaattactatcttctgaattatctatttgcaatgaatctatttctagcttgaagattttgaatgatgatttaaatgctaagctagaggtagttaataaatctagtccttgtgtagagcatgttgtaatttgcaatagatgcaaagattttaatgttgatgtttgtgatgaacatttaatttctatttctaaattaaatgatgaagtagcaagtcttaatgctcaacttaagacttgcaaaagtgattttgataaattaaaatttgctagggatgcctacactgttggtagacacccctcaattaaggatgggcttggctttaagagggaagccaagaacttaacaagccaaagggctcccattttcaacaaggaaaaagggaaggctcctatggctagtaatagtcaaaagaatcatgcatttatttatgatagaaaattttctaggaatgctcatcataataggagttataatgcttatgattcacatgccatgattgtttcaagttcttcctttgtgcatagtagaaatatgactagaaacaatgttgttcatcatgtgcctaagaaaatgcaaaataaatctgctactgtttttcatgcctgcaacactgattttgtactttcatgtaaaaataagaaagtggtcgctaggaaattgggggcaaaatgcaagggagataaaacttgcatttgggtccctaagactattgttactaaccttgtaggacccaacaagagttgggtttatgcatccgggggctcaagctggattatcgacagcggatgcacaaatcacatgacgggggagaagaagatgttcacctcctacgtcaagaacaaagattcccaagattcgatcatctttggagacgggaatcaaggcaaggttaaaggactaggaaaaatagctatttcatccgagcattccatatctaatgtgttcttagttgaatcgctcgggtataacttgttgtccgttagtcaactatgtaatacgggttacaattgcttatttaccaatgtagatgtgtctgtctttagaaggagtgatggttcattagcttttaagggtgtactagacgacaaactctatttagttgatttttcgaaggaggaggccggtctagatgcatgcttaatcgctaagactagcattggctggctgtggcatcgccgtctagcacatattgggatgaagaaccttcataaacttctaaagggagaacatgtgttaggtctaaccaatgtaactttcaaaaaagatagaccttgtgcagcttgtcaagcaggtaaacaagtgggaagttctcatcatagcaaaaatgtgatgaccgcatcaagacctttggagctacttcacatggacctcttcggacccgtcgcctacctcagcatcgggggaagtaagtatggtcttgttattgttgatgatttttcccgcttcacttgggtattctttttgcaggataaaacagaaacccaagggaccctaaagcgcttcctaaggagagatcaaaacgaatttgagctcaaggtgaaaaagataaggagcgacaacgggtccgagttcaagaatctgcaagtggaggagtaccttgaggaggaaggaatcaagcacgagttctttgctccctacacaccacagcaaaacggtgtggtagagaggaagaacaggacgcttatagacatggcgaggacgatgcttggtgaattcaagactcccgagcggttttggtcggaagctgtgaacacagcctgccacgccataaaccgggtctaccttcatcgcctcctcaagaagacgtcgtacgaacttctaaccggtaacaaacccaacgtatcatactttcgtgtatttgggagtaaatgttatattctagtgaagaaagttaggaattccaaatttgctcccaaggctgtagaagggtttttgttaggatatgactcaaatacaaaggcgtatagggtcttcaacaaatcatcgggtttggttgaagtctctagcgatgttgtatttgatgagactaatggctctccaagagagcaagttgatcttgatgatgtagaggaagatgacgttccaacggctgcaatacgcaccatggcaattggagatgtgcgaccacaggaacaaaaagagcaagatcaaccttcttcctcaacaatggtgcatcccccaactcaagacgatgaacagatacaagcaaagcaagatttaaggatacgtaccttcgcgactggccgcctgggactggctagcccgcctggctggctagtggctgcgcgcctgccacttgctgtctgggactggctgtcctactcgtttgtctcttttattgagcctttcagggtagaagaggctttgctagatccagactgggtgttagccatgcaggaagaactcaataacttcaagcgaaatgaagtttggaccctggtgccacatccaaagcaaaatattgtgggaaccaagtgggtgttccgcaacaagcaagacgagcacagagtggtgacaaggaacaaggctcgacttgtggcaaaaggttatgcccaagtcgcaggtttggactttgaggagacttttgctcctgtggctaggctagagtctattcgcattttgttagcctatgtcgctcaccattccttcaggttgttccaaatggatgtaaagagcgccttcctcaatgggccaatcaaggaggaggtgcacgtggagcaaccccctagctttgaggatgaacggtaccccgaccatgtgtgtaagctctctaaggcgctctatggacttaagcaagccccaagagcatggtatgaatgccttagagattttctaattgctaatgctttcaaggttgggaaagccgatccaactcttttcactaagacttgtgatggtgatctatttgtatgccaaatttatgtcgatgacataatatttggttctactaaccaaaagtcttgtgaagagtttagcagggtgatgacacagaaattcgagatgtctatgatgggcgagttgaactacttccttgggtttcaagtgaagcaactcaaggacgacaccttcatctctcaaacgaagtacacgcaagacttgctcaagcggttcgggatgaaggacgccaagcccgcaaagactccaatgggaaccgacggacatgtcgacctcaacaaaggaggtaagtccgttgatcaaaagacatatcggtctatgataggttctttgctttatttatgtgctagtagaccggatattatgctaagcgtatgcatgtgtgctagatttcaatccgacccaagggagtgtcaccttgtggccgttaagcgaatacttagatatttagttgctacgccttgcttcgggatctggtatccaaaggggtcaacctttgacttgattggatattcagattccgattatgctagatgcaaggtagataggaagagtacatcagggacgtgccaattcctaggaaggtccctggtgtcttggagttctaagaaacaaacttccgttgccctatccaccgctgaggccgagtatgttgccgcaggacagtgttgtgcgcaactactttggatgaggcaaaccctccgggactttggctactga

SEQ ID NO: 5006 - DNA, 4635 bp, Zea mays
  Clone ID: TF_ZmC951_321
ctaagggtttgcctcatccaaagtagttgcgcgcaaaaatgtcctgcggcaatatactcggcttcggcggtagaaagagctacggaattttgcttctttgaagcctaagacaccaaggaccttcccaagaactggcaagtccccgatgtgctctttcttttgatcgacggatttacctccctcgtcgaggtcgagatgcccattggttcccatgggtgtcttgatgggtttggcatccttcattccaaacttgcttagaatatcttgagtatacttcgtttgacttaggaaggtaccctcttggagttgcttcacttgaaaacctaagaagtacttcaactcccccatcatagacatctcgaatttttgtgtcatgatcctactaaattcttcacatgtagactcgttagtagacccaaatataatatcatcaacatagatttggcatacaaacaagtcattttcaagagttttagtgaataaagtaggaccggcctttccgactttgaatccattagtgataaggaaatctctaaggcattcataccatgctcttggggcttgcttgagcccataaagcgccttagagagtttataaacatggttagggtactcactatcttcaaagccgggaggttgctcaacatagacctcttccttgattggtccattgaggaaggcacttttcacgtccatttgataaagcttaaagccatggtaagtagcataggccaataatatgcgaattgactcaagcctagctacgggtgcataggtttcaccgaaatccaaaccttcgacttgtgagtatccgttggccacaagtcgagctttgtttcttgtcaccacaccatgctcatcttgcttgttgcggaagacccatttggttcctacaacattttggttaggacgtggaactaaatgccatacctcattcctagtgaagttgttgagctcctcttgcattgccaccacccaatccgaatcttgtagtgcttcctctaccctgtgtgcctcaatagaggaaacaaaagagtaatgctcacaaaaatgtgcaacacgagatctagtggttacccccttatgaatgtcgccgaggatggtgtcgacggggtgatctcgttggattgcttggtggactcttgggtgtggcggcctttgttcttcatcctccttgtcttgatcatttgcatctcccccttgatcattgccgtcatcttgaggtggctcatttgcttgatcttctacttcatcaacttgagcttcatcctcattttgagttggtggggatgcttgcgtggaggaggatggttgatcttgtgcatttggaggctcttcggattccttaggacacacatccccaatggacatgttccttagcgcgatgcacagagcctcttcaatacctatctcatcaagatcaacttgctctacttgagagccgttagtctcatcaaacacaacgtcacaagaaacttcaacttgcccagaggacttgttaaagactctatatgcccttgtgtttgaatcatatcctagtaaaaagccttctacagtcttaggagcaaatttagattttctacctcttttaacaagtataaagcatttgctaccaaagactctaaaatatgaaatgttgggctttttaccggttaggagttcgtatgatgtcttcttgaggattcggtgtagatataaccggttgatggcgtagcaggcggtgttgaccgcctcggcccaaaaccgatccgaagtcttgtactcatcaagcatggttcttgccatgtccaatagagttatattctttctctccactacaccattttgttgtggcgtgtagggagaagagaactcatgcttgatgccctcctcttcaaggaagccttcaatttgagagttcttgaactccgtcccgttgtcgcttcttattttcttgatccttaagccgaactcattttgagcccgtctcaagaatccctttaaggtctcttgggtttgagatttttcccaaacggttttgggtcctttggcattagaaacaagaactttgggtacccaaacacaagtcttggagcccttgtgtttgcccccaacaaacttggcaactacgttgctggatttgttagttaaagcatatgatgcattaaaagttttgaatgaaatgtcatgatcatttgatgcattaggagttctcttcttaggcaacttagcacgggttggttgcctagaactagatgtctcacccttatacatgaaagcatggttagggccagagtgagacttcctagagtgaatcctcctaattttgctctcgggataaccggcagggtacaaaatgtaaccctcgttatcctgaggcatgggagccttgccctttacaaagttagacaatcttttaggaggggcactaagtttgacattgtctcccctttggaagccaatgccatccttgatgccagggcgtctcccattataaagcatactacgagcaaatttaattttttcattctccaagttatgctcggcaattttagcatctaattttgctatatgatcattttgttgtttaattaaagacatgtgatcatgaatagcattaatatcaacatctttacatctagtacaaatagatacatgctcaacgatagatgtagagggtttgcaagattttaattctacaaccttagcatgcaatatatcgttttcacttctaaggttagaaatagtagcattgcaaacatcaaaatctttagccgtagcaattaatttttcattttcatttctaaggctaacaagagataaattcaattcttcaatcttagcaagcaaatcatcattatcattcctaagattaggaattgaaacattacaagcatttgaatcaaccttagctaacaaattagcattttcatttctaaggttgtcaatggtctcatggcaagtgcttagctcactagatattttttcacatttctcaacttctagagcataagcatttttaactttaacatgcttcttgttttctttaataagaaagtcctcttgggagtccaagagatcatccttctcatggatggcactaattaattcatttaatttctccttttgttgcatgtttaagttagcaaaaagagtgtgcaagttatcttcctcatcactagcattttcatcactagaggattcatatctagtggaggatttagatttaaccttcttctttttgccgtcctttgccatgaggcacttgtggccgacgttggggaagagaagtcccttggtgacggcgatgttggcggcgtcctcgtcgtcggaggagtcgctagagctttcgtcagagtcccactcccgacaaacatgggcatcgccgcccctcttcttgtagtatttcttcttctcctttcttctccccttcttgtcgtcgcccctgtcactgtcactagatataggacattttgcaataaaatgaccgggcttaccacatgtgtaacacactttcttggagcgagatttgtagtccttccccttcctttgtttgaggatttggcggaagctcttgatgacgagcgccatttcctcattgtcgagcttggaggcgtcgattggttgtctacttgatgtagactcctccttcttctcctccgtcgccttgaatgcgaccggttgtgcttcgggtgtggaggaggtgccttgctcgatgattttctttgagcctttaatcattagctcaaagctctcaaattttcctatgacttcctcgggagacattagcttatatctaggatcacctcgaattaattgaacttgtgtagggttaaggaatacgagggatctaagaataaccttgaccatctcatggtcatcccatttttcgctcccgaagttgcgcacttggtttaccaaggtcttcaagcggttgtacatagcttgtggatcctccccttggtgaagcatgaagcgaccgagctccccctcgatcgtttcccgcttggtgatctttgtcacctcgtctccctcgtgcgcggtcttgagtacgtcccaaatttccttcgcactttttaacccttgcaccttattatactcctctcgacttagagaggcgaggagtatagtagtggcttgggagttaaagtggtgaatttgggccacctcgtccgagtcgtagtcttcatcccctatggatggtacctgtacaccaaactcaacaacattccatatacttttgtggagtgaggttagatgaaatttcattaaatcactccacctagcataatcttcaccgtcaaaggttggcggtttgcctaatggaacggaaagtaatggagtatgtctataggtacgaggataatgtaaggggatcttactaaacttcttacgctcatggcgcttcgaagttatggagggcgcgtcggagccggaggtagaaggtgatgaagtgtcggtctcgtagtagaccactttcctcatcttctttattttgtcgccactccgatgcgacttgtgagaagaagtcttattttccttcttcttctccttcctcttctccttgttgcgagactcttccgatgaagccttcccatggcttgtagtgggcttgtcgccggtctccatctccttcttggcgagttcttccgacat

SEQ ID NO: 5007 - DNA, 1605 bp, Zea mays
  Clone ID: TF_ZmC14166_298
atgggcatttggtggttgagggctataaatatcccccaaccaccacaactccaagcatccaagttttctgaagttctcattcaatacaagaatcatgccaagagggagatcgtgaccggagacaagctcgcaagctcagggaggactctctcaagggagtccgacaacaagcacaaggaggaatcctcttcctccatcaagtcccatcaaagaggcgacaagaaaaaggagatgaagaaagtggtctactacaagagcacgaagtatagtaagatgcctcttcgatatccctgtatttctaagcgcgctcctctactttctgttccattaggaaagccaccatattttgatggtgaagattactctatgtggagtgataaaatgaggcatcatctaacctcactccacgaaagcatatggaatattgttgagtttggagcacaggtacctatggtagggaacgagggctacgactcggacgaggtcgcccaaattaggcactttaactcccaagccacaactatactcctcgcctccttgtgtcgagatgagtataataaggtgcaagggttaaaaagtgtcaaagaaatttgggacgtcctcaagacggcgcacgaaggggacgaggtgaccaagatcaccaagcgcaaaacgatcaagggagaactcggtcgattcatcctcaacaagggagaggagccacaagcgatgtacaatcggctcaagaccttggtgaaccaagtgcgcaacctcgggagcacaaaatgggatggccatgaaatggtcaaggttattcttagaacacttgtttttcgtaatcccactcaagtgcaactaatccgtggagatcctagatataaacagatgtctcccgataagcttccgccaaatcctcaagcaaagagggggaaggactacaaaccccgctccaagagggtgtgctacaagtgtggtaagcccagtcattttattgctaaatgtccaaattctagtgatagtgataggggcgatgacaagaagaggaagaagaaagagaagaagagatactacaagaagaagggcggcgatgcccacgtgtgtcgggaatgggacttcgatgagagctccaccgacccctccgccgacgaggacgccgccaacatcgctgtcaacaagggcctcctcttccccaacgtcgaccacaaatgtttcatggctaaggatggtaagaaaaagaagcatggaacaaaaggaaaaaaattaaatgaattaatagaagctattcatgagaaggatgatctcttggaaagccaagaggacttccttattaaagaaaacaaaaaacatgtcaaattgaaaaatgcttatgctcaggaagtagaaaaatgtgaaaacttgactaaggagcttagcgtttgccataattcaattaccagtcttagaaatgagaatgctaatctaaatgctaagattgatgaattgaatatttgcaatgaatcaatttctagccttagaactgaaaatgctagtttagtttctaaggttaaagagttaaatgtttgcaatgattctatttcctgtcttagaaatgagaataccatattacatgctaagatagaagattaa

SEQ ID NO: 5008 - DNA, 2110 bp, Zea mays
  Clone ID: TF_ZmC4916_442
ccgaaccatgggataaaccactgggccatctctgtgattgatctcttgtggttattgtgttttgttgagactcctctctagccacttggcaatactgtgctaacgtttaaccaagtttttgtggcattaagttcaagttttacaggatcacctattttccccccccctctaggtgctctcaattggtatcggagccgttctcttcaagaaagggactaaccgcccaaagagatggatcctaagggcaaggggattgtgatcaatgacaaggagaaggagtcattcatcaacgagcccaaggatgacaagcctaccgactcgggctcgggccacaaatgcaaagatgggaagaagaagaagacaagacgcatcaaggagatcgtctactacgacgacagcgatgagtccacttcttcccaaaaggacaacgacgacaacgactacgagagaaggaaaccggttaattcgaacttttcttttgactactctcgtattccgcaaagtacaaatgctcatttgctctccattccacttggcaaacctcctcactttgatggagaggactacggattttggagccacaaaatgcgtagtcacctgttctatctccatccgagcatatgggagattgtggaaagtggaatgaaatttgatagctcggatagtcctatgtttatcaatgaacagattcatagaaatgcacaagctactactgtgttgttagcctctttgtgcagggacgagtatcataaggtgagcggcttggataatgccaagcagatctgggacaccctcaggatctcacatgaggggaacgacgtcaccttactcaccaaaatggagttggtggagggcgagcttggaagattcgcaatgatcaggggagaggagccaacccaaacatacaaccggctcaagaccctcatcaacaagataaggagctacggaagcacacaatggacggaccacgacatcgttcgtctaatgctaaggtcctttactgtacttgatccacatttggtgaacaatatccgtgaaaatcctaggtacaccaagatgtcgcccgaagaagttcttggaaaatttgtaagcgggcgaatgatgatcaaggaggcgagatatgtcaacgacgcgttgaacggtccaatccatgagcctcaacccattgctctcaaggcaacgaggagcaaggaggcgctacctagcaaggtggcgcaagttgaggcggctgggctcaatgatgaagaaatggccctcatcatcaagcgcttcaatacggcgctaaagggtcgcaaggggcagccaagcaagaccaagacaaaggggaagtgctcatgcttcaaatgtggtaaggttggtcattttattgctaattgccccgacaatgatagtgaccaggaacaagagaacaagagggagaagaagaagaactataataaggcaaaaggcgaggcacatcttggcaaggagtgggactcagattgttcgttgtccgactccgacaacgaaggactcgccgccactgccttcaacaagtcatccctcttccccaacgagcatcacacttgcctcatggcaagggaaaagaaggtaagcactcataatactagtacttacgcttcctcaagtgatgaagaatctagcgatgatgaagtagactattcatgtttattcgagggcctagatagaactaaggttgataagattaatgaattaattgatgcattgaatgataagaataggttattagaaaagcaagaggatcttttgtatgaagaacatgataagtttgtagaggcacaaaaatcccttgctttagaaattaaagggaatgaaatgctttcttgtgaattgtctacatgccatgactctatttctagcttaaagagcataaatgatgatttgactgctaagttagaaataggtaataaatcaacatcttgtgtagaacatgttgcaatttgcaataggtgtaaagattttaatgttgatgcttgtagtgaacatctagtttcaatttctaatttgaatgatgaagtggctagtcttaatgcccaacttaagactagcaagagtgtatttacaaactaaaattgcaagggatcccgaa

SEQ ID NO: 5009 - DNA, 2661 bp, Zea mays
  Clone ID: TF_ZM4578.C2.o8.fg
atggagtggataagaaagacagagaattttattgatcgtgcttttgctttgtcaagaggcacggatgtgcgatgtccatgtagtatgtgtcgggtttgtagatgccaagacaagagaactctgtcggggcacctttgcaaatatggctacatgcctaactatgaagtctgggtgtatcacagcgaggagttgccccgtgaaaatgtgtttgaagcccacaacaatgatgacgtggaatatgatagaatggaagagatgcttcaagatttaagggaggatcctgattttgtgtttccaccacatagtaaggagctacctccagatgttaaaaagttctttgacctccttaaggctgcagaagaaccattgcatgaacacacaaaagtttccatccttgctttcgtgactcgacttatggctattaagtctaagtacgtgttctcgaacaattgttacaacgagctcttgatcttaatcagcgaagtgtttccaccaaatcacaagatgccgaaagacgtgtatcaatgcaggaaactgctctctggtctagatggggtagagacagaggaggggagacaggtgggaaatgttgatgatgaggtagagacagaggaggggagacaggtgggagatgatgatgaggtagagacagaggaggggaggcaggtgggagatgatgatgaggtagagacagaggaggcagagacatggtggggatgccatgatactggtggttttggacatgatagccatagtggatggcgtgaatggcctgaggatgcaagtggatggccaagagatggagggtcaggagttgggggagctagtgggtcaagggaaggagaagcttgtggttttggaagtgggggagttggaggggcttgggtggatagtagtttcactggcacaggtcgtcgaaggcaagtaaagaaagtgttgggcaacatatgtcgtatgaaatggcctggattggtgatagaggatggtaaggaggtccctgtcacaagatgggatcaatatgcccttgcaataaatgcgcaacatgggaatgcacaagctgcagtttggcacgacttctggaaacattacaagttgcctgaaggagatactcatacggaacacgcacactccgtgttccataggaatgcggcaagtgttgttggggatatgatgtactatgctcgaatccagcattcgattccatggatagctgtcaatgatgctgcttggcatgcgttatgtcgttactgggcttcagttgaattcaaggcaaagtctgtgcgacacagttccaatcgtggaaccgagtcgtatcacaggtatggaggtgatgatcactttcgtttggcaaaacgaatggaagctagcactggtgcagtgcccagtgatgttcaaatataccttagggggcacagaggaccagatcctgcaaatccagatgtgttgtacagccaaaaggcaacagatcgtgtggctgcatatggcgaggcgatgactagtcagcacggaccagactatgactggaggacctcacctattgatcctcaggctgtgtatgcaagtggtggaaaagctcatggaaggtacacaatgtttgctaacgtcatcgactcgagccagacccctccagctaccttgccgacgcatgaacaagaggacaggttagactttgtcgataccctcttgaatagtggaggtatcgatggtgatcggcgaccccatcttgttaatagttgtcataagaaagttgtggagatcaataaggtccaaaagaaaagaaaacaccctcaaactcatgcatcaacaaagaataaacaacggaaagagaccacaggaaagataagttatgcagtgacaggaaccattccatatgatgatgcagtaatttttggaacactagtcattcacacaaccatcgccatcgtgttgtatgatcctcgtacgacacattcctttatcagttcccagtttgcaacaaagtatggtatctttaagtgtcccttaagatcaagaaagaccatcagtacacccgaaggaaaaacgttagtgaactacatatgtccgaaagtaagcgttaaaatcaacgggatagattttccagctgatctcctagtcatagaaacaatgggaaaggatgtgattcttggaaagaattggttacaaagaactaaggcgatgatgaaccccaatggaaatgaagtaaatgatgccgacgacaatattcctaccttaacaactaggaacgagaaaaatgagtcacagaggtatttgatgaatggaatgaagaacaacaaaagaaatagaaaaatgtttggatacatgattagttcatctcaaccacaagcaaaagccccgaaacacatggatacccaaacagaagaatcaagtcagactcagctacatgagatacagacaccgaatcaaccctcaccccctgttggtcaagcaaagttgactcgtaaagaactcaaagcaagaggtggttgctattattgcaaaaatgaaggacatcttattcgcgaatgtcccaagaagcgtctagaccgaataaagaagaaagctgccaagcatgacctaagcaataattcagaagacccaccattttataagtacgatgatgaaggacgcttggttagtatacatttcggagcagagaagtaa

SEQ ID NO: 5010 - DNA, 3007 bp, Zea mays
  Clone ID: TF_ZM4622.C5.o3.fg
atggatcctaagggaaaggggatggtggtcgacaacaacgagaaggagtctatcttcaacgagccgaaggatgacaagcctaccgactcgggctcgggccacaagcgcaaagacgggaagaagaagaaaacaaggcgcatcaaggagatcgtctactacgacaacgacgaatcttcctcttcccaaaaggacgacgacgactacgagaaaaagaaaacggtcaattcaaacttttcttttgattactctcgtattcctcaaagtacaaatgctcatttattatctattccacttggcaaacctcctcattttgatggagaggactacggattttggagtcacaaaatgtgtagtcacttgttctctctccatcctagtatatgggagattgtagagagtggaatgcactttgatagtacggatagtcccatgttcattaatgagcaaattcataaaaatgcacgagctactactgttcttctagcttctttgtgcagggatgaataccacaaagtgagcggcttggataacgccaagcaaatttgggacaccctcaagatctctcatgaggggaatgacgtcacaatgctcaccaagatggagttggtggagggcgaactcgggagattcgctatgataaggggagaagagccaacccaaacgtacaaccggctcaagacccttgtcaacaagataagaagctatggaagcacgcgatggacggaccatgacgtcgtccgcctaatgctaaggtcttttactgtccttgatcctcatcttgtaaacaatattcgtgagaatcctaggtacaccaagatgacgcccgaggagatacttggaaagttcgtgagcgggcgaatgatgatcaaggaagcaagatacatggacgacgcattgaatggtccaatcaatgagcctcaacctcttgctctcaaggcaacaagaagcaaggagacgctacctaacaaggtggcacaaatcgaggctgccggacttaatgatgaagagatggctctcatcatcaagagattcaagacgacgctaaaaggtcgcaaggggcagccaagcaagaccaagacaaaggggaagcgctcatgcttcaaatgtggtaagcttggtcattttattgctagctgtcccgacaatgatagtgatcaggatcaagggaacaagagggagaagaagaagaactataagaaggcaaagggcaaggcgcatctaggcaaggagtgggattcggattgctcctcttccgactccgacaatgaaggactcgccgccaccgccttcaacaagtcatccctcttccccaacgagcgccacacatgccttatggcaagggagaagaaggtatgtactcgaaactctacttatgcttcttcaagtgaggatgaatctagcgatgaggatgaaatagattattcatgtttatttaaaggcctagatagaaccaaggtagataaaattaatgaattgattgatgccttgaatgataagaataggcttttagaaaagcaagaggatttgttgtatgaagaacatgacaaatttgtagaagcacaaaaatctcatgctctagaagttaaaagaaatgaaatgctttcttgtgaattatcttcttgccatgagacaatttctaacttaaggaacattaatgatgatttgaatgctaagttagaaatagctagtaaattaacatcttgtgtagaaattgttgcaacttgtaataggtgtaaagattttgacattgatgcttgtagtgaacacctagtttcaatttccaaacttaatgatgaattggctagtcttaatgctcaacttaagactagcaagagcgaatttgataagctaaaatttgcgagggatgcctacacgattggtagacacccctcaattaaggatggacttggcttcaagagggaagccaataacttaacaatccataaggttcccatccccgccaaggagaaagggaaggctcctatggcaagtagtactaaaaagaaccatgcttttatgtatcataacacgagacatgctagaaatgactatagaagttatgattcacatgctatgtttgcttctagttcttcttatatgcatgatagagatatgtctaggagatatgttcatcatgtgcctagaaagaatattgttcatgtttctaggaaagttatggatggtccttctacaatatatcatgctttaaatgcttcctttactatttgtagaaaggataggaagatagttgctaggaaattaggggcaaaatgcaagggtgataaaacttgcatttgggtccctaagacaattgtgactaaccttgtaggacccaacaagagttggggttatgcatccgggggttcaagctggattatcgacagcggatgcacaaaccatatgacgggggagaagaagatgttcacctcctacgtcaaaaacaaggattcccaagattcaatcatatttggtgatgggaaccaaggcaaggtgaaaggtttaggcaagactgcaatttcaaatgagcactctatctctaatgtgtttttagttgagtcccttggatataatttgctatctgttagtcaattatgtaatatgggatataattgtctatttacaaatgtagatgtgtctgtctttagaagaagtgatggttcactagcttttaagggtgtattagacggcaaactttacttagttgattttgcaaaagaagaggccggtctagatgcatgcttaattgctaagactagcatgggctggctgtggcatcgccgcttagcacatgtggggatgaagaactttcacaagcttcttaagggagaacacgtgataggtttaactaacgtgcaatttgaaaaagatagaccttgtgcagcttgtcaagcaggtaaacaagtgggaggagcacatcacagcaagaatgtgatgaccacatcaagacccctggagctgctacatatggacctcttcggtcctgtcgcctatctaagcataggaggaa

SEQ ID NO: 5011 - DNA, 648 bp, Zea mays
  Clone ID: TF_ZM4895.C2.o1.fg
atggatcctaaggggaagggaatcgtgatcaacgataaggagaaggagtccttcgtcaacgagcccaaagatgacaagcctaccgactctggctcgggccatagacggaaggaagggaagaagaagaagacaaggcgtatcaaggagatcgtctactacgacgacagcgacgaatcttcctcttcccaaaaggacaacgacgacaacgactatgacaaacaaaagacggcaacaaggagcaaggaggcgctacccagcaaggtggcgcaaattgaggcggccggtcttaatgatgaagagatggccctcatcatcaaaagattcaagacggcactgaagggtcgcaagggacagccaagcaagactaagaccaagggaaagcgatcatgcttcaaatgcggtaggcttggtcattttattgctaactgtcccgacaatgatagtgaccaggagcacgggagcaagagggaaaagaagaagtattacaagaaggccaagggcgaggcacatatcggaaaggagtgggattcggattgctcctcctccgacttcgacaatgaaggactcgccgccactgccttcaataagtcatccctcttccccaacgagtgtcacacatgccttatggcaagggaaaagaaggtgtaa

SEQ ID NO: 5012 - DNA, 5112 bp, Zea mays
  Clone ID: TF_ZmC951_398
ttataccaaagacgaagttccttttgcgtttgagcttttactctctcccccaaggatgaagtccttttccttgatgctcatttctcccccaaagacgagagagttgctcggagtgatggcgaagtatgagttacggagtggaagcctttgtcttcgccgaagactccaattccctttcaatatacctatgacttggtttgaaataaacttttgatccacggacttacctcccgtgtcgaggtcgagatgcccattagttcccatgggtgtcttgatgggtttggcatccttcatcccaaacttagcaagaatgtctcgagtgtacttcgtttggctaatgaaggtgccctcttggagttgcttgacttggaatcctagaaaatacttcaactcccccatcatcgacatctcgaacttctgtgtcatgatcctactaaactcttcacatgtagactcgttagtagacccaaatataatatcatcaacataaatttggcatacaaacaagtcattttcaagagttttagtaaagagtgtaggatcggccttgccgactttgaagccattagcaataaggaaatctctaaggcattcataccatgctcttggggcttgcttgagcccataaagcgccttagagagcctatagacatgattaggatactcactgtcttcaaagccgggaggttgctcaacatagacctcttccttgattggtccgttgaggaaggcacttttcacgtccatttgatagagcttaaagccatgataagtagcataggccaataatatgcgaattgactcaagcctagctacgggtgcataggtttcaccgaagtccaaaccttcgacttgtgaataccctttggctacgagtcgagctttgttccttgtcaccacaccatgctcatcttgcttgttgcggaagacccatttggttcctacaacattttggttaggacgtggaactaaatgccagacctcattcctcgtgaaattgttgagctcctcttgcatcgccaccacccaatccgaatcttggagagcttcctctaccctgtgtggctcaatagaggaaacaaaagagtaatgttcacaaaaatgagcaacccgagatcgagtagttacccccttatgaatgtcgccgaggatggtgtcgacggggtgatctcgttggattgcttggtggactcttgggtgtggcggtcttggttcttcctcatcctccttttcttgatcatttgtatctcccccttgatcattgctatcatcttgaggtggctcgtcttcttgattttgctcttcatcattttgagcctcatcctcattttgagttggtggagatgcttgcatggaggaggatggttgatcttgtgtacttggaggctcttcggattccttaggacacacatccccgatggacatgttccttagcgcgatgcatggagcctgttcttcacctatctcatcaagatcaacttgctctacttgagagccgttagtttcatcaaacacaacgtcacaagagacttcaactagtccagtggacttgttaaagaccctatatgcccttgtgtttgagtcataaccaagtaaaaagccttcggttaggagttcatatgatgtcttcttgaggattcggtgaagatataaccggttaatggcgtagcaggcggtgttgactgcttcggcccaaaaccggtccggtgtcttgtactcatcaagcatggttcttgccatgtccaatagagtccgattcttcctctccactacaccattttgttgtggcgtgtagggagaagagaactcatgcttgatgccctcctcctcaaggaaactttcaatttgagagttcttgaactccgtcccattgtcgcttcttattttcttgatccttaagccaaactcattttgagctcgtctcaagaatccttttaaagtttcttgggtttgagatttttcctgtaaaaagaatacccaagtgaagcgagaataatcatccacaataactagacagtacttactcccgccgatgcttatgtaagcgatcgggccgaatagatccatgtgtaggagctccagtggcctgtcagtcgtcattatgttcttgtgtggatgatgagtgccaacttgcttccctgcttggcatgcgctacaaatcctgtctttctcaaaatgaacattggttagtcctaaaatgtgctctccctttagaagtttatgaagattcttcatcccaacatgggctagtcgacggtgccagagccaacccatgttagtcttagcaattaaacatgtgtcgagctcagctctatcaaaatctactaagtatagctgaccctctaacacacccttaaatgctattgaatcatcacttcttctaaagacagtgacacctttgaccaacccttgatttccatccccaaatgtgatagctcgttggggatctttgtttttctcatatgaggagaacatccttttctccccggtcatgtggtttgtgcacccgctgtcgagtatccaacttgagcccccggatgcataaaccttgccggatttgctagtaagcacataagatgcatcaaaagttttaaatgaaatggcatgatcatttgatgcattagtggttttctttctaggcaacttggcatgggttggttgcctagatctagatgtctcacccttatacatgaaagcatgattagggccagagtgagacttcctagaatgaatctttctaattttgctctcaggatagctggcagggtataaaatgtaaccctcgttatcctgaggcatgagagctttgcccttaacaaagttagacaagttcttaggaggggcattaagtttgacattgtctcccctttggaagccaatgccatccttgatgccagggcgtctcccattataaagcatgctacgagcaaatttaaatttctcattttctaagttgtgctcggcaattttagcatctagtttagctatatgatcattttgttgcttaattaaaaccatgtgatcatgaatagcattaatatcaacatctctacatctagtacaaatggaaacatgctcaatggtagatgtagagggtttgcaagattttaattctacaaccttagcatgcaagatatcattcttagttctaaggtcggaaatggtagtattgcaaacatcaaaatccttagccttagcaagcaatttttcattctcaattctaagactagtaagagaaatgttcaattcttcaatcctagtaatcaaatcatcattattatctctaggggtgaaaattgaaacatcacaagcatgagaatcaaccttagcatttaaaatagcattttcattcctaaggttgtcaattatttcacggcaagtgcttagctcactagataatttttcacatttttctacttctagagcataagcctttttaaccttaacatgttttttgttttctttaattagacaatcctcttgggaatccaaaaggtcgtccttttcatgaatagcactaaccaattcattcaatttttctttttgagctatgttaaggttggcaaaaagggaacgcaaattatcttcctcatcactagcattgtcatcactagaggattcatatttagtggaggatttagatttaaccttctttttgccgtcctttgccatgaggcacttgtggccgacgttggggaagaggagtcccttggtgacggcgatgttggcggcgtcctcgtcgtcggaggagtcgcttgagctctcgtcggagtcccattcccgacaaacatgggcatcgccgcccttcttcttgtagtatcttttcttctcctttcttctccccttcttgtcgtcgcctcggtcactgtcactagaaataggacatttagcaatataatgaccgggcttaccacacctgtagcaaaccttcttggagcgggatttgtagtctttccccctcctttgtttgaggatttgtcggaagctcttgatgacgagcgccatttcctcattgtcgagcttggaggcgtcgattggttgtcgacttggtgtagcctcctccttcttctcctccgttgccttgaatgcaacgggttgggcttcggatgggtccccaagctcgttgattttcctcgagccttctatcatgcactcaaaacttacaaaatgcccgataacttcctcgggggtcattttagtatatctaggattaccacgaatcaattgaacttgagtgggattaagaaaaatgagagatcttaaaataacatttaccacttcgtggtcatcccacttcttgctcccgaggttgcgcacttggttcaccaaagtcttgagccggttgtacatgtgttgtggctcctcccctttttgaagccggaaccgaccgagctccccctcgatcgtttcccgcttggtgatcttggtgagctcatctccctcgtgcgcagttttgagcacatcccaaatctcctttgcatttttcaacccttgcactttgttgtattcttccttgcttagagaggcaaggagtatggttgtggcttgagagttgaagtgctcgatttgggccacctcatcctcatcatagttttcatcccctacggatggtacctgcgcaccaaactcaacaacatcccatatgcttttgtggagcgagattagatgaaatcgcattaaatcgctccacctagcgtaatcttcaccatcaaaagttggtggtttgcctaatgggacggaaagtaaaggtgtatgtttggaaatgcgagggtagcgtagggggatcttactatacttcttgcgctcttggcgcttagaagtgacggagggcgcatcggagtcggaggtagaggttgatgaagtgtcggtctcgtagtagaccacctttctcatcctcttgtgcttatcgcctttccgatgcggcttgtgggaagaagatttttccttcttttctttgtggtgagaagaagatttcttctccttccctttgttggaggagctcttcttcttctccctccttttggtgcgggactcttccgatgaagtgctcccgtagcttgtagtgggcttttcgccggtctccatctccttcttggcgtgatctcccgacat

SEQ ID NO: 5013 - DNA, 4995 bp, Zea mays
  Clone ID: TF_ZM4685.C3.o1.fg
atggatcctaagggaaaggggatggtggtcaacaacaacgagaaggagtctatcttcaacgagccgaaggatgacaagcctaccgactcgggctcgggccacaagcgcaaagacgggaagaagaagaagacgaggcgcatcaaggagatcgtctactacgacagcgacgaatcttcctcttcccaaaaggatgacgacgactacgagaaaaagaaaacggtcaattcaaacttttcttttgattactctcgtattcctcaaagtacaaatgctcatttattatctattccacttggtaaacctcctcattttgatggagaggactacagattttggagtcacaaaatgcgtagtcacttgttctctctccatcctagtatatgggagattgtagagagtggaatgcactttgatagtacggatagtcccatgtttattaatgagcaaattcataaaaatgcacaagctactactgttcttctagcttcattgtgcagggatgaataccacaaagtgagcggcttggataacgccaagcaaatttgggacaccctcaagatctctcatgaggggaatgatgtcacaatgctcaccaagatggagttggtggaaggcgaactcgggagattcgctatgataaggggagaagagccaactcaaacgtacaccaagatgacgcccgaggagatacttggaaaattcgtgagcgggcgaatgatgatcaaggaagcaagatacgtggacgacgcattgaatggtccaatcaatgagcctcaacctcttgctctcaaggcaacaagaagcaaggagacgctacctagcaaggtggcacaaatagaggcggccggacttaatgatgaagagatggctctcatcatcaaaagattcaagacgacgctaaaaggtcgcaaggggcagccaagcaagaccaagacaaaggggaagcgctcatgcttcaaatgtggtaagcttggtcattttattgttaactgtcccgacaatgatagtgatcaggatcaagggaacaagagggagaagaagaagaactataagaaggcaaagggcgaggcacatcttggaaaggagtgggattcggattgctcctcttccgactccgacaatgaaggactcgtcgccaccgccttcaacaagtcatccctcttccccaacgagcgtcacacatgccttatggcaagggagaagaaggtatgtactcgaaacactacttatgcttcttcaagtgaggacgaatctagtgatgaggatgaaatagattattcatgtttatttaagggcctagatagaaccaaggtagataaaattaatgaactaattgatgccttgaatgacaagaataagcttttagaaaagcaagaggatttgttgtatgaagaacatgacaaatttatagaagcacaaaaatctcatgctctagaagttaaaagaaatgaaatgctttcttgtgaattatcttcttgccatgagacaatttctaacttaaggagcattaatgatgatttgaatgctaagttagaaatagctagtaaatcaacatcttgtgtagaaaatgatgttatttgcaataggtgtaaagattttgacattgatgcttgtagtgaacacatagcctctattgcaaaattaaatgatgaaattgctagtcttaatgcccaacttaagactagcaaaagtgaatttgacaaattaaaatttgcaagggatgcctacacaattggtagacacccctcaattaaggatggtcttggcttcaaaagggaagtcaagaacttaacaagccataaggcttccatctccacaaaggagaaagggaaggcccctatggcgagaaatgctaaaaagaaccatgccttcatgtaccatgatagaaaattttctagaaatgttcatgatgataggagttgtaatgcttataatgcttttgactctcatgccatgtttgcttctagttcttcctatatgcatggtagaaatgtgtttagaagaaatgttgttcatcatatgcataggagaaatgttcctaggaaagttaatgaaccttctacaatttatcatgcctgtgatgcttcatttgcaatttgtagaaaggatagaaaggacccaacaagagatgggtacctaagtcccaagcctaaatttgccttgcaggtttatgcatccgggggttcaagctggattatcgacagcggatgcacaaaccatatgacgggggagaagaagatgttcacctcctacgtcaagaacaagaactcccaagattcaataatattcggtgatgggaaccaaggcaagttgagtcccttggatataatttactatctaagaagtgatggttcactagcttttaagggtgtattagacggcaaactttacttagttgattttgcaaaagaggaggccggtctagatgcatgcttaatagctaagactagcatgggctggctgtggcatcgccgcttagcacatgtggggatgaagaaccttcacaagcttttaaagggagaacatgtgataggtttaactaacgtgcaattcgaaaaagatagaccttgtgcagcatgtcaagcaggtaaacaggtgggaggagcacatcacaacaagaatgtgatgaccacatcaaggcccctggagctgctacatatggacctcttcgaacccgtcgcttatctaagcatagggggaagtaagtatggtttagttattgtggatgacttttcccgcttcacttgggtattctttttgcaggataagtctgagacccaaggaaccctcaagcgcttcctaaggagagctcaaaacgagtttgagctcaaggtgaagaagataaggagcgacaacgggtccgagttcaagaaccttcaagtggaggagtaccttgaggaggaagggatcaagcacgagttctccgctccctacacaccacagcaaaatggtgtggtagagaggaagaacaggacactaatcgatatggcgaggatgatgcttggagaattcaagacccccgagcgtttttggtcgaaagctgtgaacacggcttgccacgccatcaacagggtctaccttcaccgcctcctcaagaagacgtcatatgagcttctaaccggtaacaaacccaatgtatcttactttcgtgtatttgggagcaaatgctacattctagtgaagaagggtagaaattctaagtttgctcccaaagctgtagaagggtttttgttaggttatgattcaaatacaaaggcgtatagggtcttcaacaaatcatcgggtttggttgaagtctctagcgatgttgtatttgatgagactaatggctctccaagagagcaagttgttgatcttgatgatgtagatgaagaagatgttccgacggccactatacgaaccatggcgattggtgaagtacgaccacaggaacaaaaggagcaagatcaaccttcttcctcaactatggtgcatcccccaactcaagacgatgaacagattcatcaacaggaggtgtgtgatcaagggggagcacaagatgatcatgtgatggaggaagaagcgcaacctgcacctccaacccaagttcgagcgatgattcaaagggatcatcccgtcgatcaaattctaggtgatattagcaagggagtaactactcgatctcgattagttaatttttgtgagcattactcctttgtctcttctattgagcctttcagggtagaagaggccttgctagatccggactgggtgttggccatgcaagaggagctcaacaacttcaagaggaatgaagtttggacgctggtgcctcgtcctaagcaaaatgttgtgggaaccaagtgggtgttccgcaacaaacaagacgagcacggagtggtgacaaggaacaaggctcgacttgtggcaaaaggttatgcccaagtcgcaggtttggactttgaggagacttttgctcctgtggctaggctagagtccattcgtattttgctagcatatgccgctcaccattctttcaggttgttccaaatggatgtgaagagcgctttccttaacgggccaatcaaggaggaggtgtacgtagagcaaccccctggcttcgaggatgaacggtaccccgaccatgtgtgtaagctctctaaggcgctctatggacttaagcaagtgaagcaactaaaggatggcaccttcatctctcaaatgaagtacacgcaagacttgctgaagcggtttgggatgaaggatgccaagcccgcaaatactccgatgggtaccgacggacacactgatctcaacaaaggaggtaagtccgttgatcaaaaggcataccggtcaatgataccgttggcataccgaccatgtgctagtagaccggatattatgcttagcgtatgcatgtgtgctagatttcaatctgatcctaaggagtgtcacttagtggcagtgaagcgaatccttagatatttagttgctacgccttgcttcgggctctggtatccaaaggggtctacctttgacctaattggatattcagattccgactatgctggatgtaaggtcgataggaagagtacatcggggacgtgccaattcttaggaaggtccttggtgtcatggaattctaagaaacaaacctctgttgccctatccaccgctgaggccgagtatgttgccgcaggacagtgttgcgcgcaactactttggatgaggcaaaccctcagggactttggctacaatctgagcaaagtcccactcctatgtgataatgagagtgctatccgcatggcggaaaatcctgttgaacacagccgcacaaagcacatagacatccggcatcactttttgagagaccaccagcaaaagggagatatcgaagtgtttcatgttagcaccgagaaccagctagccgatatctttaccaagcctctagatgagaagaccttttgcaggttgcgtagtgagctaaatgtcttagattcgcagaacttggattga

SEQ ID NO: 5014 - DNA, 1470 bp, Zea mays
  Clone ID: TF_ZM4548.C3.o10.fg
atgtcgggagatcacgccaagaaggagatggagaccggcgaaaagcccactacaagccacaggagcacttcatcggaagagtcccgcaccaagaggaaggagaagaaagactcctccaaagggaaggagaagaagaaggactcctccaaagggaaggagaagaaatcttcttcacacaaagagaagaaggagaagtcttcctcccacaagccgcaacggagtggggacaagaaaaagaggatgaggaaagtggtctactacgagaccgattcttcatcgacatccacctccggctccgacgcggcatccgtcacttctaaacgccaagagcgtaagaagtatagtaagattcccctatgctaccctcgcatttctaaacatacacctttactttccgtcccattaggcaaaccaccaacttttgatggtgaagattatgctaggtggagtgatttaatgcgatttcatctaacctcactccacaaaagtatatgggatgttgttgagtttggtgcacaagtaccatccgtaggggatgaagactatgatgaggatgaggtggcccaaatcgagcacttcaattctcaagcaacaacaatactcctcgcctctctaagtagagaggaatacaacaaggtgcaagggttgaagaatgcaaaggagatttgggatctactcaagaccgcgcacgagggtgatgaactcaccaagatcaccaagcgggaaacgatcgagggggagctcggtcgctttcgtcttcgccaaggggaggagccacaagatatgtacaaccggctcaaaaccttggtgaaccaaatgtgcaacctcgggagcaagaaatgggatgaccacgaggtggttaaggttattcttagatcactcatcttccttaaccccactcaagttcaattaattcgtggtaatcctagatatacactaatgactcccgaggaagttatcgagaattttgtgagctttgaatgtatgatcaagggctcaaagaagatcaacgagcttgatgatccctccacgtccgaagcacaaccggtggctttcaaggcgacggaggagaagaaggaggagtctacaccaagtagacaaccaatcgacgcttcaaagctcgacaacgaggagatggctttaatcatcaaaagctttcgccaaatcctcaagcaacggaaggggaaggattacaaatcccgttccaagaaggtttgctacaagtgtggtaagtccggtcactttattgctaaatgtccattatcaagtgacagtgacagggataacgacaagaagggcaagaggagagaaaagaagaggtaccacaagaagaggggcggcgatgcccatgtgtgccgcgagtgggactccgacgagagctccaccgactcctccgacgacgaggacgccgccaacatcgtcgtcaccaagggactcctcttccccaacgtcggccacaagtgcctctga

SEQ ID NO: 5015 - DNA, 4158 bp, Zea mays
  Clone ID: TF_ZM4639.C2.o6.fg
atgaccggcggtgacaaatccgcaagcttgggaagaacccattcaagggagtctggccacaagcataaggaggaatcctcttcctccatcaagtcacaacggagaggtgacaagaagaagaagatgaagaaagtggtatactacgagaccgactcttcgtcaccctccacctccggctccgaatcggcgtccatcacttctaagcgccatgagcgcaagcagtatagtaagatgcccctccgctatccttgcatttctaaacgcactccattactttccgttccccaaggcaaaccaccattttttgatggtgaggactattgtatgtggagtgataaaatgaggcatcatctaacctcactccacaaagcatatgggacattgttgagtatggagcgcagatataagctaatgtctcacgaggaggttataagaaagtttgtgagctttgagttgatgatcaaaggctccaaacaaatcgtcgagcaaggcggcacctccacacccgaggtgcaacccgtcgcattcaaagcaacggaagaaaagaaagaagagtctacatcaagtaggctccccatcgacgcctccaagctcgacaacgaggaaatggcgctcatcatcaagagcttccgccaaatcctcaaacaaaggagggggaaggattacaagccccgctctaagaaagtatgctacaaatgtggtaagtccggtcattttattgctaaatgtccattatctagtgatagtgacaggggcgacgacaagaagggagagaggaaggagaagaagagctccaccgactcctccttcgacgaggatgtcgccaacatcgccgttaacaagggtcttctcttccccaacgttggccacaagtgcctcatggcaaaggacggcaaaaggaagaatgtaaaatctagagcctctatcaaatatacaacatctagtgatgagggtagctctagtgaagatgaggatgatttacttactctttttgccaaccttaacatgcaacaaaaggaaaaactaaatgaattgataggtgtcattcatgagaaggatgaactcttggatagccaagaggaattccttattaaggaaaataaaaaacatgttaaggtaaaaaatgcttatgctcaggaagtagaaaaatgtgaaaatttgactaatgagcttagcatttgtcatgacactgtttccaaccttagaaatgaaaatgctagtttaattgctaaggtggaaaaatcaaatgtttgcaatgattcaattatcaatcttagaaatgaaaatgctaatttaattgtaaagattgataaattgaatgaatctctttctagccttaagaatgaaaatgatagcttaattttaaaggctaaagatttgattgtttgcaatgattccatttcctgtcttagagataaaaatgtcatgctaaaatctaagatagatgaattaaaatcttgcaaaccctctacatccactgttgatcatgtttctatttgcatgagatgtagagatattaatgttgatgctattcatgatcatctagccttaattaaagaacaaaatgatcacatagctcaactaactgctaaaattaatgagcataagatagagaatgaaaattttaaatttgctagaagcatgctctataatgggagacgccctggcatcaatgatggcattggtttccaacagggaagcaatgtcaaacttaatgtccctaaaagattgtctaattttgttaagggcaaggctcccatggctcaggataacaagggttacattttatatcctgctggttatcctgagcacaagattaggagaattcatgctaggaagtctcattctgtttcccatcatgcttttatgtacaagaatgaggcatcaatctctaggcattctacccatgttaaaatgcctaaaaagaaaactcctactgcatcaaatgaacctaatgtttcattcaaaactcttgatgctttatatgtgcttactaacaaatcaggcaaagtagttgccaaatatgttgggggcaaacacaagggctccaagacttgtgtttgggtacccaaggtttatgcatccgggggctcaagttggattattgatagcggatgcacaaaccacatgactggggagaaaaggatgttctcctgctacgagaaaaacgatgatccccaaatagctatcacattcggggatggaaatcaaggtttggaaaaatctcaaacccaagagaccttaaaaggattcttcagacgagctcaaaatgagttcggattaaggataaaaaagataagaagcgacaacgagacggagttcaagaactcacaaatagaaggctttcttgaggaggagggcatcaagcatgagttctcttctccctacacaccccaacaaaatggtgtagtggagaggaagaatagaactctactagacatggcaaggaccatgcttgatgagtacaagtctccagaccggttttgggctgaggcgattaacaccgcctgctactccatcaaccggctctacctttaccgaatcctcaagaagacatcttatgaactcctcaccggtaaaaagcctaatgtttcatattttagagtctttgatagcaaatgttttattcttattaaaagaggtagaaaatctaaatttgctcctaaggttgtagaaggctttttactaggatatgattcaaacacaagggcatatagagtcttcaacaaatccactagattagttgaggtttcttgtgacattgtgtttgatgagactaatggctcccaagtggagcaagttgatcttgatgaattagatgatgaagaggctctgtgcgttgcgctaaggaacatgtccattgggggaatgtgtgtcctaaggaatccgaagagcctccacaagcgcaagatcaaccgtcatcttccatgcaagcatctccaccaacccaagatgaggatcaagctcaagacaatgaagaagaagatcaagaagatgagtcacctcaagaggagggcaatgatcaaggggggagatgacaatgatcaagacaaggaagatgatcaagaagtacagggtccaagaccgccacacccaagagtccaccaagtgattcaaagagatcaccccgtgaactccatcctcggcgatattcataaggggccatacatggtggaggatgcactaagagattcagattgggtgttggcaatgcaagaagagctcaacaacttcataaggaatgagtgggtattccgcaacaagcaagatgagcatggtgtggtgataaggaacaaagcccaacttgtggccaagggatattcacaagtcgaaggtttggatttcggtgaaacctatgcactcgtagctaggcttgagtcaattcatatattacttgcctatgctacttaccatggctttaagctctatcaaatggacgtgaaaagtgccttcctcaatggaccaatcaaggaagaggtctatgttgagcaacctcccggctttgaagatagtgagtaccctaaccatgtctataaactctcaaaggcattttatgggctcaagcaagccccaagagcatgccaaaccaagtacattcaagacttacttaccaagtttggaatgaaggatgccaagcccatcaagacacccatgggaacaaatgggcatctcgacctcgacacgggaggttattcagatgctgattgggcagggtgtaaaattgatagaaagagcacatcagggacttgtcagttcttgggaagatccctggtgtcttgggcttcaaagaaacaaaattcagtagctctttctaccgctgaagccgagtatattgtcgcatgtcattgttgcgcgcaattgctttggatgaggcaaacccttagggactatggctacaaatttagcaaagtccctctcctatgtgataatgagagtgcaatccgcatggcggataatcccattgaacacaaccgcactaagcacatagccattcggtatcactttttgagggatcaccaacaaaggggggatatcgagattgcttatgttagcaccaaagaacaattagccgatatctttaccaaaccattagatgagaaaatctttaccaaacttaggaatgagctaaacaatcttgattctcggaactttgattga

SEQ ID NO: 5016 - DNA, 4338 bp, Zea mays
  Clone ID: TF_ZM4981.C1.o3.fg
atgtacaaccggctcaagactttggtgaaccaagtgcgcaacctcgggagtaagaaatgggatgaccatgagatggttaaggttattctaatatccctcgtttttcttaaccctacgcaagttcaattaattcgaggaaatcctagatatacactaatgtctcccaaggaggtaattgggaattttgtgagctttgaattgatgatcaaaggctcaaggaagatcaacgagcttgacggcccctccatgttcgaagcacaaccggtcatattcaaagcaacagaggagaagaaggaggagtctacatcaagtagacaaccaatcgacgcctcaaagctcgacaatgaggagatggcgctcatcatcaagagcttccgccaaatcctcaagcaaaggagggggaaggactacaaatcccgctccaagaaagtgtgctacaaatgtggtaagtccggtcattttattgcaaaatgtccattatctagtgatagtgacaggggcgacgacaagaaggggagaagaaaggagaagaagagatactacaagaagaagggcggcgatgcccatatttgccgggaatgggactccgacgagagctccaccgactcctcctccgacgaggatgccgcaaacatcgccgtcaccaagggtattctctttcccaatgtcggccacaagtgcctcatggcaaaggacggcaaaaggaagaaggtaaaatcaagatcctccactaaatatgaaacctctagtgatgaggataatgctagtgatgaggaggataatttgcgtactctttttgccaacctaaacatgcaacaaaaagaaaaactaaataaattaattagtgatattcatgagaaggatgatctcttggactctcaagaggacttcctaattaaagaaaataagaaacatgttaaggttaaaaatgcttatgctctagaagtagaaaaatgtgaaaaactatctagtgagctaagcacttgccatgatgttattaccaaccttagaaatgagaatgcaaatttgattgctaaggttgattcaaatgtttgtgatgcttcaattcccaatcttacaaatgataatgttgatttgcttgctaagattgaagaattgaatatctctcttgctagccttaggattaaaaatgaaaaattgcttgctaaggctaaagaattagatgtttgcaatgcttccacttctaaccttagaagtgaaaatgatattttacatgctaagattgttgaactaaaaacttgcaaaccctctacatctaccgttgagcatgtttctatttgcactagatgtagagatgttgatattgatgctattcgtgatcacatggtcttaattaagcaacaaaatgatcatatagcaaaattagatgctaaaattgccgagcatgaacttgaaaatgaaaaatttaaatttgctcgtagtatgctttatagtgggagacgccctggcatcaaggatggcattggcttccaaaagggggacaatgtcaaaattaatgcccctcctaaaagattgtccaattttgttaagggcaaggctcccatgcctcaggataacgagggttacattttgtaccctgccggttatcctgaaagcaaaattaggagaattcactctaggaagtctcactctagccctaatcatgcttttatgtataagggtgagacatctagctctaggcaatcaacccgtgctaaattgcttagaaataaaaatcctattgcatcaaatgatcataatatttcttttaaagtttttgatgcatcctatgttttaactaacaaatctggcaaggtttatgcatccgggggctcaagttggatcattgatagcgggtgcacaaaccacatgacaggggagaagaagatgttctcctcctacgagaaaaaccatgatccccaaagagctatcacattcggggatggaaatcaagattctttagattacaacttgctttcagtttcgcaattatgtaaaatgggctacaactgtctttttacggacataggtgtcactgtctttagaagaagtgatgattcaatagcatttaagagagtgttagagggtcagctatacttagtagattttgatagagctgaactcgacacttgcttaattgctaagactaacatgggttggctctggcatcgccgactagcacatgttggaatgaagaatcttcacaaacttctaaagggagaacacattttgggactaacaaatgttcattttgagaaagacaggatttgtagcgcatgtcaggcagggaagcaagttggagttcatcatccacacaagaacatcatgacaactgacaggccgcttgagctcctacacatggacctattcggcccgattgcttacataagcatcggcgggagtaagtactgtctagttattgtggatgattattctcgcttcacttgggtgttatttttgcaggaaaaatcccatacccaagaaaccttaaaaggattcttaagacgggctcaaaatgagttcggcttaaggatcaagaaaattagaagcgacaacgggacggagttcaagaactcacaaatcgaaggcttccttgaggaggagggcatcaagcatgagttctcttctccctacacgccacaacaaaatggtgtagtggagaggaagaatagaactctattggacatggcaagaaccgtgcttaacgagtacaagacttcggatcggttttgggccgaggcggtcaacaccgcttgctacgccatcaaccggttgtatctacaccgaatcctcaagaagacatcatacgaactcctaaccagtaaaaagcccaatatttcatattttagagtctttggtagcaaatgctttattcttgttaaaagaggtagaaaatctaaatttgctcctaagactgtagaaggctttttactaggatatgattcaaacacaagggcatatagagtctttaacaagtcttctggacaagttgaagtttcttgtgacgttgtgtttgatgagactaacggctctcaagtagagcaagttgatcttgatgagataggtgatcaagaggctccgtgcatcgcactaaggaacatgtccaatggggatgtgtgtcctaaggaatccaaagagcctccaaatgcacaagatcaaccatcctcctccacgcaagcatctccaccaactcaagatgaggataaggctcaaaatgatgacggagaagatcaagagattgagccacctcaagatgacgagaatgatcaagggggagatgcaaatgatcaagacaaggaggatgaagttccaaggccgccacacccaagagtccaccaagcaattcaacgagatcaccccgtcgacaccattatcggcgacattcacaagggggtaaccactagatctcgtgttgcacatttttgtgagcattactcttttgtttcctctattgagccacacagggtagaggaagcactacaagattcggattgggtggtggcgatgcaagaggagctcaacaacttcactaggaatgaggtatggcatttggttccacgtcctaatcaaaatgttgtaggaaccaagtgggttttccgcaacaagcaagatgagcatggtgtggtgacaaggaacaaagcccgacttgtggccaagggatattcacaagtcgaaggtttggatttcggtgaaacctatgcacccgtagctaggcttgagtcaattcgtatattacttgcctatgctacttaccatggctttaagctttatcaaatggacgtgaaaagtgccttcctcaatggaccaatcaaggaagaggtctatgttgagcaacctcccagctttgaagatagtgagtatcctaaccatgtgtataaactctctaaggcgctttatgggctcaagcaagctccaagagcatggtctactaacgaatctacatgtgaagaatttagtaggatcatgacacagaaattcgagatgtcaatgatgggggagttgaagtacttcttgggatttcaagtgaagcaactccaagaggccaccttcattcgccaaacaaagtatattcaagacattctaaacaagtttgggatgaaggatgccaagcccatcaagacacccatgggaaccaatgggcatctcgacctcgacacgggaggtaaatccgtcgatcaaaagaaagagcacatcggggacttgccagttcttgggaagatccttggtgtcttgggcttcaaagaagcaaaattctgtagctctttctaccgccgaagccgagtatattgccgcatgccattgttgcgtgcaactactttggatgaggcaaacccttag

SEQ ID NO: 5017 - DNA, 3216 bp, Zea mays
  Clone ID: TF_ZM4544.C6.o6.fg
atggatcctaagggaaaggggatggtggtcaacgacaaggaaaaggactccatcttcaatgagccaagagacgacaagcccactgactcaggctcgagtcacaagaagagggacgggaaaaggaagaggcgcatcaagaagatcatttactacgacagtgatgcctcatcatcttcactaagggatgacgacaacgacgacgactcttcgtcaaagagaaagacgatggaactagtggaaggcgagctggggaggttcatgatgatcaggggagaggagccaactcagacctacaataggctcaagaccctggtcaacaagatccgaagctatggaagcacaagatggacggatcatgatgtcgtccaactcatgctaaggtcatttactgtaattgacccccatcttgttaatcttatttgtgaaaaccctaggtacaccaagatgacgcccgaggaggtccttggaaaattcgtgagcaggcgcatgatggtgaaggaggcgcgatacatggacgacgcgctaaatggtccactgtccatctacgagtcgcagcccgttgctctcaaagcaacaagcagcaaggaggcgctaccaagcaaagtagcacaagtggaggctgccgtgctcaacaaggacgaaatggcacttatcatcaagcgcttcaagaccgcgctaaaaggacgtaaggagtactccaacaagaacaagacaaggggaaatcgctcctgcttcaaatgcggtaagactgatcatttcattgcacaatgtcccgataatgataatgaccagggacaagaaaagagcgggaagagggaaaagaagaactacaggaatgcgaagggcgaggcgcacctaggaaaggagtgggattctgactgctcttcatccgactccaacgatgaaggattggctgcctcggccttcgacaagtcttcactcttccccaacgaacgtcatacatgtcttatggccaaggaaaagaaggtacatattcgagatacccctaagtacacttcttctagcgatgaggaatcttctgatgatgaagtagattactcggatttatttaaggggttagatcgtgctaaagtagagaaaattaatgaattaattgatgctctaaatgaaaaagatagactactagaaaagcaagaggacattttgtatgaggaacatgacaagtttgttagtgttcaaaaatctcttgctttagaaattaagagaaatgaaatgctatcttctgagttatgtgcttgccatgaatctgtctctagtttaaagaattcaaatgatgaattaaaagctaagctagaggaagttaataaaactagttcatgtgtagagcatgtttttatttgtaatagatgtaaggattttgatgttgatgcatgtgatgaacatcttgcttctattgccaaattaaacgatgaggtggcaagtcttaatgctcaatttatgacttgcaaagttgaatttgataaattaaaatttgctagggatgcctacactgttggtagacacccctcgattaaggatggacttagttttcgaaaggaaaccaagaacttaacaagccaaagggctcccgttctcaacaaggagaaagggaaggcccctatggctagtagttcccaaaagaatcatgcctatatttatgataggaaatatcctaggaatgcttataatgataaatgttataatcatgctgcttataatgattcacatgctatgtttgcatctagctccacctttgctcatggtagaagtaggcctaggagaaattatgctacttctcatgcttctagaaaagtttgcaatggacctactactgtttatcatgcttgcgatacttcctttgtgctgtcatgcaaaaatacaaaagtagttgctagaaagttgggatccaaatgcaagggagacaaaacatgcatttgggttccaaaagctattgtgactaaccttgtaggacccaacacgagttgggtttatgcatccaggggctcaagctggattatcgatagcggatgcacgaaccacatgacgggggagaagaagatgttcacctcctacgtcaagaacaaggattcccaggatacgttcatctttggagatgggaaccaaggcaaggtgaaaggcttgggcaggatagccatcactaacgagcactcaatatcaaatgtatttttagtagagtcgctcagaagaagtgatggttcattagcatttaagggtgtattagacatcaagctctatttagttgacttttcgagagagaatgccggtctagatgcatgcttaatagctaagactaatatgggctggttgtggcatcgccgtctagcacatgttgggatgaagaaccttcataagcttctaaagggagatcatgtgttaggactaaccgatgtctgttttgagaaagacagaccctgtgtagcatgtcaggaaggaaaacaggacaaatcagaaacccaagggaccctaaagcgctttctaagaagggctcaaaacgaatttgagctaaagacaccacagcaaaatggcatggtagagaggaagaataggacactaatcgacatggcgagaacgatgcttagagagttcaagacgcccgagcggttttggtcggaagctgtgaacacagcctgccgcgccataaaccggctctatctgcatcgtctcctcaagaagacctcctacaaactccttaccggtaacaaacccaatctctcttactttcatgtatttgggagcaaatgctacattatggtgaagaaaggtagacactctaaatttgctcccaagacagtagaagggtttttattagggtatgactcaaatacaaaggcgtatagagtcttcaacaaatcatcaagattagttgaagtctctagcgatgttgtatttgatgagactaatggctctccaagagagcaagttgatcttgatgatatagatgaagatgaagttccgacagccacaatgcgaacaatggcgattggagatgtgcgaccacaggaactgcaggaacaagatcaaccttcttcctcgacactggtgtatcccccaactcaagacgatgtacaggtacctcaagaagaagggcagaatcaagggggagcacaaaaagaacaggttatggaggaagaagcaccacgagtccctccaactcaagtccaagcaacgatccaaagacatcaccccgtcgactag

SEQ ID NO: 5018 - DNA, 1995 bp, Zea mays
  Clone ID: TF_ZM4679.C2.o8.fg
atgaccattgagcagatgttcatgatgcaaactcaggcagttcaggcaatcagtcagaccttagcagtgatgcaacaagtgcagcaacagccaccaccaccacagcctccagtgcaggtccagatgccacaagtgcccagagacaagcgggcagagctcatgaggggccatccccctgttttgcccattctgctgaccccatggacgctgaagattggctacctgaggggagcagcccagtcttggtgggagtcttacctcgccacccatgctaaccctgaagccattaattgggaggaattcagggacaacttccatcgctaccatgtgcccgaaggactgatgatagtgaggaaggaggtgtttctcgccccgaagcaaggtcccctgtccgtcagtgagtacagggataagtttttgcagctgtcacgttatgccccagaagacatcaacacatatgcaaagaggcagtaccgctttctgagaggattgcatttgatagacagagcaatcatgactgaaaggaagcgtcgagagatggaggataggaagcacaagattggtggacctcaggccgggagtagcagtcatccccgctactcaggcaactcaccccagcaattcaagcaagttcaccagcatccgcgtcagcaccagccccagtaccagaggcagtttcctcagcaacaacaacagcagtaccgtcagaacactcagccgggaggaaatcagtaccaacgtcagaacaaccaggcagctcgtcttcctgccccagcaaccaaccagagtagccaagcagccccagctcaagtaggaggtcgtgcatgcttctactgtggagaacaaaatcactgggcgaagaactgtcccaagaaagcagcccagcaaccaccaacagtcaatgccccagcaagacaaggagcgccacatcaagcaccaggagtccgtggtcaggcctacaaccgtgaaaaggtgaaccacctggaggtcaaagcaatccaggatgctcaggacgtggcagtaggtatgtttccagtcaaatccgacccaacaaaagtactatttgatactggtgccacacattcttttgtttctgcatcttgggtagaatcacataacatccccatagaaccaatgatcccacctttaagagttaattcagttgggggaaaagttcagtctgataggatttgtccaaatctaaggattgaaataagggggatagacttccccgctagcctagtagtcatgggaactcaagggtttgatgtcatcctagggatgaattggctacacagaaatcaagccattgtcagttgcgacaagagaacagttaagttggtgtccccatctggaaaggaagtagtaaccaagctgtacttacctgaactagaagaaggagcctgtcaccatttatcagtagatgacaacgagtccaatccaattgaggcaattaggattgtgtcagaattccctgatgtatttcctgaggagttaccaggcatgccacctaaaaggaaagttgaatttgccatagagcttatctcaggcaccgcccctatttccaagaaagattatcgtgtgtctggaccagagttggtggaactcaagaagcaaattgatgagttgttagagaaaggctacatcagaccaagtacttcaccttgggcagccccagtattatttgtggagaagaaggatggcacgaagaggatgtgtattgattatagagccttgaatgaagtcactgtcaaaaataagtaccccctgcccagaattgaagatttatttgatcagttgagaggagccagtgtgttctcaaagatagatctgaggtcaggttaccatcaactcaaaatccgacctgcagatatatcgaagacagccttcatcaccaagtatggactatatgagttcatggttatgtcattcggattgatgaatgtgaaagggaaatgtgcccttgggccatttctaaagtattttggtgattaa

SEQ ID NO: 5019 - DNA, 1349 bp, Zea mays
  Clone ID: TF_ZmC119_1217
ttcggagcctcacgggtagaacaagagatgttctgtgttattgatgcaagggctatggacacgtgcagcgtgattgtcctaatcagcgtgttttggtggtaaaagacgatggtgggtattcctctgctagtgatttggatgaagctacacttgctttgcttgcggctgatgatgcaggcactaaggaaccacccgaagaacagattggtgcagatgatgcagagcattatgagagcctcattgtacagcgtgtgcttagtgcacaaatggagaaggcagagcagaatcagcgacatacgttgcttcaaacaaagtgtgtcattaaggagcgttcatgtcgtttgatcatcgatggaggtagctgcaacaacttggctagcagcgacatggtggagaagcttgcacttacgaccaaaccgcacccgcatccatatcacattcaatggcttaacaatagtggtaaggtcaaggtaaccaagctggtacgaattaattttgctattggttcatatcgtgatgttggtgactgtgatgttgtgcctatggatgcttgtaatattctgctaggtagaccatggcaatttgattcagattgtatgaatcatggtagatcaaatcaatattctctcatacaccatgataagaaaattattttgcttcccatgtcccctgaggctattgtgcgtgatgatgttgctaaagctaccaaaactaaaactgagaacaacaagaatattaaagttgttggtaataacaaagatgggataaaattgaaaggacattgcttgcttgcgacaaaaactgatgttaatgaattatttgcttccacttctgttgcctacgccttggtatgcaaggatgctttgatttcaattcaagatatgcagcattctttgtctcctgttgttactaacattttgcaggagtattctgatgtatttccatgtgagatactagaggggctgccacctatacgagggattgagcaccaaattgatcttattcctggtgcatctttgccaaatcgtgcttcatataggacaaatccggaggaaacaaaagaaatccagcgacaagttcaagaactactcgacaaaggttacgtgcgtgagtctcttagtccgtgtgttgttccggttattttagtgcctaaaaaagatggaacatggcgtatgtgtgttgattgtagggctattaataatatcacgatacggtattgacaccctattccacgtttagatgatatgcttgatgaattgagtggtgccatcgtcttttctaaagttgatttgcgtagtgggtaccaccagattcgtatgaaattgggagatgaatggaaaactgctttc

SEQ ID NO: 5020 - DNA, 2988 bp, Zea mays
  Clone ID: TF_ZM4945.C1.o3.fg
atggcgcaaccgaagaggatgcaggagtgggaggctgagcggctgatttgtggggaccccgtgtcggcgctgaggcccgcgctagagtgggccgtgcaggtgaaatattttgggtgttacacggagcgacctccggccacggtgacctatcaggagttcctaagcacgcagccgcccttgctcatcaaggcagaggatccgttggacaccgacgtgtggttacacgtcgtggagtccaagtttcccctcctcacgggagactaccctgatgacaccaagactcgcttcgccgcgcagcagcttcgcagacctgctcggacatggtgggaccatttatgcgccatgctacctgctggtcatgaagtttcttgggaggaattcaagactgccttcaaaggacaccacattccagctaggattcttgaccacaagttgaatgatttcctagcactaaatcaaggaacccatactgtgttgcagtatgcccaggccttcaacgacctgtgccagtacacgggttatcatgttgactctgatgaaaagaagaaagaccgcttctgcaggggtctcaacaccaagctgcgtgagcgtctcaacaatgtccgggctgatagctttaatgagttggtcaacctggccatctcacaggaggactgtattatagctcaccgggcagagaagaagaggaaggcaccaatgaataaccaacctcagcagcatcaacaattccgccagggaaatgggaacaagtgcttcacttgtggcagtgtgggccattatgccaagaattgcctaaagaaccagcagaggcagatgccagcaccaaatcaagacagaggaagaaagcaaaaggtgcaagttaggcaagggaagctcaacttaactactctggaggagttacctgaaggagcacatatcatgactagtatatttttagtttttaatcaacctgcattaattctgtttgattctggtgcatctcatagtttcattagccagaagttcggtgctaaatgtcaactgcatttctatcatacaaaagcgtcattcatgatagcaacacttgggggtaaaattgcaacgaaccaattaaaccgtaatgtgactatctcactgggaagcaagatcatcaaaaccacactcctgattttgggattagagggtatggacatcattctcgaagctgactggatgactcaacaccgagtggtgttggatgtagctgccagaactctagaaatccgttctcctacctttggagaccttgcattatatctacccagccaagactctactcgatcatatgcctttgctatgatagagttacccttgaagaagattctagtggtctgtgagtatgcagatgtttttcctgataacttgccaggaatgccaccagaccgggaaattgaattcatcatcgagttgcaaccgggaacgacatctatttccaagaggccttaccggatgccacccgctgaattggcagaattgaagaaacaattgcaagaattgttagacaagggtttcatccgcccaagtacttcgccttggggatgtccagccttgttggtgaagaagaaggatgaaatcttgaggctatgtacagattaccacccacttaatgcggtgactatcaagaacaagtatcatttgcctcgtattgatgttcttttcgatcagttggtcggagccaaaatgttttccaagataaaccttcgctccggctatcatcagatcaagatacgagcaagtgatattctgaagactgtcttctcaaccagatatgggctatatgagtatttggtgatgtcatttgggctgactaatatgccagcatacttcatgtatctgatgaattctatcttcatgcccgaactggacaagtttgtggtggttttcatcgatgatatcttagtgtacacaaagaatgaagaagagcacactggtcatttacatatagtgcttcagcgtctgcgagagcaccgtctttatgccaagctgttgaaaaatcataagagcctcaaatatatctttacccaggctgatcttaacatgagacagagaagatggctagagctaatcaaggactatgacctggaggtgcactaccacccagtgaaagccaatgtggtagctgatgccttgagtcggaagtcgaaatgcaactatgttatgatggattctcgcatcaacaccctgtgtgatgagttgagcaaaatgaagattgaagtgattccttctggtgctttgtctcacatttccgttgagccaacattgcaagaccggataatcatggcccaactcagtgacaagggagtgcaaattattaaggagaacctccatcagaagccagagaagtataagtgtttccgccaagatgggaagggtatattgtggtttggaagacgattagtggttcgtaaaaataaggatctcaagaagaaaatcttggatgaggctcatctctccaaattctccatgcatctaggaagcactaaaatgtaccatgatctgaagcccttatattggtggaccggaatgaagagggagatagcccgttatgtatcagaatgtgacacatgtcagaggataaaggcaagccacttgaaattagctggtgccttgcaacccctatcaataccttcctggaaatgggatgacatcagcatggatttcattgtgggtctgcccaacacatctcggcatcatgattcgatttgggtcattgtggaccgattgacaaaagtggcaaattttcttccagtgcacaccaccgataaggctcagaagtacacagagctgtatattgatcaaatcgtgtgtttgcatggattaccccagaccattgtttctgaccgaggaacccaattcgttgctagattttttgatcaattgcaagagtctttgggaaccaagctaatgagaagttcagcttaccacccacaggctgattgtggcggaacctcccgaattattctagcttaa

SEQ ID NO: 5021 - DNA, 1504 bp, Zea mays
  Clone ID: TF_ZmC1373_22
ggtttatgaaggttttgtacctgaaaaaaaccacatatcatcaacaaaataggaaaggaccctatattgttgatgatatgtggtttatgaaggttttgtgttgcttgaagtcattctgaggtttttgtggatggggtcatacaagtcttttttcttggtgtatgctctgttacatcactaagcacttcatagatgtttgacctccgggcctgtttgacttgaatgatcttgttgaaggttttcggttttttacccaaccatggaggtctgtggtggaagggtgcccttggtggaattggtggccattgttccgatatttgtggaggactttggtgaagggcgcccttggtgtaatcttattgactgttgtagatgaagttgcaagttgatgcatttgagtacttgactcatgtcagcagcttactgtttgtggaaactatttgcgcagaatacgtgaagtggagttgaagcgtgactggaagaacaaatgctaccgctgtggtgaatcgggccatatagagagaaattgccagaacagtccaaggaatctcaggcgtgataaaagctattcacggtctccatccccacgtggtggacgtggccgcagccggagctacagcagaagccggagctatagccgatccagatccccatctggatctcccaggggtggacgccgtgaacgtgacgagaggagatctaggagtcttagctacagcaggagcgcaagccccaggcgttctgtctcacctgcaaaggaaaaggagcgcagtcgcacacccaatggcagtaggagcccaaggagccccagcccaagggctgaggtgagcccaccactgaaggataatggtgcacgcaatggctcagaccatgaaggcaaccctggtggtggagagaacagcaagaggagtcggagcccatctgatggctaccgtagccctgtggccaatgggcgcagcccgagcccgagggacgatcggagcccaagccccaagggcaacaacgaagatgacgagcgccgtggttcacctagaggaagtcagtcccccctgaactgagaaattctgatcaaatttgggccgcacgattcggttgtaactgttatattttagtttgagacaacaaactgtatttgctcatttctcatacagtcaggtttatgctttttgagctagaaaacatgtgtaagaatttgttaccttcaagctattcctggtttgtgatatggtaatacttgaactatttagcttgccaaatctgaatacttttaactatcaaaaaaaaaaaaaaaaaactcgagtttgtaggcttcgttttccttcatctaattgtcgtcgtagtcgtcgtcgtcgcgcaattaattaatggagtaagtaggaggatttgatgtgctgtgttcggttcagttcagctcccggtgctgtcttgttcgtatgtgctggatggatctgtctgttgtaagctaaactagggaggcttagttctgtgttggtccgttcctttt

SEQ ID NO: 5022 - DNA, 1891 bp, Zea mays
  unsure (1)..(1891): unsure at all n locations
  Clone ID: TF_ZM3612.C3.o1.fg
atggatcctaagggcaaggggattgtgatcaatgataaggagaaggagtccttcgtcaacgagactaaagatgacaagcctaccgactcgggctcgggccacaaacaaaaagatggaaagaagaagacgaggcacatcaaggagatcgtctactacgacgacagcgacgagtcctcttcttcccaaaaggacgacgacaacgactacgagaaaaagaagacggttaactcaaacttctctttcgattattctcgtattccgcatagctcaaatgcacatttgctttccattcctcttggcaaacctcctcactttgatggagaggactacggattttggagtcacaaaatgtgtagtcacttgttctctctccatcctagtatatgggatatagtggagagtggaatgaaatttgatagctcagatagtcctttatttatcaatgaacagattcataaaaatgcacaagctactactgtgttgttagcctcattgtgcagggacgagtaccataaggtgagcggcttggacaatgccaagcagatctgggacaccctcaagatctcacatgaggggaacgatgtcaccatgctcaccaagatggagttggtggaaggcaaactcgggagattcgcgatgataagaggggaggagccaacacagacgtacaacaggctcaagaccctcgtcaacaagataagaagctatggaagcacacgatggacggatcacgacgtcgtccgcctaatgctaaggtcctttactgtacttgatccacatctggtaaacaatattcgtgaaaatcctaggtacaccaagatgtcgcccgaagaaattcttgggaaatttgtaagcagacggatgatgatcaaggaggcgagatatgtggatgatgcattgaatggcccaatccacgagcctcaaaccgttgctctcaaagcgacaaggagcaaggaggcactacctagcaaggtggcgcaagttgaggcagccgggcttaatgaggaagaaatggcccttatcatcaagcggttcaagacggcgctaaagggtcgcaaggagcaccccaacaagaacaagacgaaggggaagtgctcctgcttcaaatgtggtaagattggtcattttatcgctaattgtcccgataatgatagtgaccgggaaaagaagagtggaaagtgggaagagaagaagaattacaagaaggcgaagggcgaggcacatcttggaaaggagtgggattcggattgctcctcgtccgactccgacaacgaaggactcgccgccactgccttcaacaagtcatctctcttccccaacgagcatcacacatgcctcatggcaaaggagaagaaggaccttttatatgaagagcatgataaatttgttagtgcacaaaactctcttgctctagaagttaaaaggaatgaaatgctttcttgcgaactatctatttgtcatgaaaccatttctactttaaaaggtgttaatgatgatttaaatgctaaactagaagtagcaaataaatctaactcttgtgtagaacatgttatgatttgcaataggtgcaaagattttaatgttgatgcttgtagtgaacacctagtttgcattgctaaattaaatgatgaagtggctagtcttaatgcccaacttaagactagcaagagtgaacttgacaagctaaaatttgcaagggatgcctacacgattggtagacacccctcaattaaggatggtcttggcttcaagagggaagtccagaacttaacaagccataaggcttccatctacgccaaggagaaagggaaggctcctatggctagtagtgctcaaaagaactatgccttcatgtatcatgataggagacatnctagaaatggttatagag

SEQ ID NO: 5023 - DNA, 4518 bp, Zea mays
  Clone ID: TF_ZM4913.C5.o4.fg
atggatcctaagggcaaggggatgatggtcaatgataaggagaaggagtccttcgtcattgatccaaaggatgacaagcctactgactcgggcacgagtcacaaaagaaaagacgggaagaagaagaaaacgaggcgcatcaaggagatcgtctactacgacgacagcgacgaatcctcttcttcccaaaagaacgacgacaacgactacgagaaaaagaagatggttaactcaaatttttcctttgattattctcgtattccgcaaagttccaatactcatttgttttccattcccctcgtatatgggagagtagaaaatggaatgcattttgatagtacggatagtcccatgttcatcaatgaacaaatccataaaaatgcacaagctactactgtccttttagcatctttatgcagggaagaatacaataaggtgagcggcttggacaatgccaagcagatctgggacaccctcaagatatcacatgagggaaatgacgtcaccatgctcaccaagatggagttggtggagggcgaacatgggagatttgccatgatcaggggagaggagccaacccaaacgtacaaccggctcaagaccctcatcaacaaaataaggagctatggaagcacacgatggacggaccacgacgtcgtccgcctactgctaaggtcttttactgtccttgatccacatcttgtaaacaatatttgtgagaatcctaggtacaccaagatgtcgcccgaagaagtacttgggaagttggtaagcgggcggatgatgatcaaggaggcaagatacgtcgacgatgcattgaatggcccaatccacgagcctcaaaccatggctctcaaagcaacaaggagcaaggaggcgctacctagcaaggtggcgcaagttgaggcggttgggcttaatgaggaagaaatgtccctcatcatcaagcggttcaaaacggcgctaaagggtcgcaaggagcaccccaacaagaacaagacaaaggggaagtgctcctgcttcaaatgtggtaagattggtcattttatcgctaattgtcccgataataatagtgaccaggaacaagataagaagagggaaaagaagaaagcttacaagaaggctaagggcgaggcacaccttggcaaggagtgggactcggattgctcgtcgtccgactccgacaacgaaggactcgctgcatcggccttcaacaaatcatccctcttccccaacgagcgtcacacatgccttatggcgaaggagaagaaggtatgtactcgaaacaatactatttatgcttcttcaagtgatgatgagtctagtgatgatgatgaaatagactattctagtttattcaaaggcttagatagaaataaaattgataagatcaatgaattgattgatgctttgaatgataagaatagattgttagaaaagcaagaggatattttgtatgaagaacatgataaatttgtagaggcacaaaaatctcttgctttagaagttaaaaggaatgaaatgctttcttgtgaactatatacatgccatgagtctatttctaacttaaagagtattaatgatgacttgaatgctaagttagaagtagcaaatagatctaactcttgtgtagaacatgttgtgatttgcaataggtgtaaagattttaatgttgatgcgtgtagtgaacatctagtgtccattacaaaactaaatggtgaagtggctagtcttaatgcccaacttaagactagcaaggatgaatttgacaaactaaaatttgcaagggatgcctacactattggtagacactcctcaattaaagatgggcttggcttcaagagggaagccaagaacttaactagtcataaggctcctattcccgccaaggagaaagggaaggcccctatgactaatagttgtcaaaagaaccatgctttcatgtaccatgataggaaattttctaaaaatgttcattatgataggagttgtaatgcttacaattcaaatgcaatgattgcctcaagttcttctattatgcataatagaaatttgactagaaaaaatgttatgcctagaagaaatgttgttcatgttcctaggaaagtaaacaatgaaccttctacaatttatcatgcttgcaatgctgcctttgcaatttgtagaaaggatagaaagttgattgctaggaaattaggggcaaaatgcaagggagataaaacttgcatttgggtccctaaggatattgtcactaaccttgtaggacccaacaagagttgggtttatgcatccgggggatcaagctggattatcgacagcggatgcacaaaccacatgacgggggagaagaagatgttcacctcctacgtcaaaaacaaagattcccaagactcaatcatattcgatgtgtctgtctttagaaggagtgatggttcattagcttttaagggtgtattagacggtaaactctatttagttgattttgcaaaagaggaggtagaccttgtgcagcttgtcaagcaggataagtctgaaacccaagggaccctcaagcgcttcctaaggagagctcaaaatgagtttgagctcaagcaaaacggtgtggtagagaggaagaacaggacgctcattgacatggcaaggacgatgcttggagagttcaagacccccgagcggttttggtcggaagccgtgaacacggcttgccatgccatcaaccgggtctaccttcatcgcctcctcaagaagacttcgtatgagcttctaaccggtaacaaacccaatgtgtcttactttcgtgtatttgggagcaaatgttatattcttgtgaagaaaggcagaaattctaagtttgctcccaaagctgtagaagggtttttgctaggttatgactcaaatacaaaggcgtatagagtcttcaacaaatcatcgggtttggttgaagtctctagcgacgttgtatttgatgagactaatggctctccaagagagcaagttgttgatcttgatgatgtagaagaagaagaggttccaacggccataatacgcaccatggcgattggagaagtgaggccacgggaacaaaaggagcaagatcaaccttcttcctcaacaatggtgcatcctccaactcaagacgatgaacagcctttcagggtagaagaggccttgctagatccagactgggtgttggccatgcaggaagagctcaataacttcaagagaaatgaagtttggacactggtgcctcgtcctaagcaaaacgttgtgggaaccaagtgggtgttctgcaacaaacaagacgagcacggagtggtgacaaggaacaaggctcgacttgtggcaaaaggttatgcccaagtcgcaggtttggactttgaggagacttttgctcctgtggctaggctagagtccattcgtattttgctagcatatgtcactcaccattctttcaggctgttccaaatggatgtgaagagcgctttcctcaacgggccaatcaaggaggaggtgtacgtggagcaaccccctggctttgaggatgaacggtaccccgaccacgttgggaaagccgatccaactttattcactaagacttgtgacggtgacttatttgtgtgccaaatttatgtcgatgacataatatttggttctactaaccaaaagtcttgtgaagagtttagcaggggtaatgactcaaaaattcgagatgtcaatgatgggcgagttgaactacttccttgggttccaagtgaagcaactcaaggagacaccttcatctcccaaacgaagtacacacaagacttgctaaagtggtttggaatgaaggacgccaagcccgcgaagacaccaatgggaaccgacggacatgtcaacctcaacaaaaggagtagaccggatattatgcttagcgtatgcatgtgtgctagatttcaatccgacccaagggagtgtcaccttgtggccgttaagcgaatccttagatatttagtcgctacgcgttgcttcgggatctggtatccaaaggagtctacctttgacttaattggatattcagacttcgactatgctggatgtaaggtcgataggaagagtacatcggggacgtgccaattcttaggaaggtccctggtgtcgtggagttcgaagaaacaaacttctgttgccctatccaccgctgaggctgagtatgttgccgcaggacagtgttgcgcgcaactactttggatgaggcaaaccctgcgggactttggctacaatctgagcaaagtcccactcctatgtgataatgagagtgctatccgcatggcggataatcctgttgaacacagccgcacaaagcacatagacatccggcatcactttttaagagaccacaagcaaaagggggatattgaagtgttttatgtgagcaccgagaaccagctagccgatatctttaccaagcctctagatgagtcgaccttttgcaggctgcgtagtgagctaaatgtcttagattcgcggaacttggattga

SEQ ID NO: 5024 - DNA, 2650 bp, Zea mays
  Clone ID: TF_ZmC31816_8
ccccttaaacgctattgaatcatcacttcttctaaagacagtaaaacctatatcttgattcccatccctgaatgtgatagctcgttggggatcttggtttttctcgtaggaggagaacatcttcttctcccctgtcatgtggtttgtgcacccgctgtcgatgatccaacttgagcccccggatgcataaaccttgccggatttattagtcaaaacataagatgcatcaaaagttttaaatgaaatgttagaatcgtttgatgcaataggagttttcttctttggcaatttagcacgggttgattgcctagagctagatgtctcacccttatacataaaagcatgattagggccagagtgagacttcctagagtgaattctcctaatcttgtgctcgggataaccgacagggtacaaaatgtaaccctcgttatcctgaggcatgggagccttgaccttaacaaagtttgacaatcttttaggaggggcattaagtttgacattgtctcccttttggaagccaatgccatccttgatgccagggtgtctcccattatagagcatgcttctagcaaatttaaatttctcattttctaagtcatgctcattaattttagcattaagttgagctatgtgatcattttgtttcttaattaaagctaggtgaacatgaatagcatcaacattaatgtctctacatctagtgcaaatggaaacatgctcaacagtagatgtagagggtttgcaagattttagttcaacaatcttagcatgtaaaatgtcattttcacttctaagattggaaatggtaacattgcaaacatctaagtcattagccttagcaattaatttttcattctcatttttaaggctagcaagagaaacattcaattcttcaatcttagcaagtaaactaacattatcgtctctaagattggaatttgaatcatctttaacattagaatcaaccttagcaattaatttagcattttcatttctaaggttggcaataatatcatgacaagtgcttagctcactagataatttttcacatttttctacttctagagcataagcattcttaaccttaacatgcttcttgttttctttaattaggaagtcctcttgagaatccaagagttcatccttctcatgaatagcactaattaattcatttaatttttctttttgttgcatgtttaggttggcaaaaagggtgcgcaaattatcctcctcatcactagaattatcttcatcactagaggatgcatatttagtggaggattttgattttaccttcttccttttgccgtcctttgccatgaggcacttgtggccgacgttggggaagaggaggcccttggtgacggcgatgttggcggcgtcctcgtcggaggaggagtcgatggagctctcatcggagtcccactcgcggcacacatgggcatcgccgcccttcttcttgtagtatctcttcttttctctcctctttcccttcttgtcgtcgcccctgtcactatcactagataatggacatttagcaatgaaatgaccgagcttaccacacttgtagcacaccttcttggaacggggcttgtaatctttccccttcctttgtttgaggatttgacggaagctcttgatgatgagcgccatctcctcattgtcgagcttggaggcgtcgatggggattctacttggagtagaatcttctttcttctcctccgttgctttgaatgcaacggtttgtgcttcgggcgtggaggagtcgccttgctcgatgatctttttggagcctttgatcattagctcaaagctcacaaatttacctatgacctcctcgggagacattagcgtgtatctaggatcacctcgaattaattgaacttgcgtagggttaaggaaaacgagggatcttagaataaccttgaccatctcatggtcatcccatttggcgctcccgaggttgcgcacttgattcaccaaggtcttcaagcgattgtacatggcttgtgggtcctcgctaaacttcttgcgctcatggcgcttagaagttacggacggcgtgtcagagccagaggtggatggcgacgaagagtcggtctcgtagtagaccaccttcttcatcttcttcttcttgtcaccgctccgacgcgacttgttgtgtgaaggggatcccttcaccttgttggcggactccccggatggagccttcccatggcttgtggcgggcttctcgccggtcccgatctccctcttggcggatgctcccgacataaatgaggtttgatccattcacaggtgaaccttacaagtttgatcccttcacaggggagcccatcaggccagatccgaaccagcgccgctcaggaagcctgtactgatcagattagttggagcgatatgccagatgagaccctgaaacaaagctagatctggataactcttcttcttgtctgccaagtgtctctgtgattttgcttgtgggctacagatcatgtaccccgagcaccatgtgtgatccagtcggactaatcatttcggcattgaaaagtcggactaactttttttgtgcccataacgctacgtattgtttggtaaaacgttcaggagtacccttttggtagattaattaaaaattcatccggtg

SEQ ID NO: 5025 - DNA, 3516 bp, Zea mays
  Clone ID: TF_ZM4892.C1.o13.fg
atgactcccgagaaagtaattgggaattttgtgagctttgaattgatgatcaaaggctcaaagaagatcaacgagcttgacggcccctccatgtccgaagcacaaccgatcgtattcaaggcgacggaagaaaagaaggaggaatctactccaagtcgaacacccatcgacgcctccaagctcgacaacgaggagatggcgctcatcatcaagagcttccgccaaatcctcaagcaaaggaggggaaaagattacaagccccgctccaagaaagtttgctacaaatgtggtaagctcggtcatttcattgctaaatgtccattatctagtgatagtgacaggggcgacgacaagaaggggagaagaaaggagaagaagaggtactacaagaagaagggcggtgatgcccatgtgtgccgcgagtgggactccgacgagagctccaccgactcctccgacgaggacgccgctaatatcgccgtcaccaagggacttctcttccccaacgtcggccacaagtgcctcatggcaaaggacggcaaaaagaaaaaggtaaaatcaagatcctccactaaatatgaaacctctagtgatgaggatgatgctagcaatgaggaggataacttacgcattctttttgccaacctaaacatgcaacaaaaggaaaaattaaatgaattgattagtgctattcatgagaaggatgatctcttggacacccaagaggactttctaattaaggaaaataataagcatgttaaggttaaaaatgcttacgctctagaagtagaaaaatgtgaaaaattatctagtgagctaagcacttgccatgatactattgccaaccttagaaatgaaaatgctcaattaatttctaaggctaaagattttgatggttgcaatgttactatttttaaccttagaagtgaaaatgatatattacatgctaaggtgatagaattaaaatcttgcaaaccctctacatctaccgttgaacatgtttctatttgcactagatgtagagatgttgatattgatgctattcatgatcatatggtcttaattaagcaacaaaatgatcatatagcaaaattagatgctaaaattgccgagcatgaacttgaaaatgaaaaatttaaatttgctcgtagtatgctttatagtgggagacgccctggcataaaggatggcattggcttccaaaagggggacaatgtcaaacttaatgcccctcctaagaaattgtccaactttgttaagggcaagtctcccatgcctcaggataacgagggttacattttataccctaccggttatcccgagagcaagattaggagagttcactctaggaagtctcactctggccctaatcatgcttttatgtataagggtgagacgtctagctctaggcaatcaacccatgctaagttgcctaagaagaaaactcctaatgcatcaaatgaccatagcatttcattcaaaacttttgatgcatcatatgttttaactaacaaatccggcaaggtttatgcatccgggggctcaagttggatcatcgatagcgggtgcacaaaccacatgacaggggagaagaagatgttctcctcctacaagaaaaaccaagatccccaaagagcgatcacattcggggatggaaaccaaggtttggtcaaaggtgtcactgtctttagaagaagtgatgattcaatagcatttaagggagtgttagagggtcagctatacttggtagattttgataaagctgaactcgacacttgcttaattgctaagactaacatgggttggctctggcaccgccgactagctcatgttgggataaagaatcttcataagcttctaaagggagagcacattttaggcttaacaaatgttcattttgagaaagacaggatttgtagcgcatgtcaggccaggaagcaagttggtgttcatcatccacacaagaacatcatgacgactgacaggtcactggagctcctacacatggacctatttggcccgatcgcttacataagcatcggcgggagtaagtactgtctagttattgtggatgattattctcgcttcacttgggtgttctttttgcaggaaaaatctcatacccaagaaaccttaaagggattcttgagatgggctcaaaacgagtttggcttaaggatcaagaaaattagaagcgacaacgggacggagttcaagaactcacaaatcgaaggcttccttgaggaggagggcatcaagcatgagttatcttctccctacaccccacaacaaaatggtgtagtggagaggaagaataaaactctattggacatggcaagaaccatgcttgatgagtacaagacttcggatcggttttgggtcgaggcggtcaacaccgcctgctacgccatcaaccggttgtatctacaccgaatcctcaagaagacatcatatgaactccttaccggtaaaaagcccaatatttcatattttagagtctttggtagcaaatactttattcttgttaaaagaggtagaaaaactaaatttgctcctaagactgtagaaggctttttactaggatatgattcaaacacaagggcatatagagtctttaacaagtcctttggacaagttgaagtttcttgtgacgttgtgtttgatgagactaacggctctcaagtagagcaagttgatcttgatgagataggtgatgaagaggctccgtgcatcgcactaaggaacatgtccattggagatgtgtgtccaaaggaatccggagagcctccaagtgcacaagatcaaccatcctcctccacgcaaccatctccaccaactcaaaatgaggatgaggctcaagttgatgaagaagaagatcaaagagatgagccacctcaagatgatggcaatgatcaagggggagatgcaaatgatcaagacaaggaggatgaagaaccaagaccgccacacccaagagtccaccaagcaatccaacgagatcaccccgtcgacaccatccttggagacatttataagggggtaaccactagatctcgtgttgctcatttttgtgaacattactcttttgtttcctctattgagccacacaaggaatgtcaaaatgttgtaggaaccaagtgggtcttccgcaacaagcaagacgagcatggtgtggtgacaaggaacaaagcccgacttgtggccaagggatactcccaagtcgaaggtttggatttcggtgaaacctatgcaccagtagctaggcttgagtcaattcgtatattattagcctatgctacttaccatggcttcaagctttaccaaatggacatgaagagtgccttcctcaatggaccgatcaaggaagaggtctatgttgagcaacctcccggctttgaagacagtgagtatcctaaccatgtctataggctctctaaggctctttatgggctcaagcaagccccaagagcatggtatgaatgcctaagagatttccttattgctaatggcttctga

SEQ ID NO: 5026 - DNA, 2805 bp, Zea mays
  Clone ID: TF_ZM5039.C1.o1.fg
atgtcgggagatcacgccaagaaggagatggagaacggcgaaaagcccactacaagccacgggagcacttcatcggaagagtcccgcaccaagaggaaggagaagaaagactcctccaaagggaaggagaagaagaaggactcctccaaggggaaggagaagaaatcttcttcacacaaagaaaagaaggagaagtcttcctcccacaagccgcaacggagtggggacaagaaaaagagaatgaggaaagtggtctactacgagaccgattcttcagcgacatccacctccggctccgacgcggcgtccgtcacttctaaacgccaagagcgtaagaagtatagtaagattcccctacgctaccctcgcatttctaaacatacacctttactttccgtcccattaggcaaaccaccaacttttgatggtgaagattatgctaggtggagtgatttaatgcgatttcatctaacctcactccacaaaagtatatgggatgttgttgagtttggtgcacaggtaccatccataggggatgaagactatgatgaggatgaggtggcccaaatcgagcacttcaactctcaagcaacaacaatactcctcgcctctctaagtagagaagagtataacaaagtgcaagtattgaagagcgccaaggaagtttgggatgtgctcaaaaccgcacacgaaggagatgagcttacaaagatcaccaagtgggagacgatcgagggggagctcggtcggttccggcttcgcaaaggggaagagccacaaaacatgtacaaccggctcaagaccttggtgaatcaagtgcgcaacctcgggagcaaaaagtgggatgaccatgaggtagttaaggttattctaagatctcttattttccttaaccctactcaagttcaattaatccgtggcaacccaagatatacactattgacccccgaggaagtaatcgggaattttgtgagttttgagtgcatgatcgaaggctcgaggaagatcaacgagcttgatgatccctccacatccgaagctcaacccgtcgcattcaaggcgacggaggaaaagaaggaggagtctacaccaagtagacaaccaatcgacgcctccaagctcgacaatgaggaaatggcgctcgtcatcaagagcttccgccaaatcctcaaacaaaggagggggaaagactacaagtcccgctccaagaaggtttgctacaagtgtggtaagctcggtcactttattgccaaatgtccattatcaagtgacagtgacagggataacgacaagaagggcaagaggagagaaaagaggaggtaccacaagaagaggggcggtgatgcccacgtgtgccgcgagtgggactccgacgagagctccaccgactcctccgacgatgaggacgccgccaacatcgccgtcaccaagggactcctcttccccaacgtcggccacaaatgcctcatggcaaaggacggcaaaaagaagaaggttaaatcaaaatcctccactaaatatgaatcttctagtgatgataatgctagtgatgaggaagataatttgcgtactctttttgccaaccttaacatggaacaaaaagaaaaattaaatgaactaattagtgccatccatgagaaggatgatctcttagactcccaagaggacttcctaatcaaggaaaataaaaaacatgttaaggttaaaaatgcttatgctctagaagtagaaaaatgtgaaaatttgtctagtgatctaagcacttgccatgagacaatagacaaccttagaaatgaaaatgctaacttgttagctaaggttgattctcatgtttgtaatgtttcaattaccaattctagaaataatgatgatgatttacttgctagaattgaagaattgaacatttctcttgctagccttagaattgaaaatgaaaaattgcttgctaaggctaaaaattttgatgtttgcaatgctactatttccgaccttagaactaagaatgacatgttacatgctaaggttgtagaattaaaatcttgcaaaccctctacatctattgttgagcatgtatctatttgtactagatgtagagatgttgatatcaatgctattcatgatcacatggctttaattaaacaacaaaatgatcatatagctaaattagatgctaaaattgtcgagcataacttagaaaatgaaaagtttaaatttgctagaagtatgctctataatgggagacgccctggcatcaaggatggcattggcttccaaaggggagacaatgtcaaacttaatgcccctcctaaaagattgtctaatttcgtaaagggcaaggctcccatgcctcaggataacgagggttacattttataccctgccggttatcccgggagcaagattagaagaattcactctaggaagtctcactctggccctaaccatgcttttatatataagggtgagacatctagctctaggcaaccaactcgtgctaagttgcctaagaagaaaactcctagtgcatcaaatgatcatgacatttcattcaaaacttttgatgcatcatatgtcttaactaacaaattcgggaaggtttatgcatccgggggctcaagttggatactcgacagcgggtgcacaaaccatatgacaggggagaaaaggatgttctcctcctacgagaaaaaccaagatccccaacgagctatcacattcggggatggaaatcaaggtgtcactgtctttagaagaagtgatgattcaatagcatttaagggagtgttagagggtcagctatacttg

SEQ ID NO: 5027 - DNA, 4040 bp, Zea mays
  Clone ID: TF_ZmC13633_1
ttggtaaaggcctagttgttgaggaggagcagcaatgacaggaccaaagaatcaaatggacaaggacaaggggcctaaacttaacgacgatgagtgtgtctcgtctatagtaaaattgacgcccaagatgcatacggactccgattgcgacggacttgatatggttggaacgacatcctgtgagcagctcgatcgacgatttgctgaacttattacacacatggaggtactggaggctcttgaaccaccaccaacgttagccttatgtctttgtcctgcgacaccgactgatgggccctttggccgtgtatcgcgtcggcgacgattaggaggtaatcgacggggtatgggagccctaatacactatttattcagcagccgccgccacattaggtttgggttttgcttagatcaattcagtcatcgaacagtaaaaagaattgcagggtcgtcaacaacagaggagcagcactttcgctccacgccagccaccggcgccagccaaggcgtcatcatcttcgggggtacggacgtccacatcttccactgtaccttcgggtgttgcagcaaaacctgctacaaccacctcttccacaggccgctcctccgacatcaagtgccaccgctgccagggacttggtcatattcaacgagattgccccagcaaacgggcatacattgctactggtgatggtgggtatgttagtgcttctgatgttgaagatgaagatactgttggagctaacattgcagagacttatgatggtgatgaagaggttcttggtacaacagcgaccgagacctataaggccttgattatgcaacgagctttgagtaccacggctagtgacgacgacaacagacagctccgcaaccttttcaacatgttcctcatcgtcaaggactgccgtgtacataccatcattgacggtggtagctgcaacaacttggtgaacgttgagggaaagaaaattgtgttgcttcctatgactcccactgagattgtccactttgaacatgagaaaaagactaatgctaagcaaaaaggtgttttgaactctgaaaatcagcaacctattaagttaaaaactcctactttgctagccactaaatctgatcttgatgagttacatgcctctcttggactttgctatgccttagtgtgcaaaaatgctttctattccattgatgatacatctattgtcttgccacctgctattgctaaccttttgcaagagtatatggatgtgtttccctccgagataccccctggattgccacctgtgcgaggcattgagcacaagattgatttaattccaggggcgagcttgcccaaccgtgctgcctacaggaccaaccccgaggagactaaggagattcagcgccaggtccaagaccttctcgaccgcgggtatattcgtgagagccttagtccttgttctgttcctattcttttggttcctaagaaagatggcacttggcgcatgtgtgttgattgtagagccattaataacatcacaattcggtacagatatcctattcctagattggatgacatgcttgatgaattaagtggttctattgttttctctataattgacttgcgtagtggataccaccagattcgtatgtctttaggtgatgaatggaaaactgcatttaaaactaagttcagtctttatgagtggttagtcatgtcttttgggttaactaatgcgcctagcacttccatgagattgatgaacgaggttttacgtgctttcatcggtaaatttgtggtgggcattgagatggatgaggcaaaaattgttgccatcacgagctggccacttccaaccacggtcacgcaggttcaaagttttcttggtcttgcaggattctacaggcgatttgtgcgggatttcagcaccattgcagcacctctccacgagttgactaagaatggagtgtcgtttcgttggggaccatcacaacagcaagcctttgatgccctcaagtcgaagctcacacaagcaccactgctgcaacttcctgattttgacaagacattcgagctcggagaagcacatggagatggcttgatgggacattttggtgttaagaagaccgaggatgtgttgtttactcatttctattggcctcggatgcggcgtgatgttgagcgctacgtctctcgttgcaccacgtgcaacaaagctaagtcccgacttaacccccatggtctttatttgcctcttcctgttcctcgtgcaccttgggaggatatttctatggattttgttttgggattgcctagaacaaagagggggagtgatagtgtttttgtcattgtcgatcgtttttcaaagatgacacattttataccctgtcagaaaactgataatgcttcacatattgctgatttgttcttcactgagattgtgcgtttgcatggtgtgccaaatactattgtttctgatagggatgctaaatttttaagtcatttttggagaactttgtggtttaaattgggaacaaagttgttgttttctactacttgtcatccccaaactgacgggcaaacagaggttgttaatcacactttatctaccatgttgcgggctattttgaaggataatttgaggttgtgggaggaatgtttgccacatattgagtttgcttataacagatcgattcattccacaaccaagcttagtccatttatggtagtatatggttttaatcctcgtgccctaattgatttgctacctttaccaccttctgaaatagtgaacttggatgctacacaacgttctgaatttattcttgagttacatgaaacaactaagttgcaaattgaaaagatgaatgaaaagtattgtattgctgctaataaaggtaggaaggaaatgaaattggaacctggtgacttggtgtgggttcatttgagaaaggataggtttcctgatttgagaaagtctaaacttatgccacgagctgcaggtccttataaagttcttgcaaaaattaatgataatgcatatacacttgagttgccgccagattttggggttagttccacctttaacatttcagatttgaagccatatatgggtgacgaggatgaggccgagtcgaggaagactccaattcaagaggaggaggatgatgaggacatcacttctatatatacaatgaatggaccgataacacgatctcctgcacgacagctaaatctccaggtaccttggagaggaccaacaaggacatgggaaagggataagccttcgtggcgaggtcattcgtgtgtcacgggtgataaccaacggagccgtggtgtagtgattgcgaggaaccgttcgctcggagccttggatcatcaacgtcgagatctccactcaatcaaattatcgtatctcacggaagatcgggccgcgtctactatcagtgtcccccgctggggcgccagcgtcgtcgactcgctcgacagccaacgaggtgccacctcctgcttggccatggttgccccgcctccttctcctgcggcgaggaaggcgacgggacaaacccagatgttgttcttccgccatggggggaaaacgtcgtcgattccgccaccgtcgggcgggctgatggccaccattatcgctgtcgcgcggtggaggaaggagtaccatgtcgtagttgccgtcaagggacatgaacttgagactcccgaaacggagcagcgtcccgggttgaagaggttgctggagactacccatctggagcttgatgggaagctgttcgtcaacacgcagcagtcccctacctggcgcgccaactatcggcgtttcgaccccggggggtccctggaccgacgacgtggtcggtccgagcccaaggtcgggcgaggcggagactcctccgaggtcgagattgaggccgagccctgggctcaggcgaggcggagaccgtcttccgaggtcgaggttgaggccgagccctggggtcgagtgaggcggagaccgtcttccgaggtcgaggcgggggccgagccctggggtcgggcgaggcggtga

SEQ ID NO: 5028 - DNA, 5252 bp, Zea mays
  Clone ID: TF_ZmC13633_2
gcgttcgtgcgcccacgcgtccgcttttcgctcggtgctccgtttgagctcaaatttttacagcagattcctgactccatggatgttttgatgattaggtaccttggagaggaccagcaaggacttgggaaaggccaaggtgttgaggaggagcagcaagggcgtccacaacagaacaggtactcttttgcaatcacacccacgctcgttggacagtcacactggtcaccgtttgccacctgcagtgctggaccaaagaatcaaatggacaaggacaaggggcctaaacttaacgacgatgagtgtgtctctcaaatggaattgaaggagatgatgcgcgcgatgactgaaggttttaaaaaataccaggactctgcctcgacatcctatgagcagcttgatcgacgagttgctgaacttgttacacgcatggacgtactggaggctcgtcccccaccaccaactccagccccagctcactctcctgtggacgacgacgacgatgacgacgatgtttatgcaccgctgcgacaacgcctcgcacgtaatcgacaaggtatgggaggtaatggtagacgtcgtcatcataatcctgaaccagaccatgatccatttgctaagattaagttttctattccaccgttcatgggttcttatgatgctgaagcttacttagactgggagatgacggtagaacaaaaatttaattcccatcttgttcctgagcagcataggggagacatgtcggtacaggaatactaccaagaacttcagaaagaaaaagaattgcagggtcgtcaacaacggaggagcagcactttcgctccacgccagccaccggcgccagccaaggcgtcatcatcttcgggcgtacggacgtccacatcttccactgtaccttcgggtgttgcagcaaaacctgctacaaccacctcttccacaggccgctcctccgacatcaagtgccaccgctgccagggacttggtcatattcagcgagattgccccagcaaacgggcatacattgctactggtgatggtgggtatgttagtgcttatgatgttgaagatgaagatactgttggagctaacattgcagagacttatgatggtgatgaagaggttcttggtacaacagcgaccgagacctataaggccttgattgtgcaacgagctttgagtaccacagctagtgacgacgacaacagacagcgccacaaccttttcaacatgttcctcatcgtcaaggactgccgtgtacataccatcattgacggtggtagttgcaacaacttggtgaacgttgaggtggtcaagaagcttggcttgaccacacgagagcatccccaccattatcacattcaatggtttaacaacaacggtaagttcaaggtaacaaaaacaacaagggtgcatttttctattggctcttaccatgactttgctgattttgatgtggtgactatggatgcttgctctcttttactgggacgtccttgggagtttgatactgatgctattcaccatggtagatctaataaatatacttttatgcacaagggaaagaaaattgtgttgcttcctatgactcccactgagattgtccactttgaacatgagaaaaagactaatcctaagcaaaaaggtgttttgaactctgaaaatcagcaacctattaagttaaaaactcctactttgctagccactaaatctgatcttgatgagttacatgcctctcttggactttgctatgccttagtgtgcaaaaatgctttctattccattgatgatacatctattgtcttgccacctgctattgctaaccttttgcaagagtatatggatgtgtttccctccgagataccccctggattgccacctgtgcgaggcattgagcacaagattgatttaattccaggggcgagcttgcccaaccgtgctgcctacaggaccaaccccgaggagactaaggagattcagcgccaggtccaagaccttctggaccgcgggtacattcgtgagagccttagtccttgttctgttcctgttcttttggttcctaagaaagatggcacttggcgcatgtgtgttgattgtagagccattaataacatcacaattcggtacagatatcctattcctagattggatgacatgcttgatgaattaagtggttctattgttttctctaaaattgacttgcatagtggataccaccagattcgtatgtctttaggtgatgaatggaaaactgcatttaaaactaagttcggtctttatgagtggttagtcatgccttttgggttaactaatgcgcctagcactttcatgagattgatgaacgaggttttacgtgctttcatcggtaaatttgtggtggtatattttgatgatattcttatctatagtaagtctcatgatgatcatattgaacatttacgtgctgtttttgatgttttgcgtgatgcacgtttatttggtaaccttgagaagtgcaccttcagcaccgatcgtgtgtcttttcttggatatgttgtgacatcgcagggcattgagatggatgaggcaaaaattgttgccatcacgagctggccacttccaaccacggtcacgcaggttcaaagttttcttggtcttgcaggattctacatgcgatttgtgcgggatttcagcaccattgcagcacctctccacgagttgactaagaatggagtgtcgtttcattggggaccatcacaacagcaagcctttgatgccctcaagtcgaagctcacacaagcaccactgctgcaacttcctgattttgacaagacattcgagctcgagtgtgatgcgagcggcattgggattggaggagtgctcattcaaggaggtaaacctgttgctttctttagtgaaaaattgaatggtccaactctgaattattctacatatgacaaagaattatatgctttagtacgagttttacaaacttggcaacattatctatggtctaaagaatttgtcatacattcggatcatgaatctttgaagtatcttaagggacaatctaatctaaacaaacgacatgctaaatggattgaattcatagaatcatttccttacattattaagcataaaaaaggaaaggataatgtaattgctgatgctttatctagacgttatactatgctgtcccaacttaatcataaaatatttggtttggagactataaaggaattatatgctgctgatttggacttcaaagatgcttttgaaaattgcagagagggaagaacgtggcaaaaatttatgctgcgtgaaggccttctctaccgtgctaacaagttgtgtgttccagctagctccgttcgtcttctactcttgcaggaagcacatggaggtggcttgatgggacattttggtgttaagaagaccgaggatgtgttatttactcatttctattggcctcggatgcggcgtgatgttgagcgctacgtctctcgttgcaccacgtgcaacaaagctaagtcccgacttaacccccatggtctttatttgcctcttcctgttcctcgtgcaccttgggaggatatttctatggattttgttttgagattgcctagaacaaagagggggagtgatagtgtttttgtcattgtcgatcgtttttcaaagatggcacattttataccctgtcacaaaactgataatgcttcacatattgctgatttgttcttcactgagattgtgcgtttgcatggtgtgccaaatactattgtttctgatagggatgctaaatttttaagtcatttttggagaactttgtggtgtaaattgggaacaaagttgttgttttctactacttgccatccccaaactgacgggaaaacagaggttgttaatcacactttatctaccatgttgcgggctattttgaaggataatttgaggttgtgggaggaatgtttgccacatattgagtttgcttataacagatcgattcattccacaaccaagcttagtccatttatggtagtatatggttttaatcctcgtgccccaattgatttgctacctttaccaccttctgaaatagtgaacttggatgctacacaacgttctgaatttattcttaagttacatgaaacaactaagttgcaaattgaaaagatgaatgaaaagtatcgtattgcttctaataaaggtaggaaggaaatgaaattggaacctggtgacttggtgtgggttcatttgagaaaggataggtttcctgatttgagaaagtctaaacttatgccacgagctacaggtccttataaagttcttgcaaaaattaatgataatgcatatacacttgagttgccgccagatattggggttagtcccacctttaacatttcagatttgaagccatatatgggtgatgaagatgagaccgagtcgaggacgactccaattcaagaggaggaggaggatgaggacatcacttctatacatacaatgaatggaccgataacacgatcacgtgcatgacagctcaatctctaggtacgttctaccctagtcaattgtgtttcagagcttacgcttggggccatggatgttttgatgattaggaaccttggagagaaccagcaaggacttgggaaaggccaaggtgttgaggaggagcagcaagggcacccacaacaggaaggagatcaagtccgactcggctgcgactccatctcgggttccaggaccagtctgcactaaaatggacgcccaagatgcatccggactccgattgcgacggacttgatatggttggaaagataaggagattatctaaccaacccaactggttccaccctaaaattcatccggagtcaacgggaatcgtcgaaacaagtcagcgttcagattctgttttggtgctgcgacaccgtctgttgggccgttgggccgtgtatcgcgtcggagcccattaggggcgagtccaggggtcacgcacgccctaatactctatttattcagccgccgccgccacatttaggtttgggttttgcttagattaattctgtcatcgaacagtgtcgccgtcatcggtttgtgagaccccatctcgtaatcaatacaattttggttgcgtttctttcatccccaaaaaactctttaagtggagtggtcctcgactcaagctcaaaaaaaaaaaaaaaaaaaaaaaaggaaaaaaaaaaaaaaaaaaaaaaaaaaaaaaaaaaaaaaaaaaaaagagaataatccgaggg

SEQ ID NO: 5029 - DNA, 498 bp, Zea mays
  Clone ID: TF_ZM4628.C6.o10.fg
atgaccaactcttccacaggccgctcctccaacatcaagtgccaccgctgccagggacttggccatattcagcgagattgccccagcaaacgggcatacattgctactggtgatggtgggtatgttagtgcttcttatgttgaagatgaagatactgttggagctaacattgcagagacttatgatggtgatgaagaggttcttggtacaacagcgaccgagacctataaggccttgattgtgcaacgagctttgagtgccacggctagtgacgacgacaacagacagtgccacaacctcttcaacatgttcctcatcgtcaaggactgccgtgtacataccatcattgacggtggtagttgcaacaacttggtgaacattgaggtggtcaagaagcttggcttgaccacacgacagcatccccacccttatcacattcaatggtttaacaacaatggaaccttggagaggaccatcaaggacttgggaaaggcctag

SEQ ID NO: 5030 - DNA, 292 bp, Zea mays
  Clone ID: TF_LIB3079-025-Q1-K1-D3
gttgatttttctgacagcgcgtctcttgctgctgctttgaagctcgaccagaaggtggtcaaggaacgcccagtcagaatcagatgtgctgttccaaaaaaggatgaccaaaaagtcaatgacaatgggaactcagatcatctgaaaagtgaaactaggacatgctatgaatgcggaacccctgggcactcttcttcttcttgccctaataagaaggattctgaagcaaggaagagctatgaatgtggcaccccggtgcacctctcttgtgcttgcccaaataataacgatt

SEQ ID NO: 5031 - DNA, 1830 bp, Zea mays
  Clone ID: TF_ZmC29741_64
gggtaccctcgggcccggccgggctagcgcacgctcgcccagccgccgcccctagcgcgcgctgcccagccgccgctccctgcacgctcgccactgctgttcgtgccgattcgcagcaccgccggccgacgttgcgagcatgaggaagtgaacatcttcttctcccccgtcatatggtttgtgcatccgctgtcgataatccagcttgaacccccggatgcataaacctgcaaggcaaatttaggcttgggacttaggtacccaactcatgttgggtcctacaagattgcgatccgtttccgagcttcgaggaatcaaagatcaagcgtgggcgaccaagtgatccagttctttgagttccacgagattgaagacctgagcatcagtttggtgaagggtgcctttctaggaatccttgttcttgacgtaggaggtgaacatcttcttctcccccgtcatgtggtttgtgcatccgctgtcgataatccagcttgagcccccagatgcataaacaaaagaagaacttgaagcaatcatagcatgtgaatcataagcataactcctatgagcatttctagaaaattttctataactatagatgaaagcatgattcctttgagcactattagccataggggccttccctttatccttgacgggaatgggatccctttggcttgttaagttcttggcttcctttcgaaagccaagcccatccttaattgaggggtgtctaccaaccgtgtaggcatccctagcaaattttaatttatcaaagtcacttttgcaagtcttaagttgagcattaagacttgctacttcatcatttaatttagaaatggaaactaaatgttcatcacatgcatcaacattaaaatccttgtataaaatgtcttcttgcttctccaaaagtctatccttctcatttaaggcatcaattaattcattaattttatctacctttgctctatctaagcctttaaataaatcggtatgatatacttcatcatcgctagagtcatcatcacttgaagtagtatacttaggagtttctcgaatgcttacctttttctcctttgccattaggcaggtgtggcgttcgttggggaagagagaggacttgttgaaggctgaggcagtgagtccttcgtcatcggaatcggaagacgagcagtccgagtcccattcctttccgatgtgtgcctcgccctttgccttcttatagctctttttcttctctttcttcccgccctttccttgttcctggtcactagagttatcgggacaatttgctataaaatgaccagtcttaccgcacttgaagcaggagtgctttccctttgcattgttcttgttagggtactccttgcgtcctttcaatgtggtcttgaagtgctttatgattagggacatctcatcctcgtttagcccggccaccacaacttgtgccaccttgctaggtagcgcctccctgctgcttgttgctttgagagcaacaggttgaggctcgtagacgggtagagggccattgagagcatcatcaacgtatcgcgcttccttcaccatcatccgcccgctcacaaatttcccaagaatctcctcgggagtcatctttgtgtacctgggattttcatggatgaggttcacaagatgaggatcaataacagtgaaggacctgagcataagtcggacgacgtcgtggtccgtccatctcgtgcttccatagctcctgatcttgttgaccagggtcttgagcctgttgtacgtttgtgttggctcttctcccctgatcattgcgaaccttcctagctcgccttccaccaactccat

SEQ ID NO: 5032 - DNA, 4179 bp, Zea mays
  Clone ID: TF_ZM4707.C6.o5.fg
atgtcgggagatcacgccaagaaggagatggagaccggcgacaaacccgctacaagccacgggaaggcttcatcgaaagagtcccgcaacaaggaaaagaggaaggacaagaagaaggaaaagattacttcttctcacaagtcgcatcggagtggcgacaaaataaagaagatgaggaaggtggtctactacgaaaccgacacttcatcaccttctacctccggctccgacaccccctccataacttctaagcgccatgagcgcaagaagtttagtaagatccctctacgctaccctcgcattactaaacatactccattagtttccgttcctttaggcaaaccgccaacctttgacggtgaagattatgctaggtggagtgatttaatgaaatttcatctaacctcactccacaaaagtatatggaatgttgttgagtttggagcacaggtaccatccgtaggggatgaggactatgatgaggacgaggtggcccaaatcgagcacttcaactcccaagcaacaaccatactcctcgcctctctaagcagggaggagtacaacaaggtgcaaggattgaagagcgccaaggaagtttgggacgtgctcaaaaccgcgcacgagggtgatgaactcaccaagatcaccaagcgggaaatgatcgagggggagctcggtcgcttccgtcttcgccaaggggaggagccacaagacatgtacaaccggctcaaaaccttggtgaatcaagtgcgcaacctcgggagcaagaaatgggatgaccacgaggtggttaaggttattttaagatcactcattttccttaacccaactcaagtacaattaattcgtggtaatccaagatatacactaatgactcccgaggaagtaatcgggaattttgtgagctttgaatttatgatcaagggttcacggaagatcaacgagcttgacggtccctccacgtccgaagctcaaccggttgcatttaaggcgacggaggagaagaaggaggagtctacaccaagtagacaaccaatcgatgcctccaagctcgacaatgaggaaatgacgctcgtcatcaagagcttccgccaaatcctcaaacaaaggagggggaaagactacaagccccgctccaagaaggtttgctacaaatgtggtaagcttggtcactttatagctaaatgtcctatttctagtgacagtgataggggtgacgacaagaaggggagaagaaaggagaagaagagatattacaagaagaagggtggcgatgcccatgtttgtcgagagtgggactccgacgaaagctctagcgactcctccgacgacgaggacgccgccaacatcgccgtcaccaagggacttctcttccccaacgtcggccacaagtgcctcatggcaaaggacggcaaaaagaagaaggttaaatctaaatcctccactagatatgaatcctctagtgatgaaaatgctagtgatgaggaagataacttgggcactctttttgccaacttaaacatgcaacaaaaagagaaattaaatgaattaattagtaccatccatgagaaggatgacctcttggactcccaagaggacttcctaatcaaggaaaacaaaaagcatgttaaagttaaaaatgcttattctctagaagttgaaaaatgtgaaaaattatctagtgaactaagcacttgccatgagaatatagacaaccttagaaatgagaatgctaatttgttagctaaggttgattctattgcttcaaaattagatgctaaaattgccgagcatgaacttgaaaatgaaaaatttaaatttgctcgtagtatgctttataatgggagacgccctagcattaaggatggcattggcttccaaaagggggacaatgtcaaacttaatgcccctcctaagaaattgtctaattttgttaagggaaaggctcccatgcctcaggataacgagggttacattttgggtgagacatctagctctaggcaaccaacccgtgctaagttgcctaagaagaaaactcctagtgcatcaaatgaacataacttttcatttaaaacctttgatgcatcatatgttttgactaacaaatccggcaaggtttatgcatctgggggctcaagttggatcatcgacagcgggtgcacaaaccacatgacaggggagaagaagatgttctcctcctacgagaaaaaccaagatccccaacgagctatcacattcggggatggaaatcaaggtgtcactgtctttagaagaagtgatgattcaatagcatttaagggagtgttagagggtcagctatacttggtagattttgatagagctgaactcgacacttgcttaattgctaagactaacatgggctggctctggcatcgccgactagcacatgttgggatgaagaatcttcacaaacttctaaagggagagcacattttaggattaacaaatgttcattttgagaaagacaggatctgtagcgcatgccaagcagggaagcaaattggtgcccatcatccacacaagaacatcatgacgactaacaggccactagagctcctacacatggacctattcggcccgattgcttacataagcatcggcgggagtaagtactgtctagttattgtggatgattattctcgcttcacttgggtattctttttgcaggaaaaatctcatacccaagagaccttaaagggattcttgatacgggctcaaaatgagttcggattaaggatcaagaaaattagaagcgataacgggacgaagttcaagaactctcaaattgaaggcttccttgaggaggagggcatcaagcatgagttctcttctccctacacgccacaacaaaatggtgtggtggagaggaagaatcgaactctattggacatggcaagaaccatgcttgatgagtacaagacttcggatcggttttgggccgaggcggtcaacaccgcttgctacgccatcaaccggttgtatctacaccgaatcctcaagaagacatcatacgaactcctaaccggtaaaaagcccaatatttcatattttagagtatttggtagcaaatgctttatacttgttaaaagaggtagaaaatctaaatttgctcctaagactgtagaaggctttttactaggatatgactcaaacacaagggcatatagagtctttaacaagtcctctggacaagttgaagtttcttgtgacgttgtgtttgatgagactaacggctctcaagtagagcaagttgatcttgatgagatagcatctccaccaactcaaaatgaggataaggctcaagttgatgaaggagaaaatcaagcaaatgagccacctcaaaatgacggcaataatcaagggggagatgcaaatgatcaagataaggaagatgaagaaccaaggccgccacacccaagagtccaccaagcaatccaacgagatcaccccgtcgacaccatcctcggcgacattcataagggggtaaccactagatctcgtgttgcacatttttgtgagcattactcttttgtttgctctattgagccacacagggtagaggaagcacttcaagattcagattgggtggtagcgatgcaagaggagctcaacaacttcactagaaatgaggtatggcatttagttccacgtcctaaccaaaatgttgtaggaaccaaatgggtgttccgcaacaagcaagacgagcatggtgtggtgacaaggaacaaagctcgacttgtggccaaaggatactcccaagtcgaaggtttggattttggtgaaacctatgcacccgtagctaggcttgagtcaattcgtatattattggcctatgctacttaccatggctttaagctttatcaaatggacgtgaaaagtgccttcctcaatggaccaatcaaggaagaggtctatgttgagcaacctcccggctttgaagacagtgagtatcctaaccatgtctataagctctctaaggcgctttatgggctcaagcaagccccgagagcatggtatgaatgccttagagatttccttatttcaaatggtttcaaagtcggaaaggccgatcctacactctttaccaaaacacttgaaaatgatttgttcatatgccaaatttatgttgatgatattatatttgggtctactaactga

SEQ ID NO: 5033 - DNA, 2106 bp, Zea mays
  Clone ID: TF_ZM4715.C1.o9.fg
atgtcgggagcacccgccaagagggagatcgggaccggcggcgacaagtccgcaagctcggggagaactcactcgagggagtccggccacaagcacaaggaggaatcctcttcctgcatcaagacacaacggagatgtgataagaagaagaagatgaagaaggtggtctactacgagaccgactctttgtcaccctccacctccggctccgaatcggcatccgccacttctaagcatcatgagcgcaagaagtatagtaagatgcccctctgctatcctcgcatttccaaacgcactccattactttctgtcccattaggcaaaccaccggtaccgaaggaaggggacaaagactatgattcagaggaggttgaacaaatccggcacttcaactcccaagccactactatactcctcgcctctctaagtcgagaggagtataataaggtgcaagggttgaaaagtgccaaagagatttgggacgtgctcaagaccgcgcacggaggagatgaggtgaccaagatcaccaagcgggaaacgatcaagggggagcttggtcgattcatgctcaaccaaggagaggagccacaagccatgtataaccggctcaagaccttggtgaatcaagtgcgcaacctcgagagcacaaaatgggatgaccatgaaatggtcaaggttattctaggatcactcgtttttcttaaccctactcaagttcaattgattcgtggtgatcctagatataagctaatgtctcccgaggaggttataggaaagtttgtgcaacccatcgccttcaaagcgacggaggagaagaaagaagagtctacgtcaagtaggctccccatcgacacctccaagctcgacaacgaggagatggcgctcatcatcaagagctttcgccaaatcctcaagcaaaggaaggggagagactacaaaccccgttccaagaaggtttgctacaagtgtggtaagctcggtcactttatagcaaaatgtcctatttctagtgacagtgataggggcgatgacaagaggggaaagaagaaggagaagaagagatactacaagaagaagggcggcgatgcccatgtgtgtcgggaatgggactccgatgagagctccaccgactcatcctccgacgaggacgccacaaacatcgccgtcaacaagggtctcctcttccccaacgtcggccacaagtgcctcatggcaaaggacggcaagaagaagccaagaggacttattaaggaaaacaagaagcatgttaaggttaaagatgcttatgctcaggaagtagaaaaatgtgaaaaattaactagtgagcttagcacttgccatgacactatctccaaccttaggaatgagaatgctaaattaattgctaaggttgagaaattaaatgtttgtgatgattctcttgtcaaacttaaaaatgataatgctagtttgattgctaagattgataagttgaatgaatctctttctagccttaagattgagaatgataaattaatttctaaggctaaggatttaaatgtttgcaatgtttctatttccaatcttagaaatgagaatgacatgttacatgctaagattgatgaattaaatgcttgcaaacccactacatccaccgttgagcatgtttctatttgtatgagatgtagagatattaatgttgatgctatccatgatcacctagctttaattaaacaagaaaatgatcacatagctcaacttagtgctaaaattaatgagcatgacttagaaaatgaaaaatttaaatttgctagaagtatgctctatagtgggagacgccctgacattaaggatgtcattggcttccaacagggagacaatgtcaagcttaattcccttaagaaattgtctaactttgttaagggaaaagctcccatggttcaggataacgagggctatattttatatcctattggttatcccgaacataagattaggagaattcattctaggaagtctcactctggctctcatcatgcttttatgtataagagtgaggcatctagttctaggcaatccactcatgttaaattgcctaaaaagaaatctcctattgcatcaatgtaa

SEQ ID NO: 5034 - DNA, 2247 bp, Zea mays
  Clone ID: TF_ZM4516.C1.o15.fg
atgccaaaatttgatggtagatctgaccctgaagattatttcacatgggaattgaaggtggagaaaatcttccgcctacataattatttagaggagaagaaacttgcaatggcatctcttgagtttgaaggatatgctctgatttggtgggagcaacttcttagtgatcgtgaagaagatggagatgaccctattattacttggcaagagatgaggcgagaaatgagaattcgttttgtgacgaagcattatcggcgtgatctttttgataaattgcagaatttgagtcagggaagtttctctgttgaggagaattataaggagatggagaaggccatgattagagccaatgtgtatgaagatgaagagcaaaccattgcatccaccaaagctgaacgtcagctgcaacaagatgctaagagcaccaagcccttgtcatatggtgcacgaaccatgactggaggaagcaaatcaatctcaaggtttactgctgcatcctcagcgacaaaaggttcaattggaggcttgcaatccaatattcaaggcaattctagtgcaaagaacggtgttgctccaaacacgagttataaaccagcagcatccacttcaacatcagtaggttcaatagccaagagtagtggtattcagtgcttcaagtgtggaggtcatggtcatgtcataaaggagtgtccaaataatcgtgtgatccttgtgaatgatgatggggaatatacatcagctagtgaagaggaagctgaagcaggaaatcattgtggaagaacaaatcaatacacactagatctgaaagggagaaagtttgtactcaagcctatgacccctcaacaaatcatggctgaacctttacaaaagaaaactgaaattagtgcagcaagtagaggaggagaagagcaaaataaattgagtgccatccacaattcggtgagcgagtgctacaagccaaattcaagagataaaaggaaggaagagggagaacatctagttatgctagccacaaaatctgagctgagagaagtgaggaacaacccatatcaagtgctctttgtacttgtgaacaaagatgctttgatttctcctaacgacataacatctcttcctagtgttgtggctgatcttttgcaagactttgaagacgtgtttccacaagaaacaccggctgtactacctccaattcgagggattgagcatcaaatcgatcttattccaggggctgcacttcctaaccgtccaccatatcgaaccaatcctaaagaaactaaggaaatacaaaggcaagtacaagaacttcttgataaaggttttattcgtgaaagtttaagccattgtgccgttcctgtgattttagtacctaagaaagatggatcttggaggatgtgtgttgattatagagctataaataatattactgttcgctatcaccatcctattccacggctagatgatatgcttgatgaattaagtggttccacaatttttactaaaattgatttgagaagtggataccatcaaataagaatgaaaactggagatgaatggaagactgcatttaaaacaaaatttgggttgtatgaatggttagtgatgccctttgggttgactaatgctcctagtatttttatgagattaatgaaccatgtcttaagaactttcattggaaaatttgttgttgtctacttcgatgatattctaatttacagcaagtcttttgatgaacatgtgaaacacattcgacaagttttagatgagcttagaaaggagaaattatttgctaatattgagaagtgcaatttttgcacagaccatgttgtgtttcttggctttgttgtttcagcaaaaggaatagaggtggatgaatccaaggtgaaagccgtcaaggattggccagccccaacgaatgtaagtcaagtaagaagttttcagggtcttgctggtttttatagaagatttgtgcgagatttcagtaccatcgcttcccctttaaatgaattgacaaagaaaggtgttgaatttaaatggggaaactcacaagaagatgcttttcaagaattgaagaaacgtttgactgaagcacatgtacttattcttcctgatttcactaaaacttttgaagtagaatgtgatgctagtgggattgggataggaggagttttaatgcaacaaggaaaacctatagcatattttagtgaaaaattgggaggtgctcaatgtaacacctcaggtgttacttag

SEQ ID NO: 5035 - DNA, 3672 bp, Zea mays
  Clone ID: TF_ZM5005.C1.o1.fg
atggatcctaagggaaaggggatggtggtcaacgacaaggaggagtccctcttcaacgagccaagggacgacaagcccattgactcaggtttgagtcacaggacgagggacgggaagaagaagaggtgcatcaagaaaatcatctactgcgacagtgatgcctcctcttcttcaccaagagacgacgacgacgactcttcgtcgaaaaagaaaacggttaatcaaaactactcttttgactattctcgcattccgtacaattcaaatgctcatttgctatcaattccacttgggaaacccccacactttgatggagaagactattctttctggattcatcaaatgtgtagtcatttattttccctccatcctagtatctgggagattgttgaaaacggaatgcattttgatagtactgacaatcctgtttttataaatgagcaaatccataagaatgcccaagctactactgtgttgctagcatctctttgcagggatgagtacaataaggtgagtggcttggacaacgccaaacagatctgggacaccctcaagatatcacatgagggaaatgatgccaccatgatcaccaagatggaactggtggagggtgagctatggaggttcgcgatgatcaggggagaggagccaacacaaacctacaacaggctcaagaccctggtcaacaagatacgaagctatggaagcacaagatggacggatcatgatgtcgtccgactcatgctaaggtcttttactataattgacccccatcttgtcaatcttattcgtgaaaatcccaggtacaccaaaatgatgtccgaggagatcctcggaaaattcgtgagcgggcgcatgatggtgaaggaggctcgatacgtggacgatgctctaaatggtccactactcatctacgagccacagctcgttgctctcaagggaactagcagcaaggagacgctaccaagcaaggtagcacaagtggaggctgctgggctgaatgaagatgagatggcgcttatcatcaagcgcttcaagaccgcactcaaaggacgcaaggagtaccccaacaagaataaaacaaggggaaaacgctcctgcttcaaatgcgataagactggtcactttattgctcaatgtcccgataataaaaatgacctggcacaagaaagacatgggaagaaggagaagaagaagaattacaggaaggcaaagggcgaggcgcatctaggaaaggaatgggattctgactgctcttcatcagactccgacgacgaaggacttgctgcctcggccttcgacaaatcctcactcttccccaacgaacgccatacatgccttatggccaaggaaaagaaggtacacattcaagatacccccaagtacacttcttctagcgatgaggaatcttctgacgatgaggtagattactcagatttatttatggggttagatcaagctaaagtagagaaaattaatgaattgatcgatgctctcaatgaaaaagatagattagtagaaaagcaagaggatattttacatgaggaacatgacaaatttgttagtgtgcaaaaatctcttgctttagaaattaagagaaatgaaatgctatcttctgagttatctgttcaccatgaatctgtctctagtttaaagaagttaaatgataaattaacagctaatctagaggaagttaataaaactagttcatgtgtagagcacgttattatttgtaatagatgtaaggattttgatgttaatgcttgtgatgaacatcttgcttctattactaagttgaacaatgaggtggcaagtcttaatgctcaacttaagacttgcaaagttgattttgacaaagtgaaatttgctagggatgcctacatagttggtagacacccctcaattaaggatggacttggctttcaaaagaaaaccaagaacttaacaagccaaaggactcccattctcaacaaggagaaagggaagacccctatggctagtagtcctcaaaggaatcatgcctttatttatgataggaaaattgctagtcattctcataggagttatgatcatgttgcttattatgattcaaatgctatgttagcttctagctccactcatgattatggtagaaataggcctaggacaatgtgcaataaaccttctactatttatcatacttgcaatacttcttttgtactcacatgcaaaaatacaaaagtagtggctagaaaattgggatccaaatgcaagggagacaagacttgtatttgggttccaaaagttatttttactaaccttgtaggacccaacaagagttgggtttatgcaaccgggggctcaagctggattatcgacagcggatgcacaaaccatatgacaggggagaagaagatgttcacctcctacgtcaagaacaaggattcccaggatacaatcatatttggagatgagaatcaaggcaaggtcaaaggtttgggaaagatagccatcacaagcgagcactccatttcaaatgtatttttagtagagtcgctaggatacaaccttctgtctgacaaattagaaacccaagggaccctaaagcgctttctaaggagggctcaaaatgaatttgagctaaaggtgaaaaagataaggagcgacaacgggtccgagttcaagaatctgcaagttgaggagtatcttgaggaggaaggcattaagcacgagttctccgctccatatacaccacaacaaaacgctgtgaacacagcttgccacgccataaaccggctctacctgcatcacctcctaaagaagacctcccacgaactccttaccggtaacaaacccaatgtctcttactttcgtgtatttgggagcaaatgctacattctggtgaagaaaggtagacactctaaatttgttcccaaggcagtagaaaggtttttactagggtatgactcaaatacaaaggcgtatagggtcttcaacaaatcatcgggattggttgaagtctctagcaacgttgtatttgatgagactaatggctctccaagagagcaagttgatcttgatgatgtagatgaagaagaaattccgacggccgcaatgcgcacgatggcaataggtgatgtgcgaccacaggaattacaggaacaagatcaaccatcctcctcgatggtggtgcatcccccaactcaagacgatgaacaggtacctcaagaagaagggcatgatcaagtgggagcacaagaagatcaagtgatggaggaagaagcaccacgggtccctccaactcaagtcctagcgacgatccaaagacatcaccccgttgaccatattctagttgacatcagcaagggagtaactactcgctcacgattagctaatttttgtgagcattactcgtttgtctcttctattgagcctttcagggtggaagaggccttgcaggatccagactgggtgttggccatgcaggaagagctcaacaacttcaagagaaatgaagtttggagcctggtgccatgtccaaagcaaaacgttgtgggaaccaagtgggtgttccgcaacaagcaagacgagcacggggtggtgacaagaaacaaggctcgacttgtggcaaaaggttatgccaagtcgcaagtttggattacgaggagacttttgcttctgtggctaggctag

SEQ ID NO: 5036 - DNA, 1536 bp, Zea mays
  Clone ID: TF_ZM4989.C10.o3.fg
atggaggacttgagcaacatgaccccgaccatcgtgattgggaaaatcgcggcttttgagatgtcgcgaaaaatgagtcggggagaggagccaacttcctcaagaccatatgcttttgcatgtgatgaaaggaagggcaaaaagaaggctcccactccaagttcctcaagcgaagaagaggaagaagaagaaagtgatgatgatgaagataatcaaccatgcacatcatcctctgaggacgaagaaacaatccgacgcgtcggaaaggtcgaggatcttctctttaacattgacaggaaaaagcaaaggaagagaggatgcttcgcatgtggggagaagggccacttcagggacaactgtcaaaatatggccaaacccaaaaaggagaggagcaaaggcaaggcgctaacaagtgttagaacttgggatgattcttcaagtgaagatgaacctccaaggacgcgcagccaccggtcctcgtcacgatcatcacagtcatcacacaaatgccttatggcaagaggtaacaaaagcattccatcctctagtgatgaaagtagtagtgatgatgaaggtgagggaaagccctctctagatgagcttgcggaagccgtagaatttttccaggatgtttgcactaagcaaaaagctcaacttaaaactttgaaaaataagttggttagctctcaaaatgattacaaaggtttgctagaaaaatttgaaacttttgcaaacttaaatagtgagctatcaactaaaattgagctattagaatctagtgctccatccactgctaccgatgacaaccttattaaaaagaatgaaaaacttaaggctaagttagctagctcccaagaagctattgaaaatttgctagagaaaatggaaattcttagcatacacaataatgagctaactactaagctagaaaacattggtagcaccccaacaacatctttagttgaaatacctgaaataattaagaaagatgcttctacttcctgctttgatttaattgatgattctaacccctgcaaccaagtcgttgttgagaatattgttgtagagacatgttcggatgaggttgcaaaggaaaatgaacaattaaagcaagaagtggctcgccttggcaaggctttgtatgacaagaaaggcaaagccaaacaaatccgacctacacaggataacaccactgcgggagtgaacaagcctgtagagggagaaactgtgatttgtaggctatgccacatggaaggccacaagtctttccaatgcaaggcgatgaccggggataaacaaaggcaaaagctcaagcaaaagccatcaagcaaaatctccaacacctacatcaaaagggtgaacaaaaaggatgctacaccatatttgatcaagaagaaaaagaatggaaaggtgatagcaatcaaggccaacaagcaagccaacaaaggaaaaggggccaaacgcatctgggtgccaaaggagataatttcaaccatgaaaagcaccaagaaggtttggatcccgaaagggaagtga

SEQ ID NO: 5037 - DNA, 4863 bp, Zea mays
  Clone ID: TF_ZmC951_430
ctaagggtttgcctcatccaaagcaattgcgcgcaacaatggcctgcggcaatatactcggctttggcggtagagagagctacggaattttgcttctttgaagcccaagacaccagagaccttcccaagaactggcaagtccctgatgtgctctttcttttgatcgacggatttacctcccgtgtcgaggtcgagatgcccattggttcccatgtgtgtcttgatgggtttggcatccttcatcccaaatttgtttagaatatcttgaatatacttcgtttggctaatgaaggtgccctcttggagttgctttacttgaaatcccaagaagtacttcaactcccccatcatcgacatctcgaatttcggtgtcatgatactactaaattcctcacatgtagattcgttagtagacccaaatataatatcatcaacataaatttggcatacaaacaaatcattgtcaagagttttagtaaataaagtaggatcgacctttctgactttgaagccattagtgatgagaaaatctcttaggaattcataccatgctcttggagcttgcttgagcccataaagcgccttagagagtttgtaaacatagttagggtactcactatcttcaaagccgggaggttgctcaacatagacctcttccttgattggtccattgaggaaggcacttttcacgtccatttgataaagctcattcctagtgaagttgttgagctcctcttgcatcgccaccacccaatccgaatcttgtagtgcttcctctaccctgtgtggctcaatagaggaaacaaaagagtaatgttcacaaaaatgagcaacacgagattgagttgttacccccttttgaatatcgccaaggatggtgttcacggggtgctcttgttggattgcttggtggactcttgggtgtggcagtcttggttctttatcctccttgtcttgatcatttgcatctcccccttgatcattgccgtcatcttgaggtggctcatcttcttgatcttctccttcatcatcttgagcctcatcctcattttgagttggtggagatgcttgcgtggaggaggatggttgatcttgtgcatttggaggctctttggattccttaggacacacatccccaatggacatgttccttagcgtgacgcacggagcctcttcatcacctatctcatcaagatcaacttgctctacttgagagccgttagtctcatcaaacacaatgtcacaagaaacttcaactagcccagaggacttgttaaagactctatatgcccttgtgtttgaatcatatcctagtaaaaagccttctacagccttaggagcaaatttggattttctacctcttttaacaagaatgaagcatttgctaccaaagactctaaaatatgaaacattgggctttttaccggttaggagttcgtatgatgtcttcttgaggattcggtgtagatacaaccggttgatggcgtagcaggcggtgttgaccgcctcgacccaaaaccgatccgaagtcttgtactcatcaagcatggttcttgccatgtccaatagagttcgattcttcctctccactacaccattttgttgtggcgtgtagggagaagagaactcatgcttgatgccctcctcctcaaggaagccttcaatttgagaattcttgaattccgtcccgttgtcgcttcttattttcttgatccttaagccgaactcgttttgagcccgtctcaagaatccctttaaggtctcttgggtatgagatttttcctgcaaaaataacacccaagtgaagcgagaatagtcatccacaataactagacagtacttactcccgccgatgcttatgtatgctatctggccgaataggtccatatgtaggagctcgagtggcctgtcagtcgtcatgatgttcttgtgtggatgatgaataccaacttgcttccctgcctgacatgcgctacaaatcctgtctttctcaaaatgaacatttgttagtcccaaaatgtgttccccctttagaagtttgtgaagattcttcattccaacatgtgctagtcggcaatgccagagccagcccatgttagtcttagcaattaggcaagtgtcgagttcagctctatcaaagtctactaagtatagctgaccctctaacactcccttaaatgttattgaatcatcacttcttctaaagacagtaacaccttgatttccatccccgaatgtgatagctcgttggggatcttggtttttctcgtaggaggagaacattttcttctcccctgtcatgtgatttgtgcacccgctgtcgatgatccaacttgagcccccggatgcataaacccaaacggttttgggtcctttggcattagatgcaagaactttgggtacccaaacacaagtcttggtgcccttgtgtttgtccccaacatacttggcaactattttgccggatttgttagttaaaacataagatgcatcaaaagttttaaatgaaaagttatgatcatttgatgtagtaggagttttccttttaggcaatctagcatgggttgattgcctagaactagatgtctcacccttatacataaaagcatgattagggccagagtgagacttcctagaatgaattctcctaattttgctctcgggataaccggtaggatacaaaatgtaaccctcgttatcctgagtcatgggagccttgcctttgacaaagttagacaatcttttaggaggggcattaagtttgacattgtcccccttttggaagccaatgccatccttgatgtcagggcgtctcccattatagagcatgcttctagcaaatttaaaattatcattttctaagtcatgctcggcaattttagcatctaattttgctatatgatcattttgttgtttaattaaagccatatgatcatgaatagcatcaatgttaatatctctacatctagtacaaatagtaacatgatctaattctttagccttaacaattaatttttcgttttcaatcttaaggctagcaagagaaacatttaattcttcaatcttagcaagtaatttaacattatcatctctaagattgggaattgaagcatcacaaacatttgaatcaaccttagcaattaaactagcattctcatttctaaggttggtaataacatcatggcaagagcttagctcaatagataatttttcacatttttctacttctagagcataagcattcttaaccttaacatgctttttattttccttaattaggaaatcctcttgggagtccaagagttcatccttctcatgaatagcactaattaattcatttaatttttccttttgttgcatgtttaggttggcaaaaagtgtgcgcaaattatcctcctcatcacaagagttatcctcatcactagaggtttcatatttagtggaggattttgattttaccttcttctttttgccgtcctttgccatgaggcacttgtggccaacattggggaagaggagtcccttgatgaaggcgatgttggcggcgtcctcgtcggaggaggagtcgctggagctctcgtcggagtcccattcgcggcacacatgggcatcgccgcctctcttcttgtggtacctcttcttctcctttcttctccccttcttgtcgtcgcctcggtcactgtcactagacataggacatttagcaataaaatgatcgggcttaccacatttgtagcaaaccttcttggagtgggacttgtagtctttccccctcctttgtttgaggatttggcggaagctcttgatgacgagcgccatctcctcattgtcaagcttggaggcgtctattggttgtcgacttggtgtagactcctccttcttttcttccgtcgccttgaatgcgaccggttgtgcttcgggcgtggaggggccatctagctcgatgattttctttgagcctttgatcatcaactcaaagctcacaaagtttcctattacttcctcgggagacattagtgtatatctaggattaccacaaattaattgaacttgtttgggattaagaaaaacgagggatcttagaataaccttgaccatctcatggtcatcccatttggtgctcccgaggttgcgcacttggttcaccaaggtcttcaagcagttgtacatgtcttgtggctcctccccttggcgaagccggaagcgatcgagctccccctcgatcgtctcccgcttggtgattttggtcacctcatctccttcgtgcgcggttttgagcacgtcccaaatctccttagcgctttttaacccttgcaccttgttatactcctctcgacttagagaggcgaggagtatggtggtggcttgggagttgaagtgccggatttgggcgacctcgtccgagtcatagtcttcatcccccggtgatggtacctgtactccaatctcaacaacatcccaaatgctagtgtggagtgaggttagatgatgcctcattttatcactccacatattataatcttcaccatcaaacatgggtggtttgcctaatgggacgaaaagtaatggagtacgttttggaatgcgagggtagtgtaggggaatcttactaaacttcttgcgctcatggcgcttagaagttacggacggcgtgtcagagccggaggtggatggcgacgaagagtcggtctcgtagtagaccaccttcctcatcttctttttcttgtcgccgctccaatgcgacttggcatgtgaaggggttcccttcatcttgttgtcggactcccctgatggatccttcccgtggcttctagacttgtcaccgtcggtcacgatctctttcttggtgtgttctcctgacat

SEQ ID NO: 5038 - DNA, 3574 bp, Zea mays
  Clone ID: TF_ZmC13103_1
atggatcctaagggcaaggggattgtgatcaatgacaaggagaaggagtcattcgtcaacgagcccaaggatgacaagcctaccgactcgggctcgggtcacaaacgcaaagatgggaagaagaagaagacaagacgcatcaaggagatcgtctactacgacgacaacgatgagtccacttcttcccaaaaggacaacgacgacaacgactacgagagaaggaaaccggttaattcgaacttttcttttgactactctcgtattccgcaaagtacaaatgctcatttgctctccattccacttggcaaacctcctcactttgatggagaggactacggattttggagccacaaaatgcgtagtcacctattctctctccatccgaccatatgggagattgtggaaagtggaatgaaatttgatagctcggatagtcctatgtttatcaatgaacagactcatagaaatgcacaagctactactatgttgttagcctccttgtgcagggacgagtatcataaggtgagcggcttggacaatgccaagcagatctgggacaccctcaggatctcacatgaggggaacgacgtcaccttactcaccaaaatggagttggtggagggcgagcttggaagattcgcaatgatcaggggagaggagccaacccaaaattgcaacttccccaagtttttaacgaatttgaccctgaggcaggtgaagataacctcccttcaggtggtccaagcataccttgctggtcttacatttgcattgccagaatcaccttgcagcacaactgttcttgctaacccttctgggatatgtcgccacttcaagagacccaattattggaggaagtttattgttgacatacacaacgggctatgttgcgcctcttcttattgcagcttcatttgctggagcactgcacagtttgttgtcattcagaagatattcggcatggataaacccaatcagtggtgcatttttactcggtggaggtgtttatacccatactggacagggtgtttccagcaacatcaatggtcatgtaggtcgcaaggggcagccaagcaagaccaagataaaggggaagcactcatgcttcaaatgtggtaaggttggtcattttattgctaactgtcccgacaatgatagtgaccaagaagaagggaataagagggagaagaagaagaattataagaaggcaaaaggtgaggcacatcttggcaaggagtgggactcggattgttcgtcgtccgactccgacaacgaaggactcgccgccactgccttcaacaagtcatccctcttccccaacgagcatcacacttgcctcatggcaagggaaaagaagggtctagatagaaccaaggtggataaaataaatgaattgattgatgctttgaatgataagaatagattgctagaaaagcaagaggatctcttatatgatgaacatgacaagtttgtagaagctcaaaaatcccttgctttagaaataaagaggaatgaaatgctttcttgtgaattgtctacatgccatgactctatttctagtttaaaaagcataaaagatgacttgactgctaagtgtaaagattttaatattgatgcttgtagtgaacacctagtttcaatttctaaattgaatgatgaagtagctagtcttaatgcccaacttaagactagcaaaagcgaatttgataagttaaaatttgcaagggatgcctacacgattggtagacacccctcaattaaggatggacttggtttcaagagggaagccaagaacttaacaagccataaggctcccatccctgccaaggagaaagggaaggcccctatggctagtagtgctaaaaagaaccatgcttttatgtatcatgataggagacatgctagaaatgcaaatagaagtcatgatgcttttgattcacatgtttatgattcatatgatatgtttgcttctagttcttcctatatgcatggtagaaatgtagctaggagaaatgctattaatcacatgcctaggagaaatggtgttagtgttcctaggaaagttaatgaaccgtctacaatatatcatgcttgcaatgcttcatttgccatttgtagaaaggataggaaggtttatgcatccgggggttcaagctggattatcgacaacggatgcacaaaccatatgacgggggagaagaagatgttcacctcctacgtcaaaaacaaggattcccaagattcaataatattcggtgatgggaatcaaggcaaggataaatctgaaacccaagggaccctcaagcgcttcctaaggagagctcaaaacgagtttgagctcaaggtgaaaaagataaggagcgacaatgggtccgagttcaagaaccttcaagtggaggagtaccttgaggaggaagggatcaagcacgagatctctgctccctacacaccacagcaaaatggtgtggtagagaggaagaacaggacgcttatagacatggtgaggacgatgcttggagagttcaagaccctcgagcgcttttggtcggaagctgtgaacacggcttgccacgccatcaaccgggtctaccttcaccgcctcctcaagaagacgtcgtatgagctactaaccggtaacaaacccaatgtttcgtattttcgagtttttgggagtaaatgctacattctagtgaagaagggtaggaactctaaatttgctcccaaagctgtagaagggtttttattaggttatgactcaaatacaaaggcgtatagagtcttcaacaaatcatcgggtttggttgaagtctctagcgacgttgtatttgatgagactaatggctctccacgagagcaagttgttgattttgataatgtagatgaagaagaagttccaataaccgcaatacgcaccatggcgattggagatgtgcggccacaggaacaagatgagcaagatcaaccttcttcctcaacaatggtgcaacccccaactcaagatgatgaacaggaggcgtgtgatcaagggggagcacaagatgatcatgtaatggaggaagaagcacaaccggcacctccaacccaagttcgagcaatgattcaaagggatcatcccgtcgatcaaattttggctgatattagcaagggagtaactactcgatctcgattagttaatttttgtgagcattactcctttgtctcttctattgagccttttagggtagaagaggccttgctagatctggactgggtgttggccatgcaagaagagctcaacaacttcaagaggaatgaagtttggatactggtgcctcgtcctaagcaaaatgttgtgggaaccaagtgggtgttccgcaacaaacaagacgagcacggagtggtgacgaggaacaaggctcgacttgtggcaaaaggctatgcccaagttgcaggtttggactttgatgagacttttgctcctgtggctaggctagagtccattcgtattttgctagcatatgccgctcaccattctttcaggttgttccaaatggatgtgaagagcgctttcctcaacgggccaattaaggaggag

SEQ ID NO: 5039 - DNA, 4935 bp, Zea mays
  Clone ID: TF_ZM4958.C2.o1.fg
atggatcctaagggcaaggggattgtgatcaatgacaaggagaaggagtcattcatcaacgagcccaaggatgacaagcctaccgactcgggccacaaaagcaaagatgggaagaagaagaagacaagacacatcaaggagatcgtctactacgacgacagcgatgagtccacttcttcccaaaaggacaacgacgacaatgactacgagagaaggaaaccggttaattcgaacttttcttttgactactctcgtattccacaaagtacaaatgctcatttgctctccattcctcttggcaaacctcctcactttgatggagaggactacgaattttggagccacaaaatgcgtagtcacctgttctctctccatccgagcatatgggagattgtggaaagtggaatgaaatttgatagctcggatagtcctatgtttatcaatgaacagattcatagaaatgcacaagctactactgtgttgttagcctccttgtgcagggacgagtatcataaggaggcaagatatgtcaacgacgcgttgaacggtccaatccatgagcctcaacccattgctctcaaggcaacgaggagcaaggaggcgctacctagcaaggtggcacaagttgaggcggccgggctcaatgatgaagagatggccctcatcatcaagcgcttcaagacggcgctaaagggtcgcaaggggcagccaagcaagaccaagacaaaggggaagcactcatgcttcaaatgtggtaaggttggtcattttattgctaactgtcccgacaatgatagtgaccaggaagaagggaacaagagggagaaaaagaagaattataagaaggcaaaaggcgaggcacatcttggcaaggagtgggactcggattgttcgtcgtccgactccgacaacgaaggactcgccgccactgccttcaacaagtcatccctcttccccaacaagcatcacacttgcctcatggcaagggaaaagaagggtctagatagaaccaaggtggataaaataaatgaattgattgatgctttgaatgataagaatagattgctagaaaagcaagaggatctcttatatgatgaacatgataagtttgtagaggctcaaaaatccctcgctttagaaataaagaggaatgaaatgctttcttgtgaattgtctacatgccatgactctatttctagtttaaaaagcataaacgatgacttgaatgctaagttggaaatagctaataaatcaacatcttgtgtagaatatgttgtggtttgcactaggtgtaaagattttaatgttgatgcttgtagtgaacacctagtttcaatttctaaattgaatgatgaagtggctagtcttaatgcccaacttaagactagcaaaagcgaatttgataagttaaaatttgcaagggatgcctacacgattggtagacacccctcaattaaggatggacttggtttcaagagagaagccaagaacttaacaagccataaggctcctatccccgccaaggagaaagggaaggcccctatggctagtagtgctaaaaagaaccatgcttttatgtatcatgataggagacatgctagaaacgcaaatagaagttatgatgcttttgattcacatgtttatgattcatatgctatgtttgcttctagttcttcctatatgcatggtagaaatgtagctaggagaaatactattaatcacatgcctaggagaaatggtgttaatgttcctaggaaaattaatgaaccttctacaatatatcatgcttgcaatgcttcatttgccatttgtagaaaggataggaaggtttatgcatccgggggttcaagctggattatcgacagcggatgcacaaaccatatgacgggggagaagaagatgttcacctcctacgtcaaaaacaaggattcccaagattcaataatatttggtgatgggaatcaaggcaaggtaaaagggttaggtaaaattgctattccatccgagcactctatatctaatgtgtttttagttgagtctcttggatataacttgttatctgttagtcaattatgcaaaatgggatataattgtctattcacaaatgtagatgtgtctgcctttagaagaagtgatggttcattagcttttaagggtatattagacggcaaactttatttagttgattttgcaaaagaggaggccggtctagatgcatgcttaattgctaagactagcatgggctggctgtggcatcgccgcttagcacatgtggggatgaagaaccttcacaagcttctaaagggagaacacgtgataggtttaactaatgtgcaattcgaaaaagatagaccttgtgcagcttatcaagcaggtaaacaagtgggaggagcgcatcacaccaaaaatgtgatgaccacatcaagacctttggagatgcttcacatggacctcttcggacccgtcgcctatctaagtataggaggaagtaagtatggtcttgttatagttgatgacttttcccgcttcacttgggtattctttttgcaggataaatctgaaacccaagggaccctcaagcgcttcctaaggagagctcaaaacgagtttgagctcaaagtgaagaagataaggagcgacaatgggtccgaattcaagaaccttcaagtggaggagttccttgaggaggaggggatgaagcacgagttctccgctccctacacaccacaacaaaatggtgtggtagagaggaagaacaggacgctcatcgatatggcgaggacgatgcttggagagttcaagacccccgagtgcttttggtcggaagccgtgaacacggcttgccacgccatcaatagggtctaccttcatcgcctcctcaagaagacatcgtatgagctactaaccggtaacaaacccaatgtttcgtattttcgagtttttgggagtaaatgctacattctagtgaagaagggtaggaattccaaatttgctcccaaagccgtagaagggtttttattaggttatgactcaaatacaaaggcatatagagttttcaacaaatcatcaggtttggttgaaatctctagcgacgttgtatttgatgagactaatggctctccaagagagcaagttgttgattttgatgatgtagatgaagaagaagttccaacggccgcaatacgcaccatggcgattggagatgtgcggccacaagaacaagatgaacgagatcaaccttcttcctcaacaatggtgcatcccccaactcaagatgatgagcaggaggcgtatgatcaagggggagcacaagatgatcatgtaatggaggaagaagcgcaaccgacacctccaacccaagttcgagcgatgattcaaagggataatcccgtcgaccaaattttgggtgatattaacaagggagtaactactcgatctcgattagttaatttctgtgagcattactcttttgtctcctctattgagcctttcagggtagaggaggccttgctagatccggactgggtgttggccatgcaagaggagctcaataacttcaagaggaatgaagtttggacactggtgcctcgtcccaagcaaaatgttgtgggaaccaagtgggtgttccgcaacaaacaagacgagcacggggtggtgacgaggaacaaggctcgacttatggcaaaaggttatgcccaagtcgcaggtttggactttgaggagacttttgctcctagcgctttcctcaacgggccaatcaaggaggaggtgtacgtggagcaaccccctggcttcgaggatgaacggtaccccgaccacgtgtgtaagctctctaaggtgctctatggacttaagcaagccccaagagcatggtatgaatgccttagagactttttaattgctaatgctttcaaggttgggaaagccgatccaactctttttactaagacttgtgatggtgatctttttgtgtgccaaatttatgtcgatgacataatctttggttctactaaccaaaagtcttgtgaagagtttagcagggtaatgactcagaaattcgagatgtcgatgatgggcgagctaagctacttccttgggttccaagtgaggcaactcaaggatggaaccttcatctcccaaacgaagtacacacaagatttgatcaagaggtttgggatgaaggacgccaagcctgcaaagactccgatgggaaccgacggacacaccgacctcaacaaaggaggtaagtccgttgatcaaaaagcataccggcctatgatagggtctttactttatttatgtgctagtagaccgaatatcatgcttagtgtatgcatgtgtgctagatttcaatctgatccaagggagtgtcacttagtggctatgaagcgaattcttagatatttagtcgctacgccttgcttcgggatctggtatccaaaggggtctacctttgacttgattggatattcagactctgactatgctggatgtaaggtcgataggaagagtacatcggggacgtgccaattcttaggaaggtccctggtgtcatggagttctaagaaacaaacttctgttgccctatccaccgctgaggccgagtacgttgccgcaggacagtgttgcgcgcaactactttggatgaggcaaaccttcagggactttggctacaatttgagcaaagtcccactcctatgtgataatgagagtgctatccgcatggtggataatcctgttgaacacagccgcacaaagcacatagacatccggcatcactttttgagagaccaccagcaaaagggagatatcgaagtgtttcatgttagctccgagaaccagctagtcgatatctttaccaagcctttagatgagcagaccttttgcaagttgcgtagtgagctcaatgtcttagattcgcggaatttggattga

SEQ ID NO: 5040 - DNA, 1518 bp, Zea mays
  Clone ID: TF_ZmC24260_17
atgtcggggggaaaaagaaacgaaagtgcttctaagcttgaaaaagttgaggttgcctcgactttatcttttggtgcagatgttgatcctagggcaatagatcttgccatgagaatcgccgaaaggatgttcctcaaaatgaaggaagatgaggcgaagaacattattgaagaagaagaaaatgatcgatggagaccaaacgatgaatccacctcttcacaaggttcgtctttcaaatccacttctcatatgtgctttattgctaatgggagtgacagtgaaagcgaaagtgaggataaggaggagcaagaaagtgatagtgaagatgaggatgatcttcaacaattcttcgctcagctaagcaagaaacatcggatgagcttgcttaaactcatgaaaagagcggaagaacaaaaagaaatgcttcataagcaagaagacttcctcatcagaaaaattgaagacttagagaagttgaccaaagagcatgagaagctaaagtgctctcatgatgatttggtccaaaggtatgaagacatttcaattgagcaaattaaagttgttaatcattcatcatatattgctcaattagaaaataaaaatgctatgttcaagaacacgatagaaaggctaaatattgaaaatctagctttccaagaaaaacatgatatgcttgtgtgctctcataataaatttatggattcacatatcatgttagaaatggctcatgaggttgtgttaactaatttgaaatcataccaacctcacatgtgcacatgtgttgaaattgaaactatattaccatgtgctaacaaatgttgctctcaagaaagccaatcttccattgagctagacatttcaagaattagtgatatttctatcacacaagaaaataaagagctcaaggaagaagttggaatgctaagaaggagcttaactcgtttgaagggaaagtgtcatgctcaacctcctcaagataaccatgataatgtggtgaaaaagcttgagaaggggacaaccgtagcatgcacaaaaccccttcaaaagaataccaagctttccaagaagggcatgagcaaaatccatggtgagaaaattaatgctcatatgatttgctctaacaatgtacctatgtgcttcaacaaagaaagatcaaagagaagcgataggagatgctatggatgcaaggagaagggccatgaaattgattcatgcccccacatgaagaatcaagaccttgcacgatcaagaaagatgaccatcaaaaaggatgaaagcaaaaggcaaaagcattgcaaggacaagcatcgcatttgctacaattgccgtgaaaaaggtcatctattcaaggtttgtccaaagggtaaaactcctaagcctaacttgtcaatacacttaaatatgctttggagacccaaatttgactcttgtgctagaaaggtgatgagttcaccacattctaggaccaaggctatttgggtgcctaagtccttattggctaaccttgacctatcatga

SEQ ID NO: 5041 - DNA, 2037 bp, Zea mays
  Clone ID: TF_ZmC951_348
ctattggaagccaatgccatccttaatgacagggcgtctcccattataaaacatactacgagcaaatttaaatttttcattctctaattcatgctcggcaattttagcatctaattttgctatatgatcattttgttgtttaatcatagcaatgtgatcatggatagcatcaacattaacatctttacatctagtgcaaatagagacataactaatagtagatgtagagggtttgcaagcatttaatttatcaatcttagcatgtaaaatagcattctcatctctaagattggaaatagaaatattgcaaacatttaaatctttagccttagcaattaatttttcattctcaattttaaggctagagagtgatgtattcaacttgtcaatattagtaaccaaactagcattatcatttctaagactaacaattgaatcatcacagacatctaacttctcaaccttagctattaactttacattttcatttctaaggtttgagataatatcatggcaagtgcttagctcactagtcaatttttcacatttctctacttcctgagcataagcatttttaaccttaacatgcttcttgttctccttaataaggaagttctcttggctatccaagagttcatccttctcatgaatagctcctatcaattcatttaatttttctttttgttgcatgttgaggttggcaaaaagggcaagcaaattatcttcatcatcactagagttatcctcatcactagatgttgcatatttagtggaggctctagattttaccttctttttgccaccctttgtcatgaggcacttgtggccgaagttggggaagaggaggcccttgttgacggtgatgttggcggcgtcctcgtcggaggaggagtcggtgtagctctcatcggagtcccattcccgacatatgtgggcatcgccgcccttcttcttgtaatacctcttcttttccttcctctttcccttcttatcgtcgcccctgtcactatcacttgatgatggacattttgcaatgaaatgactgggcttaccacacttgtagcaaactttcttggagcggggtttgtaatccttctcccttctttgcttgaggatttggcggaagctcttgatgatgagcgccatctcctcgttgtcgagcttggaggcgtcgatggggagcctacttgatgtagactcttctttcttctccttcgtcgctttgaatgcgacgggttgcacctcaggtgtggaggtggcgccttgctcgatgatttgtttggagcctttgatcatcaattcaaagctcacaaactttcctataacctcctcgagagacattagcttatatctaggatcaccacgaattaattgaacttgtgtagggttaagaaaaacaagtgatcttagaataaccttgaccatttcatggtcatcccattttgtgctcccgaggttgcgcacttggttgaccaagatcttgagccggttgtacatagcttgtggctcctctccttggttgagcatgaaccgaccgagctccccctcgatcatttccctcttggtgatcttggtcacttcgtctccttcgtgcgcggtttttagtacgtcccaaatctctttggcactcttcaacccttgcaccttattatactcctcttgacttagagaggtgaggagtatagtagttgcttgggaattgaagtgctggatttgggcgactttgtccgcatcataatcttcatcccctatggatggtactataattttcaccataaaaaccggtggtttgcgctcatggcgcttagaagtgacggacggcgtgtcggagccggaggtggaaggcgacgaagaatcggtctcgtagtagaccactttcttcattttcttcttcttgttgccactccggtgcgacttgacgcggggaggtgattcctccctcttcttgttgccggactcccctgatggagctttcccgtggcttgtggcgggcttctcgccggtcaccatctccttcttggcgtgatctcccgacat

SEQ ID NO: 5042 - DNA, 1950 bp, Zea mays
  Clone ID: TF_ZM4952.C1.o18.fg
atggcctcagggcggacgccgctgcaacaatgccctcgcccacatctacgctcgaggggcgaggacaagtacaaagagccggaggtccggagcgcggatggtggcggtgatcccgccagggacccaacagtgccagccaggcgcatcggtcacgggccagtcagcctcgggagaaggcgcgatggtcgatgcggccaaaaatgggccggcagtaatggcggtggcaggcgggcggaagcagcggtcacgtcgtcagccaagctcacgtccccacatgggacggatgtgactcaagaatggcttgatagggtgaagatagcaaggaaagggcttcgaggaactaagcgaaggttcaaccggttttttgcactgttcacctttttgaaaatactggttcagccggacactcaaccggacactcaaccggtttttgtctggtggaaacagctttggtactacatcgagttctttgtggattcattactcttggagcttctagctcctagacgactaggtgtcgcttatgttgatcctagggcaatagatcttgccatgagaatcgccgaaaggatgttcctcaaaatgaaggaagatgaggcgaagaacaagattgaagaagaaaatgatcgatggagaccaaacgacgaatccaccttttcacaaggttcgtatttcaaatccacttctcatatgtgctttattgctaatgggagtgacagtgaaagcgaaagtgaggatgaggaggaacaagaaagtgatagtgaagatgaggatgatcttcaacaattcttcgctcagctaagcaagaaacatcggatgagcttgctcaaactcatgaaaagagcggaagaacaaaaagaaatgcttcataagcaagaagacttcctcatcagaaaaatcgaagacttagagaagttgaccaaagagcatgagaagctaaagtgctctcatgatgatttggtccaaaggtatgaagacatttcaattgagcaaattaaagttgttaatcattcatcatatattgctcaattagaaaataaaaatgctatgttcaagaacacgatagaaaggctaaatattgaaaatctagctttgcaagaaaaacatgatatgcttatgtgctctcataataaatttatggattcacatatcatgttagaaatggctcatgaggttgtgttaactaatttgaaatcataccaacctcacatatgcacatgtactcaagtagaaactatattatcatgtgctaacaaatgttgctctcaagaaagccaatcttccattgagctagaaatttcaggaattaatgatatttctatgacacaagaaaataaagagctcaaggaagaagttggaaggctaagaaggatcttaactcttttgaagggaaagtgtcatgctcaaccttctcaagataaccgtgataatatggtgaaaaagcttgagaaggggacaaccgtagcatgcacaaaaccctttcaaaagaataccaagctttccaagaagggcatgagcaaaattcatggtaagaaaataaatgctcatactatttgctctaacaatgtacctatgtgcttcaacaaagaaagatcaaagagaagcgatagaaggtgctatggatgcaaggagaagggtcatgaaattgattcatgcccccacatgaagaaccaagatcttacacaatcaagaaagatgaccatcaaaaaggatgaaaacaaaaggcaaatgcattgcaaggataagcatcgcatttgctacaattgccgtgaaaaaggtcatctattcaaggtttgtccaaagggtaaaactcttaagcctaccatgtcaattcattcatattcacttaggagacccaaaaatgacacttgtgctagaaagccacataggaaaaatgaagcacttgagaatgaacttaaaagattctaccttgctttggaaaggatctaa

SEQ ID NO: 5043 - DNA, 8157 bp, Zea mays
  Clone ID: TF_ZmC3792_1
atgccgacctcctcttcttccgttgccgctacgccgccggccgatccctcgctgccggccgccgcctcgtctgaggggacgctgagtagttcgatggcggaggagttgcgcgccggcgattctgttgattttggcgtgtcgcggatgtcgtcggtccgcgtgcaagatatgcagcggttgggttacttcggcggcggagttgctcgtgtcccggggacggaggaagtccccgagccggagcgcgattaggctgtattcaaggcattgttcgccgccggtctccacttccctgaccgccgattggttggcacacggaacaggcgggtcaaccttcgtctacattggccaacaccgatcctcgggtggcctctgtccaaggatgtggcggcctcgactccgcgtggtgtccagatgacgctcgaatccggcaagcacacggtacagtgggttgacttggttccttgcgcccgaagcaactggggaaaaggttaggaaatttggttttacgttgctgagagtaccgtcaaggggcatgagggactccccgtgtccgagatgtgttctcatttttactcagcgtacccgccctttgaagtggcagaggaggatgtggacgaaggggcccttcggtgcaccgccagcccgaggagtgggcgccagatgcttgaggagtttatggcgtccgtggtgtcgacctgggcgcatgactcggcgctggagcaagtgtgccctcgccagatgcctttgcacggtgcaagggtggtgccaaggcccacctgcgcactaaacctacaaagccgcgacccggccgcccctgagcgtgatgccgagaatggggctgtgcggcgcgttggccgtgacgtgccgaggacagaggacccgcgcagctttgatatccgcgcgtcgaaggaccgtttgaacaggcttgttgaattacatcaatcgccgtaggacggttatcctggtcaagaggatgtggaccgccctgggaagaagcaggtggtggagactggagatgaccctgcgccggcggccgccccgtcctctaaaaagagcaaactaggtattcttgtgggaagacttggggtttctgctagagagttgatgaggacgagcgcgcccctggggggaaggatggcttcgcccgatctccggaaggatgcggctcggatgctgagggttatcgggggttgctggcctaggaatgttcctatcccccgcgcggctggcgaggacctttttacatctcgcatggttcgtgagtggagagtttttccttacgggcggaatattgctgctgttgtgtcggcagtgatggataaggatcgccagggagcggcacaaaagcgtcaggcggttgtcaggctcgttgaagctaggccgaagaggcagcggggatctgcgaaagctgcggccgccggtggaggcaagccgccgctggcggcgaagttgggcgtccctgcgtctagcaaagcgccggaggcgacgacaggcgccgggggctccaaaccgacgaaggcagtgccgccggccagcagagtgccggaggccgctaaggcggcgaagttgctgccggcaggcaagcgtatcgccgacttcgccaccgatattagtgtggaggactatcttggtgggtcggacgagggccaacttgctatagttgcgcctgccgcggcgacaacgacggctgccgcagcgccgaaggcgaagggcggggctattggcgccagaggtgaggtggcggccctcgcggctgtcagggatgaggcgggcgctgcgtcccgccagctgaaggaggtggcagagtcgctaagtcaggtggctgacttcgccaaccgcacgacgtcgggggccctcacggcagttgtgtctgccgaagtcgagagacttcggacacaacatactgacgccgtccgagagaaatcggccgccgacagcaagtgccgcaagctggtggacaaggtggccgcgctggagggagagaaggctgacctccggcgccaattggcgggggagaggagggagaccaacgaggccctcgtcaacgcgcaggctgcgcaggcggaggccaatctggcacgggcggagggcaatcttgccagggagcgcgccgagcagctgcaggagcggctcatcgccctggagagccgcgtggaacgggccgaggccgcgacgcgagcggaggccgaacggacgcgcacgcagcttatggacacatatcgtgagctgggtgcgcggaccggtgacttcgaagtgccggaccgagagcccggacttcactatctggaatgggtgcaggaggagctgcaggcactccccactgtcgtggaggggttcatgtcgtacgcctccctggtcacctgcgagggggcgatgaacgcgctctcccgcgaagggtgccggcacttcgaggtcttcgaccaggccgatgatgattttgagcgagatatctacaaggttgaagaccccgtagtgaaggaatccgccggggccatctacgaccggatgtggggtccgcatggtcgcgaggtggtcagggagcgggccacgacggcgagggctcaggcggcgcgtggcgagcgggtggacgacttcggagcgttgaacaacgcgctggctgacccagagccgaccccggctgtgacaatgagattgatggttctgattacgattatggtattgatggctcgacttagacacactgcacgaaagtccgtcatccccttcttaccctcccgccttgctaagcgtccgcttcgccgtcccgtggccggacagtccagccacttggagagactacaccaccgcctgcgtgaggagcaggaacgtcgacgacaggagcagcagagctcttctttctcgctccaccaggagatagagtctgtgaggagctgctctcctgtgcttcctctggaggcgccccctgcaccaccactgggcgccccagcttctggagtagctgctggaggagacccagacgacggagatggcgacgacagctcgagccacgacaccgacttctctgctaaccctgagccggaaggatgggttgctcgacccatcactcgcgacgctgctcgcgggtgtcacttccatgatgcgctcgacaccctgctacgtcgggcatttgaccggcatacttggtccgttgagtatcgctgtgtggtctaccagcatagtcgcggggtctacccggaccgctgggaggcgacttgcttggtgcgctgcccggaggacagtctccagggtgcagaggcctgctcagagcactattctatctctgaacgggactcagctgaggcagccatgcaagatgctgcacggcgtgcgctttcgcactactgctcggttttcggtggggcagctgacggtcttgacctgaagtattacccccgccgtccatctggcagcacaggaggcgtgattgtctcacctgtcggtgagggcaatcctaggttgagcagcacagtcaacctagccgccgtgctaaacacggagctggaccatgcattagacgagctgagtagggctcgtgctgagatcgccctgctgcgggctgagcgcgggaacgtcgtcatctggatgatgtcagagaacaggcgtagaggaggaaggcgtgctcagcaggagcgagccgctcaacaggaggaggtgccccagcagcagctgccacccccgcccccgatgtcgatcgagcagatgtttctgatgcagactcagtcagttcaggccatcggtcagactctggccgccattcagcagcagcagcagcagcaacagcagcaagcaccaccccagcctcagatgcctcagatgcccagagacaagcgtgctgaattcatgagaggtcatcccccaacgttcgctcactcttctgaccccatggatgctgaagattggctgcgcaatgtggagcgggagttgcataccgctcagtgtgatgacagggagaaagtcttgtatggtccccgtctgttgagaggagcagcccaatcatggtgggagtcttacctcgccacccatgccaaccccgacaccatcacctgggaagaattcagaggtagctttcgtcagtaccacgtgcctgcaggtctgatgacagtgaagaaggaggagttcctggcccttaagcaagggtcatcatctgtcagtgagtatcgagacaggtttctgcaattgtctcgctatgctcctgaggatgtcaacactgacgccaagcgacaataccgttttctgagaggcttggtcgaccccctgcagtatcaactgatgaatcacaccttcccgacattccagcacctgattgatagagcgatcatgacagaaaggaagcgtaaggagatggaagatcgtaagcgcaagatcagtggaccccagcctggaagcagcagccgccctcgtttttcaggcaatcaacctcagcagttcaggcagaaccagcgtccacctcagcagcgtcagcagcatcagcagttccaaaggcagtatcctcagcatcagtaccagaaccgtcagagcaatcagtcaggaggtcagtttcaaaggcagaatcagcaagcaccccgtcttcctgccccagcaaaccagcagaacagtcaggcagcaccagctcaggttggaaacagggcatgtttccactgtggagagcagggccattgggtgatgcaatgtccgaagaaggcagcccagcagcagtcaggccccaatgccccagcaaagcagaatgtgtctcagcctggagcaggcaaccgccctcaacagcgctataatcatggaagattgaatcacttggaggctgaagcagttcaggagacccccggcatgatagtaggtatgttcccagtcgactcccatattgcagaagtgttatttgatactggagcaacgcattctttcattactgcatcatgggtagaagcacataatcttccaactactaccatgtcaacccccattcaaattgactcagctggtggtagaattcgagctgatagcatttgtttaaatataagtgtggaaataagggggatagcgtttcccgccaaccttatagtaatgggtactcagggaatagatgtcatcctagggatgaattggttagataagtatcaggcagttatcagttgtgataaaaggacaatcaagttggtgtccccactaggaaaggaagtggtgaccgagttagtcccacctgagccgaagaaaggaagttgttatcagatggctgtcgatagcagtgaagcagatccaattgagagtatcaaggttgtgtctgaattcccagatgtgtttccaaaggatttaccgggtatgccaccagagcggaaagttgagtttgccatagagcttcttcctggaaccgcccccatctttaagagagcttacagaatatctggaccagagttggttgagcttaagaagcagattgatgagctgtcagagaaaggttacattcggccaagcacctcgccttgggccgcccctgtcttatttgtggaaaagaaagatggcaccaagaggatgtgcatcgattatcgagctttgaatgaggtcacgatcaagaacaagtatcccttgcccagaatagaagatctgttcgaccagttgagaggagccagtgtgttctccaagattgatctgaggtcaggttatcatcagctcaggatccgaccttcggacattccgaagacggcattcattaccaagtatggtttgtatgagttcacagtgatgtcttttggtttgaccaatgcaccagcgttcttcatgaatctgatgaacagtgtattcatggattaccttgataagtttgtggtggtattcattgatgacattctgatttattcccaaagcgaagaagagcacgcagatcatttgaggatggtattgcagagattgcgagagcaccagttgtacgcaaagttgagcaagtgtgagttctggatcaacgaagtcctgttcttgggtcacataatcaacaaggaaggattggctgtggatccgaagaaagtggcagacattctgaactggaaagcgccaacggatgctcgaggaatcaagagcttcattggaatggccggatactatcggcgattcattgaagggttttcgaagattgcgaagccaatgacagcgttgctaggcaacaaggttgagttcaaatggacccagaaatgtcaagaggcctttgaagcgctgaaagagaagttgactacatcgcctgtcctaatcttgcctgatgtgcacaagcccttctcggtgtattgtgatgcttgttacacaggtttgggatgtgtgttgatgcaagagggaagagttgtggcttacacgtctcgacagttgaaggttcatgagaagaactacccaatccatgatctagagttggcagcagtggttcacgcactgaagacatggaggcactatctgtatggacagaaatgcgatgtttacacagaccacaagagtctgaaatacatattcactcagtcagagttgaacatgaggcagcgaagatggttagagttgatcaaagactatgagttggagattcattaccatccaggcaaagcaaacgtagtggcagatgctttgagcagaaagagtcaagtcaatctgatggtcgctcgtccgatgccttatgagttggccaaagagtttgacaggttgagtctcggatttctgaacaattcgcgaggagttacagttgagttggaacctaccttggagcgcgaaatcaaagaagcgcagaagaatgatgagaaaatcagtgagatccggcgactgattctagatggcagaggcaaagattttcgagaagatgctgaaggcgtgatatggttcaaagaccgcttatgtgttcccaatgtccagtctattcgagagttgatcctcaaggaagctcatgagacagcctattcgattcaccctggtagtgagaagatgtatcaggatctgaagaagaaattctggtggtacggaatgaagagggaaatcgcagagcatgtggctaagtgcgatagttgtcgaagaattaaggcagagcaccagagaccagctggattgttgcaaccgttgcagatccctcagtggaaatgggatgaaattggtatggatttcatagtcggattgcctcgcactcgagccggctacgattctatttgggtagtggtggaccgtttgaccaagtcagcccacttcatacctgtcaagaccagctacaacagtgcagtattggcagagttgtatatgtctcggatcgtttgtcttcatggtgtgccaaagaagatagtgtcagacagaggaacgcagttcacctctcatttctggcagcagttgcatgaagccttgggcacacatctgaatttcagttcagcttatcacccgcagacagatggccagactgaaaggaccaatcaaattctcgaagatatgttgagagcctgtgcgttgcaagatcagtccggatgggacaagcggttgccttatgcagagttttcctataacaacagttaccaggccagtttgaagatgtcaccgtttcaggcgctttatggaaggagttgtagaactccgttgcaatgggatcagcctggagagaagcaagtgtttgggccagacattctgcttgaagccgaagagaacatcaagatggtccgagagaatctgaagatagcgcaatcgaggcagcgaagctatgcagacacaagaagaagagagctgagttttgaagtcggagattttgtctatctgaaagtgtcaccgatcagaggagtcagaagatttggagtgaaaggcaagctagcaccccgctacattggtccgtaccagatcctctcaaagcgtggagaagtggcttatcagctcagcctgccagagaatttgtctgctgtgcatgatgtctttcatgtgtctcagttgaagaagtgcttgcgtgtgccagaagagcagttgccagtggaaggtcttgaggtccaggaggacttgacctatgttgagaagccagctcagatccttgagattgcagacagagtcacccgaaggaagaccatcagaatgtgcaaagtcagatggaatcaccactctgaggaagaagcaacctgggagcgtgaagatgatctagtggccaagtacccagagctctttgctagccagccctga

SEQ ID NO: 5044 - DNA, 5400 bp, Zea mays
  Clone ID: TF_ZmC3792_12
atgagggttgtccacattgcaaccactgctcaggagaaggcgaagtcgtggaaggagacttccaggagttccaagactacgacgaattttagatggctcgtcttagacacactgcacctggaggcgccccctgcaccaccgcgggacgtcccggctgttggaggagctactggaggagatcccgacgacaacgactcagaccacagtacggagtcctctgagccgcaggaggcggaaggatgggtcgcccgacccatcacccgtgacgccgctcgcggttgtcacttccacgacgcactcgacaccttgctgcgccaggctttcgaccagcacacctggtcgatcgagtatcgttgtgtagtctaccagcacagtcgcgggaggtacccggaccgctgggaggctacctgcctagttcgccgtccggaggatgacctccggggtgcggaggccgtctcggagcactactccatctccgagagggacactgcggaggcggctatgcaggatgcagcacggcgtgcactctcccagtactgttctctgttcggtggcgtggccgatggtcttaaccttcggtactacccccgccgccctactggcagcacagagagtgtggttgtctcacccgttggtgaggctaaccctaggttgagcagcacagtcaacctagtcgcagtgcttaacactgagctggaccactctctggacgagctaagcagggctcgaacggagattgcggggttgcgtgctgagctggcagagcgccatcaccaggagggtggttctcccgctcctgttgggactcagcacccataccgctcgccgccacgtggatcaatgctgatgtatgaatgtcttccacagatgtctgacaacaggcgccgatgcaacaggcgtgctcagcaagagcagcatgaccagcaggaggaacaacagaggcaacctcccccaccacccccgatgtcagtggagcagatgttcttgatgcagactcaggcagtgcaggccattgggcagactctggcagccatgcagcaggctcaacagcaaccccaaccccaattgcaagtgcagatgccccagatgccacgggataagcgtggtgagttcatgagagggcaccctcctaccttcgcccattctgctgaccccatggatgcagaagactggctgcgcgcagtggaaagggaactgcgcaccgcccaatgtgacgacagggagaaggttctgtatggtccccgtcagctaaggggagcagcccagtcctggtgggagtcctacctcgccacccatgctaacctcgaagccatcacgtgggaagaattcagcgagagcttccgcaggtaccatgtgccggagggactgatgatcgtgaagaaggaggagtttctggctctgaagcagggacccctgtctgttagtgagtacagagacaagtttctgcagctgtctcgttatgcacctgaagacgtcaacactgatgctaaaaggcagtacaggttcatgagaggtttggtggatcccctgcattaccagctgatgaatcacaccttccccaccttccagcacctgatcgacagggcagttatgaccgagaagaagcgtaaggacatggaagatcggaagcgcaagatgagtggacaccagtccggaggcatcagccgtccacatttctcgggcagttcgtctcagcaaggcaggcctggtcacccacagggataccagaatcagaatcagcgtccgcatcagcagcagtttcagaggcagtacccgcagcagcagcagcagtatcgtcagcacagccagcagggaggtaatcagtatcagaagcagaacaaccaggcacctcgccttcctgccccaacagcgaatcagagcaaccaagcagccccagcacaaggaggaggcagaggatgtttccactgtggagaacaaggccactgggcgatgcagtgcccaaagaagttggcgcagcagcagaccaaccccaatgctccaacaaggcaaggtgtactgcagccggcagcaggcaatcgtaaccaagcgtacaaccgtggaaaggtgaaccacttggaggccgaagcaatccaggatgcaccagatgtggcagtaggtatgttttcagtcgaatctcatcccgcgaaagtgttatttgatactggtgcaactcattcatttgtcactgcaacatgggtagaattgcataacatctcagtagaggcaatgatgccgcccatgaggattaattcggtcggtggcaaggtgcaaacagataaaatatgctcaaatataatggtggaaataagggggataggattccccagtgacttaatggtaatagacacccctgggatagacattattttagggatgaattggttaatgaagtatgaggcgaatgttagttgtgacaagaggaccgtaacattgaagtccccgtcaggagaagaggtagtggccgagctatggatgcctaaatcagaagagggagtttgtcaccagatttcagttagtagtaaggagcctaacccgctcgaggctatcaaggttgtgtcagactttccggatgtgtttcccgaggagctaacgggcatgccacccgagagaaaggttgaatttgccatagagcttatccctggtaccgcccccatttcaaaaagggcctatcgagtgtctggaccagaactggtagaactcaagaagcagatagatgagatgttagagaagggttacatcaggccaagcacctcgccttgggccgctccagtgttgtttgtagagaagaaagatggtaccaaaaggatgtgcatagattacagagccctgaacgaagtcactattaagaacaagtaccctttgccaagaatagaagatctgtttgaccaactcagaggtgccagtgtattctcgaagatagatctgagatcaggttaccatcaactcagaatccgaccctcggacataccgaagacagcattcatcaccaagtacgggttatatgagttcacagttatgtcctttggtttgacaaatgcaccagccttctttatgtatctgatgaacagtgtgttcatggattatctagacaagtttgtggtagtgttcatcgatgacattctcatatactctcaaagtgaggaagatcatgcagagcatttgaagatggtactgcaaaggcttcgagagcatcaattgtatgccaagttgggcaaatgcgagttctggattcatgaagtcttgtttctgggtcacatcataaatcaagatgggttagcagtggatccaaagaaagtagcagatatcctgaactggaaagcaccgaaggatgttcgcgggatcaagagcttcattggaatggctggatattacaggcgtttcatcgaaggcttttcaaagattgctagaccaatgacagcgttactggcgaagaaagttgagtttaagtggacccaaaagtgtcaggaagcatttgaagaactgaagagtagattgactacagctcctgtgttagtcctgcctgatgttcacaagccattttcagtgtattgcgatgcttcttacaccggattgggatgtgtgctaatgcaagaaggaagagttgtagcatactcatctcgacagttgaagatccatgagaaaaattatcccacacatgacctggagttggcagcagtgaaatgcgacatctacacagatcataaaagtctgaagtacatattcacccagtcagagttaaacatgaggcagcgaagatggttggaattgatcaaagactatgagttggagatacattaccatccaggcaaagccaatgttgttgcagatgctctgagcaggaagagtcaagttaatatgttggcatcgtacccgatgccgtatgagttagccaaagagttcgacagactgagccttggtttcctaaacagtacgcaaggagtaacggtggagttagagcccaccctagagtgggagatcaaagaagggcagaaggatgatgaaaacatcaacaagattcggcagctgatcttagaaggaagaggcaaagactttcgagaggatgaagagggagtaatatggttcaaggaccgattgtgtgttcccgacctcaaacctattcgggagctgatcctaaaggaagctcatgagacagcctactccatacacccgggaagcgaaaagatgtaccaggatttaaaaaggaggttttggtggtatggcatgaaaagagagatcgcagaatatgtcgccatctgtgatagttgtcagagaaccaaagcagagcatcagaggcctgccggattgttgcagccattgcggattcctcagtggaagtgggatgagatcgggatggattttatagttggcctacctcgtacccgggccggttatgattccatctgggtggttgtggaccgcttaacaaaggtggcccatttcatacctgtgaagacaacatacaccggagcaacgttagctgagttatacatgtcgcggatagtctgccttcatggtgtgccgaagaagatagtgtcagatcgaggaacgcagttcacatctcatttttggcagcagctacaagaagctttgggcacccatttgaacttcagctcagcttatcacccgcatacagacggtcagactgaaagaactaatcagatcctagaagatatgttgagagcctgtgcgttgcaagacaagtcaggatgggacaaaagattaccttatgcagaattctcctacaacaatagttaccaggccagcttgaagatgtcaccgtttcaggcactctatggacggagttgtaggactccgctgcattgggaccagcctggagagagacaggtgtttggccccgacattttgcttgaagccgaagagaatatcaaaatggttcgggagaacctgaagatagcacagtcaagacaacgaagctatgcggaccgcaggagaagagaactgagttttgaagtgggagactacgtctatctgaaggtgtcacctatcaggggagtcagaaggttcggagtcaaaggcaagttagcaccccggtacgttggaccatatcagattcaagcaaagcgtggagaagtggcctaccagctcaacctaccagagagcttgtcagcagtgcacaatgtgttccacgtgtcgcaattgaagaaatgtctgcgagtaccagaagagcagttgccagtggagggtttggaagttcaggaagatctgacctacatagagaagccaacgcagattttggagtttgcagacagggtcacccggagaaacaccatcagaatgtgcaaagtcaggtggggtcaccactctgaggaagaagcaacctgggaacgagaagatgatctgaaagccaaataccccgaactctttgctgaccaaccctga

SEQ ID NO: 5045 - DNA, 6056 bp, Zea mays
  Clone ID: TF_ZmC3792_3
caagaccacattaggcatcgctggagttcgatgtcgcccgccaggcggagtcgattcaggatttggagacgttggtggttgggattccccttcctttgttatgagtggagatagatacccagatggtcgctaccttcgagcgctaggaggccgtggaggccacggcggcaacgcgcgtcagcgcgctcgaagcctcgaatcgaccattgcggccttcgagtcatggtgttcgcacgtcgaggcgacgaaggaagacgtcaaggcttccgtcgaccgcctacgtggggttctcgcccgattctccacgctcagtattcatgtggctcctcctcccttcgaccgcgatgcgggcatcctcggtccttttccaccggccacggagtgccctcctgctaccgtctttccggttgatggacctgatgggaaccgcatggacttcaaatgtcgagagtatggctttgggcatgtttttgctcaaacccatctcacgcctaacgatggctcgtcttagacacactgcacgtaagtcggtgattcctttcctgccgtctcgacttgcggagcgtcctctgcaccgcaccgtgtccggacagtcgagtcacctggagaggctgcaccaccgcctgcgtgaggagcaggaacgccggcgccagcacggagagcagcagggctcttcctcctcaccccagcaggaggtggagaccgtgaggccccgttcctctgttgcccagctggaggcgccccttgttccaccgcgggacgtcccggctgttggaggagctactgaaggagccactggaggagatcccgacgacgacgactcagaccacagcacggagtcctctgagccgcaggaggcggaaggatgggtcgcccgacccatcacccgtgacgccgctcgcggttgtcacttccacgacgcactcgacaccttgctgcgccaggctttcgaccggcacacctggtcgatcgagtatcgttgtgtagtctaccagcacagtcgcgggaggtacccggaccgctgggaggctacctgcctagttcgccgtccggaggatgacctccggggtgcggaggccgtttcggagcactattccatctccgagagggacactgcagaggcggctatgcaggatgcagcacgacgtgcactctctcagtactgttctttgttcgatggcgtggccgacggtcttaaccttcggtactacccccgccgccctactggcagcacagagagtgtggttgtttcacctgttggtgaggctaaccctaggttgagcagcacagtcaacctagtcgcagtgcttaacactgagctggatcactctctggacgagctaagcagggctcgaacggagattgcggagttgcgtgctgagttggcagagcgccatcaccaggagggtggttctcccgctcctgttgggactcagcacccataccgctccccgccacgtggtcaccacacttatggttcccctatgtctgacaacaggcgccgatgcaacaggcgtgctcagctagagcagcatgaccagcaggaggaaaatcagaggcagcctcccccgccacccccgatgtcagtggagcagatgttcttgatgcagacccaggcagtgcaggccattgggcagactctggcagccatgcagcaggctcaacagcaaccccaaccccaattgcaagtgcagatgccccagatgccacgagataggcgtggtgagttcatgagagggcatcctcctaccttcgcccattctgctgaccccatggatgcagaagactggttgcgcgcagtggagagggaactgcgcaccgcccaatgtgatgacagggagaaggttctgtatggtccccgccagctgaggggagcagcccagtcctggtgggagtcctacctcgccacccatgctaaccccgaagccatcacctgggaggaattcagcgagagtttccgtcggtaccatgtgccagagggactgatgatcgtaaagaaggaggagtttctggccctgaagcagggacccctgtctgttagtgagtacagagacaagtttctgcagctgtctcgttacgcacccgaggatgtcaacactgatgccaagaggcagtacaggttcatgagaggtttggtggatcccctgcattaccagctgatgaaccacaccttccccaccttccagcacttgatcgatagggcagttatgactgagaagaagcgtaaggatatggaagatcggaagcgcaagatgagtggaccccagtccggaggcatcagccgtccgcgtttctcaggcagttcatctcagcaaggcagacctggtcacccgcagggatatcagaatcagaatcagcgtccgcatcagcagcagtttcagaggcagtatccacagcagcagcagtatcgtcagcacagccagcagggaggtaatcagtatcagaagcagaacaaccaggcacctcgccttcctgccccagcagcgaatcagagcaaccaagcagccccagcacaaggaggaggcagaggatgtttccactgtggagaacaaggccactgggcgatgcagtgcccaaagaagatggctcagcagcagaccaaccccaatgctccaacaaggcaaggtgtactgcagccggcagcaggcaatcgtaaccaagcatacaaccgcggaaaggtgaaccacttggaggccgaagcaatccaggatgcatcagatgtggcagtaggtatgttttcaatcgaatctcatcccgcgaaagtgttatttgatactggtgcaactcattcttttgtcactgcaacatgggtagaattgcatagcatctcagtagaggcaatgatgccacccatgaggattaattcggttggtggcaaggtgcaaacagataaaatatgctcaaatataatggtggaaataagggggataggattccccagtgacttaatagtaataggcacccctgggatagacattattttagggatgaattggttaatgaagtatgaggcaaatgttagttgtgacaagaggaccataacattgaaatccccgtcaggagaagaggtagtggccgagctaaggatgcctaagtcagaagagggagcctgtcatcagatttcagttgatagtaaggagcctaacccgctcgaggctatcaaggtcgtgtcagactttccggatgtgtttcccgaggagctaacgggcatgccacccgagagaaaggttgaatttgccatagagcttatccctggtaccgcccccatttcaaaaagagcctatcgagtgtctggaccagaattggtggaactcaagaagcagatagatgagatgttagagaagggttacatcaggccaagcacctcgccttgggccgctccagtgttgtttgtagagaagaaagatggtaccaaaaggatgtgcatagactacagagccttgaatgaagtcactgtcaagaacaagtaccccctgccaaggatagaagatttgttcgaccagctcagaggtgccagcgaattctcgaagatagatctgagatcaggttaccatcaactcagaatccgaccctcggatataccgaagacggcattcatcaccaagtacgggttatatgagttcacggttatgtcctttggtttgacaaatgcgccagccttctttatgtacctgatgaacagcgtgttcatggattatctggacaagtttgtggtagtgttcatcgatgacattctcatatactctcaaagtgaggaagatcatgtggagcatttgaagatggtattgcaaaggcttcgagagcatcagttgtacgccaagctgggcaaatgcgagttctggattcatgaagtcttgtttctgggtcacatcataaaccaagagggattggcagtggatccaaagaaagtagcagatatcctgaactggaaagcaccgaaggatgttcgtgggatcaagagcttcattggaatggctggatattataggcgtttcattgaaggtttctcgaagattgctagaccaatgacagcgttgctagcgaagaaagttgagtttaagtggacccaaaagtgtcaggaagcatttgaagaactgaagaatagattgactacagctcctgtgctagtcctgcctgatgttcacaagtcattctcagtgtattgcgacgcttcgtacaccggattgggatgtgtactgatgcaagaagggagagttgtagcatactcatctcgacagctgaagatccatgagaagaattaccccacacatgacctggaactggcagcagtggttcatgctttgaagacctggagacattacctgtatgggcagaagtgcgacatctacacagatcataagagtctgaagtacatattcacccagtcagaactaaacatgaggcagcgaagatggttggaactgatcaaagactatgagttggagatacattaccatccgggcaaagccaatgttgttgcagatgctttgagcaggaaaagtcaagtcaatatgttggcctcgcacccaatgccgtatgagttagccaaggagtttgacagactgagcctcggtttcctgaacagtacgcaaggagtgacggtggaattagagcccaccctagagcgggagatcaaagaaggacagaaggatgatgaaaacatcaacaagatccggcagctgatcctagaaggaagaggcaaagactttcgagaggatgaagaaagagtaatctggttcaaggaccgattgtgtgttcccgacctcaaacctattcgggaattaatccttaaggaagctcatgagacagcctactccatacacccagggagtgagaagatgtaccaggatttaaaaaggaggttttggtggtatggtatgaaaagggagatcgcagaatatgtcgccatctgtgatagctgtcagagaaccaaagcagagcatcagaggcctgccggactgttgcagcctttgcggattcctcagtggaagtgggatgaaatcgggatggatttcatagttggcctacctcgtacccgggccggctacgattccatctgggtggttgtggaccgcttaacaaaggtggcccacttcatacctgtgaagacaacatacaccggagcaacgttagctgagttatacatgtcacgaatagtctgccttcatggtgtgccgaagaagatagtgtcagatcgaggaacgcagttcacatctcatttttggcagcagctacaagaagctttgggcacccatttgaacttcagctcagcttatcacccgcagacagacggccagactgaaagaactaaccagatcctagaagatatgttgagagcctgtgcgttgcaagacaagtcaggatgggataaaaggttaccttatgcagaattctcctacaacaatagttaccaggccagcttgaagatgtcaccgtttcaggcactctatgggcggagttgtaggacttcgctgcactgggaccagcctggagagagacaggtgtttggccccgacatcttgcttgaagccgaagagaatatcagaatggttcgggagaacctgaagacagcccagtcaaggcagcgaagctatgcggacagaaggagaagggaactgagttttgaagtgggagactacgtctatctgaaggtgtcacctatcaggggagtcagaaggttcggagtcaaaggcaagctagcaccccggtacgtcggaccatatcagattcaagccaagcgtggagaagtggcctaccagctcgacctaccagagagtttgtcagcagtgcacaatgtgtttcatgtgtcacaattgaaaaagtgtctgcgagtaccagaagaacagttaccagtggaaggtttggaagtccaggaagatctgacatacatagagaagccaacgcagattctggagtgtgcagacagagtcacccggaggaataccatcagaatgtgcaaagtcagatggggtcaccactctgaggaagaagcaacctgggaacgagaagatgatctaaaagccaaataccctgaactctttgctgaccaaccttga

SEQ ID NO: 5046 - DNA, 4287 bp, Zea mays
  Clone ID: TF_ZM3670.C6.o1.fg
atgaccgtggagcagatgttcttgatgcagactcaggcagtgcaggctattgggcagactctggcagccatgcagcaggctcaacagcaacctcaaccccagatgcaggtgcagatgccccagatgccacgagataagcatggcgagttcatgagagggcaccctcctaccttcgcccattctgctgaccccatggatgcagaagactggctgcgcgcagtggaaagggaactgcgcaccgcccaatgtgacgacagggagaaggttctgtatggtccccgccagctaaggggagcagcacagtcctggtgggagtcctacctcgccacacatgctgaccccgaagccatcacctgggaagagttcagcgagagtttccgtaggtaccatgtgccagagggactgatgatcgtgaagaaggaggagtttctggctctgaagcagggacccctgtctctgatgaatcacaccttccccaccttccagcacctgatcgatagggcagttatgactgagaagaagcgtaaggatatggaagatcggaagcgcaagatgagtggaccccagtccggaagcatcagccgtccccgcttctcaggcagttcatctcagcaaggcaggcctggtcacccacagggatatcagcatcagattcagcgtccgcatcagcagcagtttcagaggcagtacccacaacagcagcagtatcgtcagaacagccagcagggaggtaatcagtatcagaagcagaacaaccaggcaccttgccttcctgcccccgcagcaaatcagaacaaccaagcagccccagcacaaggaggaggcaggggatgtttccactgtggagaacaaggccactgggcgatgcagtgcccaaagaagatgacgcagcaacagaccaaccccaatgctccaacaaggcaaggtgtactgcagcaggcagcaggcaatcgtggccaagcgtacaaccgtggaaaggtgaaccacttggaggccgaagcaatccaggatgcaccagatgtggcagtaggtatgttctcagtcgaatctcattccgcaaaagtgctatttgatactggtgcaacccattcatttgtcactgcaacatgggtagaaatgcataacatctcagtagaggcaatgatgccgcccatgaggattaattcggttggtggcaaggtgcaaacagataaaatatgctcaaatataagggtggaaataagggggatagggttccccagtgacctaatagtaatagacacccctgggatagatgtcatcctagggatgaattggttaatgaaatatgaagcgaatgttagctgtgacaagaggaccgtaacattgaagtccccgtccggagaggaggtagtggctgagctaaagatgcctaaatcagcggagggagtttgtcaccagatttcagttgatagtaaggagaccaacccgctcgaggctatcaaggttgtgtcggactttccggatgtgtttcccgaggagctaacgggcatgccacccgagagaaaagtcgaatttgccatagagcttatccctggtaccgcccccatttccaaaagagcctatcgggtgtctggaccagaattggtggaactcaagaagcagatatatgagatgttagagaagggttacatcagaccaagcacctcgccttgggccgctccagtattgtttgtagagaagaaagatggtaccaaaaggatgtgcatagattacagagccctgaacgaagtcactgttaagaacaagtaccccctgccaagaatagaagatctgtttgaccagctcagaggtgccagcgtattctcgaagatagatctgagatcaggttaccatcaactcagaatccgaccctcggacataccgaagacaacattcatcaccaagtatgtgttatatgagttcacagttatgtcctttggtttgacaaatgcgccagccttctttatgtatctgatgaacagcgtgttcatggactatctagacaagtttgtggtagtgttcatcgatgatattctcatatactctcaaagtgaggaagatcatgtggagcatttgaagatggtattgcaaaggcttcgagagcatctgttgtatgccaagctgagcaaatgcgagttctggattcatgaagtcttgtttctgggtcacatcataaaccaagatgggttagcagtggatccaaagaaggtagcagatatcctgaactggaaagcaccgaaggatgttcgtgggatcaagagcttcattggaatggccggatactataggcgcttcattgaaggcttttcaaagattgctagaccaatgacagcgttactagcgaagaaagttgagtttaagtggacccaaaagtgtcaagaagcatttgaagaactgaaaaatagattgactacatcacctgtgttagttctgcctgatgttcacaagccattctcggtgtactgcgatgcttcttacaccggattgggatgtgtgctaatgcaagaaggaagagttgtagcatactcatctcgacagctgaagatccatgagaaaaattaccccacacacgacctggagttggcagcagtggttcatgcgttaaagacatggagacattacctgtatgggcagaagtgcgacatctacacagatcataaaagtctgaagtacatattcacccagtcagagttaaacatgaggcagcgaagatggttggaatttatcaaagactatgagttggaaatacattaccatccaggcaaagccaatgtggttgcagatgctctaagcaggaagagtcaagttaatatgatggccacacacccaatgtcatatgagttagccaaggagttcgacagactgagcctcggttttctgaatagtacgcaaggagtaacagtggaattagagcccaccctagagcgggagatcaaagaagggcagaaggatgatgaaaacatcaacaagatccggcagctgatcttagaaggaagaggcaaagactttcgagaggatgaagagggagtgatatggttcaaggaccgattgtgtgttcccgacctcaaacctattcgggagctgatcctcaaggaagctcatgagatagcctattccatacaccctggaagtgagaagatgtatcaggatttaaaaaggaggttttggtggtatggcatgaaaagagagatcgcagaatatgtcgccatctgtgatagctgtcaaagaaccaaagcagagcatcagaggcccgccggattgttgcagccattgcggattcctcagtggaagtgggatgagatcaggatggattttatagttggcctacctcgtacccgggccggctatgattccatctgggtggtcgtggaccgcttaacaaaggtggcccatttcatacccgtgaagacaacatacaccggagcaacgttagctgagttatacatgtctcggatagtctgccttcatggtgtgccgaagaagatagtgtcagatcgaggaacacagttcacctctcatttttggcagcagctacaagaagctttgggcacacatttgaacttcagctcggcttatcacccacagacggacggtcagactgagagaaccaatcagatcctagaagatatgctgagagcctgtgcgttgcaagacaagtcaggatgggacaaaaggttaccttatgcagaattctcctacaataatagttaccagaccagcttgaagatgtcgccgtttcaggcactctacggacggagttccgaagagaatatcaaaatggttcgggagaatctgaagatagcacaatcaagacagcgaagctatgctgaccgaaggagaagagaactgagttttgaagtgggagattacgtctatctgaaggtgtcacctatcaggggagtcagaaggttcggagttaaaggcaagttagcaccccggtacgttggaccatatcagattcaagcaaagcgtggagaagtggcctatcaactcaacctaccagaaagtttgtcagcagtgcacaatgtgttccacgtgtcgcaattgaagaagtgtctgcgagtaccagaagaacagttgcccgtggaggacttggaagtccaagaggatctgacctacgtagagaagccaacgcagattttggagtttgcagacagagtcacccgaagaaacaccatcagaatgtgcaaagtcagatggggccaccactctgaggaagaagcaacctgggaacgagaagatgatctgaaggccaaataccctgaactctttgctgaccaaccttga

SEQ ID NO: 5047 - DNA, 5505 bp, Zea mays
  Clone ID: TF_ZM4694.C3.o5.fg
atggctcgtcttagacacactgcacgtaagtcggtgattcctttcctgccgtctcgacttgcggagcgtcctctgcaccgcaccgtgtccggtcagtcgagtcacctggagaggctgcaccaccgcctgcgtgaggagcaggaacaccggcgccagcacagagagcagcagggctcttcctccccaccccagcgagaggtggagtctgtgaggccccgttcctctgtggcccagctggaggcgccccctgctccaccgcgggacgccccggctgttggaggagctactggaggagaccccgacgacgacgactcagaccacagcacggagtcctctgagccacaggaggcggaaggatgggtcgcccgacccatcacccgtgacgccgctcgcggttgtcacttccacgacgcactcgacaccttgctgcgccaggctttcgaccggcacacctggtcgatcgagtatcgttgtgtagtctaccagcacagtcgcgggaggtacccggaccgctgggaggctaccttcctagttcgccgtccggaggatgacctccggggtgcggaggtcgtttcggagcactattccatctccgagagggacactgcagaggcggctatgcaggatgcagcacggcgtgcactctcccagtactgttctttgttcggtggcgtggccgacggtcttaaccttcggtactacccccgccgccctactggcagcaccgagagtgtggttgtctcacctgttggtgagggtaaccctaggttgagcagcacagtcaacctagtcgcagtgcttaacactgagctggaccactctctggacgagctaagcagggctcgaacggagattgcggagttgcgtgctgagttggcagagcgccatcaccaggagggtggttctcccgctcctgttgggactcagcacccataccgctcaccgccacgtggtcatcacacttatggttcccctgtctgcgccgatgcaacaggcgtgctcagcaagagcagcatgaccagcaggaggaacaacagaggcagcctcccccaccaccccccgatgtcagtggagcagatgttcttgatgcagacccaggcagtgcaggccattgggcagactctggcagccatgcagcaggctcaacagcaaccccaaccccaattgcaagtgcagatgccccagatgccacgagataagcgtggtgagttcatgagagggcaccctcctaccttcgcccattctgccgaccccatggatgcagaagactggctgcgcgcagtggaaagggagctgcgcaccgcccaatgtgacgacagggagaaggttctgtatggcccccgtcagctgaggggagcagcccagtcctggtgggagtcctacctcgccacccatgctgaccctgaagccatcacgtgggaggaattcagcgagagtttccgcagataccatgtgccagagggactgatgatcgtgaagaaggaggagtttctggctctgaagcagggacccctatctgttagtgagtacagagacaagtttctgcagctgtctcgttacgcacctgaggatgtcaacactgatgccaagaggcagtataggttcatgagaggtttggtggatcccctgcattaccagctgatgaatcacaccttccccaccttccagcacctgattgatagggcagttatgactgagaagaagcgtaaggatatggaagatcggaagcgcaagatgagtggaccccagtccggaggcaccagccgtccacgtttctcaggcagttcgcctcagcaaggcaggcctggtcacccacagggatatcagaatcagaatcagcgtccgcatcagcagcagtttcagaggcagtacccacagcagcagcagcagtatcgtcagcacagccagcagggaggtaatcagtatcagaagcaaaacaaccaggcacatcgccttcctgccccagcagcaaatcagagcaaccaagcaaccccagcacaaggaggaggcagaggatgtttccactgtggagaacaaggccactgggcgatgcagtgcccaaagaagatggcgcagcagcagaccaaccccaatgctccaacaaggcaaggtgtactgcagccggcagcaggcaatcgtaaccaagcgtacaaccgtggaaaggtgaaccacttggaggccgaagcaatccaggatgcaccagatgtggcagtaggtatgttctcagtcgaatctcatcccgcaaaagtgctatttgatactggtgcaactcattcatttgtcactgcaacctgggtagaattgcataatatttcagtagaggcaatgatgccgcccatgaggattaattcggttggtggcaaggtgcaaacagataaaatatgttcaaatataatggtggaaataagggggataggattccccagtgacttaatagtaatagacacccctgggatagatgttattctagggatgaactggttaatgaagtatgaagcaaatgttagttgtgacaagaggaccgtaacattgaagtccccgtcaggagaaggggtagtggccgagctaaggatgcctaagtcagaagagggagtctgtcaccagatttcagttgatagtaaagagcccaacccgctcaaggctatcaaggttgtgtcggactttccggatgtgtttcccgaggagctaacgggcatgccacccgagagaaaggttgaatttgccatagagcttatccctggtaccgcccccatttccaaaagagcctatcgagtgtctggacccgaattggtggaactcaagaagcagatagatgagatgttagagaagggttacatcaggccaagtacctcgccttgggccgctccagtgttgtttgtagagaagaaagatggtaccaaaaggatgtgcatagactacagagccttgaatgaagtcactgtcaagaacaagtaccccctgtcaaggatagaagatttgttcgaccagctcagaggtgccagcgtattctcgaagatagatctgagatcaggttaccatcagctcagaatccgaccctcagatataccgaagacggcattcatcaccaagtatgggttatatgagttcacagttttgtcctttggtttgacaaatgcaccagccttatttatgtacctgatgaacagtgtgttcatggactatctagacaagtttgtggtagtgttcatcgatgacattctcatatactctcaaagtgaggaagatcatgtagagcatttgaagatggtattgcaaaggcttcgagagcatcaattgtatgccaagctgggcaaatgcgagttctggattcatgaagtcttatttctgggtcacatcataaatcaagatgggttagcagtggatccaaagaaagtagcagatatcctgaactggaaagcaccgaaggatgttcgtgggatcaagagcttcattggaatggctggatactataggcgtttcattgaaggcttctcaaagattgctagaccaatgacagcgttgctagcgaagaaagttgagtttaagtggactcaaaagtgtcaggaagcatttgaagaactgaagaatagattgactacaactcctgtgttagtcctgcctgacgttcacaagtcattctcagtgtattgcgacgcttcgtacaccggattgggatgtgtgctaatgcaagaaggaagagttgtagcatactcatctcgacagctaaagatccatgagaaaaattatcccacccatgacctggagttggcagcagtggttcatgccttaaagacctggagacattacctgtatgggcagaagtgtgatatctacatagatcataaaagtctgaagtacatattcacccaatcagagttaaacatgaggcagcgaagatggttggaattgatcaaagactatgagttggagatacattaccatccaggcaaagccaatgtcgttgcagatgctctgagcaggaagagtcaattagccaaagagttcgacagactgagcctcggtttcctgaacagtacgcaaggagtaacagtggaattagagcccaccctagagcgggagatcaaagaagggcagaaggatgatgaaaacatcaacaagatccggcagctgatcttagaaggaagaggcaaagactttcgagaggacgaagagggagtaatatggttcaaggaccgattgtgtgttcccgacattaaacctattcgggagctgatcctcaaggaagctcatgagacagcctactccatacaccctggaagtgagaagatgtatcaggatttaaaaaggaggttttggtggtatggcatgaaaagagaaatcgcagaatatgtcgccatctgtgatagctgtcagagaaccaaagcagagcatcaaaggcccgccggattgttgcagcctttgcggattcctcagtggaagtgggatgagatcgggatggattttatagttggcctacctcgtacccgggccggttatgattccatctgggtggttgtggaccgtttaacaaaggtggcccattttatacctgtgaagacaacatacaccggagcaacgttagctgagttatacatgtcacggatagtctgctttcatggtgtgccgaagaagatagtgtcagatcgaggaacgcagttcacctctcatttttggcagcagctacaagaagctttgggcacgcatctgaacttcagctcagcttatcacccgcagacagacggtcagactgaaagaactaatcagatcctagaagacatgttgagagcctgtgcgttgcaagacaagtcaggatgggacaaaaggttaccgtatgcagaattctcctacaacaacagttaccaggccagcttgaagatgtcaccgtttcaggcactctatggacggagttgtaggactccgctgcattgggaccagcctggagagagacaggtgtttggccccgacattttgcttgaagccgaagagaatatcaaaatggttcgggagaacctgaagacagcccagtcaagacagcgaagctatgcggaccgaaggagaagagaactgagttttgaagtgggagactacgtctatctgaaggtatcacctatcaggggagtcagaaggttcggagttaaaggcaagttagcaccccggtacgttggaccatatcagatccaagccaagcgtggagaagtggcctaccagctcaacctaccagagagcttgtcagcagtgcacaacgtgttccacgtgtcgcaattgaagaagtgtctgcgagtaccagaagaacaattgccagtggagggtttggaggtccaggaggatctgacctacaaagagaagccaacgcagattctggagtttgcagacagagtcacccggaggaacaccatcaggatgtgcaaagtcagatggggccaccactctgaggaagaagcaacctgggaacgagaggatgatctgaaggccaaataccctggactctttgctgaccaaccttga

SEQ ID NO: 5048 - DNA, 1047 bp, Zea mays
  Clone ID: TF_ZM4711.C2.o1.fg
atgcagcaggctcaacagcagccccaaccccagttgcaagtgcaaatgccccagatgccacgagataagcgtggtgagttcatgagagggcaccctcctaccttcgcccattctgctgagcccatggatgcagaagactggttgcgtgcagtggagagggaactgcgcaccgcccaatgcgacgacagggagaaggttctgtatggaccccgccagctgaggggagcagcacagtcctggtgggagtcctacctcgccacccatgctgaccccgaagccatcacctgggaggaattcagcgagagtttccgtcggtaccatgtgccagagggactgatgatcgtgaagaaggaggagtttctggctctgaagcagggacccctgtctgttagtgagtacagagacaagtttctgcagctgtctcgttatgcacctgaggatgtcaacactgatgccaaaaggcagtacaggttcatgagaggtttggtggatcccctgcattaccagctgatgaatcacaccttccccaccttccagcacctgatcgatagggcagttatgactgagaagaagcgtaaagatatggaagatcggaagcgcaagatgagtggaccccagtccggaggcatcagccgtccacgtttctcaggcagttcatctcagcaaggcagacctggtcacccacagggatatcagaatcagaatcagcgtccgcatcagcagcagtttcagaggcagtacccgcagcagcagcaacagtatcgtcagcacagccagcagggaggtaatcagtatcagaagcagaacaaccaggcacctcgccttcctgccccagcagcgaatcagagcaaccaagcagccccagcacaaggaggaggcagaggatgtttccactgtggagaacaaggccactgggcgatgcagtgcccgaagaaattggcgcagcagcaggccaaccccaatgctccagcaaggcaaggtgtactgcagccggcagcaggcaatcgtaaccaagcgtacaaccgcggaaagggtgcaaacagataa

SEQ ID NO: 5049 - DNA, 4314 bp, Zea mays
  Clone ID: TF_ZM4783.C6.o2.fg
atgccccagatgccacgggataagcctggtgagttcatgagagggcaccctcctaccttcgcccattctgctgaccccatggatgcagaagactggctacgcgcagtggaaagggaactgcgcaccgcccaatgtgacgacagggagaaggttctgtatggtccccgtcagttaaggggagcagcccagtcctggtgggagtcctacctcgccacacatgctgaccccgaagccatcacctgggaagaattcagcgagagtttccgcaggtaccatgtgccggagggactgatgatcgtgaagaaggaggagtttctggctctgaagcagggacccctgtctgttagtgaatacagagacaagtttctgcagctatctcgttatgcacctgaggatgtcaacactgatgctaaaaggcagtacaggttcatgaggggtttggtggatcccctgcattaccagctgatgaaccacaccttccccaccttccagcacctgatcgatagggcagttatgactgagaagaagcgtaaggatatggaagatcggaagcgcaagatgagtggaccccagaccggaggcatcagccgtccacgtttcataggcagttcatctcagcaaggcaggcctggtcatccacagggatatcagaatcagaatcagcgtccgcatcagcagcagtttcagaggcagtacccacagcagcagcagcagtatcgtcagcacagccagcagggaagcaatcagtatcagaagcagaacaaccaggcacctcgccttcctgccccagcagcaaatcagagcaaccaagcagccccagcacaaggaggaggcagaggatgtttccactgtggagaacaaggccactgggcgatgcagtgcccaaagaagatggcgcagcagcagaccaaccccaatgctccaacaaggcaaggtgtactgcagccggcagcaatcaatcgtagccaagcgtacaaccgtggaaaggtgaaccacttggaggccgaagcaatccaggatgcaccagatgtggcagtaggtatgttctcaatcgaatctcatcccgcaaaagtgctatttgatactggtgcaactcattcatttgtcactgcaacatgggtagaattgcataacatctcagtagaggcaatgatgccgcccatgaggattaattcggttggtggcaaggtgcaaacagataaaatatgttcaaatataatgggggaaataagggggataggattccccagtgacttaatagtaatagacacccctgggatagatgttattctagggatgaattggttaatgaagtatgaagcaaatgttagttgtgacaagaggaccgtaacattgaagtccccgtcaggagaagaggtagtggccgagctaaggatgcctaaatcagcggagggagtctgtcaccagatttcagttgatagtaaggagcccaacccgctcgaggctatcaaggttgtgtcggactttccggatgtgtttcccgaggagctaacgggcatgccacccgagagaaaagtcgaatttgccatagagcttatccctggtaccgcccccatttccaaaagagcctatcgagtgtctggaccagaattggtggaactcaagaagcagatagatgagatgttagagaagggttacatcaggccaagcacctcgccttgggccgctccagtgttgtttgtagagaagaaagatggtaccaaaaggatgtgcatagactacagagccttgaatgaagtcactgtcaagagcaagtaccccctgccaaggatagaagatttgttcgaccagctcagaggtgccagcgtattctcgaagatagatctgaggtcaggctaccatcaactcagaatccgaccctcggatataccgaagacagcattcatcaccaagtacgggttatatgagttcacagttatgtcctttggtttgacaaatgcgccagccttctttatgtacctgatgaacagtgtgttcatggattatctggacaagtttgtggtagtgttcatcgatgacattctcatatactctcaaagtgaggaagatcatgtagagcatttgaagatggtattgcaaagacttcgagagcatcagttgtatgccaagctgggcaaatgcgagttctggattcatgaagtcttatttctgggtcacatcataaatcaagatgggttggcagtggatccaaagaagagcttcattggaatggccggatactataggcgtttcattgaaggcttctcaaagattgctagaccaatgacagcgttgctagcgaagaaagttgagtttaagtggacccaaaagtgtcaggaagcatttgaagaactgaagaatagattgactacagctcatgtgttagtcctgcctgatgttcacaagtcattctcagtgtattgcgacgcttcgtacaccggattgggatgtgtgctaatgcaagaaggaagagtggtagcatactcatctcgacagctgaaggtccatgagaaaaattatcccacacatgacctggagttggcagcagtggttcatgctttaaagacctggaggcattacctgtatgggcagaagtgcgacatctacacagatcataaaagtctgaagtacatattcacccagtcagagttaaacatgaggcagcgaaggtggttggagctgatcaaagactacgagctggagatacattaccatccaggcaaagccaatgttgttgcagatgctctgagcaggaagagtcaagtcaatatgttggcctcgtacccgatgccgtatgagttagccaaggagttcgacagactgagcctcggtttcctgaacagtacgcaaggagtaacagtggaattagagcccaccctagagcgggagatcaaagaagggcagaaggacgatgaaagcatcaacaagatccggcaactgatcttagaaggaagaggcaaagactttcgagaggatgaagagggagtaatatggttcaaggaccgattgtgtgtccccgacctcaaacctattcgggagctaatcctcaaggaagctcatgagacagcctactccatacaccctggaagtgaaaagatgtatcaggatttaaaaaggagattttggtggtatggcatgaaaagagaaatcgtagaatatgtcgccatctgtgatagctgtcagagaaccaaagcagagcatcagaggcctgccggattgttgcagccattgcggattcctcagtggaagtgggatgagatcgggatggattttatagttggcctacctcgtacccgggccggctatgattccatctgggtggttgtggaccgcttaacaaaggtggcccatttcatacccgtgaagacaacatacaccggagcaacgttagctgagttatacatgtcacggatagtctgccttcatggtgtgccgaagaagatagtgtcagatcgaggaacgcagttcacctctcatttttggcagcagctacaagaagctttgggcacccatttgaacttcagctcggcttatcacccgcagacagacggacagactgaaagaactaatcagatcctagaagatatgttgagagcctgtgcgttgcaagacaagttaggatgggacaaaaggttaccttatgcagaattctcctacaacaatagttatcaggccagcttgaagatgtcgtcgtttcaggcactctatggacggagttgtaggactccgctgcattgggaccagcctggagagagacaggtgtttggccccgacatcttgcttgaagccgaagagaatatcaaaatggttcgggagaatctgaagatagcccagtcaagacagcgaagctatgcggaccgaaggagaagagaactgagttttgaagtgggagactacgtctatctgaaggtgtcacctatcaggggagtcagaaggttcggagttaaaggcaagttagcaccccggtatgttggaccatatcagattcaagcaaagcgtggagaagtggcctaccagctcaacctaccagaaagtttgtcggcagtgcacaatgtgttccatgtgtcccaactgaagaaatgtctgcgagtaccagaagaacagttgccagtggagggtttggaagtccaggaggatctgacatacatagagaagccaacgcagattctggagtttgcagacagagtcacccggaggaacaccatcagaatgtgcaaagtcagatggggtcaccactcggaggaagaagcaacctgggaacgagaagatgatctgaaggccaaataccctgaactctttgctgaccaaccttga

SEQ ID NO: 5050 - DNA, 4524 bp, Zea mays
  Clone ID: TF_ZM4932.C1.o2.fg
atgtctgacaacaggcgccgatgcaacaggcgtgctcagcaagagcagcatgaccagcaggaggaacaacagaggcagcctcccccaccacccccgatgtcagtggagcagatgttcttgatgcagactcaggcagtgcaggccattgggcagactctggcagccatgcagcaggctcaacagcaaccccaaccccaattgcaagtgcagatgccccagatgccacgagataagcgtggtgagttcatgagagggcaccctcctaccttcgcccattctgctgaccccatggatgcagaagactggctgcgcgcagtggaaagggagctgcgcaccgcccaatgtgacgacagggagaaggttctgtatggcccccgtcagctgaggggagtagcccagtcctggtgggagtcctacctcgccacacatgctgaccccgaagccatcacctgggaagaattcagtgagagtttctgcaggtaccacgtgccagagggactgatgatcgtgaagaaggaggagtttctggctctgaagcagggacccctgtctgttagtgagtacagagacaagtttctgcagctgtctcgctatgcacctgaagacgtcaacactgatgctaaaaggcagtacaggttcatgagaggtttggtggatcccctgcattaccagctgatgaatcacaccttccccaccttccagcacctgatcgatagggcagttatgactgagaagaagcgtaaggatatggaagatcggaagcgcaagatgagtggaccccagtccggaggcatcagccgtccacgtttctcaggcagttcatctcagcaaggcaggcctggtcacccacagggatatcagaatcagaatcagcgtccgcatcagcagcagtttcagaggcagtacccgcagcagcagcagcagtatcgtcagcacagccagcagggaggtaatcagtatcagaagcagaacaaccaggcacctcgccttcctgccccagcagcaaatcagagcaaccaagcagccccagcacaaggaggaggcagagggtgttttcactgtggagaacaaggccactgggcgatgcagtgcccaaagaagatggcgcagcagcagaccaaccccaatgctccaacaaggcaaggtgtactgcagccggcagcaggcaatcgtagccaagcgtacaaccgtggaaaggtgaaccacttggaggccgaagcaatccaggatgcaccagatgtggcagtaggtatgttctcagtcgaatctcatcccgcgaaagtgctatttgatactggtgcaactcattcatttgtcactgcaacatgggtagaattgcataacatctcagtagaggcaatgatgccgcccatgaggattaattcggttggtggcaaggtgcaaacagataaaatatgttcaaacataatggtggaaataagggagataggattccccagtgacttaatagtaatagacacccccgggatagatgttattctagggatgaattggttaatgaagtatgaagcaaatgttagttgtgacaagaggactgtaacattgaagtccccgtcaggagaagaggtagtggccgagctaaggatgcctaaatcagaagagggagtctgccatcagatttcagttgatagtaaggagcccaacccgctcgaggccatcaaggttgtgtccgactttccggatgtgtttcccgaggagctaacgggcatgccacccgagagaaaggttgaatttgccatagagcttatccctggtaccgcccccatttccaaaagagcctatcgagtgtctggaccagaattggtggaactcaagaagcagatagatgagatgttggagaagggttacatcaggccaagtacctcgccttgggccgctccagtgttgtttgtagagaagaaagatggtaccaaaaggatgtgcatagactacagggccttgaatgaagtcactgtcaaaaacaagtaccccctgccaaggatagaagatttgttcgaccagctcagaggtgccagcgtattctcgaaaatagatctgagatcaggttaccatcaactcagaatccgaccctcggacataccgaagacagcattcatcaccaagtacgggttatatgagttcacagttatgtcctttggtttgacaaatgcgccagccttctttatgtacctgatgaacagtgtgttcatggactatctagacaaatttgtggtagtgttcatcgatgacattctcatatactctcaaagtgaggaagatcatgtggagcatttgaagatggtattgcaaagacttcgagagcatcagttgtatgccaagctgggcaaatatgggttagcagtggatccaaagaaagtggcagatatcctgaactggaaagcaccgaaggatgttcgtgggatcaagagcttcattggaatggccggatactataggcgtttcattgaaggcttctcaaagattgctagaccaatgacagcgttgctagcgaagaaagttgagtttaaatggactcaaaagtgtcaggaagcatttgaagaactgaagaatagattgactacagctcctgtgttagtcctgcctgatgttcacaagtcattctcagtgtattgcgacgcttcgtacactggattgggatgtgtgctaatgcaagaaggaagagtggtagcatactcatctcgacagctgaagatccatgagaaaaattatcccacacatgacctggagttggcagcagtggttcatgctttaaagacctggagacattacctgtatgggcagaagtgcgacatctacacagatcataaaagtctgaagtacatattcacccagtcagagttaaacatgaggcagcgaagatggttggaattgatcaaggactatgagttggagatacattaccatccaggcaaagccaatgttgttgcagatgctctgagcaggaagagtcaagtcaatatgttggcctcgtacccgatgtcgtatgagttagccaaagagttcgacagactgagcctcggtttcctgaacagtacgcaaggagtaacagtggaattagagcccaccctagagcgggagatcaaagaagggcagaaggacgatgaaagcatcaacaagatccggcagctgatcttagaaggaagaggcaaagactttcgagatgatgaagagggggtaatatggttcaaggaccgattgtgtgttcccgacctcaaacctattcgggaactgatcctcaaggaagctcatgagacagcctactccatacaccctggaagtgagaagatgtatcagaatttaaaaaggaggttttggtggtatggaatgaaaagagagatcacagaatatgtcgccatctgtgatagctgtcagagaaccaaagcggagcatcagaggcctgccggattgttgcagccattgcggattcctcagtggaagtgggatgagatcgggatggattttatagttggcctacctcgtacccgggccggttatgattccatctgggtagttgtggaccgcttaacaaaggtggcccatttcatacctgtgaagacaacatacaccggagcaacgttagctgagttatatatgtcacggatagtctgccttcatggtgtgccgaagaagatagtgtcagatcgaggaacgcagttcacctctcatttttggcagcagctacaagaagctttgggcacacatttgaacttcagctcagcttatcacccgcagacagacggtcagactgaaagaactaaccagatcctagaagatatgttgagagcctgtgcgttgcaagacaagtcaggatgggacaaaaggttaccttatgcagaattctcctacaacaatagttaccaggccagcttgaagatgtcgccgtttcaggcactctatgggcggagatgtaggactccgctgcattgggaccagcctggggagagacaggtgtttagccccgacatcttgcttgaagccgaagagaatatcaaaatggttcgggagaacctgaagatagcccagtcaagacagcgaagctatgcggaccaaaggagaagagaactgagtttcgaagtgggggattacgtctatctgaaggtgtcacctatcaggggagtcagaaggttcggagttaaaggcaagttagcacctcggtacgttggaccatatcagattcaagcaaagcgtggagaagtggcctaccagctcaacctaccagagagcttgtcagcagtgcacaatgtgttccacgtatcgcaattgaagaagtgtctgcgagtaccagaagaacagttgccagtggagggtttggaggtccatgaggatctgacatacatagagaagccaacgcagattctggagtttgcagacagagtcacccggaggaacaccgtcagaatgtgcaaagtcagatggggtcaccactctgaggaagaagcaacctgggaacgagaagatgatctgaaagccaaataccctgaactctttgctgaccaaccttga

SEQ ID NO: 5051 - DNA, 4786 bp, Zea mays
  Clone ID: TF_ZM4940.C2.o21.fg
atgcttgctctgccgaggctgagtgccgaggttctttcgttttgctctttgttagtcactctcctgcggggagggatggctcgtcttagacacactgcacgtaagtcggtgattcctttcctgccgtctcgacttgcggagcgtcctctgcaccgcaccgtgtccggtcagtcgagtcacctggagaggctgcaccaccgtctgcgtgaggagcaggaacgccggcgccagcacggagagcagcagggctcttcctcctcaccccagcaggaggtggagaccgtgaggccccgttcctctgttgcccagctggaggcgccccttgttccaccgcgggacgtcccggctgttggaggagctactggaggagccactggaggagatcccgacgacgacgactcagaccacagtacggagtcctctgagccgcaggaggcggaaggatgggtcgcccgacccatcactcgtgacgccgctcgcggttgtcacttccacgacgcactcgacaccttgctgcgccaggctttcgaccggcacacctggtcgatcgagtatcgttgcgtagtctaccagcacagtcgcgggaggtacccggaccgctgggaggctacctgcctagttcgccgtccggaggatgacctccggggtgcagaggccgtttcggagcactattccatctccgagagggacactgcagaggcggctatgcaggatgcagcacggcgtgcactctcccagtactattctctgttcggtggcgtggccgatggtcttaaccttcggtactactcccgccgccctactggcagcacagagagtgtggttgtctcacctgttggtgagggtaaccctaggttgagcagcacagtcaacctagtcgcagtgcttaacacggagctggatcactctctggacgagctaagcagggctcgaacggagattgcggagttgcgtgctgagctggcagagcgccatcaccaggagggtggttcccccgctcctgttgggactcagcacccataccgctcaccgccacgtggtcaccacacttatggttcccctattgtgagatcaatgctgatgtgtgaatgtcttccacagatgtctgacaacaggcgccgatgcaacaggcgtgctcagctagagcagcatgaccagcaggaggaaaatcagaggcagcctcccccaccacccccgatgtcagtggagcagatgttcttgatgcagacccaggcaatgcaggccattgggcagactctggcagccatgcagcaggctcaacagcaacctcaaccccaattgcaagtgcagatgccccagatgccacgggataggcgtggtgagttcatgagagggcaccctcctaccttcgcccattctgctgaccccatggatgcagaagactggctgcgcgcagtggaaagggagctgtgcaccgcccaatgcgacgacagggagaaggttctgtatggtccccgccagctgaggggagcagcccagtcctggtgggagtcctacctcgccacccatgctaaccccgaagctatcacttgggaggaattcagcgagagtttccgtcggtaccatgtgccggagggactgatgatcgtgaagaaggaggaatttctggccctgaagcagggacccctgtctgttagtgagtacagagataagtttctgcagctgtctcgttatgcacctgaagacgtcaacactgatgctaaaaggcagtacaggttcatgagaggtttggtggatcccctgcattaccagttgatgaatcacaccttccccaccttccagcacctgattgatagggcagtcatgactgagaagaagcgtaaggatatggaagatcggaagcgcaagatgagtggaccccagtccggaggcaccagccgtccacgtttctcaggcagttcatctcaacaaggcagacctggtcacccacagggatatcagaatcagaatcagcgtccgcatcagcagcagtttcagaggcagtatccacagcagcagcagtatcgtcagcacaaccagcagggaggtaatcagtatcagaagcagaacaaccaggcacctcgccttcctgccccagcagtgaatcagagcaaccaagcagccccagcacaaggaggaggcagaggatgtttccactgtggagaacaaggccactgggcgatgcagtgcccaaagaagatggctcagcagcagaccaaccccaatgctccaacaaggcaaggtgtactgcagccggcagcaggcaatcgtaaccaagcatacaaccgcggaaaggtgaaccacttggaggccgaagcaatccaggatgcaccagatgtggcagtaggtatgttttcagtcgaatctcatcccgcgaaagtgttatttgatactggtgcaactcattcttttgtcactgcaacatgggtagaattgcatagcatctcagtagaggcaatgatgccacccatgaggattaattcggttggtggcaaggtgcaaacagataaaatatgttcaaacataatggtggaaataagggggataggattccccagtgacttaatagtaataggcacccctgggatagatgtcatactagggatgaactggttgatgaagtatgaagcaaatgttagttgtgacaagaggaccataacattgaaatccccgtcaggagaagaggtagtggccgagctaaggatgcctaagtcagaagagggagtctgtcatcagatttcagttgatagtagggagcccaacccgctcgagactatcaaggttgtgtcggactttccggatgtgtttcccgaggagctaacgggcatgccacccgaaaggaaagtcgaatttgccatagagcttatccctggtaccgcccccatttcaaagagagcctatcgagtgtctggaccagaattggtggaactcaagaagcagatagatgagatgctagagaagggttacatcaggccaagcacctcgccttgggccgctccagtgttgtttgtagagaagaaagatggtaccaaaaggatgtgcatagactacagagccttgaatgaagtcactgtcaagaacaagtaccccctgccaaggatagaagatctgtttgaccagctcagaggtgccagcgtattctcgaagatagatctgagatcaggttaccatcaactcagaatccgaccctcggacataccgaagacagcattcatcaccaagtatgggttatatgagttcacagttatgtcctttggtttgacaaatgcgccagccttctttatgtacctgatgaacagtgtgttcatggactatctagacaaatttgtggtagtgttcatcgatgacattctcatatactctcaaagtgaggaagatcatgtggagcatttgaagatggtattgcaaagacttcgagagcatcagttgtatgccaagctgggcaaatgcgagttctggattcatgaagtcttatttctgggtcacatcataaatcaagatgggttagcagtggatccaaagaaagtagcagatattctgaactggaaagcaccgaaggacgttcgtgggatcaagagcttcattggaatggctggatactataggcgtttcattgaaggcttctcaaagattgctagaccaatgacagcgttgctagcgaagaaagttgagtttaagtggactcaaaagtgtcaggaagcatttgaagaactgaagaatagattgactacagcccctgtgttagtcctgcctgatgttcacaagtcattctcagtgtattgcgacgcttcgtacaccggattgggatgtgtgctgatgcaagaagggagagttgtagcgtactcgtctcgacagctgaagatccatgagaagaattaccccacacatgacctggagttggcagcagtggttcatgccttaaagacctggagacattacctgtatgggcagaagtgcgacatctacacagatcataaaagtctgaagtacatattcacccagtcagagttaaacatgaggcagcgaagatggttggaattgatcaaagactatgagttggagatacattaccatccaggcaaagccaatgttgttgcagatgctctgagcaggaaaagtcaagttaatatgttggcctcacacccaatgccatatgagttagccaaggagttcgacaaactgagcctcggtttcctgaatagtacgcaaggagtgacagtggaattagagcccaccctagagcgggagatcaaagaagggcagaaggatgatgaaaacatcaacaagatccggcagctgatcctagaaggaagaggcaaagactttcgagaggatgaagaaggagtaatctggttcaaggaccgattgtgtgttcccgacctcaaacctattcgggaactgatcctcaaggaagctcatgagacagcctactccatacacccagggagtgagaagatgtaccaggacttaaaaaggaggttttggtggtatggtatgaaaagggagatcgcagaatatgtcgccatctgtgatagctgtcagagaaccaaagcggagcatcagaggcctgccggattgttgcagcctttgcggattcctcagtggaagtgggatgagatcgggatggattttatagttggcctacctcgtacccgggccggttatgattccatctgggtggttgtggaccgcttaacaaaggtggcccacttcatacctgtgaagacaacatacaccggagcaacgttagctgagttatacatgtcacggatagtctgccttcatg

SEQ ID NO: 5052 - DNA, 1059 bp, Zea mays
  Clone ID: TF_ZM4516.C1.o1.fg
atggaggtcttgagtacaatgaccccgatcattgtgattgggaaaattgcggcatttgagatgtcgggaaaaatgggtcgacaagaggagccaacctcttcaagaccatatgcttttgcatgtgatgaaagaaaagacaaaaagaaggctcccactccaagttcctcaagtgaagaagagtcgaggatcttcactttaacattgacaagaaaaagcaaagaaagagaggatgcttcacatgtggggagaagggccactttagggacaattgtccaaatatggccgaacccacaaaggggaggagcaaaggcaaggagcttacaagtgtcaaaacttgggatgactcttcaagcgaagatgaacctccaaggacgcgcaaccaccgatcctcatcacggtcatcgcacaagtgctttatggcaagagctatcaactaaaattgagcaattagagtctagtgctccatccacagctactgatgatggccttattaaaaagaatgaaaaacttaaggctaagttagctagctcccaagaagccattgaaaatttgctagagaaaatggaaattcttagcatacacaatgatgagctaactactaagctagaaaacattggtagcaccccagaagtatctttggttgaaatacctgaaattattaagaaagatgcttctacttcttgtcttgatgtaattgataattctaatcactgcaatcaagttcttgttaagaatgttgttatagaaacatattcggatgagattgcaatggagaatgagcaattaaagcaagaagtgtatcaccttggcaatgctttgtatgacaagaaaggcaaagccaaacaaatccaacctcctcaggataacaccactgcgggagtgaacaagcccatggagggcgaaactgtgatttgtaggctatgtcacaaagaaaaccacaagtctttccaatgcaaggcgaagaccgggataagcaaaagctcaaacaaaatccgacaagcaaaatctccaacacctacatcaacaaggtggacaaaaaggctgctacaccatacttaa

SEQ ID NO: 5053 - DNA, 1605 bp, Zea mays
  Clone ID: TF_ZmC4916_400
atggatcctaagggaaaggggatggtggtcaacgacaaggaaaagaagtccttcctcaacgagcctagagacgacaagccaaccgactctagctcgagtcacaagaagaaggacgggaagaagaagaggcgcatcaagaagatcgtctactacgacagcgatgcatcttcctcttcaccaagagacgacgatgatgacgattcttcgttaaagaaaaagacggacaccctcaagatatctcatgagggaaatgacgccaccatgatcaccaaaatggagttggtggaaggcgagctggggagatttgcgatgattaggggagaggagccaactcaaacctacaacaggctcaagaccctggtcaacaagattagaagctatggaagcacaagatggacggaccatgacgtcgtccgactcatgctcaggtcatttactgtaattgacccccatcttgtcaatcttattcgtgaaaaccctaggtacacaaagatgacgcccgaggagatccttggaaagtttgtgagcgggcgcatgatggtgaaggaagcgcgacacatggatgacgccttgaacgatccactacccatctacgagtcacaacccgttgctctcaaagcaacaagcagcaaggaggcgctaccaagcaaggtagctcaagtagaggctgccgacctcaacaaagatgagatggcgcttatcatcaagcgcttcaagaccgcacttagaggacgcatggagtaccccaacaagaataaaacaaagggaaaacgctcctgcttcaaatgcggtaagactggtcattttattgctcaatgtctcgataatgaaaatgaccagggacaagaaagacatgggaagaaggagaagaagaaaagctataggaaggcgaaaggcgaggctcatcttggaaaagaatgggattccgactgctcctcatccgactccgacgatgaaggactcgctgcctcggccttcgacaagtcttcgctcttccccaatgaacgccacacttgcctcatggccaaagagaagaaggtaaatgttcgagaaacccctaagtacactacttctagcgatgatgattcttccgatgatgaagtagattactctagcttatttaaaggtttagatagagtcaaagtagagaaaattaatgaattaattgatgctctaaatgaaaaagatagatttctagagaagcaggaagacattttatatgaggaacttgacaaatttgttagtgtacaaaagtctcttgctttagaaactaagagaaatgaaatgctatcttctgagttatctgcttgtcatgaatctatctctagtttaaagattttaaatgatgatttaaatgctaagatagaggaagttaacaaatctagttcatgtgtagagcatgttgttatttgcaatagatgtaaagactttgatgttgatacttgtaatgaacatcttattgctattactaaattaaatgatgaggtgtcaagtcttaatgctcaacttaagacttgcaaaagtgattttgaaaaattaaagtttgctagggatgcctacactattggtagacacccctcaattaaggatgggtttggtttttga

SEQ ID NO: 5054 - DNA, 5349 bp, Zea mays
  Clone ID: TF_ZmC4916_381
atggatcctaagggaaaggggatggtggtcaacaacaagacaaaggagtccatcgtcaatgagtcaagagatgataagccctcagactctggcttgagtcataacaaggacgggaagaagaagaggcacatcaagaagatcgtctactacgacagcgacaagtcttcttccccaagagacaacgaatacgaagagaaaaagaaaatgttcaattccaatgctcatttactttcaattccactcgggaaacctccgcactttgatggagaagactacccattttggagtcacaaaatgcgtagtcacctattctctctccatccaagcatttgggagattgttaaaaacggaatgctttttgatagtactgacaaccccgttttcattaatgagcaaatccataaaaatgcacaagctaccactgttttgttagcatccttgtgcagagacgagtacaataagatggagttggtggaaggcgaacttgggaggttcgcaatgatcaggggagaggagccaacgcaaacgtacaaccggctcaagaccctggtcaacaaaatcaggagctatggaagcacgagatggaccaatcacgacgtcgtccggcttatgctcaggtccttcactgttcttgatcctcatcttgtgaattcaatccgtgagaatcctaggtacacaaggatgacgcccgaggaaatactcggaaagtttgtaagcgggcgtatgatgatcaaggaggcaagatatgttgatgaggcattgaatggcccaatgcctatctacgagcctcaaaccgttgctctcaaagcaacaagcagcagagaggcgctatctagcaaggtggcacaagttgaggctgctaggctaaacgaggatgaaatggccctcatcatcaagcgcttcaagacggcactaaaaggacgcaaggagcatcccaacaaaagcaagacaaagggaaagcgctcctgcttcaagtgtggtaagactgggcactttattgctaactgtctcgataatgatagtgaccagggacaagaaaagagcgagaagagggagaaaaagaagtcctacaagaaggcgaaaggcgaggcgcaccttggcaaggagtgggatttggattgctcttcgtccgactccgacgacgaaggactcgccgcctcgtccttcaacaagtcgtctctcttccccaacgagcgccatacttgcctaatggcaaaagagaaaaaggtaaacgctcgagatacccctatgtatgcttcttcaagtgataatgaatctagtgatgatgaagtagactacacaggtttattcaaaggtttagatagaactaaaattgataagaccaataaattgattgatgccttgaatgagaagcatagattgttagagaagcaagaagatattttatatgaagagcatgacaaattcattagtgtacaaaaatctcttgctttagaagtaaaaaggaatgagatgctttccttcgaattatctacttgccatgaaactgtgtctagcttaagaagtattaatgatgatttaaatgctaagctagaagttgttaataaatctagttcttgtgtagagcatgttgttatctgtaatagatgtaaggattttgatgttgatgcatgtgttgagcaccttacctctattacaaaattaaatggtgaagtggctagtcttaatgcccaacttaagactagcaaaaatgactttgataaactaaaatttgcaagggatgcctacactgttggtaaacacccctctattaaggatgggcttggctttcgaaaggaagccaagaacttaacaagtcaaagggctcccatttccgcccaggagaaagggaaggcccctatggcaaatagtgctcaaagaaatcatgctttcatctatagtgatagaaagttttctagaaatgctcataggagttatgcttatgattcacatgctatgattgcatcaagttcttcttttgtgcatggtagaaatatgcctaggaaaaatgttgcccatgtgcctaggaaagtttgtaatgaaccttctacaatttaccatgcttgcaatacttcttttgcaatttgtcgtaagaataagaaagtgattgctaggaagttgggggccaagtgcaagggagacaagacttgcatttgggtcccaaagtctattataactaaccttgcaggacccaacaagagttgggtttatgcatccgggggctcaagctggattatcgacagcgaatgcacaaactacatgacgggggagaagaagatgttcacctcctacgtcaagaacaaggattcccaagatacaatcatatttggagatggggatcaaggcaaagtcaaaggcttaggcaagatagccatcactaatgagcactctatctctaatgtatttctagtagagtcgctaggctataatctgctgtttgttagtcaattgtgccacatgggttataattgtctatttacaaatgtagatgtgtctgtctttagaaggagtgatggttcactagcttttaagggtgtactagatggcaaactctatttagcggatttttcgaaagaggacgccgatctagatacatgcttaattgctaagactagcatgggatggctgtggcatcgccgtctagcacatgttgggatgaagaaccttcacaaacttctaaagggagaacatgtgttaggtctaacaaatgtgtttttcgaaaaagatagaccttgtgcagcttgtcaagcaggcaaacaggtgggaagcactcatcatagcaagaatgtgatgaccacatcaagacctttggagctacttcacatggacctcttcggacccgtcgcctacctcagcatagcgggaagtaagtatggtcttgttgttgttgatgatttttcccgcttcacttgggtattctttttgcaggataaatcaggaacccaagggaccctcaagcgctttctaaggcgagctcaaaacgaatttgagctcaaggtgaaaaagattagaagcgacaacgggtccgagttcaagaaccttcaagtggaggagttccttgaggaggaaggaatcaagcacgagttctccgctccctacacaccacaacaaaacggtgtggtagagaggaagaacatgacgcttatagacatggcaaggacgatgcttggagaattcaagacgcccgagcggttttggtcgaaagctgtgaacacagcttgccacgccacaaaccgggtctaccttcatctcctcctcaagaagacgtcgtatgaacttctaaccggtaacaaacccaacgtatcttattttcgtgtatttgggagtaaatgttacattctagtgaagaaaggtaggaattccaaatttgctcccaaagctgtagaagggtttttgttaggttatgactcaaatacaaaggcgtatagagtcttcaacaaatcatcgggtttggttgaagtatctagcgacgttgtatttgatgaaactaatggctctccaagagagcaagttgatcttgatgatgttccaacggacgcgattcgcaccatggcgattggagatgtgcgaccacaggaacaccagcagcaagatcaaccttcttcctcaacgatggtgcatcccccaactcaagatgatgaacaggtccctcaagaagaggcgtgtgatcaagggggagcacaaaatgtccaagatgtggaagaagaagcaccacaggcccctccaactcaagttcgggtgacgattcaaaggaatcatgccatcgaccatattttgggtgatataagcaagggagtaactactcgctcacgtctagctaatttttgtgatcattactcgtttgtctcttctattgagcctttcagggtagaagaagccttgctagatccggactgggtgttggccatgcaggaagagctcaacaacttcaagcgaaatgaagtttggacactggtgccacgtcccaagcaaaacgttgtgggaaccaagtgggtgttccgcaacaaacaggatgagcacggggtggtgacaaggaacaaggctcgacttgtgacaaaaggttatgcccaagtcgcaggtttggactttgaggagacttttgctcctgtggctaggctagagtcgattagcattttgttagcctatgtcgctcaccattcttttaggttgttccaaatggacgtgaagagtgctttcctcaacgggccaatcaaggaggagatatacgtggagcaaccccctggctttgaggatgaacggtaccccgaccatgtgtgtaagctctctaaggcgctctatggacttaagcaagccccgagagcatggtatgaatgccttagagattttctaattgctaatgctttcaaggttgggaaagctgatccaactcttttcactaagacttgtgatggtgacctatttgtgtgccaaatttatgtcgatgacataatatttggttctactaaccaaaagtcttgtgaagagtttagcaggttgaactacttccttgggttccaagtgaagcaactcaaggacggcaccttcatctcccaaacgaagtacacgcaagacttgctcaagcggttcgggatgaaggacgccaagcccgcaaagactccaatgggaaccgacggacatgtagacctcaacaaaggaggtaagtccgttgatcaaaaggcataccggtctatgatagggtctttactttatttatgtgctagtagaccggatattatgcttagtgtatgcatgtgtgctagatttcaatccgacccaagggagtgtcaccttgtggccgttaagcgaattcttagatatttagttgctacgccttgctttgggatctggtatccaaaggggtctacctttgacttaattggatattcagactccgattatgctggatgcaaggttgataggaagagtacatcagggacgtgccaattcctaggaaagtccctggtgtctttgagttctaagaaacaaacctctgttatcctatccaccgctgaggccgagtatgttgcagcaggacagtgttgcgcgcaactactttggatgaggcaaaccctcagggactttggctacaatctgagcaaagtcccactcctaggtgacaatgagagtgcaatccgcatggcggacaatcctgttgaacacagccgcacaaagcacataggcatccagcatcactttttgagagaccaccagcaaaagggagatattgaagtgttttatgttagcaccgagaaccaactagccgttatctttaccaagcctttagatgagaagaccttttgcaggctgcgtagtgagctaaatgtcatagattcgcgtaacttggattga

SEQ ID NO: 5055 - DNA, 4962 bp, Zea mays
  Clone ID: TF_ZmC6526_1
acgatccgatgcccgggagatgctactcttcctgtacgagtctaagtattttttatgagctctatacagacctggcagcgccacttcgtaaaggtagtcaaaccagaattgctttgctaatacacattcgaacaccagataaattatgttttcaccctcttgacttcacatggggcaccgttctggccgctctagccagccttggccgaacgtggcagcggcgctgcacctcctttgttcaacaatccataaaaagaacgtgcacttcccaggagcccaagatttccacacacgctctgctggttcgaactgaactgaaccaaggaagagagcattataaacataaaaggatgtataagcgcctggagcgctgattaatcatgatggtcgcgcaattatcctctgcaggagtactactgcaaatagcagttcacaaagttccagcaattcagctgccactcctatcgagattagggcatgcgaatccaaaatagaagcaaaatgggggagagcatcttaaaacaaccatatgttggctagacaccatgtcatcaaatcaaagattgcggcaactatctccttcagacaccaccactataagcattggaccttcccgataagtctattttctacatgaccgatcttagaaagaagggctgcagcaaacagattattcactccctaacaaacatgactgggtaagtccgcccaaggcttactcgggggtgttctcggttcccacgccctggatggactcaattcccaacagaggttatttaactatttaatcccaagatcatccaactacttggcactgctaaccttaggccccctctagaggctatgaacagtaaaaaactattccctataactcaagaagaagaacttccttaacatttcgattgctttaaaggcgaaatcaggaaggacaagtggcaatgcaacatacatcaccttagctgtcatgacatactctgcataaagagaactaccagtcctggtcactgctgcagctgactcccatgccaagcggatagaagccttatcaataatctcctgcgtttcgtccattgtggacgtcactgcttaacaaaaagcgattggaatcaatctgttctgttcgccaagcatttttagtaatgaatctcttccagatttttgttgaatagccataaccatagtgataaccctgtcggtaggatatagaaataccactgcgtcacccgcgtacagcgatatacggtcctgcatattcctagaaggaagaggctgaagaaacccttcctcagaggctcgcgagtcaaaagcctttgaaatgtcaagcttgagaaggatacgagcctgcttctgacaatgtaagaatctggtcgtctgctggactagcatgaagttgtcaagaataaaccgttttttaataaaagcggtttgattgggggaaaccatattttgcagccggtctgctaacctgttagccaacaatttagttaccactttcgcgaaactatgaaccagacttattgggcgaaagtctctcacactagtggccccctccaccttgggcagaagagtgatgaatgctgaattcagcgaacccaagtttctgaaatttctggcccaaatgcagtgaatggccgccataaaatcagccatgattaccgaccaacaactcttgtaaaatctaccagtgaacccgtcaggacccggggatttgtccgaagggagagccttaattgtatcccagacctcctcctccgagacaggcgcatccagggcaacgaggtcaaaagatggcatccctagagcatccagatcaactgtaacatcccttacttctgcagttccaagtaacccttgataaaaattaaagaaggctgctgcatttccttcatgggcagtccagatttgcccatcctctgagtgtattgctgcaatgaaattctttttcttcctgaaccttgtttgtgcatgaaagagagaggtattggcatccccttcattgagccacccaatccgcgatttcaaccttgccacagtacgagagatagaagacagggcaagggagtgcttcttgagcatgttccggagccacaattcagcatgagataatgagcgattgtcctgcgcaacctctaattgatgaaggagctccctagccatctcaagcttctgcttaatcttcccagcttttttgtcattccagctctgcagactcctagccgttgcctttaacttcttggccaaagtgatcggtgggcacggcccattcgaccatgtatatttccggccaatcaacggaatttcattaagggccaaatcatttgcccatctcctgaacctgcccatcatggcacggtctaagttattattattcttctcttcctcccttaaaatcggattaaaatcccccagcacaagccatggcccattacaaagagctctaatttctctaagagattgcaaaaactgaatcttctcttggttcccttgcggaccatacacacatgtaagccaccaaggggggctggtgcttgaatgaaagttcacagagacgctatgatcattcaccctactgccagcacaaataccaatgctatttttccaagccaccaagatgccaccactagcaccaacagaaggtaggaatacaaaattgtcaaaagctggacctagcatccgcaatacaaggaaccgagaaacatccaccattttagtctgcacctcggaaagccctttgctgaaaactctggcatactcatcaaggtcttttggcctaatagttacagtctcttcagcattcacaataccaagttccttcaaaatatgtttcttgccctgcgtggccggtggaggagtagccagtctctccactcctgcaccagcgacccttctattgtgtcggggtaccacctcagtggctgtagccttgccctgtcgcggccttctgactggcgccctcagaatcccacctgctggtctggtcagcttatcgatgaactcttttgcacccgaagggggggacggggacgcgccaagcagcagactgggttgactatccttcttcctcctctgccgaaagtaagtaatgatggggcttctccgtgataggcgactcgacgttcgcgcatccaccaaggctgacttctgccctcccatgtcgaatgtggcccgagatggagatcccgggggtagcacctgaattgcctgctccttctcgcatccacccatagagcaacaaactgccggagctctcaagggtgaagagggggaagatggtactggcaggggggagtgagatgggcaaccaccggacagccccgacgccccagcctccaccatgcaggcctgctcatgtctcctgccgttactctccacattatcttctgacgcctcaatcatagccccaatatttaattccttgacagcagggatatgctcctctaaattagaagaaccatttaaagatgcctccttggaaacctcctgttccaacacttcctgtgaaatagccacgtggcggggacagattggcagcggtcctagtctctcatgcacggggcgccgaacggccaacgcttcgacagggcctccctgccttgccggagaagcttgttgcaggcgacgtcgacgagacctagtgtcccgatcatcattagacgccggcggcgacgggggaggggaaacatcgcccgccgacggagagatcagagacaccgaggccatcacctgataagctagaagatgcttcacagtggtctccacttcaaaactctgaaccggcttcagaatcaaaagatcaacagcaaccggaatgagctctggatgccggctccaaccaagaaccctgaaggaggagaagttcagacgagcaacagtgtcgggatgaagctccaatgccgtgcagtgcgctcgcagcaaacttctagcagtttccacactccatgcgtgcaacgggactccctcgaagctcacagacacaaaggaaggcagggaaaccgcttcagcgtgtgcaagccttgaccacttgatgaacttgaaagacccagaaggtgagttgagaacagctccgttgttgaagacacgtaacaccgcttgctcattttgcatgataataacgaaatcttcaggcaccgaacggtggactgaaaaacttgcaggatcaagctcatactccgctgcaatttctgccgccaaaagctcagctgtcaccggcggccgcgaaccaatgaccacgacgaacagagcacaatgccgaagattgttctccaccagagttaaatcccttgcacgctcaaggacgcaaaccggccgtgccgccgaacctgcattcttcaccacggccgactgatgtgagggtagccgagcggagctgtcatcatccactggtggcaagctagcagcgctcctagatcggggccttctccccctggtacgatgtcgacccttcttggtgtgattcatcgactgtccaggcccgtcctcagcagcagcatgtcgaccatgatccatgggaggggagaccctccgccaaaccagcctccgcttagagaacggaactgaaacctccactggttgactgcctaagcgctcccacacaggacggccgccggacgaggcactggccacgttcagcctacgagcgacgagtggatgcaggtcaggaccgccggacaaaaccttggtcacgtcgtgccctctatcggcgccagggcattcagcagcacggtggcccggccggcggcagcgcaagcagcaggacggatgtcggcacgcagccgcacgatgggacgtcgccaagcagttgaaacacctcccccggagatcctgcgggaccggtcgacggggaaggggagggcgggggcgctcagccaaacgacgacgacgacagggaccacctagtctccactgtaatccagccctctgcgtctgatggcggcgaggccccgtgcaggcgacggctaccat

SEQ ID NO: 5056 - DNA, 3847 bp, Zea mays
  Clone ID: TF_ZM3738.C20.o2.fg
ggatgagtaccacaaggtgagcggcttggataacgccaagcaaatttgggacaccctcaagatttctcatgaggggaacgacgccaccatgatcaccaagatggagttggtggaaggcgaactgggaaggtttgcaatgatcaggggagaggagccaacacaaacatacaacaggctcaagacccttgtcaacaaaatcaggagctatggaagcacgagatggatggaccacaacgtcgtccgacttatgctcaggtccttcactgttcttgatcctcatcttgtgaactcaattcgtgagaatcctaggtacacaaagatgacgcccgaagaaatactcggaaagtttgtaagcgggtgtatgatgatcaaggaagcaagatatgttgatgaggcattgaatggcccaatgcccatctacgagcctcaaaccgttgctctcaaagcaacaagcagcagggaggtgctacctagcaaggtggcacaagttgaggcggccggactaaacgaggatgagatggccctaatcataaagcgcttcaagaccgcattgaagggacgcaaggagtactcaaacaagaacaaggcaaagggaaagcgctcctgcttcaagtgcggtaagactggtcattttatagcaaattgtctcgataactctagtgaccaggaacaaggaaagggtgggaagaaagagaagcaaaagagctataggaaggcaaagggcgaggcacacatcggaaaggaatgggactcggactgctcatcttctgattctgacgacgaaggactcgctgctcggccttcaacaagtcctttctcttccccaacgaacgccacacctgcctcatggcaaaggagaaaaagtgatgatgaagtagactatactgaattatttaagggcttagatagatcaaaagtagataaaattaatgaattgattgatgccttaaatgagaaagatagacttctagagaggcaagaagacattctgtatgaggaacatgacaagtttgttagtgttcaaaagtctcttgccttagaactaaagagaaatgaattactatcttctgagttatctacttgtaatgaaactgtggctagcttgaagagtattaatgatgatttaaatgccaagctagaagtagttaacaaatctagttcttgtgtagaaaagattgtaatttgcaatagatgcaaggattttaatgttgatgcttgtgatgaacatttaatttccatttctaaattaaatgatgaagtggcaagtcttaatgctcaacttaagacgtgcaaaagtgattttgataaattaaaatttgctagggatggctacactgttggtagacacctcttaattaaggatgggcttggctttaagaaggaagccaagaacttaacaagccaaagggctcccattttcaacaaggaaaaagggaaggcccctatggctagttgtattcaaaagaatcatgcgttcatttatcatagaaaagtttctaggaatactcattataataggagttatggtgcttatgattcacatgctatgattgcttcaagttctacttttgtgcatggtagaagtaggcctaggaagggaaatgttattcatcatgtgcctaataaaatgcctaatgaatctgctactgtttttcatgcctgcaacactgattttgtactttcatgtaaaaataagaaagtggttgctaggaagttgggagccaaatgcaagggagataagacttgcatttgggtcccaaaggatattgtaactaaccttgtaggacccaacaagagttgggtttatgcatccgggggctcaagctggattatcgacagtggatgcacaaaccacatgacgggggagaagaagatgttctcctcctacgtaaagagcaaagattcccaagattcgatcatctttggagatgggaaccaaggcaaggttaaaggtataggaaagatagctatttcatccgagcattccatatctaatgtgttcttagttgaatcactaggatacaacttattgtctgttagtcaactatgtaatatgggatataattgtctgtttaccaatatagatgtgtctgcctttagaaggagtgatggttcactagcttttaagggtgtactagacgacaaactctatttagttaatttttcgaaggaagaggccgatctagatgcatgcttgattgctaagactagcatgggctggttgtggcatcaccgtttagcacatgttgggatgaagaaccttcaaaaacttctaaagggagaacacgtgttaggtctaacaaatgtatctttcgaaaaagatagaccttgtggagcttgtcaagcaggtaaacaggtgggaagtactcatcacaacaagaacgtgatgaccacggcaagacctctagagctacttcatatggacctcttcggacccgtcgcctaccttagcatcgggggaagtaagtatggtcttgttattgttgatgatttttcccgcttcacttgggtattccttttgcaggataaaacagaaacccaagggaccctaaagcgctttttaaggagagctcaaaatgaatttgagctcaaggtaaaaaagataaggagcgacaacgggtccgagttcaagaatcttcaagtggaggagtaccttgaggaggaaggaatcaagcatgagttctccgctccctacacaccacagcaaaacagtgtgaaaggtaggaattccaaattcactcccaaagttgtagaagggtttttgttaggttatgactcaaatacaaaggcgtatagagtcttcaacaaatcatcgggtttggttgaagtctctagcgacgttgtatttgatgaaactaatggttctccaagagagcaagttgatcttgatgatgtagatgaagatgatgttcccacggacgcaattcgcaccatggcgattggaaatcctttcaggatagaagaggccttgctagattcggactgggtgttggccatgcaggaagaactcaacaacttcaagcgaaatgaagtttggaccctggtgccatgtccaaagcaaaacgttgtgggaaccaagtgggtgttccgcaacaagcaagacgagcacggagtggtgacaaggaacaaggctcgacttgtggcaaaaggttatgcccaactcgcaggtttggatttcgaggagacttttgctcctgtggctaggctagagtcaattcgcattctattagcctatgccactcaccattccttcagatttcaatccgacctaagggaatgtcaccttgtggccgttaagcgaattcttagatatttagttgctatgccttgcttcgggatctggtatccaaaggggtctacctttgacttaattggatactcagactccgattatgctggatgcaaggttgataggaagagtacatcagggacgtgtcaattcctaggaaggtccctggtgtcttggagttcaaagaaacaaacttccgttgccatatccaccgctgaggccgagtatgttgccgaaggacagtgttgcgcgcaactactttggatgaggcaaaccctccgggactttggctacaatctgagcaaagtcccactcctatgtgataatgagagtgcaatccgcatgggcggacaatcctggttgaacacaacccgcacaaagcacatagacatccggcatcactttttgagagaccaccagcaaaagggagatatcgaagtgttttatgttagcaccgagaaccagctagccgatatctttaccaagcctttagatgagaagaccttttgcaggttgcgtagtgagctaaatgtcttagattcatgtaacttggattga

SEQ ID NO: 5057 - DNA, 1506 bp, Zea mays
  Clone ID: TF_ZM4936.C1.o6.fg
atggagttggtggagggcgagctgggaaggttcgcgatgatcaggggagaagagccaacacaaacgtacaacaggctcaagaccctggtcaacaagattaggagctatggaagcataagatggacggaccacgacgtcgtccgacttatgctaaggtcattcacggtaattgacccccatcttgtcaaccttattcgtgagaatcccaggtacaccaagatgatgcccgaggagattcttgggaagttcgtgagcgagcgcatgatgcaaccagtagcagggagacgctgccaagtgccaagcaaggtggcacaagtggaggccgctagcctcaacgaagatgagatggcgctaatcatcaagcgcttcaagaccgctcttaaaggacgcaaggagtaccccaacaagagcaaaacaaggggaaatcgctcctgcttcaaatgcagtaagactggtcactttatagcaaattgtcccgataatgttaatgaccaggaacaagaaaagagcgggaagaaggagaagaaaaagagctataggaaggcaaagggcgaggcgcaccttaggaaagaatgggactcagactgctcttcatccgactccgacgatgaaggactggcagcctcggccttcaacaagtcttcactcttccccaacgaacgccatacgtgtctcatggctaaggagaagaaggtaattgttcgagaaacccctaaatatactacttcaagcgatgatgattctagtgatgatgaagtagattatactgatttatttaagggtttagatagagctaaagtagataaaattaatgagttaattgattctttaaatgaaaaggatagacttttagagaagcaagaggacattctatatgaagaacatgacaaatttgttagtgtacaaaagtctcttgctttagaaactaaaagaaatgaaatgttatcctctgaattgtctgtgtgccatgaatcaatctctagtttaaagattttgaataatgatttaaatgctaagctagaggtagccaataaatctagttcatgtgtagaacatgttgtagtttgcaatagatgcaaggattttgatattgatgcttgtgataaacatcttgcgtctattaccaaattgaatgatgaagtggcaagtcttaatgctcaacttaagacttgcaagattgattttgataagttaaaatttgctagggatgcctacaccgttggtagacacccctcaattaaggatggacttggctttcgaaaggaagccaagaacttaacaagccaaagggctcccattcccaacaaggagaaaggaaaggcccctatggctagtagcattcaaaggaatcatgcttttatttatgatagaaagtgttctaggaatgtgcattataataggagttatgttgattataatgattcacatgctacgtttgcctctagctctacttttgtgcatggtaggcctaggaaaagtaatggtgtgcatcatgtgcctaggaga

SEQ ID NO: 5058 - DNA, 3510 bp, Zea mays
  unsure (1)..(3510): unsure at all n locations
  Clone ID: TF_ZmC119_1513
ttagggaccccccggtctcgaaacgccgacactctttaagctagaaatagagtcatgacatgtagacaattcacaagagagcatttcatttcttttaatttctaacgcaagggagttttgtgcctctacaaacttatcatgctcatcatataagagatcctcttgcttttctaacaatcgattcttatcattcaaagcatcaatcaattcatttatttgatcaatcttagttctatctaggcccttgaataaactagcataatctatttcatcatcatcactagactcatcctcactagaagaagcataagtggattttcgagaatttaccttcttctcctttgccatgaggcaggtgtgatgctcattggagaagagggacgctttgttgaaggcggtggcggcgagtccttcgttgtcggagtcggacgacgaacaatccgagtcccactcctttccaaggtgtgcctcgcccttagctttcttgtaagccttcttcttttccctcttgtttccttgttcctggtcactatcattatcgggacaattagcgataaaatgaccaatcttaccacatttgaagcatgagtgcttcccctttgtcttggtcttgtttggatgctccttgcgaccccttagcgccgtcttgaagcgcttgatgatgagggccatctcttcctcattgagtcctgctgcctcaacttgtgccaccttgctaggtagcgcctccttgctcctcgttgctttgagagcaacggtttgaggctcgtggattggcccattcaaagcatcatcaacgtatctagcctccttgatcatcatccgcccgcttacgaactttccaagtatctcctcgggcgtcatcttggtgtacctaggattttcacgaatattgttcacaagatgcggatcaaggacagtaaaagaccttagcattaggcggacgacgtcgtggtccgtccatcgcgtgcttccatagctccttattttgttgacgagggtcttgagccggttgtatgtttgggttggctccttgcccttgatcattgcgaatctcccaagttcgccctccaccaactccatcttggtgagcatggtgacgtcgttcccctcatgtgagatcttgagggtgtcccaaatcttcttggcgttatccaagccgctcgccttatggtattcatccttgcacaatgatgctagaagaacagtagtagcttgtgcatttttgtgaatttgctcattgataaacatgggactatcactactatcaaattgcattccactctctactatctcccatatgcttggatggagagagaacaagtgactacgcattttgtgactccaaaatccgtagtcctctccatcaaagtgaggaggtttaccaagtggaatggagagtaaatgagcatttgtattttgtggaatacgagaataatcaaaagaaaagtttgaattgaccgttttctttttctcgtagttgtcgtcgtccttttgggaagaagaggactcgtcgctgtcgtcgtagtaaacgatctccttgatgcgccttgttttcttcttcttcccgtcttttctcttgtggcttgagcccgagtcagtaggcttgtcatcttttggatcattgacgaaggactccttctccttatcattgaccaccatccccttgcccttaggatccatctctttcgggcgattagtcccttttcttgaagaagaacggctctgataccaattgagagncacctagatggggggggggtgaataaggtgatcctgtaaaaacatgaaacttaatccacaaaacttgattaggagttagcacaattaagccaagtggctagagaggagagcttgcacaacacgataaccacaaagagatcaacacagagatggncacagtggtttatccccgtggttcggccaagtccaacacttgcctactccatgttgtggcgtcccaatggacgagggttgcaatcaacccctttcaagcggtccaaagacccacttgaataccacgggtgtttttgctttcactttactatatcccgcttgcgaggaatctccacaacttggagcctctcgcccttacactttgatgttcacaaagaagcacggagtaagggagggatgagcaacacacacaagacacgaaatcagagtaccaacacgcacacaagtcgcaacaagagctcacaacacaacttagcgagttcacaactcaaatggagctctaattgctatcgcaaagaatcaaatgcgcagaatcgaagtcttggtgcttaggaatgcttagagaatgcttggtgttctcctccatgctcctaggggtcccttttatagccctaaggcaactaggagccgttgagtgcattccaggaaggcaattcttgccttctgtcgcctggcgcaccagacagtccggtgcaccaccggacactgtccggtgcggatctctttccttatttggcgaagccgaccattgcagtcttggagccgttggcgcaccggacactgtccggtgcacaccggacagtccggtgccccatccgaccgttggcacttgccacgcgtcgcgcgcggattccgtggccgaccgttgacccggccgactgttggctcaccggacagtccggtgcaccaccggacagtccggtgaattttagccgtatgccgccgtcgaagtcccgagagcagccagttcgccagagctagcctggcgcaccggacactgtccggtgcaccaccggacagtccggtgcacccagactgcgcagagtcttggctgctcagccaagtcttttccaaattggtcttttcctgtttctagcacttagacacaatacattagtctccaaaacaatgtactaagtcttagaaacatacctttactcttgatttgcacttcttaagtctttggcacaaatattactcaaagcatttgtgtggagcacttaatcaccaaaatcttatagaaatgtcctaagggtacatttccctttcagggctaagtatttttttgtaaatcatattttgatacttcaccagaagtatccataaaaggaatggatttcaaggtagccaatgcatcaaagggtttccaagcaactcctataaacctaatgcacatttcactagacttaaagtgtgtaaaaatcatttaaaacacaaggaaggggttgcatgcaccggggcttgcttttgttagtaggtgagtcaggctcggactcgcagatgtcgaagtagagccaagtctctgcctgagattccaaaggtggtgatgtcttttcttcagtcacttcaccctcttctccgttttctaaatataaccatataggtatatatataagaatgaatgccatgtaatgcaaactatcacaaagagagatggagaacagaaacactacaactaaagcgcatgacaagaatatacctatttcttatcgctcgattaaagtgaccaatttgaattcacttaggtaaaccagggaattaatccaacttata

SEQ ID NO: 5059 - DNA, 4719 bp, Zea mays
  Clone ID: TF_ZmC119_745
tcaatccaagttccgcgaatctaagacatttagctcactacgcagcctgcaaaaggtcgactcatctagaggcttggtaaagatatcggctagttggttctcggtgctaacataaaacacttcgatatttcccttttgctggtggtctctcaaaaagtgatgccggatgtctatgtgcttggtgcggctatgttcaacaggattatccgccatgcggatagcactctcattatcacataggagtgggactttgctcagattgtagccaaagtccctgagggtttgcctcatccaaagtagttgcgcgcaacactgtcctgcggcaacatacttggcctcagcggtggatagggcaactgaagtttgtttcttagaactccacgacaccagggaccttcctaagaattggcacgtccccgatgtactcttcctatcgaccttacatccagcatattcggagtctgaatatccaattaagtcaaaggtagacccctttggataccagatcccgaagcaaggcgtagcgactcctttgttgaggtcggtgtgtccgtcggttcccattgcagtctttgcgggcttggcgtccttcatcccaaatcgcttgatcaagtcttgcgtgtacttcgtttgggagatgaaggtcccatccttgagttgcttcacttggaacccaaggaaatagcttaactcgcccatcattgacatctcaaacttttgagtcatcaccctgctaaactcttcacaagacttttggttagtagaaccaaatattatgtcatcgacataaatttggcacacaaataagtcaccatcacaagtcttagtaaaaagagttggatcggctttcccaaccttgaaagcattagcaattaaaaagtctctaaggcattcataccatgctcttggggcttgtttaagtccatagagcgccttagagagcttacacacgtggtcggggtaccgttcatcctcgaagccagggggttgctccatgtacacctcctccttgattggcccgttgaggaaagcgctcttcacatccatttggaacaacttgaaagaatggtgagtagcataggctaacaatatgcgaattgactctagcctagccacaggagcaaaggtctcctcaaagtccaaacctgcgacttgggcataaccttttgccacaagtcgtgccttgttccttgtcaccaccccgtgctcgtcttgtttgttgcggaacacccacttggttcccacaacattttgcttgggacaaggcaccaatgtccaaacttcatttctcttgaagttgttgagctcttcctgcatggccaacacccagtccggatctagcaaggcttcttctaccctgaaaggatctccaatcgccatggtgcgcattgcggccgttggaacgtcttcttcatttacatcatcaagatcaacaacttgctctcttggagagccattagtctcatcaaatacaacatcgctagagacttcaaccaaacccgatgatttgttgaagaccctatatgcctttgtatttgagtcataacctaacaaaaacccttctacagctttgggagcaaacttagaattcctacctttcttcactagaatgtaacatttgctcccaaatacacgaaagtaagacacattgggtttgttaccagttagaagctcatatgaagtcttcttgaggaggcgatgaaggtagacccggtttatggcatggcaagccgtgcttacggcttccgtccaaaaccgttcgggcgtcttgaattcaccaagcatcgtcctcgccatgtctagtagcgtcctgttcttcctctctaccacaccattttgctgtggtgtgtagggagcagagaactcatgcttgattccttcctcctcaagatactcctccacttgaaggttcttgaactcggacccattgtcgctccttatcttcttcactttgagctcaaactcgttttgggctctccttaggaagcgcttgagggttccttgggtttcagatttatcttgcaaaaagaatacccaagtgaagcgggaaaaatcatcaactgcttgacaagctgcacaaggtctatctttttcgaaagttacattagttagacctatcacgtgttctccctttagaagcttgtgaaggttcttcatccccacatgtgctaaacggcgatgccacagccagcccatgctagtcttagcaattaagcaagcatctagaccgacctcctcttttgcaaaatcaactaaataaagtttgccgtctagtacacccttaaaagctaatgaaccatcacttcttctaaagacagatacatctacatttgtgaataaacagttatatcccatattacaaagttgactcacagacaacaagttatatccaagcgattcaactaagaacacattagaaataaagtgctcggatgaaatagcaatttttcctaaccctttcaccttgccttggttcccatcaccgaatatgattgaatcttggggatccttgttcttgacgtaggaagagaacatcctcttctcctccgtcatgtggtttgtgcatccgctgtcgataatccagcttgatcccccggatgcataaaccttcttatcctttctacaaatagcaaaggaagcattgcaagcataataaattgtagaaggttcattcattattttcctaggaacatgaacaatatttcttctaggcgtatgatgaacaacatttttcttagccaaatttctatcatgcataatagaagaactagaagcaatcatggcatgagcatcataacttctataaacattcctagaatgtctcctatcatgatacatgaaagcatggttcttttgagcactactagccataggggccttccctttctccttggcggagatggaagccatatggcttgttaagttcttgacttccctcttgaagccaagaccatccttgattgaggggtgtctaccaattgtgtaggcatcccttgcaaattttagtttgtcaaattcactcttgctagtcttaagttgggcattaagactagccacttcatcattcaaattagaaattgaaactaggtgttcactacaagcatcaacattaaaatctttacacctattgcaaattgcaacatgttctacacaagatgttgatctattagctatttctaacttagcattcaaatcatcatttatgctctttaagctagaaatagagtcatggcatgtagacaattcatcagaaagcatttcattccttttaatttctaaagcaagggatttttgtgcctctacaaacttatcatgttcttcatacaaaagatcctcttgcttttttaataacctatttttatcattcaaggcatcaattaattcattaatcttatcaaccttagttctatttaggcccctgaataaacatgaatagtctatttcatcatcgctagattcttcatcacttgaggacgcgtaagtactagtatcacgagtgcttaccttcttttcccttgccatgaggcaggtgtgatgctcgttggggaagagggccgacttgttgaaggcggtggcggcgagtccttcgttgtcggagtcggacgaagaacaatccgagtcccactcctttccaaggtgtgcctcgcccttagcctttttgtaagccttcttcttttccctcttgttcccttgttcctggtcactatcattatcgggacaattagctataaaatgaccaatcttaccacatttgaagcatgagtgcttccccttcgtcttggtcttgttgggatgctccttgcgaccccttagcgccgtcttgaaatgcttaatgatgagggccatctcttcctcattgagtcccgccgcctcaacttgtgccactttgctaggtagcacttccttgctcctcgttgctttgagagcgacggtttgaggctcgtggattgggccattcaaggcatcgtcaacgtatcttgcctccttgataatcatccgcccgcttacaaactttccaagtatctcctcggacgtcatcttggtgtacctaggattctcatgaatattgttcacaagatgtggatcaaggacagtaaaagaccttagcattaggcggacgacgtcatggtccgtccatcgcgtgcttccatagctccttattttgttgacgagggtcttgagtcggttgtatgtttgggttggctcctcgcccctgatcattgcgaatctcccaagctcgccctccaccaactccatcttggtgagcatggtgacgtcgttcccctcatgtgagattttgagggtgtcccaaatctgcttggcgttatccaagccgctcacttggatggagagagaacaagtggctacgcattttgtgactccaaaatccatagtcctctccatcaaagtggggggtttaccgaggggaatagaaagcaaatgagcattggaactttgcggaatacgagaataatcaaaggaaaagtttgagttaaccgtcttctttttctcgtagtcgttgtcattgtccttttgggaagaggaagatttgtcgctgtcgtagtagactatctccttgatgcgccttgttttcttcttcctcccgttttttcttttgtggcccgagcctgagtcagtaggcttgtcatcctttggatcattgacgaaggactccttctccttatcattgaccaccatccccttgcccttaggatccat

SEQ ID NO: 5060 - DNA, 2555 bp, Zea mays
  Clone ID: TF_ZmC33526_1
cgcggcctctctccttctgccttcccacttcccacagtgagacgtcctcctcaccccattcgcagtcgcccactgactgtccgtgccggctaacaacatgaagtggaacctcgaattccgggccgccggcggatctcgccgtgctttgcgcgaccctcctcctgctggacggcgaagaatccccgagcctacacggctcgccacccacacttcgactgccatgcggcccagctcttccagctgcggtatacgtctttaccctctgatgtgcctagtggagaattcctagcgcagcgggatcggtttgaagcctggcaacctcgctcaccgtgctcttcgcttgctactcggctcgaagtcgacgtctgcgagttcgtcgtgtgcgccgaattgtacacgacgtctaacgcgatcgtggagcccaggaatgccgctgctggtcgtgctaagaagaagatgtgtaatgggggttgtatgaattccaacctcagcacgcgacctgtgtaagctgtagatggaaaccttcctgtgctgcaagaggacgatgcgatatactagggtgttagtgcccacttagatttggtttcctagcaatctcgccgttttatacgtttgatgtcagcgtttttttctcttattaatactattttgacgtattgtatgtatgattttcacgtattatgttaactgctgtgtacgtgaaatacctgatcttgtcacgtacatggttcgctttcggtttgccttctaaaaaccgggtgtgagaaagactctcacggctccctcccgctggccgcttctcccgccttctggttccgcctagcgccgacgcatttgggctggagtacgagacgacgattgactcgtcgatacaaggaccccccggttgtctaaataccgagacgatcctttctacaaattgcaaaggaagcattgccagtgtgataatttatagaaggttcattaatcttcctaggaacatgagtaacatttctcttaggcatatgatgaatgacatttttcctagtcaaatttctatcatgcataatagaagaactagaagcagtcatggcatgagaattaaaagcatcataacttctataattattcctagaatgtctcctatcatggtacatgaaagcatggttcttttgaacactactagacataggggccttccctttctccttggcggagatggaaaccttatggcttgttaagttcttgacttccctcttgaagccaagaccatccttaattgaggggtgtctaccaatcgtgtaggaatcccttgcaaattttattttatcaaattcactcttgctagtcttaagttgggcattaagactagccacttcatcattcaatttagaaattgaaactaggtgttcactacaagcatcaacattaaaatctttacacctattgcaaattgcaacatgttctacacaagatgttgatttatttgctatttctaacttagcattcaaatcatcatttatgctctttaagctagaaatagagtcatggcatgtagacaattcacaagaaagcatttcatttcttttaatttctaaagcaagggatttttgtgcctctacaaacttatcatgttcttcatacaaaagatcctcttgcttttctaataatctattcttatcattcaaggcatcaatcaactcattaatcttatcaaccttagttctatctaagcccttgaataaacatgaatagtctatttcatcatcgctagattcttcatcacttgaggaagcgtaagtactagtattacgagtgcttaccttcttttcccttgccacgaggcaagtgtgatgctcgttggggaagagggatgacttgttgaaggcggtggcggcgagtccttcattgtcggagtcgaacaacaaacaatccgagtcccactccttgccaaggtgtgcctcgcccttagccttcttgtacgcctttttcttttccctcttgttcccttgttcctggtcactatcattatcgggacaattagcgataaaatgaccaatcttaccacatttgaagcatgagtgcttccccttcgtcttgttcttgttaggctgccccttgcgaccctttagcgccgccttgaagcgcttgatgatgagggccatctcttcatcattaagcacggctgcctcaacttgcgccaccttgctaggtagcgtctccttgctcctcgttgccttgagagcaatagtttgaggctcttggattgggccatttaatgcatcgtcgacgtatcttgcctccttgatcatcatccgcccgcttacaaactttctaagtatctcctcaggcatcatcttggtgtacctaggattctcacgaatattgttcacaagatgtggatcaaggacggtaaaagaccttagcattaggcggacgacgtcgtggtccgtccatcgcgtgcttccatagctccttattttgttgatgagggtcttgagccggttgtacgtttgggttggctcctcgcccctgatcattgcgaatctcccaagttcgccctccaccaactccat

SEQ ID NO: 5061 - DNA, 3548 bp, Zea mays
  Clone ID: TF_ZmC4916_452
atggatcctaaggggaagggaattgtgatcaatgataagaagaaggagtcctttgtcaacgagccgaaggatgacaagcctaccgactcaggcttgggccacaaacgcaaagatgggaagaagaagaagacaagacgcatcaaggagatcatctactacgatgacaacgatgagtccacttcttcccataaggacaacgacgacaacgactacgacaaaagaaagacggttaattcaaacttttctttcgattactctcgtattccgcatagctcaaatgcacatttgctttccatccctcttggcaaacctccacactttgatggggaggactacggattttggagtcacaaaatggacgagtaccataaggtgagcggcttggacaatgccaagcagatctgggacaccctcaagatctctcatgaggggaacgacgtcaccttgctcaccaagatggagttggtagagggcgagctcgggagatttgcaatgataaggggcgaggagccaacccaaacatacaaccggctcaagaccctcatcaacaaaataaggagctacggaagcacacgatggatggaccacgacgtcgttcgcctaatgctaaggtcctttactgtacttgatccacatctggtgaacaatattcgtgaaaatcctaggtacaccaagatgtcgcctgaagaagttcttgggaagttcgtgagcgggcgaatgatgatcaaggaggcgagatacgtggacgacgcattgaatggtccaatcaatgagcctcaaccctttgctcttaaagcaacaagaagcaaggaggcgctacctagcaaggtggcacaagttgaggcggcagggctaagtgatgaagagatggctctcatcatcaagcgcttcaagacagcgctaaagggtcacaagggacagccaagcaagaccaagacaaaggggaagcactcatgcttcaagtgtggtaagattggtcattttatcgctaactgtcccgataatgatagtgaccaggaacaggggaacaagagggagaagaagaagacatacaaaaaggctaaaggcgaggcacaccttggcaaggagtgggactcggattgttcgtcatccgactccgacaatgaaggactcgccgccaccgccttcaacaagtcatccctttttcccaacgagcgtcacacatgcctcatggcgaaggagaagaaggtttatgcatccgggggttcaagctggattatcgacagcggatgcacaaaccatatgacgggggagaagaagatgttcacctcctatgtcaaaaacaaggattcccaagattcaataatattcggtgatgggaaccaaggcaaggataagtctgaaacccaagggaccctcaagcgcttcctaaggagagctcaaaacgagtttgagctcaaagtgaagaagataaggagcgacaatgggtccgagttcaagaacttcaagtggaggagttccttgaggagaaggggatcaagcacgagttctccgctccctacacaccacagcaaaatggtgtggtagagaggaagaacaggacgctcattgatatggcgaggactatgcttggagagttcaagacccccgagtgtttttggtcggaagccgtgaacacggcttgccacgccatcaacagagtctatcttcaccgcctcctcaagaagacctcatacgaactgctaactggtaacaaacccaatgtatcgtactttcgtgtatttgggagtaaatgctacattctagtgaagaagggtaggatttccaaatttactcccaaagttgtagaagggtttttattaggttataattcaaatacaaaggcgtatagggtcttcaacaaatcatcgggtttggttgaagtctctagcgacgttgtatttgatgagactaatggctctccaagagagcaagttgttgatcttgatgatgtagatgacgaagacgttccaacggccgcgatacgcaccatgacgattggagatgtacggcctcgggagcaattggagcaagatcaaccatcttcctcaactatggtgcatcccccaactcaagacgatgaacaggttcatcaaaaggaggcgtgtgatcaatggggagcacaagatgatcacgtgatggaggaagaagcgcaaccgacacctccaactcaagtccgagcggtgattcaaagggatcatcccgtcgaccaaattttgggtgacattagcaagggagtaactactcgatctcgattagttaatttctgtgagcattactcttttgtctcttctattgagcctttcagggtagaggaggccttgctagatccggactgggtattggccatgcaggaggaactcaacaacttcaagcgcaatgaagtttggacactggtgcctcgtcctaagcaaaatgttgtgggaaccaagtgggtgttccgcaacaaacaagacgagcacggagtggtgacaaggaacaaggctcgacttgtggcaaaaggttatgcccaagtcgcaggtttggactttgaggagacttttgctcctgtggctaggctagagtctattcgtatcttgctagcatatgctgctcaccattctttcaggttgtaccaaatggatgtgaagagtgctttcctcaatgggccgatcaaggaggaggtgtacgtggagcaaccccctggcttcgaggatgaacggtaccccgaccacgtgtgtaagctctctaaggcgctctatggacttaagcaagccccaagagcatggtatgaatgccttagagaatttttaattgctaatgctttcaaggttgggaaagccgatccaactctttttacaaagacatgtgatggtgatttgtttgtgtgccaaatttatgtcgatgacataatatttggttatactaaccaaaagtcttgtaaagagtttagcagggtgatgacgcagaaattcgagatgtcgatgttgggcgagttgaactacttccttgggttccaagtgaagcaactcaaggacggcaccttcatctcccaaacgaaatacacgcaagacttgctaaagcggtttgggatgaaggacgccaagcccgcaaaaactccaatgggaaccaacggacacaccgacctcaacaaaggaagtaagtccgttgatcaaaaagcataccggtccatgataggttctttgctttatttatgtgctagtagaccggatattatgcttagcgtatgcatgtgtgctagatttcaatccgatcctaaggagtgtcacttagtggcggtgaagcgaatactgagatatttagtcgctacgccttgcttcgggatctggtatcctaaggggtctaactttgacttaattggatactcagattccgactatgctggatgtaaggtcgataggaagagtacatcggggacgtgccaattcttaggaaggtccctggtgtcgtggaactctaagaaacaaacttccgttgccctatccaccgctgaggccgagtacgttgccgcaggacagtgttgcgcgcaactactttggatgaggtaa

SEQ ID NO: 5062 - DNA, 1539 bp, Zea mays
  Clone ID: TF_ZM4334.C2.o14.fg
atggatgctcaatatgatgtgactcaagaatggcttgatagggtgaagatagcaaggaaagggcttcgaggaactaagcgaagtctgcggtcagtctgcgcgtcagtctggcagtcagactggcagacaggctgccagctttggtactacatcgagttctttgtggattcattactcttggagcttgtagctcctagacgactaggtgtctcttatattgatcctagggcaatagatcttgccatgaaaatcgccgaaaggatgttcctcaaaatgaaagaagatgaggcgaagaacaagattgaagaagaagaaaatgatcgatggagaccaaacgacgaatccacctcttcacaagctaatgggagtgacagtgaaagcgaaagtgagaatgaggaggagcatgaaagtgatagtgaagatgaggatgatcttcaaaaattcttcgctcaactaagtaagaagaaccggatgagcttgctcaaactcatgaaaagagcggaagaacaaaaggaaatgcttcataagcaagaagatgtcctcatcgaaaaaatcaaagacttggagaagttgaccaaagagcatgagaagctaaagtgctctcatgatgatttggtccaaaggtatgaagacatttcaattgagcaaattaaagctattaaacattcatcatatattgctcaattagaaaataaaaatgctatgctcaagaacacggtagaaaggctaaatattgaaaatctagctttgcaagaaaaacatgatatgcttgtgtgctctcataataaatttatggattcacatatcatgttagaaatggctcatgaggttgtgttaactaatttgaaatcatgccaacctcacatatgcacatgtactcaaatagaaactatattaccatgtgctaacaattgttgttatcaagcaagccaatcttccattgagctagaaatttcaggaattagtgatatttctatcacacaagaaaataaagagctcaaggaagaaaatgagaggctaaaaaggagcttaactattttgaagggaaagtgtcatgctcaaccttctcaagataaccgtgataatatggtgaaaaagcttgagaaggggacaactgtagcatgcacaaaaccccttcaaaagaataccaagctttccaagaagggcatgagcaaaattcatggtaagaaaattaatgctcatactatttgctctaacaatgtacctatgtgcttcaacaaagaaagatcaaagagaagcgataggagatgctatggatgcaaggagaagggccatgaaattgattcatgcccccacatgaagaatcaagaccttgcaggatcaagaaatatgaccatcaaaaaggatgaaagcaaaaggcaaatgctttgcaaggacaagcatcacatttgctacaattgccgtgaaaaaggtcatctattcaaggattgtcccatgagtaagtatcctaagcctaccatgtcaattctttcatattcgcttaggagacccaaaatgacatttgtgctagaaaggtaa

SEQ ID NO: 5063 - DNA, 4890 bp, Zea mays
  Clone ID: TF_ZM4354.C13.o2.fg
atggatcctaagggcaaggggatggtggtcaatgataaggagaaggagtccttcgtcaatgatccaaaagatgacaagcctactgactcgggctcgagccacaaaagaaaagacgggaagaagaagaaaacaaggcgcatcaaggagatcgtctactacgacgacagcgacgagtcctcttcttcccaaaaggacgacgacaactacgagaaaaagaaaacgttcaattcaaacttttcttttgattattctcgtattccgcaaagtacaaatgctcatttactctccattccacttggtaaacctcctcactttgatggagaggactacggattttggagtcacaaaatgcgtagtcacttgttctctctccatccaagcatatgggagataatagagagtggaatgcaatttgatagtattgatagtcccatatttatcaatgagcaaattcacaaaaatgcacaagctactactgttcttctagcatcattgtgcagggatgaataccataaggtgagcggcttggataacgctaagcagatctgggacaccctcaagatctcgcatgaggggaacgacgtcaccatgctcaccaagatggagttggtggagggcgaacttgggagatttgcaatgatcaggggcgaggagccaacccaaacgtacaaccggctcaagaccctcgtcaacaaaataaggagctatggaagcacacgatggacagaccacgacgtcgtccgcctaatgctaaggtccttcactgtccttgatccacatcttgtaaacaatattcgtgaaaatcctaggtacaccaagatgtcgcccgaggaaatacttggaaagttcgtaagcgggctgatgatgatcaaggaggcaagatacgtcgatgatgcgttgaatggcccaatccatgagcctcaaaccgttgctctcaaagcaacgaggagcaaggaagtgctacctagcaaggtggcacaagttgaggcggcggggctcaatgaggaagagatggccctcatcatcaagcgtttcaagacggcgttaaggagtcgcaaggagcatcctaacaagaacaagacgaaggggaagcactcatgcttcaaatgtggtaagattggtcattttatcgctaattgtcccgataatgatagtgaccaggaacaagagaagaagagggaaaagaagaaggcttacaagaaggcaaagggcgaggcacaccttggcaaggagtgggactcggattgttcgtcgtccaactccgacaacgaaggactcgccgcctcggccttcaacaagtcatccctcttccccaacgagcatcacacatgcctaatggcaaaggagaagaaggtaaacactcgaaagtctacttatgcttctagtgatgatgaatctagcgatgatgaaatagactatgctagtttgttcaagggcttagatagaactaagattgataagatcaatgagttgattgatgccttgaatgataagaatagattattagaaaagcaagaggatcttttgtatgaagaacatgataagtttgtagaagcacaaaaatctcttgctttagaagttaaaagaaatgaaatgctttcatgtgaattgtctacatgccatgaatctatctctagcctaaaaagtgttaatgatgatttgaatgctaagttagaaatagctagtaaattaacctctcgtgaagaacatgttacgatttgcaataggtgtaaagattttaatgttgatgcttgtagtgaacacctagtttgcatttctaaactaaatgatgaagtggctagtcttaatgctcaacttaagactagcaaaaatgattttgataaactaaaatttgcaagggatgcctacacggttggtagacacccctcaattaaggatgggcttggcttcaagagggaagccaagaacttgacaagtcataaggctcccatctccgccaaggagaaagggaaggctcctatgactcataatagtcaaaagaatcatgctttcatttacggtgataagagatattctagaaatgttcataggagttgtaatgattcaaatgccatgtttgcttcaagttcttcctatgtgcatggtagagatatgcctaggagaaatgtcattcatcatgtgcctaggagaaatgttcatgttcctaggaaaattaatgaaccttctactatttatcatgcttgcaatgcttcctttgctatttgtagaaaggataagaaggtgattgctaggaaattaggggcaaaatgcaagggagataaaacttgcatttgggtccctaaggatattgtcactaaccttgtagaacccaacaagagttgggtttatgcatccgggggatcaagctggattatcgacagcggatgcacaaaccacatgacgggggagaagaagatgttcacctcctacgtcaagaacaaagattcccaagactcaatcatattcggtgacgggaatcaaggcaaggttaaaggactagggaagattgccatttcatccgagcactctatctctaatgtgtttttagttgagtcgcttggatataacttattgtctgtgagtcagctttgtaatatgggatataattgcttatccacaattgtagatgtgtctgtctttagaaggagtgatggttcattagcttttaagggtgtattagatggcaaactctacttagttgattttgcaaaagaggaggccggtctagatgcatgcttaattgctaagactagcatgggctggctgtggcatcgccgcttagcacatgtggggatgaagaaccttcacaaacttctaaagggagaacacgtgataggtctaacaaacgtaaccttcgaaaaagatagaccttgtgcagcttgtcaagcaggtaaacatgtgggaagctctcatcataccaaaaatgtgatgaccacatcaagaccgttggagttgcttcatatggacctcttcggacccatcgcctatctaagcatagaaggaagtaagtatggtcttgttatagttgatgatttttcccgcttcacttgggtattctttttgcaggataaatctgaaacccaagggaccctcaagcgcttcctaaggagagctcaaaatgagtttgagctcaaggtgaaaaagataaggagcgacaacgggtccgagttcaagaaccttcaagtggaggagtaccttgaggaggaaggaatcaagcatgagttctccgctccctacacaccacagcaaaatggtgtggtagagaggaagaacaggacgctcattgacatggcaaggacgatgcttggagagttcaagacgcccgagaggttttggttggaagccgtgaacacggcttgccacgccataaaccaggtgtatcttcatcgcctcctcaagaagacttcgtatgagcttctaaccggtaacaaatccaatgtgtcttactttcgtgtatttgggagcaaatgttatattctagtgaagaaaggtagaaattctaagtttgctcccaaagctgtagaagggtttttgttaggttttgactcaaatacaaaggcgtatagggtcttcaacaagtcatcgggtttggttgaagtctctagcgacgttgtatttgatgagactaatggctctccaagagagcaagttgttgatcttgatgatatagatgaagaagatattccaacggtcgcaatacgcaccatggcgattggagaagtgcggccacaggaacaaaaggagcaagatcaaccttcttcctcaacaatggtgcatcccccaactcaagacgatgaacagcctttcagggtagaagaggccttgctagatccagactgggtgttggccatgcaggaggagctcaacaatttcaagagaaatgaagtttggacactggtgcctcatcccaagcaaaacattgtgggaaccaagtgggtgttccgcagcaaacaagacgagcacggggtggtgacaaggaacaaggcacgacttgtggcaaaaggttatgcccaagtcgcaggtttggactttgaggagacttttgctcctgtggctagactagagttgttccaaatgtatgtgaagagcgctttcctcaatggaccaatcaaggaggaggtgtacgtggagcaaccccctggcttcgaggatgaacggtaccctgaccacgtgtgtaagctctctaaggcgctctatggacttaagcaagccccaagagcatggtatgaatgccttagagactttttaattgctaatgctttcaaggttgggaaagccgatccaactttattcactaagacatgtgatggcgatttatttatgtgccaaatttatgtcgatgacataatatttggctctactaaccaaaagtcttgtgaagagtttagcagggtgatgactcagaagtttgaaatgtcgatgatgggcgagttgaactacttccttgggttccaagtgaagcaactcaaggacggcaccttcatctcccaaacgaagtacacacaggacttgctcaagaggtttgggatgaaggacgccaagcccgcaaagacaccaatgggaaccgacggacatgtcgacctcaacaaaggaggacagtgttgcgcgcaactactttggatgaggcaaaccctcagggactttggctacaatatgagcaaagtcccactcctatgtgataatgagagtgctatccgcatggcggacaatcctgttgaacacagccgcacaaagcacatagacatccggcatcactttttgagagaccaccaacaaaagattttggtaaggcaatggggttctagggccaagattgatcccgttctggtgcttgatgccaaagggggagaaaataaggccaaagcaacaaatggatcagctaccacttga

SEQ ID NO: 5064 - DNA, 2913 bp, Zea mays
  Clone ID: TF_ZM4499.C1.o3.fg
atggagtgggtatttcttaggaagaaaatacttggagatatatcagtggaatatttgggtagtatttctgaaaagaacttgaaggggattactcgagaaatatctgggcgagcaagtttgagaaaatttcaagatttgaatttttgggatgctacatggacggatcacgacgtcgtccgcctaatgctaaggtccttcgctgtccttgatccacatcttataaacaatattcgtgaaaatcctaggtacaccaagatgtcggccgaagaaatacttggaaagttccgattcaagacagcactaaagggtcgcaaggagcatcccaacaagaacaagacgaaggggaagcactcatgcttcaaatgtggtaagattggtcattttatcgctaattgtcccgataatgatagtgaccaggaacaagagaagaagagggaaaataagaagtcttacaagaaggctaagggcgaggcacaccttggcaaggagtgggactcggattgttcgtcgtccgactccgacaacgaaggactcgccgcctcggccttcaacaagtcgtccctcttccccaacgagcatcacacatgcctaatggcaaaagagaagaaggtaaacactcgaaagtctacttatgcttctagtgacgatgaatctagcgatgatgaaatagactacgctagtttgttcaagggcttagatagaactaagattgataagatcaatgagttgattgatgccttgaatgataagaatagattattagaaaatcaagaggatcttttgtatgaagaacatgataagtttgtagaagcacaaaattctcttgctttagaagttaaaagaaatgaaatgctttcatgtgaattgtctacatgccatgaatctatctctagcctaaaaggtgttaatgatgatttgaatgctaagttagaaatagctagtaaatcaacctctcgtgaagaacttgttacgatttgcaataggtgtaaagattttaatgttgatgcttgtagtgaacacctagtttgcatttctaaactaaatgatgaagtggctagtattaatgctcaacttaagactagcaaaaatgattttgataaactaaaatttgcaagggatgcctacacggttggtagacacccctcaattagggatgggcttggcttcaagagggaagccaagaacttgacaagtcataaggctcccattaccgccaaggagaaagggaaggcccctatggctaatagttctcaaaagaatcatgcatttatttatgataagaaattttctagaaatgttcatcatgataggagttgtaatgcttatgattcaaatgcaatgtttgcttcaagttcttcctatgtgcatggtagagatatgcctaggagaaatgtttatgcatccgggggctcaagctggattatcgacagcggatgcacaaaccacatgactggggagaagaagatgttctcttcctacgtcaagaacaaagactcccaagactcaatcatattcggtgacgggaatcaaggcaaggacaagcacggggtggtgacaaggaacaaggcgagacttgtggcaaaaggttatgcccaagtcgcaggtttggactttgaggagatttttgctcctgtggctaggctagagtctattcgtattttgttagcctatgtcgctcaccattccttcaggttgttccaaatggatgtgaagagcgctttcctcaacgggccaatcaaggaggaggtgtacgtggagcaaccccctggcttcgaggatgaacgataccccgaccacgtgtgtaagctctctaaggcgctctatggacttaagcaagccccaagagcatggtatgaatgccttagagactttttactttctaatgctttcaaggttgggaaagtcgatccaactttattcactaagacttgtgatggtgatctttttgtgtgccaaatttatgtcgatgacataatatttggttctactaaccaaaagtcttgtgaagagtttagcaaggtgatgactcagaaattcgagatgtcaatgatgggcgagttgaactacttccttgggttccaagtgaagcaactcaaagatggcaccttcatctcacaaacaaagtatacacaagacttgctcaagaggtttgggatgaaggacgccaagcccgcaaagactccaatgggaactaacggacacaccaacctcaacaaaggaggtaagtccgttgatcaaaaggcataccagtctatgatagggtctttactttatttatgtgctagtagaccgaatattatgcttggtgtatgcatgtgtgctagatttcaatccgatccaaaggagtgtcacttagtggctgtgaagcgaattcttagatatttagtcgctacgccttgcttcgggatctggtatccaaagaggtctacctttgacttgattggatattcagactccgactatgctggatgtaaggtcgataggaagagtacatcggggacgtgccaattcttaggaaggtccctggtgtcgtggagttctaagaaacaaacttccattgccctatccaccgatgaggccgagtatgttgccgcaggacagtgttgtgtgcaactactttggatgaggcaaaccctcagggactttggctacaatctgagcaaagtcccactcctatgtgataatgagagtgccatccgcatgacggataatcctgttgaacacagccgcactaagcacatagacatctggcatcactttttgagagatcaccagcaaaagggagatatcgaagtgtttcatgttagcaccgagaaccagctagccgatatctttaccaagcctctagatgagaagaccttttgcaggctgcgtagtgagctaaatgtcttagattcgcggaacttggattga

SEQ ID NO: 5065 - DNA, 1369 bp, Zea mays
  Clone ID: TF_ZM4893.C2.o8.fg
atggagtgggtatttcttaggaagaaaatacttggagatatatcagtggaatatttgggtagtatttctgaaaagaacttgaaggggattactcgagaaatatctgggcgagcaagtttgagaaaatttcaagatttgaatttttgggatgctacatggacggatcacgacgtcgtccgcctaatgctaaggtccttcgctgtccttgatccacatcttataaacaatattcgtgaaaatcctaggtacaccaagatgtcggccgaagaaatacttggaaagttccgattcaagacagcactaaagggtcgcaaggagcatcccaacaagaacaagacgaaggggaagcactcatgcttcaaatgtggtaagattggtcattttatcgctaattgtcccgataatgatagtgaccaggaacaagagaagaagagggaaaataagaagtcttacaagaaggctaagggcgaggcacaccttggcaaggagtgggactcggattgttcgtcgtccgactccgacaacgaaggactcgccgcctcggccttcaacaagtcgtccctcttccccaacgagcatcacacatgcctaatggcaaaagagaagaaggtaaacactcgaaagtctacttatgcttctagtgacgatgaatctagcgatgatgaaatagactacgctagtttgttcaagggcttagatagaactaagattgataagatcaatgagttgattgatgccttgaatgataagaatagattattagaaaatcaagaggatcttttgtatgaagaacatgataagtttgtagaagcacaaaattctcttgctttagaagttaaaagaaatgaaatgctttcatgtgaattgtctacatgccatgaatctatctctagcctaaaaggtgttaatgatgatttgaatgctaagttagaaatagctagtaaatcaacctctcgtgaagaacttgttacgatttgcaataggtgtaaagattttaatgttgatgcttgtagtgaacacctagtttgcatttctaaactaaatgatgaagtggctagtattaatgctcaacttaagactagcaaaaatgattttgataaactaaaatttgcaagggatgcctacacggttggtagacacccctcaattagggatgggcttggcttcaagagggaagccaagaacttgacaagtcataaggctcccattaccgccaaggagaaagggaaggcccctatggctaatagttctcaaaagaatcatgcatttatttatgataagaaattttctagaaatgttcatcatgataggagttgtaatgcttatgattcaaatgcaatgtttgcttcaagttcttcctatgtgcatg

SEQ ID NO: 5066 - DNA, 498 bp, Zea mays
  unsure (1)..(498): unsure at all n locations
  Clone ID: TF_LIB3632-013-Q1-K6-E6
cggggggggggggttcaactgcggccagcctggccacgtggccagagactgctccagcggcggcggcggctacagcggtggcagcggcggtggtggtggcggatgatacaactgtttttttgccgtccacttttccagggactgcccatggggtgggggggggggcnnacgnaggctcggcggcnnccgttttgggggggggggaggatcctcccctggggagaggaaagaaacattgcccgcgactgtcccacgtcaggtgtttccgcgtccggccagtcagcctgatcggatcggatcggtccaccacctgctggtctgacggcgccgtccccttctagatctcccttgaaaaagctccccccctcgctgggtgtcggaactccttttttttggtggacgatccgggcactagtgtcctgtgcctcttttttcttctgcggttcgaggatcccggccctgcggccacaagagggacgccccgggngggacgaagaa

SEQ ID NO: 5067 - DNA, 5025 bp, Zea mays
  Clone ID: TF_ZM4587.C3.o1.fg
atgtcgggagatcacgccaagaaggagatggtgaccggcgagaagcccgttacaagccacgggaaggctccatcgggagagtcccgcaacaaggggaaggagaaggaatccccttcacacaagtcacatcggagtggcgaaaagaaaaagaagatgaggaaggtggtctactacgagatcgactctttgtcgccatccacctccggctccgacgcgccgtccgtaacttctaagcgccatgagcgcaagaagtttagtaagattcccctacactaccctcgcatttccaaacgtactccattactttccgttccattaggcaaaccaccaatttttgacggtgaagattataacatgtggagtgataaaatgagacatcacctaacctcactctacactagtatttggaacgttgttgagtttggtgtacaggagtataacaaggtgcaaggattgaagagcgccaaggagatttgggacgtcctcaaaacggcgcacgaaggagacgaggtgacaaagatcaccaagagggaaacgatcgagggggagctcggtcacttcatgctcaaccaaggagaagacccacaagccatgtacaaccggctaaaaaccttggtggaccaaatcacggggcaaggggcgagtccgagcttggccgacctggtcccgaggtccgtgcccgtcggcttgaatctcgcggcattcggttgggggatcgccaggattccgcgcaatacctggcgacaaatgcaacgtgcaggagaaggaggagctgacgacgtggccccaccacgcggtgtgaggaaggcagtagctgacgcacgggcccatttgtcagcgccagaagggcagtgccaagcgcgcggccacgcccaggcgatgcagggggaaaatgggccgcaggatgacacttttggcccaccaggctccaaaaagatcatcgagcaaggcgcatcctcctccgtacccgaagcacaacccgttgcattcaaggcaacggagaataagaaagaagactctacaccgagtagggtccccatcgacgcctccaagctcgacaatgaggagatggcgctcatcatcaagagctttcgccaaatcctcaaacaaaggaaggggaaagattacaagccccgttccaagaaggtttgctacaagtgtggtaagcccggtcatttcattgctaaatgttcattatctagtgatagtgacaggggcgacgacaagaagggaaagagaagagaaaagaagaggtactacaagaagaagggcggcgatgcccatgtttgccgggagtgggactccgacgagagctccaccgactcctcctccgacgaggacgccgccagcatcgccgtcaacaaagggctcctcttccccaacgtcggccacaaatgcctcatggcaaaggacggcaaaaagaagaaggtaaaatccaaatcctccactaagtatgcaacatctagtgatgaagctaattctagtgatgatgaggatgatttatttactctctttgccaacttaaacatgcaacaaaaggaaaaattaaatgaattaattagagctattcatgataaggatgaactcttggatagccaagaggatttcctaattaaagaaaacaaaaggcatgttaaagttaaaaatgcttatgctcaggaggtagagaaaaatgaaaaattaactagtgagctaagcacttgccatgacattgtttccaaccttagaaatgagaatgctaaattaattgctaaggttgagaatttaaatgtttgtgatgattctcttattaatcttagaaatgataacgccaacttaattgctaagattgataagttaaatgcctctcttactagccttagaaatgagaatgaaaaattgattgctaaggctaaagaactagatgtttgcaatatttctatttccaatcttagaaatgagaataacattttacatgctaagattgttgaattaaaagattgcaaaccctctacatctacagttgaacatgtttctatttgcactagatgtagagatgttaatgtagatgctattcatgatcaccttgctttaatcaaacaacaaaacgatcacatagctacattaactgctaaaatcaatgagcatgacttggaaaatgagaaatttaaatttgctagaagtatgctctatagtgggagacgccctggcattaaggatggcattggcttccaaaagggagacaatgtcaagcttaatgccccgcctaaaagattgtctaattttgttaagggcaaggctctcatggttcaggataacgagggttacattttataccctgccggttatcccgaacacaaaattaggagaattcactctaggaagtctcactctggccctaatcatgcttttatgtataagagtgagacatctagttctaggcaatcaacccatgctaaattgcctaagaagaaaactcctgctgcatcaaatgatcacaatgtttcattcaaaacttttgatgcctcttatgtgctaactaacaaatcaggcaagttagttgccaagtatgttgggggcaaacacaagggatcaaaaacttgtgtttgggtacccaaagttcttgtatctaatgtcaaaggacccaaaactatttgggtttatgcatctgggggctcaagttggatcatcgacagcgggtgcacaaaccacatgactagggagaaaagaatgttctcctcctatgagaaaaaccaagatccccaacgagctatcacattcggggatggaatcaaggataaatatcaaacccaagagactttgaaaggattcttgagacgggctcaaaatgagttcagcttgaggattaagaagataagaagcgacaacgggacggagttcaagaactcacaaatagaaggctttcttgaggaggaaggcatcaagcatgagttctcttctccctacacgccacaacaaaatggtatagtggagaggaagaatagaactctattggacatggcaaggaccatgcttgatgaatacaagactttggatcggttttgggccgaggcggtcaacaccgcttgctatgccatcaaccggttgtatctacaccgaatcctcaagaagacatcttatgaactcctcaccggtaaaaagcctaatgtttcatattttagagtctttggtagcaaatgctttattcttgttaaaagaggtagaaaatctaaatttgctcctaaggctgtagaaggctttttactaggatatgattcaaacacaagggcatatagagtctttaacaagtccactggactagttgaagtttcttgtgacattgtgtttgatgagactaacggctcccaagtggagcaagttgatcttgatgaattagatgatgaagaggctccgtgcatcgcgctaaggaacatgtccattggggatgtgtgccctaaggaatccgaagagcctccacaagcacaagatcaaccatcctcctccatgcaagcatctccaccaactcaagacgaggatgaggctcaagatgatgaaggagaagatcaagaagatgagccacctcaagaagacagcaatgatcaagggggagatgcaaatgatcaagacaaggaggatgaacaagatgcaaaaccgccacacccaagagtccaccaagcaattcaacgagatcaccccgtgaacaccatcttaggagatattcataagggggtaaccactcgatctcgtgttgctcatttttgtgaacattactcttttgtctcctctattgagccatacagggtagaggatgcactaagagattcggattgggtgctggcgatgcaagaggagctcaacaacttcacgaggaatgaggtatggcatttagttccacgtcctaaccaaaatgttgtaggtaccaagtgggtattccgcaataagcaagatgagcatggtgtggtcataaggaacaaagcacgacttgtggccaaagggtattcacaagtcgaaggtttggattttggagaaacttatgcacccgtagctaggcttgagtcaattcgtatattacttgcctatgctactcaccatggctttaagctttaccaaatggacgtgaagagtgccttcctcaatggaccaatcaaggaagaggtatatgttgagcaacctcccggctttgaagatagtgagtatcctaactatgtttataagctctctaaggcgctttatgggctcaaacaagccccaagagcatggtatgaatgcctaagagatttccttatcactaatggcttcaaagtcggaaaggtcgatcctactttattcactaaaaccattgaaaatgatttgtttgtttgccaaatttatgttaatgatatcatatttgggtctactaacaaatctatttgtgaagagtttagtaggatcatgattaaaaaaatcgagatgtctatgatgggggagttgaagtattttctaggatttcaagtgaagcaactccaagatggcaccttcatcagccaaacaaagtacattcaagatattctcaccaagtttggaatgaaggatgtcaagcccatcaagacacccatgggaaccaatgggcatctcgacctcgacacgggaggtaaatccatagatcaaaaggtatatcggtcgatgataggatctctactttatctatgtgcatctcgaccggacattatgctttctgtatgcatgtgtgcaaggttccaagccgaccctaaggaagttcaccttagggtcgtgaagcaaatcatgagatatttagtttacacacctaagtttggtctttggtaccccaaggggtcctcatttgatttattaggatattcagatgccgattgggcagggtgtaagcttgatagaaagagcacatcggggacttgccagttcttgggaagatccctggtgtcttgggcttctaaaaaacaaaattttgtagctctttctaccgccgaagccgagtatattgccgcaggccagttgcgcgcaattgctttggatgaggcaaacccttag

SEQ ID NO: 5068 - DNA, 4263 bp, Zea mays
  Clone ID: TF_ZM4677.C5.o3.fg
atgggccgcaggatgacacttttggcccaccaggttattcttagatcactcgtatttcttaaccccactcaagttcaattaattcgtggtgatccaagatataaactaatgtctcccgaggaagtgataggtaaatttgtgagctttgaactaatgatcaaaggctccaaaaagatcatcgagcaaggcgcatcctcctccgtacccgaagcacaacccgttgcattcaaggcaacggagaataagaaagaagactctacaccgagtagggtccccatcgacgcctccaagctcgacaatgaggagatggcgctcatcatcaagagctttcgccaaatcctcaaacaaaggaaggggaaagattacaagccccgttccaagaaggtttgctacaagtgtggtaagcccggtcatttcattgctaaatgttcattatctagtgatagtgacaggggcgacgacaagaagggaaagagaagagaaaagaagaggtactacaagaagaagggcggcgatgcccatgtttgccgggagtgggactccgacgagagctccaccgactcctcctccgacgaggacgccgccagcatcgccgtcaacaaagggctcctcttccccaacgtcggccacaaatgcctcatggcaaaggacggcaaaaagaagaaggtaaaatccaaatcctccactaagtatgcaacatctagtgatgaagctaattctagtgatgatgaggatgatttatttactctctttgccaacttaaacatgcaacaaaaggaaaaattaaatgaattaattagagctattcatgataaggatgaactcttggatagccaagaggatttcctaattaaagaaaacaaaaggcatgttaaagttaaaaatgcttatgctcaggaggtagagaaaaatgaaaaattaactagtgagctaagcacttgccatgacattgtttccaaccttagaaatgagaatgctaaattaattgctaaggttgagaatttaaatgtttgtgatgattctcttattaatcttagaaatgataacgccaacttaattgctaagattgataagttaaatgcctctcttactagccttagaaatgagaatgaaaaattgattgctaaggctaaagaactagatgtttgcaatatttctatttccaatcttagaaatgagaataacattttacatgctaagattgttgaattaaaagattgcaaaccctctacatctacagttgaacatgtttctatttgcactagatgtagagatgttaatgtagatgctattcatgatcaccttgctttaatcaaacaacaaaacgatcacatagctacattaactgctaaaatcaatgagcatgacttggaaaatgagaaatttaaatttgctagaagtatgctctatagtgggagacgccctggcattaaggatggcattggcttccaaaagggagacaatgtcaagcttaatgccccgcctaaaagattgtctaattttgttaagggcaaggctctcatggttcaggataacgagggttacattttataccctgccggttatcccgaacacaaaattaggagaattcactctaggaagtctcactctggccctaatcatgcttttatgtataagagtgagacatctagttctaggcaatcaacccatgctaaattgcctaagaagaaaactcctgctgcatcaaatgatcacaatgtttcattcaaaacttttgatgcctcttatgtgctaactaacaaatcaggcaagttagttgccaagtatgttgggggcaaacacaagggatcaaaaacttgtgtttgggtacccaaagttcttgtatctaatgtcaaaggacccaaaactatttgggtttatgcatctgggggctcaagttggatcatcgacagcgggtgcacaaaccacatgactagggagaaaagaatgttctcctcctatgagaaaaaccaagatccccaacgagctatcacattcggggatggaatcaaggataaatatcaaacccaagagactttgaaaggattcttgagacgggctcaaaatgagttcagcttgaggattaagaagataagaagcgacaacgggacggagttcaagaactcacaaatagaaggctttcttgaggaggaaggcatcaagcatgagttctcttctccctacacgccacaacaaaatggtatagtggagaggaagaatagaactctattggacatggcaaggaccatgcttgatgaatacaagactttggatcggttttgggccgaggcggtcaacaccgcttgctatgccatcaaccggttgtatctacaccgaatcctcaagaagacatcttatgaactcctcaccggtaaaaagcctaatgtttcatattttagagtctttggtagcaaatgctttattcttgttaaaagaggtagaaaatctaaatttgctcctaaggctgtagaaggctttttactaggatatgattcaaacacaagggcatatagagtctttaacaagtccactggactagttgaagtttcttgtgacattgtgtttgatgagactaacggctcccaagtggagcaagttgatcttgatgaattagatgatgaagaggctccgtgcatcgcgctaaggaacatgtccattggggatgtgtgccctaaggaatccgaagagcctccacaagcacaagatcaaccatcctcctccatgcaagcatctccaccaactcaagacgaggatgaggctcaagatgatgaaggagaagatcaagaagatgagccacctcaagaagacagcaatgatcaagggggagatgcaaatgatcaagacaaggaggatgaacaagatgcaaaaccgccacacccaagagtccaccaagcaattcaacgagatcaccccgtgaacaccatcttaggagatattcataagggggtaaccactcgatctcgtgttgctcatttttgtgaacattactcttttgtctcctctattgagccatacagggtagaggatgcactaagagattcggattgggtgctggcgatgcaagaggagctcaacaacttcacgaggaatgaggtatggcatttagttccacgtcctaaccaaaatgttgtaggtaccaagtgggtattccgcaataagcaagatgagcatggtgtggtcataaggaacaaagcacgacttgtggccaaagggtattcacaagtcgaaggtttggattttggagaaacttatgcacccgtagctaggcttgagtcaattcgtatattacttgcctatgctactcaccatggctttaagctttaccaaatggacgtgaagagtgccttcctcaatggaccaatcaaggaagaggtatatgttgagcaacctcccggctttgaagatagtgagtatcctaactatgtttataagctctctaaggcgctttatgggctcaaacaagccccaagagcatggtatgaatgcctaagagatttccttatcactaatggcttcaaagtcggaaaggtcgatcctactttattcactaaaaccattgaaaatgatttgtttgtttgccaaatttatgttaatgatatcatatttgggtctactaacaaatctatttgtgaagagtttagtaggatcatgattaaaaaaatcgagatgtctatgatgggggagttgaagtattttctaggatttcaagtgaagcaactccaagatggcaccttcatcagccaaacaaagtacattcaagatattctcaccaagtttggaatgaaggatgtcaagcccatcaagacacccatgggaaccaatgggcatctcgacctcgacacgggaggtaaatccatagatcaaaaggtatatcggtcgatgataggatctctactttatctatgtgcatctcgaccggacattatgctttctgtatgcatgtgtgcaaggttccaagccgaccctaaggaagttcaccttagggtcgtgaagcaaatcatgagatatttagtttacacacctaagtttggtctttggtaccccaaggggtcctcatttgatttattaggatattcagatgccgattgggcagggtgtaagcttgatagaaagagcacatcggggacttgccagttcttgggaagatccctggtgtcttgggcttctaaaaaacaaaattttgtagctctttctaccgccgaagccgagtatattgccgcaggccagttgcgcgcaattgctttggatgaggcaaacccttag

SEQ ID NO: 5069 - DNA, 2820 bp, Zea mays
  Clone ID: TF_ZmC951_443
ttatggtgtgtagggagaagagaactcatgcttgattccctcatcctcaagaaagccttctatttgtgagttcttgaactctgtcccgttatcgcttctaatctttttgatccttaagccgaactcattttgagcccgtctcaagaatccctttaaggtctcttgggtttgtgatttttccttgatttccatccccaaatgtgatagctctttggggatcatggttttctcgtaggagaacattctcttctccccagtgatgtggtttgtgcacccgctgtcaatgatccaacttgagcccccggatgcataaaccttgggtacccaaacacaagtctttgagcccttgtgtttggctccaacatatttggcaactactttgcctgatctgttagttaaaacatatgatgcatcaaaagtcttaaacaaaatgttaggttcatttgatgcaatgggagttttatttttaggcaatttagcatgggttgattgcctagaactagatggctcactcttatacataaaagcatgatgagagccagagtgagacttcctagagtgaattctcctaattttgtgcttgggataaccgacagggtataaaatgtaacccttgttatcctgagtcatgggagctttgcccttaacaaagttggacaatttcttgggggcatggagcttgaaattgtctcccttttggaagccaatgccatccttaatgcctgggcgtctcccactataaagcatactacgagcaaatttaaatttttcaatttctaattcatgctcggcaattttagcatctaattttgctatatgatcattttgttgtttaatcatagcaatgtgatcatgaatagcatcaatattaacatctctacatctagtgcaattagagacatgactaacagtagatgtagagggtttgcaaacatttaattcatcaatcttagcatgtaacatgacattttcatttctaagattggaaacaatatcattgcaaacatttaaatttttagccttaataatcaatttttcattttctatcttaaggctagcaattgattcattcaacttgtcaatcttagcaattaaattagcattatcatttttaagtttgacaagagaatcatcacaatcatctaatttctcaaccttagcaatcaatttagcattctcatttctaaggttggaaatgatatcatggcaagtgcttagctcactagttaaattttcacacttctctacttcctgagcataagcatttttaactttaacatgcttcttattttccttaataaggaagtcctcttgggtgtccaagagttcatccttctcatgaatatcactaattaattcatttaacttttccttttgttgcatgttaaggttggcaaaaagggcaagtaaattatcctcattatcactagagttttcctcatcactagatattgcatatttagtggaggctctagattttaccttcttcttcttgtcgtcctttgccatgaggcacttgtggccgacgttggggaagaggagtcccttgttgatggcgatgttggcggcgtcctcgtcggaggaggagtcggtggagctctcgtcggagtcccattcccgacaaacatgggcatcgccgcccttcttcttgtaatacttcttcttctccttcattcttcccttcttgtcgttatccctgtcactatcactatacaaaggacatttagcgataaaatgatcgggcttaccacatttgtagcaaaccttcttggagcggggtttgtaatccttccccctcctttgcttgaggatttggcggaagctcttgatgatgagcgccatttcctcgttgtcgagcttggaggcgtcgatggggagcctacttgatggagactattctttcttttcttctgtcgctttgaaggtgacgggttgcacctcggatgtagaggtggcgccttgctctaagttgatgatttgtttggagcctttgatcatcaattcaaagctcacaaactttcctataacctcctcgggagacattagcttgtatctaggatcaccacgaattaattgaacttgcgtaggattgcaaaaaatgagtgatcttagaataactttggccatttcatggtcatcccatttggtgctcccgaggttgcgcacttcgttcaccaaggtctagagccggttgtacatcgcttgtggatcttccccttgatgaagcatgaagcgaccgagctccccctcgatcgtttccctcttggtgatcttggtcacctcatctccttcgtgcgcggttttgagcacgtcccaaatctctttggcactcttcaatccttgcaccttattatactcctctcgacttagagaggcgaggagtatagtagtggcttgggagttgaagtgctcggatttgagctacctcgtccgagtcatagccttcatcccccatggatggtacatgcgctccaaactcaacaatgtcccatatgagtaatcttcaccgtcaaaaaccggtggtttgcctagtgggatggaaagtaaaggagtgcgtttagaaatgtgagggtagcgtagggggatcttactaaacttcttgcgctcatggcgcttagaagtgacggacggcgcgtcagagccgggggtggatggccatgaagaatcagtctcatagtagaccaccttcttcattttattcttcttgtcgccactccggtgcgacttgacgtggggaggtgattcctccctcttcttgttgccggactcccccgatggagccttcccgtggcttgtggcgggcttctcgccggtcaccat

SEQ ID NO: 5070 - DNA, 1587 bp, Zea mays
  Clone ID: TF_ZM4885.C3.o4.fg
atggatcctaaggggaagggtatcgtgatcaacgataaagagaaggaatcctttgtcaacgagccaaaggacgacaagcctaccgactccggctcgggccatagacggaaggaagggaagaagaagaagacgaggcgcatcaaggagatcgtctactacgacgacagcgatgagtctacttcttcccaaaaggacgacgaccacaacgactatgagagaaggaaaccggttaattcgaacttttctttcgactactctcgtattccgcaaagttcaaattcacatttgctctccattcctctcgacaagcctccacactttgatggggaggactacggattttggagccacaaaatgcgtagtcacctattctctctccatcctagtatatgggagattgtagagagtggaatgcactttgatagttcggataatcccatgttcattaatgaacaaattcataagaatgcacaagctactactgttcttctagcttcattgtgcagggatgaataccacaaagtgagtggcttggataacgccaagcagatctgggacaccctcaagatttctcatgaggggaacgacgtcaccttgctcaccaagatggagttggtggagggcgagcttggacggttcgcgatgataaggggcgaggagccaactcaaacatacaaccggctcaagacccttatcaacaaaataaggagctacggaagcacgcgatggacggaccacgacgtcgtccgactgatgctaaggtcctttaccgttcttgatcctcatttggtgaataatattcgtgagaatcccaggtacaccaaaatgtcgcccgaagaagtccttggaaaattcgttagcgggcgaatgatgatcaaggaggcgaggtacgtggacgacgccttgaatggtccgatcaacgagccgcaaacccttgctctcaaggcaacaagaagcaaggaggcgctacctagtaaggtggcacaaattgaggcagccggacttaatgatgaagagatggccctcatcatcaaaagattcaagacgacgcttaaaggtcgcaatggacagccaagcaagaccaaagccaaggggaagcgctcatgcttcaaatgcggtaagcttggtcattttattgctaactgttccgacaatgatagtgatcaggaccaagggaacaagagggagaagaagaagaattataagaaggcaaagggcgaggctcatcttgacaaggaatgggattcggactgctcctcgtccgactccgacaatgaaggactcgccgccaccgccttcaacaagtcacccctcttccccaacgagtgtcacacatgccttatggcaagggagaagaaggtatgtactcgagactctacttatgcttcttcaagtgaggacgaatctagtgatgaggatgaaatagattattcatgtctatttaaaggcctagatagaaataaaattgataaaatcaatgaattgattgatgccttgaatgaaaaggataggcttttagaaaagcaagaggatttgttgtatgatgaacatgataaatttgtagaggcacaaaaatctatgccttag

SEQ ID NO: 5071 - DNA, 2673 bp, Zea mays
  Clone ID: TF_ZM4913.C6.o1.fg
atggagaccggcgacaagcccactacaagccaagggagcacttcatcggaagagtcccgcaccaagaggaaggagaagaagaagagctcctccaacaaagggaaggagaagaaaccttcttctcatcacaaagagaagaaagagaaatcttcctctcacaaatcgcatcggagtggggaccagcacaagaggatgaggaaagtggtctactatgagaccgacacttcatcaacatcgacctccggctccgatgcgccctccgtaacttctaaacgccaagagcgtaagaagtttagtaagatccccttacactatcctcgtacatctagacatactccattactttccgttccattaggcaaactgccaacctttgacggtgaagattatgctaggtggagtgatttaatgaaatttcatctaacctcactccacaaaagtatatggaatgttgttgagtttggagcacaggtaccatccgtaggggatgaggattatgatgaggacgaagtggcccaaatcgagcacttcaactctcaagctacaaccatactcctcgcctctctaagcaaggaggagtacaacaaggtgcaagggttgaagaatgcaaaagaaatttgggacctactcaagaccgcgcacgaaggtgatgaactcaccaagattaccaagcgggaaacgatcgagggggagctcggtcgcttccgtcttcgccaaggggaggagccacaagacatgtacaaccggctcaagactttggtgaaccaagtgcgcaacctcgggagcaagaagtgggatgatcacgaggtggttaaggttattcttagatcgctcatttttcttaaccccacacaagttcaattaattcatggtaatcctagatatactcaaatgacccccgaggaagttatcgggaattttgtgagctttgaatgcatgatcaaaggctccaagaagatcaacgagcttgatgaaccctccacgtccgaagcacaaccggtggcatttaaggcgacggaggagaagaaggaggagtctacaccgagtagacaaccaattgacgcctccaagctcgacaatgaggagatggctttaatcatcaaaagctttcgccaaatcctcaagcaacggaaggggaaggattacaaatcccgttccaggaaggtttgctacaagtgtggtaagcccgatcactttatcgctaaatgtccattatcaagtgacagtgacagggataacgacaagaagggaaagaggaaagaaaagaagaggtaccacaagaggaggggcggcgatgcccatgtatgccgcgagtggaactccgacgagagctccaccgactcctcctccgacaaggacgccgccaacatcgctgtcaccaagggactcctcttccccaacgtcggtcacaagtgcctcatggcaaaggacagcaaaaggaagaaggtaaaatcaagatcctccactaaatatgaaacctctagtgatgaggatgatgctagcaatgaggaggataacttgcatgttctttttgccaaccttaacatggaacaaaaggaaaaactaaatgagctaattagtgccatccatgaaaaggatgacctcttggactcccaagaggacttcctaatcaaggaaaataaaaagcatgttaaggttaaaaatgcttatgctctagaggtagaaaattgtgagaaattatctagtgagctaagtacttgccatgacactattaccaaccttagaaatgaaaatgctagtttaaatactaaggttgattcacatgtttgtaatgtttcaattcccaatcttagaaatgataatgatgatttgcttgctaagattgaagaattgaacatttctcttgctagccttagagtagaaaatgaaaatttaattgctaaggctaaagaactagatgtttgcaatgttacaatttccgatcttagagataataatgatatcttgcgtgctaagatcgttgaacttaattcatgcaaaccctctacatctagtgttgagcatgtttccgtttgtactagatgtagagatgttgatattgatgctattcatgatcacatgaccttaattaaacaacaaaatgatcatatagcaatattagatgcaaaaattgccgaacataacttagaaaatgaaaaattcaaatttgctagaagtatgctctataatgggagacgccctggcatcaaggatggcattggcttccaaaggggagacactgtcaaacttaatgcccctcctaaaagattgtctaactttgttaagggcaagactcccatgcctcaggataacgagggttacattttataccctgccggttatcccgaggacaaaattaggagaattcattctaggaagtctcactctggccctaaccatgcttttatgtataagggtgagacatctagctctaggcaaccaacccgtgctaagttgcctaagaagaaaacccctagtgcatcaaatgaacatagtctttcatttaaaacttttgatgcatcttatgtgttgactaacaaatccggcaaagtagttgccaaatatgttgggggcaaacacaaggggtcaaagacttgtgtttgggtacccaaagttcttgtgtctaatgccaaaggacccaaaaccatttgggtacctaaagtcaagaactaa

SEQ ID NO: 5072 - DNA, 4380 bp, Zea mays
  Clone ID: TF_ZM5008.C2.o5.fg
atgaatcctcctaatcctccaccaggcggagttgacccactggttgctgctcagatggcggtgatgcagcaaatggcagacaccatggctgatatgcgtgcccagatgcagcaagaacgccaggaaatgcgtcaggaaagagaagatatacgccaggagttgcgccaggagagagatgagatacgccaagaaaggagggcgcaacaacagcagctgcaacaacaacttcaacaacagcaacaacagcaacaagtgccattgcctccaccaccaccaccagttccacctcatgataagcaccgggagtttatgagtcataagccaccgaccttcgccagttcgccagatccacttgatgcagacgattggttgaagtcaattgagaagatgctgaatattgcacaatgcactgaccgggagaaggttttatatgcttctggacgtctgactggtcctgctgctgactggtgggattcttatactgctgcccatgatgctgcggatactattacttgggcagagttcagtacgcaatttaggaactaccatattccagctggtatgataaagatcaagaagaaggagtttctgtcattaaagcaaggcaacatgtcggtcagcgagtacagggacaaatttattcagttgtcgaggtatgctccggaggaagttgctgaggatgaaagaaagcaggagcactttattgaaggacttaatggacccttgcagtatgcactggtggcacacacctttccatcatttcagaggctactggataaggctcttgctattgaacacaagcgtgttcaactgagtgatttgaagaggaaggctatctcgcagggacagggtagcagcagtgttcgtccccgctacgttccaccacagggtacaccgactcgaccaggaggaccacgcccagttcagcaatcaccactgaggattccacctcctcgacaggctacccccactggcaccccgacgaggcctacaggacagaagaccggccctacatgcttcaagtgcagtcaggttgggcactatgctaatgcttgtcctatgggaaattctggtacaccagctaagaacaagcaacagacccgtggcaagggatattctatagccagggtgaatcaagtcagcgttgatgatactcctgatggtggggacctcgtaattggtatgttttatgttaatgcaattcctgcaacaatattatttgattctggtgctacacattcattcatgtctgctagatatgccaacacaaatgaaataccactgctaaatatgagaaaacccatgatagtaattacacctaaagggcctgttgaggcgaatcaaatgacacgtagattgaccttgaccattatgggtagagaatttggagctactgctataatattagagtcaagcagtatagatctgatccttggtatgtcatggctaagaaaggcaaaggccgttatagcatgtggtaggggtaccgtagaactcactaccactaaaggagaaagatttcaagttaatattgcagtaacctcctcatccatgcgtgcaatgttctttatgcctgaggagtttgttggtgacaacatccgggtggttagagattttccggatgtctttccagaggagttaccagggatgccccctgatagggaagttgagtttgttattgatctcttacctggaaccgcccctatttctaaacggccatataaaatgtccgtagaggagttgaaggaactgaagaagcagttgattaatgatgttacggtgaagaacaagtatctgttgccccgtattgaggatttatttgatcagatgagaggtgctagagtattctcgaagattgatctccgatccggttaccatcagatgaggattagaccatcggatattcctaagacaacattctcgaatcgatatggattatatgagtttactgttatgtcatttggattaaccaatgcaccggcttatttcatgaatttgatgaacaaagtgtttatggagtatttggacagattcgtcgtggtatttatcgacgatattcttatctattctaagaatgaaagtgatcatgaacaacatctaaggttggtgctacagaagttgcgagataatcaactctacgctaagttcagcaagtgcgagttttggattgacaaggtgccattccttggtcatattatttctaatggaggaatagcagtggatccttctaaagtgaaggagattatggagtggagagtgcccactacagttactgagattcggagtttcttgggactcgcaggatattatcggagatttattgaagggctctctaagattgccaagcctatgacctcgcttttggagaaaggaagagaattcaagtgggatgagaaatgccaagagagctttgatcaattgaaggagagattaatgtctccgccagtattggttatgccagatctgcagaagggatttgacatttactgtgatgcatgtggccaaggacttggatgtgtgcttatgcaagatggtcatgtgattgcctatgcatctcgtcagttgaggaggcatgaattgaactaccccactcatgatttagagctggcagcagttgtgcatgcacttaagatttggagacactacattatgggaactaagtgccaagtatacacggatcataagagtttgaagtatatattcactcagaaggatctcaatcttaggcaacgtcgttggttggagctcattaaggattatgatttggagattcactatcacccaggcaaggcaaatttggttgcagatgccttgagtcgaaaggagcatgttcactccgctttcgttgtccagctacctgatgaattagcaaaagattttgagagactcaacctgggaattgttacacatacggaaggagtgactattgaattggaacctaccttggagcaagaaattcgtaaaggtcagattggtgatgccaaaatccaggagatcaaggatctgataacagagggtagaggcccggaattcacagaggatgagcaaggcacgatatggttcaagaatcggatctgtgttcccgaaattgatagtcttcgggaaactatattgaaggaagcacatgactcagtttattctatccaccctggaagtactaagatgtatcagggtttgaagcaaaaatattggtggtatggattgaagagagatgtggccgcacatgtggctatgtgcgatgtgtgccaaagagttaaagctgaacaccagaggccagccggactattgcacccactgaagatacctgagtggaaatgggaagagattggcatggacttcattgttggattaccccgcacatctgctggatatgattctatatgggtgattggggacaggctaactaaagtagcccactttattccagtgaagaccacgtattcaggagccaagttggcagagttgtacatggcacggattgtatgcctgcatggtgtaccaaagaagattgtgtcagaccggggatcacagtttacctctcgatattggaagaagttgcacgagtccttggatacaagattaaattttagttcggcttaccatccacagactgatgggcagactgagaggactaaccaagtgttagaagatatgttaagagcttgtgctcttaagcatggtggtagttgggataagagtctaccatatgctgagttctcatataataatagctaccaggccagtttgaagatgtcaccgtttgaggctttgtatggcagaaagtgcagggctccactgtattgggatcaaactgatgaaaggcagttgtttgggcctgagattatacaagaagcagaggatcaagtccagcaaataagggagaatttgagaactgcacagtccaggcagaagagctatgctgatacccggagaagattgcttgagtttaaggagggagattatgtctatttgaaggtgtcaccactccggggtatgagaagattcaaagtcaaaggaaagttgtcccctcgctttattggacccttcttaatcttaaagcgagtgggtgaggttgcatatcaattggagttaccggatcatcttgcggatgttcatgatgtatttcatgtatcccagctgaagaaatgtctcagggtgcctgaagaacaattaccaatggaagaccttagtgttcaagatgacctgacttatgctgaataccccatcaagattttggatactttgactcgagttacgaggaataaggttataaagatgtgcaaagtgcaatggagtcaccatggcgaagatgaagcaacatgggaaagagaagaagagcttcgcgtagattttccccaccttttccctagatcttcctaa

SEQ ID NO: 5073 - DNA, 3994 bp, Zea mays
  Clone ID: TF_ZmC16207_1
cctggccggctaaagtaggcacatttcatcctatccaaaatcaaatcaagatagcagcagcagctgttgattttacaacataattagagggcaaaatggtgatgaaggttggcttgaccaccaaccagatcatatatctccaagccagtatgttgaagtcccagagggagacaacaactatcccaatgatatggactcaagtgatggaagcaacctgagagatcagattgctctccaaatgtgggctgcctacaatagttaatttaggatctcttatatatattatatagtaataaagacttatgttttattatgtagtagtaaagtcttttgttttattatgtagtagtaaagccttttgtttactatgttttgttgaaaaatatagctatggcaaagaatgtttttagggcagcttggaacactgtgtatgagaaaggtctggttgatgtgctccttgaacataaggacaaccgaaaggtgaaaagtcaaaatgggagccttggactctggaacatccaaactattttagttttcagactgttttagttttcagactgtatacacagaaaaggttagctgttaaatctaaaacctttactaaactttactaaactatcatatgttttagttttcagattgttcaaatataacagctaacctttactaaacttcagccggcagactgtgcacaaatagaaagtgaacaagggtcggcagactgtgctctataatcctgagaagggaagatttgttcaaatagaaagtgaacaattgtttaatatagatcccgacaactttatccacaaattgcattgctaaatctaaaactgtaacctttactaaactgtaacctttgctgaactaaactgtaacctttgctgaatttataatcttgagtagccttggacatatgacatataaattcaaccagtacaagggtcgttaatacgcttcagccgggaaggcgtttgttattatctttgcgattgttattatctttacgatattttccattgcttatcatgccttttgctatgattatgtgttgcttacatgtttctcaatttctctagatatgggttcttgggaagagctagctaggcagtttttgttggaggaagaagaagacgatgagtttttctttattcttctccttgctatacttccattcctctctgaagagaaaaggctgttcggtgtgcaccggacagtgtgcggtgcacagggtgcttcagcatgaaactcactgctcgcaggaatccgccagggcactgtgcctaaaaactctcggactgcccttccttgtgtgcgtttctttccctcccttactcttgtggctttctttgtgatcaacgttggaaggggattgagtgcaatccttgaccgaaggaggtcaccacaacgtggagtaggcattggctcgagtaacaagaagagggatggaaagaagaagaggcgcataaagaagatcatctactacgacagcgacgcctcctcttcttcaacaagggatgacgacatcgtccgacgcatgctaaggtcattcaccgttattgatcctcatcttgtaaatcttatttgtgagaaccccaagtacaccaagatgacgcccgaagaaattcttggaaaattcgtgagcgggcgcatgatggtgaaggaaacgaggtatgtggacgatgccttaaacagaccgcttcttctacacgagtcgcaacccgttgctctcaaagcaaccggcagcaaggaggcactacctagcaaggtagcacaagtggaggctgtcgggctcaacgaggacgaaatgacgctcatcatcaagtgtttcaagactgccttgaagggacgcaaggagtaccctaacaagaacaaatcaaggagaaagtgctcctgcttcaaatgcggtaagtatggtcatttcatagcacaatgtcccgataataacaatgaccaggcacgagaaaagtatgggaagaaggaaaggaagaagaactacaggaaagcgaagggcgaggcgcacattggaaaagagtgggactccgactgttcttcatccgactccgatgatgaaggactagctgcctcggccttcaacaagtcttctctcttccccaacgaacgacacacatgcctcatggctaaggagaataagatagatctaaggtgtaaagattttaatattgatgcttgtaatgaacatgtctctactattctcaaattgaacaatgatgttgcaagtcttaatgctaaacttaagacttgcaaggatgactatgagaaactaaaatttacaagggatgcctacaccattggtagacacccctcaattaaggatggacttggtttccaaaaggagaccaagaactttacaagccataggacttccaatctcaacaaggagaaagggaaggctcctatggctaatagttctcaaaaaaatcatgcctatctgtataagaaaattcctaatgttactcatcatgataaatgtcataatcattctgttttcttgtgcgtcatgatgatgtatttagttctcatgccatgtttgcaaccagctcctcgtatgctcatggtttatgcattcgggggctcaagctggatcattgatagcggatgcacaaaccacatgatgggggagaagaaaatgttcacctcctacgtcaaaaatagggattcccaagacactaacatctttggagatgggaatcaaggcaaggttaaaggcttaggcaaaattgccatcacaaccgagcactcgatctcaaatgtgtttttcgtagaatcactcgggtacaatttattgtctgataaaactgaaactcaaggaaccctaaagcgcttcttaaggagagctcaaaatgaatttgagctaaaggtggaaaagataaggagcgataatggatctgaattcaagaaccttcaagtcaaagattatcttgaggatgaaggcatcaagcacgagttctccgctccctacacaccacaacaaaatggtgtagtagagaggaagaacaggacgctaattgacatggcgaggactatgcttggagaatacaagacgcctgagcggttttggtcggaagctgtgaatacagcctgccatgacataaaccggctctatctgcattgcctcctcgagaagacatcttacgaactcctaaccggtaacaaacccaaagtttcctattttcgtgtatttgggagcaaatgctacgtcttgataaagaaaggtaggcattcgaagtttgctcccaaagctgtagaagggtttttattagggtatgactcaaatacaaaagcgtatagagtcttcagcaaatcatcagaattagttgaagtctctagcgacgttgtatttgatgaaactaatggctctccaagagagcaagttgatcttgatgatgtagatgaagatgaggttccgacggccgcaatgcgaacaatggcgataggtgaggaagagctcaacaacttcaaaagaaatgaagtgtggagcctggtgccacgtccaaagcaaaatgttgtgggaaccaagtgggtgttccgcaataagcaagatgaacacggtgtggtgacaagaaacaaagctcgacttgtggcaaaaggttatgcccaagtcacaggtttggattttgaggagacttttgctcctgtagctaggctagaatcaattcgaattttattggcatgtgctgctcaccactcttttaagatttttcaaatggatgtgaagagcgccttcctcaatggaccaatcaaggagaaggtatacgtggaacaaccccctagctttgaggatgacaggtatcctgaccacgtctacaagctctctaaggcgctctatgggcttaagcaagccccaagagcatggtatgaatgtcttagagatttctttattactaatgctttcaaggttgggaaagctgatcctactctcttcactaagacttgcaatggtgatctttttgtatgccaaattgtaacgccctga

SEQ ID NO: 5074 - DNA, 4383 bp, Zea mays
  Clone ID: TF_ZmC951_456
tcacaagaaatacttcaactcccccatcatagacatctcgaatttctgtgtcatgatcctactaaactcttcacatgtagattcgttagtagacccaaatatgatatcatcaacataaacttggcatacaaacaaatcattttcaagagttttggtaaagagtgtaggatcggcttttccgactttgaatccattagtgataagaaaatctctaaggcattcataccatgctcttggggcttgcttgagcccataaagcgcctttaaaagtttatagacatggttagggtactcactatcttcaaagccgggaggttgctcaacatagacatcttccttgattggtccgttgaggaaggcactcttcacgtccatttggtaaagcttgaagccatggtaagtaccataggctaataatatacgaattgactcaagcctagctacgggtgcatagatttcaccgaaatccaaacctttgacttgggagtatcccttggccacaagtcgggctttgttccttgtcaccacaccatgctcgtcttgctcgttcctagtgaagttgttgagctcctcttgcatcgccaccacccaatctgaatcttggagtgcttcctctaccctgtgtggctcaatagaggaaacaaaagagtaatgttcacaaaaatgtgcaacacgagatctagtggttacccccttatgaatgtcgccgaggatggtgtcgacagggtgatctcgttggattgcttggtggactcttgggtgtggcggccttcgttcctcatcctccttgtcttgatcatttgcatctcccccttgatcattgtcgtcatcttgaggtagctcacttgcttgatcttctccttcatcaacttgagcctcatcctcattttgagttcgtggagatgcttgcgtggaggaggatggttgatcttgtgcatttggaggctcttcagattccttaggacacacatccccaatggacatgttccttagcgcgatgcatggagcctcttcatcacatatctcatcaagatcaacttgctctacttgagagccgttagtctcatcaaacacaacgtcacaagaaacttcaacttgtccggaggacttgttaaagactctatatgcccttgtgtttgaatcatatcctagtaaaaagccttctacagtcttaggagcaaatttagattttctacctcgatccgatgtcttgtactcatcaagcatggttcttgccatgtccaatagagttcgattcttcctctccactacaccattttgttgtggggtgtagggagaagagaactcatgcttgatgccctcctcctcaagcaatccttctatttgtgagttcttgtactctgtcccgttgtcgcttcttattttcttgatccttaagccgaactcattttgagcccgtctcaagaatccctttaaggtttcttgggtatgagatttttcctgcaaaaagaacacccaagtgaagcaagaataatcatccacaataactagacaatacttactcccgccgatgcttatgtaagcgatcgggccgaatagatccatgtgtaggagctccagtggcctgtcggtcgtcatgatgttcttgtgtggatggtgagcaccaacttgcttccccgcttggcatgcgctacaaatcctgtctttctcaaaatgaacattggttaatcctaagatgtgctctccctttagaagcttgtgaagattcttcatcccaacatgggctagtcggcggtgccatagccaacccatgttagtcttagcaattaagcaagtgtcgagttcagctctatcaaaatctaccaagtatagctgaccctctaacactcccttaaatgttattgaatcatcacttcttctaaagacagtgacaccttgatttccatccccgaatgtgatagctcgttggggatcttggtttttctcataggaggagaacatcttcttctcccctgtcatgtggtttgtgcacccactgtcgatgatccaacttgagcccccggatgcataaaccttgccggatttgttagttaaaacataggatgcatcaaaagttttaaatgaaatgttatgatcatttgatgcactaggagttttctttttaggcaacttagcacgggttggttgcctagaactagatgtctcacccttatacataaaagcatgattagggccagagtgagacttcctagagtgaattctcctaattttgctctcgggataaccggcaggatacaaaatgtaaccctcgttatcctgaggcatgggagccttccccttaacaaaattagataatttcttaggaggggcattaagtttgacattgcctccctgttggaagccaatgccatccttaatgccaggacgtctcccactataaagcatactacgagcaaatttaaatttttcattttcaatttcatgctcggcaatttttgcatctagtttagctatatgatcattttgttgtttaattaaagccatatgatcatgtatagcattaatatcaacatctctacatctagtgcaaatagtagtgtgctcaacggtagatgtagatggtttgcaagattttaattctacaaccttagcatgcaatatatcatttttacttctaaggttggaaatggtagcattgcaaacatcaaaatctttagccttagcaagcaatttttcatcttcatctctaaggctagcaagagatatgttcaattcttcaatcctagcaagcaaatcatcattatcatttctaagattgggaattgaaacattacaagcaatagaatcaaccttagctaacaaattagcattctcatttctaaggttgtctatagtctcatggcaagtacttagctcactagatattttttcacatttttcaacctctagagcataagcatttttaactttaacatgctttttgttttccttgattaggaagtcctcttgggagtccaagagatcatccttctcatggatggcactaattaattcatttaatttctctttttgttgcatgtttaagttggcaaaaagagtacgcaaattatcttcctcatcactagcattatcatcgctagaagactcatatctagtggaggatttggatttaacattcttctttttgccatcctttgccatgaggcacttgtggccgacgttggggaagagaagtcccttggtgacggcgatgttggcgacgtcctcgtcgtcggaggagtcgctagagctttcgtcggagtcccactcgcgacaaacatgggcatcaccgcccttcttcttgtagtacctcttcttctcctttcttctccccttcttgtcgtcacccctgtcactgtcactagaaatagaacatttagctataaagtgaccgggcttaccacatttgtagcaaaccttcttgaagcggggcttgtaatcttttcccctcctttgtttgaggatttggcggaagctcttgatgacgagcgtcatttcctcgttgtcgagcttggaggcgtcgatgggtgttctactcgatgtagactcttccttcttctcctccgtcgccttaaatgtgaccggttgtgcttcggacgtggaggggccgtcaagctcgttgatcttccgtgagcccttgatcataaattcaaagctcacaaaactcccgattacttcctcgggagtcattagtgtatatcttgggttaccacgaattaattgtacttgagtagggttaagaaaaataagtgatcttagaataaccttaaccaccttgtggtcatcccatttcttgctcccgaggttgcgcacttgattcaccaaggttttgagtcggttgtacatgtcttgaggctcctcctcttggcgaagacggaagcgaccgagctccccctcgattgtttcccgcttggtgatcttggttagttcatcaccctcgtgcgcgtcttgagcacgtcccaaactttcttggcgctctttaatccttgcaccttgttgtactcctccctgtgctccaaactcaacaacattccatatacttttgtggagtgaggttagatgaaatttcattaaatcactacacctagcataatcttcaccgtcaaaggttggtggtttgctaaacttcttgcgctcatggcgcttagaagttatggagggcgcgtcggagccggatgtagatggtgatgaggtgtcggtttcgtagtagaccactttcctcatcatcttcttcttgtccccactccgatgcgacttgtgggaagagggtttcttctccttccctttccctttgttgcgggactctcccgatgaagctttcccgtggcttgtagcgggcttgtcgccggtctccatctccttcttggcgtgttctcccgacat

SEQ ID NO: 5075 - DNA, 2355 bp, Zea mays
  Clone ID: TF_ZM4589.C1.o4.fg
atgaagaaagtggtctactacgagaccgactcttcctcgccctctacatccggatccgacgctgcgtccgtcacttctaagcgccaagagcgcaagaagtatagtaagattcccctacgctatcctcgcattcctaagcatactccattactttccgtactattaggcaaaccaccgacgtttgacggtgaagattattctaggtggagtgatatgatgagatatcacctaacctcactccacaaaaatatatgggatattgttgagtttggtgtacaggtaccatccgtaggggatgaagattatgatgaggacgaggtggcccaaatcgtgcacttcaactcccaagccaccactatactcctcacctctctaagtcgagaggagtataacaaggtgcaaggattgaagagcgccaaggagatttgggacgttctcaagaccacggacgaaggagacgaggtgaccaagatcaccaagcgggagacgatcgagggggagctcggtcgcttccggcttcgcaagaggaggagccacaagaaatgctcaaagaaaatcatcgagcaagatggcccctccacgcccgaagcacaatcggtcgcattcaaggcgacggaggagaagaaggaagagtctacatcaagtagacttcctatcgacgcctccaagctcgacaacgaggaaatgacgctcatcatcaagagcttccgccaaatcctcaagcaaaggagagggaaggactacaagtcccgctccaagaaagtgtgctacaagtgtggtaagcccggtcactttattgcaaaatgttcaatatcaagtgacagtgacaggggcgacgacaagaagggaaagaggagagaaaagaagagatactacaagaagaagggcggcgatgcccatgtgtgccgcgagcggaactccgacgagagctcctccgactcctcctccgacgaggacgccgccaacatcgccgtcaccaaaggactcctcttccccaacatcggccacaaatgcctcatggcaaaggacggcaaaaggaagaaggtaaaatcaagatcctccactaaatatgcatcctctagtgatgaagataattctagtgatgaggaggataatttgcgcaccctttttgccaacctaaacatgcaacaaaaggaaaaattaaatgaattaattagtgatattcatgagaaggatgaactcttggactctcaagaggacttcctaattaaagaaaataagaagcatgttaaggttaaaaatgcttacgctctagaagtagaaaaatgtgaaaaattatctagtgagctaagcacatgccatgatattattgccaaccttagaaatgagaatgctaaaatgattactaaggttgattcaaatttatgtgatgattcaatttccaatcatagagatgataatgttaatttacttgctaagattgaagaattgaatgtctctcttgctagccttagaaacgagaatgaaagattaattgctaaggctaaggacttagatgtttgcaatgttaccatttccaatcttagaagtgaaaatgacattttacatgctaagattgttgcattaaattcttgcaaaccctctacatctaccattgagcatgttactatttgcactagatgtagagacattaatgttgatgctattcatgatcacctagctttaattaagaaacaaaatgatcacatagctcaacttaatgctaagattaatgagcatgacttagaaaatgaaaaatttaaatttgctagaagcatgctctataatgggagacgccctggcatcaaggatggcattggcttccaaaagggagacaatgtcaaacttaatgcccctcctaaaagattgtctaattttgttaagggcaaggctcccatgcctcaggataacgagggttacattttgtaccctgtcggttaccccgagcacaaaattaggagaattcactctaggaagtctcactctggccctaatcatgcttttatgtataagggtgagacatctagttctaggcaatcaacccgtgcaaaattgcctaagaagaaaactcctattgcatcaaatgattctaacatttcatttaaaactgttgatgcatcttatgttttgactaacaaatccggcaaggtttatgcttccgggggctcaagttggatcatcgacagcgggtgcccaaaccacatgacaggggagaagaagatgttctcctcctacaagaaaaaccaagatccccaacgagctatcacattcggggatgggaatcaaggtgttactgtctttagaagaagtgatgattcagtagcatttaagggagtgttagagggtcagctataa

SEQ ID NO: 5076 - DNA, 4944 bp, Zea mays
  Clone ID: TF_ZmC951_328
ttaggtggtggtgcggtccttttgctttgggctcatactttctccccctttggcatgaatcgccaaaaacggaatcattagagcccttacattactttcttcccctcccgtgtcgaggtcgagatgcccattggttcccatgggtgtcttgatgggcttggcatccttcatcccaaacttgtttagaatgtcttgagtgtacttcgtttggctaatgaaggtgccctcttggagttgcttcacttgaaatcctaggaaatacttcaactcccccatcatagacatctcgaacttttgtgtcatgatcctactaaattcttcacatgttgactcgttagtagacccaaatataatatcatcaacgtaaatttggcatacaaacaagtcattttcaagagttttagtgaataaagtaggatcggcctttccgactttgaagccattagtgataaggaaatctctaaggcattcataccatgctcttggggcttgcttgagcccataaagcgccttagagagtttgtaaacatggttagggtactcactgtcttcaaagccgggaggttgctcaacatagacctcttccttgattggtccattgaggaaggcacttttcacgtccatttgataaagcttaaagccatggtaagtagcataggctaataatatttgaattgactcaagcctagctacgggtgcataggtttcaccgaaatccaaaccttcgacttgggagtatcccttggccacaagtcgagctttgttccttgtcaccacaccatgctcatcttgcttgttgcggaagacccatttggttcctacaacattttggttaggacgtggaactaaatgccatacctcattcctagtgaagttgttgagctcctcttgcatcgccaccacccaatccgaatcttggagtgcttcctctaccctgtgtggctcaatagaggaaacaaaggagtaatgctcacaaaaatgtgcaacacgagatctagtggttacccccttatgaatgtcaccgaggatggtgtcgacggggtgatctcgttggattgcttggtggactcttgggtgtggcggcctttgttcttcatcctccttatcttgatcatttgcatctcccccttgatcattgccatcatattgaggtggctcatttgcttgatcttctccttcatcaatttgagcctcatcctcattttgagtcggtggagatgcttgcgtggaggaggatggttgatcttgtgcatttggaggttcttcggatttcttaggacacacatccccaatggacatgttccttagcgcgatgcacggagcctcttcatcacctatctcatcaagatcaacttgctctacttgagagccgttagtctcatcaaacacaacgtcacaagaaacttcaacttgtccagaggacttgttaaagactctatatgcccttgtgtttgaatcatatcctagtaaaaagccttctacagtcttaggagcaaatttagattttctacctcttttaacaagaataaagcatttgctaccaaagactcggttgatggcgtagcaagcggtgttgaccgcctcggcccaaaaccgatccgaagtcttgtactcatcaagcatggttcttgccatgtctaatagagttctattcttcctctccactacaccattttgttgtggcatgtagggagaagagaactcatgcttgatgccctcctcctcaaggaagccttcaatttgagagttcttgaactccgtcccgttgtcgcttctaattttcttgatccttagggtgaactcgttttgagcccgtctcaagaatccttttaaggtctcttgggtttgatatttttcaagacaatacttactcccgccgatgcttatgtaagcaatcgggccgaatagatccatgtgaagtagctccagtggcctgtcggtcgtcataatgttcttgtgtggatgatgggcaccaacttgctttcctgcttggcatgcgctacaaatcctgtctttctcaaagtgaacatttgttagtcctaaaatgtgttctccctttagaagcttgtgaagattcttcatcccaacatgggctagtcggcggtgccagagccaacccatgttagtcttagcaattaagcaagtgtcgagttcagctctatcaaaatctaccaagtatagctgaccctctaacactcccttaaatgctattgaatcatcacttcttctaaagacagtgacaccttggtttccatccccgaatgtgatagctcgttggggatcctggtttttctcgtaggaggagaacattttcttctccccagtcatgtggtttgtgcacccgctgtcgatgatccaacttgagcccccggatgcataaaccttgctggatttgttagttaaaacatatgatgcatcaaaagttttgaatgaaatgtcatgatcatttgatgcactaggagttttcttcttaggcaacttagcacgggttggttgcctagagctagaagtctcactcttatacataaaagcatggttagaaccagagtgagacttcctagaatgagttctcctaattttgtcctcgggataaccggcagggtataaaatgtaaccctcattatccggaggcatgggagccttgccctttacaaaattggacaatcttttaggaggggcattaagtttgacattgtctcccctttggaagccaatgccatccttgatgccagggcgtctcctactatagagcatacttctagcaaatttaaatttttcattttctaagttatgctcggcaattttagcatctaattttgctatatgatcattttgttgtttaattaaagtcatgtgatcatgaatagcattaacatcaatatctctacatctagtgcaaatagaagtgtgctcaacggtagatgtagagggtttgcaagattttaattctacaaccttagcatgcaatatatcattcttagttctaaggtcggaaatggtagcattgcaaacatcaaaatctttagccttagcaattaatttttcattttcattcttaaggctaacaagagataagttcaattcttcaatcttagcaagcaaatcatcattatcatttctaagattgggaattgaaacattacaagcaatagaatcaaccttagctaataaattagaattctcatttctaaggttgtctatagtctcatggcaagtgcttagctcattagacaatttttcacatttttcaacttctagagcataagcatttttaaccttaacatgcttcttattttctttaataaggaagtcctcttgggtgtccaagagatcatccttttcatgaatggcactaatcaattcattaagtttctctttttgttgcatgttgaggttggcaaaaagagtgcgcaagttatcttcctcatcactaacattttcatcactagaggattcatatctagtggaggatttagatttaaccttcttctttttgccgtcctttgccatgaggcacttgtggccgacgttggggaagagaagtcccttggtgacggcgatgttggcggcgtcctcgtcgtcggaggagtcgctagagctttcgtcggagtcccactcccgacaaacatgggcatcgccgcccctcttcttgtagtattttttcttctcctttcttctccccttcttgtcatcgccccggtcactgtcactagatataggacattttgcaataaaatgatcgggcttaccacatttgtagcaaaccttcttggagcggagcttgtagtctttccccctcctttgtttgaggatttggcggaaactcttgatgacgagcgccatttcctcattgtcgagcttggaggcgtcgattggttgtctacttggtgtagactccttcttctcctctgttgccttgaatgcaaccggttgagcttcggacgtggagggatcatcaagctcgttgatcttcctcgagccttcgatcatgcactcaaaacttacaaaattcccgattacttcctcgggagtcattagtgtatatctagggttgccacaaattaattgaacttgagtagggttaagaaaaataagtgatcttaaaataaccttaaccatttcgtggtcatcccatttcttgctcccgaggttgcgcacttgattcaccaaggtcttgagccggttgtacatgttttgtggctcctcccctttgcgaagccggaaccgaccgagctccccctcgatcgtctcccgcttggtgatctttgtgagctcatctccttcgtgtgcggttttgagcacatcccaaacctccttggcgctcttcaacccttgcactttgttatactcctctctacttagagaagcgaggagtattgttgttgcttgagagttgaagtgctcgatttgagcaacctcgtcctcatcataatcttcatcccctacggatggtacctgtgcaccaaactcaacaacatcccatatacttttgtggagtgaggttagatgaaatcgcattaaatcactccacctagcgtaatcttcaccatcaaatgttggtggtttacctaatgggacgaaaagtaaaggtgtatgtttagaaatgtgagggtagcgtagggggatcttactatacttcttgcgctcttggcgcttagaagtgacggacgccgcgtcggagccggaggtggatgttgatgaagaatcggtctcgtagtagaccactttcctcatcttctttttcttgtccccactccgatgcggcttgtgagaagaggatttttccttcttctctttgtgtgaagaagatttcttctccttccctttggaggagtctttcttctccttcctcttgttgcgggactcttccgatgaagtcttcccgtggcttgtagtgggcttttcgccggtctccatctccttcttggtgtgatctcccgacat

SEQ ID NO: 5077 - DNA, 3612 bp, Zea mays
  Clone ID: TF_ZmC951_331
ctatttcgatatccccctttgttggtgatccctcaaaaagtgatactgaatgtctatgtgcttagtgcgactgtgttcaacgagattatcctccatgcggattgcactctcattatcacataggagagggactttgctcaatttgtagccatagtccctgagggtttgcctcatccaaagtaattgcacacaacaatggcctgcggcaatatactcggcttcagcggtggaaagagctactgaattttgtttctttgaagcccaagacaccagggatcttcctagaaactgacaagtccctgatgtgctcttcctatcaattttacaccctctcgtgtcgaggtcgagatgcccattagttcccatgggtgtcttgatgggcttggcatccttcattccaaacttggtaagtatgttttgaatgtacttcgtttggctgatgaaggtgccctcctggagttgcttgacttgaaatcctaggaaatacttcaactcccccatcatagacatctcgaatttttgtatcatgatcctactaaactcttcacaagtagatttgttagtagacccaaatatgatatcatcaacataaatttggcatacaaacaaatcttttgcaatggttttagtaaagagtgtaggatcggcttttccgactttgaatccattagtgataaggaaatctcttaggcatttataccatgctcttggggcttgcttgagcccataaagcgcctttgagagtttatacacatggttagggtactcactaacttcaaagccgggaggttgctcaacatagacctcttctttgattggtccattaaggaaggaacttttcatgtccatttgataaagctttgacttgtgaatatccattggccacaagtcgggctttgttccttgtctccacaccatgctcatcttgcttgttgtggaatacccacttggtacctcattcctcgtgaagtttttgagttcctcttgcattgccaacacccaatctaaatctcttaatgcttcttccaccctgtatggctcaatagaagacacaaaagagtaatattcacaaaaatgtgcgactcgagatcgagttgttacccccttatgaatatcgccgaggatggagttcacggggtgatctctttgaatcgcttggtggactcttgggtgtggcggtctttgaccctgtaactcttgatcatcttccttgtcttgatcaacttcatatcccccttgatcattgtcctcctcttgaggtggctcatcctcttgatctccatcttcattgtcttgagcctgatcctcatcttgagttggtgggatgcttgcatgaaagtgacggttgatcttgtgcttgtgtgggctcttcggattccttaggacacacatccccaatggacatgttccggtgaggaattcatatgatgtctttttaaggattcggtgaaggtagagccggttgatggagtagcaagcagtgttgattgcttccacccaaaaccagtcaggagtcttgtactcatcaagcatggtccttgccatgtccaatagagttctattcttcctctccactacaccattttgttgaggtgtgtagggagaagagaactcatgcttgatgccctcatcctcaagaaagccttcaatttgagagttcttgaactccgtcccgttgtcgcttcttatcttttttattctcaatccaaactcattttgagcccgtctcaagaatccttttaaggtctcttgggtttgagatttttcccgtcgatgcttatgtaagctatcgagccgaatagatccatgcgaagcagttccagtggtctgtccgttgtcattatgttcctctaatactcccttaaatgctattgaatcatcacttcttctaaatacagtaacacctaaatcttgatttccatccccgaatgtgataactctttggggatcatcatttttctcgtaggaggagaacatccttttctcccatgtcatatggtttgtgcatctgctatcaataatccaacttgagctccaggatgcataaaccttaggtacccaaacacgagtcttggagcccttgtgtttgcccccaacatatttggcaactattttgcctgatttgttagtaagcgcataagaagcatcaaaagtcttaaatgaaacattaggttcatttgatgcagtaggagttatctttttagacattttaacataggtagaatgcctagagctagatgcctcattcttgtacataaaagcatgatgggaaacagaatgagacttcctagcatgacttctcctaatcttatgctcaggataaccagcaggatataaaatgtaaccctcgttatcctgagccttgggagccttacccctcatcactagatgtagtatacttggggtggttctagcttgtaccctctttttcttgccgtcctttgccatgtagcatttgtggccgacgtttgggaagagaagtcccttgttgacgatgatgtttgcggcgtcctcgtcggaggaggagtcccattcccaacacacgtgggcatcgtcgcccttcttcttgtagtatttattcttttccttcttcatccccttcttgtcgttatccctgtcactatcactagacatagggcatttagcgataaaatgtctgggcttaccacacttgtagcacaccctcttagagcgaggtttgtagtccttccccctcctttgcttgaggatttggcggaagctcctaatgatgagcgtcatttcctcattgtcgagcttggaggcgtcaatggggagcctacttgatgtagactcttctttcttatcctccgtcgctttgaatgcgatgggttgcacctcgggtgtggaggtgtcgccttgctccaagttgactatttgtttggagcctttgatcatcaattcaaagctcacaaactttcctataacttcctcgggagacattagcttatatctaggatcacctcgaattaattgaacttgcgtaggattacgaaaaatgagtgatcttagaataatttggttgaccaaggtcttgagccgattgtacattgcttgtggctcctctccttggttgaggacaaatcgaccgagctccccctcgatcgtctcccgcttggtggtcttggtcacctcatccccttcatgcgcagtctttagtacatcccaaatctttttggcactttttagccattgcaccttattatactcctctcgacacaaggaggcgaggagtatagtagttgcttgggagtcaaagtgccagatttgggcgatttcgttcgaatcataatcttcatcccctatgggtggtacctgcgctccaaactcaacaatgtcccatatgctagcgtggagtgaggttaggtgatgcctcaatttatcactccacatacaataatcttcaccataaaaaataggtggtttgcctaatgagatggaaagtaaaggagtgcgtttagaaatgcggggatagcgtaaggggatcttactaaacttcttgcgctcatggcgcttagaagtgacggacggagcgtcggagccgaaggtggagggcgacgaagaatcgatctcgtagtagaccactttcttcat

SEQ ID NO: 5078 - DNA, 4752 bp, Zea mays
  Clone ID: TF_ZmC951_376
tcatccaaacttctttagaatgtcttgaatatactttgtttggctaatgaaggtgccctcttggagttgcttcacttgaaatcccaagaagtacttcaactcccccatcatagacatctcgaatttctgtgtcatgatcctactaaattcctcacatgtagactcgttagtagacccaaatatgatatcatcaacataaatttgacatacaaacaaatcattgtcaagagttttagtaaataaagtaggatcggcctttccgactttgaagccattagctataaggaaatctcttaggcattcataccatgctcttggggcttgcttgagcccataaagcgccttagagagttcgtggttagggtactcactatcttcaaagccgggaggttgctcaacatagacctcttccttgattggtccattgaggaaggcactcttcacatccatttgataaagcttgaagccatggtaagtagcataggctaataatatacgaattgactcaagcctagctacgggtgcataggtttcaccgaaattcaaaccttcgacttgggagtatcccttggccacaagtcgggctttgttccttgtcaccacaccatgctcatcttgcttgttgcggaaaacccacttggttcctacaacattttgattaggacgtggaaccaaatgccatacctcgttcctagtgaagttgttgagctcctcttgcatcgccaccacccaatccgaatcttgtagtgcttcctctaccctgtgtggctcaatagaggaaacaaaagagtaatgctcacaaaaatgtgcaacatgagatctagtggttacccccttatggatgtcgccgaggatggtgtcgacggggtgatctcgttggattgcttggtggactcttgggtgtggcggccttggttcttcatcctccttgtcttgatcatttacatctcccccttgatcattgccgtcatcttgaggtggctcaactctttgatcttctccttcatcaacttgagcctcatcctcattttgagttggtggagatgcttgcgtggaggaggatggttgatcttgtgcatttggaggctcttcggattccttaggacacacatccccaatggacatgttccttagcgcgatgcatggagcctcttcattacctatctcatcaagatcaacttgctctacttgagagccgttagtctcatcaaacacaacgtcacaagaaacttcaacttgtccagagaacttgttaaagactctatatgcccttgtgtttgaatcatatcctagtaaaaagccttctacaatcttaggagcaaatttagactttctacctcttttaacaagaataaagcatttgctaccaaagactctaaaatatgaaatatttggctttttaccggttaggagttcgtatgatgtcttcttgaggattcggtgtagatacaaccggttgatggtgtaacaggcggtgttgaccgcctcggcccaaaaccgatccgaagtcttgtactcatcaagcatggtccttgccatgtccaatagagttctattcttcctctccactacaccattttgttgtggcgtgtagggagaagagaactcatgcttgatgccttcctcctcaaggaagccttcaacttgagagttcttgaactctgtcccgttgtcgcttctaattttcttgatccttaagccgaactcattttgagcccgtctcaagaatccctttaaggtttcttgggtatgagatttttcctgcaaaaagaatacccaagtgaagcgagaatagtcatccacaataactagacagtacttactcccgccgatgcttctgtaagctatcgggccgaataggtccatgtgtaggagttccagtggcctgtcagtcgtcatgatgttcttgtgtggatgatgagcaccaacttgcttccctgcttggcatgcgctacaaatcctgtctttctcaaaatgaacatttgttaatcctaaaatgtgttctccctttagaagcttatgaagattcttcatcccaacatgggctagtcggcggtgccatagccaacccatgttagtcttagcaattaagcaagtgtcgggttcagctctatcaaaatctaccaagtatagctgaccctctaacactcccttaaatgctattgaatcatcacttcttctaaagacagtgacaccttggtttccatccccgaatgtgatagctcgttggggatcctggtttttctcgtaggaggagaacattttcttctcccctgtcatgtggtttgtgcacccgctatcaatgatccaacttgagcccccggatgcataaaccttgacggatttgttagttaacacataagatgcatcaaaagttttaaatgaaatgctatgttcatttgatgcactaggagttttcttcttaggcaacttagcatgggttggttgcctagaactagatgcctcacccttatacataaaagcatggttagggccagagtaagacttcctagaatgaattctcctaattttgctctcgggataaccggcagggtataaaatgtaaccctcgttatcctgaggcatgggagccttgcccttaacaaagttagataatcttttaggaggggcattaagtttgacattgtcccccttttggaagccaatgccatccttgatgcccaggcgtctcccactatagagcatgcttctagcaaatttaaatttttcattttctaagtcatgctcattaattttagcattaagttgagctatgtgatcattttgtttcttaattaaagctaggtgatcatggatagcatcaacattaatgtctctacatttagtgcaaatggcagtatgctcaacggtagatgtatagggtttgcaagattttaattctacaaccttagcatgcaatatatcatttttacttctaaggtcggaaatggaagcattgcaaacatcaaaatctttagccttagcaattaatttttcattttcatttctaaggctagtaagagacatgttcaattcttcaatcttagcaagcaaatcatcattatcattcctaagattgggaattgaaacatcacaaacatttgaatcaaccttagctaacaaattagcattctcattcctaaggttgtctatagtctcatggcaagtgcttagctcactagatagtttttcacatttttctacttctagagcataagcatttttaaccttaacatgctttttgttttctttaataaggaagtcctcttgggtgtccaagagatcatccttctcatgaatagcactaatcaattcatttaatttttctttttgttgcatgtttaagttggcaaaaagaatgcgcaagttatcctcctcattactagcattatcctcatcactagaggtttcatatttggtggatgatcttgattttaccttcttccttttgccgtcctttgccatgaggcacttgtggccgatgttggggaagagaagtcccttggtgacggcgatgtttgcggcgtcctcatcggaggaggagtcggtggagctctcatcggagtcccattcccggcaaacatgggcatcgccacccttcttcttgtagtacttcttcatctcctttcttctccccttcttgtcgtcgcccctatcactgtcactagaaataggacattttgctataaagtgatcgggcttaccacacttgtagcaaactttcttggagcagggcttgtaatctttccctttcctttgcttgaggatttggcggaagctcttgataatgatcgccatctcctcgttgtcgagcttggaggcgtcgatgggtgttcgacttggagtagattcctccttcttttcttccgtcgccttgaatgcgaccggttgtgcttcggatgtggaggggccatcaagctcgttgatcttctttgagcctttgatcatcatttcaaagctcacaaaattcccgattacttcctcgggagtcattagtgtatatctaggattgccacgaattaattgaacttgagtagggttaagaaaaacaagtgatcttagaataaccttaaccatttcgtggtcatcccattttttgctcccgaggttgcgcacttggttcaccaaggttttgagccggttatacatgtcttgtggctcctccccttggcgaagtcggaagcgaccgagctcccccttgatcgtttcccgcttggtgattttggtcacctcgtctccttcatgcgcggtctttagtgtgtcccaaatctccttggcacctttcaacccttgcaccttattatactctctcgactgtacaccaaactcaacaacatcccatatacttttgtggagtgaggttggatgaaatcgcatcaaatcactccacctagcataatcttcaccatcaaatgttggtggtttgcctaatgggacggaaagtaaaggcgtatgtttaggaatgcgaggatagcgtaaggggatcttactaaacttcttgcgctcatggcgcttagaagtaatggatggcgcgtcggagccggaggtggaaggtgatgaagtatcggtctcgtagtagaccaccttcctcatcttctttttcttgtcgccactccgatgcgacttgtgggaagaggatttcttctccttcccctttcccttgttgcgggactcttccgatgaagctttcccgtggcttgtagtgggcttgtcgcctgtctccatctccttcttggcgtgatctcccgacat

SEQ ID NO: 5079 - DNA, 2798 bp, Zea mays
  unsure (1)..(2798): unsure at all n locations
  Clone ID: TF_ZmC951_378
cgggggaccacgtcccaatggaatgttccttagcgcgatgtcacggagcctcttcatcacctatctcatcaagatcaacttgctctacttgagagccgttagtctcatcaaacacaacgtcacaagaaacttcaacttgtccggaggacttgttaaagactctatatgcccttgtgtttgaatcatatcctagtaaaaagccttctacagtcttaggagcaaatttagattttctacctcttttaacaagtataaagcatttgctaccaaagactctaaaatatgaaatattgggctttttaccggttaggagttcgtatgatgtcttcttgaggattcggtgtagatataaccggttgattgcttagcaggcggtgttgactgcctcggcccaaaaccgatccgaagtcttgtactcatcaagcatggttctagccatgtcaaatagagttcaattcttcctttccactacaccattttgttgtggcgtgtagggagaggagaactcatgcttgatgccctcctcctcaagaaagccttcaatttgagagttcttgaactccgtcccgttgtcgcttctaattntcttgctccttaagccgaactcattntgagcccgtctcaagaatccctttaaggtctcttgggtatgagatttttcctgcaaaaagaatacccaagtgaagcgagaataatcatccacaataactagacagtacttactcccgctgatgcttatgtaagctatcgggccgaataaatccatgtggagtagctcgagcggtatgtcagtcgtcataatattcttgtgtggtgggcaccaacttgctttcctgcttggcatgtgctacaaaccctgtctttctcaaaatgaacatttgttagtcccaaaatgtgttctcccttcagaagcttggaagattcttcatcccaacatgggctagtcggcgatgccagagccaacccatattagtcttagcaattaagcaagtatcgagttcagctctattaaaatcaactaagtatagctgaccctctaatactcccttaaatgctattgaatcatcacttcttctaaatacagtaacacctaaatcttgatttccatccccgaatgtgataactctttggggatcatcatttttctcgtaggaggagaacatccttttctcccatgtcatatggtttgtgcatctgctatcaataatccaacttgagctccaggatgcataaaccttaggtacccaaacacgagtcttggagcccttgtgtttgcccccaacatatttggcaactattttgcctgatttgttagtaagcgcataagaagcatcaaaagtcttaaatgaaacattaggttcatttgatgcagtaggagttatctttttagacattttaacataggtagaatgcctagagctagatgcctcattcttgtacataaaagcatgatgggaaacagaatgagacttcctagcatgacttctcctaatcttatgctcaggataaccagcaggatataaaatgtaaccctcgttatcctgagccttgggagccttacccctcatcactagatgtagtatacttggggtggttctagcttgtaccctctttttcttgccgtcctttgccatgtagcatttgtggccgacgtttgggaagagaagtcccttgttgacgatgatgtttgcggcgtcctcgtcggaggaggagtcccattcccaacacacgtgggcatcgtcgcccttcttcttgtagtatttattcttttccttcttcatccccttcttgtcgttatccctgtcactatcactagacatagggcatttagcgataaaatgtctgggcttaccacacttgtagcacaccctcttagagcgaggtttgtagtccttccccctcctttgcttgaggatttggcggaagctcctaatgatgagcgtcatttcctcattgtcgagcttggaggcgtcaatggggagcctacttgatgtagactcttctttcttatcctccgtcgctttgaatgcgatgggttgcacctcgggtgtggaggtgtcgccttgctccaagttgactatttgtttggagcctttgatcatcaattcaaagctcacaaactttcctataacttcctcgggagacattagcttatatctaggatcacctcgaattaattgaacttgcgtaggattacgaaaaatgagtgatcttagaataatttggttgaccaaggtcttgagccgattgtacattgcttgtggctcctctccttggttgaggacaaatcgaccgagctccccctcgatcgtctcccgcttggtggtcttggtcacctcatccccttcatgcgcagtctttagtacatcccaaatctttttggcactttttagccattgcaccttattatactcctctcgacacaaggaggcgaggagtatagtagttgcttgggagtcaaagtgccagatttgggcgatttcgttcgaatcataatcttcatcccctatgggtggtacctgcgctccaaactcaacaatgtcccatatgctagcgtggagtgaggttaggtgatgcctcaatttatcactccacatacaataatcttcaccataaaaaataggtggtttgcctaatgagatggaaagtaaaggagtgcgtttagaaatgcggggatagcgtaaggggatcttactaaacttcttgcgctcatggcgcttagaagtgacggacggagcgtcggagccgaaggtggagggcgacgaagaatcgatctcgtagtagaccactttcttcat

SEQ ID NO: 5080 - DNA, 3840 bp, Zea mays
  Clone ID: TF_ZM3644.C1.o16.fg
atgtcgggagatcacgccaagaaggagatggagaccggcgaaaagcccactataagccacgggagcacttcatcggaagagtcccgcaccaagaggaaggagaagaaggactcctccaaagggaaggagaagagatcttcttcacatcacaaagagaagaaggagaaatcctcttcccacaagccgcatcggagtggggacaagaaaaagaggatgaggaaggtggtctactacgagaccgattcttcatcggcatccacctccggctccgacgcggcgtccgtcacttctaagcgccaagagcgtaagaagtatagtaagattcccctacgctaccctcgcatttctaaacatacacctttactttccgtcccattaggcaaaccaccaacatttgatggtgaagattacgctaggtggagtgatttaatgcgatttcatctaacctcgctccacaaaagtatatgggatgttgttgagtttggtgcacaggtaccatccgtaggggatgaagactatgatgaggatgaagtggcccaaatcgagcacttcaactcccaagccacaaccatactccttgcctctctaagtagagaggaatataacaaggtgcaagggttgaagagtgcaaaggagatttgggacttactcaagaccgcgcacgagggtgatgaactcaccaagattaccaagcgggaaacgatcgagggggagctcggtcgcttccgtcttcgccaaggggaggagccacaagacatgtacaactggctcaaaaccttggtgaaccaagtgcgcaacctcgggagcaaaaagtgggatgaccacgaagtggttaaggttattctaagatctcttattttccttaaccctactcaagttcaattaattcgtggcaacccaagatatacactaatgactcccgaggaggtaatcgggaattttgtgagctttgagtatatgatcaagggctcgaagaagatcaacgagctagatgatccctccacatccgcggcacaaccggacgcatttaaggcgacggaggagaaggatgagtctacatcgagtagacaaccaatcgacacctcaaagctcgacaacgaggagatgacgcttgtcatcaaaagctttcggcaaatcctcaagcaaaggagggggaaggattacaagccccaatcaaagaaggtttgctacaagtgtggtaagcccgatcactttatagctaaatgtcctatttctagtgacagtgacaggggcgatgacaagaagggcagaagaaaggagaagaagagatactacaagaagaagggcggcgatgcccatgtttgtcgggagtgggactccgacgaaagctctagcgactcctccgacgacgaggacgccgccaacatcgccgtcaccaagggactcctcttccccaacgtcggccacaagtgtctcatggcaaaggatggcaaaagaaagaaggttaaatccaaatcatccactaaatatgagacttctagtgatgataatgctagtgatgaggaggataacttgcgtaccctttttgccaaccttaacatggaacaaaaagaaaaattaaatgaattaattagtgctattcatgaaaaggatgaccttttggattctcaagaggacttcctaattaaggaaaataagaaacatgttaaggttaaaaatgcttatgctctagaaatagaaaaatgtgagaaattatctagtgagctaagcacatgccatgacactattgccaaccttagaaatgaaaatgccaaattaattgctaaggttgattctcatgtttgcaatgtttcaacttccaatcctagagatgataatgttgatttacttgctaggattgatgaattgaacatttctcttgttagccttaggattgaaaatgagaaattgcttgctaaggctaaagattttgatgtttgcaatgttactatttctaaccttagaagtgaaaatgacatattgcatgctaaggttatagaattaaaatcttgcaaaccctctacatctatcgttgagcatgtatctatttgtactagatgtagagatgttgatgttaatgctattcttgatcacatggctttaattaaacaacaaaatgatcatatagcaaaattagatgctaaaattgtcgagcataacttagagaatgaaaaatttaaatttgctagaagtatgctctataatgggagacgccctggcatcaaggatggcattgacttccaaaggggagacaatgtcaaacttaatgcccctcctaaaagattgtctaattttgttaagggcaaggctcccatgcctcaggataacgagggttacattttgtaccctgccggttatcccgagagcaagattaggagaattcactctaggaagtctcactctggccctaaccatgcatttatgtataagggtgagacatctagttctaggcaaccaacccatgccaagttgcctaagaagaaaactcccagtgcatcaaatgaacatagcatttcatttaagacctttgatgcatcttatgttttgactaacaaatccggcaaaatagttgccaagtttgttgggggcaaacacaagggatcaaagacttgtgtttgggtacccaaagttcttgtttctaatgccaaaggacccaaaaccgtttgggtttatgcatccgggggctcaagttggatactcgacagcggatgcacaaaccatatgacaggggagaagaagatgttctcctcctacgagaaaaaccaggatccccaacgagctatcacattcggggatggaaatcaaggtgtcactgtctttagaagaagtgatgattcaatagcatttaagggtgtgttagagggtcagctatacttagaaaaatctcaaacccaagaaaccttaaagggattcttgagacgagctcaaaacgagttcggcttaaggatcaagaaaattagaagcgacaacgggacggagttcaagaactctcaaatcgaaggcttccttgaggaggagggcatcaagcatgagttctcttctccctacacgccacaacaaaatggtgtagtagagaggaagaatcgaactctattggacatggcaagaaccatgcttgatgagtacaagacttcggatcggttttgggccgaggcggtcaacaccgcttgctacgccatcaaccggttatatctacaccgaatcctcaagaagacatcttatgaactcctaaccggtaaaaagcccaatatttcatattttagagtctttggtagcaaatgttttattcttattaaaagaggtagaaaatctaaatttgctcctaagactgtagaaggctttttactaggacatgattcaaacacaagggcatatagagtctttaacaggtccactggacaagttgaagtttcttgtgacgttgtgtttgatgagactaacggctctcaaatagagcaagttgatcttgatgagataggtaatgaagaggctccatgcatcgcgctaaggaacatgtccattggggatgtgtgtcctaaggaatccgaagagcctccaaatgcacaaaatcaaccatcctcctccacgcaagcatctccatcgactcaaaatgaggatgaagctcaagttgatgaagtagaagatcaagcaaatgagccacctcaagatgacgacaatgatcaaaggggagatgcaaatgatcaagacaaggaggatgaagagcaaaggccgccacacccaagagtccaccaagcaattcaacgagatcaccccgtcgacaccatcctcggcgacattcataagggggtaactactagatctcgtgttgcacatttttga

SEQ ID NO: 5081 - DNA, 945 bp, Zea mays
  Clone ID: TF_ZM4612.C4.o4.fg
atggagaacttgagtcaaatgaccctgaccattgtgattggaaaaattgtggtcgatgatcttctctttaacactgaaggaaaatgcaaagaaagaaaggatgcttctcatgcggggagaagggccacttcagggacaactgtccaaacatgtccgaacccacaaaggggaggagcaaagccaaggcgcttacaagtgtcaaaacttgagataactcttcaaacgaagatgaacctccaaggacacgcaaccaccaatcctcatcacgcccatcacggtcattgcacaagtgccttatggcaagaggtaacaactaaaattgagcaactagagtctgatgttccatcctcagctaccgatgatggccttattaaaaataatgaaaaacttaaggctaagttagctagctctcaagaagcaattgaaaacttgctagagaaaatggaaattcttagcatacacaataatgaactaactactaagctagaaaagatcgatagcaccttagaagtatttttagttgaaatacctaaaattattgaaaaagatgcttctacttcttgctttgatttaattgatgattctaacccctgcaaccaagttcttgttgagaatgttgttatagaaacatgttcgaacgaggtttcaaaggaaaatgagcaattaaggcaagaagtggctcgccttggcaaggccttgtatggcaagaaaggcaaagccaaacaaatccaaactcctcagggtaacaccactgcaggagtgaacaagcctgtggagggaggaactgtgatttgtaggatatgccacaaggaagggcacaagttttatcaatgcaaggcgaagaccggggataagcaaaagcaaaagctcaagaaaaagtcaaacaacaaaatctccaacacctacatcaacaaggtggataaaaggctgctacaccatatttga

SEQ ID NO: 5082 - DNA, 1987 bp, Zea mays
  Clone ID: TF_ZM4913.C4.o2.fg
atggatcctaagggaaaggggatggtggtcaacaacaacgagaaggagtctatcttcaacgagccgaaggatgacaagcctaccgactcgggctcgagccacaagcgcaaagacgggaagaagaagaagacaaggcgcatcaaggagatcgtctactatgacagcgacgaatcttcctcttctcaaaaggacgacgactacgagaaaaagaaaacggtcaattcgaacttttcttttgattactctcgtattcctcaaagtacaaatgctcatttattatctattccacttgataaacctcctcattttgatggagaagactacggattttggagtcacaaaatgcgtagtcacttgttctctctccatcctagtatatgggagattgtagagagtggaatgcactttgatagtacggatagtcccatgttcattaatgagcaaattcataaaaatgcacaagctactactgttcttctagcttcattgtgcagggatgaataccacaaagtgagcggcttggataacgccaagcaaatttgggacaccctcaagatctctcatgaggggaatgacgtcacaatgctcaccaagatggagttggtggagggcgaactcgggagattcgctatgataaggggagaagagccaacccaaacgtacaaccgactcaagacccttgtcaacaagataagaagctatcgaagcacgcgatggacggaccacgacgtcgtccgcctaatgctaaggtcttttactgtccttgatcctcatcttgtaaacaatattcgtgagaatcctaggtacaccaagatgacgcccgaggagatacttggaaagttcgtgagtgggcgaatgatgatcaaggaagcaagatacgtggacaacgcattgaatggtccaatcaatgagcctcaacctcttgctctcaaggcaacaagaagcaaggagacgctacctagcaaggtagcacaaattgaggcggccagacttaattatgaagagatggctctcatcatcaagagattcaagacggcgctaaaaggtcgcaaggggcagccaagcaagaccaagacaaaggggaaacactcatgcttcaaatgtggtaagcttggtcattttattgctaactgtcccgataatgatagtgatcaggatcaagggaacaagagggagaagaagaagaactataagaaggcaaagggcgaggcgcatctaggcaaggagtgggattcgaattgctcctcttccgactccgataatgaaggactcgccgccaccgccttcaacaagtcatccctcttccccaacgagcgtcacacatgccttatggcaagggagaagaaggtatgtactcgaaactctacttatgcttcttcaagtgaggacgaatctagtgatgaggatgaaatagattattcatgtttatttaagggcctagatagaaccaaggtagataaaattaatgaattgattgatgccttgaatgataagaataggcttttagaaaagcaagaggatttgttgtatgaagaacatgacaaatttgtagaagcacaaaaatctcatgctctagaagttaaaagaaatgaaatgctttcttgtgaattatcttcttgccataagacaatttctaacttaaggagcattaatgatgatttgaatgcgaagttagaaatagctagtaaatcaacatgttgtggagaaattgttgcaacttgtaatagatgtaaagattttgacattgatgcttgtagtgaacacctagtttcaatttccaaacttaatgatgaattggctagtcttaatgctcaacttaagactagcaagagcgaatttgataggctaaaatttatgatggatgcctacacgattggtagacacccctcaattaaggatggacttggcttcaagagggaaaccaagaacttaacaagccataaggttcccatccccgccaaggagaaagggaaggctcctatggcaa

SEQ ID NO: 5083 - DNA, 1332 bp, Zea mays
  Clone ID: TF_ZM4986.C2.o5.fg
atggatcctaaggggaagggaatcgtgatcaacgacaaggagaaggagtccttcgtcaacgagccgaaggatgacaagcctactgactcggggtcgggccacaagcgtaaagatgggaagaagaagaagacaaggcgtatcaaggagatcgtctactacgacgatagcgatgagtcgacttcttcccaaaaggacgacgacaacgactacaggaagacggtcaattcgaacttttcatttgattattctcgtattccacatagttcgaattcgcatttgctttccattcctcttggcaaacctccacacttcgatggggaagactacggattttggagtcacaaaatgcgtagtcacttattctctctccatccaagcatggaagagtacaataaggtgagcggcctggacaacgccaagcagatatgggacaccctcaagatctctcacgaagggaacgacatcaccatgctcactaaaatggagttggtggagggcgagcttggacgattcgcaatgataaggggagaggagccaacccaaacttacaaccggctcaagacccttatcaacaaaataaggagctacggaagcacgcgatggacggaccacgacgtcgtccgcctaatgctaaggtcctttaccgttcttgatcctcatctcgtaaacaatattcgtgagaatcccaggtacacgatgatgacgcccgaggaggtactcggaaaattcgtaagcgggcggatgatgatcaaggaggcgagatacgtcgacgacgctctaaacggtccaatcaatgagcctcaacctcttgctctcaaggcaacaagaagcaaggaaatgctacctagcaaggtggcacaaattgaggcggtcggacttaatgatgaagagatggctctcatcatcaagagattcaagacggcactaaaaggccgcaaggggcaaccaagcaagaccaagacaaaggggaagcactcatgcttcaaatgtggtaagcttggtcattttattgctaactgtcccgacaatgatagtgatcaggatcaagggaacaagagggagaagaagaagaactataagaaggcaaagggcgaggcgcatctaggcaaggagtgggactcggactgctcctcttccgactccgacaatgaaggactcgccgccaccgccttcaacaagtcatccctcttcccaaacgagcgtcacacatgccttatggcaagggagaaaaaggtgagtactcgagactccacttatgcttcttctagtgataatgagtctagtgatgatgatgacatagactattcatgcttattcaagggcttagattga

SEQ ID NO: 5084 - DNA, 1761 bp, Zea mays
  unsure (1)..(1761): unsure at all n locations
  Clone ID: TF_ZmC29741_67
cgacnctagactgaactccaagtacacaaaacataaccaaataaagtttgccgtctcagatacacatttaaaagctagagaaccatgagagagagtagtagacagacacaattacatttgtaaatagacagaattattccatattacataaaatgactagcacacaggcaactatatgtagaactctaaacacaaaacacattagagattgaatgggcatttgatattgcaatcttgcctaaacctttgaccatgccttggatcccatcaccaaatatgatggaatcttgggaatccttattcttgacgtaggaggtgaacatctttttaatcggacccatcaggcctttgcagctttatgctgatgggggttaccagctgagaattaggcgtcttgagggtacccctaattatggtccccgacagtacccaactcttgttgggtcctacaaggttagtaacaatggccttagggacccaaatgcaagttttatctcccttgcattttgcccctaatttcctagcgatcactttcttatttttcctacaaattgcaaaagaagcattgcaagcatggtaaattgtagaaggttcattacttggttttctaggtacatgaacaacatttctcctaggcatatctctaccatgcacaaagaaagaacttgaagcaatcatggcatttgaatcataagcatcacaactcccattatgataagcatttctagaaaattttctatcataaataaatgcatgattcttttgactactattagccataggagccttccccttttccttgttgaaaattggagctctttggcttgttaagttcttggcttccctcttgaagccaagcccatccttaattgaggggtgtctaccaatagtgtaggcatcccttgcaaattttagtttgtcaaagtcattcttgctagtcttaagttgggcattaagactagccacttcaccatttaatttcgcaatagaagtaaggtgctcaacacatgcatcaacattaaagtccttacacctattgaaaatcacaacatgttctacacaagagcttgatttattagttatttctaacttagtatttaaatcatcattaatactctttaagctagaaatagattcatggcatgtagataattcacatgaaagcatttcatttcttttaacttctaaagcaagagaattttgcgcactaacaaatttatcatgctcttcatataaaagatcctcttgcttttctaacaatctatctttctcattcaaagcatcaattagttcattgatcttgtcgattttagttctatctaaacctttgaataagcttgcgtagtctacttcatcatcactaggctcatcatcacttgaagaagcatacgtaatagtacgtcgagtacttaccttcttctcctttgccatgagacaggtgtgatgctcgttggggaagagagacgatttgttgaaggctgtggcggcgagtccttcgtcgtcggagtcggacgaagaacaatccgagtcccattcttttccaaggtgtgcctcgctcttagccttcttgtaaaccttcttgttctctctcttcccattctttccttgttcctggtcactatcattatcgagacagttagcaataaagtgaccaatcttaccacacttgaagcaggagcgctttcccttcgtcttgctcttgttgggatgctccttgcgacctttgagcgccgtcttgaagcgcttgatgatgagggccat

SEQ ID NO: 5085 - DNA, 882 bp, Zea mays
  Clone ID: TF_ZM3651.C6.o3.fg
atggatcctaagggcaaggggattgtgatcaatgataaggagaaggagtcatttgtcaacgagcctaaagatgacaagcctaccgactcgggatcgggccacaaacgaagagatgggaagaagaagaagacgaggcgcatcaaggagatcgtctactacgacgacaacgacgagtcctcttcttcccaaaaggatgatgacaacaactacgagaaaaagaagacgattaactcaaacttctctttcgattattctcgtattccgcatagttcaaatgcacatttgctttccattccacttgggacgagtaccataaggtacacgaagatgacgcccgaggagatccttggaaagttcgtaagcgggcggatgatgatcaaggaggctagatacgtcgacgatgcattaaatggtccaatccaagagcctcaaactattgctctcaaggcaacaaggagcaaggaggcactacctagcaaggtggcgcaagttgaggcggccgggcttaatgttgaagagatgaccctcatcatcaagcggttcaagacggcgctaaagggtcgcaaggagcaccccaacaagaacaagacgaaggggaagcactcctgcttcaaatgtggtaagattggtcattttatcactaattgtcccgataatgatagtgaccaggaaaagaagagtggaaagtgggaaaagaagaagaactacaagaaggcgaagggcgaggcacatcttggaaaggagtgggattcggattgctcctcgttcgactccgacaacgaaggactcgccaccaccaccttcaataagtcatccctcttccccaacaagcatcacacttgcctcatggcaagggaaaagaaggtgttaatgatgatttaa

SEQ ID NO: 5086 - DNA, 4986 bp, Zea mays
  Clone ID: TF_ZM4412.C1.o7.fg
atggatcctaaggggaagggaatcgtgatcaacgacaaggagaaggagtccttcgtcaacgagccaaaggatgacaagcctactgactcgggctcgggccacaagcgcaaagatgggaagaagaagaagacaaggcgcatcaaggagatcgtctactacaacgatagcgatgagtctacctcttcccaaaaggacgatgacaacgactacaggaagacggtcaattcgaacttttcatttgattattctcgtattccacatagttcgaattcgcatttgctttccattcctcttggcaaacctccacacttcgatggggaagactacggattttggagtcacaaaatgcgtagtcacttattctctctccatccaagcatatgggagattgtagaaaatggaatgaaatttgatagctcggatagccctatgcttataaatgaacaaatccatagaaatgcacaagctactactgttctattagcatctttgtgcagggaagagtacaataaggtgagcggcttggacaacgccaagcagatatgggacaccctcaagatctctcacgaggggaacgacatcaccatgctcactaaaatggagttggtggagggcgagcttggacgattcgcaatgatgaggggagaggagccaacccaaacttacaaccggctcaagacccttatcaacaaaataaggagctacggaagcactcgatggacggaccacgacgtcgttcgcctaatgctaaggtcctttaccgttcttgatcctcatctcgtaaacaatattcgtgagaatcccaggtacacgatgatgacgcccgaggaggtatacgggaaattcgtaagcgggcggatgatgatcaaggaggcgagatacgtcgtcgacgctctaaacggtccaatcaatgagcctcaacctcttgctctcaaggcaacaagaagcaaggaaacactacctagcaaggtggcacaaattgaggcggtcggacttaatgatgaagagatggctctcatcatcaagagattcaagacggcactaaaaggccgcaaggggcaaccaagcaagaccaagacaaaggggaaacgctcatgcttcaagtgtggtaagcttgatcattttattgctaactgtcccgacaatgatagtgatcaggatcaagggaacaagagggagaagaagaaaaactataagaaggcaaagggcgaggcgcatctaggcaaggagtgggactcggactgctcctcttccgactccgacaatgaaggactcgccgccaccgccttcaacaagtcatccctcttccccaacgagcatcacacatgccttatggcaagggagaagaaggtgagtactcaagactccacttatgcttcttctagtgataatgagtctagtgatgatgatgacatagactattcatgcttgttcaagggcttagatagatctaagatagataaaattaatgaattgattgatgccttgaatgataagaataggcttttagaaaagcaagaggatttgttgtatgaagaacatgacaaatttgtagaagcacaaaaatcacttgcattagagattaagagaaatgaaatgctttcttttgaactatctacttgtcatgaaaccatttctactttaaaaagtgtcaacaatgatttaaatgctaaattagaagcagcaaataaatctaattcttatgtagaacatgttgtaatttgtactaggtgtaaagattttgacattgatgcttgtagtaaacacctagtttcaatttccaagcttaatgatgagttggctagtcttaatgctcaacttaagactagcaagaatgatttcgataagctaaaatttgcaagggatgcctacacgattggtagacacccctcaattaaggatggacttggcttcaagagggaagccaagaacttaacaagccataaggctcctatctccgccaaggagaaagggaaggctcctatggctagtagtactaaaaggaaccatgcttttatgtatcatgataggagacaaactagaaatgcttataggagttataatgcttatgatgattttgactctcatgccatgtttgcttctagttcttcctacatgcatggtagaaatatgtctaggagaaatgctattcatcatgtgcctagaaagaatattattcatactcctaggaaagtagtgaatgaaccctctacaatttattgtgctttaaatgcttcctttgctatttgtagaaaggataggaaaattgttgccaggaagttaggggcaaaatgcaagggagacaaaacttgcatttgggtccctaaggatatttgcactaaccttgtaggacccaacatgagttgggtttatgcattcgggggttcaagctggattattgatagcggatgcacaaaccatatgacgggggagaagaagatgttcacctcctacgtcaagaataaggattcccaagattcaattatattcggtgatgggaatcaaggcaaggataagtctgaaacccaagggaccctcaagcgcttcctcaggagagctcaaaatgagtttgagctcaaggtgaagaagataaggagcgacaacgggtccgagttcaagaaccttcaagtaggggagttccttgaggaggaagggatcaagcacgagttctccgctccctacacaccacagcaaaatggtgtggtagagaggaagaacaggacactaatcgatatggcgaggacgatgcttggagaattcaagacccccgagtgtttctggtcggaaaccgtgaacacggcttgccacgccatcaacagggtctaccttcatcgcctcctcaagaagacttcgtatgagctactaactggtaacaaacccaatgtatcttactttcgtgtatttgggagcaagtgctacattctagtaaagaagggtagaaattctaagtttgctcccaaagctgtagaagggtttttgttaggttatgactcaaatacaaaggcgtatagagtcttcaacaaatcatcgggtttggttgaagtctctagcgacgttgtatttgatgagactaatggctctccaagagagcaagttgttgatcttgatgatgtagatgaagaagacgttccaacggccgctatgcgcaccatggcgattggtgatgtgcgaccacaggaacaattggagcaagatcaaccttcttcctcaacaatgatgcatcccccaactcaaaacgatgaacaggttcatcaagaggagtgtgatcaagggggagcacaagatgatcatgtgatggaggaagaagcacaaccggcacctccaacccaagttcgagcgatgattcaaagggatcatcccgtcgaccaaattctgggtgatattagcaagggagtaactactcgatctcgattagttaatttttgtgagcattactcctttgtctcttctattgagcctttcaaggtagaagaggccttgctagatccggactgggtgttagccatgcaggaggaactcaacaacttcaagcgcaatgaagtttggacactggtgcctcgtcccaagcaaaacgttgtgggaaccaagtgggtattccgcaacaaacaggacgagcacggggtggtgacgaggaacaaggctcgacttgtggcaaaaggttatgcccaagtcgcaggtttggactttgaggagacttttgctcctgtggctaggctagaatcaattcgtatcttgctagcatatgccgctcaccattctttcaggttgttccaaatggatgtgaagagcgccttcctcaacgggccaatcaaggaggaggtgtacgtggagcaaccccctggcttcgaggatgaacggtaccccgaccacgtgtgtaagctctctaaggcactctatggacttaagcaagccccaagagcatggtatgaatgccttagagactttctaattgttaatgctttcaaggttgggaaagccgatccaactctctttactaagacatgtgatggtgatttgtttgtgtgccaaatttatgtcgatgacataatatttggttctactaaccaaaagtcttgtgaagagtttagcagggtgatgacgcagaaattcgagatgtcgatgatgggagagttgaactacttccttgggttccaagtgaagcaactcaaggacgacaccttcatctcccaaacgaagtacacgcaagatctgctaaagcggtttgggatgaaggatgccaagcccgcaaagactccgatgggaaccgacggacacaccgacctcaacaaaggaggtaagtccgttgatcaaaaagcataccggtcaatgatagggtctttactttatttatgtgctagtagaccggatattatgcttagcgtatgcatgtgtgctagatttcaatccgatcctaaggagtgtcacttagtggcagtgaagcgaattctaagatatttggttgctacgccttgtttcgggctctggtatccaaaagggtctacctttgacttggttggatactcagattccgactatgctggatgtaaggtcgataggaagagtacatcagggacgtgccaattcttaggaaggtccctggtgtcgtggaactctaagaaacaaacctccgttgccctatccaccgctgaggccgagtatgttgccgcaggacagtgttgcgcgcaactactttggatgaggcaaaccctcagggactttggctacaatctgagcaaagtcccactcctatgtgataatgagagtgctatccgcatggcggaaaatcctgttgaacacagccgcacaaagcacattgacatccggcatcactttttgagagaccaccagcaaaagggagatatcgaagtgtttcatgttagcaccgagaaccagctagccgatatcttcactaagcctctagatgagaagactttttgcaggttgcgtagtgagctaaatgtcttagattcgcggaacctggattga

SEQ ID NO: 5087 - DNA, 4077 bp, Zea mays
  Clone ID: TF_ZM4640.C8.o1.fg
atgacttctcatggatcctcagacgaagggaatgcacagtcccacacggacggacttgcacgagagggtttccgctgtatcttgtgggaggtacttcagggagcaggttacatgacacctcccctgtacgcggtgcagcagttagagaagcaccgagtgccccgctgtagggtgaggatgaccctggagcctcatcccctgcagccaggctggcgttcgctggactttgaatgttttgggtaccgggctgaggatactatcgaggcgatcgctcttcacggactgaccactttctgcagattccaccccttggagctgtccactcaccccattggcttgttcctcactgagaaggaggacgacccaatgtggaaggaccgagtggagcatgccaaggacatctgggctatctacccatgtcagactgctcacttaacggtgcggtgcatgaatgccctgtatcgtctgcaagtgatgcgtggagaggcaatgtcccatctgatggcattgttagaggcaaccaaaattaccttggataatagagaggaacttgtggttgacttgtccactgagatggtggaaaaggacttacaggtggagcaactgtcaaatgagatccaagagcttgaggaactagtggggacgagggagaacacccttgaggagctgatggctcaacagaatgagatcttgaggcagctagctcagcgtcagccaccacctcagcactatggtggtggtgatcatcagcgtcaccccgcggcagccacctatcaggagttcctcagtacccagccaccattgttcaccagggcagaggacccccttgatgcggatgtatggttgagagtagtggaatccaaattcccgctactccatggagtttgttcagaggtcactaagccagaggaccgagaggtggaatggagagagttcaaggcagctttcagggggcaccatataccagcgggcattatggaccgcaagctcaacgagtttctggcactcactcaatggaaccggacagtgttacagtattctcaggccttcaatgatctgtgccagtatgccggatatcacgcagacacggatgagaagaagtgggacaggttcaggagggggctcagcactaagctccgtgaccgtctcaacacagtcagggccaacagttataatgagttagtcaatatggccatttctcaggaggattgtatcacagctcgtcaggcagaaaagaagaggaagtcccctgtggaaggaccttcagctcagccacaacacttcaggatcgtgtctgatactcagaacagaggacccaagcagcagcaaggacgttgggtgatccgcccacagcagcagcagcagtaccgtcaggccaatgacaacatgtgtttcacttgtggtaacactggacattatgccaagaattgccccatgaaccagcagaggcagaggcagaatgccaaccagaatcaaggcaagagacaaaaggttcaagtgaggcaaggcagattgaacttcaccaccatggctgacattccagagggagcacccgtcatgactggtatcttttcagtttcgaattatcctgctattattctttttgattctggtgcatcacatagttttatcagtgccaaatgtcagttacctttccatcataccaatgggggtattacaatttcaacaccaggaggcagggttgccacctaccaaatcaacaagaatgtgcctataaagtttggtagtttgataatcaaaacgaacctcctcattttgggtttgaatagtgtggatatcatattgggaactgactggttaaccaaacatcaggccacgatggatactgcagctagggccattgaggtgcactcaccgacttgtggtgaaaccacattatatttgcccaaccagggttgtacccgttcttgtgccttcgttatgatagagtccccagtggaaaggatcccattggtctgtgactacccagatgtttttccggatgaattgccagggatgccacctgacagagacattgagttcgcaattgaattgcaaaccggaactgctcctacatccaagagaccctataggatgcctccagcagaattggcagaattgaagaagcaactgcaagagttgttggacaaggggttcattcgcccaagtacttcaccttggggatgtccggccctatttgtaaagaagaaggatgaaagtctgagaatgggtgtcgactaccgccctctcaatgcggtgaccatcaagaacaaatacccactgccccacattgatgttttatttgatcagttgctaagagaaattaaattcttgggtcacacaatttctcaggatgggatatcagttgatcctgagaaggtgcaagaggtaatgtattggaaacctcctaccacagtgagacagattcggagttttctgggattggcagggtattatcgacgattcattccggatttctccagaattgccaagccaatgactgaactattgaagaagggagtcaagtataattggagccagaagtgtgaagatgcctttcatacactaaggcagcacttgacaacagccccagtgctagctcaacctgacaacaccaagccctttgaagtgtattgcgatgcttctggtacgggactgggatgtgtcttaatgcaagataacagagtaattgcttatgcctcccaagcacttagaccccatgagcagaactaccctacacatgatctggagttagcagctgtggttcatgctctcaagatatggagacatttcttgatgggagctcactgtaacatttacactgatcataagagtctcaaataccttttcactcaggcagaccttaatatgaggcagagaagatggttagagttaatcaaggactatgatttggaggtgcattaccatcctggcaaagccaatgttgtagcagatgccttgagcagaaaggcccagtgcaattgtgctttaaattatatctcggtggagcccacaatgcaagagcaaatagtcagggcacagattgaagacaagggtgttcaggtcattaaggaaatgatcaagcagaaagcagaaaaatacaaatgcttccggcaggacagcaaaggaatcctatggtttggagatcgattggttgttcccaaggaccctgagctcagaaagaagatattggatgaggctcacctttcaaaattctccatgcacccaggcagcaataagatgtatcatgatctcagatccttatactggtggaccagaatgaagagggaaattgccaagtatatatccgaatgtgacacctgccagagaattaaagtcattcatttgaaggtagcaggccccctgcaaccccttcccataccatcttggaaatgggaagacatttgcatagatttcatcgtgggattgcccaatacctcccgacaccatgattctatttgggttattgtggatagattgaccaagaccgctcatttcttgccagtgcataccacccacaagacagagaaatatgcagaaatctatgttgatccgatagtgcgtttgcatggtattccaaagaccattgtatatgacagaggagcactgtttgtggcacgcttttgggagcagctacaagaatcacttgggacccatgcaataaggagctccgcatatcatccgcagacagatggccagacagaaagagtgaatcaaatcctcgaagacatgttgcgagcctgtgtgctacactatggtaaaaattgggacaagtgtctttctttggcagagttctcctataataacagctaccagtccagtctaaagatggcgccttttgaggccttatatgggagaaggtgtaggacaccgctcaattggtctcaagcaggagagagggaaatatttggaccagacttggtacttgaagcagaggaaaaggtcagagtcattaagaagaacctagaagctgctcaggccaggcagaagagctatcatgataagaggcggaagcctctacagtttgaagtgggagatcatgtttatcttaaggtgtcacccaccaagggtgtctag

SEQ ID NO: 5088 - DNA, 4557 bp, Zea mays
  Clone ID: TF_ZM4871.C2.o15.fg
atggatcctaagggcaaggggattgtgatcaatgataaggagaaggagtcctttgtcaacgagccgaaagatgacaagcctaccgactcgggctcgggccacaaacgaagagatgggaagaagaagaagacgaggcgcatcaaggagatcgtctactacgacgacagtgacgagtcctcttcttcccaaaaggacaacgacgacaacgactacgacaaacgaaagacgatggagttggtggagggagagcttggaagatttgcaatgataaggggagaggagccaacccaaacaaataaccggctcaagaccctcatcaacaagataaggagctacggaagcacgcgatggacggaccacgacatcgttcgcctattgctaaggtcttttactgtacttgatccacatttggtgaacaatatccgtgaaaatcctaggtacaccaagatgtcgcccgaagaagttctttggaaattcgtaagcgggcgaatgatgatcaaggaggcgagatatgtcgacgacgcgttgaacggtccaatccatgagcctcaacccattgctctcaaggcaacaaggagcaaggagtcgctacctagcaaggtggcacaaattgaggcgacagggctcaatgatgaagagatggccctcatcatcaagcgcttcaagacggcgctaaaggatcgcaagggacagccaagcaagaccaagacaaaggggaagcgttcatgcttcaaatgcggtaagattggtcattttattgctaactgcctcgataatgaaagtgaccaggaacaagggagcaagagggagaagaaggcatacaagaaagctaagggcaaggcacaccttggaaaggagtgggactcggattgttcgtcatccgactccaaaaatgaaggactcgccgccaccgccttcaacaagtcctccctcttcccaaacgagcgacacacatgcctcatggtaaaggagaagaaggtatgtactcgagacagtactacttatgattcttctagtgatgaagaaatagattactctagtttgttcaagggattggatagaactaaagtagataagattaatgaattgattgatgccttgaatgaaaaggataaactcttagaaaaacaagaggaccttttatatgaagagcatgacaaatttgtagaggcacaaaaatcttatgctttagaagttaaaagaaatgaaatgctttcttgtgaactatcttcttgccatgagacaatttctagcttaaggagcataaatgatggtttgaatgctaagttagagatagcaagtaaatctaactcttgtgtagaacatgttatgatttgcaataggtgtaaagattttgacattgatgcttgtagtgaacacatagcttctattgcaaaattaagtgatgaagtagctagtcttaatgcccaacttaagactagcaaaagcgaatttgataagttaaaatttgcaagggatgcctacactattggtagacacccctcaattaaggatggacttggcttcaagagagaagccaagaacttaacaagccataaggctcccatccccgccaaggagaaagggaaggcccctatggctagtagtcctaaaaagaaccatgcttttatgtaccatgatagaagacagtcttataggagttgtaatgcttataatgcttttgactctcatgccatgtttgcttctagttcttcctatatgcatggtagagatatgtctagaagatacgttgttcatatgcctaggagaaatgttgttaatgttcctaggaaagttaatgaaccctctacaatatatcatgctttaaatgcttcctttgctatttgtagaaaggataggaagatagttgctagaaaattaggggcaaaatgcaagggagacaaaacttgcatttgggtccctaaggatatttgtgctaaccttgtaggacccaacatgagttgggtttatgcatccgggggttcaagctggattatcgacagcggatgcacaaaccatatgacgggggagaagaagatgttcacctcctacgtcaaaaacaaggattcccaagattcaataatattcggtgatgggaaccaaggcaaggataaatctgaaacccaagggaccctcaagcgctttctaaggagagctcaaaacgagtttgagctcaaggtgaagaagataaggagtgacaatgggtccgagttcaagaaccttcaagtggaggagtaccttgaggaggaagggatcaagcacgagttctccgctccctacacaccacaacaaaatggtgtggtagagaggaagaacaggacgctaatcgatatggcgagaacgatgcttggagagttcaagacccccgagcgtttttggtcggaagccgtgaacacggcttgccacgccatcaaccgggtctatcttcaccgcctcctcaagaagacttcgtatgagcttctaaccggtaacaaacccaatgtatcttactttcgtgtatttgggagcaaatgctacattctagtgaagaagggtagaaattctaagtttgctcccaaagctgtagaagggtttttgttaggttatgattcaaatacaaaggcgtatagggtcttcaacaaatcatcgggtttggttgaagtctctagcgacgttgtatttgacgagactaatggctctccaagagagcaagttgttgatcttgatgatgtagatgaagaagatgttccgacggccgctatacgaaccatggtgattggtgatgtacgaccacaggaacaaaaggagcaagatcaaccttcttcctcaacaatggtgcatcccccaactcaagaagatgaacaggtttatcaaaaggaggcgtatgatcaagggggagcacaagatgatcaagtaatggaggaagaagcacaatcggcacctccaactcaagtccgagcgatgattcaaagggatcatcccgtcgaccagattttgggtgacataagcaagggagtaactactcggtctcgattagttaatttttgtaagcattactcctttgtctcttccattgagcctttcagggtagaggaggccttgctagatccggactgggtgttggccatgcaagaggagctcaacaacttcaagaggaatgaagtttggacactggtgcctcgtcctaagcaaaatgttgtgggaaccaagtgggtattccgcaacaaacaagacgagcacggagtggtgacgaggaacaaggctcgacttgtggcaaaaggttatgcccaagtcgcaggtttggactttgaggagacttttgctcctgtggctaggctagagtccattcgtattttgctagcatatgccgctcaccattctttcaggttgttccaaatggatgtgaagagcgctttcctcaacgggccaatcaaggaggaggtgtacgtagagcaaccccctggcttcgaggatgaacggtaccccgaccacgtgtgtaagctctctaaggtgctctatggacttaagcaagccccaagagcatggtatgaatgccttagagactttctaattgctaatgctttcaaggttgggaaagccgatccaactcttttcactaagacttgtgacggtgatctttttgtgtggcaaatttatgtcgatgacataatatttggttctactaataaaaagtcttgtgaagagtttagcagggtgatgacgcagaaattcgagatgtcaatgatgggcgagttgaactacttccttgggttccaagtgaagcaactcaaggacgacaccttcatctctcaaacgaagtacacgcaagacttgctgaagcggtttgggatgaaggatgccaagcccgcaaaaactccgatggggaccgacggacacaccgatctcaacaaaggaggtaagtccgttgatcaaaaggcataccagtcaatgatagggtcattactttacttgtgtgctagtagaccggatattatgcttagcgtatgcatgtgtgctagatttcaatccgatcctaaggagtgtcacttagtggcagtgaagcgaatccttagatatttagttgctacgccttgctttgacctgattggatattcagattccgactatgctggatgtaaggtcgataggaagagtacatcggggacgtgccaattcttaggaaggtccctggtgtcatggaattctaagaaacaaacctctgttgccctatccaccgctgaggccgagtatgttgccgcaggaaagtgttgcgcacaactactttggatgaggcaaaccctccaggactttggctacaatctgagcaaagtcccactcctatgtgataatgagagtgccatccgcatggcgggaaatcctgttgaacacaaccgcacaaagcacatagacatccgacatcactttttgagagaccaccagcaaaagggagatatcgaagtgtttcatgttagcaccgagaaccagctagccgatatctttaccaagcctctagatgagaagaccttttgcaggttgcgtagtgagctaaatgtcttagattcgcggaacttggattga

SEQ ID NO: 5089 - DNA, 4893 bp, Zea mays
  Clone ID: TF_ZM4926.C1.o9.fg
atggatcctaagggcaaggggattgtgatcaatgataaggaaaaggagtctttcgtcaacgagcccaaagatgacaagcctaccgactcaggctcgggccacaaacgtagagatgggaagaagaagaagacaatgcgcatcaatgagatcgtctactacgacgacagcgatgggtcctcttcttcccaaaaggacaacgacgacaacgactacgacaaaagaaagacgattcataaaaatgcacaagctactactgtgttgttagcctctttgtgcagggacgagtatcataaggtgagcggcttggacaatgccaagcagatctgggacaccctcaagatctctcatgaggggaacgacgtcaccttgctcaccaagatggagttagtagagggcgaactcgggagatttgcaataataaggggcgaggagccaacccaaacatacaaccggctcaagaccctcatcaacaaaataaggagctacagaagcacacaatggacggaccacgacgtcgttcgcctaatgctaaggtcatttactgtacttgatccacatctggtgaacaatattcgtgaaaatcctaggtacaccaagatgtcacccgaagaagttcttgggaagttcgtgaacgggcgaatgatgatcaaggaggcaagatacgtggacgacgcattgaatggtccaatcaatgagcctcaaccctttgctctcaaggcaacaagaagcaaggaggcgctacctagcaaggtggcacaagttgaggcggcagggctaaatgatgaagaaatggctctcatcatcaagcgcttcaagacgacgctaaagggtcacaaggggcagctaagcaagaccaagacaaaggggaagcgctcatgcttcaagtgtggtaagattggtcattttatcgctaactgcctcgataatgatagtgaccaggaacaagggaacaagagggagaagaagaaggcatacaaaaaggctaagggcgaggcacaccttggaaaggagtgggactcggattgttcgtcatccgactccgacaatgaaggactcgccgccaccaccttcaacaagtcatccctcttccccaacgagcatcacacatgcctcatggcgaaggagaagaaggtatgtactcgaaacaatgccacttatgattcttctagtgatgaagaaatagattactctagtctgttcaagggattggatagaactaaaatagataagattaatgaattgattgatgccttgaatgaaaaggataaacttttacagaaacaagaggaccttttatatgaagagcatgacaaatttgtagaggcacaaaaatctcatgctttagaagttaagagaaatgaaatgctttcttgtgaactatcttcttgccatgagacaatttctagcttaaggagcataaatgatgatttaaatgctaagttagttatagctagtaaatctaactcttgtgtagaacatgttatgatttgcaataggtgtaaagattttgacattgatgcttgtagtgaacacctagtttcaatttccaaattgaatgatgaattagctagtcttaatgcccaacttaagactagcaagaatgaatttgacaagctaaaatttgcaagggatgcctacacgattggtagacacccctcaattaaggatggacttggcttcaagagggaagccaaggacttaacaagctataaggctcccatctccgccaaggagaaagggaaggctcctatggctagtagtgcaaaaaggaaccatgcttttatgtaccatgatagaagacagtcttataggagttgtaatgctaatgatgcttttgtctctcatgccatgtttgcttctagttcttcctataggcatgatagagatatgtctaggagaaatgctgttcatatgcctaggagaaatgttgttaatattcctaggaaagtcaatgaaccttctacaatatatcatgttttaaatgcttcctttgctatctatagaaaggataggaagatagttgctagaaaattaggggcaaaatgcaagggagacaagacttgcatttgggtccctaaggatatttgtactaaccttgtaggacccaacaagagttgggtttatgcatccgggggttcaagctggattatcgacagcggatgcacaaaccatatgacgggggagaagaagatgttcacctcctacgtcaaaaacaaggattcccaagacttaataatattcggtgatgggaatcaaggcaaggtaaaagggttagatgtgtctgtctttagaagaagtgatggttcattagcttttaagggtgtattagacggcaaactttatttagtcgattttgcaaaagaggaggccggtctagatgcatgcttaattgctaagactagcatgggctggctgtggcatcgccgcttagcacatgtggggatgaagaaccttcacaagcttctaaagggagaacacgtgataggtctaaccaatgttactttcgaaaaagatagaccttgtgcagcttgtcaagcaggtaaacaagtgggaggagcgcatcatagcaagaatgtgatgaccacatcaagacctctggagccgctacatatggacctcttcggacccgtcgcctatctaagcataggaggaagtaagtatggactagttattgttgatgacttttcccgcttcacttgggtattctttttgcaggataaaactgaaacccaagggaccctcaagcgcttcctaaggagagctcaaaacgagtttgagctcaatgtgaagaagataaggagcgacaatgggtccgagttcaagaaccttcaagtggaggaatatcttgaggaggaagggatcaagcacaagttctccgctccctgcacaccacagcaaaatggtgtggtagaaaggaagaacaggacacttatagacatggcgaggacgatgcttggagagttcaagacccccgagtgcttttggtcggaagccgtgaacacggcttgccacgccatcaaccgggtctaccttcatcgcctcctcaagaagacttcgtatgagctactaaccggtaacaaacccaatgtttcgtattttcgagtttttgggagtaaatgctacattctagtgaagaagggtagaaattccaaatttgctcccaaagccgtagaagggtttttgttaggttatgactcaaatacaaaggcgtatagagtcttcaacaaatcatcgggtttggttgaagtctctagcgacgttgtatttgatgaaactaatggctctccaagagagcaagttgttgattttgatgatgtagatgaagaagacgttccaacggccgcaatacgcaccatggcgattggagatgtgcggccacaggaacaaggtgaacgagatcaaccttcttcctcaacaatggtgcatcccccaactcaagatgatgaacaggaggtgtgtgatcaagggggagcacaagatgatcatgtaatcgaggaagaagcgcaaccagcacctccaacccaagttcgagcaatgattcaaagggatcatcccatcgaccagatcttgggtgacattagcaagggagtaattactcgatctcgattagttaatttttgtgagcattactcctttgtctcttctattgagcctttcagggtagaagaggccttgctagatccggactgggtgttggccatgcaggaggagctcaacaacttcaaaagaaatgaagtatggacactggtgcctcgtcccaagcaaaatgttgtgggaaccaattgggtgttccgcaacaaacaagacaagcacggggtggtgacaaggaacaaggcacgacttgtggcaaaaggttatgcccaagtcgcaggtttggactttgaggagacttttgctcctgtggctaggctagagtccattcgtattttgctagcatatgccgctcaccattctttcaggttgttccaaatggatgtgaagagcgctttcctcaacgggccaatcaaggaggaggtgtacgtggagcaaccccctggctttgaggatgaacggtaccccgaccacgtgtgtaagctctctaaggctctctatggacttaagcaagccccaagagcatggtatgaatgccttagagactttctaattgctaatgctttcaaggtcgggaaagccgatccaactcttttcactaagacatgtgatggtgatctttttgtatgccaaatttatgtcgatgacataatatttggttctactaaccaaaagtcttgtgaagagtttagcagggtaatgactcaaaagttcgagatgtcgatgatgggcgagttaagctacttccttgggttccaagtgaggcaactcaaggatgggaccttcatctcccaaacgaagtacacacaagacttgatcaagcggtttgggatgaaggacgccaagcccgcaaagactccaatgggaaccgacggacacaccgacctcaacaaaggaggtaagtccgttgatcaaaaggcatataggtctatgatagggtctttactttacttatatgctagtagaccggatattatgcttagcgtatgcatgtgtgctagatttcaatccgatcctaaggagtgtcacttagtggctgtgaagcgaattcttagatatttagtcgctacgccttgcttcgggatctggtatccaaaggggtctacctttgacttgattggatattcagactccgactatgctggatgtaaggtcgataggaagagtacatcggggacgtgccaattcttaggaaggtccctggtgtcatggagttctaagaaacaaatttcgttgctctatccaccgctgaggccgagtacgttgccgcaggatagtgttgcgtgcaactactttggatga

SEQ ID NO: 5090 - DNA, 1908 bp, Zea mays
  Clone ID: TF_ZM4991.C3.o7.fg
atggatcctaaggggaagggaatcgtgatcaacgataaggagaaggagtccttcgtcaacgagccgaaggatgacaagcctaccgactcgggctcgggccacaaacgcaaagatgggaagaagaagaagacgagacgcatcaaggagatcgtctactacgacgacaacgatgagtccacttcttcccaaaaggacaacgacgacaacgactacgacaaacgaaagacggttaactcaaacttttctttcgattattcgcgtatcccgcatagctcaaatgcacatttgctttccatccctcttggcaaacctccacactttgatggggaggactacggattttggagtcacaaaatgcgtagtcacttgttctctctccatccaagcatatggttgattgttgagaatggaatgaaatttgatagctcggatagtcctacatttattaatgaacagattcataaaaatgcacaagctactactgtgttgttagcctccttgtgcagggacgagtaccataagatggagttggtggagggcgagcttggaagattcgcgatgataaggggcgaggagccaacccaaacatacaaccggctcaagacccttatcaacaaaataaggagctacggaagcacgcgatggacggaccacgacgtcgtccacctaatgctaaggtcctttactgtacttgatccacatttggtgaacaatattcgtgaaaatcctaggtacaccaagatgtcgcccgaagaagtccttggaaagttcataagcgggcgaatgatgatcaaggaggcaaggtacgtggacgacgcgttgaacggtccaatccatgagcctcaacccattgctctcaaggcaacgaggagcaaggaggtgctacctagcaaggtggcgcaagttgaggcggccgggctcaatgatgaagagatggccctcatcatcaagcgcttcaagacggcgctaaagggtcgcaagggacagccaagcaagaccaagacaaaggggaagcgctcatgcttcaaatgtggtaagattggtcattttattgctaactgtctcgataatgatagtgaccaggaacaagggggaaagagggagaagaagaaggcatacaagaaggctaagggcgaggcacaccttggcaaggagtgggactcggattgttcatcatccgactccgaaaatgaaggactcgccgccaccgccttcaacaagtcatccctcttccccaacgagcgtcacacatgcctcatggcaaaggagaagaaggtatgtactcgagacagtactacttatgattcttctagtgatgatgaatctagtgatgaacaaatagattactctagtttattcaagggattggatagaactaaaatagataagattaacgaattgattgatgccttgaatgaaaaggatagacttttagaaaaacaagaggaccttttatatgaagagcatgataaatttgttagtgcacaaaattcacttgctctagaagttaaaaggaatgaaatgctttctagtgaagtgtctacatgtcatgactctatctctagtttaaagagaattaacaatgatttaaatgctaaactagaagtagcaaataaatctaactcttgtgtagaacatgttatgatttgcactaggtgtaaagattttgacattgatgcttgtagtgaacacctagtttgcatttctaaattaaatgatgaagtggctagtcttaatgcccaagttaagactagcaagagtgaatttgataagctaaaatttgcaagggatgcctacacgattggtagacacccctcaattaaggatggacttggcttcaagagggaagccaagaacttgacaagccataaggctcccatctcagccagggaaggcccctatggctag

SEQ ID NO: 5091 - DNA, 4194 bp, Zea mays
  Clone ID: TF_ZmC951_407
tcaatcaaagttccgagaatcaagtatatttagctcattcctaagtttgctaaaggttttctcatctaatgggttggtaaagatattggctaattgttctttggtgctaacataagctatctcgatatcctccctttgttggtgatccctcaaaaagtgataccgaatgtctatgtgcttagtgcggttgtgttcaacgggattatccgccatgcggattgcactctcattatcacataggagaaggactttgctcaatttgtagccataatccctgagggtttgccccatccaaagtaattgcgcacaacaatggcctgcggcaatgtactcagcttcggcagtaaaaagagctactgagttttgtttctttgaagcccaagacaccagggatcttcccagaaactgacaagtcccggatgtgctcttcttatcaattttacaccctctcgtatcgaggtcgagatgcccattagttcccatgggtgtcttgatgggcttagcatccttcattccaaacttgttgagtatgtcttgaatatactttgtttggcagatgaaggtgccctcttggagttgcttgacttgaaatcctagaaagtacttcaactcccccatcatagacatctcgaatttctgaatcatgatcctactaaactcttcacaagtagatttgttagtagacccaaatatgatatcatcaacataaatttggcatacaaacaaatcttttgcaatgtttttagtaaagataataggatcggctttaccgactttgaagctattagtgataaggaaatctcttaggcattcataccatgctcttggggcttgcttgagcccataaagcgcctttgagagtttgtaaacatagttagggtactcactatcttcaaagccgggaggttgctcaacatagacctcttccttgattggtccattgaggaaggcacttttcacgtccatttggtaaaacttaaagccatggtaagtagcataggcaagtaaaatgcgaattgactcaagcctagctacgggtgcataggtttcaccgaaatccaaacctttgacttgtgaatatcccttggctacaagtcgggctttgttccttgtcaccacaccatgctcatcttgtttgttgcggaagacccatttggttcctacaacattttggttaggatgtggagctaaatgccatacctcattcctcgtgaagttgttgagttcctcttgcatcgccaacacccaatctgaatcccttaatgcgtcttccaccctgtatggctcaatagaagacacaaaggagtaatgttcacaaaaatgagcaacacgagatcgagtggttacccccttatgaatatcgtcgaggatggagttcacggggtgatctctttgtattgcttggtggactcttgggtatggcggtcttggaccgtcattatcatccttgtcttgatcacgggcatctcccccttgatcattgccctcctcttgaggtggctcatcttcttgatcctcattctcatcatcttgagcttgatcctcatcttgggttggtggagatgcttgatttgaagatgatggttgatcttgtgcttgtggagaatctttggattctttaggacacacatccccaatggacatgttccttagcgtgacgcacagagtctcttcatcatctagctcatcaagatcaacttgctcaacttgagagccgttagtctcatcaaacacaatgtcaccagaaacttcaactagtctggtggacttgttaaagactctatatgcccttgtgtttgaatcatatcctagtaaaaagccttctacagccttaggagcaaaattagattttctacctcttttaacaagaataaaacatttgctaccaaagactctaaaatatgaaacattgggctttttaccggttaggagttcatacgatgtcttcttgaggattcggtgaaggtagaggcagttgatggcgtagcaagcggtgttgatcgcttccgcccaaaaccggtccgaagtcttgtactcatcaagcatggttcttgccatgtcaagtagagatctattcttcctttccactacaccattttgttgtggtgtgtagggagaagagaactcatgcttgatgccctcatcctcaagaaagccttcaatttgagagttcttgaactccgtcccgttgtcgcttctaatctttttgatccttaagccaaactcattttgagctcgtctcaagaatccctttaaggtctcttgggtttgtgatttttccaaaccttgatttccatccccgaatgtgatagctctttggggatcatggtttttctcgtaggaggagaacatctttttctccccaatcatgtggtttgtgcacccgctatcaatgatccaacttgatcccccggatgcataaacattgtctcccttttggaagccaatgccatccttaatgcctgggcatctcccactataaagcatactacgagcaaatttaaatttctcattttctaattcatgctcggcaattttagcatctaattttgctatattatcattttgttgtttaatcatagcaatgtgatcatggatagcatcaacattaacatctctacatctagtgcaaatggagacatgactaacggtagatgtagagggtttgcaagtatttaattcaacaatcttagcatgtaaaatagcattctcatctctaagattggaaatggaaacattgcaaacatttaagtctttagccttagcaatcaatttttcattctcaactttaaggctagagagagatgcattcaacttgtcaatcttagcaattaaactagcattatcatttctaagattaacaattgaatcatcacaaacatttaatttctcaaccttagcaatcaatttgtcattttcaaatctaaggttggaaatagtgtcatggcaagtgcttagctcactagttaaattttcacatttttctatctcttgagcataagcatttttaactttaacatgctttttattttccttaataaggaagtcctcttgggtatccaaaagttcatccttgtcatgaatagcactaatcaattcatttaatttttctttttgttgcatgtttaagttggcaaaaagggtgagcaaatcatcctcatcatcactagagctagcctcatcactagaagttgcatacttagtggaagatctagattttaccttcttccttttgccgtcctttgccatgaggcacttgtggccgacgttggggaagagaagacctttggtgacggcgatgtttgtggcgtcctcgtcggaggagtcggtggagctctcgtcggagtcccactcccggcaaacatgggcatcgccgcccttcttcttgtagtacctcttcttttctcttctctttcccttcttgtcgtcgccactgtcactatcactagataatggacatttagcaatcaaatgatcaggcttaccacacttgtagcacaccttcttggaacggggcttgtaatctttccccttcctttgcttgaggatttggcgaaatcttttgatgattaaagtcatctcctcattgtcgagcttggaggcgtcgatagggagcctacttgatgtagactcttccttcttctcctccgtcgctttgaaggcgacgggttgcacctcgggtgtggaggtggcgcctcgctcaatgatttgtttggagcctttgatcattagttcaaagctcacaaactttcctatcacttcctcgggagacattagttgatatcttggatcaccacgaattaattgtacttgtgtagggttaagaaaaacgagtgatctaaaaataaccttgaccatttcatggtcatcccatttggtgctcccgaggttgcgcacttggttcaccaaggttttgagccggttgtacatggcttgtggctcctctccttggtgaagcatgaagcgaccgagctccccctcgatcgtatccctcttggtgatcttggtaacctcgtctccttcgtgcgcggtcttgagcacgtcccaaatatcctttgcactcttcaacccttgcaccttattatactcctcccgacttagagaggcgaggactatagtagtggtttgggagttgaagtgttggatttgttcgacctcctccgaatcataatccttgtcccctttctttggtac

SEQ ID NO: 5092 - DNA, 1590 bp, Zea mays
  Clone ID: TF_ZM4640.C5.o2.fg
atgctcaacatcgcccaatgctcggaccgggagaaggtcctttatgcttctggtcgtctgacaggtcctgctgctgactggtgggattcttatgttgttgcccatgatgctgctgacactattacttgggcggaattcacaactgagttcagaaactaccacattcttgctggattgatgaagatcaagaagaaggagtttctgtcattgaagcaaggcaatatgtctgtcagtgtgtacaaagacaaattcattaagctgtctagatatgctcctgatgaggtgagactgctggataaggctcttgctattgaacacaagcgtgttcaactaggtgacttgaagaggaaggccattacccaggggcaggggtacaccagctcatccaggaggaggaccacgcccagctcagtacactccacaggggtctccacggacacctcccattcgtcaggctgcccccactggcacccggtgaggcctacaggacagaagactggccctacatgcttcaagtgcagtcaggttgggcactatgctaatgcttgtccggtggggaattccggtacaccagctcagaacaagcaacagactcctagcaagggatactctattgccagggttaatcaagtcagcgcagatgctactcctgatggtgctgacatcacacttggtacattttacgttaatgcaattcctgcaacaatattatttgattctggtgctacacattcatttatgtctgctcgatatgctaatacaattgaaataccactacaacatatgagaaaaccaatgatagtaatcacacctatagggcctgttgaggcaaatcatataacacataaattggcattaacaattatgggaagagaaatctgggctaccgctatagtattagaggaaagcagtatagatctgatccttggtatgtcatggttaaggaaggcaaatgacataatacaatgtgctaggggtactgtagaactcaccaaccctaaaggagaaagatttcaagttcaaattgcagtaaccacctcttccagacgtgcgatgttctttatagctgaggagtttgttggtgaaaacatccgtgtggttagggattttccatatgtctttccagaggagttaccagggatgccacctgagagatcacttaatgatgtcaccatcaagaacaagtactcgttacctcgtattgatgacttatttgatcagatgagaggtgctagggtgttctctaagattgaccccagatcaggctaccatcaaatgaagattaggccatctgatattcctaacacggttttttctacccgatatggtctatatgaattcacagtcatgtcatttggcttaaccaatgcaccagcttattttatgaatctgatgaataaggtgttcatggagtatcttgataaattcgtcgtagtattgatcgacgacattcttatttattccaagaatgatagttattactggcgattcattgaagggttctccaagatttctaagcatatgacctcattgttggagaagggcaaggagtttaagtggactgagaaatgccaagagagtttcgattag

SEQ ID NO: 5093 - DNA, 4410 bp, Zea mays
  Clone ID: TF_ZmC119_1021
ttaagaagatctagggaaaaggtggggaaaatctatacgaagctcttcttctctttcccaagttgcttcgtcttcaccgtggtggctccattgaactttgcacatctttataaccttattccttgtaacacgagtcagtgtatccagaatcttgatgggatactcagcataagtcaaatcttcctgaacactaaggtcttccataggtaattgttcctcaggtaccctaagacatttcttcagctgagacacatgaaagacatcatgaacatccgcaaggtgatccggtaactccaattgatatgcaacctcacccactcgctttaagattaagaagggtccaataaagcgaggggacaactttcctttgactttgaatcttctcataccccggagtggtgacaccttcaaatagacataatctccctccttaaactcaagcagtctcctccgggtgtcagcatagcttttctgcctggactgtgcagttctcaaattctcccttatttgttgaacttgttcttctgcttcctgtataatctcaggcccaaacaactgcctttcaccagtttgatcccaatacaatggagtcctgcactttctgccatataaagcctcaaacggtgacatcttcaaactggcctgatagctattattgtaagagaactctgcatacgacaaactcttatcccaacttccaccatgtttaagagcacaagctcttaacatatcctcaagcacttggttggtcctctcagtctgcccatcagtctgtggatggtaagccgaactaaaattcaatcttgtatccaaggactcgtgcaacttcttccaataccgagaagtaaactgtgatccccggtctgacacaatcttctttggcacaccatgtaggcaaacaatccgtgccatgtacaactctgctaacttggctcctgaatatgtggtcttcactggaataaagtgggctactttagttagcctgtccacaatcacccatatagaatcatatccagcagacgtgcggggtaatccaacaatgaaatccatgtcaatctcttcccatttccactcaggtatcttcagtggatgcagtagtccggctggcctttggtgttcagccttaactctttggcacacatcgcacatagccacatgtgcagccacatctctcttcaatccataccaccaatatttttgcttcaaatcctgatatatcttagtactcccaggatggatagaataaactgaatcatgtgcatccttcaatatggtttctcgaagactatcaatatcgggaacacagatccgattcttgaaccatatcgtgccttgctcatcctctgtgaattccgggcctctaccctctttacgaatttcttgctccaaggtaggttccaattcaatagtcactccttccgtatgtgtaacaattcccaggttgagcctctcaaaatcttttgctaactcatcaggtagctggacaacgaaagcggagtgaacatgctccttccgactcaaggcatctgcaaccaaatttgccttgcctgggtggtaatgaatctccaaatcataatccttaataagctccaaccaacggcgttgcctaaggttgagatccttctgagtgaatatgtacttcaagctcttatgatccgtatatacttggcacttagttcccataacatagtgtctccaaatcttcagtgcatgcacaacggcagccagctccaagtcatgagtggggtagttcaattcatgcttcctcaactgacgagatgcataggcgatcacatgtccttcttgcatgagcacacatccaagtccttggccacatgcatcacagtaaatgtcaaatcccttctgtagatctggcataatcaatactggtggcgacatcaacctctccttcaattgatcaaagctttcttggcatttctcatcccacttgaattctcttcctttctccaaaagcgatgtcataggcttggcaatcttagagaacccttcaataaatctccgataatatcctgcaagtcccaagaaactccgaatctcagtaactgtagtgggcactatccactccataatctccttgaccttagcaggatccactgctattcctccattagaaataatatgtccaaggaatgacaccttgtcaatccaaaactcgcacttgctgaacttagcatagagttgattatctcgcagcttttgtagcaccaaccttagatgttgtacatgatcactttcattcctagaatagatcagaatatcgtcgataaacaccacgacgaatctgtccaaatactccataaacactttgttcatcaaattcatgaaataagctggtgcattggttaatccaaatgacataacagtaaactcatataatccatatcgggttgagaaagtcgtcttaggaatatccgagggtctaatcttcatctgatggtatcccgatcggagatcaatcttcgagaataccctggctcctctcatctggtcaaacaaatcctcaatacggggtaatggatacttgttcttcaccgtgacatcattaagtgatctatagtccacacacatccgttgcgatccatccttcttctgcacaaataacaccggtgctccccaaggtgaggaactcggacgaatgtaccccgcttcttgtaactcagttaactgcttcttaagctccttcagttcttctacagccatcctgtatggtcgcttagaaataggggcggttccaggtaagagatcaataacaaactcaacttctctatcaggtggcatccctggtaactcctctggaaagacatccggaaaatctctaaccacccggatgttgtcaccaacaaactcctcaggcataaagaacattgcacgcatggatgaggaggttactgcaatattaacttgaaatctttctcctttagtggtagtgagctctacgatacctctaccacatgctataacggcatttgcctttcttagccatgacataccaaggatcagatctatactgcttgactctaatattatggcagtagctccaaattctctacccataatggtcaatgtcaatctacgtgtcatttgattcgcctcaacaggccctttaggtgtaattactatcaggagttttctcatatttagtagtggtatttcatttgtgttggcatatctagcagacatgaatgaatgtgtagcaccagaatcaaataatatggttgcaggaattgcattaacataaaacataccaagtacgatgtcaccaccatcaggagtatcatcaacgctgacttgattcaccctggcagaattccccatcgggcaagcattagcataatgcccaatttgactgcacttgaaacatgtagggctagtcttctgtcctgtagacctcgtcggggtgccagtcggagtggcctgacgagtaggtgtccgtggagagccctgtggagcatactgaactgggcgtggtcctcctggtcgagtcggtgtaccctgtggcggtacgtagcggggacgaacactgctgctaccctgtccctgtgagatagccttcctcttcaaatcactcagttgaacacgcttgtgttcaatagcaagagccttatccagtagtctctgaaatgatggaaaggtgtgtgcaaccagtgcatactgcaagggtccattaagtccttcaataaagtgctcctgctttctttcatcctcagcaacttcctccggagcatacctcgacagctgaataaatttgtctctgtactcgctgaccgacatgttgccttgcttcaatgacagaaactccttcttcttgatctttatcataccagctggaatatggtagttcctgaactgtgtactgaactccgcccaagtaatagtatcagcagcatcgtgggcagcagtataagaatcccaccagtcagcagcaggacctgtcagacgacctgaggcataaagaactttctcccggtccgtgcactgtgcaatattcagcatcttctcaatagacttcagccaatcatccgcgtccagtggatcaggtgagcttgcaaatgtaggtggcttatgactcatgaactctctatgcttgtctcggggtggaactggtggtggtggtggaggcagtggtacttgttgttgctgctgctgctgttgttgctgttgcatttgttgttgcagctgctgttgttgtgccctcctttcctggcgtatctcctctcgctcttggcgcaactcctgtcgtatatcttctctttcctgacgcatctcctggcgttcttgctgcatctgggcacgcatatcagccatagtgtccgtcatttgctgcatcaccgccatctgagcagcaactagtgggtcaactccgcctggtggaggattaggaggattcat

SEQ ID NO: 5094 - DNA, 4047 bp, Zea mays
  Clone ID: TF_ZM4625.C2.o3.fg
atggcggagagagaagagatacgccaggagagaagggcgcaacagcagctacaacaacaatttcagcaacagcagcaacaacaacaagtaccatttcctccaccaccaccaccagttccacctcgtgataagcaccaggaatttatgagccataagccaccgaccttcgccagttcgccagatccacttgatgcagatgattggttgaagtcaattgagaagatgctcaacattgcccaatgctcagacagggagaaagttctttatgcctcaggtcgtctgatagatcctgctgctgactggtgggattcttatactgctgcccatgatgctgctgatactattacttgggtggagttcagtacacagttcagaaactatcacattccagctggtttgatgaagatcaagaagaaggagtttctgtcattgaagcaaggcaacatgtctgtcagcgagtacagagataaattcattcagctgtcgagatatgctctggacgagaggcttctggataaggctcttgctattgaacacaagcgtgttcaactgggtgatttgaagaggaaggctatctcacagggacagggtagcagcagtgtttgtccccgctacgttccaccacagggtacaccgactcgattaggagggccacacccagttcagtatgctccacaggcgtctccacggacacctcctactcgtcaggctactcccaatggtaccccgacgaggcccacaggacagaagaccgaccctacatgcttcaagtgcagtcagattgggcactatgctaatgcttgtccgatgggaaattctggtacaccagctaagaacaagcaacagactcctggcaagggatattctatagccagggtgaatcaagtcagcgttgatgctactcctgacggtgcggacatcgtacttggtatgttttatgttaatgcaattcctgcaaccatattgtttaattctggtgctacacattcattcatgtctactcgttatgccaacacaaatgagataccactgctaaatatgagaaaaccaatgatagtaatcacacctaaagggcctattgaggcaaatcaaatgacacgtagattgacattaacaattatgggaagagaatttggagctactgctataatattagaggccagcagtatagatctgattcttggtatgtcatggttaaggaaggcaaaggccattatagcatgtggtaggggtactatagaactcactagccctaaaggagaaacgtttcaagttcaatttgcagtaaccacctcttccaagcgggctatatactttatacctgaggagtttgttggtgacaacatccgtgtggttacatattttccggatgtctttccagaggagttaccagggatgccaccagatagggaagttgagtttgtgattgatcttctacctggaactgcccctatatctaagcgaccatacaagatgtctgtagaagagttaaaggaactgaagaagcagttaacagagttacaagaggctggatacattcatctgagttcctcaccttggggagcaccagtgctatttgtacagaagaaggatggatcgcaacggatgtgtgtggattatagatcacttaatgatgttactgtgaagaacaagtatccattaccccgtattgaggatttgtttgatcagatgagaggtgctagggtattctcgaagattgatctcctatcgggataccatcagatgaagattagaccatcagatattcctaagacggctttctcaacccgatatggattatatgagttcactgttatgtcttttgggttaaccgatgcaccagcttattttatgaatttgatgaataaggtgtttatggaatatttggacagattcgtcgtggtgttcatcgacgatattcttatctattctaagagtgaaagtgatcatgaagaacatctaaggttggtgctacagaagctacgagataaccaactctacgctaagtttagcaagtgcgagttctggattgacaaggtgccattccttggacatatcatttctaatggaggaatagcagtggatcctgttaaagtgaaggagataatggaatggagcgtgcccactactgttacggagattcagagtttcttggggcttgcgggatattatcggagatttattgaaggattctctaagattgccaagcctatgacctcgcttctggagaagggcagagaatttaagtgggacgagaaatgtcaagacaactttgatcaattgaagaagagattgatggcaccaccagtgttgattatgccagatctgcagaaaggatttgacatttattgtgatgcatgtggacaaggattgggatgtgtgcttatgcaagaaggacacgtgattgcctatgcgtctcgtcagttgcggaaacatgaattgaactaccccactcatgacttagaactggcagccgtggtgcatgcactgaagatttggagacactacattatgggaactaagtgtcaagtgtacatggatcataagagtttgaagtacatattcactcagaaggatctcaaccttaggcaacgccgttggttggagctcattaaggattatgatttggagattcactatcacccaggcaaggcgaatttggttacagatgccttgagtcggaaggagcatggagtcaccattgaattggagcctaccttggagcaagaaattcgtaaaggccaagtgggtgatgctaaaattcaagagattaaggatctgattatggaaggtcgagtgccagatttcacggaggatgagcaaggtactatatggttcaatgatcggatatgtgttccagagattgatagccttcgtgagactattttaaaagaagcccatgattctgattactctatccaccctggtagcactaagatgtatcaggatttaaagcaaaagtattggtggtatggattgaaaagagatgtggctgctcatgtggctaagtgtgatgtgtgtcaaagagtcaaggccgaacatcaaagtcccgctggactattgcacccattgaagatacccgagtggaaatgggaagaaattggtatggatttcattgttggactaccccgcaccccagtaggatatgactctatttgggtgattgtggacagattgacaaaagtggctcatttcatacctgtgaggactaattacacgggagccaagctagtagaattgtatatgactcggatagtttgcctacatggagttcctaagaagatcgtgtctgatcgaggatcacagtttacttctcggttttggaagaagttgcatgagagcttggatacaaggttgaattttagttcagcctaccatcctcagactgatgggcagaccgagaggacaaatcaagtactagaggatatgttaagagcttgtgctcttaaacatggtggaagttgggataagagcttaccatatgcagagttctcttataataatagctaccaggccagtttgaagatgtcaccgtttgaggctctatatggcagaaaatgcaggacaccactacaaaagagctatgctgataataggagaagactactggagtttaaggagggtgatcacgtgtatctgaaggtgtcaccaatccagggtatgaggagatttaaagtcaaaggaaagttgtcccctcgcttcattggacctttcttgatcttaaagcgagtgggagaagttgcatatcagctagaactactcgatcacctatcaaatgtacatgatgtattctatgtatctcaactgaagaaatgtctcacggtacctgaggagcagctaccaatggaggaccttagtgttcaagatgatctgacttatgctgagtaccctatcaagattctggacactctgactcgagttacaagaaataaggtgataaagatgtgcaaagtacaatggagtcaccacggagaggatgaagctacttgggaaagggaagaagaccttcgcatagattttccccatcttttccctagaccttcctaa

SEQ ID NO: 5095 - DNA, 5136 bp, Zea mays
  Clone ID: TF_ZM5057.C1.o8.fg
atggatcctaagggcaagaggattgtgatcaatgacaaggagaaggagtcattcgtcaacgagcccaaggatgacaagcataccgactcgggctcgggccacaaacgcaaagatgggaagaagaagaagacaagacgcatcaaggagatcgtctactacgacgacagcgatgagtccacttcttcccaaaaggacaacgacgacaacgactacgagagaaggaaaccggttaattcgaacttttcttttgactactctcgtattccgcaaagtacaaatgctcatttactctccattccacttggcaaacctcctcactttgatggagaggactacggattttggagtcacaaaatgcgtagtcacctgttctctctccatccgagcatatgggagattgtggaaagtggaatgaaatttgatagctcggatagtcctatgtttatcaatgaacagattcatagaaatgcacaagctactactatgttgttagcctccttgtgcagggacgagtatcataaggtgagcggcttggacaatgccaagcagatctgggacaccctcaggatctcacatgaggggaacgacgtcaccttactcaccaaaatggagttggtggagggcgagcttggaagattcgcaatgatcaggggagtggagccaacccaaacatacaaccggctgaagacccttatcaacaagataaggagctatagaagcacacgatggacggaccacgacgtcgttcgtctaatgctaaggtcctttactgtacttgatccacatttggtgaacaatatccgtgaaaatcctaggtacaccaagatgtggcctgaagaagttcttgggaaatttgtaagcgggcgaatgatgatcaaggaggcaagatatgtcgacgacgcgctgaacggtccaatccatgaacctcaacccattgctctcaaggcaacgaggagcaaggaggcgctacctagcaaggtggcgcaagttgaggcggccgagctcaatgatgaagagatggccctcatcatcaagcgcttcaagacggcgctaaagggtcgcaaggggcagccaagcaagaccaagacaaaggggaagcgctcatgcttcaaatgtggtatggttggtcattttattgctaactgtcctgacaatgatagtgaccaggaagaagggaacaagagggagaagaagaagaattataagaaggcaaaaggcgaggcacatcttggcaaggagtgggactcggattgttcgtcgtccgactctgacaacgaaggactcgccgccactaccttcaacaagtcatccctcttccccaacgagcatcacacttgcctcatggcaagggaaaagaaggtaagcgctcataacactagtacttatgcttcttcaagtgaggatgagtctagtgatgatgatgaaatagattattcatgtttattcaaaggtctagatagaaccagggtggataaaataaatgaattgattgatgctttgaatgataagaatagattgctagaaaagcaagaggatctcttatatgatgaacatgacaagtttgtagaagctcaaaaatcccttgctttagaaataaagaggaatgaaatgctttcttgtgaattgtctacatgccatgactctatttctagtttaaaaagcataaacgatgacttgaatgctaagttagaaatagctaataaatcaacatcttgtgtagaacatgttgtgctttgcactaggtgtaaagattttaatattgatgcttgtagtgaacacctagtttcaatttctaaattgaatgatgaagtagctagtcttaatgcccaacttaagactagcaaaagcgaatttgataagttaaaatttgcaagggatgcctacacgattggtagacacccctcaattaaggatggacttggtttcaagagggaagccaagaacttaacaagccataaggctcccatccccgccaaggagaaagggaaggcccctatggcaagtagtgctaaaaggaaccatgcttttatgtatcatgatagaaaacagtcttataagagttgtaatgcttatgatgcttttgactctcatgccatgtttgcttctagttcttcctatatgcatggtaaagatatgtctaggagatatattgttcatatgcctaggagaaatgttgttaatgttcctaggaaagttaatgaaccttctacaatatatcatgctttaaatgcttcctttgccatttgtagaaaggataggaagatagttgctagaaaattaggggcaaaatgcaagggagacaaaacttgcatttgggtccctaagacaattgtgactaaccttgtaggacccaacaagagttgggtttatgcatccgggggttcaagctggattatcgacagcggatgcacaaaccatatgacgggggagaagaagatgttcacctcctacgtcaaaaacaaggattcccaagattcaataatatttggtgatgggaatcaaggcaaggtaaaagggttagatgtgtctgtcattagaagaagtgatggttcactagcttttaagggtgtattagacgacacactttacttagttgattttgcaaaagaggaggccggtctagatgcatgcttaattgctaagactaacatgggctggctgtggcatcgccgcttagcacatgtggggatgaagaaccttcacaagcttctaaagggagaacacgtgacaggtctaactaatgtgcaattcgaaaaagatagaccttgtgcagcttgtcaagcaggcaaacaggataaatctgaaacccaagggaccctcaagcgcttcctaaggagagctcaaaacgagtttgagctcaaggtgaaaaagataaggagcgacaatgggtccgaattcaagaaccttcaagtggaggagtaccttgaggaggaagggatcaagcacgagttctccgctccctacacaccacagcaaaatggtgtggtagagaggaagaacaggacgcttatagacatggcgaggacgatgcttggagagttcaagacccccgagcgtttttggtcggaagccgtgaacacggcttgccacgccatcaacagggtctaccttcatcgcctcctcaagaagacgtcgtatgagctactaaccggtaacaaacccaatgtttcgtattttcgagtttttgggagtaaatgctacattctagtgaagaagggtaggaattccaaatttgctcccaaagtcgtagaagggtttttgttaggttatgactcaaatacaaaggcgtatagagtcttcaacaaatcatcgggtttggttgaagtctctagcaatgttgtatttgatgagactaatggctctccaagagagcaagttgttgactatgatgatgtagatgaagaagaagttccaacgaccgcaatacgcaccatggcgattggagatgtgcggccacaggaacaagatgagcaagatcaaccctcttcctcaacaatggtgcaacccccaactcaagatgatgaacaggaggcgtgtgatcaagggggagcacaagatgatcatgtaatggaggaagaagcacaaccggcacctccagcccaagttcgagcaatgattcaaagggatcatcctgtcgaccaaattttgggtgatattagcaagggagtaactactcgatctcgattagttaatttttgtgagcattactcctttgtctcttctattgagcctttcagggtagaagaggccttgctagatccggactgggtgttggccatgcaggaggagctcaacaacttcaaaagaaatgaagtctggacactggtgcctcgtcccaagcaaaatgttgtgggaaccaagtgggtgttccacaacaaacaagacgagcacggggtggtgacaaggaacaaggctcgacttgtggcaaaaggttatgcccaagttgcaggtttggactttgaggagacttttgctcctgtggctaggctagagtccattcgtatattgctagcatatgccgctcaccattctttcaggttgttccaaatggatgtgaagagcgctttcctcaacgggccaatcaaggaggaggtatacgtggagcaaccccctggcttcgaggatgaacggtaccccgaccacgtgtgtaagctctctaaggcgctctatggacttaagcaagccccaagagcatggtatgaatgccttagagactttttaattgctaatgctttcaaggctgggaaagccgatccaactctttttactaagacttgtgatggtgatctttttgtgtgccaaatttatgtcaatgacataatatttggttctactaaccaaaagtcttgtgaagagtttagcagggtgatgacgcagaaattcgagaggtcaatgatgggcgagttaagctacttccttgggttccaagtgaggcaactcaaggatggaaccttcatctctcaaaccaaatacacgcaagacttgatcaagcggtttgggatgaaggacgccaagccgcaaagactccaatgggaaccgacggacacaccgacctcaacaaaggaggagtgtcacttagtggctgtgaagcgaattcttagatatttagtcgctacgccttgtttcgggatctggtatccaaaggggtctacctttgacttgattggatattcagactctgactatgctggatgtaaggtcgataggaagagtacatcggggacgtgccaattcttaggaaggtccctggtgtcatggagttctaagaaacaaacctccgttgccctatccaccgctgaggccgagtacgttgccgcaggacagtgttgcgcgcaactactttggatgaggcaaaccctcagggactttggctacaatctgagcaaagtcccactcctatgtgataatgagagtgctatccgcatggcggataatcctgttgaacacagccgcacaaagcacatagacatccggcatcactttttgagagaccaccagcaaaagggagatattgaagtgtttcatgttagctccgagaaccagctagccgatatctttaccaagcctttagatgagcagaccttttgcaagttgcgtagtgagctaaatgtcttagattcgcggaacttggattga

SEQ ID NO: 5096 - DNA, 2492 bp, Zea mays
  Clone ID: TF_ZmC10872_12
atggcgctcatcatcaaaagtttctgccaaatcctcaagcaaaggagggggaaggactacaagccccgctccaagaaagtttgctacaagtgtgataagcctggtcattttattgctaaatgtccattatcaagtgatagtgacaagggcgacgacaagaggaaaaaaagaaggataagaagaggtactacaagaagaagggcggcgatgcccatgtttgtcgggagtgggactccgatgagagctccaccgactcctcctccgacgaggacaccacaaacatcatcgtcaaccaaaggtctcctcttccccaacgtcggccacaagtgcctcatggcaaaggacgacaaaaagaaggtaaaatctagagcctccactaaatatgcaacatctagtgatgaggaaaactctagtgatgatgaagataatttgcttgctctttttgccaacctaaacatgcaacaaaaagaaaaattaaatgaattgataggtgctattcatgagaagtatgaactcttggataaccaagaggacttccttattaaggaaaataagaagcatgttaaggttaaaaacgcttatgctcaggaagtagagaggtgtgaaaaattgactagtgagctaagcacttgccatgatattatctcaaaccttagaaatgaaaatgcaaaattaattgctaaggttgagaagttagatgtttgtgatgattcaattgttagtcttagaaatgataatgctagtttgattactaagattgacaagtttaatgcatcactctctagccttaaaattgagaataaaaaattaattgctaaggctaaagatttaaatgtttgcaatgtttctatttccaatcttaagaatgaaaatgctatttcacatgctaagattgatgaattaaatgcttgcaaaccctctacatctactgttagtcacgtctctatttgcactagatgtagagatgttaatgttgatgctatccatgataacattgctatgattaaacaacaaaatgatcatatagaaaaattagatgctaaaattgccgagcatgacatggaaaatgaaaattttaaatttgctcgtagtatgctttatagtgggagatgccctggcattggcttccaacagggaggcaatgtcaagctcaatgcccctaaaagattgtctaattttgttaagggcaaggctcccatgcctcaggataacgagggctatatattatatcctgctggttatcctgaggataagattaagagaattcatgctaagaagactcattctgtttctcaccatgcttttatttataagaatgaggcttctagctctaggcattctacccatgttaaaatgcctaaaatgaaatctcctattgcatcaaatgatcataacatttcatttaagacttttgatgcttcatatgttttaactaacaaatcaggcaaagtagttgccaaatatgttggggccaaacacaagggctcaaagacttgtgtttgggtacccaaggtttatgcatccgggggctcaagttggatcattgatagcgggtgcacaaaccacatgactggggagaaaaggatgttctcctcctatgagaaaaaccatgatccccaaagagctatcacattcggggatggaaatcaaggtttggtcaaaggacttggtaaaattgctatatcgcctggccattcgatttccaatgtttttcttgtagattctttagactataacttgctttcagtttctcaattatgtaaaatgggctacaattgtctttttacgaatatagatgttactgtctttagaagaagtgatgattcagtagcatttaagggagtgttagagggtcagctatacttagttgattttaatagagctgaactcgacacttgcttaattgctaagactaacatgggttggctctggcatcgccgactagcccacgttgggatgaagaattttcataagcttctaaagggagaacacattttgggactaacaaatgttcattttgagaaagacaggatttgtagcgcatgtcaagcagggaagcaagttgatgttcatcatccacacaagaacatcatgacgactgacagaccgcttgagctactccacatggacctattcggcccgatagcttacataagcatcgacgggagtaagtactatctagttattgtggatgattattctcgcttcacttgggtgttctttttgcaggataaatctcaaacccaagagaccttaaagggattcttaagatgggctcaaaatgagttcgggttaaggataaaaaagattagaagcgacaatgggacggagttcaagaactcacaaatagaaggcttccttgaggatgagggcataaaacatgagttctcttctccctacacaccacaacaaaatggtgtagtagagaggaagaatagaactctacttgacatgacgaggaccaagcttgatgagtacaagacttcggaacg

SEQ ID NO: 5097 - DNA, 4767 bp, Zea mays
  Clone ID: TF_ZmC4916_426
atggatcctaatggaaaggggatgatggtcaacgacaaggagaaggagtccatcttcaacgagccaagggacgacaacccactgactcaggatcaagtcacaagaagagggacgggaagaagaagaggcagatcaagaagatcatttactacgacaacgacgcctcctcttcttcaccaagagacgacaacgacgatgactcgtctaaaaagaaaccgtatttgggagatagttgaaaatggaatgcattttgatagtacggataaccccgtgtttattaatgaacaaattcataagaatgcacaagctaccactgtgttgctagcatttttgtgcagggatgaatacaacaaggtgagcgacttagacaacgccaagcaaatttgggataccctcaagatatcacacgagggaaacgacaccaccatgatcaccaagatggagttggtggaaggcgaactgggaagattcgcgatgatcaggggagaggagccaacacaaacatacaacaggctcaagaccctggtcaacaagattaggagctatggaagcacaagatggacggaccacgacgtcgttcgactaatgctaaggtcatttatggtaattgaccctcatcttgtcaaccttattcgtgagaatcccaggtacaccaagatgacgcccgaggagattcttgggaagtttgtgagcgggcgcatgatggtaaaagaggctcgatatgtggacgatgctctaaacggaccactacccgtccacgagcctcaaaccattgccctcaaagcaaccagcaatagggagaagctaccaagcaaggtggcacaagtggaggccgcgggcctcaatgaagatgagatggcgcttatcatcaagcgcttcaagaccgcattgaaaggacgcaaggagtaccccaacaagaacaaagcaaggggaaagcgctcctgcttcaaatgcggtaacactggtcattccatagcacaatgccccgataatgatgatgaccatgaacaagaaaagcacgggaagagggagaagaagaaggtctataagaaggcgaagggcaaggcgcaccttggtaaagaatgggattctgactactcttcatccgactccgacgatgaaggactggcagcctcggccttcaacaaatcttcgctcttccccaacgaatgccacacctgccttatggccaaggaaaagaaggtgagtgttcgagattcccccaagtactctacttctagtgatgaggattctagtgatgatgaagtagattactctaccttgttcaaaggattagatagagctaaagtagaaaagattaatgaactaattgatgctttaaatgaaaaggatagacttttagaaaagcaagaggatattttgtatgaagagcatgataaatttgttagtgcgcaaaaatctcttgctttagaaactaagagaaatgagatgctatcttctaaattatctgcttgccatgaatctatctctaggttaaagattttaaatgatgatttaaatgctaagttagaggtagctaatcaatctagttcatgtgtagaacatgttgtaatttgcaatagatgcaaggattttgatattgatgcttgtgatgaacatcttacgtccattactaaattaagtgatgaggtggcaagtcttaatgctcaacttaagacttgcaaggttgattttgataagcaaaaatttgctagggatgcctatgctattggtagacacccctctattaaggatggacttggttttcgaaaggaaaccaggaacttaacaagccaaaagactcccgttctcaacaaggagaaagagaaggctcctatggctagtagttctaaaaaatgtcatgcttacatttatgatagaaaattttctagaaacgctcattataataggagttataatgcgtttaattcacatgctatgtttgcttctagctctacttttgtgcatggtagaagtaagcctaggagaaatcatgttgtgcatcatgtgcctaggaaagtttatgcatccgggggctcaagctggattatcgacagcggatgcacaaaccacatgacgggggagaagaagatgtttacctcctacgtcaagaacaaggattcccaagattcgatcatctttggagatgggaaccaaggcaaggttaaaggattgggaaagatagccattacatccgagcattcaatctccaatgtgttcttagttgaatcgctcgggtacaacctattgtccatgtttctgtctttagaaaggagtgatggttcattagcgtttaagggtgtattagacaacaaactctacttagttgatttttcgagagaagaggtcgatctagatgcatgcttaatagctaagactagcatgagctggttgtggcatcatcgtctagcacatgtcgggatgaagaaccttcataaacttctaaagggagaacatgtgttaggactaaccaatgtctgcttcgagaaagacagaccttgtgcaacttgtcaggcagggaaactggtgggaagcactcatcacagtaagaatgtgatgacaacatcaagaccactggagcttcttcacatggacctcttcggacccgtcgcctaccttagcatcggaggaagtaagtatggtcttgtaattgtagatgacttttcccgcttcacttgggtgttctttttgcaggataaatcagaaacccaagggaccctaaagcgctttctaaggagggctcaaaacgaatttgagctcaaggtgaaaaagataagaagcaacaacgggtccgagttcaagaacttacaagttgaggagtatcttgaggaggaaggtgtcaagaatgagttctccgctccctacacaccacagcaaaatggtgtagtagagaggaagaacaggacacttatcgacatggtgaggacgatgcttggagagtttaagatgctcgagcggttttggtcggaagctgtgaacacagcttgccacgccataaaccggctctatctgcatcatctcctcaagaagacctcctacgaactccttaccgataacaaacccaatgtctcttactttcgtgtatttgggagaaaatgctatattttggcgaagaaaggtagacattcaaaatttgctcccaaagctgtagaagggtttttactagggtatgactcaaatacaaaggcatatagagtcttcaacaaatcatcggctttggttgaagtctctagcgatgttgtattttatgagactaatggctctccaagagagcaagttgatcttgatgacataaatgaagatgatgttccgacggcagcaatacgcaccatggcaattggagatgtgcgaccacaggaacaacaagagcaagatcaaccttcttcctcaataatggtgcatccccctactcaagatgatggacaggttcctcaagaagaggcgtgtgatcaagggggagcacaagaagaacaagctatggaggaagaagcaccaccggcccctccaactcaagtccgagcgacgattcaaagaaatcaccccgtcgatcagattctgggtgacataagcaagggagtaactactcgctcaagattagctaatttttgtgagcattactcgtttgtctcttctattgagcctttcagggtagaagaggccttgcaagacccggactgggtgttggccatgcaggaacagctcaacaacttcaagagaaatgaagtttggagcctggtgccacgtccaaagcaaaacgttgtgggaaccaagtgggtgttccgcaacaagcaagacgagcatagagtggtgacaagaaacaaggctcgacttgtagcaaaaaggttatgcccaagtcgcaggttgtttcaaatggatgtgaagagcgcttttctcaacgggccaataaaggaggaggtgtacgtggaacaaccccctgactttgaggatgacaggtacccccaccatgtgtgtaagctctctaaggcgctctatggacttaagcaagccccaagagcatggtatgaatgccttagagatttcttaattgctaattctttcaaggttgggaaagctgatcccactcttttcactaagacttgtaatggtgacctttttgtgtgccaaatttatgtcgatgacataatatttggttctactaatcaaaagtcttgtgaggagtttagcagggtgatgactcagaaatttgagatgtcaatgatgggcgagttgaactacttccttgggttccaagtgaagcaactcaaggatggcaccttcatctcccaaacgaagtacactcaagatcttcccatgcggtttgggatgaaggacactaagcccgcaaagacacctatgggaaccgacggacatgtcgacctcaacaaaggaggtaagtccattgatcaaaaggcatactggtctatgataaggtcattgctttatttatgtgctagtagaccgtatattatgcttagcgtatgcatgtgtgctagatatcaatccgacccaagggaatgccaccttgtggctgttaagcggattcttagatatttagtctctacgccttgcttcgggatctggtatccaaaggggtctacctttgacttgattggatattcagactcggattatgctggatgcaaggttgataggaagagtacatcagggacgtgccaattcctaggaaggtccctggtgtcttggagttcaaagaaacaaacctccattgccctatccaccgctgaggccgagtatgttgccacatga

SEQ ID NO: 5098 - DNA, 5207 bp, Zea mays
  Clone ID: TF_ZM4405.C4.o1.fg
acaaccaaaaattgaagaattacttgactgatgcaactactagaggaaaagttgctattgagaacaatgatttcaacaatgagttggcagtggataatcaaaggcttaagaatgaggtcaagaaactaaaaagtgaaaatgaacaccttgcaacaagtgtgcaaaagttcaacaagggtcaatacctccaaaatgagctgcttatgaacactgttatgaaaaataacaagagtggtattggatacaatgcttttgtgcaaaagaaagctatcactcaatacaagccaaagcagactcacaagcctatcaaatgctttgagtgtggaaatgaaggtcattttgcccacaactgcaaagctaaaccaccaactcccttgcctaagcactcaagaccatttgctttcaatgctcactatgttctaagaaaggttgcaaatggaaagattaaggtgaactacaagaccggtgggagccattgggttattgacagtggatgcacacaacatatgacaggcaacccacggatgttcacctcactagatgagaatgttgatggtcaagataaaatcacatttggagacaactcaaaaggaaaagtgcaaggacttggcaaggtggcaatctcaaatgacttatcaatatcaaatgttctcttagttgcacccttgagcttcaatttattatcagtgggacaactctgtgatcttggacttcaatgcttattcactccatcagaggttattgtaacaaaaatggatgatgaatcaatggtattcaagggatttagatacaacaacctctacttagtggatttcacttcagaagatgcagacttaagaacttgcctcttcaccaaagcttctcttggatggctttggcataggaggcttgcacatgttgggatgagcacactcaagaaggtattaaagaaagatatggttagaggattaaaggatgtggtgtttgaaaaagacaagccatgcagtgcatgtcaagctggaaagcaagttgctaatacacatcctactaaagctttcatgtcaacatcaaggccactggaactacttcatatggatttatttggacctacaaattatgtcagtgccggtggcaacctctactgtctagtaattgttgatgacttctcaagatacacttgggtgttctttctccatgacaaatctgaagttgcatctatattcaagaaatttgccaagaaagcacaaaatgaatttgattgcaagattaagaagattagaagtgacaatggcaaagaatttgacaacaccaacattcatgagtactgtgatgaaattgggatcaagcatgaagtatctgccacatatacacctcaacaaaatggagttgttgaaaggaaaaataggatattgatcacccttgcaagaacaatgattgatgagtataacacaccggagaggttttgggctgaagctgtcaacactgcttgttatgcatcaaacaggctatttcctcaccggctacttgcgaagactccttatgaactgctaaatgggaaaaagccagacgtctctttcttccgggtatttgggtgcaaatgctacatctacaagaaacgccatcacctagggaagtttcaaagacgttgtgatattggttttcttttgggttattcattaaagtccaaagcatatcgagtattcaaccatgccactggcgtggtagaagaaacatatgatgtggaatttgatgagactaatggctcccaaggagcacttgaaaatcttgatgatgtaggtgatgagccacttagggaagcaatgaagaacatgcctattggagctatcaaaccaaaagaagatgaagaagaggtgcaaatcattgacaggccttcttcatcaaatgtaccacaagatgatgaaaaatatgagaggcatgcaaatgaagatacatttgtctcttatgaacaagcaagggtacaagccgaagatgttgatgctccaggatcctcttcccaagtggttgacaggagaaactcatcactacttcaagctcatcctgaaagccaaatcatcgggagtccttcacaaggggttattactcgatcacatagacatgctactttcattgaacatcactcttttgtttcttgtgttgagcctacttgtatagatgaggcgctacaggatccggactgggtgaatgccatgcatgaagaacttaacaacttcacccgtaacgaagtttggaccctggagaagcccccacaagatgcaagaatcattggaacaaagtgggtgttcagaaacaaacaagatgatcaaggtgtgattgtaagaaacaaggcaagacttgtcgcaaagggattctctcaagttgaaggcttagattttggagagacctttgcaccggttgctcgactagaagccatctgtatcctacttgcatatgcatcatgctatgatataaaactttatcaaatggatgtaaaaagtgcatttttaaatggcttcataaatgaacttgtatatgttgagcaaccgcctggatttgaagaccctagatatcctaaccatgcttacaggttgtccaaggcgctttatgggctaaagcaagctccaagggcttggtatgagcgtcttcgcgacttcctcatcgaaaagggcttcaagatcgggaccgtcgacacaactctcttcacaaagaaacataacggtgatattttcatttgtcaagtatatgttgatgatataatctttggctcgacaaatgactatcattgcaaggaatttggtgagttgatgtcgaaggagttcgagatgtcaatgattggtgagctaacatacttcctcggctttcaagtcaagcaaatgaaagatggtaactttctctcacaagagaagtataccaaagacttgttgaaaagattcaacatggagaagtgcaaaccaatcaagacccccatgcctacaaatggacatctcgacttagatgagggaggtaacccggttaatcaaactctctaccgttctatgattggtagtttattgtaccttaccgcatctaggcccgatattatgttcagtgtctgcatgtgtgctagatttcaatctaatcctaagaaagctcatcttcgcgctgttaagagaattcttaggtatctcaggcacaccacaagcgttggtctgtggtatccgaaaggagctacttttgatttaattggctattccgattcggattatggcggttgcaaaattgataggaaaagtacttctgggggatgccatcttcttggtagatcactagtttcatggacatccaaaaagcaaaatagtgttgccttgtcaactgccgaagcggaatacattgccgcaggtgcttgttgcacacagattttatatatgaaacaaactcttctagactatggcgtagttctagaaaaggtacctttgttgtgtgataatgagagtgctgttaaaattgctaataatcctgtacaacactctcgcaccaagcacattgatatccgtcatcactttcttagagatcatgttgctaaaggagatatcattttagaaggagtgagacatcagatcaggatgccgcgcacgaagaatgcgtcggcgccagggggtggcgatgatgaggagcctcgtcgccccttcaggcaggtcaagggcaagactgtctatttggagcagcaggaaggccgcaagaagcggtacgtacccgtggagtcttggctaccagctcagagagaccctgcagcaggtgatcttttcagcacacggattcaggagtcattcttcagagctcagatgtctgctcagatagctctgcgagtgcaccggcttttggatcttccagcctttctgcttgcagccggtgctgactctgaggcgcatctcacctatttgcctggccttcagacccttctgactatcagcggcagatacgttgaggagtgggtccgagtcttctacgcctctgtttggattgacccggatcatcactggataaggttccgctttgagcgagaggatgtcacaattactgccagtcagatccgtcagctctttggattcccagagtcgacgactcgcctacacagtctctgttacggctcttctgaccctcctcatcgccctcacggcggtgtggcaccagggacagctcacgtcgcggctctgttccgcccgcctttcacagatgggtcgcgacgttcaccggcagactttactacagcagcgaagtacttatatgagctcatcagacggactcttctgccaaggatgggatacagggaggctaccactcatattcaactttggctccttggtgccctggtctcccactctgagtttgacgttgtggacttcctgatttgtgagatcgaggacaccgttctggatgggattcgtgctcgtcggcagttgccttatgctcactacttatgccacatctttgcgcagctgattcagccacctcgctttcagagcacccttgaggcctcacgcctttttgacactcagggtacaacagctgatgatgatgatgatgatgatgattttggggttcctcctccgcctccgcctcctatgcctccacgctcacatgatcatgaggctgggagttctcgtgctgcccctgctcctccttcggctatggaccctgctcttgcgacgattctggccaacctggcagccgagcaggcccggttatccgagacgatgctctcgatgtttcagagcatgcaggacaggcaggatgcacttcagcagcagctacttcaggatcgggctgagagtagggcattcatggcccttatgcttcagcattctggtatctcagcacctccggttcagtctgctccacctcctccgcttcacgctccagtggtgccatcgattttgtcaggaccccctgttggtacctctccgctccggccggtcactttggcgttcacctctccggttctcagctctgtctgtccgcagccgccagtgccaccagcatctgctgttaccactaccgctgtggcagtatctgtgaccgcttctgttccggtagctcctgcagcgcggcctcagtctgagtcagtaccagctccagcttctaccgcagatcctggatccgagactgactctgaccctccgccggcgttcgccctgctacctcgaccacgaccgaatgcgcccccgccgcctcctcctgcttcagatgtttag

SEQ ID NO: 5099 - DNA, 4449 bp, Zea mays
  Clone ID: TF_ZmC3792_17
atgtctgacaacaggcgccgatgcaacaggcgtgctcagcaggagcagcatgaccagcaggaggaaaatcagaggcagcctcccccaccacccccgatgtcagtggagcagatgttcttgatgcagacccaggcagtgcaggccattggacagactctggcagccatgcagcaggctcaacagcagccccaaccccagttgcaagtgcagatgccccagatgccacgagataagcgtggtgagttcatgagagggcaccctcctaccttcgcccattctgctgaccccatggatgcagaagactggttgcgcgcagtggaaagggagctgcgcaccgcccaatgcgacgacagagagaaggttctgtatggtccccgccagctgaggggagcagcccagtcctggtgggagtcctacctcgccacccatgctgaccccgaagccatcacctgggaggaattcagcgagagtttccgtcggtaccatgtgccggagggactgatgatcgtgaagaaggaggagtttctggctctgaagcatggacccatgtctgttagtgagtacagagacaagtttctgcagctgtctcgttatgcacccgaggatgtcaacactgatgccaagaggcagtacaggttcatgagaggtttggtggatcccctacattaccagttgatgaatcacaccttccccaccttccagcacctgatcgatagggcagtcatgactgagaagaagcgtaaggatatggaagatcggaagcgcaagatgagtggaccccagtccggaggcatcagccgtccacgtttctcaggcagttcatctcagcaaggcagacctggtcacccacagggatatcagaatcagaatcagcgtccgcatcagcagcagtttcagaggcagtacccgcagcagcagcagcagtatcgtcagcacagccagcaaggaggtaatcagtatcagaagcagaacaaccaggcacctcgccttcctgccccagcagcgaatcagagcaaccaagcagccccagcacaaggaggaggcagaggatgtttccactgtggagatcaaggccactgggcgatgcagtgcccaaagaagatggctcagcagcagaccaaccccaatgctcccgcaaggcaaggtgtactgcagccggcagcaggcaatcgtaaccaagcgtacaaccgtggaaaggtgaaccacttggaggccgaagcgatccaggatgcaccagatgtggcagtaggtatgttctcagtcgaatctcatcccgcgaaagtgctatttgatactggtgcaactcattcttttgtcactgcaacatgggtagaattgcataacatctcagtagaggcaatggtgccacccatgaggattaattcggttggtggcaaggtgcaaacagataaaatatgttcaaacataatggtggaaataagggggataggattccctagtgacttaatagtaataggcacccctgggatagatgtcattctagggatgaactggttgatgaagtatgaagcaaatgttagttgtgacaaaaggaccataacattgaagtccccgtcaggagaagaggtagtggccgagctaaggatgcctaagtcagaagaaggagtctgtcatcagatttcagttgatagtaaggagcccaacccgctcgaggctatcaaggttgtgtcggactttccggatgtgtttcccgaggagctaacgggcatgccacccgaaaggaaagtcgagtttgccatagagcttatccctggtaccgcccccatttcaaagagagcctatcgagtgtctggaccagaattggtggaactcaagaagcagatagatgagatgttagagaagggttacatcagaccaagtacctcgccttgggccgctccagtattgtttgtagagaagaaagatggtaccaaaaggatgtgcatagactacagagccttgaatgaagtcactgtcaagaacaagtaccccctgccaaggatagaagatttgtttgaccagctcagaggtgccagcgtattctcgaagatagatctgagatcaggttaccatcagctcagaatccgaccctcggatataccgaagacggcattcatcaccaagtatgggttatatgagttcacggttatgtcctttggtttgacaaatgcgccagccttctttatgtacctgatgaacagtgtgttcatggactatctagacaagtttgtggtagtgttcatcgacgacattctcatatactctcaaagtgaggaagatcatgtagagcatttgaagatggtattgcaaaggcttcgagagcatcagttgtatgccaagctgggcaaatgcgagttctggattcatgaagtcttgtttctgggtcacatcataaaccaagatgggttggcagtggatccaaagaaagtagcagatatcctgaactggaaagcaccgaaggatgttcgtgggatcaagagcttcattggaatggctggatactataggcgtttcattgaaggcttctcaaagattgctagaccaatgacagcgttactagcgaagaaagttgagtttaagtggactcaaaagtgtcaggaagcatttgaagaactgaagaatagactgactacagctcctgtgctagtcctgcctgatgttcacaagtcattctcagtgtattgcgacgcttcgtacaccggattgggatgcgtgctaatgcaagaaggaagagttgtagcatactcgtctcgacagctgaagatccatgagaagaattatcccacacatgacctggaattggcagcagtggttcatgctttgaagacctggagacattacctgtacgggcagaagtgcgacatctacacagatcataagagtctgaagaagagtcaagttaatatgttggcctcgtacccaatgccatatgagttagccaaggaatttgacagactgagtctcggtttcctgaatagtacgcaaggagtgacagtggaattagagcccaccctagagcgggagatcaaagaagggcagaaggatgatgaaaacatcaacaaaatccggcagctgatcctagaaggaagaggcaaagactttcgagaggatgaagaaggggtaatctggttcaaggaccgattgtgtgttcccgacctcaaacctattcggggactgatcctcaaggaagctcatgagacagcctactccatacacccgggaagtgagaagatgtaccaggatttaaaaaggaggttttggtggtatggtatgaaaagggagatcgcagaatatgttgccatctgtgttagctgtcagagaaccaaagcagagcatcagaggcccgccggactgttgcagccattgcggattcctcagtggaagtgggatgagatcgggatggatttcatagttggcctacctcgtacccgggccggttatgattccatctgggtggtcgtggaccgcttaacaaaggtggcccacttcatacctgtgaagacgacatacactggagcaacgttagctgagttatacatgtcacggatagtctgccttcatggtgtgccgaagaagatagtgtcagatcgaggaacgcagttcacctctcatttttggcagcagctacaagaagctttgggcacacatttgaacttcagctcagcttatcacccgcagacagacggtcagactgaaagaactaatcagatcctagaagatatgttgagagcctgtgcgttgcaagacaagtcaggatgggacaaaaggttaccttatgcagaattctcttacaacaatagttaccaggccagcttgaagatgtcaccgtttcaggcactctacggacggagttgtaggactccgctgcactgggaccagcctggagagagacaggtgtttggccccgacatcttgcttgaagccgaagagaatatcaaaatggttcgggagaacctgaagacagcccagtcaagacagcgaagctatgctgacagaaggagaagggaactgagttttgaagtgggagactacgtctatctgaaggtgtcacctatcaggggagtcagaaggttcggagttaaaggcaagttagcaccccggtacgtcggaccatatcagattcaagccaagcgtggagaagtggcctaccagctcgacctaccagagagtttgtcagcagtgcacaacgtgttccatgtgtcgcaattgaagaagtgtctgcgagtgccagaagaacagttgccagtggagggtttggaagtccaagaagatctgacatacatagagaagccaacgcagattctggagtttgcagacagagtcacccggaggaacaccatcagaatgtgcaaagtcagatggggtcaccactcggaggatgaagcaacctgggaacgagaagatgacctgaaggccaaataccctgaactctttgctgaccaaccttga

SEQ ID NO: 5100 - DNA, 4365 bp, Zea mays
  Clone ID: TF_ZmC3792_22
atgccccagatgccacgggataagcgtggtgagttcatgagagggcaccctcctaccttcgcccattctgctgaccccatggatgcagaagactggctgcgcgcagtggaaagggaactgcgcaccgcccaatgtgacgacagggagaaggtcctgtatggtccccgccagctaaggggagcagcccagtcctggtgggagtcctacctcgccacccatgctgaccccgaagccatcacctgggaggaattcagcgagagtttccgcaggtaccatgtgccggagggactgatgatcgtgaagaaggaggagtttctggctctgaagcagggacccgtgtctgttagtgagtacagagacaagtttctgcagctgtctcgttatgcacccgaggacgtcaacactgatgccaagaggcagtacaggttcatgaggggtttggtggatcccctgcattaccagctgatgaatcacaccttccccaccttccagcacctgatcgatagggcagttatgactgagaagaagcgtaaggatatggaagatcggaagcgcaagatgagtggaccccagtccggaggcatcagccgtccacgcttctcaggcagttcgtctcagcaaggcagacctggtcacccacagggatatcagaatcagaatcagcgtccgcatcagcagcagtttcagaggcagtacccgcagcagcagcagcagtatcgccagcacagccagcagggaggtaatcagtatcagaagcagaacaaccaggcacctcgccttcctgccccagcagcaaatcagagcaaccaagcagccccagctcaaggaggaggcagaggatgtttccactgcggagatcaaggccactgggcgatgcagtgcccaaagaagttggcgcagcagcagaccaaccccaatgctccaacaaggcaaggtgtactgcagccggcagcaggcaatcgtagccaagcgtacaaccgtggaaaggtgaaccacttggaggccgaagcgatccaggatgcacccgatgtggcagtaggtatgttctcagtcgaatctcatcccgcaaaagtgctatttgatactggtgcaactcattcgtttgtcactgcaacatgggtagaattgcataacatctcagtagaggcaatgatgccgcccatgaggattaattcggttggtggcaaggtgcaaacagataaaatatgctcaaatgtaagggtggaaataagggggatagggttccccagtgacctaatagtaatagacacccccggggtagatgtcatcctagggatgaactggttgatgaagtatgaggcgaatgttagttgtgacaagaggaccgtaacattgaagtccccgtcaggagaagaggtagtggccgagctatggatgcctaaatcagtggagggagcctgtcatcagatttcagttgatagtaaggagcccaacccgctcgaggctatcaaggttgtgtccgactttccggatgtgtttcccgaggagctaacgggcatgccacccgagagaaaggttgaatttgccatagagcttgtccctggtaccgcccccatttccaaaagagcctatcgagtgtctggaccagaactggtggaactcaagaagcagatagatgagatgttagagaagggttacatcaggccaagcacctcgccttgggccgctccagtgttgtttgtagagaagaaagatggtaccaaaaggatgtgcatagactacagagccctgaatgaagtcactgtcaagaacaagtaccccctgccaaggatagaagatctgttcgaccagctcagaggtgccagcgtattctcgaagatagatctgagatcaggttaccatcaactcagaatccgaccctcggacataccgaagacggcattcatcaccaagtatgggttatatgagttcacagttatgtcctttggtttgacaaatgcgcccgccttctttatgtacctgatgaacagtgtgttcatggattatctggacaagtttgtggtagtgttcatcgacgacattctcatatactctcaaagtgaggaagatcatgtagagcatttgaagatggtattgcaaaggcttcgagagcatcagttgtatgccaagctgggcaaatgcgagttctggattcatgaagtcttgtttctgggtcacatcataaatcaagatgggttggcagtggatccaaagaaagtagcagatatcctgaactggaaagcaccgaaggatgttcgcgggatcaagagcttcatcggaatggccggatactacaggcgtttcatcgaaggcttctcaaagattgctagaccgatgacagcgttactagcgaagaaagttgagtttaagtggacccaaaagtgtcaggaagcatttgaagaactgaagaatagattgactacagctcctgtgttagtcctgcctgatgttcacaagccattctcagtgtattgcgacgcttcttacaccggattgggatgtgtgctaatgcaagaagggagagttgtagcatactcgtctcgacagctgaagatccatgagaaaaactatcccacacatgacctggagttggcagcagtggttcatgctttaaagacctggagacattacctgtatgggcagaagtgcgacatctacacagatcataaaagtctgaagtacatattcacccagtcagagttaaacatgaggcagcgaagatggttggaattgatcaaagactacgagctggagatacattaccatccaggcaaagccaatgttgttgcagatgctctgagcaggaagagtcaagtcaatatgttggcctcgtacccgatgccgtatgagttagccaaagagttcgacagactgagcctcggtttcctgaacagtacgcaaggagtaacggtggagttagagcccaccctagagcgggagatcaaagaagggcagaaggacgatgaaagcatcaacaagatccggcagctgatcttagaaggaagaggcaaagactttcgagaggatgaagagggggtaatatggttcaaggaccgattgtgtgttcccgacctcaaacctattcgggagctgatcctcaaggaagctcatgagacagcctactccatacacccggggagcgagaagatgtaccaggacttaaaaagaaggttttggtggtatggcatgaaaagggagatcgcagaatatgtcgccatctgcgatagctgtcagagaaccaaagcggagcaccagaggcctgccggattgttgcagccattgcggattcctcagtggaagtgggatgagatcgggatggattttatagttggcctacctcgcacccgggccggttatgattccatctgggtggttgtggaccgcctaacaaaggtggcccatttcatacccgtgaagacaacatacaccggagcaacgttagctgagttatacatgtcacggatagtctgccttcatggtgtgccgaagaagatagtgtcagatcgaggaacgcagttcacatctcatttttggcagcagctacaagaagctttgggcacccatttgaacttcagctcagcttatcacccgcagacagacggtcagactgaaagaactaatcagatcctagaagatatgctgagagcttgtgcgttgcaagacaagtcaggatgggacaaaaggttaccttatgcagaattctcctacaacaatagttatcaggccagcttgaagatgtcgccgtttcaggcactctatgggcggagttgtaggaccccgctgcattgggaccagcctggagagagacaggtgtttggccccgacatcttgcttgaagccgaagagaatatcaaaatggttcgggagaacctgaagatagcccagtcaagacagcgaagctatgcggaccgaaggagaagagaactgagtttcgaagtgggggattacgtctatctgaaggtgtcacctatcaggggagtcagaaggttcggagttagaggcaagctagcaccccggtacgtcggaccatatcagattcaagcaaagcgtggagaagtggcctaccagctcaacctaccagagagcttgtcagcagtgcacaatgtgttccacgtatcgcaattgaagaagtgtctgcgagtaccagaagaacagttgccagtggagggtttggaggtccaggaggatctgacatacatagaaaagccaacgcagattctggagtttgcagacagagtcacccggaggaacaccatcagaatgtgcaaagtcagatggggtcaccactccgaggaagaagcaacctgggaacgagaagatgatctgaaggccaaataccctgaactctttgctgaccaaccttga

SEQ ID NO: 5101 - DNA, 5418 bp, Zea mays
  Clone ID: TF_ZM3616.C5.o3.fg
atggctcgtcttagacacactgcacgtaagtcggtgattcctttcctgccgtctcgacttgcggagcgtcctctgcaccgcaccgtgtctggtcagtcgagtcacctggagaggctgcaccaccgcctgcgtgaggagcaggaacgccggcgccagcacagagagcagcagggctcttcctccccaccccagcgagaggtggagtccgtgaggccccgttcctctgtggcccagctggaggcgccccctgcaccgccacgggacgtcccggctgttggaggagctactggtggagatcctggaggagaccccgacgacgacgactcagaccacagcacggagtcttctgagccgcaggaggcggaaggatgggtcgcccgacccatcacccgtgacgccgctcgcggttgtcacttccacgacgcactcgacaccttgctgcgccaggctttcgaccggcacacctggtcgatcgagtatcgttgtgtagtctaccagcacagttgcgggaggtacccggaccgctgggaggctacctgcctagttcgccgtccggaggatgacctccggggtgcggaggccgtttcggagcactattccatctccgagagggacactgcagaggcggctatgcaggatgcagcacggcgtgcactctcccagtactgttctttgttcggtggggtggccgacggtcttaaccttcggtactacccccgccgccctactggcagcaccgagagtgtggttgtctcacctgttggtgaggctaaccctaggttgagcagcacagtcaacctagtcgcagtgcttaacacggagctggaccactctctggacgagctaagcagggctcgaacggagattgcggagttgcgtgctgagttggcagagcgccatcaccaggagggtggttcccccgcccctgtcgggactcagcacccataccgctcaccgccacgtggtcaccacacttatggttcccctattgtaagatcaatgctgatgtatgaatgtcttccacagatgtctgacaacaggcgccgatgcaacaggcgtgctcagctagagcagcatgaccagcaggaggaaaatcagaggcagcctcccccaccacccccgatgtcagtggagcagatgttcttgatgcatacccaggcagtgcaggccattgggcagactctagcagccatgcagcaggctcaacagcaaccccaaccccaattgcaagtgcagatgccccagatgccacgagataagcgtggtgagttcatgagagggcaccctcctaccttcgcccattctgctgaccccatggatgcagaagactggctgcgcgcagtggagagggagctgcgcaccgcccaatgcgacgacagggagaaggttctgtatggtccccgccagctgaggggagcagcccagtcctggtgggagttctacctcgccacccatgctgaccccgaagccatcacttgggaggaattcagcgagagtttccgtcggtaccatgtgccggagggactgatgatcgtgaagaaggaggagtttctggctctgaagcagggacccctgtctgttagtgagtacagagacaagtttctgcagctatctcgttatgcacccgaggatgtcaacactgatgccaagaggcagtacaggttcatgagaggtttggtggatcccctgcattaccagctgatgaatcacaccttccccaccttccagcacctgatcgatagggcagtcatgactgagaagaagcgtaaagatatggaagatcggaagcgcaagatgagtggaccccagtccggaggcatcagccgtccacgtttctcaggcagttcatctcagcaaggcagacttggtcacccacagggatatcaaaatcagaatcagcgtccgcatcagcagcagtttcagaggcagtacccgcagcagcagcagcagtatcgtcagcacagccagcagggaggtaatcagtatcagaagcagaacaaccaggcacctcgccttcctgccccagcagcgaatcagagcaaccaagcagccccagcacaaggaggaggaagaggatgtttccactgtggagatcaaggccactgggcgatgcagtgcccaaagaagacggctcagcagcagaccaaccccaatgctccagcaaggcaaggtgtactgcagccggcagcaggcaatcgtaaccaagcgtacaaccgtggaaaggtgaaccacttggaggccgaagcgatccaggatgcacccgatgtggcagtaggtatgttctcagtcgaatctcatcccgcgaaagtgctatttgatactggtgcaactcattcatttgtcactgcaacatgggtagaattgcataacatctcagtagaggcaatgatgccacccatgaggattaattcggttggtggcaaggtgcaaacagataaaatatgttcaaacataatggtggaaataagggggataggattccccagtgacttaatagtaatagacacccccgggatagatgtgattctagggatgaactggttaatgaagtatgaagcaaatgttagttgtgacaagaggaccataacattgaagtccccgtcaggagaagaggtagtggccgagctaaggatgcctaagtcagaagagggagtctgtcaccagatttctgttaatagtaaggagcccaacccgctcgaggctatcaaggttgtgtcggactttccggatgtgtttcccgaggagctaacgagcatgccccccgagagaaaagtcgaatttgccatagagcttatccctggtaccgcccccatttcaaagagagcctatcgagtgtctggaccagaattggtggaactcaagaagcagatagacgagatgttagagaagggttacattagaccaagcacctcgccttgggccgctccagtgttgtttgtagagaagaaagatggtaccaaaaggatgtgcatagactacagagccttgaatgaagtcactgtcaagaacaagtaccccctgccaaggatagaagatttgttcgaccagctcagaggtgccagcgtattctcgaagatagatctgagatctggttatcatcaactcagaatccgaccctcggatataccgaagacggcattcatcaccaagtacgggttatatgagttcacagttatgtcctttggtttgacaaatgcgccagccttctttatgtacctgatgaacagtgtgttcatggattatctggacaagtttgtggtagtgttcatcgatgacattctcatatactctcaaagtgaggaagatcatgtagagcatttgaagatggtattgcaaagacttcgagagcatcaattgtatgccaagctaggcaagtgcgagttctggattcatgaagtcttatttctgggtcacatcataaaccaagatgggttagcagtggatccaaagaaagtagcagatatcctgaactggaaagcaccgaaggacgttcgtgggatcaagagctttattggaatggccggatactataggcgtttcattgaagtcttctcaaagattgctacaccaatgacagcgttgctagcgaagaaagttgagtttaagtggactcaaaagtgtcaggaagcatttgaagaactgaagaatagattgactacagctcctgtgttagtcctgcctgatgtccacaagtcattctcagtgtattgcgacgcttcgtacaccggattgggatgtgtgctaatgcaagaaggaagagtggtagcatactcatctcgacagctgaagatccatgagaagaattcccccacacatgacctggaattggcagcagtggttcatgccttaaagacctggagacattacctgtatgggcagaagtgtgacatctacacagatcataagagtctgaagtacatattcacccagttagagttaaacatgaggcagcgaagatggttggaattgatcaaagactatgagttggagatacattaccatccaggcaaagccaatgttgttgcagatgctctgagcaggaagagtcaagttaatttgttggcctcgtacccgatgccgtacgagttagccaaagagttcgacagactgagcctcggtttcctgaacagtacgcaaggagtaacagtggaattagagcccaccctagatcgggagatcaaagaagggcagaaggatgatgaaaacatcaacaagatccggcagctgatcctagaaggaagaggcaaagactttcgagaggatgaagagggggtaatctggttcaaggaccgattgtgtgttcccgacctcaaacctattcgggaactgatcctcaaggaagctcatgagacagcctactccatacacccaggaagtgagaagatgtaccaggatttaaaaaggaggttttggtggtatggcatgaaaagagagatcgcagaatatgtcgccatctgtggtagctgtcagagaaccaaagcagagcatcagaggcctgccggattgttgcagccattgcggattcctcagtggaagtgggatgagatcgggatggatttcatagttggcctacctcgtacccgggccggctacgattccatctgggtggttgtggaccgcttaacaaaggtggcccatttcatacctgtgaagacgacatacaccggagcaacgttagctgagttatacatgtcacggatagtctgccttcatggtgtgccgaagaagatagtgtcagatcgaggaacacagttcgcctctcatttttggcagcagctacaagaagctttgggcacacatttgaacttcagctcagcttatcacccgcagacagacggtcagactgaaagaactaatcagatcctagaagatatgttgagagcctgtgcgttgcaagacaagtcaggatgggacaaaaggttaccttatgcagaattctcctacaacaatagttatcaggccagcttgaagatatcgccgtttcaggcactctatgggcggagttgcaggactccgctgcattgggaccaggctggagagagacaggtgtttggccccgacatcttgcttgaagccgaagagaatatcaaaatggttcgggagaacctgaagacagcccaatcaagacagcgaagctatgcggacagaaggagaagggaactgagttttgaagtgggagactacgtctatctgaaggtgtcacctatccgaggagtcagaaggttcggagttaaaggcaagttagcacctcggtacgttggaccatatcagattcaagcaaagcgtggagaagtggcttaccagcttgacctaccagagagtttgtcagcagtgcacaatgtgttccatgtgtcgcaattgaagaagtgtctgcgagtaccagaagaacagttgccagtggagggtttggaagtctag

SEQ ID NO: 5102 - DNA, 4326 bp, Zea mays
  Clone ID: TF_ZM4327.C5.o5.fg
atgtcagtggagcagatgttcttgatgcagacccaggcggtgcaagccatcgggcagactctggcagccatgcagcaggctcaacagcaaccccaaccccaattgcaagtgcagatgccccagatgccacgagataagcgtggtgagttcatgagagggcaccctcctaccttcgcccattctgctgaccccatggatgcagaagactggttgcgcgcagtggagagggagctgcgcaccgcccaatgcgacgacagggagaaggttctgtatggtccccgccagctgaggggagcagcccagtcctgtgagtacagagacaagtttctgcagctgtctcgttatgcacccgaggatgtcaacactgatgccaagaggcagtacaggttcatgagaggtttggtggatcccctgcattaccagctgatgaatcacaccttccccaccttccagcatctgatcgatagggcagttatgactgagaagaagcgtaaggatatggaagatcggaagcgcaagatgaatggaccccagtccggaggcatcagccgtccgcgcttctcaggcagttcatctcagcaaggcagacctggtcacccacagggatatcagaatcagaatcagcgtctgcatcagcagcagtttcagagacagtacccgcagcagcagcagcagtatcgtcagcacagccagcagggaggtaatcagtatcagaagcagaacaaccaggcacctcgccttcctgccccagcagcgaatcagagcaaccaagcagccccagcacaaggaggaggcagaggatgtttccactgtggagatcaaggccactgggcgatgcagtgcccaaagaagacggctcagcagcaaaccaaccccaatgccccagcaaggcaaggtgtactgcagccggcagcaggcaatcgtagccaagcgtacaaccatggaaaggtgaaccacttggaagccgaagcgatccaggatgcaccagacgtggcagtaggtatgttctcagtcgaatctcatcccgcgaaagtgctatttgatactggtgcaactcattcatttgtcactgcaacatgggtagaattgcatagcatctcagtagaggcaatgatgccacccatgaggattaattcggttggtggcaaggtgcaaacagataaaatatgttcaaacataatggtggaaataagggggataggattccccagtgacttaatagtaatagacacccctgagatagatgttattctagggatgaattggttaatgaagtatgaagcaaatgttagttgggacaagaggaccgtaacattgaagtccccgtcaggagaagaggtagtggccgagctaaggatgcctaagtcagaagagggagtctgtcaccagatttcagttgatagtaaggagcccaacccgctcgaggctatcaaggttgtgtcggactttccggatgtgtttcccgaggagctaacaggcatgccacccgagagaaaagtcgaatttgccatagagcttatccctggtaccgcccccatttccaaaagagcctaccgagtgtctggaccagaattggtggaactcaagaagcagatagatgagatgttagagaagggttacatcaggccaagcacctcgccttgggccgctccagtgttgtttgtagagaagaaagatggtactaaaaggatgtgcatagactacagagccttgaatgaagtcactgtcaagaacaagtaccccctgccaaggatagaagatttgttcgaccagctcagaggtgccagcgtattctcgaagatagatctaagatctggttatcatcaactcagaatccgaccctcggatataccgaagacggcattcatcaccaagtacgggttatatgagttcgcggttatgtcctttggtttgacaaatgcgccagccttctttatgtacctgatgaacagtgtgttcatggattatctggacaagtttgtggtagtgttcatcgatgacattctcatatactctcaaagtgaggaagatcatgtagagcatttgaagatggtattgcaaagacttcgagagcatcagttgtatgccaagctgggcaaatgcgagttctggattcatgaagtcttatttctgggtcacatcataaatcaagatgggttagcagtggatccaaagaaagtagcagatatcctgaactggaaagcaccgaaggatgttcgtgggatcaagagcttcattgggatggccggatattataggcgtttcatcgaaggcttctcaaagattgctagaccaatgacagcgttactagcaaagaaagttgagtttaagtggacccaaaagtgtcaggaagcatttgaagaactgaagaatagattgactacagctcctgtgttagtcctgcctgatgttcacaagtcattctcagtgtattgcgacgcttcgtacaccagattgggatgtgtgctaatgcaagaagggagagttgtagcgtactcatctcgacagctgaagatccatgagaagaattatcccacacatgacctggaattggcagcagtggttcatgctttaaagacctggagacattacctgtatgggcagaagtgcgacatctacacagatcataaaagtctgaagtacatattcacccagtcagagttaaacatgaggcagcgaagatggttggaactgatcaaagactatgagttggagatacattaccatccgggcaaagccaatgttgttgcagatgctctgagcaggaagagtcaagtcaatatgttggcctcgcacccaatgccgtatgagttagccaaggagtttgacagactgagcctcggtttcctgaatagtacgcaaggagtgacagtggaattagagcccaccctagagcgggagatcaaagaagggcaggaggatgatgaaaacatcaacaagatccggcagctgattctagaaggaagaggcaaagactttcgagaggatgaagagggggtaatctggttcaaggaccgattgtgtgttcccgacctcaaacctattcgggaactgatcctcaaggaagctcatgagacagcctactccatacaccctggaagtgagaagatgtaccaggatttaaaaaggaggttttggtggtatggcatgaaaagagagatcgcagaatatgtcgccatctgtgatagctgtcagagaaccaaagcagagcatcaaaggcctgccggattgttgcagccattgcggattcctcagtggaagtgggatgagatcgggatggatttcatagttggcctacctcgtacccgggccggctacgattccatctgggtggttgtggaccgcttaacaaaggtggcccatttcatacctgtgaagacgacatacaccggagcaacgttagctgagttatacatgtcacggatagtctgccttcacggtgtgccgaagaagatagtgtcagatcgaggaacacagttcacctctcatttttggcagcagctacaagaagctttgggcacacatttgaacttcagctcagcttatcacccgcagacagacggtcagactgaaagaactaatcagatcctagaagatatgttgagagcctgtgcgttgcaagacaagtcaggatgggacaaaaggttaccttatgcagaattctcctacaacaatagttaccaggccagcttgaagatgtcaccgtttcaggcactctacggacggagttgtaggactccgctgcattgggaccagcctggagagagacaggtgtttggccccgacatcttgcttgaagccgaagagaatatcaaaatggttcgggagaacctgaagacagcccagtcaagacagcgaagctatgctgacagaaggagaagggaactgagtttcgaagtgggagattacgtctatctgaaggtgtcacctatcaggggagtcagaaggttcggagttaaaggcaagttagcaccccggtacgtcggaccatatcagattcaagccaagcgtggagaagtggcctaccagctcgacctaccagagagcttgtcagcagtgcacaatgtgttccacgtgtcgcaattgaagaaatgtctgcgagtaccagaagaacagttgccagtggagggcttggaagtccaggaggatctgacatacatagagaagccaacgcagattctggaggttgcagacagagtcacccagaggaataccatcagaatgtgcaaagtcagatggggtcaccattcggaggaagaagcaacctgggaacgagaagatgatctgaaagccaaataccctgaactctttgctgaccaaccctga

SEQ ID NO: 5103 - DNA, 5413 bp, Zea mays
  Clone ID: TF_ZM4454.C1.o11.fg
ggggctcaggctgtttcctgagtacctctccatggctcgtcttagacacactgcacgtaagtcggtgattcctttcctgccgtctcgacttgcggagcgtcctctgcaccgcaccgtgtccggacagtcgagtcacctggagaggctgcaccaccgcctgcgtgaggagcaggaacgccggcgccagcacggagagcagcagggctcttcctcctcaccccagcaggaggtggagaccgtgaggccccgttcctctgttgcccagcttgaggcgccccttgtaccgccgcgggacgccccggctgttggaggagctactggaggagatcccgacgacgacgactcagaccacagcacggagtcttctgagtcgcaggaggcggaaggatgggtcgcccgacccatcacccgtgacgccgctcgcggttgtcacttccacgacgcactcgacaccttgctgcgccaggctttcgaccggcacacctggtcgatcgagtatcgttgtgtagtctaccagcacagtcgcgggaggtacccggaccgctgggaggctacctgcctagttcgccgtccggaggatgacctccggggtgcggaggccgtttcggagcactattccatctccgagagggacactgcagaggcggctatgcaggatgcagcacggcgtgcactctcccagtactgttctttgttcggtggcgtggccgacggtcttaaccttcggtactacccccgccgccctactggcagcacggagagtgtggttgtctcacctgttggtgaggctaaccctaggttgagcagcacagtcaacctagtcgcggtgcttaacactgagctggatcactctctggacaagctaagcagagctcgaacggagattgcggagttgcgtgctgagttggcagagcgccaccaccaggagggtggttctcccgcacctgttgggactcagcacccataccgctcaccgccacgtggtcaccacacttatggttcccctgtctgcgcagatgcaacaggcgtgctcagctggagcagcatgaccagcaggaggaaaatcagaggcagcctccccccaccacccccgatgtcagtggagcagatgttcttgatgcagacccaggcagtgcaggccattgggcagactctggcagccatgcagcaggctcaacagcaaccccaaccccaattgcaagtgcagatgccccagatgccacgagataagcgtggtgagtttatgagagggcaccctcctaccttcgcccattctgctgaccccatggatgcagaagactggctgcgcgcagtggaaagggagctgcgcaccgcccaatgcgacgacagggagaaggttctgtatggtccccgccagctgaggggagcagcccagtcctggtgggagtcctacctcgccacccatgctaaccccgaagctatcacttgggaggaattcagcgagagtttccatcggtaccatgtgctggagggactgatgatcgtgaagaaggaggaatttctggccctgaagcagggacccctgtctgttagtgagtacagagataagtttctgcagctgtcttgttatgcacctgaggacgtcaacactgatgctaaaaggcagtacaggttcatgagaggtttggtggatcccctgcattaccagttgatgaatcacaccttccccaccttccagcacctgatcgatagggcagttatgactgagaagaagcgtaaggacatggaagatcggaaacgcaagatgagtggaccccagtccggaggcatcagccgtccacgtttctcaggcagttcatctcagcaaggcagacctgcagcgaatcagagcaaccaagcagccccagcacaaggaggaggcagaggatgtttccactgtggagatcaaggccactgggcgatgcagtgcccaaagaagacggctcagcagcagaccaaccccaatgctccagcaaggcaaggtgtactgcagccggcagcaggcaatcgtaaccaagcgtacaaccgtggaaaggtgaaccacttggaggccgaagcgatccaggatgcaccagatgtggcagtaggtatgttctcagtcgaatctcatcccgcgaaagtgctatttgatactggtgcaactcattcatttgtcactgcaacatgggtagaattgcatagcatctcagtagaggcaatgatgccacccatgaggattaattcggttggtggcaaggtgcaaacagataaaatatgttcaaacataatggtggaaataagggggataggattccccagtgacttaatagtaatagacacccctgggatagatgttattctagggatgaactggttaatgaagtatgaagcaaatgttagttgtgacaagaggaccataacattgaagtccccgtcaggagaagaggtagtggccgagctaaggatgcctaagtcagaagagggagtctgtcaccagatttcagtcgatagtaaggagcccaacccgctcgaggctatcaaggttgtgtcggactttccggatgtgtttcccgaggagctaacgggcatgccacccgagagaaaagtcgaatttgccatagagcttatccctggtaccgcccccatttcaaaaagagcctatcgagtgtctggaccagaattggtggaactcaagaagcagattgatgaactgttagaaaagggttacatcagaccaagcacctcgccttgggccgctccagtgttgtttgtagagaagaaagatggtaccaaaaggatgtgcatagattacagagccctgaatgaagtcactattaagaacaagtaccccctgccaaggatagaagatttgttcgaccagcttagaggtgccagcgtattctcgaagatagatctaagatctggttatcatcaactcagaatccgaccctcggatataccgaagacggcattcatcaccaagtacgggttatatgagttcacagttatgtcctttggtttgacaaatgcgccagccttctttatgtacctgatgaacagtgtgttcatggattatctggacaagtttgtggtagtgttcatcgatgacattctcatatactctcaaagtgaggaagatcatgtagagcatttgaagatggcattgcaaagacttcgagagcatcagttgtatgccaagttgggcaaatgcgagttctggattcacgaagtcttgtttctgggtcacatcataaaccaagatgggttggcagtggatccaaagaaagtagcagatatcctgaactggaaagcaccgaaggatgctcgtgggatcaagagcttcattggaatggctggatactataggcgtttcattgaaggcttctcaaagattgctagaccaatgacagcgttgctagcgaagaaagttgagtttaagtggactcaaaagtgtcaggaagcatttgaagaactgaagaatagattgactacagctcctatgttagttctgcctgatgttcacaagtcattctcagtatattgcgacgcttcttacaccggattgggatgtgtgctaatgcaagaagggagagttgtagcgtactcatctcgacagctgaagatccatgagaagaattatcccacacatgacctggagttggcagcagtggttcatgctttaaagacctggagacattacctgtatgggcagaagtgcgacatctacacagatcataaaagtctgaagtacatattcacccagtcagagttaaacatgaggcagcgaagatggttggaactgatcaaagactatgagttggagatacattaccatccgggcaaagccaatgttgttgcagatgctctgagcaggaaaagtcaagtcaatatgttggcctcgcacccaatgccgtatgagttagccaaggagtttgatagactgagcctcggtttcctgaatagtacgcaaggagtgacagtggaattagagcccaccctagagcgggagatcaaagaagggcagaaggatgatgaaaacatcaacaagatccggcagctgatcctagaaggaagaggcaaggactttcgagaggatgaagaaggggtaatctggttcaaggaccgattgtgtgttcccgacctcaaacctattcgggaactggtcctcaaggaagctcatgagacagcctactccatacaccctggaagtgagaagatgtaccaggatttaaaaaggaggttttggtggtatggcatgaaaagagagatcgcagaatatgtcgccatctgtgatagctgtcagagaaccaaagcagagcatcaaaggcctgccggattgttgcagccactgcggattcctcagtggaagtgggatgaaatcgggatggatttcatagttggcctacctcgtacccgggccggctacgattccatctgggtggttgtggaccgcttaacaaaggtggcccatttcatacctgtgaagacgacatacaccggagcaacgttagctgagttatacatgtcacggatagtctgccttcatggtgtgccgaagaagatagtgtcagatcgaggaacgcagttcacatctcatttttggcagcagctacaagaagctttgggcacccatttgaacttcagctcagcttatcacccgcagacagacggccagactgaaagaactaaccagatcctagaagatatgttgagagcctgtgcgttgcaagacaagtcaggatgggacaaaaggttaccttatgcagaattctcctacaacaatagttaccaggccagcttgaagatgtcaccgtttcaagcactctacggacggagttgtaggactccgctgcattgggaccagcctggagagagacaggtgtttggccccgacatcttgcttgaagccgaagagaatatcaaaatggttcgggagaacctgaagacagcccagtcaagacagcgaagctatgctgacagaaggagaagggaactgagtttcgaagtgggagattacgtctatctgaaggtgtcacctatcaggggagtcagaaggttcggagttaaaggcaagttagcaccccggtacgtcggaccatatcagattcaagccaagcgtggagaagtggcctaccagctcgacctaccagagagcttgtcagcagtgcacaatgtgttccatgtgtcgcaattgaagaagtgtctgcgagtaccagaagaacagttaccagtggagggcttggaagtccaggaggatctgacatacatagagaagccaacgcagattctggaggttgcagacagagtcacccggaggaataccatcagaatgtgcaaagtcagatggggtcaccattcggaggaagaagcaacctgggaacgagaagatgacctgaaggccaaataccctgaactctttgctgaccaaccttga

SEQ ID NO: 5104 - DNA, 645 bp, Zea mays
  Clone ID: TF_ZM4581.C2.o10.fg
atggaggacttgagtgcaatgaccacgacaactgtgatcagaaagattgcagcatttgaaatatcgcaaaaaatgggtcaagaggagccaacttcttcaaggccatatgcttttgcatgtgatgaaaagaagaaaggcaagaaaaaggctcccactccaagatccttaagtgaagaagaggaagaagaagaaagaaaaagcaaagaaagagaggatgttttgcatgtggggagaagggtcacttcagggacaactgtccaaatatgtccgaacgcacaaaaaagaggagcaaaggcaaggcattcacaagtgtcaaaacttgggatgattcttcaagcgaagatgatcctccatggtctcacagccaccaatcctcatcattcttatcacggccatcacacaagtgctctatggcaagaggataacaccactgcggaagtgaacaagcctggggagggagaaaccatggtttgtaggctatgctacaaggaatgccacaagtcttaccaatgcaaggtgaagaccgaggataagcaaaagcaaaagctcaagcaaaagccaacaagcaaaatctccaacacctacatcaacaaggtggacaaaaaggtcgctacgccatatttgatcaagaagaaaaagaattga

SEQ ID NO: 5105 - DNA, 5778 bp, Zea mays
  Clone ID: TF_ZM4889.C4.o1.fg
ccgcggaggtccgccaccgtcgccccgggccaccgtcgcgccattgccgtcgccgaggagtccccggagcccgccttgagggggctcaggctgtttcctgagtacctctccagggtagtgaaactgatatatcagtcgtgctcacggttaagagcagccttgggatcctctttgattagagatacagatggttcgagatacaaggattatgttatggttttgatggctcgtcttagacacactgcatgtaagtcggtgattcctttcctgccgtctcgacttgcggagcgtcctctgcaccgcaccgtgtccggtcagtcgagtcatctggagaggctgcaccaccacctgcgtgaggagcaggaacgtcggcgccagcatagagagcagcagggctcttcctccccaccccagcaagaggtggagtccgtgaggccccgttcctctgttgcccagctggaggcgccccctgcaccgccgcgggacgccccggctgttggaggagctactggaggagatcttggaggagaccccgacgatgacgactcagaccacagcacggagtcttctgagccgcaggaggcggaaggatgggtcgcccgacccatcacccgtgacgccgctcgcggttgtcacttccacgacgcactcgacaccttgctgcgccaggcttttgactggcacacctggtcgatcgagtatcgttgtgtagtctaccagcacgggaggtacccggaccgctgggaggctacctgcctagttcgccgtccggaggatgacctccggggtgcggaggccgtttcggagcactattccatctccgagagggacactgcagaggcgactatgcaggatgcagcacgacgtgcactctcccaatactgctctttgttcggtggggtggccgacggtcttaaccttcggtactacccccgccgccctactggcagcaccgagagtgtggttgtctcacctgttggtgagggtaaccctaggttgagcagcacagtcaacctagtcgtggtgcttaacactgagctggatcactctctggacgagctgagcagggctcgaacggagattgcggagttgcgtgctgagctggcagagcgccatcaccaggagggtggttcccccgctcctattgggactcagcacccataccgctcaccgccacgtggtcaccacacttatggttcccctatgtctgacaacaggcgccgatgcaaccggcgtgctcagcaggagcagcacgaccagcaggaggaacatcagaggcagcctcccccaccacccccgatgtcagtggagcagatgttcttgatgcagacccaggcagtgcaggccattgggcagacactggcagccatgcagcaggcccaacagcaaccccaaccccaattgcaagtgcagatgccccagatgccacgagataagcgtggtgagttcatgagagggcaccctcctaccttcgcccattctgctgaccccatggatgcagaagactggctgcgcgcagtggaaagggaactgcgcaccgcccaatgtgacgacagggagaaggttctgtatggtccccgtcagctaaggggagcagcccagtcctggtgggagtcctacctcgccacacatgctgaccccgaagccatcacctgggaagaattcagcgagagtttccgcaggtaccatgtgccagagggactgatgatcgtgaagaaggaggagtttctggctctgaagcagggacccctgtctgttagtgaatacagagacaagtttctgcagctgtctcgttatgcacccgaggatgtcaacactgatgctaaaaggcagtacaggttcatgaggggtttggtggatcccctgcattaccagctgatgaatcacaccttccccaccttccaacacctgatcgatagggcagttatgactgagaagaagcgtaaggatatggaagatcggaagcgcaagatgagtggaccccagtccggaagcatcagccgtccccgtttctcaggcagttcatctcagcaaggccggcctggtcatccacggggatatcagaatcagaatcagcgtccgcatcagcagcagtttcagaggcagtacccacagcagcagcaacagtatcgtcagcacagccagcagggaggtaatcagtatcagaagcagaacaaccaggcacctcgccttcctgcccccgcaacaaatcagagcaaccaagcagccccagcacaaggaggaggcagaggatgtttccactgtggagatcaaggccactgggcgatgcagtgcccaaagaagttggcgcagcagcagaccaaccccaatgctccaacaaggcaaggtgtactgcagccggcagcaggcaatcatagccaagcgtacaaccgtggaaaggtgaaccacttggaggccgaagcaatccaggatgcaccagatgtggcagtaggtatgttctcagtcgaatctcatcccgcaaaagtgctatttgatactggtgcaactcattcgtttgtcactgcaacatgggtagaattgcataacatctcagtagaggcaatgatgccgcccatgaggattaattcggttggtggcaaggtgcaaacagataaaatatgttcaaatataatggtggaaataagggggataggattccctagtgacttaatagtaatagacacccccgggatagatgttattctagggatgaactggttaatgaagtatgaagcaaatgttagttgtgacaagaggaccgtaacattgaaatccccgtcaggagaagaggtagtggccgagctaaggatgcctaaatcagaagagggagtctgccatcagatttcagttgatagtaaggagcccaacccgctcgaggctatcaaggttgtgtccgactttccggatgtgtttcccgaggagctaacgggcatgccacccgagagaaaggttgaatttgccatagagcttatccctggtaccgcccccctttccaaaagagcctatcgagtgtctggaccagaattggtggaactcaagaagcagatagatgagatgttggagaagggttacatcaggccaagtacctcgccttgggccgctccagtgttgtttgtagagaagaaagatggtaccaaaaggatgtgcatagactacagggccttgaatgaagtcactgtcaagaacaagtaccccctgccaaggatagaagatttgttcgaccagctcagaggtgccagcgtattctcgaagatagatctgagatcaggttaccatcaactcagaatccgaccctcggacataccgaagacagcattcatcaccaagtacgggttatatgagttcacagttatgtcctttggtttgacaaatgcgtcagccttctttatgtatctgatgaacagcgtgttcatggactatctagacaagtttgtggtagtgttcatcgatgacattctcatatactctcaaagtgaggaagatcatgtagagcatttgaagatggtattgcaaaggcttcgagagcatcagttgtatgccaagctgggcaaatgcgagttctggattcatgaagtcttatttctgggacacatcataaaccaagatgggttggcagtggatccaaagaaagtagcagatatcctgaactggaaagcaccgaaggatgttcgtgggatcaagagcttcattggaatggtcggatactataggcgtttcattgaaggcttctcaaagattgctagaccaatgacagcgttgctagcgaagaaagttgagtttaaatggactcaaaaatgtcaggaagcatttgaagaactgaagaatagattgactacagctcctgtgttagtcctgcctgatgttcacaagtcattctcagtgtattgcgacgcttcgtacaccggattgggatgtgtgctaatgcaagaaggaagagtggtagcatactcatctcgacagctgaagatccatgagaaaaattatcccacacatgacctggagttggcagcagtggttcatgccttaaagacctggagacattacctgtatgggcagaagtgtgacatctacacagatcataaaagtctgaagtacatattcacccagtcagagttaaacatgaggcagcgaagatggttggaattgatcaaagactatgagttggagatacattaccatccaggcaaagccaatgttgttgcagatgctctgagcaggaagagtcaagtccatatgttggtctcgtacccgatgccgtatgagttagccaaagagttcgacagactgagcctcggtttcctgaacagtacgcaaggagtaacagtggaattggagcccaccctagagcgggagatcaaagaagggcagaaggatgatgaaaacatcaacaagatccggcagctgatcttagaaggaagaggcaaagactttcgagaggatgaagagggggtaatatggttcaaggaccgattgtgtgtccccgacctcaaacctattcgggaattgatcctaaaggaagctcatgagacagcctactccatacacccgggaagtgaaaagatgtaccaggatttaaaaaggaggttttggtggtatggtatgaaaagagagatcgcagaatatgtcgccatctgtgatagctgtcagagaaccaaagcagagcatcagaggcctgccgagttgttgcagccattgcggattcctcagtggaagtgggatgagatcgggatggattttatagttggcctacctcgtacccgggccagttatgattccatctgggtggttgtggaccgcttaacaaaggtggcccatttcatacctgtgaagacaacatacaccggagcaacgttagctgagttatacatgtcacggatagtctgccttcatggtgtgccgaagaagatagtgtcagatcgaggaacgcagttcacctctcatttttggcagcagctacaagaagctttgggcacacatttgaacttcagctcagcttatcacccgcagacagacggtcagactgaaagaactaaccagatcctagaagatatgctgagagcctgtgcgttgcaagacaagtcaggatgggacaaaaggttaccctatgcagaattctcctacaacaatagttaccaggccagcttgaagatgtcgccgtttcaggcactctatggacggagttgtaggactccgctgcattgggaccagcctggagagagacaggtgtttggccccgacattttgcttgaagccgaagagaatatcaaaatggttcgggagaatctgaagatagcacaatcaaggcagcgaagctacgcggacagaaggagaagagaactgagttttgaagtgggagactacgtctatctgaaggtgtcacctatcaggggagtcagaaggttcggagttaaaggcaagttagcaccccggtacgttggaccatatcagatccaagccaagcgtggagaagtggcctaccagctcaacctaccagaaagtttgtcagcagtgcacaatgtgttccacgtgtcgcaattgaagaagtgtctgcgagtaccagaagagcagttgccagtggagggtttggaagtccaggaagatctgacatacatagagaagccgacgcagattctggagtttgcagacagggtcacccggaggaacaccatcagaatgtgcaaagtcagatggggtcaccactcggaggaagaagcaacctgggaacgagaagatgatctgaaggccaaataccctgaactctttgctgaccaaccttga

SEQ ID NO: 5106 - DNA, 4563 bp, Zea mays
  Clone ID: TF_ZM4985.C1.o5.fg
atgtctgacaacaggcgtgctcagcaagagcagcatgaccagcaggaggaacatcagaggcagcctcccccaccacccccgatgtcagtggagcagatgttcttgatgcagactcaggcagtgcaggccattgggcagactctggcagccatgcagcaggctcaacagcaaccccaaccccaattgcaagtgcagatgccccagatgccacgggataagcgtggtgagttcatgagagggcaccctcctaccttcgcccattctgccgaccccatggatgcagaagactggctacgcgcagtggagagggaactgtgcaccgcccaatgtgacgacagggagaaggttctgtatggtccccgccagctaaggggagcagcccagtcctggtgggagtcctacctcgccacccatgctgaccccgaagccatcacctgggaagaattcagcgagaatttccgcaggtaccatgttccagagggactgatgattgtgaagaaggaggagtttctggatctgaagcagggacccctatctgttagtgaatacagagacaagtttctgcagctatctcgttatgcacctgaagacgtcaacactgatgctaaaaggcagtacaggttcatgaggggtttggtggatcccctgcattaccagctgatgaatcacaccttccccaccttccagcacctgatcgatagggcagttatgactgagaagaagcgtaaggatatggaagatcggaaacgcaagatgagtggaccccagtccggaagcatcagccgcccccgtttctcaggcagttcatctcagcaaggcaggcctggacacccacagggatatcagaatcagaatcggcgtccgcatcagcagcagtttcagaggcagtacccacagcagcagcagcagcagtatcgtcagaacagccagcaaggaggtaaccagtatcagaagcagaacaaccaggcacctcgccttcctgcccccgcaacaaatcagagcaaccaagcagccccagcacaaggaggaggcagaggatgtttccactgtggagatcaaggccactgggcgatgcagtgcccaaagaagatggcgcagcaacagaccaaccccaatgctccaacaaggcaaggtgtactgcagccggcagcaggcaatcgtggccaagcgtacaaccgtgggaaggtgaaccacttggaggccgaagcaattcaggatgcaccggatgtggcagtaggtatgttctcagtcgaatctcatcccgcaaaagagctatttgatactggtgcaactcattcatttgtcactgcaatatgggtagaaatgcataacatctcagtagaggcaatgatgccgcccatgaggattaattcggttggtggtaaagtgcaagcagatagaatatgctcaaatataagggtggaaataagggggatagggttccccagtgatctaatagtaatagacacccttgaggtagatgtcatcctagggatgaattggttaatgaaatatgaagcgaatgttagctgtgacaagaggaccgtaacattgaagtccccgtcaggagaggaggtagtggccgagctaaggatgcctaaatcagcggagggagtctgtcaccagatttcagttgatagtaaggagcccaacccgctcgaggctatcaaggttgtgtcggactttccagacgtgtttcccgaggagctaacgggcatgccacccgagagaaaagtcgaatttgccatagagcttatccctggtaccgtccccatttccaaaagagcctatcgagtgtctggaccagaattggtggaactcaagaagcagattgatgagctattagaaaagggttacatcagaccaagtacctcgccttgggccgctccagtgttgtttgtagagaagaaagatggtaccaaaaggatgtgcatagactacagagccttgaatgaagtcactgtcaagaacaagtaccccctgccaagaatagaagatctgtttgaccaactcagaggtgccagcgtattctcgaagatagatctgaggtcaggctaccatcaactcagaatccgaccctcggacataccgaagacagcattcatcaccaagtacgggttatatgaattcagagttatgtcctttggtttgacaaatgcgccagccttctttatgtatctgatgaacagcgtgttcatggactatctagacaagtttgtggtagtgttcatcgatgatattctcatatactctcaaagtgaggaagatcatgtggagcatttgaagatggtattgcaaagacttcgagagaaacagttgtatgccaagctgagtaaatgcgagttctggattcatgaagtcctgttcctgggccacatcataaatcaagatgggttagcagtggatccaaagaaagtggcagatatcctgaactggaaagcaccgaaggatgttcgtgggatcaagagcttcatcggaatggccggatactacaggcgtttcatcgaaggcttctcaaagattgctagaccaatgacagcgttgctagcgaagaaagttgagtttaagtggacccaaaagtgtcaggaagcattcgaagaactgaaaaatagattgactacagctcctgtgttagtcctgcctgatgttcacaagccattctcagtgtattgtgatgcttcttacaccggattgggatgtgtgctaatgcaagaaggaagagttgtagcatactcatctcgacagctgaagatccatgagaaaaattatcccacacatgacctggagttggcagcagtggttcatgctctaaagacatggagacattacctgtatggacagaaatgcgacatctacacagatcataaaagtctgaagtacatattcacccagtccgagttaaacatgaggcagcgaagatggttggaattgatcaaagactacgagttggaaatacattaccatccaggcaaagccaatgttgttgcagatgctctgagcaggaagagtcaagtcaatatgttggccacgtacccaatgccatatgagttagccaaggagttcgacagactgagtctcggtttcctgaacagtatacaaggagtaacagtggaattagagcccaccctagagcgggagatcaaagaagggcagaaggatgatgaaaacatcaacaatatccggcagctgatcttagaaggaagaggcaaagactttcgagaggatgaagagggagtaatatggttcaaggaccgattgtgtgttcctgacatcaaacctattcggaagctgatcctcaaggaagctcatgagacagcctactccatacaccccggaagtgaaaagatgtatcaggatttaaaaaggagattttggtggtatggcatgaaaagagaaatcgcagaatatgtcgccatttgtgatagctgtcaaagaaccaaagcagagcatcaaaggcccgccggattgttgcagccattgcggattcctcagtggaagtgggatgagatcgggatggattttatagttggcctacctcgtacccgggccggctatgattccatctgggtggttgtggaccgcttaacaaaggtggcccatttcatacccgtgaagacaacatacactggagcaatgttagctgagttatacatgtcacggatagtctgccttcatggtgtgccgaagaagatagtgtcggatcgaggaacacagtttacctctcatttttggcagcagctacaagaagctttgggcacacacttgaacttcagctcggcttatcacccacagacagacggtcagactgaaagaactaatcagatcctagaagatatgctgagagcctatgcgttacaagacaagtcaggatgggacaaaagattaccttatgcagaattctcctacaacaatagttaccaggccagcttgaagatgtcaccgtttcaggcactctatggacggagttgtaggactccgctgcattgggaccagcctggagagagacaggtgtttggccccgacattttgcttgaagccgaagagaatatcaaaatggttcgggagaatctgaagatagcacaatcaagacagcgaagctatgcggaccgaaggagaagagaactgagttttgaagtgggagattacgtctatctgaaggtgtcacctatcaggggagtcagaaggttcggagttaaaggcaagttagcaccccggtacgtcggaccatatcagatccaagcaaagcgtggagaagtggcctaccagctcgacctaccagagagcttgtcagcagtgcacaacgtgttccacgtgtcgcaattgaagaagtgtctacgagtaccagaagaacagttgccagtggagggtttggaggtccaggaggatctgacatacatagagaagccaacgcagattctggagtttgcagacagagtcacccggaggaacaccatcagaatgtgcaaagtcagatggggtcaccactcggaggaagaagcgacctgggaacgagaagatgatttgaaggccaaataccctgagctctttgctgaccaaccttga

SEQ ID NO: 5107 - DNA, 5409 bp, Zea mays
  Clone ID: TF_ZM4995.C3.o5.fg
atggctcgtcttagacacactgcacataagtcggtgattcctttcctgccgtctcgacttgcggagcgtcctctgcaccgcaccgtgtccggacagtcgagtcacctggagaggctgcaccaccgcctgcgtgaggagcaggaacgccggcgccagcacggagagcagcagggctcttcctcctcaccccagcaggaggtggagaccgtgaggccccgttcctctgttgctcagctggaggcgccccttgttccaccgcgggacgtcccggctgttggaggagctactggaggagatcccgacgacgacgactcagaccacagcacagagtcttctgagccgcaggaggcggaaggatgggctttcgaccgacacacctggttgatcgagtatcgttgtgtagtctaccagcacagtcgcgggaggtacccggaccgctgggaggctacctgcctagttcgccgtccggaggatgacctccggggtgcggaggccgtttcggagcactattccatctccgagagggacactgcagaggcggctatgcaggatgcagcacgacgtgcactctctcagtactgttctttgttcggtggcgtggccgacggtcttaaccttcggtactacccccgccgccctactggcagcacagagagtgtggttgtttcacctgttggtgaggctaaccctaggttgagcagcacagtcaacctagtcgcagtgcttaacacggagctggatcactctctggacgagctaagcagggctcgcacggagattgcggagttgcgtgctgagttggcagagcgccatcaccaggagggtggttctcccgctcctgtcgggactcagcacccataccgctcaccgccacgtggtcaccacacttatggttcccctattgtaagatcaatgctgatgtatgaatgtcttccacagatgtctgacaacaggcgccgatgcaacaggcgtgctcagctggagcagcatgaccagcaggaggaaaatcagaggcagcctcccccaccacccccgatgtcagtggagcagatgttcttgatgcagacccaggcagtgcaggccattgggcagactctggcagccatgcagcaggctcaacagcagccccaaccccagttgcaagtgcagatgccccagatgccacgagataagcgtggtgagttcatgagagggcaccctcctaccttcgcccattctgctgaccccatggatgcagaagactggctgcgcgcagtggagagggagctacgcacccccaatgcgacgacagggagaagcgagagtttccgtcggtaccatgtgccagagggactgatgatcgtgaagaaggaggagtttctggctctgaagcagggacccatgtctgttagtgagtacagagacaagtttctgcagctgtctcgttatgcacccgaggatgtcaacactgatgccaagaggcagtacaggttcatgagaggtttggtggatcccctgcattaccagctgatgaatcataccttcccaaccttccagcacctgatcgatagggcagtcatgactgagaagaagcgtaaggatatggaagatcggaagcgcaagatgagtggaccccagtccggaggcatcagccgcccacgtttctcaggcagttcatctcagcaaggcagatctggtcacccacagggatatcagaatcagaatcagcgtccgcatcagcagcagtttcagagacagtacccgcagcagcagcagcagtatcgtcagcacagccagcagggaggtaatcagtatcagaagcagaacaaccaggcacctcgccttcctgccccagcagcgaatcagaacaaccaagcagccccagcacaaggaggaggcagaggatgtttccactgtggagatcaaggccactgggcgatgcagtgcccaaagaagtcggctcagcagcagatcaaccccaatgctccagcaaggcaaggtgtactgcagccggcagcaggcaatcgtaaccaagcgtacaaccgtggaaaggtgaaccacttggaggccgaagcgatccaggatgcaccagatgtggcagtaggtatgttctcagtcgaatctcatcccgcgaaagtgctatttgatactggtgcaactcattcttttgtcactgcaacatgggtagaattgcataacatctcagtagaggcaatgatgccacccatgaggattaattcggttggtggcaaggtgcaaacagataaaatatgttcaaacataatggtggaaataagggggataggattccccagtgacttaatagtaataggcacccctgggatagatgtcattctaggaatgaactggttaatgaagtatgaagcaaatgttagttgtgacaagaggaccataacattgaagtcctcgtcaggagaagaggtagtggccgagctaaggatgcccaagtcagaagagggagtctgtcaccagatttcagttgatagtaaggagcccaacccgctcgaggctatcaaggttgtgtcggactttccggatgtgtttcccgaggagctaacgggcatgccacccgagaggaaagtcgaatttgccatagagcttatccctggtaccgcccccatttcaaagagagcctatcgagtgtctggaccagaattggtggaactcaagaagcagatagacgagatgttagagaagggttacatcaggccaagcacctcgccttgggccgctccagtgttgtttgtagagaagaaagatggtaccaaaaggatgtgcatagactacagagccttgaatgaagtcactatcaagaacaagtaccccctgccaaggatagaagatttgttcgaccagctcagaggtgccagcgtattctcgaagatagatctgagatcaggttaccatcaactcagaatccgaccctcggacataccgaagacaacattcatcaccaagtacgggttatatgagttcacagttatgtcctttggtttgacaaatgcgccagccttctttatgtacctgatgaacagtgtgttcatggactatctagacaagtttgtggtagtgttcatcgatgacattctcatatactctcaaagtgaggaagatcatgtagagcatttgaagatggtattgcaaaggcttcgagaacatcagttgtatgccaagctgggcaaatgcgagttctggattcatgaagtcttatttctgggtcacatcataaaccaagatgggttagcagtggatccaaagaaagtagcagatatcctgaactggaaagcaccgaaagatgttcgtgggatcaagagcttcattggaatggctgggtattataggcgtttcattgaaggtttctcgaagattgctagaccaatgacagcgttactcgcgaagaaagttgagtttaagtggactcaaaagtgtcaggaagcatttgaggagctgaagaatagattgactacagctcctgtgttagtcctgcctgatgttcacaagtcattctcagtgtactgcgacgcttcttacaccggtttgggatgtgtgctaatgcaagaagggagagttgtagcatactcatctcgacagctgaagatccatgagaagaattaccccacacatgacctggaattggcagcagtggttcatgccttaaagacctgtagacattacctgtatgggcagaagtgcgacatctacacagatcataagagtctgaagtacatattcacccagtcagagttaaacatgaggcagcgaagatggttggaactgatcaaagactatgagttggagatacattaccatccgggcaaagccaatgttgttgcagatgctctgagcaggaaaagtcaagtcaatatgttggcctcgcacccaatgccgtatgagttagccaaggagtttgacagactgagcctcggtttcctgaatagtacgcaaggagtgacagtggaattagagcctaccctagagcgggagatcaaagaagggcagaaggatgatgaaaacatcaacaagatctggcagctgatcctagaaggaagaggcaaagactttcgagaggatgaagaaggagtaatctggttcaaggaccgattgtgtgttcccgacctcaaacctattcgggaattgatcctcaaggaagctcatgagacagcctactccatacacccagggagtgagaagatgtaccaggatttaaaaaggaggttttggtggtatggtatgaaaagggagatcgcagaatatgtcgccatctgtgatagctgtcagagaaccaaagcggagcatcagaggcctgccggattgttgcagccattgcggattcctcagtggaagtgggatgagatcgggatggatttcatagttggcctacctcgtacccgggccggctacgattccatctgggtggttgtggaccgcttaacaaaggtggcccacttcataccggtgaagacgacatacaccggagcaacgttagctgagttatacatgtcacgaatagtctgccttcatggtgtgccgaagaagatagtgtcagatcgaggaacgcagttcacatctcatttttggcagcagctacaagaagctttgggcacacatttgaacttcagctcagcttatcacccgcagacagacggtcagactgaaagaactaatcagatcctagaagatatgttgagagcctgtgcgttgcaagacaagtcaggatgggacaaaaggttaccttatgcagaattctcctacaacaatagttaccaggccagcttgaagatgtcaccgtttcaggcactctatgggcggagttgcaggactccgctgcattgggaccagcctggagagagacaggtgtttggccccgacatcttgcttgaagccgaagagaatatcaaaatggttcgggagaatctgaagacagcccagtcaagacagcgaagctatgcgaacagaaggagaagagaactgagttttgaagtgggagactacgtctatctgaaggtgtcacctatcaggggagtcagaaggttcggagttaaaggcaagttagcaccccggtacgtcggaccatatcagattcaagcaaagcgtggagaagtggcctaccagcttgacctaccagagagcttgtcagcagtgcacaatgtgttccatgtgtcgcaattgaaaaagtgtctgcgagtaccagaagaacagttgccaatggagggtttggaggtccaggaggatctgacatacatagaaaagccaacgcagattctggagtttgcagacagagtcacccggaggaatactatcagaatgtgcaaagtcagatggggtcaccactctgaggaagaagcaacctgggaacgagaagatgacctgaaggccaaataccctgaactctttgctgaccaaccttga

SEQ ID NO: 5108 - DNA, 5358 bp, Zea mays
  Clone ID: TF_ZM4158.C1.o6.fg
atggatcctaaggggaagggaatcgtgatcaacgataaggagaaggagtccttcgtcaatgaggccaaagatgacaagcctaccgactccggctcaggtcatagacgaaaggaagggaagaagaagaagacgaggcgcatcaaggagatcgtctactacgacgacagtgatgagtctacttcttcccaaaaggacgacgaccacaacgactacgagcaaaggaaaccggttaattctaacttttcctttgactactctcgtattccgcaaagttcaaattcacatttgctttccattccactcggcaagcccccacactttgatggagaggactacggattttggagccacaaaatgcgtagtcacctattctctctccatcctagtatatgggagattgtagatagtggaatgcactttaatagttcggatagtcctatattcattaatgagcaaatccataagaatgcacaagctactactgttcttctagcttcattgtgcagggatgaatataacaaattggtggagggcgagcttggacggttcgcgatgataaggggcgaggagacaactcaaacatacaaccggctcaagacccttatcaacaaaataaggagctacggaagcacgcgatggacggaccacgacgtcgtccgcctaatgctaaggtcctttaccgttcttgatcctcatttggtgaataatattcgtgagaatcccaggtacaccaaaatgtcgcccgaagaagtcttaggaaaattcgtcagcgggcgaatgatgatcaaggaggcaaggtacgtggacgacgccttgaatggaccgatcaatgaaccacaaccttttgctctcaaagcaacaagaagtaaggaggcgctacctagcaaggtggcacaaattgaggcggtcggacttaatgatgaagagatggctctcatcatcaaacgcttcaagacggtactaaagggtcacaaagggcagccaagcaagaccaaggcgaaggggaagcactcatgcttcaagtgcggtaagtttggtcattttatcgctaactgccccgataatgatagtgaccaggaaaagggaaacaagagggactccgacaatgaaggactcgccgccaccgccttcaacaaatcaaccctcttccccaacgagcgtcacacatgccttatggcaagggagaagaaggtatgtactcacaactctacctatgcttcttcaagtgaggacgaatctagtgatgaggatgaagtagattattcatgtttgttcaagggtttagatagatctaagatagacaaaattaatgaattaattgatgccttgaatgaaaagaatatacttttagaaaagcaagaggatttgttgtatgaagaacatgataagtttgtagaggctcaaaaatcccttgcattagaaattaagaggaatgaaatgcttgcttgtgaagtgtcaacatgccatgattctatttctaacttaaagagcataaacgatgatttaaatgctaaactagtagaagcaaataaatccaacttttgtgttgaatatgttgaaatttgcactaggtgtaaagatattaacattgatgattatagtgaacacctagcttgtatttctaaattaaatgaagaggtagctagtcttaatgcccaacttaagactagcaaaagtgattttgagaaactaaaatttgctagggatgcctacacggttggtagacacccctcaattaaggatgggcttggcttcaagagggaagccaagaacttaacaagccataaggctcccattcccactaaggagaaagggaaggctcctatggctactagcactaaaaggaatcatgcttttatatatcatgataggagacaaactagaaatgcttataggagttataatgcgtacgatgatttttctcatgctatgtttgcttctagttcttcatatgtgcacaatagaaatgttggtagaagggatgttgttcataatatgcctagaaaaaatattattcatgctcctaggaaagtagtgaatgaaccatctacaatttattgtgctttaaatgcttcctttgcaatttgtagaaaggatagaaagataattgctaggaagttaggggcaaaatgcaagggagacaaaacttgcatttgggtccctaaagatatttgtgctaaccttgtaggacccaacatgagttgggtttatgcatccgggggttcaagctggattattgatagcggatgcacaaaccatatgacgggggagaagaagatgttcacctcctacgtcaagaataaggattctcaagattcaattgtattcggtgatgggaatcaaggcaaggtaaaagggttagtagagtctcttggttataatttgctatctgttagtcaattatgcaacatggggtataactgtctattcacaaatgtagatgtgtctgtctttagaagaagtgatggttcactagcttttaagggtgtattagacggcaaactctatttagttgattttgcaaaagaagaggctggtctagatgcatgcttaatagctaagactagcatgggctggctgtggcatcgccgcttagctcatgtggggatgaagaaccttcacaagcttctaaagggagaacacgtgataggtttgactaacgtacaattcgaaaaagatagaccttgtgcagcttgtcaagcaggtaaacaagtgggaggagcacatcacagcaagaatgtgatgaccacttcaagacccctggagctgctgcatatggacctcttcggacccgtcgcctatctgagcataggagggagtaagtatggtctagttattgttgatgacttttcccgcttcacttgggtgttctttttgcaggataagtctgaaacccaagggaccctcaagcgcttcctcaggagagctcaaaatgagtttgagctcaaagtgaagaagataaggagcgacaacgggtccgagttcaagaaccttcaagtggaggagttccttgaagaggaagggatcaagcacgagttctccgctccctactcaccgcagcaaaatggtgtggtagagaggaagaacaggacgctcatcgacatggcgaggacgatgctaggagagttcaagacccccgagtgcttttggacggaagccgtgaacacggcttgccacgccatcaaaaaggtctaccttcatcgcctcctcaagaagacgtcgtatgagctactaaccggtaacaaacccaatgtatcttactttcgcgtatttgggagcaagtgctacattctagtgaagaagggtagaaattctaaattcgctcccaaagctgtagaagggtttttgttaggttatgactcaaatacaaaggcgtatagagtcttcaacaaatcatcgggtttggttgaagtctctagcgacgttgtatttgatgagactaatggctctccaagagagcaagttgttgattgtgatgatgtagatgaagaagatgttccgacggccgctatacgaaccatggcgattggagacgttcggccacaggaacaagatgaacgagatcaaccttcttcctcaattatggtgcatcccccaactcaagacgatgaacgggttcatcaacaggaggcgtgtgatcaagggggagcacaagatgatcatgtgatggaggaagaagcggaaccggcacctccaacccaagttcgagcgatgattcaaagggatcatcccgtcgaccaaattctgggtgacattagcaagggagtaactactcgatctcgactagttaatttttgtgagcattactcctttgtctcttctattgagcctttcagggtagaggaggccttgctagatccggactgggtgttggccatgcaggaggagctcaacaacttcaaaaggaatgaagtttggacactggtgcctcgtccgaagcaaaatgttgtgggaaccaagtgggtgttccgcaacaaacaggacgagcacggggtggtgacgagaaacaaggctcgacttgtggcaaaaggttatgcccaagtcgcaggtttggatttcgaggagacctttgctcctgtggctaggctagaatcaattcgtatcttgctagcatatgccgctcatcattctttcaggttgtaccaaatggatgtgaagagcgctttcctcaacgggccaatcaaggaggaggtgtacgtggagcaaccccctggcttcgaggatgaacggtaccccgaccatgtgtgtaagctctctaaggcgctctatggacttaagcaagccccaagagcatggtatgaatgccttagagactttctaattgttaatgctttcaaggttgggaaagccgatccaactctttttacaaaaacatgtgatggtgatttgtttgtgtgccaaatttatgtcgatgacataatatttggttctactaaccaaaagtcttgtgaagagtttagcagggtgatgactcagaaattcgagatgtcgatgatgggcgagttgaactacttccttgggttccaagtgaagcaactcaaggatggcaccttcatctctcaaacgaagtacacgcacgacttgctaaagcggtttgggatgaaggacgccaagcccgcaaagacgccgatgggaaccgacggacacaccgacctcaacaaaggaggtaagtccgttgatcaaaaagcataccggtcaatgatagggtcattactttacttatgtgctagtagaccggatattatgcttagcgtatgcatgtgtgctagatttcaatccgaccctaaggagtgtcacttagtggcggtgaagcgaattttgagatatttagttgctacgccttgcttcgggctctggtatccaaaggggtctacctttgacttggttggatactcagattccgactatgctggatgcaaggtcgataggaagagtacatcggggacgtgccaattcttaggaaggtccctggtgtcatggaactctaagaaacaaacttctgttgccctatccaccgctgaggccgagtatgttgccgcaggacagtgttgcgcgcaactactttggatgaggcaaaccctcagggactttggctacaatctgagcaaagtcccactcctatgtgataatgagagtgctatccgcatggcggaaaatcctgttgagcacagccgcacaaagcacatagacatccggcatcactttttgagagaccaccagcaaaagggagatatcgaagtgtttcatgttagcaccgagaaccagctagccgatatctttaccaagcctctagatgagaagaccttttgcaggctgcgtagtgagctaaatgtcttagattcgcggaacctggattga

SEQ ID NO: 5109 - DNA, 525 bp, Zea mays
  unsure (1)..(525): unsure at all n locations
  Clone ID: TF_ZmC1020407_1
cattgactgaattatgatcctggatggataaaaatcacagttattctatctgatgctaatgttcctggcgaaggggagctttnaataatgtcgtatattcgtggtcaacggaatctccctggatttaatccagacacacgccattgcttatatggcctggatgcagacctcataatgttagtttagcaactcatgaagtacacttctctatattgagagatgtagtctttacacctgggcagcaggacaaatgcttcttatgtggtcaggtggggcatctagccgctaattgtgaaggaaaggcaaagagaaaagctggggaatacgatgagaaaggtgaagctattgttccaaagaaaccataccagttcttgaataactggaaccttcgggagtacttaggatatgagttcagaatggccaatccggctttccagattgattttggacggattgttgatgatttcatcttcatgtgctttttcgttggcaacgattttcttccgcatatggcaacactaggga

SEQ ID NO: 5110 - DNA, 4275 bp, Zea mays
  unsure (1)..(4275): unsure at all n locations
  Clone ID: TF_ZmC5679_1
ggcatccaantattttattattttcttaatatgttcgggcatgttttgggtgacctggaggcctgggcctagttagcgaagggcttggacctaacattacagtggaattttgggccctttaagggctgggcaatttctttttcttctaccagacatctagcactggacctaaactagacgagcactttgtcgtgaggaacaaccacgccgggcgcgcacaatatttttttcagcaaatggaagaaaaatttttgtggtggatctaagccccatttgatgtgttttctcccaatactctaagatggactgattgatttcacatctgtgttgttaaaggtcatctattccagctttataacctaggttgtataaactcatttggtgaacaaaaagacccagttattgtccaatcgcaagaaactacgccagcccatgagtccgtctcgacagtgaccggacctcttcgttagggtttcgcgcctcttctcaccgtctgcctactactagggatagacctccggcaaggcctccctcgcgccggcggcgtcagcagcggatatgggtgttccggcgttctaccgatggctggcggagaagtacccgatggtggtggtggacgtggtggaggaggagcccgtagagatcgagggcgtcaaggtgcccgtcgacacctccaagcccaaccccaacagcctcgagttcgacaacctctacctcgatatgaacggaatcatacacccctgcttccacccggaggacaggccctccccaacaacatttggtgaggttttccagtgcatgtttgattatatcgacagactattcgtcatggttcgcccccggaggcttttgtacatggccattgatggtgttgctcctcgtgctaagatgaaccagcagcgctcaagacgattcagggctgcaaaagatgcagctgatgcggctgcagaagaagaacggttacgtgaagagtttgagagggaaggcagaaagcttcctccaaagcagcaatcacaaacatgtgattcaaatgttattactccagggactgaatttatggctgttttatcagttgctttgcagtattacatccatcgtagattgaattatgatcctggatggaaacaaattaaagggaacataaaatcatatatgtcctacctggccaacggaatctgtctggttttaacccaaatacgcgccattgcctgtatggcctggacgcagatctgatcatgctagctttggcgacacatgaagtacacttctcaatactgagagaggtagtttatacacctggacagcaggataaatgcttcttgtgtggtcaggtgggacatctagcagcaaactgtgaaggaaaggtgaaaagaaaagctggggagtttgatgagaagggtggtgctattgttcccaagaagccctatcagttcttgaatatatggaccctgcgggaatatttagaatacgagttcagaatgccaaacccacctttcaagattgattttgaacgcattgttgatgatttcatcttcatgtgcttctttgttggcaacgattttcttccacatatgccgacgctagagatccgtgagggagctattaatttgctaatggcagtgtacaagaaggaatttccctcaatgggtggatatttaactgattcttgcacgcctgatctgagcagagttgagcacttcattcaagcagttggttcatatgaggacaaaatatttcagaaaagagcacgtttgcatcagcgtcaagcggaaaggataaaacgggaaaaagctcaagcaaagcggggtgatgatctggatccccatgttagggatgaccttattgtacctattcaacgttttcaagggtctcgcctagcctctggggctgtacctgtgccatatgagcagaatggatcccataaagacaataaagaaaggaatagtcgagcccggaaagctgcacgagtatcaacgtcaggttccagcattgcctcagccttagttgaagctgaaaatgacctcgaagcccaagaatgtgaaaacaaagaagaactgaagtcaatgcttaaagatgcacttcgcgagaaatctgatatttttaattctgacaatccagaggaggataaggtgaaacttggagaaccaggatggagggaaaggtactatgaagagaaatttggggcaagaacacccgagcagattgaagaaatacgcagagatgttgttctcaaatacacagaaggattgtgttgggtaatgcactactattatgaaggggtatgctcatggcaatggttctacccttatcattatgctccgtttgcttcggatctaagtggattgggccaacttaatattaaatttgaacttgggacaccattcaaaccttttgatcaacttatgggtgttttcccagctgcaagtgcccatgcgctaccgctacagtatcgacgattgatgaccgatccaaattcaccaataattgatttttatcctacagattttgaagtagatatgaatgggaagagatattcttggcaagggattgcaaaactaccgtttattgatgaagatcgtttgttggctgagataaaaaaagttgagcatactttgacgcctgaagaagcaaggagaaacagtatcatgtgtgatatgctttttgtgaatgggtcacatccactttcgccttatatctactctctcaacagcaaatttgggcatctgcctgacaaaaggagaaatgaaattaaagaaaaacttgatccttctgctagtggaggaatgaatggatacataacactttgcagtggggatccatgccctcctatctttaggtctcctgtggacgggctggaggatattatggacaatcaagtgatatgttcaatctacaatcttccagaccatcataagcacatagcccagccgccagttggtgttatcatgcccaagaagattgttgaagccggtgatctgaaaccacctccagtgctgtggcatgaagatagtggcaggcggcctcatgataatagcaacaggcaaaacccatctggtgccatatcaggccgtcaacttggagaggcagctcaccgacttgtcataaacagcttaaatgctcagggtagggggcaacatagtggcacatcaatgccatatcgaactataatgaatggcttgcatcatctggatgtagcgtcccctgtcagcgatcaaggcatgcgtccacaagtggggcagtctgccggacctcctggttggtatgttcctaggggtagtgtatcaaatggtcaaccaccagcttatgcatcatcaggatcaggtcattatcagtatgaaagttcggggcattcacaatatgaacaaggtaaccatggaaggcaacaatctcacccatatgcaagagatggcttccatgatacacgaggaagggttccacctgcatatgggtaccagcagagcaacatgtatccatcgggtcctggattgtatgggcaacctccatcagcatatcctggggttcatggtggaggctaccaaccccctccatatggcggaggccagcagtggcagcaacaatcatatagttcgtatgccgtgcgaggcccctacggaggcaggccaccacccacaagggctgattcagggtcacagcaaccacagaaccgttatggtgctttagacagaagtaacaaccggaggccttcatctggatacagaagataatagtttgtgacccagtttatgttatagctcaaagtttgttatcagtagagcttcgagtaactcagctaaagcataggcggaatagtctgctaagtcttgtgaccttcaagcagttagggggtggccatcaaagatattgggaggcaaaatttgtatgctagtgcagactttcaggtactagcggttttgatcgccattgaagcagctaggtttgcggcatcagaggttttgcgaagcaagatttgtatactactgttatcaacgggccatcaggtactggtggctggtcgccattctttatctgtagttaccatttgtttagaagatgtcataaacggccctggggcttaaataggtcccattgagaatatttttgaaggacgtttactctgagacttgacaagttttgggggcattttgatatcagataaatgtatgcaggagtgcagttttgatgatgtgtgtattccaagtcattaatttaaaaaaaaaaaaaaaaaaaaaaaaaaaaaaaaaaaagatcccttcaaagagcggcatattgcccgca

SEQ ID NO: 5111 - DNA, 576 bp, Zea mays
  unsure (1)..(576): unsure at all n locations
  Clone ID: TF_LIB3060-078-Q1-K6-A1
gtccttttgggtggataaccaancaagggnaaagtgatacagtagnagatggttctgttccactgtatgaccgggagtttaccttgcactcgactcctctaggtggttcatcaaacactgaaagggtggataaggacgattcacgctgcttcaattgtggttcttatagccatgctatgaaggattgcccaaagcctcgggacaatgttgcaattagcaatgcacgaaaacagcataatttgaaaagaaaccaatctaatgttaaccgtgtacaaaaccgatactaccagaaaacgcccggcaaatttgatgatttgaaagctggagtactgggacctgaaactagacagtgcttggggatcggggtactgactataccatttgcagtcaaaatttgaacatcctgattttattgatattatggttatatttggctggtctaccagtacacataagtcttctgatgtatttacagtgagataaaaatgacatttatctgtactcctgttagttaatgagataccactacacatttaacattcatgagatgaaaatgattagtttattactctcaat

SEQ ID NO: 5112 - DNA, 2389 bp, Zea mays
  Clone ID: TF_ZmC6869_1
gccggccgggtcggggggatcgcccgcccagtccacgcatcaaatttccattccggtgggtcttacctgcttgagtactactctcccgttcaccacgttcactccgtatctctcgtgcctttttcctttcctggttgcgacgagccgacgactgggcggacgccgctgccgccctacgccaggtcttcgtcggccccttcgacgagcacacacaagattcagtcgggaatgttgaatgcatagtgtaatttctgcgcaaaaagatggcatcagacgagttcatcagccttgacgcaccttgtgaggctgatgcgaaagatgaagggggagacgttcaggttaaagctcctgatgtgagtgggatggagcctctggtatcggatctccaaccagaagggaaagctggtgctgtgggtagtaatcccaagacatctgctgggaacctggatcttgaagaggggcaagtggaagatatggacctcgcggatgatgacgtagtggttggaaaggatcagctattagatgcttccattcagcccgagatcagtgttgcagctgtgcagactgtgattggttttgaggtcaagctggacaagggggacgggactgaaaatgaaataatttatgagtcaaacagcatctctattgaagaaagtcgtatcctattgaatggaatattatgtatttcttctaatatacttgtgcaactgcaagtgtctatgttttctgaagattcatttgtttccattgaatccttggaactgtacttgcataagaagtgcagactcttgcttatactcctgggaccctaaacatgttattgtgatctggggggaatttatagttgttgttgttccttgatgtggcatttttagcctcaagaggagttaaaagagcccgtgtggaatcaaaggaaccttctgttcgtgtcatctacagtgacttgacaagggaaagcaaacgaaagcttatgcaattgatgcaacaatggtctgagtggcaggctagaaggatgcaccatttggaggaagctgtggaagtgaccttagaaagtggtgaagagacttattatcctgcattacatgttggttctgagaaatcttgtgccgtgtccttttgggtggataaccaagcaagggaaagtgatacagtagatgatggttctgttccactgtatgaccgggagtttaccttgcactcgactcctctaggtggttcatcaaacactgaaagggtggataaggacgattcacgctgcttcaattgtggttcttatagccatgctatgaaggattgcccaaagcctcgggacaatgttgcaattagcaatgcacgaaaacagcataatttgaaaagaaaccaatctaatgttaaccgtgtacaaaaccgatactaccagaaaacgcccggcaaatttgatgatttgaaagctggagtactgggacctgaaactagacagtgcttggggatcggggagaatgatcctcctccttggctgcacagaatgcgtgagttaggctatcctccgggctacctagatgtggttgacgatgaagatagaccttctggtatcaccatatttggagatggtgaggtgaaactagagtatgaggagggagagctttcagagcaaggcgaagcatctccgcctaagaaaaagatgacagtggaattccctggaataaacgcccccatcccagaaaatggtgatcagtggctgtggggtagcaccccgccccagtcctcaggccgccaccactcattggattcgagggatttccatgatagagggcctcctggcgctgatcattattcaccgagataccactcccacgattttggacctttgcgcccaagcatagggagatcacactcagacagggggtggagaagcccacctcgttatgataatccgcctgcagatgatggtgcctggaccccgcattcataccccagcaggcagcacttgggccattacagctcgagctctgagatgtcgtcacgccattccagggacaaagacagagataggcatgatagcaggcactaccaccaccgcagatgagtcaagcctgtagctgatttgtatcatattcttttgctgaagaatcctctacctgacgcattcgatctgacatagaaatcagtcctgctatagtttcttaagttacgaaatttcctttccttccaatatatttttgcagcagtgctcccaaacccatggtagagagtgaccttatctcgtctggtccgtgagctgtatctgaattatatgactgccttcctcacatatgcaactcttgctccttccttgactgttatgggcctgcttggttcagggactaactaatgtttagtcaggggactaaagttatacctgtttgattac

SEQ ID NO: 5113 - DNA, 4653 bp, Zea mays
  Clone ID: TF_ZmC951_287
ctaagtttggtaaaggtttttctcatctaatgacttggtaaagatatcggctaattgttcttttgtgctaacataagcaatctcgatatcccccctttgttggtgatccctcaaaaagtgataccgaatggctatgtgcttagtgcggctgtgttcaacgagattatccgccatgcggattgcactctcattgtcatataggggagggactttgcttaatttgtagccatagtccctaagggtttgcctcatccaaagtaattgcgcgcaataatgacctgcgacaatatactcggcttcggcggtagaaatagctactgaattttgcttctttgaagcccaagacaccagggatctccctagaaactgacaagtccctgatgtgctcttcctatcaattttacaccctctcgtgtcgaggtcgagatgcccattggttcccatgggtgtcttgatgggcttggcatccttcattccaaacttggtaagtatatcttgaatgtacttagtttggctgatgaaggtgccctcttggagttgcctcacttgaaatcctaggaaatacttcaactcccccatcatcgacatctcgaatttttgaatcataatcctactaaactcttcacaagttgatttgttagtagacccaaatatgatatcatcaacataaatttggcatacaaacaaatcatttgcaatagttttagtaaagagagtaggattagcttttctgactttgaagccattagtgataaggaaatctcttaggcattcataccatgctcttggggcttgcttgagcccataaagcgccttagagagtttatacacatggttagggtactcactatcttcaaagccaggaggttgctcaacatagacttcttccttgattggtccattgaggaaggcacttttcacgtccatttgatagagcttaaagccatggtaagtagcataggcaagtaatatatgaattgactcaagcctagctatgggtgcataggtttcaccaaaatccaaaccttcgacttgtgaatatcccttggccacaagtcgggctttgttccttgtcaccacaacatgctcatcttgcttgttgcggaaaacccactcattccttatgaagttgttgagttcctcttgcattgccaacactcgattcgaatctcttaatgcgtcttccaccctgtatggcctgtacttcttgctcatcttccttttcttgatcattatcatctccccttgatcattgtcctcctcttgaggtggctcatcctcttgatcttcattttcatcatcttgagcttgatcctcatcttgggttggtggagatgcttgcatggaagatgacgcttgatcttgagcttgagtgggctctttggattccttaggacacacatatccaatggacatgttccttagcacgacgcatggagcctcttcatcatctagctcatcaagatcaacttgctccacttgggagccataagtctcatcaaacacaatatcacaagaaacctcaactaatccagtggatttgttgaagactctatatgcccttgtgtttgaatcatatcctagtaaaaaggcttctacagccttaggagcaaatttagattttctacctcttttaacaagaataaagcatttgctaccaaagactctaaaatatgaaacactgggctttttaccggttaggagttcatatgatgtcttcttgatgattcggtggagatacaatcggttgatggcgtagcaggtggtgttgaccgcctcggcccaaaaccgatctgaagttttgtactcatcaagcatggtccttgccatgtccaatagagttctattcttcctctccactacaccattttgttgtggcgtgtagggagaagagaactcatgcttgatgccctcctcctcaaggaagccttcaatttgagagttcttgaactccgtcccgttgtcgcttcggattttcttgatccttaagccgaactcgttttgagccatctcaagaatccttttaaggtctcttgggtatgagatttttccctctaacactcccttaaatgctattgaatcatcacttcttctaaagacagtgacaccttgatttccatccccgaatgtgatagctcgttggggatcttggtttttctcataggaggagaacatctttttctcccttgtcatgtggtttgtgcacccgctatcgatgatccaacttgagcccccggatgcataaaccttgcctgatttgttagttaaaacataggatgcatcaaaagttttaaatgaaatattatgatcatttgatgcaataggagttttctttctaggcaatttagcacgagttgattgcctagaactagatgtctcacccttatacataaaagcatgattagggccagagtgagactttctagagtgaattctcctaatcttgctctcgggataaccggcagggtacaaaatgtaaccctcgttatcctgaggcatgggagccttgccctttacaaagttagacaatctcttaggaggggcgttaagtttgacattgtcccccttttggaagccaatgccatccttgatgccagggcgtctcccattatagagcatgcttctagcaaatttaaaattttcattttctaagtcatgctcattaattttagcattaagttgagctatgtgatcattttgtttcttaattaaagctaggtgatcatgagtagcatcaacattaatgtctctacatctagtgcaaatggaaacatgctcaatggtagatgtagagggtttgcaagaattaagttcaacaatcttagcacgtaaaatatcattcttatctctaagatcagaaatggaagcattgcaaacatctaaatccttagccttagcaatcaaattttcattttcatttctaaggctagcaagagaaacattcaattcttcaatcttagcaagtaaattaacattatcatctctaagattgggaattgaaacataactaacattagaatcaaccttagcaattaatttagcattttcatttctaaggttggcaattatatcaatacaagtgcttagctcactagataatttttcacatttttctacttctagagcgtaagcatttttaaccttaacatgcttcttgttttccttgattaggaagtcctcttgagagtccaagaggtcatccttctcatgaatagcactaattaattcatttaatttttccttttgttgcatgttgaggttggcaaaaagggtgcgcaaattatcctcctcatcacaacagttatcctcatcactagaggtttcatatttagtggaggattttgattttaccttcttccttttgccgttcttggccatgaggcacttgtggccgacgttggggaagaggagtcccttggtgacggcgatgttggcggcgtcctcgtcggaggaggagtcggaggagctctcgtcggagtcccacttgcggcacacatgggcatcgccgcccctcttcttgtggtacctcttcttttctctcctcttgcccttcttgtcttcacccctgtcactatcactagataatagacatttagcaatgaaatgaccgggcttaccacatttgtagcatactttcttggagcggggcttgtaatccttcccccttctttgcttcaggatttggcggaagctcttgatgatgagcgccatttcctcgttgtcgagcttagatgcatcgatgggttgtctacttgatgtagactcctcctttttctcctctgttgccttgaatgcgaccggttgtgctttggacgtggaggggccatctagctcgatgattttctttgagcctttgatcatcaactcaaagctcacaaagtttcctattacctcctcaggagacattagtgtatatctaggattacctaggattaattgaacttgcgtaggattaagaaaaacgagggatcttagaataaccttgaccatctcatggtcatcccatttggtgctcccgaggttgcgcacttgattcaccaaggtcttcaagcggttgtacatggcttgagggtcctcgccttggttgagtcggaacagaccgagctcctcctcgatcgtctcctgcttggtgattttagtcacctcatctccttcgtgcgcggttttaagcacgtcccaaatttccttggcgctctttaacccttgcaccttgttatactcctctcgctgtactccaatctcaacaacatcccaaatgctagtgtggagtgaggttagatgatgcctcattttatcactccacatattataatcttcaccatcaaacataggtggtttgcctagtgggacggaaagtaatggagtacatttggaaatacgtggatagcgtaggggaatcttactaaacttcttgcgctcatggagcttagaagttacggagggcgtgtcggagccggaggtggatggcgacaaagagtcggtctcgtagtagaccaccttcctcatcttcttcttgtcaccgctccaccccgacttgttgtgtgaaggggatcccttcaccttgttggtggactcctcggatggagccttcccatggcttgtagcgggcttctcgccggtcccgaactccctcttggcggatgctcccgacat

SEQ ID NO: 5114 - DNA, 556 bp, Zea mays
  Clone ID: TF_LIB5117-003-Q1-PF1-H3
accttccccactccctccgctgtcacccgcgattccctcctcctctccgccctctacaccgcgattccggacgctctgcgatgcggcctgcagcgccgctcgcccatctccggtttccccggccgccactgttgcggacggcgctcccactccgctacagtcctataaggacgcactgctctccccggctcctcctcatctccaccgtcgccgcctccttgccttcctctcctctccagtcaaaaaactgtgccacaagtgctactccgctgagcacctcgtccgcgattgccgcgaccccgtgcgctgccgtgactgcgggcgttccgggcacttaagctcagcatgtaagttcgagcccctccttcccccgtcccttgtgtcccctgcctctcaccctcctctcccccctcgcaggctctccaacgagcttctccggtctctgtcccgctcccgctcgacctcgccgcccaactcccccatgtcgcgtgctcctccgcgtgagcactggttggaccgctactaccgggaggtcgaggcggagcgcaccatcccc

SEQ ID NO: 5115 - DNA, 5535 bp, Zea mays
  Clone ID: TF_ZmC951_385
tcacttgaagaacacattagtcatagtaatatgaaagagatgatcaaaggtatataactgagctatgtgtgcaaaatatctatataagtttctagaatcaagaatatttagctcatgcctaagtttggtaaatgttttctcatctaaaggcttggtaaagatattggcgagttgttctttggtgttaatgtaagcaatctcgatatctccccgttgttggtgatccctcaaaaaatgatactgaatggctatgtgtttagtgcggctatgctcaacaggattatccgccatgcggattgcactctcattatcacatagaagaggaactttggttaatttataaccatagtccctcagggtttgcctcatccaaagcaattgcgcgcaacaatggcctgcggcaatatactcggcttcggcggaagaaagagctacagaattttgcttctttgaagcccaagacaccagagatcttcccaagaactggcaaggccctgatgtgctctttatatcgatcttacaacccgcccaatcggcatccgaataaccaattaaatcaaaagtggatcccctaggataccaaagcccaaacttaggagtataagccaaatatctcaagattcgttttacaaccgtaaggtgagcttccttagggtcggcttggaatcttgcacacatgcatacggaaagcataatgtccggtcgagatgcacataaatagagtaatgaacctatcatcgaccggtataccttttgatctacggatttaccttccgtgtcgagatcgagatgcccattggttcccatgggtgtcttgatgggcttggcatccttcatcccaaacttgcttagaatgtcttgagtatacttcgtttggctaatgaaggttccctcttggagttgctttacttgaaatcctaagaaatacttcaactcccccatcattgacatctcgaatttctgtgtcatgatcctactaaactcttcacatgtagattcgttagtagacccaaatataatatcatcaacataaatttggcatacaaacaaatcattttcaagtgttttggtaaagagtgtaggatcggcctttccgactttgaatccattagtgataaggaaatttcttaggcattcataccatgctcttggagcttgcttgagcccataaagcgccttagagagtttatacacatggttagggtactcactatcttcaaagacgggaagttgctcaacatagacttcttccttgattggtccgttgaggaaggcactcttcacgtccatttgataaagcttgaagccatggtaggtagcataggctaataatatgcgaattgactcaagcctagctatgggtgcataggtttcaccgaaatccaaaccttcgacttgtgaataccccttggccacaagtcgggctttgttccttgtcaccacaccatgctcatcttgcttgttgcggaagacccatttggttcctacaacattttgattaggacatggaactaaatgccatacctcgttcctagtgaaattgttgagctcctcttgcatcgccaccacccaatccgaatcttgtagtgcttcctctaccctgtgtgactcaataggggaaacaaaagagtaatgctcacaaaaatgtgcaacacgagatctagtggttacccccttatgaatgtcgccgaggatggtgtcgacagggtgatctcgttggattgcttggtgggctcttgggtgtggcggccttggttcttcatcctccttgccttgatcatttgcatctcccccttgatcattgccgtcatcttgaggtggctcatctctttgatctcccccttcatcaacttgagcctcatcctcattttgagttggtggagatgcttgcgtggaggaggatggttgatcttgtgcatttggaggctcttcggattccttaggacacacatccccaatggacatgttccttagcgcgatgcatggagcctcttcatcacctatctcatcaagatcaacttgctctacttgagagccgttagtctcatcaaacacaacgtcacaagaaacttcaacttgtccagaggacttgttaaagactctatatgcccttgtgtttgaatcatatcctagtaaaaagccttctacagtcttaggagcaaatttagattttctacctcttttaacaagaataaagcatttgctaccaaagactctaaaatatgaaatattgggctttttaccggttaggagttcgtatgatgtcttcttgaggattcggtgtagatacaaccggttgatggcgtagcaggcggtgttgaccgcctcggcccaaaaccgatccgaagtcttgtactcatcaagcatggtccttgccatgtccaatagagttctattcttcctctccactacaccattttgttgtggcgtgtagggagaagagaactcatgcttgatgccctcctcctcaagaaagccttcaatttgagagttcttgaactccgtcccgttgtcgcttcttattttcttgatccttaagccgaactcattttgagcccgtctcaagaatccttttaaggtctcttgggtttgagatttttcctgcaaaaagaatacccaagtgaagcgagaataatcatccacaataactagacagtacttactcccgccgatgcttatgtaagctatcgggccgaataggtccatgtgtaggagctccagtggcctgtcagtcgtcatgatgttcttatgcggatgatgaacaccaacttgcttccctgcttggcatgcgctacaaatcctgtctttctcaaaatgaacatttgttaatcctaaaatgtgttctccctttagaagcttatgaagattcttcatcccaacatgggctagtcggcggtgccagagccagcccatgttagtcttagcaattaagcaagtgtcgagttcagctctatcaaaatctaccaagtatagctgaccctctaacactcccttaaatgctattgaatcatcactccttctaaagacagtgacacctttgaccaacccttggtttccatccccgaatgtgatagctctttggggatcttggtttttctcgtaggaggagaacatcttcttctccccagtcatatggtttgtgcacccgctatcgatgatccaacttgagtccccggatgcataaaccttgccggatttgttagttaaaacatacgatgcatcaaaagtcttaaatgagattttagaatcatttgaagcagtaggagtttttttcctaggcaattttgcatgagttgattgcctagagctagatgtctcacccttatacataaaagcatgattagggccagagtgagacttcctagagtgaattctcctaattttgctctcaggataaccgacagggtataaaatgtaaccctcgttgtcctgaggaatgggagccttgcccttaacaaaattagataatcttttaggaggggcattaagtttgacattgtctcccctttggaagccaatgccatccttgatgccagggcgtctcccactataaagcatactacgagcaaatttaaaattttcattttcaagttcatgctcggcaattttagcatctaattttgctatatgatcattttgttgcttaattaagaccatatgatcatgaatagcatcaatatcaacatctctacatctagtgcaaatagaaacatgctcaacggtagatgtagagggtttgcaagtttttagttcaacaatcttagcatgtaaaatatcattctcacttctaagatcggaaatagaagcattgcaaacatctaagtttttagccttagtaagcatttttttcattttcaatcctaaggtagacaatttttcacatttctcaacttctagagcgtaagcatttttgaccttaacatgctttttgttttccttgattaggaagtcctcttgggtgtccaaaagttcatctttttcatggatggcactaattaattcatttaatttttccttttgttgcatgtttaggttggcaaaaagggtacgcaaattatcctcctcatcactagcattatcatcactagaggactcatatttagtggaggatttggatttaaccttcttctttttgccgtcctttgccatgaggcacttgtggccgacgttggggaagagaagtcccttgttgacggcgatgttggcggcgtcctcgtcggaggaggagtcggtggagctctcatcggagtcccactcgtggcacacatgggcatcgccgcccttcttcttgtgatttctcttcttctcctttcttctccccttcttgtcgtcgcccctgtcactgtcactagaaataagacatttagcaataaagtgaccgggcttaccacacttgtagcaaaccttcttggagcagggcttataatccttcccccttctttgcttgaggatttggcggaaactcttgatgatgagcgtcatttcctcgttgtcgagcttggaggcgtcgatgggttgtctacttgatgtagactcctccttcttctcctccgtcgccttgaatgccaccggttgtgcttcgagcgttgaggaggtaccttgctcgatgattttctttgagcctttaatcgttagctcaaagctcacaaattttcctataacctcctcgggagacattagcttatatctaggatcacctcgaattaattgaacttgtgtagggttaagaaatacgagggatctaagaataaccttgaccatctcatggtcatcccatttttcgctcccgaggttgtgcacttgattcaccaaggtcttcaagcggttgtacatggcttgtgggtcctccccttggtgaagcatgaagcgaccgagctccccctcgatcatttcccgcttggtgatttttgtcacctcgtctccttcgtgcgcggtcttgagtacgtcccaaatttccttcgcactctttaacccttgcaccttattatactcctctcgagttagagaggcgaggagtatagtagtggcttgggagttaaagtggtgaatttgggccacttcgtccgagtcatagtcttcatcccctacggatggtacctgtacaccaaactcaacaacattccaaatgcttgtgtggagtgaggttagatgatgcctcattttgtcactccacatattataatcttcaccgtcaaacagtggtggtttgcctaatggaacggagagcaatggagtacgctttgaaatacgggggtagcgtagggggatcttactaaacttcttgcgctcatggcgcttagaagtaatggatgacgcgttggagccagaggtggaaggcgatgaagtatcggtctcgtagtagaccaccttcctcatcttctttttcttgtcgccactccgatgcgacttgtgggaagaggatttcttctccttccccttccccttgttgcgggactcttccgatgaagtcttcccgtggcttgtagtgggcttgtcgccggtctccatctccttcttggcgtgatctcccgacat

SEQ ID NO: 5116 - DNA, 4968 bp, Zea mays
  Clone ID: TF_ZM3738.C1.o1.fg
atgtccggtggggatggacctcctcccgtttttgatggtgacgattttccttattggaaaattcgtatggaagcatacttagaggctatagacattggtgtctataaagccgccacacaaggattccccgaacctagagatcccacaaatcttgtaggtgatgagttcaattatgagaagtggaatgctaaggccaaaaacaccctttttagaggcctttgcaaagatgtgttcaatagagtaagaaatcataaaaatgctcatgatttgtggatggacatttgtgctctacacgaaggaactagaagtgagcgtgaggagagatatcacatagccatgcgaaagttaaattcttttgaaatgcttgctaatgaaaatgcaaatgctatgtactcacgtctaaatattcttgtagaggaagttaatggattggggcttactcaaatctcacaaccggatgttgtgaggaagattctcagtgtcctcccaatagacaaatatggacacattgtcactgtgctacatcaaatggatctttcagttaccacacctacacagattttgggaaagatcaatgcccatgaaatgaagaccaccaagatgttgaagaagctaaatagagaaggcatcaaatttgattcaagaaagaaaaaattcttttccaacaaaagaaagcccatttctgagatggactgctacaactgtggtgagctcggtcatcttgctcatcaatgcaacaagcccaagaagaataagttcaagggcaagaaacaagatgacaacgatgatgaaaagaaggaaaagaaattcttcaagaggaaggatgggaagcaaaagaggttccacaagaagaagaatggaaaggcatatattgttggtgactggctcaccgacattgaatcatcaagtgggtcttcttcaagtgaaaaagagaatgatgaaaaagttgccgccatcgccggggacttctcttcaccaccaccatcgccatcatcgacttctcacatatgcctcatggctaggggtgaacggaaggtacaaaacgatattaatattgttgatgatagtgatagtgatagtgatagtgatgaggaatttgcttcaccttcatatgatgagctagctgacttgcttaaagaatatactcaaatcattagaaagtcaaaagctaaatgtgataggttgaaaaatgaaaatgaatctttaaatgctaaatatgacatagttataaaagctagtgatgaaataaaagaagaaaataaaactatgtcatcaactgtaaatgagctcacaaactccctaaaagatgctaaggaaaaatgtgacaaattaaatgaagctaatagggagttgcaaaatagactagttaaaatcaaggaagactatactcaaattaaatttgatcatgacaatcttcttgttgaaaatgaacttttatcttgcaaaacacatgaggctattaaccctgttgttaagattgatgtagcaacctcatgtgatgatttgagtcaagaagagcaaactagtctacatgctgaattgactgaaaaagttgaagtcctgactttagacaaccaaaaattgaagaattacttgactgatgcaactactagaggaaatgttgctattgagaacaatgatttcaacaatgagttggcagtggataatcaaaggcttaaaatgagtgtgcaaaagttcaacaagggtcaatacctccaaaatgagctgcttatgaacactgtcatgaaaaacaacaggagtggtcattttgcccacaactgcaaagccaaaccgccaacccccttgcctaagcactcaagaccatttgctttcaatgctcattatgttctaagaaaggttgcaaatggaaaggtgaactacaagaccggtgggagccattgggttattgacagtggatgcacacaacatatgacaggcaacccacggatgttcacctcactggatgaaaatgttgatggtcaagataaaatcacatttggagacaattcaaaaggaaaagtgcaaggacttggcaaggtggcaatctcaaatgatctatcaatatcgaatgttctcttagttgcacctttgagcttcaatttattatcagtgggtcaactctgtgatcttggacttcaatgcttattcactccaacagaggttattgtaacaaagatggatgatgaatcaatggtgttcaaaggttttaggtacaacaacctctacttagtggatttcacttcagaagatgcaaacttaagaacttgcctcttcaccaaagcttcacttggatggctctggcataggaggcttgcacatgttgggatgagcacactcaagaaggtattaaagaaagatatggttagaggattaaaggatgtggtgtttgaaaaagacaagccatgcagtgcatgtcaagctggaaagcaagttgctaatacacatcctactaaagctttcatgtcaacatcaaggccactggaactacttcatatggatttatttggacctacaaattatgtaagtgtcggtggcaacctctactgtctagtgattgttgatgacttctcaagatacacttgggtgttctttctccatgacaaatctgaagttgcatctatattcaagaagtttgccaaaaaggcacaaaatgaatttgattgcaagatcaagaagattagaagtgacaatggcaaagaatttgacaacaccaacattcatgagtactgtgatgaaattgggatcaagcatgaagtatctgcaacatacacacctcaacaaaatggagttgttgaaaggaagaacaggaccatgatcactcttgcaagaacaatgattgatgagtataacacaccggagaagttttgggccgaagctgtcaacactgcttgttatgcatcaaacagactatttcctcaccggctacttgagaagactccttatgaactgctaaatgggaaaaagccagacatctctttcttccgggtgtttgggtgcaaatgctacatctacaagaaacaccatcacctagggaagtttcaaagacgttgtgatattggttttcttttgggttattcattaaagtccaaagcatatcgagtattcaaccatgccactggcgtggtagaagaaacatatgatgtggaatttgatgagactaatggctcccaaggagcacttgaaaatcttgatgatgtaggtgatgagccacttagggaagcaatgaagaacatgcctattggagctatcaaaccaaaagaagatgaagaagaggtgcaaatcattgacatgccttcttcatcaaatgtaccacaaaatgatgaaaaagatgagaggcatgcaaatgaagatacatttgtctctcatgaacaagcaagggtacaagccgaagatattgatgctccaggatcttcttcccaagtggttgacaggagaaactcatcactacttcaagctcatcctcaaaaccaaatcatcgagagtccttcacaaggggttattactcgatcacacagacatgcttcttttattgaacatcactcttttgtttcttgtgttgagcctacctgtatagatgaggcgctacaggatccggactgggtgaatgccatgcatgaagaacttaacaacttcacccgtaacgaagtttggaccctggagaagcccccacaagatgcaagaatcattggaacaaagtgggtgttcagaaacaaacaagatgatcaaggtgtgattgtaaggaacaaggcaagacttgtcgcaaagggattctctcaagttgaaggcttagattttggagagacctttgcacctgttgctcgactggaagccatccgtatcctacttgcatatgcatcatgctatgatataaaactttatcaaatggatgtaaaaagtgcatttttaaatggcttcataaatgaacttgtatatgttgagcaaccgcctggatttgaagaccctagatatcctaaccatgcttacaggttgtccaaggcgctttatgggctaaagcaagctccaagggcttggtatgagcgccttcgcgacttcctcatcgaaaagggcttcaagatcgggaccgtcgacacaactctcttcacaaagaaacataacggtgacattttcatttgtcaagtcaagcaaatgaaagatggtaactttctctcacaagagaagtataccaaagacttgttgaaaaggttcaacatggagaagtgcaaaccaatcaagacccccatgcctacaaatggacatctcgacttagatgagggaggtaaccctgttaatcaaactctctaccgttccatgattggtagtttattgtaccttaccgcatctaggcccgatattatgtttagtgtctgcatgtgtgctagattacaatctaatcctaagaaagctcatcttcgcgctgttaagagaattcttaggtatctcaggcacaccacaagcgttggtctgtggtatcccaaaggagctacttttgatttaattggctactccgattcggattatgccggttgcaaaattgataggaaaagtacttctgggggatgccatctgcttggtagatcactagtttcatggacatccaaaaagcaaaacagtgttgccttgtcaactgccgaagcggaatacattgccgcaggtgcttgttgcacacaaattttgtatatgaaacaaactcttctagactatggagtagttctagaaaaggtacctttgttgtgtgataatgagagtgctgttaaaattgctaacaatcctgtacaacactctcgcaccaagcacattgatatccgtcatcacttccttagagatcatgttgctaaaggagatatcattttagaaggagtgaggttggaagatcaattagcggatattttcactaagccacttgataagacccgcttttgcatgttgaggaatgaactaaatattcttgatctcagaaattttatgtaa

SEQ ID NO: 5117 - DNA, 4965 bp, Zea mays
  Clone ID: TF_ZM4509.C5.o5.fg
atgtcgggagctcacgccaagaaggagatggtgaccggcgagaagcccgccacaagccacggtaaggctccatcgggagagtccgacaacaagaagagggaggaatcacctccccgtgtcaagtcgcaccggagtggcgacaagaagaagaaaatgaagaaagtggtctactacaagaccgattcttcgtcgccttccacctccagctccgacgcgtcgtccgtcacttctaagcgccatgagcgcaagaagtttagtaagatccccttacgctatcctcgcatttccaaacgcacccctttactttacgtcccactaggcaaaccaccggaaccatccgtgggggatgaaggctatgactcggacgaggtagcccaaatccggcacttcaactcccaagccactactatactcctcgcctctctaagtcgagaggagtataataaggtgcaagggttgaagagtgccaaagagatttgggacgtgctaaaaaccgcgcacgaaggagacgaggtgaccaagatcaccaagagggaaacgatcgagggggagctcggtcgcttcatgcttcaccaaggggaggagccacaagccatgtacaaccggctcaagaccttggtgaaccaagtgcgcaacctcgggagcaccaaatgggatgaccatgaaatggtcaaggttattcttagatcactcgtttttcttaaccctactcaagtacaattaattcgtggtgatcctagatataaactaatgtctcccgaggaagtgatagggaagtttgtgagctttgagctaatgatcaaaggctccaaacaaatcattgagcgaggcgccacctccacacccgaggtgcaacctgttgccttcaaagcaacggaggagaagaaagaagagtctacatcaagtaggctccccatcgacgcctccaagctcgacaatgaggagatggctttaatcgtcaaaagctttcgccaaatccgcaagcaaaggaggggtaaggactacaagccccgctccaagaatgtttgctacaagtgtggtaagcacggtcatttcattgctaaatgtccattatcaagtgatagtgacagaggcgacgacaagaaggggagaagacaggagaagaagtattacaagaagaagggcggcgatgcccatgtttgtcgggagtgggactccgatgagagctccaccgactcctcctccgacgaggacgcggcaaacatcaccgtcaacaagggtcttctcttccccaacgtcggccacaagtgcctcatggcaaaggacggcaaaaagaagaaggtaaaatctagagcttccactaaatatgcaacatctagtgatgaggctagctctagtgatgatggggatgatttgctcaccctttttgccaacttaaacatgcaacaaaaagaaaaattgaatgaattgattagtgctattcatgagaaggatgaactcttggatagccaagaggacttccttattaaagaaaataagaagcatgttaaagttaaaaatgcttatgctcaggagatagaaaaatgtgaaaaaataactagtgagcaaagcacttgccataacactatttccaaccttagatttgaaaatgataaattgattgctaaggttgagaaattaaatgatagtgatgattctcttgtcaaccttagaaatgataatgctaatttgattgctaagattgacaaattgaatgcatctctctctagccttaaaattgagaatgaaaaattaatttctaagcctaaagattcaaatgtttgcaatgtttctatttccaatcttagagatgagaatgctattttacatgctaagattgttgaattaaatacttgcaaaccctctacatctactgttagtcatgtctctatttgcactagatgtagagatgttaatgttgatgctattcatgatcacattgctatgattaaaaaacaaaatgatcatatagcaaaattagatgctaaagttgccgagcatgaattagagaatgaaaattttaaatttgctcgtagtatgctttatagtgggagacgtcctggcattaacgatggcattggcttccaacagggaggcaatgtcaaactcaatgcccctaaaagattgtctaactttgttaagggcaaggctcccatgcctcaggataacgagggctatattttatatcctgcaggttatcctaaggataagattaggagaattcatgctaagaagactcattctgtttcacaccatgcttttatttataagaatgaggcttctagctctaggcgttctacccatgttaaaatgcctaaaaagaaatctcctattgcattaaatgatcataacatttcatttaagacttttgatgcttcatatgttttaactaacaaatcaggcaaagtagttgccaaatatgttggggccaaacacaagggctcaaagacttgtgtttgggtacccaaggtgcttgtttctaatgtgaaaggacccaagaccgtctgggtttatgcatccgggggctcaagttggatcatcgatatcgggtgcacaaaccacatgaatggggggaaaaggatgttctcctcctacgagaaaaaccatgatccccaaagagctatcacattcggggatggaaatcaaggtgttactatctttagaagaagtgatgattcagtagcatttaagggagtgttagagggtcagctatacttaattgattttaatagagctgaactcgacacttgcttaattgctaagactaacatgagttggctctggcatcgccgactagcccatgttgggatgaagaatcttcacaagcttctaaagggagagcatattttaggactaacaaatgtttattttgagaaagacaggatttgtagcacatgtcaagcaggaaagcaagttggtgttcatcatccacacaagaacatcatgacgaccgacaggccgcttgagctactccacatggatctattcggcccgatcgcttacataagcatcggcgggaaaaccttaaagagattcttgagacgggctcaaaatgagttcggcttaaggatcaaaaagattagaagcgacaacgggacggagttcaagaactcacaaattgaaggctttcttgaggatgagggcatcaagcatgagttctcttctccctacacaccacaacaaaatagtgtagtggagaggaagaatagaactctacttgacatggcgaggaccatgcttgatgagtacaagacctcggaccggttttgggtagaagcagtcaacaccgcttgctacgccatcaaccgtctataccttcaccgaatcctcaagaagacatcatatgaactcctaaccggtaaaaagcccaatgtttcatattttagagtctttggtagcaaatgctttattcttattaaaagaggtagaaaacccaaatttgctcctaaggctgtagaaggctttttacttggttatgactcaaacacaagggcatatagagtctttaacaagtccactcggctagttgaagtttcttgtgatattgtgtttgatgagactaacgactctcaagtagagcaagttgatcttgatgagctagatgatgaagaggctccgtgtgtcgcgctaaggaacatgtccattggggatgtgtgtcccaaggaatccgaagagcctccacatgcacaagatcaaccatcatcttcaaatcaagcatctccacctacccaagatgaggatcaagctcaagatgatgaaaatgaagatcaagaagagccacctcaagaggaggacaataatcaagggggagatgccaatgatcaatataaggaagatgatgagggtcccgcaccaccacaccgaagagtccaccaagcaatacaacgagatcaccccgtgaactccatcctcggcgatattcataagaggagggtggaagatgcattaagagattcagattgggtgttggcgatgcaagaggagctcaacaacttcacgaggaatgaggtatggcatttagttccacgtcctaatcaaaatattgtaggaaccaagtgggtcttccacaacaaacaggatgagcatggtgtggtgacaaggaacaaagctcgacatgtggccaaggaatactcccaagtcgaaggtttggatttcggtgaaacatatgcacccgtagctaggcttgagtcaatttgtatattacttgcttatgctacttaccatggctttaagctttaccaaatggacatgaaaagcgccttcctcaatagaccaatcaaggaggaggtctatgttgagcaacctcccggctttgaagatagtgagtaccctaaccatgtctataaactctctaaggcgctttatgggctcaagcaagccccaagagcatggtatgaatgcctaagagattttcttattgctaatggcttcaaagtcggaaaaaccgatcctactctctttactaaaacaattgcaaatgatttgtttgatcatggttcaaaaattcgagatgtccatgatgggggagttgaagtatttcttaggatttcaagtcaagcaactccaagaggcaccttcattagccaaacgaagtacattcaagacatactcaccaagtttgggatgaaggatgccaagcccatcaagacacccatgggaactaatgggcatctcgacctcgacatgggagggtgtaaaattgatagaaagagcacatcagagacttgccagttcttggaaagatctctggtgtcttgggcttcaaagaaacaaaattttgtagctctttctaccgccgaagccgagtacattgccgcaggccattgttgcacgcaattactttggatgaggcaaacccttagggactatgattacaagttaatcaaagttcctctcctatgtgataatgagagtgcaatccgcatggcggataatcccgtgagcacagccacactaagcacatag

SEQ ID NO: 5118 - DNA, 2194 bp, Zea mays
  Clone ID: TF_ZM4581.C2.o19.fg
atgtcgggagctcacgccaagaaggagatggtgaccggcgagaagcccgccacaagccacggtaaggctccatcgggagagtccgacaacaagaagagggaggaatcacctccccgtgtcaagtcgcaccggagtggcgacaagaagaagaaaatgaagaaagtggtctactacaagaccgattcttcgtcgccttccacctccagctccgacgcgtcgtccgtcacttctaagcgccatgagcgcaagaagtttagtaagatccccttacgctatcctcgcatttccaaacgcacccctttactttacgtcccactaggcaaaccaccggaaccatccgtgggggatgaaggctatgactcggacgaggtagcccaaatccggcacttcaactcccaagccactactatactcctcgcctctctaagtcgagaggagtataataaggtgcaagggttgaagagtgccaaagagatttgggacgtgctaaaaaccgcgcacgaaggagacgaggtgaccaagatcaccaagagggaaacgatcgagggggagctcggtcgcttcatgcttcaccaaggggaggagccacaagccatgtacaaccggctcaagaccttggtgaaccaagtgcgcaacctcgggagcaccaaatgggatgaccatgaaatggtcaaggttattcttagatcactcgtttttcttaaccctactcaagtacaattaattcgtggtgatcctagatataaactaatgtctcccgaggaagtgatagggaagtttgtgagctttgagctaatgatcaaaggctccaaacaaatcattgagcgaggcgccacctccacacccgaggtgcaacctgttgccttcaaagcaacggaggagaagaaagaagagtctacatcaagtaggctccccatcgacgcctccaagctcgacaatgaggagatggctttaatcgtcaaaagctttcgccaaatccgcaagcaaaggaggggtaaggactacaagccccgctccaagaatgtttgctacaagtgtggtaagcacggtcatttcattgctaaatgtccattatcaagtgatagtgacagaggcgacgacaagaaggggagaagacaggagaagaagtattacaagaagaagggcggcgatgcccatgtttgtcgggagtgggactccgatgagagctccaccgactcctcctccgacgaggacgcggcaaacatcaccgtcaacaagggtcttctcttccccaacgtcggccacaagtgcctcatggcaaaggacggcaaaaagaagaaggtaaaatctagagcttccactaaatatgcaacatctagtgatgaggctagctctagtgatgatggggatgatttgctcaccctttttgccaacttaaacatgcaacaaaaagaaaaattgaatgaattgattagtgctattcatgagaaggatgaactcttggatagccaagaggacttccttattaaagaaaataagaagcatgttaaagttaaaaatgcttatgctcaggagatagaaaaatgtgaaaaaataactagtgagcaaagcacttgccataacactatttccaaccttagatttgaaaatgataaattgattgctaaggttgagaaattaaatgatagtgatgattctcttgtcaaccttagaaatgataatgctaatttgattgctaagattgacaaattgaatgcatctctctctagccttaaaattgagaatgaaaaattaatttctaagcctaaagattcaaatgtttgcaatgtttctatttccaatcttagagatgagaatgctattttacatgctaagattgttgaattaaatacttgcaaaccctctacatctactgttagtcatgtctctatttgcactagatgtagagatgttaatgttgatgctattcatgatcacattgctatgattaaaaaacaaaatgatcatatagcaaaattagatgctaaagttgccgagcatgaattagagaatgaaaattttaaatttgctcgtagtatgctttatagtgggagacgtcctggcattaacgatggcattggcttccaacagggaggcaatgtcaaactcaatgcccctaaaagattgtctaactttgttaagggcaaggctcccatgcctcaggataacgagggctatattttatatcctgcag

SEQ ID NO: 5119 - DNA, 1653 bp, Zea mays
  Clone ID: TF_ZM4939.C2.o4.fg
atggatgctcaatttgatgtgactcaagaatggcttgatagggtgaagatagcaaggaaagggcttcgaggaactaagcgaagtctgcaagtcagactggcaaacaggtcgccagaggtgtcaggggaggctcaaccgccctgggggggcggttcaaccgccctagtcaaccctgaccagtctgcagatgttgatcctagggcaatagatcttgccatgaaaatcgccgaaaggatgttcctcaaaatgaaggaagatgaggcgaagaacaagattgaagaagaagaaaatgatcgatggagaccaaacgacgaatccacctcttcacaaggttcatctttcaaatccacttctcatatgtgctttattgctaatgggagtgacagtgaaagcgaaagtgaggatgaggaggagcaagaaagtgatagtgaagatgaggatgatcttcaacaattcttcgctcagctaagcaagaaacatcggatgagcttgcttaaactcatgaaaagagcggaagaacaaaaagaaatgcttcataagcaagaagacttcctcatcagaaaaattgaagacttagagaagttgaccaaagagcatgagaagctaaagtgctctcatgatgatttggtccaaaggtatgaagacatttcaattgagcaaattaaagttgttaatcattcatcatatattgctcaattagaaaataaaaatgctatgttcaagaacacgatagaaaggctaaatattgaaaatctagctttgcaagaaaaacatgatatgcttgtgtgctctcataataaatttatggattcacatatcatgttagaaatggctcatgaggttgtgttaactaatttgaaatcataccaacctcacatgtgcacatgtgttgaaattgaaactatatcaccatgtgctaacaattgttgttatcaagcaagccaatcttccattgagctagaaatttcaggaattagtgatatttctatcacacaagaaaataaagagctcaaggaagaagttggaaggctaagaaggagcttaacacttttgaagggaaagtgtcatgctcaaccttctcacgataaccgtgataatatggtgaaaaagcttgagaaggggacaaccgtagcatgcacaaaaccccttcaaaagaataccaagcttttcaagaagggcatgagcaaaattcatggtaagaaaattaatgatcatactatttgctctaacaatgtgcctatgtgcttcaacaaagaaagatcaaagagaagcgatagaaggtgctatggatgcaaggagaagggtcatgaaattggttcatgcccccacatgaagaacaaagaccttgcacaatcaagaaagatgatcatcaagaaagatgaaagcaaaaggcaaatgcattgcaaggacaagcaccgcatttgctacaattgccgtaaaaaaggtcatctattcaaggtttgtccaaatggtaaaactcctaagcctaacttgtcaatacattcaaatatgcttaggagacccaaatttgactcttgtgctacaaaggtgatgagttcaccacattctaggaccaaggctgtttgggtgcctaagtccttattggctaaccttgatggacccatcatgagatgggtaccaaaatgtacttaa

SEQ ID NO: 5120 - DNA, 4173 bp, Zea mays
  Clone ID: TF_ZM5005.C1.o15.fg
atggaagcatatttagaggctatagacattggtgtctacaaagctgccacacaaggattcctcgaacctagaaatcccacaaatcttgtaggtgatgagtttaattatgagaaatggaatgctaaggccaaaaacaccctttttagaggcctttgcaaagatgtgtttaatagagttagaaatcataaaaatgctcatgatttgtggatggacatttgtgctctacatgaaggaactagaagtgagcgtgaggagagatatcacattgctatgagaaagttaaattcttttgaaatgcttgctaatgaaaatgccaatgctatgtactcacgtctcaatattcttgtagaggaagtaaatggattggggcttacacaaatttcacaacaggatgttgtgaggaagattctcagtgtcctcccaattgacaaatatggacacattgtcattgtactgcatcaaatggatctttcagttaccacacctacacagatattgggaaagatcaatgctcatgatatgtacatgcacatcaatgacaaggatgagtcatattccaagagaaaggatttggctctcaaagcaaatcaagaaagaaaaggaaaagctaaagtacaaattgaggaagaatcctcaagtgatgatgatcttaatgctaacattgccttgatggtgaggaagaccaccaagatgttaaagaagctcaacagagaaggcatcaaatttgattcacgaaagaagaaattcttttccagcaaaagaaagcccatttctgagatggattgctacaactgtggagaacttggtcatcttgctcatcaatgtaacaagcccaagaagaacaagttcaagggcaagaaagaagatgacaacgatgatgagaaaaaggaaaagagattcttcaagaggaaggatgggaagcacaagaggttccacaaaaagaaaaatggaaaggcatatattgttggtgactggctcactgacattgagtcatcaagtggatcttcttcaagtgaagaagagaatgatgaaaaagttgccaccatcgtcgggaacttctcttcaccaccaccatcgccatcatcgacttctcacctatgcctcatggctagaggtgatcggaacatacaaaatgatattgatattactgatgatagtgatagtgatagtgatgaggaatttgcttcaccttcctatgatgaactagctgacttgcttaaagaatacactcaaatcattaggaagtcaaaagctaaatgtgataagttgaaaaatgaaaatgaatctttgaatgctaaatatgacatagataaatgtgacaagttaaatgaagctaatagggagttgaaagatagactagtgaaaatcaaggaagactatactaagattaaatttgataatgataatcttcttgttgaaaatgaacttttatcttacaatacacatgaggctattaaccctgttgttaagattgatgtagcaacctcatgtgatgatttgaatcaaggagagcaaactagtgtacatgatgaattgaccgaaaaagttgaagtcctgactttagacaaccaaaaattgaagagatacttgactgatgcaactactagaggaaaggttgccattgagaacaatgatttcaacaatgagttggcagtggataatgaaaggcttaaaaatgaggtgaactacaagaccggtggcagccattgggttattgacagtggatgcacacaacatatgacaggcaacccacggatgttcacctcacttgatgagaatgttgatggacaagacaaaatcacatttggggacaattcaaaagggaaagttcaaggacttggcaaggtggcaatttcaaatgatctatcaatttcaaatgttctcttggttgcacctttgagcttcaatttattatcagtggggtttagatacaacaatctctacttagtggatttcacctcagaagatgtagacttaagaacttgcctcttcaccaaagcatcacttggatggctttggcataggaggcttgcacatgttgggatgagcacactcaagaaggtattaaagaaggacatggttagaggatcaaaggatgttgtatttgaaaagaacaagccttgtagtgcatgtcaagctgggaagcaagttgctaacacacatcctacaaaagctttcatgtcaacatcaaggccactggaactacttcatatggatttatttggacctacaaattatgtaagtgctggtggcaacctctactgtctggtgattgttgatgatttctcaagatacacttgggtgctatttctccatgataaatctgaagttgcatctatattcaagaagtttgccaagaaggctcaaaatgaatttgattgcaagatcaagaagattagaagtgataatggtaaagaatttgacaacaccaacattcatgagtactgtgatgagattgggatcaagcatgaagtatctgcaacatatacacctcaacaaaatggagttgttgaaaggaaaaataggaccttgatcacacttgcaagaacaatgattgatgagtataacacaccggagaggttttgggccgaagctgtcaacactgcatgttatgcatcaaacaggctatttcctcactggctacttgcgaagactccctatgaactgctaaatgggaaaaagccagacgtctccttccgggtgttcggatgcaaatgctacatctacaagaaacgccatcacctagggaagtttcaaagacgttgtgatattggttttctattgggttattcatttaagtccaaagaatatcgagtattcaatcatgccactggcgtggtagaagaaacatatgatgtggaatttgatgagactaatggctcccaaggagcacttgaaaatcttgatgatgtaggtgatgagccacttagggaagcaatgaagaacatgccaattggagctatcaaaccaaaagaagatgaagaagaggtgcaagacattggtaggccttcttcatcaaatgtaccacaagatgatgaaaaagatgagaggcatgcaaatgaagatacatttgtctctcatgaacaagcaaggcctacatgtatagatgaagcgctacaggatctggactgggtgaacgctatgcatgaagaacttaacaacttcacccataaccaagtttggaccctagagaagcccccacaagatgcaagaatcattggaacaaagtgggtgttcagaaacaaacaagatgatcaaggcgtgattgtaaggaacaaggcaagacttgttgcaaagggattctctcaagttgaaggcttagattttggagagacctttgcaccggttgctcgactggaagccatccgtatcctacttgcatatgcatcatgctatgatataaagctttatcaaatggatgtaaaaagtgcatttttaaatggcttcataaatgaacatgtatatgttgagcaaccacctggatttgaagaccctagatatcctaaccatgcttacagattgtccaaggcgctatatgggctaaagcaagctccaagggcttggtatgagcgtcttcgtgacttcctcatcgaaaagggcttcaagatcgggaccgtcgacacaactctattcacaaagaaacataacggtgatattttcatttgtcaagtatatgttgatgacacaatctttggctcgacaaatgactatcattgcaaggaatttggtgagttgatgtcgaaggagttcaagatgtcaatgattgagaagtataccaaagacttgttgaaaaggttcaacatggagaagtgcaaaccaatcaagacacctatgccaacaaatggaaatcccgacctagatgagggaggtaacccggttaatcaaactctctaccgctctatgattggtagtttattgtatcttaccgcatctaggcctgatatcatgtttagtgtctgcatgtgtgctagatttcaatctaatcctaagaaagttcatcttcgctctattaaaagaattcttaggtatctcaggcacaccctaagcgttggtttgtggtatcccaaaggagctacttttgacttaattgactattccgattcagattatgccggttgcaaaattgatagaaaaagtacttctgggggtgccatttgcttgggagatcactag

SEQ ID NO: 5121 - DNA, 2018 bp, Zea mays
  Clone ID: TF_ZmC4916_457
atggatcctaaggggaagggaattgtgatcaacgacaaggagaaggagtccttcgtcaacgagccaagggatgacaagtccaatgactcgggctcgggccacaagcgaagagatgggaagaagaagaagacaagacgcatcaaggagatcgtctactacgacagcgatgagtcctcttcttcccaaaaggacgacgaccacgacaaacaaaggaaaccggttaattctaacttttcttttgactactctcgtattccgcaaagttcaaattcacatttgctttccattccactcggcaagcccccacactttgatggggaggactacggattttggagccacaaaatgcgtagtcacctattctctctccatcctagcatatgggagattgtagatagtggaatgcactttaatagttcggatagtcctatattcattaatgagcaaatccataagaatgcacaagctactactgttcttctagcctcattgtgcagggatgaatataataaagtgagtggcttggataacgccaagcaaatctgggataccctcaagatctctcatgagggaaatgacgctaccttgctcaccaaaatggagttggtggagggcgagcttggacggttcgcgatgataaggggcgaggagccaactcagacatacaaccggctcaagacccttatcaacaaaataaggagctacggaagcacgcgatggacggaccacgacgtcgtccgactaatgctcaggtcctttaccgttcttgatcctcatttggtgaataatattcgtgagaatcccaggtacaccaaaatgtcgctcgaagaagtcctaggaaaattcgtcagcgggcgaatgatgatcaaggaggcaaggtatgtggacgacgccttgaatggaccgatcaacgagccgcaaccttttgctctcaaagccacagggaacaaggaggcgctacccagcaaggtggcgcaaattgaggcggccggtcttaatgaagaagaaatggccctcattatcaagagattcaagacggtgctaaagggtcgcaatggacagccaagcaagactaagaccaaggggaagcgatcatgcttcaaatgcggtaagcttggtcattttattgctaactgtctcgataatgatagtgaccaggaaaagggaaacaagagggaaaagaagaagcattacaagaaggcaaagggcgaggcgcatctaggcaaggagtgggactcggattgctcctcgtccgactccgacaatgaaggactcgccgccaccgccttcaacaaatcaaccctcttccccaacgagtgtcacacatgccttatggcaagggagaagaaggtatgtactcgcaactctacctatgcttcttcaagtgaggacgaatctagtgatgaggatgaagtagattattcatgtttgttcaagggcttagatagatctaagatagacaaaattaatgaattaattgatgccttgaatgaaaagaatatacttttagaaaagcaagaggatttgttgtatgaagagcatgataaatttgttgaggcacaaaaatcctatgctttagaagttaaaagaaatgaaatgctttcttttgaactatctacttgtcatgaaaccatttctactttgaaaggtgtcaacaatgatttaaatgctaaattagaagtagcaaataaatccaattcttgtgtagaaaatgttgttatttgcaatagatgtaaagactttgatattgatgcttgtagtgaacacatagcttctattgcaaagttaaataatgaagtggctagtcttaatgcccaacttaagactagcaaaagtgaatttgataagttaaaatttgcaagggatgcttacacaataggaagacatccctcaattaaggatggacttggcttcaagagggaagccaagaacttaacaagccataagactcccatctccaccaaggagaaagggaaggctcctgtggctaatagtgttaagaagaatcatgctttcat

SEQ ID NO: 5122 - DNA, 1324 bp, Zea mays
  Clone ID: TF_ZmC8013_1
gcgatctaaaactagtcggcatggtaggttgagcgtgcacatgcagggagtgcgatccgagttagttggagtggtggcgcaggaatcccttaccgttgggcgcgtgcgggtcgtgcggacaaacgcgtcctgcgggcacgacgcagcgcacaggcgcggacatggtggggacccgggtggtggaagggagctctgccccggctatatgtaccacccctctctgctgtaatcgtgctcggggtgtccaggaaataaaggccaacatacaggcgagggagagcttctcgccggggcgttcgtcggccatatccactgttcatctccttcctctcagtgttctctgctttctagggtgtgagcgctctttcttgagtgagagggtccaacatttggtaccagagctaggatggagacgccgccggcaaaggatggcctcaagatgttcgacggcatgggctcgacgagtgccgcgatggagcgcgtcatcaacagcagctccgttgagctcccgctgctgaccaaggcgaattaccacgagtgggcgttggttatgcaggtctcgctggaggcgatggaactgtgggacgcggtggaggccgtgtgcaaggagcgtcccaaggatcggcgggcaatggccgccatcctgcgcggagtgccgccggagatgaaggcggggctcgccgtgaagaagacggcgaaagaagcgtgggaggcggtgaggtcgatgaggatcggcgatgaccgggtgaaggccgcgagcgtgcaacgcttgtggaaagagtacgagaacgtcggtttctgtgatggtgagagcgtcggcgacttcgcgttgcggatcaacggcctcgtcgcaagccttcgagagatgggcgagacgctggaggaccaccgcgtcgtgaagaagatcctccgcgtcgtccccaaacgtctcaagcaggtggccgtggcgatcgagatgctcaccgacctcaacacgacgacgattgaagagctcgtcggccgactacgcgttgcggaggacgccgacgcggacgacgccaaggcgaaggaggtctccacggagggcgtcgggcagctgttgctcactgaggcacagtgggaggcgcggcgtcgggaacggaacaagcagcgcaagccccgtgacggtgacaagaggcgcggcaatggcgatcgcggcaacaacggagacgatgagcacagcgacggcgacgacgatgcgagcagcatggcctcgggttcaagccggagaggctggagccgcaacaagggccagtgcttcgagtgcggcggctatggtcacatcgcccggttctgccgtgagaag

SEQ ID NO: 5123 - DNA, 1185 bp, Zea mays
  Clone ID: TF_ZM4488.C6.o1.fg
atggggatgatccgcaagattaatctaatgggtgtgcccttgcaggtcgaagatattctctttaacattgataggaaaaagcaaagaaagagaggatgcctcgcatgtggggagaagggccactttagggacagctgtccaactatggccaaacccaaaaaggagaggagcagaggcaaggcgctaacaagtgttagaacttgggatgattcttcaagtgaagatgaacctccaaggacgcgcagccactggtcctcatcacgctcatcacgatcatcacacaaatgccttatggcaagaggtaacaaaagcattccatcctctagtgatgaaaatagtagtgatgatgaaggtttgctagaaaattttgaaacttttgcaaacttaaatagtgagttgtcaactaaaattgagctattagagtctagtgttccatccaatactgctgatgatgaccttattaaaaagaatgaaaaacttaaggctaagttagctagctcccaaaatactattgaaaatttgctagagaaaatggaaattcttagcatacataatgatgagctaactactaagctagaaaacattggtagcaccccaggagcatctttagttaaaattctcgaaattattaaaaaggatgcttctacttcttgctttgatttaatggatgatactaacccctgcaaccaagttcttgttgagaatattgttatagaaacatgttcggatgaggttgcaaaggaaaatgagcaattaaggcaagaagtggctcgtcttggcaaggctttgtatgacaagaaaggcaaagccaaacaaatccaacttccacagtataacactactgcgggagtgaacaagcctatggagggagaaactgtgatttgtaggttatgtcacaaggaaagccacaagtctttccaatgcaagacgatgaccggggataagccaaggcaaaagctcaagcaaaagccatcaagcaaaatctccaacacctacatcaaaaaggtggacaaaaagactgctacaccatatttgatcaagaagaaaaagaatggaaaggtgatagcaatcaaggccaacaagcaagccaacaaaggaaagggggccaaacgcatctgggtgccaaaggaaataatttcaaccatgaaaagcaccaagaaggtttggatcccgaaagggaagtaa

SEQ ID NO: 5124 - DNA, 4452 bp, Zea mays
  Clone ID: TF_ZmC951_363
tcaatcaaaattcctagaatcaagaatatttagctcatgcctaagtttggtaaatgtttgctcatctaatggcttggtaaagatatctgctaattgttctttggtgttaacatatgcaatcttgatatcccccttttgttggtgatcccttaaaaaatgataccgaatggctatgtgtttagtgcggctatgttcaacgggattatccgctatgcggattgcactctcattatcacatagaagaggaactttggttaatttgtaaccatagtccctaagggtttgcctcatccaaagcaattgcgcgcaacaatggcctgcggcaatgtactcggcttcggcggtataaagagcgacagaattttgcttctttgaagcccaagacaccagagatcttcccaagaactgacaagtccctgatgtgctctttctattaattttacaccctcctgtgtcgaggtcgagatgcccattagttcccatgggtgtcttgatgggcttggcatccttcatcccaaactttgtgagtatgtcttgaatgtacttcgtttggctaatgaaggtgccctcttggagttgctttacttgaaatcccaagaaatacttcaactcccccatcatcgacatctcaattttttgtgtcatgatcctactaaacttatcttcaaagccgggaggttgctcaacatagacctcctccttgattggtccatttaggaaggcacttttcacgtccatttgataaagcttattccttgtgaagttgttgagctcctcttgcatcgccagcacccaatccgaatcttgaagtgcttcctctaccctgtgtggcatcatcatcttccttgtcttgattattaacatctccccttgatcattgccctcctcttgaggtggctcatcttcttgatcttctccttcatcattttgagcctcactctcatcttgagttggtggggatgcttgcatgggggaagatggttgatcttgtgcttgtggaggctcttcggattccttaggacacacatccccaatagacatgttccttagagtgacgcacggagcctcttcatcatctagctcatcaagatcaacttgctttacttgagagctgttagtttcatcaaacacaatgtcacaagaaacttcaactagtccagtggacttgttaaagactctatatgcccttgtgtttgaatcaaaaccaagtaaaaagccttctacagccttaggagcaaatttagattttctacctcttttaacaagaataaagcatttgctaccaaagactctaaaatatgaaacattgggctttttaccggttaggagttcataagatgtcttcttgaggattcgatgaagatataaccggttgatggcgtagcaagcggtgttgaccgcctcggcccaaaaccgatctgaagtcttgtactcatcaagcatggtccttgccatgtccaatagagttctattcttcctctccactacaccattttgttgtggcgtgtagagagaagagaactcatgcttgatgccctcctcctcaagaaagccttcaatttgagagttcttgaactgcgtcccgttgtcgcttcttatcttcttgatacttaatccgaactcattttgagcccgtctcaagaatccctttaaggtctcttgggtttgagatttttcttgcttccctgcttgacatgcgctacaaaccctgtctttctcaaaatgaacattggttagtcccaaaatgtgctctccctttataagcttatgaagattcttcatccccatatgggctagtcggcggtgccagagccaacccatgttagtcttagcaattaagcaagtgtcgagttcagctctatcaaaatctactaagtatagctgaccctctaacactcccttaaatgctactgaatcatcacttcttctaaagacagtaacaccttgatttccatccccgaatgtgatagctcgttggggatcttggtttttctcataggaggagaacatattctcccctgtcatatggtttgtgcactcgctatcgatgatccaacttgagcccccggatgcataaaccttgggtacccaaacacaagtctttgacccgttgtgtttgcccccagcatatttggcaactactttgcctgatttgttagttagcacataagatgcatcaaaagtcttgaatgaaatgttatgatcatttgatgcaataggagttttcttcttaggcaatttagcatgagtagattgcctagaactagatgcctcactcttgtacataaaatcatgattagggccagagtgagacttcctatagtgaattctcctaattttgtgctcaggataaccggcagggtacaaaatgtaaccctcgttattctgaggcatgggagccttgcccttaacaaagttagataatcttttaggaggggcattgagtttgacattgcctccctgttggaagccaatgccatccttaatgccagggcatctcccactatagagcatactacgagcaaatttaaaattttcattttctaactcatgctcggcaattttagcatctaattttgctatatgatcattttgttgtttaatcatagcaatgtgatcatggatagcgtcaatgttaacatctctacatttagtgcaaatagtaacatgctcaatggtagatgtagagggtttgcaagaatttaattcaacaatcttagcatgtaatatggcattttcatctctaagattggaaatggaaacattgcaaacatttaattccttagccttagcaattaatttctcattctcatttctaaggctagcaagagaggcatttaatttttcaatcttagcaattgaactagcattatcatttctaagattgacaattgaatcatcacaaatatttgacttctcaaccttagcaattagtttggcattttcatttctaaggttggaaataacatcatggcaagtgcttagctcactagataatttttcacattttctaattaggaagtcctcttggctatccaagagttcatccttctcatgaatagcactaattaattcatttaatttttccttttgttgcatgtttaagttggcaaaaaggatgagcaaattatcctcatcatcactagaattatcctcatctctagaagtttcatacttagtggaggattttgattttaccttcttccttttgtcgtcctttgccatgaggcatttgtggccgacgttggggaagagaaggcctttggtgatggcgatgtttgcggcgtcctcgtcggaggaggagtcgatggagctctcgtcggagtcccattcccggcaaacatgggcatcgccgcccttcttcttatagtatctcttcttctccttcttcttccccctcttgtcgttatccctgtcactatcactagacaaaggacatttagcgataaaatgactgggcttaccacacttgtagcaaactttcttggagcgagacttgtagtccttccccctcctttgcttgaggatttggcgaaagctcttgatgatgagcgtcatttcctcgttgtcgagcttggaggcgtcgatcgggaccctactaggtgtagagtcttctttcttctcctccgttgccttgaatgcaacgggttgtacatcgggtgtggaggaggcgccttgctcgatgattttcttggagcctttgattatcaactcaaagctcacaaattttcctattacttcctcgggagacattagtgtgtatctaggatcaccatgaattaattgaacttgcatagggttaaggaaaacgagtgatctaagaataaccttgaccatttcatggtcatcccattttgtgctcccgaggttgcgcacttggttcaccaaggtcttgagccggttgtacatcacttgtggctcctccccttggtaaagcatgaagcgaccgagctccccctcgatcgtctcccgcttggtgatcttggtcacctcgtctccttcgtgcacggtcttgagcacgtcccaaatttcctttgcgttcttcaacccttgcaccttattatactcctctcgacttagagaggcgaggagtatagtagtggcttgggagttgaagtgttggatttgttcgacctcctccgagtcgtaatccttttctcccttctttggtacctgcgctccatactcaacaatatcccatatgcttttgtggagtgaggttaggtgatgcctcattttatcactccacatagaataatcttcaccttctagcataggtggtttgcctaatgcaacggaaagtaatggagtgcgttttgaaatgcgaggatagcgaaggggcatcttactatacttcttgcgctcatggcgcttagaagatgcggatgccgatttcgagccggaggtggagggtgacaaagagtcggtctcgtagtagaccaccttcttcat

SEQ ID NO: 5125 - DNA, 3267 bp, Zea mays
  Clone ID: TF_ZM4578.C3.o6.fg
atgtacaaccggctcaagaccttggtcaaccaagtgtgcaacctcgggagcaccaaatgggatgaccatgaaatggtcaaggttattcttagatcactcatttttcttaaccctactcaagtacaattaattcatggtgatcctagatataaactaatgtctcccgaggaagtgataggaaagtttgtgagctttgagttaatgatcaaatgctccaaacaaatcatcgagcgaggcgccacctccacacccgaggtgcaacccgtcgccttcaaagcgatggaggagaagaaggaagagtatacatcaagtaggctccccatcgacgcctccaagctcgacaatgaggagatggctttaattattaaaagctttcgccaaatactcaagcaaaggaaggagagagattacaagccccattccaagaaggtgtgctacaagtgtggtaagcccagtcatttcattgctaaatgtccattatcaagtgatagtgataggggcgacgacaagaagggaagaaggaaggagaagaagaagtattacaagaagaagggcggcgacgcccatgtttgccgggagtgggactccgatgagagctccaccgactcctcctttgacgaggacaccgcaaacatcgccttcaacaaaggtctcctcttccccaacgtcggccacaagtgcctcatggcaagggatgacaaaatgaagataaaatctagagcctccactaaatacgcgacatctagtgaggaggagaactctagtgatgatgaggataatttacttgccctttttaccaacctcaacatgcaacaaaaagaaaaactaaatgaattgatagcgggtgttactgtctttagaagaagtgatgattcagtagcatttaagggagtattagagggtcagctatacttagttgattttaatagagctgaactcgacacttgcttaattgctaagactaacatgggttggctctggcatcgccgactagctcacgttgggatgaagaatcttcataagcttctaaagggagagcacattttgggactaacaaatgttcattttgagaaagacaggatttgtagcgcatgtcaagcaggaaagcaagttggtgttcatcatccacacaagaacatcatgacgaccgacaggccgcttgagctactccacatggacctattcggcctgatcgcttacataagcatcggcgggagtaagtactgtctagttattgtggatgactattctcgcttcacttgggtgttctttttgcaggaaaaatctcaaacccaagagaccttaaagggattcttaagacggactcaaaacgagttcggtttaagaatcaagaaaataagaagcaacaatgggacggagttcaagaactcacaaatagaaggcttccttgaggatgagggcatcaagcatgagttctcttctccctacacaccacaacaaaatggtgtagtggagaggaagaatagaactctacttgacatggcgaggaccatgcttgatgagtacaagacctcggaccggttttgggcggaagcagtcaacatcgcttgctactccatcaaccgactctatcttcaccgaatcatcaagaagacatcatatgaactcctcaccggtaaaaagcccaatgtttcatattttagagtctttggtagcaaatgctttattcttgttaaaagaggtagaaaatctaaatttgctcctaaggctgtaaaaggctttttacttggttatgattcaaacacaagggcatatagagtctttaacaagtccactggactagttgaagtttcttgtgacattgtgtttgatgagactaacggctctcaagtagagcaagttgatcttgatgagctagatgatgaagaggctccgtgcatcgcgctaaggaacatgtccattggggatgtgtgtcctaaggaatccgaagagcctccacatgcacaagatcaaccatcatcttcaaatcaagcatctccaccaacccaagatgaggatcaagctcaagatgatgagaatgaggatcaagaagatgagccacctcaagaggagggcaatgatcaagggggagatgcccatgatcaagacaaggaagatgatgagggtccaagaccgccacacccaagagtccaccaagtgatacaacgagatcaccctgtgaactccatcctcagcaatattcataagggggtaaccactcgatcttgtgtcgctcatttttgtgaacattactcctttgtgtcttctattgagccatacagggtggaagatgcattatgggatttggattgggtgttggcaatgcaagaggagctcaacaacttcacgaggaatgaggtatggcatttagttccacgtcctaatcaaaatgttgtaggaaccaagtgggtcttccacaacaagcaagatgagcatggtgtggtgacaaggaacaaagcccaacttgtggccaaaggatattcacaagtcgaaggtttggatttcggtgaaacttatgcacccgtagctaggcttgagtcaattcgtatattacttgcctatgcttcttaccatggctttaagctttaccaaatggacgtgaaaagtgccttcctcaatggaccaatcaaggaggaggtctatgttgagcaacctcccggctttgaagataatgtctatgatgggggagttgaagtatttctaggatttcaagtgaagcaactccaagagggtaccttcattagccaaacgaagtacactcaagacatactcaccaagtttgggatgaaggatgtcaagcccatcaagacacccatgggaaccaatgggcatctcgacctcaacacgggaggatgcaaaattgatagaaagagcacatcaaggacttgtcagttcttgggaagatccctggtatcttgggcttcaaagaagcaaaattcagtagctctttctaccgccgaagccgagtatattgccgcaggccattgttgcgcgcaattactttggatgaggcaaacccttagggactatggttacaaattaaccaaagttcctctcctatgtgataatgagagtgcaatccgcatggcggataatcccgttgagcacagccgcactaaacacatagccattcagtatcactttttgcgggatcaccaacaaaggggggatatcgagattgcatatgttagcaccaaagaacaattagccgatatctttaccaagccactagatgagaaaacttttacaaacttaggcatgagctaa

SEQ ID NO: 5126 - DNA, 1287 bp, Zea mays
  Clone ID: TF_ZM4590.C5.o1.fg
atgtcgggagatcacgccaagaaggagatggagaccggcgaaaagcccactacaagccacgggagcacttcatcggaagagtcccgcactaagaggaaggagaagaagaaggactcctccaaaggaaaggagaagagatcttcttcacaccacaaagagaagaaggagaaatcctcttcccacaagccgcatcggagtggggacaagaaaaagaggatgaggaaggtggtctactacgagaccgattcttcatcggcatccacatccggctccgacgcggcgtccgtcacttctaaacgccaagagcgtaagaagtatagggatgaaaactatgatgaggatgaagtagcccaaatcgagcacttcaactcccaagccacaaccatattcctcgcctctctaagtagagaggagtataacaaggtgcaagggttgaagaatgcgaaggagatttgggatctactcaagaccgcgcacgagggtgatgaactcaccaagatcaccaagcgggaaacgatcgagggggagctcggttgcttccgtcttcgccaaggggaggagccacaggatatgtacaaccggctcaaaaccttggtgaaccaagtgcgcaacctcgggagcaagaaatggaatgaccacgaggtggttaaggttattcttagatcactcatcttccttaaccccactcaagttcaattaattcgtggtaatcctagatacacactaatgactcccgaggaagttatcgggaattttgtgagctttgaatgtatgatcaagggctcaaaaaagaacaacgagcttgatgatccctccacatccgaagcacaaccggtggcattcaaggcgacggaggagaagaagaaggagtctacaccaagtagacaaccaatcgacgcttcaaagctcgacaacgaggagatggctttaatcatcaaaagctttcgccaaatcctcaagcaacggaagaggaaggattacaaatcccgttccaagaaggtttgctacaagtgtggtaagcccagtcactttattgctaaatgtccattatcaagtgacagtgacagggataacgacaagaagggcaagaggagagaaaagaagaggtaccacaagaagaggggcggcgatgcccacgtatgccgcgagtgggactctgacgagagctccaccgactcctccgacgacgaggacgccgccaacatcgccgtcaccaagggactcctcttccccaacgtcggccacaagtgtctcatggcaaaggacggcaaaaggaagaagccttaa

SEQ ID NO: 5127 - DNA, 3990 bp, Zea mays
  Clone ID: TF_ZM4903.C2.o1.fg
atgagggagatcgagaccggtgacaagtccgcaagcttgggaagaacacactcaagggagtctgcccacaagcacaaggaggaatcctcttcctccatcaagtcccaacggaagggcaaaccacctatgtttgatggtgaatattattctatgtggattgataaaatgaggcatcacctaacctcactccacaaaagcatatgggatattgttgagtatggagcgcaggtaccaaaggaaggggacaatgattgtgattcggaggaggtcaaacaaatccaacacttcaactcccaagccactactatactccttgcctctctaagtcgagaggagtataataaagtgcaagggttgaagagtgcaaaggagatttgggacgtgctcaagaccgcgcacgaaggatacgaggtgaccaagatcaccaagagggagacgatcgagggggagctcggtcgattcatgcttcaccaaggggaggagccacaagcgatgtacaaccggctcaagaccttggtgaaccaagtgcgcaacctcgggagcaccaaatgggatgaccatgagatggtcaaggttattcttagatcactcgtttttcttaaccctacacaagttcaattaattcgtggtgatccaaggtataaactaatgtctcccaaggaagtgataggaaaatttgtgagctttgaattgatgatcaaaggctccaagaaaatcatcgagcaaggcgccacctcaacacccgaggtacaacccgtcgcattcaaggcgacgaaagaagagaagaaggattctacaccaagtaggattcccatcgacgcctccaagctcgacaacgaggaaatgtcgctcatcatcaagagctttcgccaaatcctcaagcaaaggagggggaaggactacaagccccgctccaagaaagtttgctacaagtgtggtaagcccagtcattttatcgctaaatgtcctttgtctagtgatagtgacaggggcgacgacaagaagggaaagagaagagaaaagaagagctccaccgactcctcctccgatgaggacgccgcaaacatcaccgtcaccaaaggccttctcttccccaatgtcggccacaagtgcctcatggaaaaggacggcaagaagaagaaggtaaaatctagatcctccactaagtatgcaacttctagtgatgaggataattgtagtgacgatgaggacaacttgcttattctttttgccaatcttaacatgcaacaaaaggaaaaattaaatgaattgattagtgttattcatgagaaggatgaactcttggatagccaagaggatttccttattaaggaaaacaaaaaacatgttaagactaaaaatgcttatgctcaggaggtagagaaaaataaaaaattaactagtgagcttagcacttgccatgacactatttctagccttagaaatgaaaatgctaaattaattgctaacgttgagaagttagatgtttgtgatgattcaattgttaatcttagaaatgataatgctagtttaattgctaagattgataagttgaatgcatccctcactagccttaaatttgagaatgaaaaattaattgctaaggctaaagatttaaatgtttgcaatgtttctatttccaatcttagagatgagaatgctattttacatgctaagattgttgaattaaatatttgcaaaccctctacatctactgttgagcatgtttatgcatccgggggctcaagttggatcatcgatagcgggtgcacaaaccacatgacaggggagaaaaggatgttctcctcctatgagaaaaaccaagatccccaacgagctatcacattcggggatggaaatcaaggtgttactgtctttagaagaagtgatggttcagtagcatttaagggagtgttagagggtcagctatacttagttgattttaatagagttgaactcgacacttgcttaattgctaagactaacatgggttggctctggcatcgccgactagcccacgttgggatgaagaatcttcacaagcttctaaagggagagcacattttgggactaaccaatgttcattttgagaaagacagggaaaaatctcaaacccaagagactttaaagagattcttgagacgggctcaaaatgagttcagcttgaggatcaagacaataagaagcgacaacgggacggagttcaagaactcacaaatcgaaggctttcttgaggaggagggcatcaagcatgagttctcttctccctacacgccacaacaaaatggtgtagtgaagaggaagaatagaactccattggacatggcaaggaccatgcttgatgaatacaagacttcggatcggttttgggccgaggcggtcaacaccgcttgctacgccatcaaccggaatatgtccattggagatgtgtgtcctaaagaatccaaagagcctccacatgcacaagatcaaccatcttcctcaatgcaagcatttcaaccaactcaagatgaggatcaagctcaagatgatgaagatgaagatcaagaggagccacctcaagaggaggacaatgatcaagggggagatgctaatgatcaagacaaggaagatgatgagggtccaagaccgccacacccaagagtccaccaggcgattcaaagagataaccccatgaacaccatcctcggcgatattcataaggggccacacagggtagaggaagcacatcaagattcggattgggtgctggcgatgcaagaggagctcaacaacttcacaaggaatgaggtatggcatttagttccacgtcctaaccaaaatgttgtaggaaccaagtgggtcttcagcaacaagcaagatgagcatggtgtggtgacaaggaacaaaccccaacttgtggccaagggatattcacaagtcgaaggtttggatttcggtgaaacctatgcacccgtagctaggcttaagtcaattcgcattttacttgcctatgctacttaccatggcttcaagctttatcaaatggacgtgaagagtgccttcctcaatggaccaatcaaggaggaggtctatgttgagcaacctcccggctttgaagatagtgagtaccctaatcacatctacaaactctctaaggcgctttatgggctcaagcaagccccaagggcatggtatgaatgcctaagagattttcttatcgctaatggcttcaaagtcggaaaatccgatcctactctattcactaaaactattgcaaatgatttgtttgtatgccaaatttatgttgatgatatcatatttgagtctactaacaaatctacttgtgaagaatttagtaggatcatgattcaaaaattcgagatgtcaatgatgggggaattgaagtattttctaggctttcaagccaagcaactccaagaaggcaccttcattagccaaacaaagtacattcaagacattcttgcaaagtttgggatgaaggatgccaagcccatcaagacacccatgggaaccaatgggcatctcgacctcgacacgggagggtgtaagattgatagaaagagcacatcagggacttgccagttcttgggaagatctctggtgtcttgggcttcaaagaaacaaaattctgtagctctttctaccgccgaagtcgagtatattgtcgtaggccattgttgcgcgcaattactttggatgaggcaaacccttagggactatggttacaagttaaccaaagttcctctcctatgtgataatgagagtgcaatccgcatggcggataatcccgttgagcacagccgcactaaacacatagtcattcggtatcactttttgagggatcaccaacaacggggggatatcgagattgcttatattaacaccaaagaacaattagccgatatctttaccaagccactagatgagaaaacatttaccaaacttaggcatgagctaaatattcttgattctaggaattttgattga

SEQ ID NO: 5128 - DNA, 1395 bp, Zea mays
  Clone ID: TF_ZM4983.C2.o13.fg
atggctcgaagaagatcccaaaagaacaagaagacacctccgaagaaaaacaatgaggtaactcttgaggtattactttccgattgttctaattatgcttcatggtccactagggtgataaatgcttttagaaccatagactcacaattagaacaagttttagacaagagtattataccctctaattatgataaggaaaatgcttccgaggaagatcaaagatgtatacgcttaaactatcttgcttatgacatcttaagtaattctcttagcaaagaagattatcgtgccttcataatgaattataatgaatatattcctgatgcgcatggtatttggacaagaattaaaagtaaatttaatgagtccaaacatattagttcatatgatgcttatacttcctttagtccttgtgaaactaaccctttgaaggaagaagaagaaaatgaacgttggagactaaacgatgaatccacctctccaaaagaaaacttaaaatcccaacaacctcactcatgcacatgtattcaaattgaaactatattaccatgtgctaatgcttgttgctcgtcaacaagcaaatcctcctttgagctagaattttcaggaacaaaagatgatacatgtcaagagctcaaggaagaaaatgagaagctaaggacgagcttgacacaactaaaagggaagtgcactgcccaaccttctcaagataaccgtgattacatggtgaaaaagcttgagacgggaacaactgtggcatgcacaaaatccctcgaagaaaaagtcaaggacttgaggattgtcaagagtaaagaacaaaagaagaaaatcaatacctctgccaaaagcctcaaccatgcctccatgcaaggtaacatccaaggtaatgatcaagccacacttcacactaagaaaagtaagaagtgtagtgaatgctttgaaaatgggcacttgattaggtcatgtccctatattaaagaaaatggcttgattattaacaaggatgataaacattgttttagatgctctaagaagggacatttagttaagtcatgtccctatgaagaacaaaaatgcatagttttagaaaagaaaatatttactaaccatgtagcaagcaagaaacaaggaaagaagaaatcttcaagatatgatgatcgcctttggtacatatgccgaaagaaaggacatcaatgtaaggattgtcctattggtaactatcccgcccccaacttgtcaattgattcatatgtaactaggcaatccaaaattgcaacttgtgctagaaaggtaatgagtttaccaagtgctagcacaaaggacatctgggttcctagatctctgatgactaaccttgatggacccatcaagagatggggaccaaaatatgcatga

SEQ ID NO: 5129 - DNA, 372 bp, Zea mays
  Clone ID: TF_ZmC14166_328
tagatacaaacagatgtcccccgaggaggtgattggcaagttcatgagctttgaacttatgatcaaagactccaaacacattgtcaacttggagtaaggcgccaccttcacacctgaggtgcaacccgttgcattcaaagcaacagaagagaagaaggaagagtctacaccaagtagactcccaatcaacccctccaagcttgataatgaggaaatgactcttatcatcaagatcttctggtaaatcctcaagcaaagaaaggggaagcccgctttaagagggtttgctacaggtgtggtaagtccggtcactttatcgctaaatgtccatatacaagtgacagtgatagggacgacgacaagaaagggaag

SEQ ID NO: 5130 - DNA, 4569 bp, Zea mays
  Clone ID: TF_ZmC951_355
ttaaaatcctaagaaatacttcaactcccccatcatagacatctcgaatttttgaatcatgatcctactaaactcttcacaagtagatttgttagtagacccaaatatgatatcatcaacataaatttggcatacaaacaaatcatttgcaatggttttagtaaagagagtaggatcggctttgccgactttgaagccattagtgataagaaaatctcttaggcattcataccatgctcttggggcttgcttgagcccataaagcaccttagagagtttgtaaacatgattagggtactcactatctttaaagccgggaggttgctcaacatagacctcctccttgattggttcattgaggaaggcactcttcacgtccatttgataaagcttgaagccgtggtaaatagcataggcaagtaatatgcgaattgactcaagcctagctatgggtgcataggtttcaccgaaatccaaaccttcgacttgtgagtatcccttggctacaagtcgggctttgttccttgtcaccacaccatgctcatcttgcttgttgtggaagacccacttggtccctacaacattttggttagcatgtggaacaagatgccatacctcattcctcgtgaagttgttgagttcctcttgcattgccaacaaccaatccgaatcccttaatgcgtctttcaccctgtatggatcaatagaagacacaaaggagtaatattcacaaaaatgagcgacacgagatcgagtggttacccccttataaatatcgccgaggagggagttcacgaggtgatcttgttgtatctcttggtggactcttgggtgtggcggtcttggaccctcatcatcttccttgttttgatcattggcatctcccccttgatcattgtcctcctcttgaggcagcttttcttgatcttcattttcatcatcttgggcttgatcctcatcttgagttggtggagatgcttgtatggaagaagatggttgatcttgtgcttgtggaggctcttcggattctttaggacacacatccccaatggacatgttccttagcgcgacgcatggagcctcttcatcatctagctcatcaagatcaacttgctctacttgagagccattagtctcatcaaacacaatgtcacaagatacttcaactagtccagtggacttgttaaagactctatatgcccttgtgtttgagtcataaccaagtaaaaagtcttctacatccttaggagcaaatttagattttctacctcttttaacaagaataaagcatttgctaccaaagactctaaaatatgaaacattgggctttttaccggtgaggagttcataagatgtcttcttgaggattcggtgaaggtagagacggttgatggcgtagcaagcggtgttgattgcttccgcccaaaaccgatccgaggtcttgtactcatcaagcatggtcctcgctaagtcaagtagagttctattcttcctctccactacaccattttgttgaggtgtgtagggagaagaaaactcatgcttgatgccctcgtcctcaagaaagccttcaatttgagagttcttgaactccgttccattgtcgcttctaatctttttgatccttaagccgaactcattttgagcccatctcaagaatccctttaaggtctcttgggtttgagatttttccctgtctttctcaaaatgaacatttgttagtcctaaaatgtgctctccctttagaagcttgtgaagattcttcatcccaacatgggctagtcggcgatgccagagccaacccatattagtcttagcaattaagcaagtgtcgagttcagctctattgaaatcaactaagtatagctgaccctccaacactcccttaaatgctactgaatcatcacttcttgtaaagacagtaacacctatatcttgatttccatccccgaatgtgatagctctttggggatcatggtttttctcataggaggagaacatccttttctcccctgtcatatggtttgtgcacccgctatcaatgatccaacttgagcccccggatgcataaaccttgggtacccaaacacaagtctttgagcccttgtgtttggccccaacatatttggcaactactttgcctgatttgttagttaaaacatatgaagcatcaaaagtcttaaatgaaatgttatgatcatttgatgcagtaggagttttctttttaggaaatttagcatgagtggattgcctaaaactagatgcctcactcttatacataaaagcatgatgagagccagagtgagacttcctagaatgaattctcctaatcttatgttcgggataaccagcaggatataaaatgtatccctcgttatcctgaaccatgggagctttgcccttaacaaagttggacaatttcttaggggcattaagcttgacattgtctccctgttggaagccaatgtcatccttaatgccagggcgtctcccattatagagcatacttctagcaaatttaaaattttcattttctaagtcatgctcattaattttagcactaagttgagctatgtgatcattttgttgtttaattaaagctaggtgatcatggatagcatcaacattaatgtctctacatctagtacaaatagtaacatgctcaatggtagatgtagagggtttgcaaacatttaattcatcaatcttagcatgtaacatgacattttcatttctaagattggaaacaatatcattgcaaacatttaaatttttagccttagtaatcaatttattattttctatcttaaggctagcaattgattcatttaacttgtcaatcttagcaatcaaattagcattatcatttttaagtttgacaagagaatcatcacaaacatttaaattctcaaccttagcaattaatttagcattctcatttctaaggttgaaaatagtatcatggcaagtgcttagctcactagtcaatttttcacatttttctacttcctgagcataagcatttttaaccttaacatgcttcttgttttctttaaaaaggaagtcctcttggctatccaagagttcatccttctcatgaataacacctattaattcattcaatttttccttttgttgcatgtttgggttggcaaaaagggcaagcaagttatcctcatcatcactagagttctcctcatcactagatgttgcatatttagtggaggctctagattttaccttctttttgccgtcctttgccatgaggcacttgtggccgacattgtggaaaaggagacctttgttgacggtgatgtttgcggcgtcctcgtcggaggagtcagtggagctctcatcggagtcccactcccagcatacatgggcatcgccgcccttcttcttgtaatacttcttcttctccttccttcttcccttcttgtcgtcgcccctgtcactatcacttgataatggacatttagcaatgaaatgaccgggcataccacacttgtagcaaactttcttggagcggggcttgtagtccttccccctcctttgcttgaggatttggcagaaacttttgatgatgagtgtcatctcctcattgtcgagcttggaggcgtcgatggggagcctacttgatgtagactcttctttcttctcctccgttgctttgaaggcaacgggttgcacctcgggtgtggaggtggcgcctcgctcgatgatttgtttggagcctttgatcatcaattcaaaactcacaaactttcttattacttcttcgggagacattagtttatatctaggatcaccacgaattaattgaacttgtgtagggttaagaaaaacgagtgatcttagaataaccttgaccatttcatggtcatcccatttggtgctcccgaggttgcgcacttggttcaccaaggtcttgagccggttgtacatggcttgtgactcctcatctccttcgtgcacggtcttgagcacgtcccaaatatctttggtggtttcaaacccatgcactttgttatactcctctcgacttaaagagacgaggagtatagttgttgcttgcgagttaaagtgtcgtatttggtcggcctcatccgagtcatagtccttatcccccacctgtggtacctgcgctccatactcaacaacatcccatatgcttttgtggagtgaggttagatgacctttcattctagcactccacatagagtaatcttcaccctcaaaaaccggtggtttccctaatggaacagaaagtaaaggagtgtgtttaggaatgcgaggatagcgtagggggatcttactaaacttcttgcgctcatgacgcttagaagtgatggatggcgtgttggagccggatgtagaaggtgatgaagaatcggtctcgtagtagaccaccttcttcattttctttttcttctcgccgctccaatgcgacttgttgtgtgaaggggatcccttcatcttgttgccgaactctcccgatggagtcttcccgtggcttgtggcgggcttctcgccagtcaccatctccttcttagcgtgatctcccgacat

SEQ ID NO: 5131 - DNA, 1629 bp, Zea mays
  Clone ID: TF_ZM4596.C2.o8.fg
atgtacaaccggctcaagacaatggtcaaccaagtccgcaacctcgggagcactaagtgggatgactatgaaatggtcaaggttattctaagatctcttgtttttcatagtcccactcaagtgcaactaatccgtggagattctagatataaacagatgtcttccaaggaggttattgacaagtttgtgagctttgaacttatgctcaaagactccaaacatattgtcaactcgaatcaaggtgccacctccacacccgatgtgcaacccgttgcgttcaaaccaacaaaagaaaagaaggaagagcctacaccaacaagtagattcccaatcgacgcctccaagctcgacaatgagaagatgactcttatcatcaagagcttctggcacgtcctcaaacaaaggaaggggaaggactacaaaccccgttccaagagggtttgctacaggtgtggtaagtccggtcattttatcgctaaatgtccatatacaagtgatagtgatagggacgatgacaagaaagggaagaaggagatgacaaagaaaagatattacaacaagaagaagggtggcgaggcacacatggggcgaaaatgggactccgacaagagctccaccgactcctccttcgacgaggacgccgccaacatcgtcatcaacaaaggccttctcttccccaacgtcggccacaaatgcctcatggttaaggatagcaaaaagaagaaggtacattctagagataccaccaagtacactacttccgatgatgagggtaactctagtgatgataatgatgatttgacttctctttttgcaaaccttagtaaagatcaaaagaagaaaattaatgaattgatagaaaccattaacgagaaggatgatatcttggaataccaagaggacttgctcattaaggaaaataaaaagtttgttaagctaaaagatgtttatgctcttgaagtagaaaaatgtgaaaatttgtctaaagagcttaatatttgcaatgattcaatttcttgtcttataactgaaaatgttagtttaatttataagattaaagaattgaacgcttgcaaaccctctacatctactattgagcatgttaccgtttgcactaaatgtagagatgttaatattgatgctatgaatgatcaccttgctatgattaaagaacaaaatgatcacataaacaaattaaatgctaaaattgtcgagcatgaactagagaatgaaaattttaaatttgctcgtagtatgctatataatgggagacgccctagcattaaggatgtcattggtttccaacaaggaagccaaagcaacgtcaaacttaatgcccctaagaacatgctttctaactttgttaagggcaaggcacccatggttcaggatagggaagaatcttcacaagcttctaaagcggagcacattttaggactaaccaatgttcattttgagaaagacaggatttgtagtgcatgtcaagcagggaagcaggttggagctcatcatccacacaaaaacatcatgatgaccgagaggccgcttgagctactccacatggatctcttcggcccgattgcttacataatcattggtgggagaaaatctcaaacccaagagacctaa

SEQ ID NO: 5132 - DNA, 972 bp, Zea mays
  Clone ID: TF_ZM4948.C1.o9.fg
atgtctcgagatcacgccaagagagagatcatgaccggcgacaagcccgcgagctcggggaagactctctcaagagagtccgacaacaagtataaggaggaatcatcttcctccatcaagtcacatcagaggggtgacaagaagaagaggaagaacaaagtggtctactacgagaccgactctttgtcaccctccacatccggtaccgactcgtccactacttctaagcgccatgagcacaagaagtataaggtgtataacaaggtgcaaggattaaaaaatgccaaagaaatttgggatgtcctcaaaacggcgcacgaaggggacaaggtgaccaagatcaccaagagagagacaatcgaggcagagtttggtcgattcgtcctaaacaaaggggaagagccgcaagtcatgtacaatcggctcaagacaatggtgaaccaagtgcgcaacctcgggagcaccaaatgggatgaccatgaaatggtcaaggttattctaagatcccttgttttttgtaatcctactcaattacaattaatacgtggggatcctagatacaaacagatgtctcccgaggaggtaattggcaagtttgtgagctttgaactaatgatcaaagactccaaacacattgtcaacttggagcaaggcgccacctccacacccgaggtgcaacccgttgcattcaaagcaactgaagaaaagaaggaggagtctacactaagtagacttccaatcgacacctccaagctcgacaacgaagaaatggcgctcatcatcaagagcttccgccaaatcctcaagcaaaggagggggaaggactacaagccccactccaaaagggtgtgctaccggtgtggtaagtccggtcactttattgctaaatgtccatattctagtgaaagtgatagggatgaagacaaaaaggggaagaagaagtactacaagaagaagggcggcgaggcgtga

SEQ ID NO: 5133 - DNA, 4179 bp, Zea mays
  Clone ID: TF_ZmC119_1038
atggggggtctggcgccggtgagaaattgcgacgcgaccgtccaagttctggggtggggaggccacgacactactgggacgcccctacgaccctcccaagtcaccaatcgagaacggagcatgacccaggacgtaggccggcgacggcgctcctccgccagcgattcaattggtgactgggtactcgacgagatggaaaagggagctggagcgatggcacctagcacaccaacatttactttgcgatcaattcttgaaaaggataagttaaatggaacaaactatacggattggatccgtaacctgagaattgttctcagggctgaaaaaaaggaagacgttctagacaccccactgccagaggatcctggtgaaaatgcaactgctgcagctaaaaccgcttacaagaaagcaatggatgctaatcttgaagtgagttgcctaatgcttgcttgcatggagcctgagctccagatgcagtttgagtcaaaccatgaggtgtacgatatgatcgtggcgctcaaggatatgttccagactcaggctaggactgaaaggttcaatgtgtccaaagcctttctggaatgcaagctagcagaaggcgcagcagttgggccacatgtaatcaaaatggttggttacagtcagaggttggagaagctaggcttcccaataagccaagagttggccactgacttcattttggcatctcttccgcccagctatggaaacttcatcacgaactaccatatgcatggggcggagaggggcctcaatgaactatgtggcatgctgaaaacagcagagggggacataaagaaaagcgctggcagcagcggccatgtgatggcggtccaaaacaaacccaactttaagaagaagggtaaatctcaaaagaagaagggcaaggcaaaggatacagtatccaagccaaatcaaaagcccaaggctggaccagctgcagatgcagagtgcttttattgcaaagaacttggtcactggaaaaggaattgcaagcagtacttggcctctattaaggatcgcggcggtaagggtacagccgcagcaggtacacttgctattcacattacagaaatttttcttgctgattcttatattaattcttgggtatttgataccggatcggttgcccatatttgcaattcgatgcagggaatgataagaagtagaagcgtgaaaagaggagaagttgatttccgggtaggcaataatgcaagagttgctacgttgactgtcgggacgatgcaactccacctcccatcaggatttattttggagttaaataattgttatctagttcctagtatgagtcaaaacattatgtctccttcatgtttgatgaaggatggttattcatttgcgagtgaaaacaatggttgtgtgatctctaagaatggcatgtttgtggcttttgcatccattatgaatgggttattcattttaaatcttgatgatgcacctatctgtaatattagtgctaaaaggcctcggcctaatgatttaagtcctacctacatgtggcactgtcgtttgggtcatataagtgagaatcgcatgaagaagcttcattctgatgggcttttaacttcgtttgattttgaatcatacgagacatgtgaagcttgcttacttggtaagatgaccaaggcgcccttcacgggtttaccggagaggacgttagatttattggaactcatacatactgatgtgtgcggaccaatgagtacgacagctaggggaggattccaatacttcataaccttcactgatgattttagtagatatgggtatgtctacttaatgaaacacaagtctgaatccttagaaaagttcaaagagtttcagaatgaagtagaaaatcagcgtggcaagaaaattaaagcactgcgatcagatcgtggtggtgaatatttgagtcatgagtttagcaatcatctaaagagttgtggaattgttccacagcttacgccgcctggaacgcctcagaggaatggcgtgtctgagcgacgtaatcggactttattggatatggttcgatcaatgatgagccagtcggacctacctttgtcgttttggggatacgctctagaaacagcagctttcacactaaatagggtaccgtctaagtccgtagttaagacaccatatgagatgtggactgggaagactcccagcttgtcttttctgaagatttggggttgtgaggtttacgtcaagcgactacagtcggataaactcactccaaaatcggacaagtgcatgttcgtgggatatccaaaggaaactttaggatattacttttaccaccggtcagagggcaaagtgtttgtcgcccggaacggtgtgttcttagagaaagagtttctcaaaagagagaaaagtaaacaaaaggtgtatcttgaagaagttcaggatgagccagtgggacaagattcaacaagtgatgctaatgtagcagaacaagttgagacgtctatggcaagagaatcaccaccacaaccacgaaggtcagcaaggcttcgcgaggcacgaggagaagtgctattgttgggcaatggggaagtgttgttgttagacaacgacgaacctgcaacatattcagaagcgatgatggacccagattccgagaaatggcatgtcgccatgagatccgagatagattccatgggagaaaatcaagtttggaacttggttgacccgcctgatggtgttagacctatagaatgcaaatggatctataagaagaagaaagacatggatggaaatgttcacatctataaggctcgacttgttgcaaagggttttcgacaagttcaaggagttgactatgacgagacattctcgccagtagcgatgcttaaatctattcggatcattctagctattgccgcatatttcgattatgagatttggcagatggatgtcaaaacagctttccttaatggaaacctagatgaggacgtgtatatgatacagcccgagggttttgtcgatccgatcaatgctggaaagatatgcaaacttcagaaatccatttatgggttgaagcaagcatctcggagttggaacattcgttttgatgaagtgatcaaagggcttggttttcatcagaatgaagaagaagcttgtgtttacaagaaggaaagtgggagcgctgttgtatttctgatcttgtatgtggatgacatattattgattgggaatgacattcctatgctggagtccgtcaaggcttcactgaaaaagagtttttctatgaaggacttaggggaagcagcatatattttgggcataaggatctatagagataggtcgaagaggcttataggattaagtcaagatacgtacattgacaaggttttgaaacggttcaacatggaacagtccaagaaaggtttcatacctatgtcacatggtaaacaccttagccagatgcaatgtcctgcgacggctaatgagcgagagcgcatgagtaaggtaccatacgcctcagcgattggatcaatcatgtatgccatgataagtacacgcccagatgtttcatacgctataagtgctacgagtagataccaggctgatccaggtgaggatcactggacagcggtaaaaggcattcttaagtacttaagaaggactaaagatatgttcctggtatatgggggtaaggaggagctcgttgtaactggttacactgatgctagcttccaaactgacccagacgagttaaaatcgcaatcaggttttgtgttcacaataaatggtggtgctgttagttggaagagttccaaacaggagactgtgactgattctacaacagaagccgagtacattgcagcttctgaatctgcgaaagaaggtgtttggataaggaagttcctcatcgagcttggtgtgtttcctaatgcatctagcccattgaacctctactgtgacaacaatggggctattgcgcaagctaaggagccaaggaaccaccagaaaaacaaacatgtactgcggaagtttcacctcatacgggaattcattaggcggggtgagataaagatatgcaaaatacatacggatttgaatgttgctgatcctttgacaaaacctcttccacaacctaagcatgaggcacacgtgagatctatgggtattagatatcttctagattaa

SEQ ID NO: 5134 - DNA, 4275 bp, Zea mays
  Clone ID: TF_ZmC119_814
atggcacctagcacaccaacatttactttgcgatcgattcttgaaaaggataagttaaatggaacaaactatacggattggatccgtaacctgagaattgttctcagggctgaaaaaaaggaagacgttctagacaccccactgccagaggatcctggtgaaaatgcaactgccgcagctaaaaccgcttacaagaaagcaatggatgctaatcttgaagtaagttgcctaatgcttgcttgcatggagcctgagctccagatgcagtttgagacaaaccatgaggtgtacgatatgatcgtggcgctcaaggatatgttccagactcaggctaggactgaaaggttcaatgtgtccaaagcctttctggaatgcaagctagcagaaggcgcagcagttgggccacacgtaatcaaaatggttggttacagtcagaggttggagaagctaggcttcccaataagccaagagttggccactgacttcattttggcatctcttccgcccagctatggaaacttcatcacgaactaccatatgcatggggcggagaggggcctcaatgaactatgtggcatgctgaaaactgcagagggggacataaagaaaagtgctggcagcagcggccatgtgatggcggtccaaaacaaacccaactttaagaagaagggtaagtctcaaaagaagaagggcaagggaaaggatacagtatccaagcccaatcaaaagcccaaggctggaccagctgcagatgcagagtgcttttattgcaaagaacttggtcactggaaaaggaattgcaagcagtacttggcctctattaaggatcgcggcggtaagggtacagccgcagcaggtacacttgctattcacattacagaaatttttcttgctgattcttatattaattcttgggtatttgataccggatcggttgcccatatttgcaattcgatgcagggaatgataagaagtacaagcgtgaaaagaggagaagttgatttccgggtaggcaataatgcaagagttgctgcgttgaccgtcgggacgatgcaactccacctcccatcaggatttattttggagttaaataattgttatctagttcctagtatgagtcgaaacattatgtctccttcatgtttgatgaaggatggttattcatttgcgagtgaaaacaatggttgtgtgatctctaagaatggcatgtttgtggcttttgcatccattatgaatgggttattcattttaaatcttgatgatgcacctatctgtaatattagtgctaaaaggcctcggcctaatgatttaagtcctacctacatgtggcactgtcgtttgggtcatataagtgagaatcgcatgaagaagcttcattctgatgggcttttaacttcgtttgattttgaatcatacgagacatgtgaagcttgcttacttggtaagatgaccaaggcgcccttcacgggtttaccggagaggacgttagttttattggaactcatacatactgatgtgtgcggaccaatgagtacgacagctaggggaggattccaatacttcataaccttcactgatgattttagtagatatgggtatgtctacttaatgaaacacaagtctgaatccttagaaaagttcaaagagtttcagaatgaagtagaaaatcagcgtggcaagaaaattaaagcactgcgatcagatcgtggtggtgaatatttgagtcatgagtttagcaatcatctaaagagttgtggaattgttccacagcttacgccgcctggaacgcctcagaggaatggcgtgtctgagcgacgtaatcggactttattggatatggttcgatcaatgatgagccagtcggacctacctttgtcgttttggggatacgctctagaaacagcagctttcacactaaatagggtaccgtctaagtccgtagttaagacaccatatgagatgtggactgggaagactcccagcttgtcttttctgaagatttggggttgtgaggtttacgtcaagcgactacagtcggataaactcactccaaaatcagacaagtgcatgttcgtgggatatccaaaggaaactttaggatattacttttaccaccggtcagagggcaaagtgtttgtcgcccggaacggtgtgttcttagagaaagagtttctcaaaagagagaaaagtaaacaaaaggtgtatcttgaagaagttcaggatgagccagtgggacaagattcaacaagtgatgctaatgtagcagaacaagttgagacgtctatggcaagagaatcaccaccacaaccacgaaggtcagcaaggcttcgcgaggcacgaggagaagtgctattgttgggcaatggggaagtgttgttgttagacaacgacgaacctgcaacatattcagaagcgatgatggacccagattccgagaaatggcatgtcgccatgagatccgagatagattccatgggagaaaatcaagtttggaacttggttgacccgcctgatggtgttagacctatagaatgcaaatggatctataagaagaagaaagacatggatagaaatgttcacatctataaggctcgacttgttgcaaagggttttcgacaagttcaaggagttgactatgacgagacattctcgccagtagcgatgcttaaatctattcggatcattctagctattgccgcatatttcgattatgagatttggcagatggatgtcaaaacagctttccttaatggaaacctagatgaggacgtgtatatgatacagcccgagggttttgtcgatccgatcaatgctggaaagatatgcaaacttcagaaatccatttatgggttgaagcaagcatctcggagttggaacattcgttttgatgaagtgatcaaagggcttggttttcatcagaatgaagaagaagcttgtgtttacaagaaggaaagtgggagcgctgttgtatttctgatcttgtatgtggatgacatattattgattgggaatgacattcctatgctggagtccgtcaaggcttcactgaaaaagagtttttctatgaaggacttaggggaagcagcatatattttgggcataaggatctatagagataggtcgaagaggcttataggattaagtcaagatacgtacattgacaaggttttgaaacggttcaacatggaacagtccaagaaagggttcatacctatgtcacatggtaaacaccttagccagatgcaatgtcctgcaacggctaatgagcgggagcgcatgagtaaggtaccatacgcctcagcaattggttcaatcatgtatgccatgataagtacacgcccagatgtttcatacgctataagtgctacgagtagataccaggctgatccaggttttgtgttcacaataaatggtggtgctgttagttggaagagttccaaacaggagactgtgactgattctacaacagaagccgagtacattgcagcttctgaatctgcgaaggaaggtgtttggataaggaagttcctcatcgagcttggtgtgtttcctaatgcatctagcccattgaacctctactgtgacaacaatggggctattgcgcaagctaaggagccaaggaaccaccagaaaaacaaacacgtactgcggaagtttcacctcatacgggaattcattaggcggggtgagataaagatatgcaaaatacatacggatttgaatgttgctgatcctttgacaaaacctcttccacaacctaagcatgaggcacaccgtagcctccccgtaatcctacagaatatacacattataactcctatcaaatcaagagatatcggactggacaagacgatgcacccattgggtccactacttcagatcatcagcgaagacatgcatggcgatcttctgaagaaagtgctatttgggaccttcgagtcgattgtttcccaagtcgtcccaaagctcgggggctacaccccttgggtgcacctacccaagacactcggcggaagttgcattccaagcaagtttctgcatctcagagctcaggcgccaatggtgacaaatgagattgttattgaagctatgatcaaggggcttcaaccaggaccaacaacacagtatttcgccaggaagcccccacaaactctggagaagcttcttcagaaaatggacgagtacatcagagccgataatgactttcgacagagaagggaagaagcctacagatactctgtaaggcccaaaatatgcataaaaacatataaataa

SEQ ID NO: 5135 - DNA, 3903 bp, Zea mays
  Clone ID: TF_ZmC119_998
atggcacctagcacaccaacatttactttgcgatcgattcttgaaaaggataagttaaatggaacaaactatacggattggatccgtaacctgagaattgttctcagggctgaaaaaaaggaagacgttctagacaccccactgccagaggatcctggtgaaaatgcaactgccgcagctaaaaccgcttacaagaaagcaatggatgctaatcttgaagtaagttgcctaatgcttgcttgcatggagcctgagctccagatgcagtttgagacaaaccatgaggtgtacgatatgatcgtggcgctcaaggatatgttccagactcaggctaggactgaaaggttcaatgtgtccaaagcctttctggaatgcaagctagcaaaaggcgcagcagttgggccacacgtaatcaaaatggttggttacagtcagaggttggagaagctaggcttcccaataagccaagagttggccactgacttcattttggcatctcttccgcccagctatggaaacttcatcacgaactaccatatgcatggggcggagaggggcctcaatgaactatgtggcatgctgaaaactgcagagggggacataaagaaaagtgctggcagcagcggccatgtgatggcggtccaaaacaaacccaactttaagaagaagggtaagtctcaaaagaagaagggcaagggaaaggatacagtatccaagcccaatcaaaagcccaaggctggaccagctgcagatgcagagtgcttttattgcaaagaacttggtcactggaaaaggaattgcaagcagtacttggcctctattaaggatcgcggcggtaagggtacagccgcagcaggtacacttgctattcacattacagaaatttttcttgctgattcttatattaattcttgggtatttgataccggatcggttgcccatatttgcaattcgatgcagggaatgataagaagtagaagcgtgaaaagaggagaagttgatttccgggtaggcaataatgcaagagttgctgcgttgaccgtcgggacgatgcaactccacctcccatcaggatttattttggagttaaataattgttatctagttcctagtatgagtcgaaacattatgtctccttcatgtttgatgaaggatggttattcatttgcgagtgaaaacaatggttgtgtgatctctaagaatggcatgtttgtggcttttgcatccattatgaatgggttattcattttaaatcttgatgatgcacctatctgtaatattagtgctaaaaggcctcggcctaatgatttaagtcctacctacatgtggcactgtcgtttgggtcatataagtgagaatcgcatgaagaagcttcattctgatgggcttttaacttcgtttgattttgaatcatacgagacatgtgaagcttgcttacttggtaagatgaccaaggcgcccttcacgggtttaccggagaggacgttagatttattggaactcatacatactgatgtgtgcggaccaatgagtacgacagctaggggaggattccaatacttcataaccttcactgatgattttagtagatatgggtatgtctacttaatgaaacacaagtctgaatccttagaaaagttcaaagagtttcagaatgaagtagaaaatcagcgtggcaagaaaattaaagcactgcgatcagatcgtggtggtgaatatttgagtcatgagtttagcaatcatctaaagagttgtggaattgttccacagcttacgccgcctggaacgcctcagaggaatggcgtgtctgagcgacgtaatcggactttattggatatggttcgatcaatgatgagccaggtaccgtctaagtccgtagttaagacaccatatgagatgtggactgggaagactcccagcttgtcttttctgaagatttggggttgtgaggtttacgtcaagcgactacagtcggataaactcactccaaaatcggacaagtgcatgttcgtgggatatccaaaggaaactttaggatattacttttaccaccggtcagagggcaaagtgtttgtcgcccggaacggtgtgttcttagagaaagagtttctcaaaagagagaaaagtaaacaaaaggtgtatcttgaagaagttcaggatgagccagtgggacaagattcaacaagtgatgctaatgtagcagaacaagttgagacgtctatggaaagagaatcaccaccacaaccacgaaggtcagcaaggcttcgcgaggcacgaggagaagtgctattgttgggcaatggggaagtgttgttgttagacaacgacgaacctgcaacatattcagaagcgatgatggacccagattccgagaaatggcatgtcgccatgagatccgagatagattccatgggagaaaatcaagtttggaacttggttgacccgcctgatggtgttagacctatagaatgcaaatggatctataagaagaagaaagacatggatggaaatgttcacatctataaggctcgacttgttgcaaagggttttcgacaagttcaaggagttgactatgacgagacattctcgccagtagcaatgcttaaatctattcggatcattctagctattgccgcatatttcgattatgagatttggcagatggatgtcaaaacagctttccttaatggaaacctagatgaggacgtgtatatgatacagcccgagggttttgtcgatccgatcaatgctggaaagatatgcaaacttcagaaatccatttatgggttgaagcaagcatctcggagttggaacattcgttttgatgaagtgatcaaagggcttggttttcatcagaatgaagaagaagcttgtgtttacaagaaggaaagtgggagcgctgttgtatttctgatcttgtatgtggatgacatattattgattgggaatgacattcctatgctggagtccgtcaaggcttcactgaaaaagagtttttctatgaaggacttaggggaagcagcatatattttgggcataaggatctatagagataggtcgaagaggcttataggattaagtcaagatacgtacattgacaaggttttgaaacggttcaacatggaacagtccaagaaagggttcatacctatgtcacatggtaaacaccttagccagatgcaatgtcctgcaacggctaatgagcgggagcgcatgagtaaggtaccatacgcctcagcaattggttcaatcatgtatgccatgataagtacacgcccagatgtttcatacgctataagtgctacgagtagataccaggctgatccaggtgaggatcactggacagcggtaaaaggcattcttaagtacttaagaaggactaaagatatgttcctggtatatgggggtaaggaggagctcgttgtaactggttacaccgatgctagcttccaaactgacccagacgagttaaaatcgcaatcaggttttgtgttcacaataaatggtggtgctgttagttggaagagttccaaacaggagactgtgactgattctacaacagaagccgagtacattgcagcttctgaatctgcgaaggaaggtgtttggataaggaagttcctcatcgagcttggtgtgtttcctaatgcatctagcccattgaacctctactgtgacaacaatggggctattgcgcaagctaaggagccaaggaaccaccagaaaaacaaacacgtactgcggaagtttcacctcatacgggaattcattaggcggggtgagataaagatatgcaaaatacatacggatttgaatgttgctgatcctttgacaaaacctcttccacaacctaagcatgaggcacacgtgagatctatgggtattagatatcttctagattaa

SEQ ID NO: 5136 - DNA, 1895 bp, Zea mays
  Clone ID: TF_ZM3660.C11.o1.fg
atggatgctaatcttgaagtgagttgcctaatggttgcttgcatggagcctgagctccagatgcagtttgagacaaaccatgaggtgtacgatatgatcgtggcgctcaaggatatgttccagactcaggctaggactgaaaggttcaatgtgtccaaagcctttctggaatgcaagctagcagaaggcgcagcagttgggccacacgtaatcaaaatggttggttacagtcagaggttggagaagctaggcttcccaataagccaagagttggccactgacttcattttggcatctcttccgcccagctatggaaacttcatcacgaactaccatatgcatggggcggagaggggcctcaatgaactatgtggcatgctgaaaacagcagagggggacataaagaaaagcgctggcagcagcggccatgtgatggcggtccaaaacaaacccaactttaagaagaagggcaaggcaaaggatacagtatccaagccaaatcaaaagcccaaggctggaccagctgcagatgcagagtgcttttattgcaaagaacttggtcactggaaaaggaattgcaagcagtacttggcctctattaaggatcgcggcggtaagggtacagccgcagcaggtacacttgctattcacattacagaaatttttcttgctgattcttatattaattcttgggtatttgataccggatcggttgcccatatttgcaattcgatgcagggaatgataagaagtagaagcgtgaaaagaggagaagttgatttccgggtaggcaatagtgcaagagttgctgcgttgaccgtcgggacgatgcaactccacctcccatcaggatttattttggagttaaataattgttatctagttcctagtatgagtcgaaacattatgtctccttcatgtttgatgaaggatggttattcatttgcgagtgaaaacaatggttgtgtgatctctaagaatggcatgtttgtggcttttgcatccattatgaatgggttattcattttaaatcttgatgatgcacctatctgtaatattagtgctaaaaggcctcggcctaatgatttaagtcctacctacatgtggcactgtcgtttgggtcatataagtgagaatcgcatgaagaagcttcattctgatgggcttttaacttcgtttgattttgaatcatacgagacatgtgaagcttgcttacttggtaagatgaccaaggcgcccttcacgggtttaccggagaggacgttagatttattggaactcatacatactgatgtgtgcggaccaatgagtacgacagctaggggaggattccaatacttcataaccttcactgatgattttagtagatatgggtatgtctacttaatgaaacacaagtctgaatccttagaaaagttcaaagagtttcagaatgaagtagaaaatcagcgtggcaagaaaattaaagcactgcgatcagatcgtggtggtgaatatttgagtcatgagtttagcaatcatctaaagagttgtggaattgttccacagcttacgccgcctggaacgcctcagaggaatggcgtgtctgagcgacgtaatcggactttattggatatggttcgatcaatgatgagccagtcggacctacctttgtcgttttggggatacgctctagaaacagcagctttcacactaaatagggtaccgtctaagtccgtagttaagacaccatatgagatgtggactgggaagactcccagcttgtcttttctgaagatttggggttgtgaggtttacgtcaagcgactacagtcggataaactcactccaaaatcggacaagtgcatgttcgtgggatatccaaaggaaactttgggatattacttttaccaccg

SEQ ID NO: 5137 - DNA, 3324 bp, Zea mays
  Clone ID: TF_ZM4447.C1.o15.fg
atggcacctagcacaccaacatttactttgcgatcaattcttgaaaaggataagttaaatggaacaaactatacggattggatccgtaacctgagaattgttcttagggctgaaaaaaaggaagacgttctagacaccccactaccagaggatcctagtgaaaatgcaactgctgcagctaaaaccacttacaagaaagcaatggatactaatcttgaagtgagttgcctaatgcttgcttgcatggagcctgagctacagatgcagtttgagacaaaccatgagatgcacgatatgatcgtggcgctcaaggatatgttccagactcaggctaggactgaaaggttcaatgtgtccaaagcctttctggaatgcaagctagcagaaagcgcagcagttgggccacacgtaatgaaaatggttggttacagtcagaggttggagaagctaggcttcccaataagccaagagttggccactgacttcattttggcatctcttccgaccagctatggaaacttcatcacgaactaccatatgcatggggcggagaggggcctcaatgaactatgtggcatgctgaaaacagcagagggggacataaagaaaagcgctggcagcagcagccatgtgatggcggtccaaaacaaacccaactttaagaagaagggtaaatctcaaaagaagaagggcaaggcaaaggatacagtatccaagccaaatcaaaagcccaaggctggaccagctgcagatgcagagtgcttttattgcaaagaacttggtcactggaaaaggaattgcaagcagtacttggcctctattaaggatcgcggcggtaagggtacaaccgcagcaggtacacttgctattcacattacagaaatttttcttgctgattcttatattaattcctgggtattttataccggatcggttgcccatatttgcaattcgatgcagggaatgataagaagtagaagcgtgaaaagaggagaagttgatttctgggtaggcaataatgcaagagttgctgcgttgaccgtcgggacgatgcaactccacctcccatcaggatttattttggagttaaataattgttatctagttcctagtatgagtcgaaacattatgtctccttcatgtttgatgaaggatggttattcatttgcgagtgaaaacaatggttgtgtgatctctaagaatggcatgtttgtggcttttgcatccattatgaatgggttattcattttaaatcttgatgatgcacctatctgtaatattagtgctaaaatgcctcggcctaatgatttaagtcctacctacatgtggcactgtcgtttgggtcatataagtgagaatcgcatgaagaagcttcattctgatgggcttttaacttcgtttgattttgaatcatacgagacatgtgaagcttgcttacttggtaagatgaccaaggcgcccttcacgggtttactagagaggacgttagatttattggaactcatacatactgatgtgtgcggaccaatgagtacgacatctaggggaggattccaatacttcataaccttcactgatgattttagtagatatgggtatgtctacttaatgaaacacaagtctgaatccttagaaaagttcaaagagtttcagaatgaagtagaaaatcagcgtggcaagaaaattaaagcactgcgatcagatcgtggaggtgaatatttgagtcatgagtttagcaatcatctaaagagttgtggaattgttccacagcttacgccgcctggaatgcctcagaggaatggcgtgtctgagcgacataatcggactttattggatatggttcgatcaatgatgagccagtcggacctacctttgtcgttttggggatacgctctagaaacagcagctttcacactaaatagggtaccgtctaagtccgtagttaagacaccatatgagatgtggactgggaagactcccagtttgtcttttctgaagatttgtggttgtgcggtttacgtcaagcgacttcagtcagataaactcactccaaaatcggacaagtgcatgttcgtgggatatccaaaggaaactttaggatattacttttaccaccggtcagagggcaaagtgtttgtcgcccggaacggtgtgttcttagagaaagagtttctcaaaagagagaaaagtaaacaaaaggtgtatcttgaagaagttcaggatgagccagtaggacaagattcaacaagtgatgctaatgtagcagaacaagttgagacgtctatggcaagagaatcaccaccacaaccacgaagacctatagaatgcaaatggatctataagaagaagaaagacatggatggaaatgttcacatctataaggctcgacttgttgcaaagggttttcgacaagttcaaggagttgactatgatgagacattctcgctaatggatgtcaaaacagctttccttaatggaaacctagatgaggacatgtatatgatacagcccgagggttttgtcgatccgatcaatgctggaaagatatgcaaacttcagaaatccatttatgggttgaagcaagcatctcggagttggaacattcgttttgatgaagtgatcaaagggcttggttttcatcagaataaagaagaagcttgtgtttacaagaaggaaagtgggagctctgttgtatttctaatcttgtatgtggatgacatattattgattgggaatgacattcctatgctggagtccgtcaaggcttcactgaaaaagagtttttctatgaaggacttaggggaagcagcatatattttgggcataaggatctatagagataggtcgaagaggcttataggattaagtcaagatacgtacattgacaaggttttgaaacggttcaacatggaacagtccaagaaagggttcatacctatgtcacatggtaaacaccttagccagatgcaatgtcctgcgacggctaatgagcgggagcgcatgagtaaggtaccatacgcctcagcaattggatcaatcatgtatgccatgataagtacacgcccagatgtttcatacgctataagtgctacgagtaggtaccaggctgatccaggtgaggattactggacagcggtaaaaggcattcttaagtacttaagaaggactaaagatatgttcctggtatatgggagtaagaaggagctctttgtaactggttacaccgatgctagcttccaaactgacccagacgagttaaaatcgcaatcaggttttgtgttcacaataaatggtggtgttgttagttggaagagttccaaatag

SEQ ID NO: 5138 - DNA, 3039 bp, Zea mays
  Clone ID: TF_ZM4489.C3.o3.fg
atggttggttacagtcagaggttggagaagctaggcttcccaataagccaagagttggccactgacttcattttggcatctcttccgcccagctatggaaacttcattacgaactaccatatgcatggggcggagaggggcctcaatgaactatgtggcatgctgaaaacagcagagggggacataaagaaaagcgctggcagcagcggccatgtgatggcggtccaaaacaaacccaactttaagaagaagggtaaatctcaaaagaagaagggcaaggcaaaggatacagtatccaagccaaatcaaaagcccaaggctggaccagctgcagatgcagagtgcttttattgcaaagaacttggtcactggaaaaggaattgcaagcagtacttgtcctctattaaggatcgcggcggtaagggtacagccgcagcagttcctagtatgagtcgaaacattatgtctccttcatgtttgatgaaggatgattattcatttgcgagtgaaaacaatggttgtgtgatctctaagaatggcatgtttttggcttttgcatccattatgaatgggttattcattttaaatcttgatgatgcacctatctgtaatattagtgctaaaaggcctcgacctaatgatttaagtcctacctacatgtggcactgtcgtatgggtcatataagtgagaatcacatgaagaagcttcattctgatgggtttttaacttcgtttgattttgaatcatacgagacatgtgaagcttgcttacttggtaagatgaccaaggcacctttcacgggtttaccggagaggacattagatttattggaactcatacatactgatgtgtgcggaccaatgagtacgacagctaggggaggattccaatacttcataaccttcactgatgattttagtagatatgggtatgtctacttaatgaaacacaagtctgaatccttagaaaagttcaaagaatttcagaatgaagtagaaaatcagcgtgacaagaaaattaaagcactgcgatcagatcgtggaggtgaatatttgagtcatgagtttagcaatcatctaaagagttgtggaattgttccacagcttacgccgcctggaacacctcagaggaatggcgagtccgagcgacgtaatcggactttattggatatggttcgatcaatgatgagtcagtcagacctacctttgtcgttttggggatacgctctagaaacagcagctttcacactaaatagggtaccgtctaagtccgttgttaagacaccatatgagatgtggactgggaagactcctagtttgtcttttctgaagatttggggttgtgaggtttacgtcaagcgacttcagtcggataaactcactccaaaatcggacaattgcatgttcgtgggatatccaaaggaaactttaggatattacttttaccaccggtcagagggcaaagtgtttgtcgcctggaacgaagcgatgatggacctagattccgagaaatggcaagtcgccatgagatccgagatagattccatgggagaaaatcaagtttggaacttggttgacctgcctgatggtgttagacccatagaatgcaaatggatctataagaagaagaaagacatggatggaaatgttcacatctataaggctcgacttgttgcaaagggttttcgacaagttcaaggagttgactatgacgagacattctcgctagtagcgatgcttaaatctattcggatcattctagctattgccacatatttcgattatgagatttggcagatggatgtcaaaacagctttccttaatggaaacctagatgaggacgtgtatatgatacaacccgagggttttgtcgatccgatcaatgctggaaagatatgtaaacttcagaaatccatttatgggttgaagcaagcatctcggagttggaacattcgttttgatgaagtgatcaaagggcttggttttcatcagaatgaagaagaagcttgtgtttacaagaaggaaagtgggagcgctgttgtatttctgatcttgtatgtggatgacatattattgattgggaatgacattcctatgctggagtccgtcaaggcttcactgaaaaagagtttttctatgaaggacttaggggaagcagcatatattttgggcataaggatctatagagataggtcgaagaggcttataggattaagtcaagatacgtacattgacaaggttttgaaacggttcaacatggaacagtccaagaaagggttcatacctatgtcacatggtaaacaccttagccagatgcaatgtcctgcgacggctaatgagcgagagcgcatgagtaaggtaccatacgcctcagcgattggatcaatcatgtatgccatgataagtacacgcccagatgtttcatacgctataagtgctacgagtaggtaccaggctgatccaggtgaggatcactggacaacggtaaaaggcattcttaagtacttaagaaggactaaagatatgttcctggtatatgggggtaaggaggagctcgttgtaactggttacaccgatgctagcttccaaactgacccagacgagttaaaaccgcaatcaggttttgtgttcacaataaatggtggtgctgttagttggaagagttccaaacaggagactgtgactgattctacaacagaagccgagtatattgcagcttctgaatctgcgaaggaaggtgtttggataagaaagttcctcatcgagcttggtgtgtttcctaatgcttctagtccattgaacctctactgtgacaacaatggggctattgcgcaagctaaggagccaaggaaccaccagaaaaacaaacacgtactgcggaagtttcacctcatacgggaattcattaggcggggtgagataaagatatgcaaaatacatatagatttgaatgttgctgatcctttgacaaaacctcttccacaacctaagcatgaggcacacatgagatctatgggtattacatatcttctagattaa

SEQ ID NO: 5139 - DNA, 3567 bp, Zea mays
  Clone ID: TF_ZM4630.C4.o4.fg
atggcacctagcacaccaacatttactttgcgatcgattcttgaaaaggataagttaaatggaacaaactatacggattggatccgtaacctgagaattgttctcagggctgaaaaaaaggaagacgttctagacaccccactgccagaggatcctggtgaaaatgcaactgctgcagctaaaaccgcttacaagaaagcaatggatgctaatcttgaagtgagttgcctaatgcttgcttgcatggagcctgagctccagatgcagtttgagacaaaccatgagaggttggagaagctaggcttcccaataagccaagagttggccactgacttcattttggcatctcttccgcccagctatggaaacttcatcacgaactaccatatgcatggggcggaaaggggcctcaatgaactatgtggcatgctgaaaacagcagagggggacataaagaaaagcgctggcagcagcggccatgtgatggcggtccaaaacaaacccaactttaagaagaagggtaagtctcaaaagaagaagggcaaggcaaaggatacagtatccaagccaaatcaaaatcccaaggctggaccagctgcagatgcagagtgcttttattgcaaagaacttggtcactggaaaaggaattgcaagcagtacttggcctctatcaaggatcgcggcggtaagggtacagccgcagcaggtacacttgctattcacattacagaaatttttcttgctgattcttatattaattcttgggtatttgataccggatcggttgcccatatttgcaattcgatgcagggaatgataagaagtagaagcgtgaaaagaggagaagttgatttccgggatggttattcatttgcgagtgaaaacaatggttgtgtgatctctaagaatggcatgtttgtggcttttgcatccattatgaatgggttattcattttaaatcttgatgatgcacccatctgtaatattagtgctaaaaggcctcggcctattgatttaagtcctacctacatgtggcactgtcgtttgggtcatataagtgagaatcgcatgaagaagcttcattctgatgggcttttaacttcatttgattttgagtcatacgagacatgtgaagcttgcttacttggtaagatgaccaaggcgcctttcacgggtttaccggagaggacattagatttattggaactcatacatactgatgtgtgcggaccaatgagtacgacagctaggggaggattccaatacttcataaccttcactgatgattttagtagatatgggtatgtctacttaatgaaacacaagtctgaatccttagaaaagttcaaagagtttcagaatgaagtagaaaatcagcgtggcaagaaaattaaagcactgcgatcagatcgtggtggtgaatatttgagtcatgagtttagcaatcatctaaagagttgtggaattgttccacagcttacgccgcctggaacgcctcagaggaatggcgtgtctgagcgacgtaatcggactttattggatatggttcgatcaatgatgagccagtcggacctacctttgtcgttttggggatacgctctagaaacagcagctttcacactaaatagggtaccgtctaagtccgtagttaagacaccatatgagatgtggactgggaagactcccagtttgtcttttctgaagatttggggttgtgaggtttacgtcaagcgactacagtcggataaactcactccaaaatcggacaagtgcatgttcgtgggatatccaaaggaaactttaggatattacttttaccaccggtcagagggaaaagtgtttgtcgcccggaacggtgtgttcttagagaaagagtttctcaaaagagagaaaagtaaacaaaaggtgtatcttgaagaagttcaggatgagccagtgggacaagattcaacaagtgatgctaatgtagcagaacaagttgagacgtctatggcaagagaaacaccaccacaaccacgaaggtcagcaaggcttcgtgaggcacgaggagaagtgctattgttgggcaatggggaagtgttgttgttagacaacgacgaacctgcaacatattcagaagcgatgatggacccagattccgagaaatggcatgtcgccatgagatccgagatagattccatgggagaaaatcaagtttggaacttggttgacccgcctgatgttcaaggagttgactatgacgagacattctcgccagtagcgatgcttaaatctattcggatcattctagctattgctgcatatttcgattatgagatttggcagatggatgtcaaaacagctttccttaatggaaacctagatgaggacgtgtatatgatacagcccgagggttttgtcgatccgatcaatgctggaaagatatgcaaacttcagaaatccatttatgggttgaagcaagcatctcggagttggaacattcgttttgatgaagtgatcaaagggcttggttttcatcagaatgaagaagaagcttgtgtttacaagaaggaaagtgggagcgctgttgtatttctgatcttgtatgtggatgacatattattgattgggaatgacattcctatgctggagtccgtcaaggcttcactgaaaaagagtttttctatgaaggacttaggggaagcagcatatattttgggcataaggatctatagagataggtcgaagaggcttataggattaagtcaagatacgtacattgacaaggttttgaaacggttcaacatggaacagtccaagaaagggttcatacctatgtcacatggtaaacaccttagccagatgcaatgtcctgcaacggctaatgagcgggagcgcatgagtaaggtaccatacgcctcagcaattggttcaatcatgtatgccatgataagtacacgcccagatgtttcatacgctataagtgctacgagtagataccaggctgatccaggtgaggatcactggacagcagtaaaaggcattcttaagtacttaagaaggactaaagatatgttcctggtatatgggggtaaggaggagctcgttgtaactggttacaccgatgctagcttccaaactgacccagacgagttaaaatcgcaatcaggttttgtgttcacaataaatggtggtgttgttagttggaagagttccaaacaggagactgtgactgattctacaatagaagccgagtacattgcagcttctgaatctgcgaaggaaggtgtttggataagaaagttcctcatcgagcttggtgtgtttcctaatgcatctagcccattgaacctctactgtgacaacaatggggctattgcgcaagctaaggagccaaggaaccaccagaaaaacaaacacgtactgcggaagtttcacctcatacgggaattcattaggcggggtgagataaagatatgcaaaatacatacggatttgaatgttgctgatcctttgacaaaacctcttccacaacctaagcatgaggcacacgtgagatctatgggtattagatatcttctagattaa

SEQ ID NO: 5140 - DNA, 3204 bp, Zea mays
  Clone ID: TF_ZM4992.C3.o2.fg
atggcacctagcacaccaacatttactttgcgatcgattcttgaaaaggataagttaaatggaacaaaccatacggattggatccgtaacctgagaattgttctcagggctgaaaaaaaggaagacgttctagactccccactgccagaggatcctggtgaaaatgcaactgccgcagctaaaaccgcttacaagaaagcaatggatgctaatcttgaagtaagttgcctaatgcttgcttgcatggagcctgagctccagatgcagtttgagacaaaccatgaggtgtacgatatgatcgtggcgctcaaggatatgttccagactcaggctaggactgaaaggttcaatgtgtccaaagcctttctggaatgcaagctagcagaaggcgcagcagttgggccacacgtaatcaaaatggttggttacagtcagaggttggagaagctaggcttcccaataagccaagagttggccactgacttcattttggcatctcttccgcccagctatggaaacttcatcacgaactaccatatgcatggggcggagaggggcctcaatgaactatgtggcatgctgaaaactgcagagggggacataaagaaaagtgctggcagcagcggccatgtgatggcggtccaaaacaaacccaactttaagaagaagggtaagtctcaaaagaagaagggcaagggaaaggatacagtatccaagcccaatcaaaagcccaaggctggaccagctgcagatgcagagtgcttttattgcaaagaacttggtcactggaaaaggaattgcaagcagtacttggcctctattaaggatcgcggcggtaagggtacagccgcagcaggtacacttgctattcacattacagaaatttttcttgctgattcttatattaattcttgggtatttgataccggatcggttgcccatatttgcaattcgatgcagggaatgataagaagtagaagcgtgaaaagaggagaagttgatttccggcttacgccgcctggaacgcctcagaggaatggcgtgtctgagcgacgtaatcggactttattggatatggttcgatcaatgatgagccagtcggacctacctttgtcgttttggggatacgctctagaaacagcagctttcacactaaatagggtaccgtctaagtccgtagttaagacaccatatgagatgtggactgggaagactcccagcttgtcttttctgaagatttggggttgtgaggtttatgtcaagcgactacagtcggataaactcactccaaaatcggacaagtgcatgttcgtgggatatccaaaggaaactttaggatattacttttaccaccggtcagagggcaaagtgtttgtcgcccggaacggtgtgttcttagagaaagagtttctcaaaagagagaaaagtaaacaaaaggtgtatcttgaagaagttcaggatgagccagtgggacaagattcaacaagtgatgctaatgtagcagaacaagttgagacgtctatggcaagagaatcaccaccacaaccacgaaggtcagcaaggcttcgcgaggcacgaggagaagtgctattgttgggcaatggggaagtgttgttgttagacaacgacgaacctgcaacatattcagaagcgatgatggacccagattccgagaaatggcatgtcgccatgagatccgagatagattccatgggagaaaatcaagtttggaacttggttgacccgcctgatggtgttagacctatagaatgcaaatggatctataagaagaagaaagacatggatggaaatgttcacatctataaggctcgacttgttgcaaagggttttcgacaagttcaaggagttgactatgacgagacattctcgccagtagcgatgcttaaatctattcagatcattctagctattgccgcatatttcgattatgagatttggcagatggatgtcaaaacagctttccttaatggaaacctagatgaggacgtgtatatgatacagcccgagggttttgtcgatccgatcaatgctggaaagatatgcaaacttcagaaatccatttatgggttgaagcaagcatctcggagttggaacattcgttttgatgaagtgatcaaagggcttggttttcatcagaatgaagaagaagcttgtgtttacaagaaggaaagtgggagcgctgttgtatttctgatcttgtatgtggatgacatattattgattgggaatgacattcctatgctggagtccgtcaaggcttcactgaaaaagagtttttctatgaaggacttaggggaagcagcatatattttgggcataaggatctatagagataggtcgaagaggcttataggattaagtcaagatacgtacattgacaaggttttgaaacggttcaacatggaacagtccaagaaagggttcatacctatgtcacatggtaaacaccttagccagatgcaatgtcctgcaatggctaatgagcgggagcgcatgagtaaggtaccatacgcctcagcaattggttcaatcatgtatgccatgataagtacacgcccagatgtttcatacgctataagtgctacgagtagataccaggctgatccaggtgaggatcactggacagcggtaaaaggcattcttaagtacttaagaaggactaaagatatgttcctggtatatgggggtaaggaggagctcgttgtaactggttacaccgatgctagcttccaaactgacccagacgagttaaaatcgcaatcaggttttgtgttcacaataaatggtggtgctgttagttggaagagttccaaacaggagactgtgactgattctacaacagaagccgagtacattgcagcttctgaatctgcgaaggaaggtgtttggataaggaagttcctcatcgagcttggtgtgtttcctaatgcatctagcccattgaacctctactgtgacaacaatggggctattgcgcaagctaaggagccaaggaaccaccagaaaaacaaacacgtactgcggaagtttcacctcatacgggaattcattaggcggggtgagataaagatatgcaaaatacatacggatttgaatgttgctgatcctttgacaaaacctcttccacaacctaagcatgaggcacacgtgagatctatgggtattagatatcttctagattaa

SEQ ID NO: 5141 - DNA, 471 bp, Zea mays
  Clone ID: TF_uC-zmflteosinte082f08b1
ttttcataccgatagcgatgtcagctccattaggggtagcctcagcactgacttgggtgaccctagcaatgctgaatcccttgtcagaggttggagtctgttgcttgttctgagctggtgtgttggaattccccatcggacaagcgattgcatagtgcccaacctgactacacttgaagcatgtggggcctgttctctgtctgcgggccttgccggggcgccagagggggcaacctgaccagtgtggggtgtctgcggagtctcctgagctggactcggccctcctccaagacgagctggagtaccctggggcggaacatatcgaggacgaatactgctgctaccctgaccctgagaacggccttgctatacattctcccagcagaacacgctcgtgctcaatagctagagccttttgctacgagtatctaaactgatggaaaggcgtgagcaaccactgcatactatagt

SEQ ID NO: 5142 - DNA, 1284 bp, Zea mays
  Clone ID: TF_ZM4631.C1.o5.fg
atggacgctgaagattggctgcgtaccgtggagcgtgagttgcacactgcccagtgcaacgatcgtgagaaggtgttgtacggtccccgacagctcaggggaacagtccagtcttcttgggagtcttacctcgccacccatgccaaccctgaatccatcacttgggaagaattcagggacaacttccgtcgctaccatgtgcccgagggactgatgatagtgaggaaggaggagtttctcgccttgaagcaaggtcccctgtccgtcagcgagtacagggacaagtttctgcagctgtcgcgttatgtcccagaagatgtcaacacatccaagaggcagcaatccacttcagccattcaagcaaggtcaccagcaccagcaccagcatcagcatcaaaaccagcaacagcagtgccaaaggcagtttcctcagtagcagcagcagtaccgttagaacaacaagcaaggaggaaatcaatatcagcgtcagggcaatcaggcagcccgtcttcttgccccagcaaccaatcagaacaaccaagcagcgccagcgcaaggaggaagtcgtgcatgtttccactgtggggaacaaggccattgggcaaatcattgcccaaagaaagtagctcagaagcagccagctcccaatgccccagtcagacagaatgcaatgcagcaaggaggcaacaaccgtgggcaacctcgtgcccagtatggaaaggtgaaccacttggagtccgacacagtccagaagactccaggagtggcactaggagaagaagtgttatggagttggtcttgtctggaccaaggaaaggaagttgtcaccaagtcaccgcccatattgaggagattaaaccatcagaagctatcaatgtagtatcagaattcccagatgtgtttcccgaggagttactgggtatgccacctgaaaggaaggttgaatttgccatagagcttataccaggcaccacccctatttccaagagagactatcgagtgtccggaccagagttggtggaactcaagaagcagattgatgagttgtcggagaagggctacatcagaccgagtacctcgccttgggcagccccagtgctatttgtggagaaggatggaacaaagaggatgtgcattgactacagatctttgaatgaagtcactatcaagaacaagtaccccctgcccagaattgaagacttattcgatcagttgagaggagccagtctgttctcgaaaatagagaccagggccatggtgggtgcaccagggttctcgatctag

SEQ ID NO: 5143 - DNA, 1926 bp, Zea mays
  Clone ID: TF_ZM4545.C3.o1.fg
atgtcgggagatcacaccaagaaggaggtcatgaccggcgagaagcccgctacaagccacgagaagactccatcaagggagtctggctccaaagtaaagggagaatcaccctcccacaacaagtcgcatcggagtggcgacaaggaaaagaagatgaagaaggtggtctactacgagaccgattcttcgtcgccatccacctccgactctgacacgtcttctgtcacttctaagcgccatgagtgcaagaagtttagtcagatccccttacgctaccctcgcttttctaaacatactcctttactttccgtcccactaggcaaaccacccgtttttagggtgaaggtaccatcgctgggggatgaagattatgattcagacgaggttgaccaaatccggcacttcaactcccaagccactactatactcctcgcctctctaagtcgagaggagtataataaggtgcaagggttgaagagtgccaaagagatttgggatgttctaaaaaccgcgcacgaaggagacgaggtgaccaagatcaccaagatggaaacggtcgaggggaagcttggtcgatttatgctcaaccaaggggaggagccacaagccatgtacaaccggctcaagaccttggtgaaccaagtgcgcaacctcgggagcacaaaatgggatgaccatgaaatggtcaaggaagttataggaaaatttgtgagctttgaattgatgatcaaaggctccaagaaaatcatcgagcaaggcgcctcctccacacccgagatgcaactcgtcgcattcaaggcgacggaggagaagaaagaagagtctacatcaagtagacctcccatcgacgcctcaaagctcgacaacgaggaaatggcactcatcatcaagagcttccgccaaaccctcaagcaaaggagggggaaggattacaagccccactccaagaaagtttgctacaagtgtggtaagcccagtcactttatagcaaaatgtcctatttctagtgacattgacaggggcgacgacaagaagggaaagaggagggaaaagaagaggtactacaagaagaagggcggcgatgcccatttatgccgtgagtgggactccgacgagagctccaccaactcctccgacgaggacgccgccaacatcgtcgtcaacaagggactcgtcttccccaacgtcggccacaagtgcctcatggcaaaggacggcaagaagaagaaggtaaaatctagatcctccactaagtatgcaacttctagtgatgaggataactctagtgatgatgaggataatttgcttactctttttgctaatcttaacatgcaacaaaaagaaaaattaaatgaattgattagtgctattcatgagaaggatgaactcttggatagccaagaggacttccttattaaagaaaacaataagcatgttaaggttaaaaatgcttatgctcaggaggttgagagatttgatgattgtgataattcaattgttagtcttagaaatgataatgccaatttaattgctaagattgacaagttgaatgaatctctttctagccttaagattgagaatgataaattaattgctaaggctaaggaattagatgtttgcaatgtttctattttctatcttagaaatgagaatgctattttacatgctaagattgatgatttaaatgcatgcaaaccctctacttctagtgttgatcatgtttctatttgtactagatgtagagatattaatgttgatgctattcatgatcaccttgctatgattaaacaacaaaatgatcatatagctaaactagatgctaaaattgccgagcatgaactagaaaatgagaagtttaaatttgctcgtagcatgctttatagtgggagacgccctggcattaaggatggcattggcttccaatag

SEQ ID NO: 5144 - DNA, 4869 bp, Zea mays
  Clone ID: TF_ZM4926.C2.o1.fg
atgtcgggagaacacgccaagaaggagatggagaccggcgacaagcccgctacaagccacgggaaggcttcatcggaagagtcccgcaacaaaaagaaagggaaggagaagaaagcctcctcccacaagtcgcatcggagtggcgataagaaaaagaaaatgaggaaggtggtctactacgagaccgatacttcatcaccttccacctccggctccgacgcgccctccataacttctaagcgtcatgagcgcaagaagtttagtaagattcccttacactatcctcgcacctctagacatactccattactttccgttccattaggcaaaccaccaacctttgacggtgaagattatgctagatggagtgatttaatgaaatttcatctaacctcactccacaaaagtatatggaatgttgttgagtttggagcacaggtaccatccgtaggggatgaggattatgatgaggacgaggtggcccaaatcgagcacttcaactcccaagccacaaccatactcatcgcctctctaagtagggaggagtacaacaaggtgcaaggattaaagagcgccaaggaagtttgggacgtgctcaagaccgcgcacgagggtgatgaactcaccaaaatcaccaagcgggaaatgatcgagggggagctctgtcgcttccatctacgccaaggggaggagccacaagacatgtacaaccggctcaaaaccttggtaaatcaagtgcgcaacctcgggagcaagaaatgggatgaccacgaggtggttaaggttattcttagatcactcattttccttaaccctactcaagttcaattaattcgtggcaaccctagatacacactaatgactcccgaggaagtaatcgggaattttgtgagctttgagtttatgatcaaaggctcaaggaagatcaacgaacttgacggcccctccacgtccaaagcacaaccggtcgcatttaaggcgacggaggagaagaaggaggagtctacaccgagtagaacacccatcgacgcctccaagctcgacaacgaggaaatggcgcttgtcatcaaaagctttcgccaaatcctcaagcaaaggagggggaaagactacaagccccgctccaagaaggtttgctacaagtgtggtaagcccagtcactttatagcaaaatgtcctatttctagtgacagtgacaggggcgacgacaagaaggggagaagaaaggagaagaagtggtactacaagaagaagggcggcgatgcccatgtttgtcgcgagtgggactccgacgaaagctctagcgactcctccgacgatgaggatgccgccaacatcgccgtcaccaaggggcttctcttccccaacgtcggccacaagtgcctcatggcaaaggacgacaaaaagaagaaggttaaatctaaatcctccactagatatgagtcttctagcgatgataatgctagtgacgaggaagataatttacgtactctttttgccaacttaaacatgcaacaaaaagagaaattaaatgaattgattagtgctatccatgagaaggatgatctcttggactcccaagaggacttccttataaaagaaaacaagaagcatgttaaagtaaaaaattcttatgctctagaagttgaaaagtgcgaaaaattatctagtgagctaagcacttgccatgagactatagacaaccttagaaatgagaatgctaatttgttagctaaggttgattctattgcttgtaatgtttcaattcccaatcttagaaatgataatgatgatttacttgctaagattgaagaattaaacatgtctcttgctagccttaggattgaaaatgaaaaattgcatgctaaggttgtagaattaaaatcttgcaaaccctctacatctatcgttgagcacacttctatttgtactagatgtagagatgttgatgttaatgctattcatgatcacatggctttaattaaacaacaaaatgatcgtatagcaaaattagatgctaaaattgccgagcatgaacatgaaaatgaaaaatttaaatttgctcgtagtatgatttatagtgggagacgccctggcattaaggatggcattggcttccaaaaggggaacaatgtcaaacttaatgcccctcctaagaaattgtctaattttgttaagggcaaggctcccatgcctcaagataacgagggttacattttgtaccctgccggttatcctgagagcaaaattaggagaattcattctaggaagtctcactctggccctaaccatgcttttatgtataagggtgagacatctagttctaagcaaccaacccgtgctaagttgcctaagaagaaaactcctaatgcatcaaatgatcatgacatttcatttaaaacctttgatgcatcatatgttttaactaacaaatccggcaaggtttatgcatccgggggctcaagttggataatcgacagcgggtgcacaaaccacatgacgggggagaagaagatgttctcctcctacgagaaaaaccaagatccccaacgagctatcacattcggggatggaaaccaaggtgtcactgtctttagaagaagtgatgattcaatagcatttaaaggagtgttagagggtcagctatacttggtagattttgatagagctgaactcgacacttgcttaattgctaagactaacatgggttggctctggcaccgccgactagcccatgttgggatgaagaatcttcataagcttctaaagggagagcacattttaggattaacaaatgttcattttgagaaagacaggatttgtagcgcatgccaagcagggaagcaagttggtgcccatcatccacataagaacatcatgacgactgacaggccactggagctcctacacatggatctattcggcccgattgcttacataagcatcggcgggaagaccttaaagggattcttgagacaggctcaaaatgagttcggcttgaggatcaaaaagattagaagcgacaatgggacggagttcaagaactctcaaattgaaggcttccttgaggaggagggcatcaagcatgagttctcttctccctacacgccacaacaaaatggtgtagtggagaggaagaatagaactctattggacatggcaagaaccatgcttgatgagtacaagacatcggatcggttttgggccgaggcggtcaacaccgcctgctacgccatcaaccagttatatctacaccgaatcctcaagaagacatcatacgaactcctaaccggtaaaaagcccaatatttcatattttagagtctttggtagcaaatgctttatacttgttaaaagaggtagaaaatctaaatttgctcctaagactgtagaaggctttttactaggatatgattcaaacacaagggcatatagagtctttaacaagtcctccagacaagttgaagtttcttgtgacgttgtgtttgatgagactaacggctctcaagtagagcaagttgatcttgatgagataggtgatgaagaggctccgtgcatcgcgctaaggaacatgtccattggggatgatgaagctcaagttgatgaagtacaagatcaagcaaatgagccacctcaagatgacgacaatgatcaagggggagatgcacatgatcaagacaaggaggatgaagaaccaaggcctccacacccaagagtccaccaagcaatccaacgagatcaccctgtcgacaccatccttggcgacattcataagggggtaaccactagatctcgtgttgcacatttttgtgagcactactcttttgtttcctctattgagccacacagggtggaggaagcactacaagattcgaattgggtggtggcgatgcaagaggagctcaacaacttcactaggaatgaggtatggcatttagttccacgtcctaaccaaaatgttgtaggaaccaaatgggtgttccgcaacaagcaagatgagcatggtgtggtgataaggaacaaagcccgacttgtggccaagggatattcgcaagtcgaaggtttggatttcggtgaaacctatgcacccgtagctaggcttgagtcaattcgtatattattggcctatgctacttaccatggcttcaagctttaccaaatggacgtgaagagtgctttcctcaatggacctatcaaggaagaggtctatattgagcaacctcccggctttgaagatagtgagtaccctaatcatgtctataaactctctaaggccctttatgggctcaagcaagctccaagagcatggtatgaatgccttagagatttccttatcactaatggattcaaagtcggaaaagtcgatcctacactcttcactaaaactcttgaaaatgacttgtttgtatgccaaatttatgttgatgatattatatttgggtgtactaacgagtctacatgtgaagaatttagtaggatcatgacacaaaagttcgagatgtcaatgatgggggagttgaagtacttcttaggatttcaagtgaagcaactccaagagggcaccttcctaagccaaacgaagtatactcaagatatactaagcaagtttgggatgaaggatgccaaacctatcaagacacccatgggaaccaatgggcatctcgacctcgacgaaggaggtaaattcgtcgatcaaaaggtataccggtcgatgataggttctttgctctatttatgtgcatctcgactggatattatgctttccgtatgcatgtgtgcaagattccaagctgaccctaaggaagctcaccttacggccgtaaaacgaatcttgagatttttagtttatactcctaagtttgggctttag

SEQ ID NO: 5145 - DNA, 4620 bp, Zea mays
  Clone ID: TF_ZM4932.C3.o1.fg
atgtcgggagaacacgccaagagggagatggagatcggcaacaagcccatcggcgacaagcccactacaagccacgagaaggcttcatcggaagagtcccgcaaaaaggggaaggggaaggagaagaaagcctcttcccacaagtcgcatcagagtggcaacaagaaaaagaagatgaggaaggtggtctactacgagaccgatacttcatcaccttccacctccggctccgacgcgccctccgtaatttctaagcgtcatgagcgcaagaagtttagtaagatccccttacgctatcctcgcattcctaaacatacgcctttactttccgtcccattaggcaaaccactaacttttgatggtgaagattatgcaaggtggagtgatttaatgcgatttcatctaacctcactccacaaaagtatatgggatgtcgttgagtttggtgtacaggtaccatccgtaggggatgaagattatgatgaggacgaggtggcccaaatcgagcacttcaactcccaagccacaactatactcctcgcctctctaagtcgagaggagtataacaaggtgcaagggttgaagagcgccaaggaagtttgggacgtgctcaagaccgcacacgagggagatgagcttaccaagatcaccaagcgggagacgatcaagggggagctcgtgcgcaacctcgggagcaaaaagtgggatgaccacgagatggttaaggttattcttagatcactcattttccttaaccctactcaagttcaattaattcgtggtaatcctagatatacactaatgactcccgaggaagtaatcgggaattttgtgagctttgagtacatgatcaagggctcaaagaaaatcaatgagctagatgatccctccacatccgaagcacaaccggtcgcatttaaggcgacgaaggagaagaaggaggagtctacaccgagtagacaaccaatcgacgcctcaaagctcgacaacgaggaaatggcgtttgtcatcaagagcttccgccaaatcctcaagcaaaggagaaggaaagattacaagccccgctccaagaaggtttgctacaagtgtggtaagcccagtcactttatagcaaaatgtcctatttctagtgacagtgacaggggcgacgacaagaaggggagaagaaaggagaagaagaaatactacaagaagaagggtggcgacgctcatgtatgccgcgagtgggactcggacgagagctcctccgactcctcctccgacgaggacgccgccaacatcgccatcaacaaaggccttctcttccccaacgtcggccacaagtgcctcatggcaaaggacggcaaaaagaagaaggttaaatccaaatcctccactagatatgagtcttctagcgatgataatgctagtgatgaggaagataatttgcgtacactttttgccaacctaaacatgcaacaaaaggaaaaattaaatggattgattagtgctatccatgaaaaagatgatctcttggactcccaagaagacttccttattaaagaaaacaagaagcatgttaaggttaaaaatgcttatgctctagaagtagaaaagtgcgaaaaattatctagtgagctaagcatttgccataagactattgacaaccttagaaatgaaaatgctaatttgttagctaaggttgattcaaatgtttgtgatgtttcaattcccaatcctagaagtgataatgatgatttgcttgctaagattgaagaattgaacatttctcttgctagccttagagatgaaaatgaaaaattgcttgctaaggctaaagattttgatgtttgcaatgctaccatttctgaccttagaagtaaaaatgatatattgcatgctaaggttgtagaattaaaatcttgcaaaccatctacatctaccgttgagcacacttctatttgtactagatgtagagatgttgatattaatgctattcatgatcacatggatttaattaaacaacaaaatgatcatatagcaaaattagatgctaaaattgccgagcatgaacttgaaaatgaaaattttaaatttgctcgtagtatgctttatagtgggagacgccctggcattaaggatggcattggcttccaacagggaggcaatgtcaagcttaatgcccctcctaagaaattgtctaattttgttaagggcaaggctcccatgcctcaagataacgagggttacattttgtaccctgtcggttatcctgagagcaaaattaggagaattcattctaggaagtctcactctggccctaaccatgcatttatgtataagggtgagacatctagttctaggcaaccaacccgtgctaagttgcctaagaagaaaactcctagtgcatcaaatgatcatgacatttcatttaaaacttttgatgcatcatatgtcttaactaacaaattcggcaaggtttatgcatccgggggctcaagttggataatcgacagcgggtgcacaaaccacatgacaggggagaagaagatgttctcctcctacgagaaaaaccaagatccccaaagagcgatcacattcggggatggaaatcaaggtgtcactgtctttagaagaagtgatgattcaatagcatttaagggtgtgttagagggtcagctatacttagtagattttgatagagctgaactcgacacatgcttaattgctaagactaacatgggttggctctggcaccaccgactggcccatgttgggatgaagaatcttcataagcttctaaagggagagcacattttaggattaacaaatgttcattttgagaaagacaggatttgtagcgcatgccaagcaggaaagcaagttggtgctcaccatccacataagaacatcatgacgactgacaggccactggaactcctacacatggacctattcggcccgattgcttacataagcatcggcgggagtaagtactgtctagttattgtggatgattattctcgcttcacttgggtattctttttgcaggaaaaatctcacacccaagagactttaaaaggattcttgagacgggctcaaaacgagttcggcttaaggatcaagaaaattagaagtgacaacgagacggagttcaagaactcacaaatcgaaggcttccttgaggaggagggcatcaagcatgagttctcttctccctacacaccacaacaaaatggtgtagtggagaggaagaatagaactctattggacatggaaagaaccatgcttgatgagtacaagacttcggatcagttttgggccgaggcggtcaacaccgcctgctacgccatcaaccgagtcttcggtagcaaatgctttattcttattaaaagaggtagaaaatctaaatttgctcctaagactgtagaaggctttttactaggatatgattcaaacacaagggcatatagagtctttaacaagtcctctggacaagttgaagtttcttgtgacgttgtgtttgatgagactaacgactctcaagtagagcaagttgatcttgatgagataggtgaggaagaggctccatgcatcgcactaaggaacatgtccattggggatgtgtgtcctaaggaacccgaagagcctccaagtgcacaagatcaaccatcctcctccacgcaagcatctccaccaactcaaaatgaggatgaggctcaaagtgatgaaggagaaaatcaagcaaatgagccacctcaagatgacgacaatgatcaagggggagatgcaaatgatcaagacaaggaggatgaagaaccaaggccgccacacccaagagtccaccaagcaatccaacgagatcaccccgtcgacaccatcctcggcgacattcataagggggtaaccactagatctcgtgttgctcatttttgtgaacattactcttttgtttcctctattgaaccacgtaggatagaggaagcacttcaagattcggattgggtggtggcgatgcaagaggagctcaacaacttcacaaggaatgaggtatggcatttggttccacgtcctaatcaaaatgttgtaggaaccaagtgggtgttccgcaacaagcaagacgagcatggtgtggtgacaaggaacaaagcccgacttgtggcaaaaggatactcccaagtcgaaggtttggatttcagtgaaacctatgcacccgtagctaggcttgagtcaattcgtatattattggcctatgctacttaccatggcttcaagctttatcaaatggatgtgaagagtgctttcctcaatggaccaatcaaggaagaagtctatgttgagcaacctcccggctttgaagatagcgagtaccctaaccatgtatataagctctctaaggcgctttatgggctcaagcaagccccaagagcatggtatgaatgccttagagattttcttatcactaatggattcaaagtcggaaaggccgatcctacactctttaccaaaacacttgaaaatgatttattcgtatgccaaatttatgttgatgatattatatttgggtctactaacgaatctacatgtgaagagtttagtaggatcatgacacaaaaattcgagatgtctatgatggggtag

SEQ ID NO: 5146 - DNA, 583 bp, Zea mays
  unsure (1)..(583): unsure at all n locations
  Clone ID: TF_ZmC685828_1
gcgtttcggnctagttctagnacgcgagcggacgctctttgtcgtttttatttaggtttgcggcgtgacattcaggacattatggattacaaagaatttaacactgtcaacaagttgttccagtttgctatgcttgcagagacggaattgcagggacgccaacatcgacctagggctacttttggcgcctcctctacatcacggacgcacacacctgcctcgagtcatacaccttcgaccactccagcgtccacgcgacctccctcgacacctgctgcacatgttggtaaccttcctttgcaggtacccaccaagaaacataattcactagcacctgcagcaacttccagtggtcgttcttcgggtattgtttgccaccgctgtcatgggattggtcacgtgaagaaggattgcccgagtcagcgaacatacattgctacggatgatggctacattagtacttccgacgctgagggtgacgatgatgactccagtgatgttgctgccaatgatgatgccatgcttggtgctgatgctatagtgaaccttcgaagcatcatggtgcagcgtgttcttagttctc

SEQ ID NO: 5147 - DNA, 1656 bp, Zea mays
  Clone ID: TF_ZM3671.C11.o6.fg
atgccggctacacgcatagtgtcgcttcgcctccagtccaccctcctgaaaaaaggagatcggctgaacttcaacttcaaccggggtccagagaggttcaaccggggtccagggcaagttcaaccggggtccagagaagttcaaccggtgtctagggaaagttcagccggggtattttcccaggacctcactgatgttgatcctagggcaatagaccttgccatgagaatcgccgaaaggatgtttctcaaaatgaaagaagatgaggcaaagaacaagattgaagaagaaaatgatcgatggagaccaaacgacgaatccacctcttcacaaggtttgtctttcaaatccacttctcatatgtgctttatcgctaatgggagtgacagtgaaagcgaaagtgaggatgaggaggagcaagaaagtgatagtgaagatgaggatgatcttcaacaattcttcgctcagttaagcaagaaaaatcggatgagcttgctcaaactcatgaaaagagcggaagaacaaaaagaaatgcttcataagcaagaagacttcctcatcagaaaaatcgaagacttagagaagttgaccaaagagcatgaaaagctaaagtgctctcatgatggtttggtccaaaggtatgaagacatttcaattgagaaaattagagctattaatcattcatcatatattgctcaattagaaaataaaaatgttatgctcaagaacacgatagaaaagctaaatattgaaaatctagctttacaagaaaaacatgatatgcttgtgtgctctcataataaatttatagattcacatatcatgttagaaatggctcatgaggttgtgttaactaatttgaaatcataccaacctcacatatgcacatgtactcaagtagaaactatattatcatgtgctaacaaatgttgctctcaagaaagccaatcttccattgagttagaaatttcaggaattagtgatatttctatcacacaagaaaataaagagctcaaggaagaagttggaagactaagaaggagcttaactcttttgaagggaaagtgtcatgctcaaccttctcaagataaccgtgataatatggtgaaaaagcttgagaaggggacaaccgtagcatgcacaaaaccccttcaaaggaataccaagctttccaagaagggcatgagcaaaatttatggtaagaaacttaatgctcatactatttgctctaacaatgtacctatgtgcttcaacaaagaaagatcaaagagaagcgatagaaggtgttatggatgcaaggagaagggtcatgaaattgattcatgccctcacatgaagaatcaagaccttgcacgatcaagaaagatgaccatcaagaaagatgaaagcagaaggcaaatgcattgcaaggacaagcaccgcatttgctacagttgtcgtgaaaaaggtcatctattcaaggtttgtccaaagggtaaaattcctaagcctaacttgtcaatacattcagatatgcttaggagacccaaatttgattcttgtgctagaaaggtgatgagttcaccacattctaggaccaaggctatttgggtgcctaagtccttattggctaaccatgatggacccatcatgagatgggtaccaaaatatacttaa

SEQ ID NO: 5148 - DNA, 3977 bp, Zea mays
  unsure (1)..(3977): unsure at all n locations
  Clone ID: TF_ZmC36654_1
atgctgattagccagattgctcagatgaaaccgctagatggtagtaattaccattcttggcgggaggatatagacatgataaccacagtgggtgagatagattacgcactgaggtttgataaaccagttgagcccacagtgggcactcccaactatgaccacaggtggatgcaatacagcatcgacaaggtcaagtgggagagatcaaatgacaaatgtatgattattcttaagaggagcatcaaggagcctcttaagagttccataccagagtgcgagactgccaaagaataccttgagagggtagcctctcatcaccaagggtcttctaaggcttatgcttgctatctaatgacagaatttgtcaatgcaaaatacgatggaaatggtgtcagaccattcattcagaaaatgatatccatcgtagctaagataaacaagtacctcgggtctcctttacacgaggaatttgtagtatttatgataatgaagtctctgcccaaggagtttgagacttttcacatacagtacaacactagtgtcactgataagtggaatatagatcaactcttggcacagtgtgtccaggaggaagagaggttaaagcagactggagactctgtcaacctcatcaaaggcaatgtccccagacagaacaagaactcaaagaaaatgttcaagaagcaaggtaaacagaataaccaggcttcctcgagcaataataatcagccaagacaaggaggcagtttctcagttccccctgatacctgcctctattgcaagaagacaggtcattacaagaggaagtgccctgaattcctgcagtatctactagagagtggtaaggaccaagttacttttgtaaatgagtctttatacttagaatatcccagttattcttggtggattgactcgggtgcaactgttcatgttgcaaactctctacagggactccgtacaagccaaaggctcccaaagggccgaagaacaattagagtggcaaatggagttgaagcagcagtcgaggccattggagatatacatcttaaattagttaatggttttgtactgttgttgagagacgtactttatgtaccttccttgcgaaggaaccttatttcggtttctagattagatgatcagcacattcattgccattttggtgatagacagtgtgtcattcagtttgataataaagatgttggtctcgccatccgacgagatatgctttatttactttcgcaaagtgatgttgttaatgtattagatataccagaaaacgatccagccagcagtggcaggaaaagaaaacgaagtgatggagaaacctcgtcgaaattatggcactatcgtttgggccatatttcgannnnnagaatagaaagtcttgttaaggaacagattctccatcccctagatttcacagacttagagcaatgcagagattgcattaagggtaaattcgcgaagcagattaagaaagatgctaagcatagtacgagagtgttagaaattattcatacagatatctgtggtccttttccagttaggacagtagatgggtttaattcgttcataaccttcacagatgactactctcgctacggttatatttatcctattaaggaaagatcagaagctttagacaagtttaaacagttcaaggctgaagtagagaatcaacacgatttgaagataaagattgttcgatcagatcgtnnnnnnnagtactatgggcgccataccgagtatggccaggtcccaggacctttcgcgaggttcctaagagaaaacggtattgttgctcagtattcaacacctggcgannnnnnnnnnnnnnnnnnnnnnnnnnnnnnnnnnnnnnnnnnnnnnnnnnnnnnnnnnnnnnnnnnaagttactctaacctgccattgggtctatggatggaggctttnnnnnccgctatgcatatactcaacagagttcctagtaaatcagtggctagaactccatatgagttgtggactggcagaaaacccacgctcaactacttccatatatggggttgtccagcagaagctagaatatttaatcctggacagggaaagctagatgagagaaccactagctgccattttattggctaccctgacagatcaaagggatacagattctactgccctgacagacaaaccaagttcatagaaaccagacatgccattttcttagaggatgacatgatcaaggggagtaaggtactcagagaggttgaccttcaggaaaagaggatatatgtcccgtttccgatggttgaagaaccacacttctcgatacccactgtggttacaccaacagtcacaccgactgtgggtgaaacacctgctgcaaatgtggcatcatctagtgcaactactacagagcaagtagcttcaccttctgcgcatattggccctgagccagttgcacaggacagttcagaagatgatgatagtgttgcgccaagtgatgcaccattgcaggagccccaggtagaatctgaaccagaaccaagtctcaggagatcacagagactcagaaaatctgcgattcctgatgactatgaagtctatgcagcagaaaacatagaatgtgatgagattcatatgagtgaggacattgatacagaaggtgatcccactnnnnnnnnnnnnnnnnnnnnnnnnnnnnnnnnnnnnnnnnnnnnnnnnnnnnnnnnnnnnnnnnnnnnnnnnnnnnnnnnnnnnnnnnnnnnnnnnnnnnnnnnnnnnnnnnnnnnnnnnnnnnnnnnnnnnnnnnnnnnnnnnnnnnnnnnnnnnnnnnnnnnnnnnnnnnnnnnnnnnnnnnnnnnnnnnnnnnnnnnnnnnnnnnnnnnnnnnnnnnnnnnnnnnnnnnnnnnnnnnnnnnnnnnnnnnnnnnnnnnnnnnnnnnnnnnnnnnnnnnnnnnnnnnnnnnnnnnnnnnnnnnnnnnnnnnnnnnnnnnnnnnnnnnnnnnnnnnnnnnnnnnnnnnnnnnnnnnnnnnnnnnnnnnnnnnnnnnnnnnnnnnnnnnnnnnnnnnnnnnnnnnnnnnnnnnnnnnnnnnnnnnnnnnnnnnnnnnnnnnnnnnnnnnnnnnnnnnnnnnnnnnnnnnnnnnnnnnnnnnnnnnnnnnnnnnnnnnnnnnnnnnnnnnnnnnnnnnnnnnnnnnnnnnnnnnnnnnnnnnnnnnnnnnnnnnnnnnnnnnnnnnnnnnnnnnnnnnnnnnnnnnnnnnnnnnnnnnnnnnnnnnnnnnnnnnnnnnnnnnnnnnnnnnnnnnnnnnnnnnnnnnnnnnnnnnnnnnnnnnnnnnnnnnnnnnnnnnnnnnnnnctcctatgttcttggaatagaaattcgcagagacagacaaaagggagtactaggactctcacagaagtcatatatagaaaatgtactaaagaggtataatatgcacaagtgtaatgcctcgcctggtccaatagtcaagggtgataagtttggggaatatcagtgtcccaagaatcagtatgagnnnnncaagatgaagtcagtaccatatgcttcagctatcggaagcattatgtatgctcaagtatgtactcgccctgacttagcttttaccaccgggatgcttggacgctatcagaagaatccaggcatagaacactggaaagcagtcaagaaggctctaaggtaccttcaaggtactaaaggtctcatgcttacgtacagaagatctaattccctacaaatagttggctatgcagatgccgactggggagggtgtagagatacactgaagtccacttcagggtatgtctttatgctctctnnnnnagctatttcttggaagagctgcaaacagacagcgagagcatcgtcgacaatgcacgctgagtttgtagctacgtatgaggcaactggacaggcgatatggataaagaaattcgtacccggattaagagtggttgatagcatagagcg

SEQ ID NO: 5149 - DNA, 664 bp, Zea mays
  Clone ID: TF_ZmC36654_4
gaatttgtagtgtttatgataatgaagtctctgcctaaggagtttgagacttttcacatacagtacaacaccagtgtcactgataagtggaatatagaccaactcttggcacagtgtgtccaggaggaagagaggttaaagcagactggagactctgtcaacctcgtcaaaggcaatatccccagacagaacaagaactcaaagaaaaagttcaagaagcaaggtaaacagaataaccaggcttcctcgagcaataataatcagccaagacaaggaggcagtttttcagttccccctgatacctgcctctattgcaagaagacaggtcattacaagagaaagtgccctgaattcctgcagtatctactagagagtgggactccgtacaagccaaaggctcccaaagggccgaagaacaattagagtggcaaatggagttgaagcagcagtcgaggccattggagatatacatcttaaattagttaatggttttgtactgttgttgagagacgtactttatgtaccttccttgcgaaggaaccttatttcggtttctagattagatgatcagcacattcattgccattttggtgatagacagtgtgtcattcagtttgataataaagatgttggtctcgccatccgacgagatatgctttttttt

SEQ ID NO: 5150 - DNA, 1470 bp, Zea mays
  Clone ID: TF_ZM4446.C1.o1.fg
atgagtagtgatagtgacttatttgttgatgctcatgatctttggactaaagttaagttgaaaatttttaagtccatatgcactacttctgctccctctattgctggtagtactaacttgtccaagggagaagaacaagaacgatggacaccaaacgatggatccacctcaccaacaggttcatctcccactagttatacatgtcttgttgctaacgatgagagtggagatgaaagcgatgatgaggaggaatatgaggatgaggagtctacatcatcacaaggtacattttcctgttttgcttccactgataataatgacagggaaaatgagaccgacgatgtggaagaagaggagattcgccatttctacacccatctcaacaaagaagacaaagcgctcttggttaagttgttgagaaggatcaaggaacaaagcgagacgcttctcaggctagaagagactctcatcaaaaccaacgacagtctggagaagatgaccaaagaacatgaggagctaaagtgctctcatgatgatttggtccaacagtatgattcagttttaattgagcaaagaaataatgatgatgatttatcttgtgttgctcaacttaaaatggaaaatgccatgcttgagaggcaagtagaattgctaaatttagaaaagcttgctctaggtgaaaagtatgatatgttgtcatattctcataataaattagttgatgaccatatcatgctcgatattgctcatgaggtagtaattactagtttaaacttatgtgaacctcattcttgtacatgtgcacatttagataatatatcaccatgtgctaacccctgttgctcaaaagaaagccaatgtttgaatgagcatcaagctacaggatcaaaagaaaagttgctcatcaataaagaaaggaacaagaaagcaaagcaactaaggagaagacgtcgtgctcaagatatttacaaacatgtggtgaataagcttgaggaagaaggaaccgcagcaagggtcaaactctgcgagaaagaagctcctaagaacaaaaagagaagaggaaaaaggaggtgcttcaagtgcaatgagtcaagccacctcattgcttcttgtccatacaaagacaaggatgaggggatgaggagatgttttggatgcaacgataaggaccatatgatcacttcatgtccgctcatgaagaatcaaagacgtacaccctccaagatgaccctcactaaggaaaaagacaaacaacaagtgtcatgtcaggttgagcgacacttttgctacatgtgtggtgagcgtggtcatctatccaagtctcaaggtggaaaagggaagatgagcaagaaatggaagaatcaggacttgggtacctccataagtcaagtatttggtatcttaagctcaacaagacaaggtcaggataaaggatcaggcacaagtgtgaaggagcttcctagagattaa

SEQ ID NO: 5151 - DNA, 775 bp, Zea mays
  unsure (1)..(775): unsure at all n locations
  Clone ID: TF_ZmC1239986_1
ctttctcaggctcttatcagagatgattcctgcaagcaagctcatgattcccaagacaagggcgtcccatttcatcaatcaaagcttcaatggtccgccgcagctggcgatggctcctatgcgacgacccgggtggatacaagatcaaaatccaaagcagatccgcgtccagtgcaggcagctcttggtgatcctcttcggcagacttcaatgccgcgtatcctggcgtctggaaaggccgaggtgggtgcagatcgcactccggatttccagctctcctgcaagccggaaggggatttgaattcgggcaacgtttggtcacatcggcgtgctgctggtctcgatgccgcgccgcgtttgaatggacagaggccataccctgctgcgtcggatggcattgaaggggactggtcggtggtcagaccgcggtactggtggcgcaagagctggacgtctactgagcgaacacggcaatatcatcaattcgacgtgaagggcactggtcttttcaaattgaagctaaagggcaaatgttacaattgcttctcaccagatcatctagctttttgctgccaggctccttcgcgctgctggctttgccttcaatccggacatcgagcgagatactgcagccggattagctatcaggggacattcactgctgctgggttttttcctaagccagtcgaacaaccatcaaggacccctacctaccatgaggcacgaccatggactgacgatctacataaganccttgagcattgcggtaggacca

SEQ ID NO: 5152 - DNA, 5094 bp, Zea mays
  Clone ID: TF_ZmC36592_163
tcagactggatttgggaaaagataagggtattccctcctcaagaagtcctcactctcccaggtggcttcctcttctccttctctgctccactgaactttacagagctttacttctgaggtgcgggtctttctgattgctgaatcaagaaccttcactggtttttcacgatactgaaggtctttctgaatctgcaccgtctcttcttcgaggtgactttctggtgcttgcaggcatttgcggagctgggatacgtggaacacattgtggatgtcagacatggattctggtagttccaggcggtatgctgcgggtcctaccctgccaatgatgggatagggacctacaaaacgtggggctagcttccctttgacttggaacctcctgacaccacgcattggagaaaccttgaggtagacgaagtctccttcctcaaatctgagttccctccgtctgttgtctgcgtaactcttctgccgactttgagcttcaagcaaccttctgcggatcagtgcaactttctcttccgcctctttgacaaaggcaggtccttctagtgcttttcccccacgttggaccacatgagaggggtatgctcttaacagatcttcaaggactttgttgactctctctgtctgcccatctgtctgagggtgataagcggtactgaaatctagcttggtgcccatagctttctgaaggcttgtccagaatttggatgtgaactgggttcctctgtctgatactatctttcttgggatgccatggagtctgactatctccttgaggtaaatccgggcaagggtggctcctccaaaggtagttttcactggaatgaaatgggctaccttggtgaggcggtctattattacccagatggaatcattccctttttgcgtctggggcaatccggtgacgaagtccatgcctatttcttcccacttccattcaggtattgggaggggttgtaataggcctgcaggtttttggtgttcggccttcgtccgttggcagatgtcacatcgggccacatactgagctatttctttcttcatccccttccaccagtatctggtcttgaggtccaggtacatcttggtagtcccggggtggatggagtaggccgagtcgtgagcttccttgagtaggacttctcgggcttccccttttggtacacacagacggtgtttgaaccaaaggactccttggtcatctgtcctgaggtccgggagttgttccttgcgggccttctccacaagccttgctgtctctgagtctagacgttgagctttgccgatgaggtcttctagcattggtttgacttcgagactgtcgttgattcccagacatgcatttagttgtgctgattctttcttccaatcttccagaaagttggttccctttattccgaatggttttcgactgagggcgtcggctaccacgttggccttcccggggtgatagtgaatttctaggtcataatccttgatcagttctaaccatcttcgctgacggaggttgagatcaggttgagtgaatatatacctcagactcttgtgatcggtgaaaatgtggcatttgtttccgattaggtaatgcctccatatcttcaaggcatgcactatggctgccaattccaaatcatgggtggggtaattctgttcgtgcggcttgagtaggcgtgatgcgtaagcaatgactttctcgttttgcattagcacacaccctaagccttgcctcgaggcatcacagaagacgacaaaatcttgatgaatatctggcagtgatagaacgggtgccgttgtaagtttctcctttatgatttggaaacttccttcacattttggggtccacacaaatttatggtctttcttgagaagttctgtcattggtcttgctatgctggagaatcctttgatgaagcggcggtaataccctgccattcctaggaagcttcgaacttcactgacgttggttggttgcctccattttgatactgcttctactttggaagggtccacttctatcccttctgcggttaagatatggccaaggaaggctatcttttccaaccagaattcacatttactgagtttagcataaagttggtgtgctctgagttttccaaggacgatccgaaggtgacgcttgtggtcttcacggttcttggagtaaataaggatgtcgtcgatgaagactacgacaaacttatctagctcttccataaacactttattcatgaggttcatgaaaaaggcgggtgcgtttgtcagtccgaacgacattactgtgaattcatattgcccgtaccgggtgacaaatgcagtcttttggatgtccgcttccttgatcctcaattggtggtaaccagaccttaggtctatcttggagaagtacttggctccttgaagctgatcgaagaggtcgtcaatccgaggaagtggatacttgttcttgatggtaacttcatttaacgatcggtaatcaatacacattctcatgcttccatccttcttagagacgaacaggactggcgctccccaaggtgatgagctgggacgaatgtaccctttttgctgaagatctgcgatttgaagcttcaattctgctaactcggttggagccatgcggtatggtctctttgcgatgggtgctgttccaggaatcagatctatgtagaactccacttctctttctggtggcattcctgacaattcttctggaaacacgtccatgaattcttctactactgatatactttccgttattagattgaacatcattaggtcactggcgggtggctgtgcctggcaagagactgactttccctgctggtcggtgaggaggactgtcttgtctgcgcaactgataatgcctttgtgtttagctagccaatccatccctaagattacatcaattcctttggatggcaagacggttaagtctgccaggaatactaccccacttaaaaggattctgacttgggagcattttagctggcatagaaggtcggaccctggggttcgggtgaccaagggaatctctagaggagtagagggaatgccatatttttccacaaagctagtggctatgaaagagtgggatgctccagaatcgaaaagtacggtagcgggagtaaattcaacaaggaactcaccgagtactactcccggagcctgctgagcttcctgggcatcgacgtgatttacacgtgcccttccttggtacggagtcttgttctgctggctgacgacggagggcgccttgggggcggatgccgaggtattcttggggccattcaccgagttggagtaggcgggtcccggtggcttcagctgcggacagttgttctttaagtgacttggatcaccgcagtgccaacatgcatttgccgggggttggttgcttgccactgagggggaatggaaagagctctgactctgctggctgaatcgcgacggagtgggtccagctggtctactgaagttgggccctttgggtggaaacccaaatgatcgagtcttctggtgccggtcctgctgctgtgcccggagaacctggaacttccttttgagatgtcctttttcttcctccttagccctttcaacttgcatggccttgttggaaaggtgagagaagttgaggaagtcttggctagccagaattgtcttgagttctggcctgagtcccttcaggaaacgggccatcttcttgctctcggtactgacatcatctggcgcgtagcgggctaactccatgaacagtccttggggcacatggtgctcccggaaggctgcttcaaattctgcccaggtagcatccctgatggtgacgttgaaggtgtcccaccaggctagggccatcccagaaagttggtgggcagctagttgaacacgctgattttctgggcaaccaatggcttccagtttccttttgatcgtgcgcatccaatcgtctgcatcgagggggttgcttgatccggcgaacgtgggaggtttaagtctcaggaagtcccccattttgtcttgcggtcttccaccattcggccgttgattttccagatttcgagtgaggacctcgatgagtcgggtctgattggctagaacttgggctaggtctaagggtaggggtggaggtgcggggaggtgggtttcactttcttctctaacgacttccccttcagctcttcgaggaaaacctgctccaatcccagaggcggtaggcgtggttttatccgaagccatgagagcgttcttcgaggtactagcgagttccttgtctaaggtgtccccaaatgccttgagaagatcatcgaggctggctagggatacatcttcttcgtcggaccagtcatctattctggggggaggtagggctagaggggccttcttcttcttcttctctgtctggcatccctggttagtggtcttcttctggatcttctttctgggggcgagtgtctttagcttcttgtcaaagtctatcttcaaggtccgataggcctcacgggtgttggcttcctcgccttctactatgctgagactctcctggagagatgccttctcttgcttaagctctttgacttgctgctctaggctttccactcgggagtttaggtgggtacagtgggaggagagctcatcgtagtggttgtcgagggtgtggaggtatccggccatgtagacgatagtgggatcatcttctatgggatctcctcctgacagagcctggagtcttttcttccaggtgggggtgtttttgttgctgggtgggaaatatcggaggggggtctcaaagatctcgcggctatagttttggcacagttgtttgagggcttttcgagcaacgctctggcatgtgtctgggaagcggtgcccgatgaaggtaatttggaagggagggtggtttgggtagttccggctttctcccaagtagaccgccatagagcacttttccattccattttcacggtactccttccagacatattcgggcttcttgcggatccccaagcgtagcgcgcaactccgaagaaggtgaggaaagccttcctcctctgagcaataggaagtcctaatcacccaagggttttccat

SEQ ID NO: 5153 - DNA, 4962 bp, Zea mays
  Clone ID: TF_ZM5033.C2.o1.fg
atggatcctaggggcaaggggatggtggtcaatgataaggagaaggagtccttcgtcaatgatccaaaggatgacaagcctactgactcagccttggcccacaaaagaaaagacgagaggaagaagaaaacaaggcgcatcaaggagatagtctactacaacagcgacgaatcttcctcttcccaaaaggatgacgacatcgactacgagaaaaaaaagacgttccaatgctcatttgctttccattcccctcggaaaaccccccactttgatggagaggactatggattttggagtcacaaaatgcgtagccacttgttctctatccatccaagtatatgggagatagtagaaaatggaatgcactttgatagtacggatagtcccatgttcattaatgagcaaattcacaaaaatgcacaagctactactgttcttctagcttcattgtgcaggaatgaatatcataaggtgagcggcttggacaacgccaagcagatttgggacaccctcaaaatctcacatgaggggaacgacgtcaccatgctcaccaagatggagttggtggaaggcgaacttgggagatttgcaatgatcaggggcgaggagccaacccaaacgtacaaccggctcaagaccctcgtcaacaaaataaggagctatggaagcacgcgatggacggaccacgacgtcgtccgcctaatgctaaggtctttcactgtccttgatcctcatcttgtgaacaatattcgtgagaatcctaggtacaccaagatgacacccgaggagatacttggaaagtttgtaagcgggcggatgatgatcaaggaggctagatatgttgatgatgcgttgaatggcccaatccaagagcctcaaaccattgctctcaaagcaacaaggagcaaggaggcgctacctagcaaggtggcacaagttgaggcggccggacttaataatgaagaaatggccctcatcatcaagcgcttcaagacggcgctaaggggtcgcaaggagcatcccaacaagactaagacaaaggggaagcgctcatgcttcaaatatggtaagattggtcattttatcgctaattgtcccgataatgatagtgaccaggaacaagggaacaagagggaaaagaagaaggcttacaagaaagctaagggcgaggcacaccttggaaaggagtgtgactcggattgttcgtcgtccgactccgacaacgaaggactcgctgccaccgccttcaacaagtcggccctcttccccaatgagcatcacacctgcctcatggcaagggaaaagaaggtaagcactcgtgatactagtacttacgcttcctcaagtgatgaagaatctagcgatgatgaaatagactattcatgtttattcaagggcctagatagaactaaggttgataaaattaatgaattaattgatgcattggatgataagaataggttattagagaagcaagaggatcttttgtatgaagaacatgataagtttgtagaggcacaaaaatcccttgctttagaaattaaaaggaatgaaatactttcttgtgaattgtcttcatgccatgactctatttctagcttaaagagcataaatgatgatttgaatgctaagttagaagtagctactaaatcaacatcttgtgtagaacatgttgcaatttgcaataggtgtaaagatttcaatattgatgcttgtagtgaacacctagtttgcatttctaaactaaatgatgaagtggctattcttaatgctcaacttaagactagcaaaaatgattttgacaaactaaaatttgcaagggatgcctacatgattggtagacacccctcaattaaggatggtcttggcttcaagagggaagtcaagaacttgacaagtcataaggctcccatctccatcaaggagaaagggaaggcccctatggcaaatagtattcaaaagaaccatgctttcttataccatgataggaaatattctacgaatgttcatcatgatagaagttgcaatgatgttgtttcacatgcttatgattcaaatgcaatgtttgcttcaagttcttctatgatgtatgatagaagtttggctaggaaaaatgtttatgcatccaggggctcaagctggattatcgacagtggatgcacaaaccacatgatggggaaaaagaggatgttctcttcctacgtcaagaacaaggattcccaagattcaatcatattcggtgatgggaaccaaagcaaggtgaaagggttaggaaaaattgctatttcatccgagcactctatttctaatgtgttcctagttgagtcgcttggatataacttgttgtctgtgagtcaactttgtaatatgggatataactgtttattcacaaatgtagatgtgtttgtctttagaagaagtgatggttcattagcttttaagggtgtattagacgacaaactttatttagttgattttgcaaaagaggaggccggtctagatgcatgcttaattgctaagactagcatgggctggctgtggcatcgccgtttagctcatgtagggatgaagaaccttcacaaacttctaaagggagaacacatagaccttgtgcagcttgtcaagcaggataaatctgaaacccaagggaccctcaagcgcttcctaaggagagcccaaaacgagtttgagctcaaagtgaagaagataaggagcgacaatgggtccgagttcaagaaccttcaagtggaggagtatcttgaggaggaaggaatcaaacacgaattctccgctccctacacaccacaacaaaatggtgtggtagagaggaagaacaggacgctactagacatggcgaggacgatgcttggtgaattcaagacgcccgaacggttttggacggaagccgtgagcacggcttgccacgccataaaccgggtctaccttcatcgccttctcaagaagacttcatatgagcttctaaccggtaacaaacccaatatgtcttactttcgtgtatttgggagcaaatgttatattctagtgaagaaaggtagaaattctaagtttgctcccaaagctgtagaagggtttttgttaggttatgactcaaatacaaaggcgtatagggtcttcaacaaatcatctggtttggttgaagtctctagcgacgttgtatttaatgagactaatggctctccaagagagcaagtttgtgatcttgatgatgcagatgaagaagacgttccaacgaccgcaatacgcaccatggcgattggagatgtgcggccacaggaacaaaatgagcgagatcaaccttcttcctcaacaatggtgcatcccccaactcaagacgatgaacaggttcatcaagaggaggcgtgtgatcaagggggagcacaagatgatcatgcaatggaggaagaagcgcaaccggcacctccaacccaagttcgagcaatgattcaaagggatcatcccgtcgaccagattttgggtgacattagcaagggagtaactactcgttctagattagttaatttttgtgagcattactcttttgtctcttctattgagcctttcagggaagagctcaacaacttcaaaagaaatgaagtttggacattggtgcctcgtcccaagcaaaatgttgtgggaaccaagtgggtgttccgcaacaaacaagacgagcacggggtggtgacaaggaacaaggctagacttgtggcaaaaggttatgcccaagtcgcaggtttggactttgaggagacttttgctcctgtggctaggctagagtcaattcgcatattgttagcctatgctactcaccattctttcaggttgttccaaatggatgtgaagagctctttcctcaacgggccaatcaaggaggaggtgtacgtggagcaaccccctggcttcgaggatgaacggtaccccgaccacgtgtgtaagctctttaaggcgctctatggacttaagcaagccccaagagcatggtatgaatgccttagagactttttagttgctaatgctttcaaggttgggaaagccgacccaactcttttcactaagacatgtgatggcgatttatttgtgtgccaaatttatgtcgatgacataatatttggttctactaaccaaaagtcttgtgaagagtttagcagggtgatgactcaaaagttcgagatgtcgatgatgggcgagttaagctatttccttgggttccaagtgaagcaactcaaagacggcaccttcatctcccaaacgaagtacacgcaagacttgatcaagcggtttgggatgaaggacgccaagcccgcaaagactccaatgggaaccgacggacacactgacctcaacaaaggaggtaagtccgttgatcaaaaggcataccggtctatgatagggtctttactttatttatgtgctagtagaccggatattatgcttagcgtatgcatgtgtgctagatttcaatctgatccaagggagtgtcacttagtgcccgtgaagcgaattcttagagatttagtcgctacgccttgcttcgggatctggtatccaaaggggtctacctttgacttgattggatattcagactccgattatgctggatgtaaggtcgataggaagagtacatcgggacagtgttgcgcgcaactactttggatgaggcaaaccctcagggactttggctacaatctgagcaaagtcccactcctatgtgataatgagagtgctatccgcatggcggataatcctgttgaacacagccgcacaaagcacagtgacatccggcatcactttttgagagaccaccagcaaaagggagatatcgaagtgttttatgttagcaccgagaaccagctagccgatatctttaccaagcctctagatgagtcgaccttttgcacgctgcgtagtgagctaaatgtcttagattcgcggaacttggagtga

SEQ ID NO: 5154 - DNA, 4083 bp, Zea mays
  Clone ID: TF_ZmC951_459
ctaggtgaagatatcggctaattgttctttggtgctaacataagcgatctcgagatcccccctttgttggtgatcccttagaaagtgataccgaatgtctatgtgcttagtgcggctgtgttcaacgggattatccgccatgcgggttgcactctcattatcacataggagagggactttgctcaatttgtagccatagtccctgagggtttgcctcatccaaagtaattgcgcacaacaatgtcccacggcaatatactcggcttcggtggtagaaaaagctactgagttttgtttctttgaagcccaagacatcagggatcttcctagaagctgacaagtccctgatgtgctcttcctatcaattttacaccctgcccaatcagcatctgaatatcctattaaatcaaaggtggatcccttggggtaccaaagtccaaacttaggagtataaactaaatatctcatgattgttttcacggccctaaggtgaacttccttaggatcggcttggaaccttgcacacatgcatacagaaagcataatatccggtcgagatgcacataaatagagtaaagatcctatcatcgaccagtataccttttgatctacggatttaccccccgtgtcgaggtcgagatgcccatttgttcccatgggtgtcttgatgggcttggcatccttcattccaaacttggtaagtatgtcttgaatgtacttggtttggctgatgaaggtgccttcctggagttgcttgacttgaaatattagaaaatacttcaactcccccatcatagacatctcaaatttctgaatcatgatcctactaaactcttcacaagtagatttgttagtagacccaaatatgatatcatcaacataaatttggcatacaaacaaatcttttgcaatagttttagttaagagtgtaggatcgactttaccgactttgaagccattagtgataaggaaatctcttaggcattcataccatgctcttggggcttgcttaagcccataaagcgcctttgagagtttatacacatggttagggtactcactatcttcaaagccgggaggttgctcaacatagacctcttccttgattggtccattgaggaaggcacttttcacatccatttgataaagcttaaagccatggtaagtagcatagggaagtaatattcgaattgactcaagcctagctacgggtgcataggtttcaccaaagtccaaaccttcgacttgtgaatatcctttggcaaccagtcgggctttgttccttgtcaccacaccatgctcatcttgcttgttgtggaatacccacttggttctcctcttgaggtggctcatattcttgatcttcattttcattgccttgagcccgatcctcatcttgagttggtggggatgcttgattggaagatgatggttgatcttgtgtatgagtgggtcttcggattccttaggacacacatccccaatggacatgttccttagcaagacgcacggagcctcttcatcatgtagctcatcaagatcaacttgctccacttgggagccattagtctcatcaaacacaatgtcacaagaaacctcaactaatccagtggatttgttgaagactctatatgcccttgtgtttgagtcataaccaagtaaaaagctttctacagccttaggagcaaatttggattttttacctcttttaacaagaataaaacatttgctaccaaagactctaaaatatgaaacattgggctttttaccggtgaggagttcatatgatgtcttcttgagaattcggtgaaggtagaaccggttgatggagtagcacgcggtgttaatcgcctcagcccaaaaccggtccggagtcttgtactcatcaagcatggtcctcgccatgttcagtagagttctattcttcctctccactacaccattttgttgaggtgtgtagggagaagagaactcatgcttgatgccctcctcctcaagaaagccttcaatttgagagttcttgaactccatccagttgtcgcttcttatctttttgattctcaatctgaactcattttgagctcgtttcaagaacccctttaaagtctcttgggtttgggatttttccctgtctttctcaaaataaacatttgttagtcccaaaatgtgctctccctttaaaagcttgtgaagattcttcatcccaacatgggctagttggcggtgccagagccaacccatattagtcttagcaattaagcaagtatcgagttcagctctattaaaatcaactaagtatagctgaccctctaatactcccttaaatgctactgaatcatcgcttcttctaaagacagtaacaccttgatttccatccccaaatgtgatagctctttggggatcttcatttttctcgtaggaggagaacatccttttctcccctgtcatgtggtttgtgcatccgctatcaataatccaacttgagcccccggatgcataaaccttgggtacccaaacacaagtcttggagcccttgtgtttgcccccaacatatttggcaactactttgcctgatttgttagtgagcacataagaagcatcaaaagtcttaaatgaaacattaggctcatttgatgcagtaggagttttctttttaggcattttaacatgagtaggatgcctagagctcgaagcctcattcttatacataaaagcatgatgggaaacagaatgatatttcttagcatgaattctcctaatcttgtgctcaagataaccagtaggatataaaatgtaaccctcgttatcttgagccatgggagccttgcccttaacatgcttcttattttccttaataaggaattcatcttgactatccaagagttcatccttctcatgaatagcacctattaattcattcaatttttctttttgatgcatgttaaggttgacaaaaaaggtaagtaaattatcctcatcttcactagagctaccttcatcactagatgttgtatatttagtggaggctctagattttaccttcttctttttgccgtcctttgccatgaagcacttgtggccgacgttggggaagaggagtcctttgttgacggcgatgttggtggcatcctcgtcggaggaggactcggtggagctcatgtcagagtcccattcccgacacacatgggcatcaccgcccttcttcttgtagtatttcttctctttcttcctccccttcttgtcgttgtccctgtcactatcactagacatagggcatttagcgataaaatgactggccttaccacacttgtagcacacccttttggagtggggtttgtagtccttccccctcctttgcttgaggatttgacggaagctcttgatgatgagcaccatctcctcattgtcgagcttggaggcgtcgatggggagcctacttgatgtagactcttctttcttctcctctgtcgccttgaatgcgatgggttgcacctcaggtgtggaggtgccgccttgctccaagttgactatttgtttggagccacgtattaattgaacttgagtaggattacgaaaaacgagtgatcttagaataaccttgaccatttcatggtcatcccatttggtactcccgaggttgcgcacttggttgaccatcgtcttgagccggttgtacatggtttgcggctcttctcctttgttgaggaagaaacgactgagctccccctcaatcgtcttgcgcttggtgatcttggtcacctcatccccttcgtgcgtggtttttagtacgtcccaaatctctttggaactttttagcctttgcaccttattatactccttaaacttcttgtgctcatggcgcttagaagtgatggacggagcatcggagctggaggtggagggcgacaaagagttggtctcatagtagaccactttcttcattttcttcttcttgtcgccactccagtgtgacttgacgcgaggaggagattcctcccttcttttggcgccggactcccttgatggagccttcccgtggcttgtgcccgtttcaatctccctcttggtggatcctcccgacat

SEQ ID NO: 5155 - DNA, 3669 bp, Zea mays
  Clone ID: TF_ZmC119_1382
atggatcctaagggaaaggggatggtggtcaacgacaatgagaaggagtccatcttcaacgagccaagggacgacaaagtcaatgactccagctcgagtcaaaagaagaaagatggaaagaagaagaggcgcatcaggaaggttgtctactacgacagcgatgaatcttcctcttctcaaaaggacgacgaatacgaggagaaaaagaaaatggttaactcgaacttttcttttgattactctcgtattctgcataattccaatgctcatttgctttctattccacttggtaaacctcctcactttgatggagaggactacggattttggagtcacaaaatgcgtagtcatttgttctctcttcatccaagtatatggaagatagtagaaaacagaatgcaatttgatagttcggataattctatgtttatcaatgaacaaatccataagaatgcacaagctactactgttcttctaacatccttgtgcagggaagaatacaataaggtgagcgacttggacaatgccaagcagatctgggacaccctcaagatctcacatgaggggaacgacgtcaccatgctcaccaagatggagttggtggaaggcgaactaggaaggttcgcaatgatcaggggggaggagccaacgcaaacatacaataggctcaagaccctcgtcaacaaaataaggagctatggaagcacgcgatggacggaccacgacgtcgtccgacttatgctaaggtctttcaccatccttgatcctcatcttgttaactctattcgtgagaatcctaggtacaccaagatgacgcccgaggaaatacttggaaagtttgtaagcgggcggatgatgatcaaggaggcaagatacgttgatgatgcgttgaatggcccaatccacgagcctcaaaccattgctctcaaagcaacaaggagcagggaggcgctacctagcaaggtggcgcaagttgaggcggccgggcttaacgaggaagaaatggccctcatcatcaagtgtttcaagacggcgctcaaaggtcgcaaggagcatcccaacaagagcaagacgaagggaaagcgctcctacttcaagtgtggtaaggttggtcactttattgctaattgtcccaataatgatagtgaccaggatcaagaaaagaagagggaaaagaagaagacctacaagaaggctaagggcgaggcacaccttggcaaggagtggaactcggattgttcatcgtccgactccgatgacgaaggactcgccgcctcggccttcaacaaatcgtccctcttccccaacgagcatcacacatgcctaatggcaaaggagaagaaggtaagtactcgaaataatactacgtatgcttcttcaagtgatgatgaatctagtgatgatgaaatagactatgcatgtttattcaaaggattagatagaactaaaattgataagatcaatgagttgattgatgctttgaatgagaaaaatcgacttttagaaaagcaagaagatctcttatatgaagagcatgataaatttgtaagtgtgcaaaattctcttgctttagaagttaaaagaaatgaaatgctttctcgtgaattgtctacatgccatgaatccatttctagcttaaagagtatcaatgatgacttgaatgctaagttagaaatagctaataaatcaacctcttatgaagaacatgttgtgatttgcaataggtgtaaggattttaatgttgatgcttgtagtgaacacctagttgccatttctaaattaagtaatgaagtgactagtcttaatgctcaacttaagactagcaaaaatgaattcgataaattaaaatttgtaagggatgcctacacgattggtagacacccctcaattaaggatgggcttggctttaagagagaagccaagaacttaacaagtcataaggctcccattcccgccaaggagaaagggaaggcccctatggctaatagtgctcaaaagaatcatgcatttatttatgataggaaattttctagaaatgttcatcatgataggagttgtaatgcttatgattcaaatgcaatgtttgcttcaagttcttcctatgtgcatggtagagatatgcctaagaaaaatgtcattcatcatatgcctaggagaaatgttgctcaggatcctaggaaaatagttaatgaaccttctacaatttatcatgcttgcaatgcttcctttgtaatttgtagaaaggataagaaggtttatgcatccgggggctcaagctggattatcgacagcggatgcacaaaccacatgacgggggagaaaaagatgttcacctcctacgtcaagaacaaagattcccaagattcaatcatattcggtgacgggaatcaaggcaaggttaaagggttaggaaagattgctatttcttccgagcactccatttctattgtgtttttagttgagtcgctcggttataacttgttgtccgttagtcaactttgtaatatgggttataattgcctattcacaaatgtagatgtgtctgtctttagaagaagtgatggttcattagcttttaagggtgtactagacgtcaaactttatttagttgattttgcaaaggaggaggccggtctagatgcatgcttaatagccaagactagcatgggctggctgtggcatcgccgtttagcacatgtggggatgaagaaccttcacaaacatctaaagggagaacatgtgttaggtctaacaaatgtgactttcgaaaaagatagaccttgtgcagcttgtcaagcaggtaaacaagtgggaaatgctcatcacagcaagaacgtgatgaccacatcaagacccctggagctgctacatatggacctcttcggacccgttgcctatcttagcatcgggggaagtaagtatggtttagtaattgttgatgatttttcccgcttcacttgggtattctttttgcaggataaatctaaaacccaagggaccctcaagcgcttcctaaggagagctcaaaatgagtatgagctcaaggtaaagaagataaggagcgacaatgggtacgagttcaagaaccttcaagcggaggagtattgtcacacccaggtttcgggggcaccaagacccgggcgcgaacataatcaccaggtgtgctgggaccaagtgtcacacatatgatgaatcatggcacagggtcaaatgtcacatctttactatataataggagttctatacaaaataaataattacattataaggagacaacggtccagcaacccaaagttgactgggagacgacgacctagaccactcacgaactcatcgcagcatcttccatgagcatcatcctgcagtacctggtcttgacctgggacttgagattctaggtaccaggatgatcttcagatgacacgtgtcctcactgcttggattatgcgcactggtgccctgaccacggcgcacggcggaatgccccagactacacgacgtcggcgagcaatccccatgctccacaagtcctcaataccgccatgtgaggtcgcgaacgtgttcggtgtgctctggagactctcctcgaccatcaaccaagcccagagtaaagctcctgacgggatgcccatgcgagcggacatacatctccccatggtgctttgaaac

SEQ ID NO: 5156 - DNA, 778 bp, Zea mays
  Clone ID: TF_ZmC173187_1
agaagacgacggtggaggtgtgggcgagcctcaagactcgtttcgtcggggcggattgggtcatgacggcgcgcctccccacgctcaagggggagttcgacaagctatgcatggaagatagagagcagttggacgactacgctgacaaaataagcggcatgtcgcgcgttacgtcgggcttggcacgatgctcgacgacgacgccatggtgaagaagctcctcaacaccatcctggatcggctcttcccagccgttgcgggcatcgagcagttctgcaacgtcgagatgatggcgctcgaggaggctcttaacgggctgaaggtgttcgacgaacgtttccggcggcgcactcgtgttggtggcaaacgacgtgaggaccaactcctcacggaaatcgagtggaaagctcggcaaaaacccaagtcatcgattaggaggtgcttcaattgcggcattcgcagccactttgcacgggactgccacaagccgaagaaggaggaggctttactcgccgatgatggtgaagaagcgacgctcctgtgagtgtgggaagcggctctttgtttaggggagattgttagaaaataaacccgacaccatgtagatgtgtggttgctaagtagacgtgtgtgtgtgtgcatgtgttgtgtccagggtgtgtggacagtcgtggagctacatgcaggtggtcgttgctcctacgtgtgccacgtggagtctattgaggagccgacgttgatatgttagaagggtggccacgtcgtgtgtgtttgaccc

SEQ ID NO: 5157 - DNA, 549 bp, Zea mays
  Clone ID: TF_ZM3652.C7.o2.fg
atggggatgatactcaagattaatctaatgggtgtgcccctgcaggtagatgatcttttctttaacattgatagaaaaaagcaaagaaagagaggatgctttgtatgcggggagaagggccactttagggacagctgtccaactatggtcgaacataaaaaggggaggggcaaaggcaaggcgctaacaagtgtcaaaacttgggatgattcttcaagcgaagaagaacctccaaggacacgcagccaccggtcctcatcacgctcatcacgcaagtgccttatggcaagaggtttgctagaaaaatttgaaacatttgcaaatttaaattgtgagctatcaactaaaattgcgcaattagaatctagtgctccatccactgctaccgatgatggccttattaaaaagaatgaaaaacttaaggctaagttatctagctcccaagaagctattgaaaatttgctaggaaaaatggaaattcttagcataaacaataatgagctaactattaagccagaaaacattggtagcacccaggggcatctttag

SEQ ID NO: 5158 - DNA, 1656 bp, Zea mays
  Clone ID: TF_ZM4328.C2.o1.fg
atgtcgggagatcatgccaagagggagatcgtgaccgacggcaacaagtccgcaagctcggagagaacccattcgagggagtccgaccacaagcataaggaggaatcctcttcctccatcaagtcacaacggagaggtgacaagaagaagaagatgaagaaagtggtctactacgagactgactcatcgtcaccctccacctccggctccgactcgtcgtccactacttctaagcgccatgagcgcaagaagtatagtaagatgtccctccgctactctcgcatctctaagcgcactccattactttctgttcccttaggcaaaccaccatcctttgatgtgcgcaacctcgggagcaccaaatgggatgaccatgaaatggtcaaggttattcttagatcacttgtatttcgtaatcctactcaagttcaattaatacatggtgatcctagatacaagctaatgtctcccaaggaggttataggaaagtttgtgagctttgaattgatgatcaaaggctccaaacaaatcatcaacttggagcaaggcggcacctccacacccgaggtgcaacccgtcgcattcaaagcgacgggggagaagaaagaagagtctacatcaagtaggctccccatcgacgcctccaagcttgacaacgaggaaatggcgctcatcatcaagagcttttgccaaatcctcaaggaaaggaaggggaaagattacaagccccgttccaaaaaggtgtgctacaagtgtggtaagtctggtcattttattgcaaaatgtcctttttctagtgacaggagcgacgacaagagagggaagaaaaaggagaagaagagatattacaagaagaagggcggtgatgcccacgtgtgtcaagaatgggactccgacgtgggctccaccgactcctccgacgaggatgccgccaacatcgccgtcaacaaaggtctcctcttccccaatgtcggccacaagtgcctcatggcaaaggacggcaaaaagaagaaggttgaaagattaaatgcttgtattgattcaattgtcaatcttaaaaatgataatgctagtttaattgctaagattgataaattgaatgaatcaatttctagccttaaaattgagagtgatagtttaatttccaaggctagagatttaaatgtttgcaacgattctatttcctgtcttagaaatgaaaatgctacattacatgctaagatagaagaattaaaatcttgcaaaccctctacatctacagttactcatgtctctatttgtactagatgtagagatattaatgttgatgctattcatgatcacctagctttaattaaagaacaaaatgatcatatagctcaattaactactaaaatcaatgagcatgagatacaaaatgaaaaatttaaatttgctagaagcatgctctataatgggagacgccctggcatcaaggatggcattggtttccaacagggaagcaatgtcaaacttaatgcccccacaagattgtctaattatgtaaagggcaaggctatcatggctcaggataatgaaggttacattttatatcctgatggttatcctgagcacaagattaggagaattcatgctaggaagtctcattctgtttcccatcatgattttatgtactaa

SEQ ID NO: 5159 - DNA, 1542 bp, Zea mays
  Clone ID: TF_ZmC24260_18
atgtcggggggactaagaaacgaaagtgcttctaagcttgaaaaagttgagattgcctcgacttcatcttttggtgcagatgttgatcctagggcaatagatcttgccatgagaatcgccgaaaggatgttcctcaaaatgaaggaagatgaggcgaagaacaaaattgaagaagaaaatgatcgatggagaccaaacgacgaatccacctcttcacaaggttcgtctttcaaatccacttctcatatgtgctttattgctaatgggagtgacagtgaaagcgaaagtgaggatgaggaggagcaagaaagtgatagtgaagatgaggatgatcttcaacaattcttcgctcagctaagcaagaaacatcggatgagcttgctcaaactcatgaaaagagcggaagaacaaaaagaaatgcttcataagcaagaagacttcctcatcagaaaaatcgaagacttagagaagttgaccaaagagcatgagaagctaaagtgctctcatgatgatttggtccaaaggtatgaagacatttcaattgagcaaattaaagttgttaatcattcatcatatattgctcaattagaaaataaaaatgctatgttcaagaacacgatagaaaggctaaatattgaaaatctagctttgcaagaaaaacatgatatgcttgtgtgctctcataataaatttatggattcacatatcatgttagaaatggctcatgaggttgtgttaactaatttgaaatcataccaacctcacatatgcacatgtactcaagtagaaactatattatcatgtgctaacaaatgttgctctcaagaaagccaatcttccattgagctagaaatttcaggaattagtgatatttctatcacacaagaaaataaagagctcaaggaagaagttggaaggctaagaaggagcttaactcttttgaagggaaagtgtcatgctcaaccttctcaagataaccgtgataatatggtgaaaaagcttgagaaggggacaaccgtagcatgcacaaaaccccttcaaaagaataccaagctttccaagaagggcatgagcaaaattcatggtgagaaaattaatgctcatattatttgctctaacaatgtacctatgtgcttcaacaaagaaagatcaaagagaagcgataggaggtgctatggatgcaaggagaagggtcatgaaattggttcatgcccccacatgaagaaccaagaccttgcacgatcaagaaagatgaccatcaagaaggatgaaagcaaaaggcaaatgcattgcaaggacaagcaccgcatttgctacaattgccgtgaaagaggtcatctattcaaggtttgtccaaagggtaaaactcctaagcctaacctgtcaatacattcaaatatgcttaggagacccaaatttgactcttgtgctagaaaggtgatgagttcaccacattctaggaccaaggctatttgggtgcctaagtccttattggctaaccttgatggacccatcatgagatgggtaccaaaatgtacttaa

SEQ ID NO: 5160 - DNA, 1365 bp, Zea mays
  Clone ID: TF_ZM4986.C1.o4.fg
atggatcctaagggaaagaggatggtggtcaacgacaaggagaaggagtccttcctcaacgagccaagggacgataagcccactgactctggctcaagtcataagaaggacgggaagaagaagaggcgcatcaagaagatcgtctactacgacagcgacgggtcttcttcttccccaagagacgacgactacgacgagaaaaagaaactgtacggatctgtattcattaacgaacaaattcataagaatgcacaagctaccactgttttgttagcatcattgtgcagggatgaatacaacaaggtgagtggcttggacaacgccaagcaaatatgggacaccctcaagatttcacatgaggggaacgacgccaccatgatcaccaaaatggagttggtggaaggcgagctaggaaggtttgccatgatcatgggagaggagccaacgcaaacatacaacaggctaaagaccctggtcaacaagatcaggagctatggaagcacgagatggacggaccacgacgtcgtccgacttatgctcaggtcttttactgtcattgaccctcatcttgtgaacctcatccgtgaaaatcccaggtacacaaagatgacacccgaggagatactcggaaagtttgtaagcgggcgtatgatggtcaaggaagctagatatgttgatggtgcattgaacggcacaatgcccatctatgagccccagcctgtcacactcaaggcaacaagcagtaacagggaggcgctacctagcaaggtggcacaagttgaggctaccgggctaaacgaagatgagatggccctcatcatcaagcgcttcaagaccgcgctaaaaggacgcaaggagcatcccaacaagagcaaagcaaagggaaagtgctcctgttttaaatgtggtaagactggtcattttatagcgaattgtctcgataatgctaatgaccaggaacaagaaaagagcaggaagagggagaagaagaaggcctacaagaaggcgaagggcgaggtgcaccttggcaaagaatgggattcagattgctcttcttccgactccgacgacgaaggactcgccgcctcggccttcaacaagtcgtctctcttcccccaacgagcgtcatacttgcctcatggcaaaggagaaaaagagcatgttgtcatttgtaataggtgcaaggattttgatgttgatgcatgtgttgaacaccttacttctattacaaaattaaatggtgaagtggcaagtcttaatgcccaacttaagacttgcaaaaatgactttgataagttaaaatttgctagggatacctacaccgttggtagacatccctcaattaaggatggacttggcttttga

SEQ ID NO: 5161 - DNA, 363 bp, Zea mays
  Clone ID: TF_ZM4874.C3.o1.fg
atggcactcatcatcaagcgattcaagacgacgctaaagggtcgcaaggagcatcccaacaagaacaagacgaaggggaagcgctcctgcttcaaatgtggtaagattggtcattttatcgctaactatcccgataatgatagtgaccaggaaaagaagagtggaaagtgggaaaagaagaagaactacaagaaggcgaagggcgaggcacatcttggaaaggagtgggattcagattgctcctcgtcagactccaacaacgaaggactcgccgccaccgccttcaacaagtcatccctcttccccaacgagcatcacacttgcctcatggcaagggaaaagaaggtgttaatgatgatttga

SEQ ID NO: 5162 - DNA, 4491 bp, Zea mays
  Clone ID: TF_ZM5039.C4.o3.fg
atggatcctaagggaaaagggatggtgatcaacgacaaggagaaggagtccttcatcaatgagccaaaagacgacaagcccactgactcgggctcaagtcataagaagaaggacgggaagaagaagagacgcatcaagaagatagtctactatgacagtgacgagtcctcttcttcccaaagagacgacgacgacaagaaaaagaaaacggtcaactcaaacttttcttttgattattctcgtattccgcaaaattccaatgctcatttgctttccattcctcttggtaaacctccacactttgatggagaggactacggattttggagtcacaaaatgcgtagccacttgttctctcttcatccaagtatatgggagatagtagaaaatggaatgcaatttgatagtacggataatcccatgtttatcaatgaacaaattcacaaaaatgcacaagctaccactgttcttttagcatccttgtgcagggaagagtatcataatatctcgcatgaggggaacgacgccaccatgatcaccaagatggagttggtggaaggcgaactaggaaggttcgcaatgattaggggggaggagccaactcaaacgtacaacaggctcaagaccctggtcaacaaaatcaagagctatggaagcacgagatggacggaccacgacgtcgtccggcttatgctaaggtccttcactgtccttgatcctcatcctgtaaactctattcgtgaaaatcctaggtacaccaagatgacgcccgaggaaatactcggaaagtttgtaagcgggcgaaagatgatcaaggaggcaagatatgttgatgaggcgttgaatggcccaatgccgatccacgagcctcaaaccgttgctctcaaagcaataagcagcagggaggggctacctagcaaggtggcgcaagttgaggcggccgggctaaatgaggatgaaatggccctcatcatcaagcgcttcaagacggtgctcaaaggtcgcaaggagcatcccaacaagagcaagacgaagggaaagcgctcctgcttcaagtgtggtaagattggtcactttattgctaactatcccgataataatagtgaccaggaacaaggaaagaatgggaagagagagaacaagaaggtttacaagaaggctaagggcgaagcacaccttggaaaagaatgggactcggattgttcttcgtccgactccaacgacgaaggactcgccgccacggccttcaacaaatcgtctctcttccccaacgatcatcacacctgcctcatggcaaaggagaagaaggtaagcactcgaaacactattgcatatgcttcttcaagtgatgacgaatctagtgatgatgaagtagactacgcaagtttattcaaaggcttagatagaactaaaattgataagatcaatgaattaattgatgcgttgaatgagaaaaatagattgctagaaaggcaagaggatcttttatatgaagagcatgataaatttgtttatgcatccgggggctcaagctggattatcgacagcggatgcacaaaccacatgacgagggagaagaagatgttcacctcctacatcaagaacaaagattcccaagattcaatcatattcggtgacgggaatcaaggaaaggttaaaggactagtaaagatagctatttcatccgagcattccatatctaatgtgtttttagttgaatcgctcgggtataacttgttgtccgttagtcaattatgtaatatggggtataattgcttatttacaaatgtagatgtgtctgtctttagaaggagtgatggttcattagcttttaagggtgtactttacgacaaactctatttagttgattttgcaaaggaggaggccggtctagatgcatgcttaattgctaagactagcatgggctggctgtggcatcgccgtctagcacatgttgggatgaagaaccttcataaacttctaaagagggaacatgtgttaggtctaacaaatgtaactttcgaaaaagatagaccttgtgcagcttgtcaagcaggtaaacaggtgggaagctctcatcatagcaaaaacgtgatgaccacatcaagacctttggagctacttcacatagacctcttcggacctgtcgcatacctcagcatcggaggaagtaagtatggtcttgttattgttgatgacttttcccgcttcacttgggtattctttttgcaggataaatctgaaacccaagggaccctcaagcgcttcctaaggagagctcaaaatgaatttgagctcaaggtgaagaagataaggagcgacaacgggtccgaattcaagaaccttcaagtggaggagtaccttgaggagaaaggaatcaagcacgagttcttcgctgtctacacaccacagcaaaatgatgtggtagagagaaagaacaggacgctcatagacatggcgaggacgatgcttggagagttcaaggcgctcgagcggttttggtcggaagccgtgaacacgacttgccacgccataaaccgggtctaccttcatcgcctcctcaagaagacgtcgtacgaactcctaaccggtaacaaacccaatgtttcatattttcgtgtatttgggagtaaatgctacattctagtgaagaaaggtaggaattctaaatttgctcccaaagctgtagaaggatttttgttaggttatgactcaaatacaaaggcgtatagagtcttcaacaaatcatcgggtttggttgaagtctctagcgacgttgtatttgatgagactaatggctctccaagtgagcaagttgatattgatgatgtagatgaagaagatgttccaacggccgcaatacgcaccatggcgattggagatgtgcgaccacaggaacaaaaggagcaagatcaaccttcttcctcaacaatggtgcaccctccaactcaagatgatggacaggctcatcaagaagaggcatgtgatcaagggggagcacaagatgatcatgttatggaggaagaagcaccacaggcccctccaactcaagtccgagcgacgattcaaaggaatcatcctgtcgaccagatattgggtgatataagcaagggagacgagcacggggtggtgacaaggaacaaggtgagacttgtggcaaaaggttatgcccaagtcgtaggtttggactttgaggagacttttgctcctgtggctaggctagaatctattcgtattttgttagcctatgccgctcaccattctttcaggttgtttcaaatagatgtgaagagcgctttcctcaacgggccaatcaaggaggaggtgtatgtagagcaaccccctggctttgaggatgaacggtaccccgaccacgtgtgtaagctctctaaggcgctctatggacttaagcaagccccaagagcatggtatgaatgccttagagactttctaattgcaaatgctttcaaggttgggaaagccgatccaactttattcactaagacttgtgatggtgacttatttgtgtgccaaatttatgtcgatgacataatatttggttctactaaccaaaagtcttgtgaagagtttagcagggtgatgactcaaaaatttgagatgtcgatgatgggtgagttgaactacttccttgggttccaagtgaagcaactcaaggacggcaccttcatctcccaaacgaagtacacacaagatttgatcaagcggtttgggatgaaggacgccaagcccgcaaagactccaatgggaaccgacggacacgtcgacctcaacaaaggaggtaagtccgttgatcaaaaggcataccggtcgatgataggttgcttgctttacttatgtgctagtagaccggatattatgctaagcgtatgcatgtgtcctagatttcaatccgatccaagggagtgccaccttgtggctgttaagcgaatacttagatatttagttgctacgccttgcttcgggatctggtatccaaaggggtctacctttgacttaattggatattcagattctgattatgctggatgcaaggttgataggaagagtacatcagggacgtgccaattcttaggaaggtccctggtgtcttggagttctaagaaacaaaattccgttgccctatccaccgctgaggccgagtatgttgtcgcaggacagtgttgcgcacaactactttggatgaggcaaaccctcagggactttggctacaatctgagcaaagtcccactcctatgtgacaatgagagtgcaatccgcatggcggataatcctgttgaacacagccgcacaaagcacatagacatccggcatcactttttgagagaccaccagcaaaagggagatatcgaagtgttttatgttagcaccgagaaccagctagccgatatctttaccaagcctctagatgagtcaaccttctgcaggctgcgtagtgagctaaatgtcttagattcgcgtaacttggattga

SEQ ID NO: 5163 - DNA, 625 bp, Zea mays
  Clone ID: TF_ZmC18109_16
cagcttcgcagcccgcgcccctaaaaccctagccccggcggatcggggggcgcctttggtgccagcgacgcggatcaaggacgggagcgctggcgcctcaggaatggtctcaaagagtggtggtaaggatgggagtaggcttaacggctgtagtagtcgagcctctttaacttccatgcctccaagtgtgaagactgaatgtgaaatcctgcaatccgccaatgttaagatcttcaccttcaataatctcaaggcagccatagggaattttgtttttgctagatttagggtgttacaaacatacccccttaacaagaatctcgtcctcgagattaagaaaggctagcacgaaagcaaaggagatacatggttatttgtaggttcttagttcacattgaactcctccaaacttaaggaacttccttacttctttgctccaaaatgtatactaatcaagcgaccttcatcatcatacttataaaatggttggtcttctgggttattgtttgggtcttgcttcaccgtcttcttctttagttggtctagacgcttcttggggcattcgcgaataatatgttcttcatttttgcagtagtagcaagcacctcttgctttgagttctttg

SEQ ID NO: 5164 - DNA, 1609 bp, Zea mays
  Clone ID: TF_ZmC824_1
gttctcatgatccatattgttatggatatatttgagatcatgatttctatgattaattatcttttatatgtcatcatcataatgttaatttatggaattaaaatgatatggaaaatgcctataattttaacacaccaaaaacctaatgttaggcatttttctgtcagtggttttgctgctgtgctaaagcctgatccatttgatggtaaaaacttcttgatttggaaagctaaaatggtattgtggcttactgtaatgtcttgttttcatgccgctgagggcaagcctgtcaacttacctcctgaggatgaggctaagtttaaggctgaagacaacctctttcgaggagcagtaattagcgcacttgatacaaaattccagaaaagctatatcatccttcctacagggaaagagctgtggaatgcacttattggaagtttggagtaactgatgctggtagcgagctgtatctcatgtagcagctgtatgactacaagatggttgagaaccgatctgtagtggaacaggctcatgagtttcaggcactagctaagcaactcaaactttttccgtgtcctttgcctcacaagtttgtggctggcggtataatcgccaagttgccaccttcttggaaggactttgctacctctctcaaacataagagacaagagttcaatgtggaggagctcattggtactcttgatgttgaggaaagggctagaacaaaggacagtggaaaaggtgtggagacctctactgctaatgtggtgcagaagagaaacttccgcaagtttaacaagaagaaaaaccagaacaaacaagagaacacaaataaacctgttcaaacagcacagtttaaaaagaagaagaacaataacaagggaaagggaggatgctttgtttgtggcagtgatcaacattgggctagagagtgccctgatcgcaagttcacacatgacaagaaatcagctaatgttgtaaccactgaaactggagatgaaacatctgggtatggtaattctttaccatttgttctttcagtttgtaattcacctgagtggtggatggacagtggtgcaaatattcatgtgtgtgctgatgcctctatgttctcctcctaccaggtcgggaggtctggcgccttgttaatgggaaatgggtcgcatgctcatgttcttggtgttggtacggtcattctgaagtttacttcgggaaagacggtgccattgaagagcgtgcagcatgtgccctttatcaagaagaatctcgttagtgcttccatgctatgtcgagatggatacaaagttgttcttgagtcaaataaatgtgttatgtcgaaacatggtacttttgttggtaaaggatatgactgcggaggcttgttccgcttatcactgcatgatgtgtgtaataaaatggtgaattctgttataagggatgtgccctttatcactcattcatggatggcaaagttcttattatgtcgaagtgttgtaaactccgcggcttgcttctatggtctgttttggacatgtgcgttcattgtttcatcggtctgtgcttagggttgatgcgctaagcttcgcactgcctgacttgtggctgtaaa

SEQ ID NO: 5165 - DNA, 852 bp, Zea mays
  Clone ID: TF_ZM4511.C1.o4.fg
atgagaaccatagactcacaattagaacaaatcttagacaagagtattataccttctagttatgataagaaaaatgcttccgaggaagatcaaagatgtatacgcttatactatcttgcttatgacatcttaagtaattctcttagcaaagaagattatcgtgccttcataatgagatatgatgaacctattcatgatgcgcatgatatttggactaaaattaaaagtaaatttaatgagtccaaacatgttagttcatatgatgcttctacttcctttagtccttgtgaaactaaccctttgaaggaaaaagaagaaaatgaacgttggagaccaaacgatgaatccacctctccaaaagcaagcaaatcctcctttgagctagaatttctaggaataaaagatgatacatgtcaagagctcaaggaagaaaatgaaaggcttagaacgagcttgacacaactaaaagggaagtgcactgcacaaccttctcaagataaccgtgattacatggtgaagaagtttgagataggaacaacagtggcatgcacaaaatcccttgaagaaaatgtcaaggacttgaggaatgtcaaggggaaggaacaaaagaagaaaatcaatacctctgccaaaaacctcaaccgtgcctccatgcaaggtaacatccaaggtaatgatcaagccacacttcacactaagaaaagtaagaagtgtagtgaatgctttgaaaaggggcactttattaggtcatgtccctatattaaagaaaatggcttaattcttaacaaggatgataaacgttgttttaaatgctctaagaagggacatttagttaagtcattccctatgtaa

SEQ ID NO: 5166 - DNA, 3480 bp, Zea mays
  Clone ID: TF_ZM5032.C3.o6.fg
atgccgccgcgcacaaggaaaaccgtgcgcaagtctaccggaccaattggcgtgcctcgccatcaactagctccaaggcatgaggacagtagtagtggtagcaatgatcccatcggagatctggaagctcaggtggagcaactgcgaacggaattatgtcatagaaacaatgtgtgggtcgaggatgacgagcttgccgaacgagatttggcactcgattgggctgttaactcacattccattgcttgggacaaggaggcaaaggctcgtgctcgtgtggccgagcttagcacggccgtcgacaacttgcagatcctgtcggaatgggagctggaccttctggtgcagcgggtgaagcccttggctgaagatccccttgaagcagatgagtggatccgggttatcgaacaaaagtttgggcttctccgatgcacggagactcagaagcccttatttgcggcgcagcagttacgaggccctgccagcacctggtggggaaattatgtggctatccagcctgctggtcatcaaattacttgggacaaatttaggttggcatttcgggagcactacattccagaaggggtgctccatatgaaacaggaagaatttatgaagcttaagcaaggtggcacagtatctcaacaagttcaaccatttgtcccacagaaaatggtcacctacctcgacctctcctacagtagagctgtcagcacggcgctggcagttgaagccaagtatgctggcccaggaaagtcaaagggctatggaggtgacaggcccaaccaggggcctgagaagcgacaaaggttggtgatccgaccttttaatcaaaattgttcttcaccacgtccaccctcctacccctttaaacaacctgtctttatctgtcctgccactacccccacctcaacaaatcagccgagtgcccctggtactcgtttccccgccctcccaagctcttcaacaggttgctttaattatgggaagtctggacattttatcaaggactgcccatatcccaagaagaacagatcaaatgatcagcagagttcagggagttccgctcaaggcaagggaaacccggcgaataatacatcgggcaaaaatatgaagaaaactgggcgaatttattatatgcaaatggccacgacgccggaaggagaaccggtcttgttgggtacgtttctcatggccaatcaccctgcagttattctttttgattctggcgcttcacacacattcataagcaagaagtttgtggagcaacattgcattccatacaatgaatcaagggaagggtttataattcattcgcctgggggacaaatattcactaaagaagtggatttccatgtgcccgtaacattggctgaacgggactttcccacaaatatgattgttctgaaaggccaagatatagatgtaattctgggcatgaattggttagcccaacataaagctatcctcaacactgatctgagatccatcaggttgagctatggccaagaagaggttctgttgtccattcccgtagctattccagctaaaccaattggcagagtatatgaagccatcataccagagatccaagatattccggtagtatgtgaattctcggacgtctttccggaagatctgcctggattgcctccagaaagagatgtagaatttgtgattgggttgaagcccgccatctttgtcaagaagaaggaccaaacacttcggatgtgcgtggattatagaccccttaatgaggtcacaatcaagaataagtaccctcttcctcggattgatatcttattcgatcaacttaccggagctcgggtattttccaagattgacctcaggttgggttaccatcagatccgtatccgacccgaagatatacccaagaccgcattcactacgcgatgtgatgaagcctttgagcagctgaaagtattattgaccactgctccggtattagctcaaccggacattgaaaagccctttgatgtgtattgtgatgcatcagatcataaaagtttgaagtacatctttacccagtcagaactgaatatgagacagaggagatggcttgagcttattaaggattatgaactggagattcactatcacccaggcaaggctaatgtagtggcagatgcgttaagtcgcaaggctttctatcattgtcttacaatgaagacttctgacattacgttatgccaagaaatggagaagttggacctgggaatgatacaacacgaaacttcaaatcacttgaagcttgagtctgtcctcctacaaaggataattgacgcacaaagaaaggatgaaggtatgaaacacattcatgagaaaatggaggccggtaaagccaactgcttcagaagagataatcaaggtgttgtatggtttaacaaccgcatagttgtgcctaaaaatgatgagatccgccagcaaattttagatgaagcacatcttagtcgctattttattcatcccggaagtactaagatgtatcatgatctaaagcagcattattggtggacgaaaatgaagattgaaattgcacgctatgtggcaaaatgcaacacttgccgacgtgtcaaggccatacatatgaagactgctggcccattacagtctttacctataccaacatggaaatgggaggatattagtatggactttattatggggttacccaggacagcaaaagggtatgattccgtctgggttatcattgatcgacttaccaagatcgcccactttctcccagtcaaagtaaagtatccagtaatcgcatatgcggaactgtacattgctcgcattctcagtctgcacggtgttccgaagaccatagtgtcggatcgtggacctcaattcttatccaaattcattgaagaacttcacaaatccttgggtgaaagatgtttcttcaggtctgatatggaaaaggaaacagaagaaaaggttcgacgaataattcataatttgaaagaagcccaagctcgccaaaagagttatgcagacaagcgacgtcaacccttgcactttaaagttgaagaccatgtttacctgaaagtttcaccaatgaagggtgtatcacgtttcggggtaaaggggaagctcgcaccccggtacattggtcattttcctatccttgaaagatatggaccagtggcatatcgactccagttacccgaaacattgtctgctgtacataatgtgttccacgtatctcaattgaagaagtgtcttcgggttccagatcgaactattgaagtaacagatgttgccttagaactagacttgacctattcaaaacatcctgttcaagttttggatcaaaaggatcggatttcccaaaggaaaactctcaagttttacaagatacagtggaaccaacacacggaagatgaagctacttgggaaactcaagactttttagataagaatttcccaggctttatagcttcatgtaaattgtaa

SEQ ID NO: 5167 - DNA, 1068 bp, Zea mays
  Clone ID: TF_ZmC1324486_2
atgtcaaccaaagagttcgaggaactcgcccttgatggccataactacccaacttgggcttcagatattgaaataacttttgcttctcgtggaatcattgatgcaattgcagcacccatcactggtactgatccagtgaatgaggttaaaaagaacacagcacttttccttttgaggctttacatccataaggaccttaagcaagagtaccttatggagagatgccctcataacttgtggaaagctctcaaagagcgctatgaacagcagaaggagctcatatggccgtcagccaaccatgagtggaaccaccttcgtctacaagattttaaatctgttgcagaatataaccatgctcttcatagcatttgttctaaattgaaattttgcgagaaagagccctctgaagcagacaagatagagaagactctatctaccatgcttccagaggataggatattgcatcagcagtatcgctctagcaatttccagagatattctcaactcatgcacacattgacccaagcagaaaagcatcatgagcttcttctaaagaatgctcagcagcgccctcctgggtctgcccctctgcctgaggtacatttcaatgtgcataagactgagaataagaaaggattcaagaaaaacttcaagaatcctcctggatctcgcaaattcaagaagaacaaattccacaagaaaggtaaaggaaaaggaaaaggaaatgacaagcctctaccatctaagggcaacagagcttgccttaaatgtggtactgagggccattttgctagggactgcacttgccctaagcaccttgttcttttgtatcaacaatccctaaagaagccaaagtctgataagcctggttttgaggctcatttcaattctactgaagcaccaattgaggttggaagttcttcactggcttctggtgatctgaagaacactcttgctaaagagcacctcaatgtggttgacaacaagcctccacttctgcaagaagatgaatctgatgatatgatcattgagtatatgtcaaaggatccatttggagatttggcataa

SEQ ID NO: 5168 - DNA, 1644 bp, Zea mays
  Clone ID: TF_ZM4353.C2.o2.fg
atgtctggagatcacgctaagagggagatagtcaccggcgataaggctaaaagctcgggaaggaagaatgaatggactccatcaagagagtctagcgacaaatacaaggaggaatctgcttcctccatcaagtcacataggaagggcaaaccaccatattttgatggtaaagattactgtatgtggagtgataaaatgaggcaccatctaacctcactccacgaaagcatttgggatattgttgagtttgaagtgcaggcaccacaggtgggcgacgaggactacgactcggatgaggccatccaaattaggcactttaattcccaggaaacttctatactcctcgcctccttgtgtcgagaggagtataataagatgcaagggttgaaaaatgctaaagaaatttgggatgtcctcaaaatggcgcacgaaggggacaaggtgaccaaggtccccaagcgcgagacgatcgagggagaactcagtcgattcatcctcaacaaaggagaggagccgcaagcgaagtacaaccggctcaaaacaatggtcaaccaagtgcgcaacctcgggagcaccaaatgggacgactatgaaatggtcaaggttattctaagatctcttgtttttctcaatcctactcaagttcaattaatctatggagatcctagatataaacagatgtcccccgaggaggtaattggcaggtttgtgagctttgaacttatgatcaaagactccaaacatattgtcaacttggagcaaggcgccacctccacacttgaggtgcaacccgttgcattcaaagcaacagaagagaataaggaagagtctacacgaagtagactcccaatcgacgcctccaagctcgataacgaggagataactcttatcattaagtgctttcgaccaatcctcaaacaaaagaaggggaaggactacaagccccgttccaaaaggttgtgttataggtgtggtaagtccggtcacttcattgctaaatgtccatatactactgacagtgacagggacgatgacaagaaagggaagaagaagatggagaagaagagatactacaagaagaagggtggcgaggcacacattgggcgggaatgggactctgacgagagctccaccgactcctccgacgacaaggacgccaccaacatcgccatcaacaagggccttctcttcccaaacatcagccacaagtgcttaatggctaagaacgacaaaaggaaaaaggtagaaaaatgtgagaatttatctaaagagcttaacatttgcaatgattcaatttcctgtcttagagatgaaaatgctagtttaaatgctaagatagaagaattgaatgcttgcaatatttctacatctactgttgagcatatcaccatttgcactagatgtagagatgttaatattgatgctatagatgatcaccttaccataattaaagaacaaaatgatcacatagcaaaattaaatgctaaaattgccgagcatgagcttgagaatgaaaattttaaatttgattgtagcatgctctataatgggagacaccctggcattaaggatggcattagcttccaacaagggagccaaagcaacaccaaacttaatgcccccaagaatagactgtctaattga

SEQ ID NO: 5169 - DNA, 1476 bp, Zea mays
  Clone ID: TF_ZM4678.C6.o4.fg
atggacgtcgatttggaggcaccgccgccgcctccacccactgcagcagcagttactcgtcgttcaccatctccgtcggcacccatggtcgtcgggaccattgctgctcgtcgtggagagccccacgcgccgtcgatgctccgcgcggacgcatcatcctcactggccatcgcccaaatggggtggccccatcttcctcctccaatgggaggacctaatggccctcgatccggccgccacgacggccgtttggggggagggggtggggaagaggctcggcccctgcgcgggcagtggaggagcgcgctcagcgcggcgctgctcctcgacgtggagcagtgggcgggcggcggctcagcaaggcccgaggtcgggcctggcgcggcgtgtccggccgagcgcaggcgacggcaccggccggcggtgcgtggccgcggtggcctggccgagtcggccacatcctcccccagcgcggatggggagggcggctccactggcacgcgcgccatggcggctctcggcgctggcaaggaccggcacgacggccacgcgggccctcttcctccaaggcgcggcaggctccatggtggagccacgggcgcgcaggaaaggagcctggcggcggctggagctggccgctcccttctggcgcctcctcctggagggaacatgtcaaccaaagagttcgaggaactcgcccttgatgggcataactacccaacttgggcttcagatattgaaataacttttgcttctcgtgggatcattgatgccattgcagcacccatcactggtactgatccagtgaatgagccctctgaagcagacaagatagagaagactctatctaccatgcttccagaggacaggatattgcatcagcagtatcgctctagtaatttccagagatattctcaacttatgcacacattgacccaagcagaaaagcatcatgagcttcttctaaagaatgctcagcagcgccctccagggtctgcccctctgcctgaggtacatttcaatgtgcataagactgagaataagaaaggattcaagaaaaacttcaagaatcctcctggacctcgcaaattcaataagaacaaattccataagaaaggtaaaggtaaaggaaatggcaagcctctaccatctaagggcaatagagcttgccttaaatgtggtactgagggccattttgctagggattgcacttgccctaagcaccttgttcttttgtatcagcaatccctaaataagccaaagtcaaataagcctggttttgaggctcatttcaattctactgaagcaccaattgaggttggaagttcttcactggcttctggtgatctgaagaacactcttgctaaagagcacctcaatgtggttgacaacaagcctccacttctacaagaagatgaatctgatgatatgatcattgagtatatgtcaaaggatccatttggagatttggcataa

SEQ ID NO: 5170 - DNA, 436 bp, Zea mays
  Clone ID: TF_LIB3068-010-Q1-K1-C8
gcggtagcggcgagtccttcattgtcggagtcggaagaggagcaatccgaggcccactcgttgcctagatgcgcctggccctttgccttcttgtaatgcttcttcttttccctcttgttttccttttcctggtcactatcattatcaggccagttagcgataaaatgaccaatcttaccgcacttgaagcatgagcgcttccccttcgtcttggtcttgcttggctgccccttgtgaccctttagcaccgtcttgaagcgtttgatgatgagagccatctcttcttcattaagtccgaccgcctcaatttgtgccaccttgctaggtagcgcctccttgcttcttgttgctttgagagcaaaaggttgtggttcgttgatcggtccattcaaggcgtcgtccacgtaccttgcctccttgatcatcattcgcccgc

SEQ ID NO: 5171 - DNA, 5533 bp, Zea mays
  Clone ID: TF_ZmC36592_178
caagagcagagagagagagagggggggggcgctgacgggcggggtcgggctgtcagcgggcgggagtggcgcgcggtttgggccgcctgggccgaaaggagaggggagggtggctggtgcgcgcgagctgggctggaagccggcccagccgagggagggaaggattttccttttctttttcttattctatttccttttctttttcttttctccttttgtgtctttttgctcctttttctcttaaccaaaaattctctaaatgaacttggtgataaatatggtctatgtgaggtgcttcaaatcattttaagtatatgcaaatgattgggtgacctaggggtagggttagggaggagaataaaacaaaagggggggaaattagggggggttagggtttcaaacctgggttgggaatttgggatgttacaaacctacccacttaaaggaatctcgccctcgagatttagactggatttgggaaaaggtaagggtattccctcctcaagaagtcctcactctcccaggtggcttcctcttctccttctctgctccactgaactttacagagctttacttctgaggtgcgggtctttctaactgctaaatcaagaatctttactggtttctcatgatattgaaggtctttctgaatctgcactgtctcttcttcgaggtgactttctggtgcttgcaggcatttgcggagctgggacacgtggaacacattgtggatgtcggacatggattctggtagttccaggcggtatgcggcgggtcctaccttgccaatgatgggatagggacctacaaaacatggggctagcttccctttgacttggaacctcctgacaccacgcattggagaaaccttaaggtagacgaagtctccttcctcaaatcggagttccctccgcctgttgtccgcgtaactcttctgtcgactctgagcttcaagcaaccttctgcggatcagtgcaactttctcttctgcctctttgacaaaggcaggtccttctagtgctttttcccccacgttggaccacatgagaggggtcctttctgtctgcccatctgtctgagggtggtacgcggtgctgaaatctagcttggtgcccatagctttctgcaggcttgtccagaatttggatgtgaactgggttcctctgtctgacactatcttccttgggatgccgtggagtttgactatctctttgaggtagatccgggcaagggtggctcctccaaaggtagttttcactgggatgaaatgggctaccttggtgaggcggtctattattacccagatggaatcattccctttttgcgtccggggtagtccggttacgaaatccatgcctatctcttcccatttccattcaggtatcgggaggggttgtaataggccagcaggtttttggtgttcgacttttgttcgttggcagatatcacatcgggccacatactgagctatttctttcttcatccccttccaccagtatctggtcttgaggtccaggtacatcttggtagttccggggtggatggagtaggccgagtcgtgagcttccttgagtaggacttctcgggcctccccttttggtacacacagacggtgtttgaaccaaacgactccttggttatctgtcctgaggtccgggagttgttccttgcgggctttctccacaagccttgccgtctctgggtctagatgttgagctttgcggatgaggttttctagcattggcttgacttcgatactgtcgttgtttcctagacatgcatttagttgtgctgattcttccttccagtcttctagaaagttggtcccttttattccgaatggttttcgactgagggcgtcggctaccacgttggccttcccggggtgatagtgaatttcgaggtcataatccttgatcagctctaaccatcttcgctgacggaggttgagatccggttgagtgaatatgtacctcagactcttgtgatcggtgaaaatatggcatttgtttccgattaggtaatgcctccatatctttaaggcatgcactatggctgccaattccagatcatgggtggggtaattctgctcgtgcggcttgagtaggcgtgatgcgtaagcaatgactttctcgttctgcattagcacacaccctaagccttgccttgaggcatcacagaagacgacaaaatcttgatgaatatctggcagtgatagaacgggtgccgttgtgagtttctcttttatgatttggaaactttcttcacattttggggtccacacaaatttatggtctttcttgagaagttctgtcattggcctcgcgatgctggagaatcctttgatgaagcggcggtaataccctaccattcctaggaagcttcgaacttcactgacgttggttggttgcctccattttgacactgcttctactttggaggggtccacttctattccttctgcggttaagatatgcccaaggaaggctatcttttccaaccagaattcacatttactgagtttggcataaagttggtgtgctctgagttttccaaggacgatccgaaggtgacgcttatggtcttcgcggttcttggagtaaataaggatgtcgtcgatgaagactacgacaaacttatctagctcttccataaacactttattcatgaggttcatgaagaaggcgggtgcgtttgtcagtccgaacagcattactgtgaattcatattgcccgtaccgggtgacaaatgcagtcttttggatgtccgcttccttgatcctcaattggtggtaaccagacctcaggtctatcttggagaagtacttggctccttgaagctgatcgaagaggtcgtcaatccgaggaagtgggtacttgttcttgatggtaacctcatttaacgatcggtaatcaatacacattctcatgcttccatctttcttggagacaaacaggactggtgccccccaaggtgatgagctgggacgaatgtaccccttttgctgaagatctgagatttgaagttttagttctgctaactcagttggagccatgcggtatggtctctttgcgatgggtgctgttccaggaatcagatctatgtaaaactccacttctctttctggtggcattcctggcaattcttctggaaatacgtccatgaattcttccactactgatatatttccctgctggtcggtgaggaggactgtctcatctgcgcaactgatgatgcctttgtgtttagttagccaatccatccctaggattacatcaattcccttggatggcaagacggttaagtctgccaggaatactaccccacttaaaaggattctgacttgggaacattttagctggcataggaggtcgaaccccggggttcgggtgaccaaaggaatctctaggggagtagagggaatgccatgcttttccacaaagctagtggctatgaaagagtgggatgctccagaatcaaaaagtacggtagcgggagtaaattcaacaaggaactcaccgagtactactcccggagcctgctgagcttcctgggcatcgacgtgatttacacgtgcccttccttggtacggagtcttgttctgctggctgacggcggagggcgccttgggggcgggtgccgaggtattcttggggccattcatcgagttggagtaggcgggtccctgtggcttcagctgcggacagttgttcttgaagtgacttggatcaccgcagtgccaacatgcatttaccggaggttggttgcttgccactgagggagaatggaaagagctctgactctgctggctgaatcttgacggagtgggtccagctggtctactgaagttgggccccttgggtggaaacccaaatgatcgagtcttctggtgccggtcctgttgctgagctcggaggacttggaatttcctctttaggtgacccttttcttcttcccttgccctttccacttgtatggctttgtttgagaggtgcgagaagctgaggaagtcttggctagctaggatggtcttgagttctggtctgagccatttcaagaagcgggccatcttcttggcctctgagatgacatcatctggcgcgtagcgggataattctgtgaatttgtgcacgtactcgctgatggatcttccgtcttgagtcaattctcggaactcgtcctccttaagctgtaccaatccttggggcacatggtgctcccggaaagctgcttcaaattccgcccaggtagcatctctgatggtgatgttgaaagtgtcccaccaggctaaggccatcccagagagttggtgggcagccagttgaacacgctgattttctgggcaactgatggcttccagcttccttttgatcgtgcgcatccaatcgtctgcatcgagggggttgcttgatccggcgaacgtgggaggtttgagtctcaggaagtcccccattctgtcttgcggtcttccaccatttggccgttgattttccagattttgagtgaggacctcgatgagtcgggtctgattggctagaacttgggctatgtctaagggtaggggtggaggtgcggggaggtgggtttcactttcctctctatcgacttccccttcagctcttcgggggaaaccctgctccaatccctggggcggtaggcttggttttatccgaagccatgagggcgttcttcgaggtgctagcgagttccttgtctaaggtgtccccaaatgccttgagaagatcatcgaggctggctagggatacatcttgttcgtcggaccagtcatcgattctggggggaggtagggctagaggggccttcttcttcttcttctctgtctggcacccttggttagtggtcttgttctggatcttctttttgggggcgagtgcctttagcttcttgtcaaagtctgtcttcaaggtccgataggcctcacgggtgttggcttcatcgccttccactatgctgagactctcctggagagatgccttctcttgcttaagctctttgacttgctgctctaggctttccactcgggagtttaggtgggtacaatgggaggagagctcatcgtagtggttgtcgagggtgtggaggtatccggccatgtagacgatagtgggatcatcttctatgggatctcctccctgacagagcctggagtcttttcttccaggttggggtgtttttgttgctgggtggaaaatatcggaggggggtctcaaagatctctcggctatagttttggcacagttgtttgagggcttttcgagcaacgctctggcatgtgtctgggaagcggtacccgatgaaggtaatttggaaaggagggtggtttgggtagttccggctttctcccaagtagatcgccatagagcactttttcattccattctcacggtactctttccagacatattcgggcttcttgcggatccccaagcgcagtgcgcagcttcgcaagaaggtgaggaaagccttcctcctctgagcaataggaagtcctaatcacccagaggttttccat

SEQ ID NO: 5172 - DNA, 4647 bp, Zea mays
  Clone ID: TF_ZM3657.C15.o1.fg
atggaagactctctggccattaggacatcctactgctcagaggtggaagggttcccgcatctcttgcgaagctgcgcgcttcgcatgggaatccgcaaaaagccggaatacgtctggacggagcatatcgaaggcggaatggagaaatgctctatggcagtctacctgggagaaagccgaaactatccaaaccatccttccttccaagtcactattaccggataccgtttccacgatacttgccaaaatgttgcccgaaaagccctccgacaactgtgtcagaactacaacaaagtgatctttgaaaccccccttcactactttccacccagcaacaagaacacccccacctggaggaaaagacttcaggccctatcaggaggagatcctattgagaatgatcccaccattgtctacatggccggataccttcacacccttgacaaccaatatgatgacctcgccctccactgcacctccctaacctcccgggtggaaagcctggagcaaaaaagcctcttaatggctgaaggcgaagaggccaatacccgtgaagcctaccgcaccctaaaattggactatgacaagaaactgaagaagctcgcccccgcaaggaaaatccgcaagaagaccaaaagtcaaggatgtcagactgagcagaaggaagaaaaccctccaaggaacccatccgacaccgaagagatgtccctggccagccttgatgaccttctcaaggaatttggggacaccttagagaaggagttcgggagtactctagatagcacccgtatggcttcggatagaaccacgcctaccgcctccgggattggagcaagacttcctctaggagctgaaggagaggctggcagagaagggggtgagacccacctccccgcacctccggagctaccattagacctagcccaagttctggccaatcaaacccgactcattgaagtcctcactcgaagtctggaaaaccagcgcccaggcggtggaaggccacaggacaagatgggggaatttttgagactcaagcctcccacattcgcggggtctagcaatcccctcgatgcaaatgactggcttcgcacgatcaagaggaagttagaagccatcgcttgccccgagaatcagcgtgttcaactggcagctcatcagctttcaggaatggctttagcatggtgggacactttcagtgaagccgtcagagatgctacctgggcagaattcgaagcagctttccgtgaacaccacttcacagaactggcccgctacgcgcccgaggatgtcagcaccgaggccagaaaaatggcccgttttctgagaggattaagacccgagcttaagaccatcctcgccagccaagacttccacagcttctctcacctctccaacaaagctatccaagtggaaagggcaaaagaggaagaaaaagggcacatcaagaggaaattccaagtcctccgagcacaacagcaagagcgtcaccagagagctcgaccccttggacttccacccaggggtccaagcttcaataaacaatctggacccactccatcacgctacagtcagcagagtcagagctcccttcaggcaccctccgttgcgagcaaccagccgccagcaaacgcctgttggcactgcggagaccccagtcacttcaagaacaattgccctcagttgaaggcatctggaccaacttactccaactcagtgaatggccccaagattccatcggcacctacccccaaggcacttccttcaagcagccagcagagcaggactcagtatcagggcagagcccgggtcaaccacgtcgacgctcaagaagctcagcaagccccgggagtagtgctcggagcatcccattcttttatagccgctaagtttgtggaaaagcatggcatcccctctacacccctagctatccctttggtcacccgaaccccgagatcagacctcctgtgcaagctcaggtgctcccaagtcagaattctcttaagtggggtagtgttcctagcagacttaaccatcttgccatcccaaggaattgatgtaatcctagggatggattggctagccaagcacaagggtatcatcagctgcgcaagcaagacggttctcctcacagatcaccaaggaaaagcagtttcctgtcaagcccaaccgcccgcaaacgatccaatgatgtttaatctaatagcagagagcatgtctgtaatcaaggagtttgaggatgtatttccggaagagttgcccggaatgccaccagaaagaggagtggagttctatatagatctcattcctggcactgcgcccatcgcgaagagaccataccgcatggcccccactgaattggcagaattaaaacttcagatttcagaactacaggaaaaagggtacatccgtcccagttcgtctccctggggagcacccgttcttttcgttaccaaaaaggatggaagtatgaggatgtgtattgattatcgatccttgaacgaagttacaatcaagaataagtaccctctccctcgaatcgatgacctcttcgaccagctacagggagccaaatacttctccaaaatagacctcaggtcagggtatcaccaactaaggattaaggaggcagacattcagaaaactgcattcaacaccagatacgggcaatatgaattcacagtgatgccatttgggctcacaaacgcacccgcctttttcatgaacctcatgaataaggtatttatggaagagttggataagtttgtcgtggtctttatcgacgacatcctcatatattccaagagtcgcaaggaccatgagcatcaccttcgaatcgtcctcggaagactcagagcacatcaactttatgctaaactcagcaagtgtgagttctggttagagaagatagctttcctggggcatatcttgactgcagaagggatagaagtggacccatctaaggtagaagctgtttcaaattggaagcaaccatccaacgtcagtgaagtacgaagctttctgggaatggcagggtattaccgccgttttatcaagggattctccagcatagcaaaacccatgaccgaacttctcaaaaaggacaataagttcatgtggactcccaaatgtgaagaaagtttccaaatcatcaaagagaagcttacaaccgcaccagttttgaccctaccagacatacaccaggattttgtcatcttctgtgatgcttccaagcaaggcttagggtgtgtcctaatgcaaaatgagaaagccattgcttatgcatcccgcttactcaagccgcacgaacagaactaccctacccacgatctggaattggcagccatagtgcacgccctaaaaatatggaggcattatctgatcgggaacaaatgccacatcttcactgatcacaagagtctcaagtacatcttcacgcaaccggacctcaacctccgtcaaagaaggtggctcgaattgatcaaggattatgacctcgaaatccactaccaccccggaaaggccaacgtagtagcagacgccctcagccgaaaacctttcggggttaaaggaacaaactttctggaagattggaagagagaatcagctcagctgaatgcatgtctgggagacaacggtggcctggaagtcaagccaaacctagaagatctcatatgcaaggctcaacgcctggacgcagagacagccaggcttatggggagagcacgcaaggagcaacttccgggccttaggacagacgagcaaggagtcctctggttcaaaaaccgcctgtgtgtgccagtgggagaggcacgaggaaccctactcaatgaagcccacaactcagcttactctatccacccaggaaccaccaagatgtacctagacctcaaggccagatattggtggaaagggatgaagaaggaaatagcacagtatgtggcccgatgtgacacctgtcagcgaacaaaggccgaacatcagaagcctgcaggcctacttcaacccctcccaatacccgaatggaagtgggaagaaataggcatggatttcgtaaccggactgccccgatcacagagaggaaatgattccatatgggtaataatcgatcgtctcaccaaggtggcccactttgttccagtaaagaccactttcggaggagcagcccttgcccgaatataccttaaagagatagtcaggctacatggcattccacggaagatagtatcagatagaggaacgcagttcacttcaaaattttggaagggccttcagcaagcaatgggcaccaagctagatttcagcaccgcttatcatccccagtcagatggtcaaaccgaaagagtcaacaaggtcctcgaagatttactcagagcctgcgtattaaccttcgacagagattgggagtccagtttgccgtacgccgaattctcgtacaacaacagccatcaggccagcatcaagatgtcaccatttgaagcactgtacggaagaaaatgccagactcctctaatgtggtccaatgtgggggaaaggacgcttgaaggacccgactttgttaaagaggccgaagagaaagtcgctttaatccgcaggaggttactggaagctcagagccgacagaagagttacgcagacaataggtga

SEQ ID NO: 5173 - DNA, 4809 bp, Zea mays
  Clone ID: TF_ZM4489.C3.o4.fg
atggaagcctctctggccattaagtcatcctactgctcggaagtggaagggttcccacgcctcttgcgaagctgtgcgctccgcatgggaatccgtaagaagccggaatacgtctggacggaacatctcgagggcggaatgataagatgctctatggcagtctacctgggggagagccaaagctatcccaaccaacgttccttccaagtcacttttaccgaagcccatttcctagatgcttgccaaaatgtcgcccgaaaagccctccgacagctttgtcagaactacaacaaagtaatcattgaaaccccccttcgctactttccacccagcaacaagaatacccccacctggaggaaaagacttcaggccctatcaggaggagatcctattgagaatgatcccaccattgtctacatggcaggataccttcatacccttgataaccaatatgatgacctcgccctccactgcacctccctaacctcccaggtggaaagcctggagcagaaagtcagggaactttcagaagaaaaagcgtcccttcaagagaacctctcgctagctgaaggcgaagaggccaatacccgtgaagcttaccgcaccctcaaattggactacgacaagaaactgaagaagctcgcccccgcaagaaaaacccgcaagaagaccaaaagccaaggatgtcagactgagcagcaggaagagaaccctcccaggaaccagtccgaccccgaggacatgtccctggccagtcttgatgaccttctcttggaatttggtgacaccttagagaaagagttcgggggtaccctagcaactctcttcccatggcatatggcttcggatagaaccacgcctaccgcctccgggattggagcaagacttcctctaggagctgagggagaggctggcggagaagggggtgagacccacctccccgcacctccagaactaccactagacctagcccaaattctggccaatcaaaccagactcattgaagtcctcactcgaagcctggagaaccagcgcccaggcggtggaaggccccaggacaggatgggagaattcctgagactgaagccgcccacgttcgcggggtccagcaatcccctcgatgcagatgactggcttcgcacaatcaagaggaagttggaagccatcgcttgtcctgagaatcaacgtgttcagctggcagctcatcagctttcaggaatggctttagcatggtgggacactttcagtgaagccatcagagacgctacttgggcagaatttgaagcagccttccgtgagcaccacgtaccccaggggatagtgcaactcaaggaagatgagttccgggagctaacccaaggcggaagaacagtcagtgaatatgtgcacaagttcacagagttggcccgctacgcgcccgaggatgtcagcaccgaggccagaaagatggctcgttttctgagagggttaagacccgagcttaagaccatcctcgccagccaggacttccacagcttctctcacctttccaacaaagctattcaagtggagagagcaaaagaggaagaaaaagggcacatcaagagaaagttccaggtcctccgagcacaacagcaagaacgtcaccagagagctcgaccctttgggctcccacccaggggtccaagctttcataaacaatctgggccctctccatcacgcttcagtcagcagagtcagagctcccatcaggcaccttccgttgcaagcaaccagccgccagcaaacgcctgttggcactgcggggaccccagtcatttcaaaaacaactgcccccagttgaaggcaccagggccaacctactccaactcggtgaatggccccaaggttccatcagcacccacccccaaggcgctcccctccaacagccagcagagcaggactcagtaccagggcagggcccgggaatttgaagatgtatttccagaagagctgcccgggatgccaccagaaagagaagtagagttctatatagatctcattcccggcactgcacccattgcaaagagaccataccgcatggcccccactgagttggcagaattgaagcttcagatttcggaactacaacaaaaagggtacatccgtcccagttcgtctccctggggagcacccgttcttttcgttaccaaaaaggatgggagtatgaggatgtgtattgattatcgatccttgaacgaggttacaatcaagaataagtaccctcttcctcggatcgatgacctcttcgaccaactacaaggagccaaatacttctccaagatagacctcaggtcagggtatcaccaactgagaatcaaagaggcagacattcagaaaactgcattcgtcaccagatatgggcaatatgagttcacagtgatgccatttggactaaccaacgcacccgcctttttcatgaacctcatgaataaggtgtttatggaagaattggataagtttgtcgtggtcttcatcgacgacatcattatttattcaaagaatcgcaaggaccatgagcatcaccttcgaatcgtcctcggaagactcagagcgcatcaactttatgcgaagctcagcaagtgtgagttttggttggagaagatagctttcctagggcatatcttgactgcagaagggatagaagtggacccatccaaggtggaagctgtctcaaattggaagcaaccatccaatgtcagcgaagtacgaagctttctgggaatggcagggtattaccgccgttttatcaagggattctccagcatagcaaagcccttgaccgaacttctcaaaaaggacaataagtttgtgtggactcccaagcgtgaagaaagtttccaaatcatcaaggagaaacttacaactgcaccagtcctgactctgccagacatacaccaggatttcgtcatcttttgtgatgcttccaagcaaggcttagggtgtgtcttaatgcaaaatgagaaagtcattgcttatgcatctcgcttactcaagccgcacgaacagaactaccctacccacgatctggaattggcagccatagtgcacgccctaaaaatttggaggcattatctgattgggaacaaatgccacatcttcactgatcacaagagtctaaagtacattttcacgcagccggacctcaacctccgtcaaagaaggtggctcgaattgatcaaagattatgacctcgaaatccactaccaccccggaaaggccaacgtggtagctgacgccctcagcagaaaaccctttgggattaagggagcaaactttctggaagattggaagaaagaatctgctcagctaaatgcatgtctgggagacaacggtagcctggaagtcaagcccaatctagaagatctcatatgcaaggcccaacgcatggacgcagaaacaaccaagcttatggaaagagcacgaaaggagcaacttccggacctcagggcagataatcaaggaaccctctggttcagggatcgcctgtgcgtaccagtgggagaaacacgagaaaccctgctcaacgaagcccacaactcagcttactctatccacccagggaccaccaagatgtacttagaccttaaggccagatattggtggaaagggatgaagagggaaatagcacagtatgtggcccgatgtgacacctgccagcgaacaaaggccgaacatcagaagcctgcaggcctacttcaacccctcccaatacccgaatggaagtgggaagaaataggcatggatttcgtaaccggactacccagatcacaaagaggaaatgattccatatgggtaatcatcgatcgtctcaccaaggtggcccatttcattccagtaaagaccacttttggaggagcagcccttgcccgattataccttaaagagatagtcaggctacatggcattccacggaagatagtatcagatcgaggaacgcagttcacttcaaaattttggaagggccttcagcaagcaatgggcaccaagttagatttcagcactgcttatcacccccagtcagatggtcaaacagaaagagtcaacaaagtcctcgaagatttactcagggcctgcgtgttagccttcgacagagattgggagtctagtttaccgtacgccgaattctcatacaacaacagccatcaagccagcatcaaaatgtcaccattcgaagcactgtatggaagaaaatgccagactcccctaatgtggtccaatgtaggggagaggacactagaaggacccgactttgttaaagaagccgaagaaaaagttgctttgatccgcagaaggttacttgaagctcagagtcgacagaagagttacgcagacaataggcgaagggaactcagatttgaggaaggagattttgtttatctcaaggtttccccaatgcgtggtgtcaagaggtttcagatgaaaggaaagctagcaccccgtttcgtcggtccttaccctatcatttcccgaataggacccgtggcataccgtcttgagctaccagaatccatgtcagatattcacaatgtgttccatgtgtcccaactccgcaaatgcctaaaagtaccagaaacccgtatcaaggcagaagcaattcagattcaaaaagatctccagtaccgggaaaagccagtgaagattctcgactcagcagtcagaaggacccgcaatttagaagtgaagctctgtaaggttcagtggagcagagatggggaggaggaagccacctgggagagtgaggacttcttgaggagggaatacccttaccttttcccaaatacagtctaa

SEQ ID NO: 5174 - DNA, 4443 bp, Zea mays
  Clone ID: TF_ZM4715.C4.o1.fg
atggaaaacccctggttgattaggatctcctattgctcagaggaggaaggcttccctcaccttcttcggagttgcgcgctacgcttggggatccgcaagaagcccgaatatgtctggaaggagtaccgtgaaaatggaatagaaaagtgctctatggcggtctacttaggagagagccagaactacccaaaccaccctcccttccaaattaccttcatcgggcacagtttcccagacacttgccagagcgttgctcgaaaagccctcaaacaactgtgccaaaactatagccgagagatctctgagacccccctccgatatttcccacccagcaacaaaaacacccccacctggaggaaaaggctccagtctctgtcaggaggagatcccacagaagatgaccccactatcgtatacatggccggatacctccacaccctcgacaaccactacgacgagctctcctcccactgcacccacctaaactcccgagtggaaagcctagagcagcaagtcaaagagcttaagcaagaaaaggcatccctccaggagagtctcaacatagcagaaggcgaggaagccaacactcgtgaggcctatcggaccttgaaaatggactatgacaagaagctaaagaaactcgcccccaagaagaaaatccagaagaagaccaccaaccaaggatgccagacagagaagaagaagaagaaggcccctctagccctacctccccccagaatagatgattggtctgacgacgaggatgtatccctagcaagcctcgatgatcttctcaaggcatttggggacaccctagataaggaattcgctacctggtgggacaccttcaacgtcaccatcagagatgctacctgggcggaatttgaagcagctttccgggagcaccatgtgccccaaggacttgtacaacttaaggaggacgagttccgagaattgactcaagacggaagatctgtcagcgaatatgtgcacaagttcacagaattagcccgctacgcgccagatgatgtcagtaccgagagcaagaagatggcccgtttcctgaaaggactcaggcctgaactcaagacaattctggctagccaagacttcctcaacttctctcacctttccaacaaggccatgcaagttgaaagggcaaaggaggaagaaaaagggcatcttaaaaggaagttccaggttctccgggcacagcagcaggaccggcaccagaagactcgatcatttgggtttccacccaaggggccaaacttcagtaggccagctggacccactccgtcgcgattcagccagcagagtcagagctcttttcattccccctcagtggcaagcaaccaacccccggcaaatgcatgttggcactgtggtgatcccagtcacttcaagaacaactgtccacagctgaaggtaccagtacccgcctactccaactcggtgaatggccccaagaatacctcgacatccacccccaaggcgccctccgccgtcagccagcagaacaaggctccgtaccaaggaagggcacgtgtaaatcacgtcgatgcccaggaagctcagcaggctccgggagtagtactcgaagaattaccaggaatgccaccagaaagagaagtggagttctacatagatctgatccctggaacagcacccatcgcaaaaagaccataccgcatggctccaaccgagttagcagaactgaagcttcaaatcgtagatcttcagcaaaaagggtacattcgtcccagctcatcaccttggggagcactagtcctgttcgtctctaagaaggatggaagcatgagaatgtgtattgattaccgatcgttaaatgaagttaccatcaagaacaagaatccacttcctcggattgacgacctcttcgatcagcttcaaggagccaagtatttctccaagatagacctaaggtctggttaccaccaattgaggatcaaggaagcagacatccaaaagacggcatttgtcacccgatacgggcaatatgaattcacagtgatgtcgttcggactgacaaacgcacccacctttttcatgaacctcatgaataaagtgtttatggaagagctagataagtttgtcgtagtcttcatcgacgacatccttatctactccaagagccgcgaagaccataagcgtcaccttcggatcgtccttggaaaactcagagcacaccaactttatgctaaactcagtaaatgtgaattctggttggaaaagatagccttccttgggcatatcttaaccgcagaagggatagaagtggacccttccaaggtggaagcagtatcaaaatggaggcagccaaccaacgtcagtgaagttcgaagcttcctaggaatggcagggtattaccgccgcttcatcaaaggattctccagcatagcaagaccgatgatagaacttctcaagaaagaccataaatttgcgtggacccaaaaatgtgaagggagtttccaggtcataaaggagaaacttacaacagcactcgttctatcactgccagatattcatcaagattttgtcgtcttctgtgatgcctcgaggcaaggcttagggtgcgtgctaatgcaaaacgagaaggtcattgcttacgcatcacgcctactcaagtcgcacgaacataattaccccacccatgatttggaattagcagccatagtgcatgccttgaagatatggaggcattacctaatcggaaacaaatgccacattttcaccgatcacaagagtctgaggtatatattcactcaaccagatctcaacctccgtcagcgaagatggttagagctgatcaaggattatgacctagaaattcactaccaccccgggaaggccaacgtggtagccgacgccctcagccgaaaaccattcggaataaaaggaaccaactttctagaagattggaagaaagaatcagcacaactaaatgcatgtctgggaaacaacgacagtctcgaagtcaaaccaatgctagaagacctcatctgcaaagctcaacgtctagactcagagacagcaaggcttgtggagaaagcccgcaaggaacaactcccggacctcaggacagatgaccaaggagtcctttggttcaaacaccgtctgtgtgtaccaaaaggggaggcccgagaagtcctactcaaggaagctcacgactcggcctactccatccacccaggaactaccaagatgtacctggacctcaaaaccagatactggtggaaagggatgaagaacgaaatagctcagtatgtggcccgatgtgacatctgccaacggacgaaggccgaacaccaaaaacctgcaggcctattacaaccccttctgatacctgaatggaagtgggaagaaataggcatggacttcgtaaccggactgccccggacgcaaaaagggaatgactccatctgggtaataatagatcgcctcaccaaggtagcccatttcatcccagtgaaaactacctttggaggagccacccttgcccggatttatctcaaggagatagtcagaccccatggcatcccaaggaagatagtgtcagacaggggaacccagttcacatccaaattctggacaagccttcagaaagctatgggcaccaaactagatttcagtaccgcttatcaccctcagacagatgggcagacagagagagtcaacaaagtccttgaagatctgttaagagcatgtgtgttagcttttgatagaagttgggaatccagtctaccctacgcagagttctcgtacaacaatagctatcaggccagcatcaagatgtcgccattcgaagcactgtatggacggaaatgccagacccctctcatgtggtccaacgtggggggaaaagcactggaaggacctgcctttgtcaaagaggcggaagagaaagttgcactgatccgcagaaggttacttgaagctcagagtcggcagaagagttacacagacaacaggcggagggaactccgatttgaggaaggagacttcgtctacctcaaggtttctccaatgcatggtgtcaggaggttccaagtaaaagggaagctagccccacgtttcgtaggtccctatcccatcattggcagggtaggacccgcagcataccgcctggaactaccagaatccatgtccgacatccacaatgtgtttcacgtatcccagctccgcaaatgcctgcaagcaccagaaagtcacctcgaagaagagacagtgcagattcagaaagaccttcagtaccgtgaaaaaccagtgaagattcttgattcagcagtcagaaagacccgcacctcagaagtaaagctctgtaaagttcagtggagcagagaaggagaagaggaagctacctgggagagtgaggacttcttgaggagggaatacccttatcttttcccaaatccagtctaa

SEQ ID NO: 5175 - DNA, 2793 bp, Zea mays
  Clone ID: TF_ZM4912.C1.o17.fg
atgggggacttcctaagactcaaacctcccacgttcgccggatcaagcaaccccctcgatgcagacgattggatgcacacgatcaaaaggaaactggaagccattggttgcccagaaaatcagcgtgttcaactggctgcccaccaactttctgggatggccttagcctggtgggacaccttcaacgtcaccatcagggatgctacctgggcggagtttgaagcagctttccgggagcaccatgtgccccaaggactggtacagcttaaggaggacaagttccgagaattgactcaagacggaaggtctgtcagcaattatgtgcacaagttcacaaagttagcccgctacgcgccagatgatgtcaatactgagagcaaaaagatggcccgtttcctgaagggactcaggccagaactcaaaacaattctggctagccaagacttcctcaacttctctcacctttccaacaaggccatgcaagttgaaagagctaaggaggaagaaaaaggacatctcaaaaggaagttccaggttctccgggcacagcagcaggaccgtcaccagaagactcgatcatttgggtttccacccaaggggcccaacttcggtagaccagctggacccactccatcacgattcagccagcagagtcagagctctttccattcttccttagtggcaagcaaccaacctctggcgaatgcatgttggcactgcggtgatccaagtcatttcaaaaacaactgtccgcagctgaagccaccaggaccctcctactccaactcggtgaatggccccaagaatacatcggcaaccgcccccaaggcgccctccgccgtcagccagcagaacaagactccgtaccaagggagggcacgtgtaaatcacgtcgatgcccaggaagctcagcaggctccgggagtagtactcggtgagtttcttgttgaatttactcccgctaccgtacttttcgattctggagcatcccactccttcatagccactagctttgtagaaaaatatggcattccctctactcctctagagattcctttggtcacccgaaccccagggtccgacctcctatgccagctaaaatgctcccaagtcagaatccttttaagtggggtagtttacctggcagacttaaccgtcttgccatccaaaggaattgatgtaatcctagggatagattggctaactaaacacaaaagcattatcagctgcgcagacaagacagtcctcctcaccgaccagcagggaaagtcagtctcttgccaggcacagccacccgccagtgacccaatgatgttctatctaacaacggaaagtatatcagtagtagaggaattcatggacgtatttccagaagaattgctaggaatgccaccagaaagagaagtggagttctacatagatctgattcctggaacagcacccatcgcgaagagaccataccgcatggctcctaccgagttagcagaactgaagcttcaaatctcagatcttcagcaaaaagggtacattcgtcccagctcatcaccttggggagcaccagtcttgttcgtctccaagaaggatggaagcatgagaatgtgtattgattaccgatcgttaaatgaagttaccatcaagaacaagtacccacttcctcggattgacgatctcttcgatcagcttcaaggagccaagtacttctccaagatagacctaaggtctggttaccaccaattgaggatcaaggaggcagacatccaaaagactgcattcgtcacccggtacgagcaatatgaattcacggtaatgtcgttcggactgacaaacgcacccgcctttttcatgaacctcatgaataaagtgtttatggaagagctagataagtttgtcgtagtcttcatcgacgacatccttatttactccaggaaccgtgaagaccataagcgtcaccttcggatcgtccttggaaaactcagagcacaccaactttatgctaaactcagtaaatatcacctcaccaaggtagcccatttcattcccgtgaaagctacctttggaggagccacccttgcccggatttacctcaaggagatagtcagactccatggcatcccaaggaagatagtgtcagacagaggaacccagttcacatccaaattctggacaagccttcagaaagccatgggcaccaagctagatttcagtaccgcttaccaccctcagacggatgggcagacagaaagggtcaacaaagtccttgaagatctattgagagcatacccctctcatgtggtccaacgtgggggaaaagcactagagggacctgcctttgtcaaagaggcggaagagaaagttgcactgatccgcagaaggttgcttgaagctcaaagtcggcagaagagttacgcagacaacaggcggagggaactccgatttgaggaaggagacttcgtctacctcaaggtttctccaatgcgtggtgtcaggaggttccaagtcaaagggaagctagccccacgttttgtaggtccctatcccatcattggcaagcttcgcaaatgcctgcaagcaccagaaagtcacctcgaagaagagacagtgcagattcagaaagatcttcaatatcgtgagaaaccagtgaagattcttgattcagcagtcagaaagacccgcacctcagaagtaaagctctgtaaagttcaatggagcagagaaggagaagaggaagccacctgggagagtgaggacttcttgaggaaggaatacccttatcttttcccaaatccagtctaa

SEQ ID NO: 5176 - DNA, 3786 bp, Zea mays
  Clone ID: TF_ZM4948.C2.o9.fg
atggccttagcctggtgggacaccttcaacgtcaccatcagagatgctacctgggcggaatttgaagcagctttccgggagcaccatgtgccccaaggattggtacagcttaaggaggacaagttccgagaattgactcaagacggaagatctgtcagcgaatatgtgcacaagttcacggagttagcccgctacgcgccagatgatgttaatactgagagcaagaagatggcccgtttcctcaagggactcaggccagaactcaagacgattctggctagccaagacttcctcaacttctctcacctttccaacaaggccgtgcaagttgaaagagctaaggaggaagaaaaaggacacctcaaaaggaagttccaggttctccgggcacaacagcaggaccggcaccagaagactcgatcatttgggtttccacccaaggggcccaacttcagtaggccagttggacccactccgtcacgattcagccagcagagtcagagctctttccattctccctcagtggcaagcaaccaaccaccggcaaatgcatgttggcactgcggtgatccaagtcacttcaagaacaactgtccgcagctgaagccacagggacccgcctactccaactcggtgaatggccccaagaatacctcggcacccgcccccaaggcgctctccgccgtcagccagcagaacaagactccgtaccaaggaagggcacgtgtaaatcacgtcgatgcccaggaagctcagcaggctccgggagtagtactcggtgagttccttgttgaatttactcccgctaccgtacttttcgattctggagcatcccactctttcatagccactagctttgtggaaaaatatggcattccctctactcccctagagattcctttggtcacccgaaccccggggtccgacctcttatgccagctaaaatgttcccaagttagaatccttttaagtggggtagtattcctggcagacttaaccgtcttgccatccaaggtaattgatgtaatcctagggatggattggctaactaaacacaaaggcatcatcagttgcacagacaagacagtcctcctcaccgaccagcagggaaagtcagtctcttgccaggcacagccacccgctagtgacccaatgatgttcagtataacaacggaaaatatatcagtagtagaagaattcatggatgtgtttcccgaagaattgccaggaatgccaccagaaagagaagtggagttctacatagatctgattcctggaacagcacccatcgcaaagagaccataccgcatggctccaactgagttagcagaactgaagcttcaaatctcagatcttcagcaaaaagggtacattcgtcccagctcatcaccttggggagcaccagtcctgtttgtctccaagaaggatggaagtatgagaatgtgtattgattaccgatcgttaaatgaagttaccatcaagaacaagtacccacttccacggattgacgacctcttcgatcagcttcaaggagccaagtacttctccaagatagacctaaggtctggttaccaccaattgaggatcaaggaagcggacattcaaaagactgcatttgtcacccggtacgggcaatatgaattcacagtaatgccgttcggacttacaaacgcacccgcctttttcatgaacctcatgaataaagtgtttatggatgagctagataagtttgtcgtagtcttcatcgacgacatccttatttactccaagaaccgcgaagaccataagcgtcacctttggatcgtccttgggaaactcagagcacaccaactttatgccaaactcagtaaatgtgaattctggttggaaaagatagccttccttgggcatatcttaaccgcagaaggaatagaagtggacccttccaaagtagaagcagtgtcaaaatggaggcaaccaaccaacgttagtgaagttcgaagcttcctaggaatggcagggtattaccgccgcttcatcaaaggattctccagcatcgcaaggccaatgacagaacttctcaagaaagaccataaatttgtgtggactccaaaatgtgaagaaagtttccaaatcataaaagagaaactcacaacggcacccgttctatcactgccagatattcatcaagattttgtcgtcttctgtgatgcctcgaggcaaggcttagggtgtgtgctaatgcagaacgagaaagtcattgcttacgcatcacgcctactcaagccgcacgagcagaattaccccacccatgatctggaattggcagccatagtgcatgccttaaagatatggaggcattacctaatcggaaacaaatgccatattttcaccgatcacaagagtctgaggtacatattcactcaacctgatctcaacctccgtcagcgaagatggttagaactgatcaaggattatgacctcgaaattcactatcaccctgggaagtccaatgtggtagctgacgctctcagtcgaaaaccattcggaataaaagggaccaaccttctagaagactggaagggagaatcagcacaactaaatgcatgtctgggaaacaacgacagtctcgaagtcaagccaacgctagaagacctcatctgcaaagctcaacatctagacccagagacggcaaggcttgtggggaaagcccgcaaggaacaactcccggacctcaggacagatgaccaaggagtcctttggttcaaacaccgtctgtgtgtaccaaaaggggaggcccgagagaaagggaatgactccatctgggtaataatagatcgcctcaccaaggtagcccatttcattccagtaaaaactacctttggaggagccacccttgcccgaatttacctcaaggagatagtcagactccatggcatcccaaggaagatagtatcagacagaggaacccagttcacatccaaattctggacaagccttcagaaagctatgggcaccaagctagatttcagtaccgcttatcaccctcagacagatgggcagacagagagagtcaacaaagtccttgaagatctcttaagagcatgtgtgttagcttttgatagaagttgggagtccagtctaccctacgcagagttctcctacaacaatagctatcagtccagcatcaagatgtcaccattcgaagcactgtatggacgaaaatgccagacccctctcatgtggtccaacgtgggggaaaaagcactagaaggacctgcctttgtcaaggaggcagaggagaaagttgcactgatccgcagaaggttgcttgaagctcagagtcgacagaagagttacgcagacaacaggcggagggaactccgatttgaggaaggagacttcgtctaccttaaggtttctccaatgcgtggtgtcaggaggttccaagtcaaagggaagctagccccacgttttgtaggtccctatcccatcattggcaaggtaggacccgccgcataccgcctggaactaccagaatccatgtccgacatccacaatgtgttccacgtgtcccagctccgcaaatgcctgcaagcatcagaaagtcacctcgaagaagagacagtgcagattcagaaagaccttcaatatcgtgagaaaccagtgaagattcttgactcggcagtcagaaagacctgcacctcggaagtaaagctctgtaaagttcagtggggcagagaaggagaagaggaagccacctgggagagtgaggacttcttgaggagggaatatgagagcacctag

SEQ ID NO: 5177 - DNA, 2826 bp, Zea mays
  Clone ID: TF_ZM5108.C7.o8.fg
atgtcgcccgaaaagccctccgacagctatgtcagaactacaacaaacaacaagaatatccccacctggaggaaaagacttcaggccctatcaggaggagatcctattgagaatgatcccaccattgtctacatggctggataccttcatacccttgataaccaatatgatgacctcgccctccactgcacctccctaacctcccgggtggaaagcctggagcagaaagtcagggaactttcagaagaaaaagcgtccctccaagagagcctctcgttagctgaaggcgaagagaccaacacccgtgaagcttaccgcaccctcaaaatggactacgacaaggtactgaagaagctcgcccccgcaaggaaaatccgcaagaagaccagaagccaaggatgccagactgagcagcaggaagagaaccctcccagaaaccagtccgacaccgaggacatgtccctggccagccttgatgaccttctcaaggaatttggggacactttagagaaagagttcggggcgactctcttcccatggcagatggcttcggatagaaccacgcctaccgcctctgggattggagcaagacttcctctaggagctgagggagaggctggcggagaagggggtgagacccacctccccgcacctccagaactaccactagacctagcccaaattctggccaatcaaaccagactcattgaagtcctcactcgaagtctggagaaccagcgcccaggcggtgaaaggccccaggacaggatgggagaattcctgagactgaagccgcccacgttcgcggggtccagcaatcccctcgatgcagatgactggcttcgcacaatcaagaggaagttggaagccatcgcttgtcctgagaatcagcgtattcagctggcagctcatcatctttcaggaatggctttagcatggtgggacactttcagtgaagccatcagagacgccacatgggcagaatttgaagcagccttccgtgagcaccacgtaccccaggggatagttcaactcaaggaggatgagttccgagagctaactcaaggcgggaggacaatcagtgagtatgtgcacaagttcacagagctggcccgctacgctcccgaggatgtcagcaccgaggccagaaagatggctcgttttctgagagggttaagacccgagcttaagaccatcctcgccagccaggacttccacagcttctctcacctttccaacaaagctattcaagtggaaagagcaaaagaggaagaaaaagggcacatcaagagaaagttccaggtcctccgagcacaacagcaagaacgtcaccagagagctcgaccctttgggctcccacccagaggtccaagcttccataaacaatctggaccctctccatcgcgctacagtcagcagagtcagagctcccatcaggcaccctccgttgcaagcaaccagccgccagcaaacgcctgttggcactgcggggaccccagtcacttcaagaacaactgcccccagttgaaggcaccaggaccaacctactccaactcggtgaatggccccaagattccatcagcacctacccccaaggcgtttccttccagcagccagcagagcagggctcagtaccagggcagggcccgggtcaaccacgtcgacgctcaggaagcccagcaagccccgggagtagtgctcggtgagttcctcgttgaatttactcccgcttctgtgctttttgattcaggagcatcccattcatttatagccgctaagtttgtggaaaagcatggcataccctctacacctctagctatccctttggtcacccgaaccccgggatcagacctcctgtgcaaactcaggtgttcccaggtcagaattcttttaagtggggtagtgttcctggcagacttaaccatcttgccatcccaaggaattgatgtaatcctaggaatggattggctagctaagcacaagggtgttatcagctgcgcaagcaagactgttcttctcatagatcaccaaggaaaggcagtttcctgtcaagcccaaccgcccgcaaatgacccaatgatatttaatctggcagtagaaagcatgtctgtaatcaaggaatttgaagatgtatttccagaagagttgcccgggatgccaccagaaagagaaggcctccagcaagcaatgggcaccaagctagatttcagcactgcttatcacccccagtcagatggggaaagaacactagaaggacccgactttgttaaagaagccgaagaaaaagttgctttgatccgcagaaggttacttgaagctcagagtcgacagaagagttacgcagacaataggcaaagggaactcagatttgaggaaggagattttgtttatctcaaggtttccccaatgcgtggtgtcaaaaggttccagatgaaaggaaagctagcaccccgtttcgtcggtccttaccctgtcatttcccgaataggacccgtggcataccgtcttgagctaccagaatccatgtcagatattcacaatgtgttccatgtgtctcaactccgcaaatgcctagaagtaccagaaacccgtatcgaggcagaagcaattcagattcaaaaagatctccagtaccgggaaaagccagaaaagattctcgactcagcagtcagaaggacccgcaattcagaggtgaagctctgtaaggttcagtggagcagagatggagaagaggaagccacctgggaaagtgaggactctctgaggaaggaatacccttaccttttctcaagccccgtcagaatctcgagggcgagattcctttaa

SEQ ID NO: 5178 - DNA, 1656 bp, Zea mays
  Clone ID: TF_ZmC10872_15
atgatcaccggcgacaagcccgaagcttcgggaaggaagaacaatgaacggactatgtcaaaggaggtcggcgacaagcacaagggtgataagaagaaaaagaaaaggaagaaatcggcttcctccatcaagtcacaaaggaagggtgataagaagaaaaagaaaatgaagaaagtggtctactacgagaccgactcttcatcgccttccacatccagcgtcgagtctacaactttgaaacgccaagagcgtaagaagtataaagaggagccacaagcgatgtacaaccggctcaaagcaatggtcaaccaagtgcgcaacctcgggagtacaaaatgggatgaccatgaaatgatcaagatgtcccccgaggagattattagcaagtttgtgagctttgaacttatgatcaaaaactccaaacacattgtcaacttggatcaatgtgccacctctacacccgaggtgcaacccgttgcattcaaagtaatggaagagaagaaagaagagtctacaccaagtagacttccaattgacgtctccaagcttgacaacgaggagatggctcttatcattaagggctttcgacaaatcctcaaacaaaggaaggggaaggactacaagccatgttccaagagggtgtgttataggtgtggtaagtctggtcactatattgcaaaatgtccatatacaagtgacagtgacagggacgacgacaagaaagggaagaagaagatggagaataagagatattataagagaaagggtggagaggcgcatatggggcgggaatgggactctgatgagagctccaccaactcctcctccgacaaggacgctgccaacatcgccatcaacaagggtcttcttttccccaacgtcggccacaaatgcctaatggctaaggatggcaaaagaagaagcgggtgcacaaaccacatgaaagaggagaaaagaatgttctcctcatatgagaaaaatgaagatccccaaagagctatcacattcggggatggaaatcaaggtttggtcaaagattccttagattacaacttgctttcagtttctcaattatgcaaaatgggttacagctgtctctttactgatgttggtgttactgtctttagaaaaaataatgactcaatagcttttaagggagtgttagatggtcagctatacttagttgattttgatgataacaatgttgaactagacacttgcttaattgctaagactaacatgggttggctctggcatcgccgacttgcccatgttgggatgaagaatcttcacaaacttctaaagggagaacacattttaggactaacgaatgaaaaatctcaaacccaagataccttaaagagattcttgagatgggctcaaaatgagttcggattgaggatcaagaagattagaagcaacaatggaacggagttcaagaactctcaaattgaaggatttcttgaggatgaaggcatcaagcatgagttctcttctccctacacacctcaacaaaatggtgtagtgaagaggaagaatagaactctattggacatggcaaggaccatgcttgatgagtacaagacactggatcggttttgggcggaggcgattaacacagcttgctactccatcaaccgactctatcttcactga

SEQ ID NO: 5179 - DNA, 5151 bp, Zea mays
  Clone ID: TF_ZmC36592_123
tcagacggggctcgagaaaaggtaagggtattccttcctcagagagtcctcactttcccaggtggcttcctcttccccatctctgctccactgaaccttacagagcttcacttctgaattgcgggttcttctgactgctgagtcgagaatcttcactggcttttcccggtactggagatctttttgaatctgaattgtttctgcctcgatacgggtttctggtacttttagacatttgcggagttgagacacatggaacacactgtgaatatctgacatggatcctggtagctcaagacggtatgccacaggtcctattcgggaaatgacagggtaaggaccgacgaaacggggtgctagctttcctttcatctggaaccttctgcggatcaaagcaactttttcttcggcttctttaacaaagtcgggtccttctagtgttctttcccctacattggaccacattaggggagtctggcattttattccatatagtgcttcgaatggtgacattttgatgctggcctgatggctgttgttgtatgagaattcggcgtacggtaaactagactcccaatctctgtcgaaagccaatacgcaggctctgagtaaatcttcaaggaccttgttgactctttctgtttgaccatctaactgggggtgataagcagtgctgaaatctagcttggtgcccattgcttgctgaaggcccttccaaaattttgaagtgaactgcgttcctctatctgatactatctttcgtgggatgccatgtagcctgactatctctttaaggtataatcgggcaagggctgctcctccaaaagtggtctttactggaatgaaatgggccaccttggtgagacgatcgatgattacccatatggagtcatttcctctttgtgatctgggcagtccggtgacgaaatccatgcctatttcttcccacttccattcgggtattgggaggggttgaagcaggcctgcaggcttctgatgttcggcctttgttcgctggcaggtgtcacatcgggccacatactgtgctatttccctcttcatccctttccaccaatatctggtcttaaggtctaagtacatcttggtggtccctgggtggatagagtaagctgagttgtgggcttcatcgagcagggtttctcgtgtttctcccattggcacgcacaggcgatccttgaaccagagggctccttgattatctgtcctgaggtccggaagttgctcctttcgtgctctttctatcagcttggttgtttctgcgtccaggcgttgggccttgcatatgagatcttctagatttggcttgacttccaggctaccgttgtctcccagacatgcatttagctgagctgattctttcttccaatcttccaaaaagtttgctcctttaaccccgaagggttttctgctgagggcgtctgctaccacgttggcctttccggggtggtagtggatttcgaggtcataatctttgatcaattcgagccaccttctttgacggaggttgaggtccggttgcgtgaagatgtactttagactcttgtgatcagtgaagatgtggcatttgtttccaatcagataatgcctccaaatttttagggcgtgcactatggctgccaattccagatcgtgggtgggatagttctgctcgtgcggcttgagcaaacgggatgcataagcaatgactttctcattttgcattaagacacaccctaagccttgcttggaagcatcacaaaagatgacgaaatcctggtgtatgtctggtagggtcaggactggtgcagttgtaagtttctccttgatgatttggaaactttcttcacatttgggagtccatacaaacttattgtcctttttgagaagttccgtcatgggctttgctatgctggagaatcccttgataaagcggcgataatactctgccattcccagaaagcttcgaacttcactgacgttggatggttgcttccaatttgaaacagcttctaccttagatgggtccacttctatcccttcagcagtcaagatatgccctaggaaggctatcttctctaaccagaactcacacttgctgatcttagcataaagttgatgtgccctgagtcttccgaggacggttcgaaggtgctgctcatggtccttgcgactcttggaatagatgaggatgtcgtcgataaaaactacgacaaacttatccaattcttccataaataccttattcatgaggttcatgaaaaaggcgggtgcgttggttagtccaaatggcatcactgtgaattcatattgcccgtatctggtgacgaatgcagttttctgaatgtctgcttccttaatcctgagttggtgataccctgaccggaggtctatcttggagaagtacttggctccttgcagttggtcgaataggtcatcgatccggggaagagggtacttattcttgattgtaacctcgttcaaggatcgataatcaatacacatcctcatactcccatcctttttggtaacgaaaagaacgggtgctccccagggagacgaactgggacggatgtaccctttttgttgtagttccgaaatctgaagcttcaattctgccaactcagtgggggccatgcggtatggtctctttgcgatgggtgcggtgccgggaatgagatctatatagaactctacttctctttccggtggcatcccgggcaactcttctgggaatacatcttcaaactccttgattacagacatgctttctactgccagattaaatatcattggatcatttgcgggcggttgggcttgacaggaaactgcctttccttggtgatctatgagaagaacagtcttgcttgcgcagctgataacacccttgtgcctagctagccaatccattcctagaattacatcaattccttgggatggcaagatggttaagtctgccaggaacactaccccacttaaaagaattctgacttgggaacacctgagtttgcacaggaggtctgatcccggggttcgggtgaccaaggggatagctagaggtgtagagggtatgccatgcttttccacaaacttagcggctataaatgaatgggatgctcctgaatcaaaaagcacagaagcgggagtaaattcaactaggaactcaccgagcactactcccggggcttgctgggcttcctgagcgtcgacgtggttgacccgggccctgccctggtactgagccctgctctgctggctgctggaaggaaacgccttgggggtgggtgctgatggaaccttggggacattcaccgagttggagtaggttggtcctggtgccttcaactgggggcagttgttcttgaagtgattggggtccccgcagtgccaacaggcgtttgctagcggctggttgcttgcaacggagggtgcctgatgggagctctgactctgttgactgtagcgcgatggagagggtctagattgtttatggaagcttggacccctgggtgggagcccaaagggtcgagctctctggtgacgttcttgctgttgtgctcggaggacctggaactttctcttgatgtgccccttttcttcctcttttgctctttccacttgaatagctttgttggaaaggtgagagaagctgtgaaagtcctggctggcgaggatggtcttaagctcgggtcttaaccctctcagaaaacgagccatctttctggcctcggtgctgacatcctcgggcgcgtagcgggccaactctgtgaacttgtgcacatattcactgactgttcttccgccttgggttagctcccggaactcatcctccttgagttgaactatcccctggggtacgtggtgctcacggaaggctgcttcaaattctgcccatgtagcgtctctgatggcttcactgaaagtgtcccaccatgctaaagccattcctgaaagctgatgagctgccagctgaatacgttgattctcaggacaagcgatggcgtccaacttcctcttgattgtgcgaagccagtcatctgcatcgaggggattactggatcccgcgaacgtgggtggcttcagtctcaggaattctcccatcctgtcctgggcccttccaccgcctgggcgctggttctccagacttcgagtgaggacttcaatgagtctggtttgattggccagaatttgggctaggtctagtggtagttctggaggtgcggggaggtgggtctcacccccttctccgccagcctctccctcagctcctagaggaagtcttgctccaatcccggaggcggtaggcgtggttctatccgaagccatctgccatgggaagagagtcgccccgaactctttctctaaagtgtccccaaattccttaagaaggtcatcaaggctggccagggacatgtcctcggtgtcggactggttcctgggagggttttcttcctgccgctcagtctgacatccttggctcttggtcttcttacggattttccttgcgggggcgagcttcttcagtaccttgtcgtagtccgttttgagggtgcggtaggcttcacgggtgttggcctcttcgccttcagctaacgagaggctctcttggagggacgccttttcttctgaaagttccctgactttctgctccaggctttccacctgggaggttagggaggtgcagtggagggcgaggtcatcatattggttatcaagggtatgaaggtatccagccatgtagacaatggtgggatcattctcaataggatctcctcctgatagggcctgaagtcttttcctccaggtgggggtattcttgttgctgggtggaaagtagcgaaggggggtttcgatgattactttgttgtagttctggcatagctgtcggagggcttttcgggcgacattttggcaagcatctaggaaatggactccggtaaaagtgacttggaaggaacgttggttgggatagctttggctttcccccaggtagactgccatagagcatcttatcattccaccctcgaaatgttccgtccagacgtattccggcttcttgcggattcccatgcggagcgcacagcttcgcaagaggcgggggaacccttccacttctgagcagtaggatgacttaatggccagagagtcttccat

SEQ ID NO: 5180 - DNA, 4329 bp, Zea mays
  Clone ID: TF_ZM4158.C1.o1.fg
atggcttcggatagaaccacgcctaccgcctccgggattggagcaagacttcccctaggagctgagggagaggctggcggagaagggggtgagacccacctccccgcacctccagaactaccactagacctagcccaaattctggccaatcaaaccagactcattgaagtcctcactcgaagtctggagaaccagcgcccaggcggtggaaggccccaggacaggatgggagaattcctgagactgaagccgcccacgttcgcggggtccagcaatcccctcgatgcagatgactggcttcgcacgatcaagaggaagttggaagccatcgcttgccctgagaatcaacgtgtgcagctggcagctcatcagctttcaggaatggctttagcatggtgggacactttcagtgaagccatcagagacgctacatgggcagaatttgaagcagccttccgtgagcaccacgtaccccaggggatagttcaactcaaggaggatgagttccgggagctaacccaaggcggaagaacagtcagtgaatatgtgcacaagttcacagagttggcccgctacgcgcccgaggatgtcagcaccgaggccagaaagatggctcgtttcctgagggggttaagacccgagcttaagaccatcctcgccagccaagacttccacagcttctctcacctttccaacaaagctattcaagtggagagagcaaaagaggaagaaaaagggcacatcaagagaaagttccagtcagcagagtcagagctcccatcaggcaccctccgttgcaagcaaccagccgccagcaaatgcctgttggcactgcggggaccccaatcacttcaagaacaactgcccccagttgaaggcaccaggaccaacttacaccaactcggtgaatggccccaaggttccatccgcacccaccccaaggcgtttccttccagcagccagcagagcagggctcagtaccagggcagggcccgggtcaaccacgtcgacgctcaggaagcccagcaagccccgggagtagtgctcggtgagttcctcgttgaatttactcccgcttctgtgctttttgattcgggagcatcccattcatttatagccgctaagtttgtggaagagcatggcataccctctacacctctagctatccctttggtcacccgaaccccgggatcagacctcctatgcaagctcaggtgttcccaggtcagaattcttttaagtggggtagtgttcctggcagacttaaccatcttgccatcccaaggaattgatgtaattctaggaatggattggctagctaggcacaagggtgttatcagctgcgcaagcaagactgttcttctcatagatcaccaaggaaaggcagtttcctgtcaagcccaaccgcccgcaaatgatccaatgatatttaatctggcagtagaaagcatgtctgtaatcaaggagtttgaagatgtattcccagaagagttgcccgggatgccaccagaaagagaagtagagttctatatagatctcattcccggcaccgcacccatcgcaaagagaccataccgcatggcccccactgagttggcagaattgaagcttcagatttcagaactacaacaaaaagggtacatccgtcccagttcatctccctggggagcacccgttcttttcgttaccaaaaaggatgggagtatgaggatgtgtattgattatcggtccttgaacgaggttacaatcaagaataagtaccctcttccccggatcgatgacctattcgaccaactgcaaggagccaagtacttttccaagatagatctcaggtcaggatatcaccaactcaggataaaggaagcagacattcagaaaactgcattcgtcaccagatacgggcaatatgaattcacagtaatgccttttgggcttaccaacgcacccgcctttttcatgaacctcatgaataaggtatttatggaagaattggataagttcgtcgtggtttttatcgacgacatcctcatctattccaagagtcgcaaggaccatgagcagcaccttcgaaccgtcctcggaagactcagagcacatcaactttatgctaagctcagcaaatgtgagttctggttagaaaagatagccttcctagggcatatcttgactgctgaagggatagaagtggacccgtctaaggtagaagctgtttcaaactggaagcaaccatccaatgtcagtgaagttcgaagctttctgggaatggcagggtattatcgccgcttcatcaagggattctccagcatagcaaagcccatgacggaacttctcaaaaaggacaataagtttgtatggactcccaaatgtgaagaaagtttccaaatcatcaaggagaaacttacaactgcaccagtcctgaccctaccagacatacaccaggattttgtcatcttctgtgatgcttccaagcaaggcttaggatgtgtcttaatgcaaaatgagaaagtcattgcttatgcatcccgattactcaagccgcacgagcagaactatcctacccacgatctggaattggcagccatagtgcacgccctaaaaatttggaggcattatctgattgggaacaaatgccacatcttcactgatcacaagagcctaaagtacatcttcacgcaaccggacctcaacctccgtcagagaaggtggctcgaattgatcaaagattatgacctcgaaatccactaccaccccggaaaggccaacgtggtagcagacgccctcagcagaaaacccttcggggttaagggagcaaactttctggaagattggaagaaagaatcagctcagctaaatgcatgtctgggagacaacgatggcctggaagtcaagccaaatctagaagatctcatacgcaaggcccaacgcctggacgcagaaacaaccaagcttttggaaagagcacgaaaggagcaacttccggacctcaggacggataatcaaggagccctctggttcaaggatcgcctgtgcgtgccagtgggagaaacacgagaaaccctgctcgatgaagcccacaactcagcttactctatccacccagggaccaccaagatgtacttagaccttaagaccaggtattggtggaaagggatgaaaagggagatagcacagtatgtggcccgatgtgacacctgccagcgaacaaagaccgaacatcagaagcctgcaggcctgcttcaacccctcccaatacccgaatggaagtgggaagaaataggcatggatttcgtcaccggactgcccagatcgcaaagaggaaatgactccatatgggtaatcatcgaccgtctcaccaaggtggcccatttcattccagtaaagaccacttttggaggagcagccctcgcccgattataccttaaggagatagtcaggctacatggcattccacggaagatagtatcagatagaggaacgcagttcacttcaaaattttggaagggccttcagcaagcaatgggcaccaagctagatttcagcactgcttatcacccccagtcagatggtcaaacagaaagagtcaacaaggtccttgaagatttactcagagcctgcgtattggctttcgacagagattgggagtctagtttaccgtacgccgaattctcatacaacaacagccatcaggccagcatcaaaatgtcaccgttcgaagcactgtatggaagaaaatgccagactcccctaatgtggtccaatgtaggggaaagaacactagaaggacccgactttgttaaagaagccgaagaaaaagttgctttgatccgcagaaggttacttgaagctcagagtcgacagaagagttacgcagacaataggcgaagggaactcagatttgaggaaggagattttgtttatctcaaggtttccccaatgcgtggtgtcaagaggtttcagatgaaaggaaagctagcaccccgtttcgtcggtccttaccctatcatttcccgaataggacccgtggcataccgtcttgagctaccagaatccatgtcagatattcacaatgtgttccatgtgtcccaactccgcaaatgcctaaaagtaccagaaacccgtatcgaggcagaagcaattcagattcaaaaagatctccagtaccgggaaaagccagtgaagattctcgactcagcagtcagaagaacccgcaattcagaagtgaagctctgtaaggttcagcggagcagagatggagaagaggaagccacctgggaaagtgaggactctctgaggaaggaatacccttaccttttctcgaaccccgtctga

SEQ ID NO: 5181 - DNA, 3141 bp, Zea mays
  Clone ID: TF_ZM4163.C12.o4.fg
atggctcgttttctgagggggttaagacccgagcttaagaccatcctcgccagccaggactttcatagcttctctcacctttccaacaaagctattcaagtggaaagagcaaaagaggaagaaaaggggcacatcaagagaaagttccaggtcctccgagcacaacagcaagaacgtcaccagagagctcgaccctttgggctcccacccaggggcccaagcttccataaacaatctggaccctctccatcgcgctacagtcaacagagtcagagctcccatcaggcaccctccgttgcaagcaaccagccgccagcaaacgcctgttggcactgcggggaccccaatcacttcaaaaacaactgcccccagttgaaggcaccaggaccaacctactccaactcggtgaatggccccaaggttccatcagcacccacccccaaggcgtttccttccagcagccagcagagcagggctcagtaccagggcagggcccgggtcaaccacgtcgacgctcaggaagcccagcaagccccgggagtagtgctcggagcatcccattcatttatagccgctaagtttgtggaaaagcatggcataccctctacacctctagctatccccttggtcacccgaaccccgggatcagacctcctgtgcaaactcaggtgttcccaagtcagaattcttttaagtggggtagtgttcctggcagacttaaccatcttgccatcccaaggaattgatgtaattctaggaatggattggctagctaggcacaagggtgtcatcagctgcgcaagcaagactgttctcctcatagatcaccaaggaaaggcagtttcctgtcaagcccaaccgcccgcaaatgatccaatgatatttaatctggcagtagaaagcaggtctgtaatcaaggagtttgaagatgtattcccagaagagttgcccgggatgccaccggaaagagaagtagagttctatatagatctcattcccggcaccgcacccatcgcaaagagaccataccgcatggcccccactgagttggcagaattgaagcttcagatttcggaactacaacaaaaagggtacatccgtcccagttcgtctccctggggagcacccgttcttttcgttaccaaaaaggatgggagtatgaggatgtgtatcgattatcgatccttgaacgaggttacaatcaagaataagtaccctcttccccggatcgatgacctattcgaccaactgcaaggagccaagtacttctccaagatagatctcaggtcagggtatcaccaactcaggattaaggaagcagacattcagaaaactgcattcgtcaccagatacgggcaatatgaattcacagtgatgccttttggactaaccaacgcacccgcctttttcatgaacctcatgaataaggtatttatggaagaattggataagtttgtcgtggtttttatcgacgacatcctcatctattccaagagtcgcagggaccatgagcagcaccttcgaaccgtcctcggaagactcagagcccatcaactttatgctaaactcagcaagtgtgagttttggttagaaaagatagccttcctagggcatatcttgactgctgaagggatagaagtggacccatctaaggtagaagctgtttcaaattggaagcaaccatccaacgtcagtgaagttcgaagctttctggggatggcagggtattatcgccgctttatcaagggattctccagcatagcaaagcccatgacggaacttctcaaaaaagacaataagtttgtatggactcccaaatgtgaagaaagtttccaaatcatcaaggagaaacttacaactgcaccagtcctgaccctaccagacatacaccaggatttcgtcatcttttgtgatgcttccaagcaaggcttagggtgtgtcttaatgcaaaatgagaaagtcattgcttatgcatcccgtttgctcaagccgcacgagcagaactatcctacccacgatctggaattggcagccatagtacacgccctaaaaatttggaggcattatctgattgggaacaaatgccacatcttcactgatcacaagagtctaaagtacatcttcacgcaaccagacctcaacctccgtcaaaaaaggtggctcgaattgatcaaggattatgacctcgaaatccactaccaccccggaaaggccaacgtggtagcagacgccctcagcagaaaacccttcggggttaaaggagcaaactttttggaagattggaagaaagaatcagctcagctaaatgcatgtctgggagacaacggtagcctggaagtcaagccaaatctagaagatctcatatgcaaggcccaacgcctggacgcagaaacaaccaagctgatagaaagagcacgaaaggggcaacttccggacctcaggacagataatcaaggagccctctggttcaaggatcgcctgtgcgtgccaatgggagaaacacgagaaaccctgctcgatgaagcccacaactcagcttactctatccacccagggaccaccaagatgtacttagaccttaagaccagatattggtggaaagggatgaagagggaaatagcacagtatgtggcccaatgtgacacctgccagcgaacaaaggccgaacatcagaagcctgcaggcctgcttcaacccctcccaatacccgaatggaagtgggaagaaataggcatggatttcgtcaccggactgcccagatcacaaagaggaaatgactccatatgggtaatcatcgatcgtctcaccaaggtggcccatttcattccagtaaagaccacttttggaggagcagcccttgcccgattataccttaaagagatagtcaggctacatggcatcccacgaaagatagtatcagatagaggaacacagttcacttcaaaattttggaagggccttcagcaagcaatgggcaccaagctagatttcagcactgcttatcacccccagtcagatggtcaaacggaaagagtcaacaaggtccttgaagatttactcagagcctgcgttttggctttcgacagagattgggagtctagcttacctgttggagacttgttctcaaatgctatgaattaa

SEQ ID NO: 5182 - DNA, 771 bp, Zea mays
  Clone ID: TF_ZM4181.C3.o3.fg
atggcttgttacctagaggtcgttgatctaggtgtttggagagtcactcatgacgggatgaaaccacctaaaaatcctgagaagctcaccacgaataatgagcttgttagatacatgtattctcgtttaaatctaatcatcaatgagctcaattatattggaattaaaaagctaggtgatgcggacattatgggtcaagaggagcaaacttcttcaatgccatatgcttttgcatgtgatgaaaagaaagacaagaagaaggctgccactccaagctcctcaagtgaagaagaggaagaaaaagaacgtgatgatgatgatcaaccctcaacatcatccttgaaggacaaagaaacaatccaatgcgtcgggaaggtcgaggatcttctccttaacattaacaggaaaaagcaaaaaagatatgatgcttcgtatgcgaggagaagggccacttcaagaacaactgtccaaatatggtcgaacccacaaagaggaggagcaaaggggtacccagattatcaccctaaaacgtgcttaacactcaaggacgtcatcagggcacattccctgaggatgaaaggatcgggctccgcctcgcccgaggtccccctaaggggtcttccaaaaaactccgcctcgctcgagcccaatctcggagagggtgtgagctcaggaggatctttgcctcactcgaggccttctcactcaagggcagccatgttcacctcacccgagcccgtctcgggcgataaggacaagacctgcgaatag

SEQ ID NO: 5183 - DNA, 1236 bp, Zea mays
  Clone ID: TF_ZM5106.C1.o3.fg
atgtcgcccgaaaagccctccgacagctgtgccagaactacaacaaacaacaagaatacccccacctggaggaaaagacttcaggccctatcaggaggagatcctattgagaatgatcccaccattgtctacatggctggatatcttcatacccttgataaccaatatgatgacctcgccctccactgcacctccctaacctcccaggtggaaagcctggagcagaaagtcagggaactttcagaagaaaaagcgtccctccaagagagcctctcgttagctgaaggcgaagagaccaacacccgtgaagcctaccgcaccctcaaaatggactacgacaagatggcttcggatagaaccacgcctaccgcctctgggattggagcaagacttcctctaggagctgagggagaggctggcggagaagggggaatggctttagcatggtgggatactttcagtgaggccatcagagacgctacatgggcagaatttgaagcagccttccgtgagcaccacgtaccccaggggatagttcaactcaaggaggatgagttccgggagctaaaccaaggcggaagaacggtcagtgaatatgtgcacaagttcacagagttggcccgctacgcgcccgaggatgtcagcaccgaggccagaaagatggctcgttttctgagagggttaagacccgagcttaagaccatcctcgccagccaggactttcacagcttctctcacctttccaacaaagctattcaagtggaaagagcgaaagaggaagaaaaggggcacatcaagagaaagttccaggtcctccgagcacaacagcaagaacgtcaccagagagctcgaccctttgggctcccacccaggggcccaagcttccataaacaatctggaccctctccatcgcgcttcagtcaacaaagtcagagctcccatcaggcaccctccgttgcaagcaaccagccgccagcaaacgcctgttggcactgcggggaccccaatcacttcaaaaacaactgcccccagttgaaggcaccaggaccaacctactccaactcggtgaatggccccaaggttccatcagcacccacccccaaggcgtttccttccagcagccagcagagcagggctcagtaccagggcagggcccgggtcaaccacgtcgacgctcaggaagcccagcaagccccgggagtagtgctcggtgttcccaagtcagaattcttttaa

SEQ ID NO: 5184 - DNA, 4092 bp, Zea mays
  Clone ID: TF_ZmC951_452
cggacgcgtgggatggcatgtacttagggcgctagctctcctccgctagacacgtagcactctgctacaccccccattgtacacctggatcctctccttacgcctataaaaggaaggatcagggccctcttagagagggttggccgcgcggggacggggacgagacaggcgctcgcttgaagccgctcgctccctctcccgcgtggacgcttgtaaccccctactgcaagcgcacccgacctgggcgcgggacgaacacgaaggccgcgggatttccacctctctcacgcctgtctccgaccacctcacttccccccttcgcgctcggcctcgcgtcgacccatctgggctagggcacgcggcgacattcactcgtcggcttagggaccccccggtctcgaaacaccgacaccagtggacttgttaaagactctatatgcccttgtgtttgaatcataaccaagtaaaaagccttctacaaccttaggagcaaatttagattttctacctcttttaacaagaataaagcatttgctaccaaagacactaaaatatgaaacattgggctttttaccggttaggagttcatacgatgtcttcttaaggattcggtgtagatataaccggtttatggcgtggcaagcagtgttgaccgcctcggcccaaaaccgatccgaagtcttgtactcatcaagcatggtccttgccatgtccaatagagttctattcttcctctccactacaccattttgttgaggtgtgtagggagaagagaactcatgcttgatgccctcctcctcaagaaatcctttaatttgtgagttcttgaactccattccattgtcgcttctaatctttttgattctcaatccaaactcattttgagcccgtctcaagaatctctttaaggtctctagggtttgagatttttcctacaaaaagaatttggtgaaggtagagccggttgatggagtagcaagcagtgttgattgcttcctcccaaaaccggtctggtgtcttatactcatcaagcatggttcttgccatgtccagtagagttctattcttcctctccactacaccattttgttgaggtgtgtagggagaggagaactcatgcttgatgccctcctcctcaagaaagccttcaatttgtgagttcttgaactccgtccaattatcgcttctaatctttttgattctcaatccgaactcattttgagcccgtctcaagaatccctttagggtctcttgggtttgtgatttttgttgcaaaaagaatacccaagtgaagcgagaataatcatccacaattacaagacaatacttactcccgccgatgcttatgtaagcaatcgagccgaataaatccatgtggagtagctcaagtggcctgtcggtcgtcgtgatgttcttgtgtggatgatgggagccaactttctttcctgcttgacatgcgctacaaaccctgtctttctcaaattgaacatttgttagtcccaaaatgtgttctccttttagaagcttgtgaagattctgcatcccaacatgggctagtcggcgatgccagagccaacccatattagtcttagcaattaagcaagtatcgagttcagctctattaaaataaactaagtatagctgaccctctaatactcccttaaatgctactgaatcattacttcttctaaagaaagtaacaccttgatttccatccccgaatgtgatagttcttttgggatcttcgtttatctcgtaggaggagaacatctttttctcccctgtcatgtggtttgtgcatccgctatcaattatccaacttgagcccccggatgcgtaaaccttgggtacccaaacacaagtctttgaccccttgtgtttgcccccggcatatttggcaactactttgtctgatttgtttattaaaacataggaagcatcaaaagtcttaaatgaaatgttatgatcatttgatgcagtagaagatttctttttaggcattttaacatgggtagaatgactagagctagatgtctcattcttgtacataaaagcatgatgggaaacagaatgagacttcctagcatgaattctcctaatcttgtgctcaggataaccaacaggatataaaatgtatccctcgttatcctgagccatgggagccttgccctttacaaagttagacaatattttgggggcattaagtttgacatttcttccctgttggaaaccaatgccatccttaataccagggtgtctcccattatagagcatgcttctagcaaatttaaatttttcgttttcaattttatgctcattaattttactagttagttgtgctatatgatcattttgttgtttaattaaagctaggcgatcatgaatagcatcaacattaatgtctctacatctagtacaaatagtaacatgatcaacattagatgtagatggtttgcaagcatttaattcttctatcttagcatgtaatatggcattctcatttctaagacaggaaatagaatcattgcaaccatttaaatctttagtctcagttttaaggttctcaaccttagcaaataaattggcgttctcagttctaaggttggaaatagtgtcatggcaaatgctaagctccttagtcaaatttttatttttctctacttcctgagcataagcattctttaccttaacatgctttttattttccttaatgaggaattcctcttggctatccaagagttcatccttctcatgaatagcacctatcaattcattcaatttttctttctgttgcatgttaaggttggcaaaaagggcaagcaaattatcctcatcttcactagagctaccctcatcacttttccttttgccgtccttttccatgaggcacttgtggccgacgttggggaagagaagacctttgttgacggcgatgtttgtggcatcctcgtcggaggaggagtcggtggagctctcgtcggagtcccattccctacacacgtgggcatcgccgcccttcttcttgtagtacttcttcttttccttcctctttcccctcttgtcatcacccctgtcactatcactagacatcagacaatttgcaataaaatgactgggcttaccacacttgtagcacacccttttggagcggagcttgtagtccttccccttcctttgcttgaggatttgacgaaagctcttgatgatgagtgtcatctcctcattgtcgagcttggagacgtcgatgggaattctacttggcgtagattccttcttttcttcctccgctgccttgaatgtgacgggttgcacctcgggtgtggaggtgccgccttgctccaagttgacaatatgtttggagcctttgatcatcaactcaaagctcacaaactttcctattacttcttcgggagacattagcttgtatctaggatcaccacgtattagttgaacttgagtaggattatgaaatacgagtgatctaagaataaccttgaccatttcatggtcatcccatttggtgctcccgaggttgcgcacttggttgaccaaggtcatgagccggttgtacattgattgtggctcctcttcttggttgaggatgaatcgactgagctccccctcgatcgtctcccgtttggtgatcttggtcacctcatctccttcgtgcgtcgtcttgaggacatcccaaatttctttggctgtctttaacccttgcaccttattatactcctctcgacacaaggaggcgaggagtatagttgtggcttgggagttaaagtgccgaatttggtcggcctcatccgaatcgtagtccttgtcccttacctttggtactatacttcttacgctcatggcgcttagaagtgacggacgatgattcgaagccggaggtggagggtgacgaagagtcggtctcgtagtagaccactttttcatcttcttcttcttgtcacctctccgttgtgacttgatggaggaagcagattcctccttatgcttgtggtcagactccctcgaatgggttctccctgagcttgcggacttgtcgccgccggtcacgatctccctcttggcgtgatctcccgacat

SEQ ID NO: 5185 - DNA, 4641 bp, Zea mays
  Clone ID: TF_ZM5028.C2.o1.fg
atgtcgggagatcacgccaagagggagatcgtgaccggcggtgacaagtccgcaagctcggggaaaactcattcgagggagttcggccacaagcataaggaggaatccgcttcctccatcaagtcacaacggaggggtgagaagaagaagaaaatgaagaaggttgtctactacgagaccgattcttcgtcaccctctacatttgggtccgaattgtcgtccgtcacttctaaacgccatgagcgtaagaagtatatgcgcaacctcgggagcacaaaatgggatgaccatgaaatggtcaaggttattctaagatcactcatttttcataatcctacgcaagttcaattaatacatggtgatcctagatacaagctaatgtctcctgagaaagttatagtaaagtttgtgagctttgagttgatgatcaaaggctccaaacaaattgtcgagcaaggtggcacctccacacccgagatgcaacccgtcgtattcaaagcgacggaggagaagaaagaagagtctacatcaagtaggctccccatcgacgcctccaagcttgacaatgagaaaatggcgctcatcataaagagtttttgccaaatcctcaagcaaaggaaggggaaagactacaagccccgttccaaaaaggtgtgctacaagtgtggtaagtccgatcactttattgcaaaatgtcctatttctagtgatagtgacaggggcgccgacaagagagggaagaagaaggagaagaagagatactacaagaagaaaggcggcgatgcccatgtttgttgggaatgggactccgacatgagctccaccgactcctcctctgacgaggatgccgccaacatcgccgtcaacaagggacttctcttccccaacgtcggccacaagcgcctcatggaaaatgacgacaagaaaaagaagaaagaaaaattaaatgaattgataagtgctattcatgagaaggatgaacttttggatagccaagaggaattccttattaaggaaaataagaagcatgttaaggtaaagaatgcttatgctcaggaagtagagaaaaatgaaaacttgactaaggagcttagcattcgccatgacaccatttccaaccttagagatgagaacactagtttaattgctaaggttgagaaatcaaaagtttgccatgattcaattgacaatcttagaaatgaaaatgctagtttatttgctaagattgataaattgaatgaatcaattgctagccttaaaactgagaatgataagttaatttctaaggctaaagatttgaatgtttgtaatgtttctatttccaatcttagaaatgagaatgccatgttacatgctaagattgatgaattaaatgcttgcaaaccctctacatctaatgttaatcatgttactatttgtactagatgtagagacattaatgttgatgctattcatgatcacctagctttaattaaacaacaaaatgatcacatagctcaactaactgctaaaatcaatgagcatgaaatagaaaatgaaaattttaaatttgctagaagcatgctttataatgggagacgccctgacattaaggatggcattggctttcaacagggagacaatgtcaagcttaatgcccccaagaaattgtctaattttgttaagggtaaggctcccatggctcaggataacgagggttacattttatatcctgctggttatcctgagcacaagattaggagaattcatgctaggaagtctcattctgttttccatcatgtttttatgtacaagaatgaggcatctagctctaggcattctacccatgctaaaatgcctaaaaagaaaactcctattgcatcaaatgatcctaatgtttcatttaagacttttgatgcatcatatgttttaactaacaaatcaggcaaagtagttgccaaatatgttgggggcaaacacaagggctccaagacttgtgtttgggtacccaaggtttatgcatccgggggctcgagttggattattgatagtggatgcacaaaccacatgacaggggagaaaaagatgttctcctcctacgagaaaaacgaagatccccaaagagctatcacattcggggatggaaatcaagattctttagattacaatttgctttttgtatctcaattatgcaaaatgggttacaactatctttttacggatataggtgttactgtctttagaagaagtgatgattcattagcttttaagggagtattagagggtcagctatacttagttaattttaatagagctaaactcgatacttgcttaattgctaagactaatatgggttggctctggcatcgccgactagcccatgttgggatgaataatcttcacaagcttctaaagggagaacacattttgggactaaccaatgttcatttcgaaaaagacagggaaaaatctcaaacccaagagactttaaagggattcttgagacgggctcaaaatgagttcgaattgaggatcaagaaaataagaagcgataatgggacagagttcaagaactcacaaactgaaggctttcttgaggaagagggcatcaagcatgagttctcttctccctacacacctcaacaaaatggtgtagtggagaggaagaatagaactctactggacatggcgaggaccatgcttgatgagtacaagactccggaccggttttgggctgaggcgattaacaccgcttgctactccatcaaccggctctaccttcaccgaatcctcaagaaaacatcgtatgaactcctcactggtaaaaagcccaatgtttcatattttagagtctttggtagcaaatgctttattcttgttaaaagaggtagaaaatctaaatttgctcctaaggttgtagaaggctttttactaggatatgactcaaacacaagggcatatagagtcttcaacaaatccactggattagttgaagtttcttatgacattgtatttgatgagaataatggctctcaagtagagcaagttgatcttgatgaattagatgatgaagaagctccatgcgtcgtgctaaggaacatgtccattggggatgtgtgtcctaaggaatccgaagagcccacacaagcacaagatcaaccatcatcttccatgcaagcatctccaccaactcaagatgaggatcaagctcaagatgatgaaaatgaagatcaagaggatgagccacctcaagaggaggacaatgatcaagggggagatgaagctaataaagacaaagaagatgatcaggaacaaagaccgccacacccaagagtccaccaagcaatacaacgagatcaccccgtgaactccatcctcggcgatattcataagggggtaaccactcgatctcaagtcactcatttttgtcaacattactcttttgttttctctattgagccatacaaggtagaggatgcactaagagattcggattgggtgctggcaatgcaagaggagctcaataacttcacgaggaatgaggtatggcacttagttccacgtcctaaccaaaatgttgtaggaaccaagtgggtattccgcaataagcaagatgagcatggtgtgatgacaaggaacaaagcccgacttgtggccaagggttattcacacgtcgaaggtttggatttcggtgaaacctatgcacccgtagctaggcttgaatcaattcgtatattatttgcctatgctacttaccatggcttcaagctttatcaaatggacgtgaaaagtgccttcctcaatggaccaatcaaggaaggggatttcaagtcaagcaactccaagagggcaccttcatcaaccaaactaaatacatttcaagacatacttacaaagtttggaatgaaggatgccaagcccatcaagacacccatgggaactaatgggcatctcgacctcgacacgggaggtaaatccgtagatcaaaaggtataccggtcgatgataggatctttactctatttatgtgcatctcgaccgtatattatgctttctgtatgcatgtgtgcaaggttccaagccgatcctaaggaagttcactttaaggccgtaaaaagaatcatgagatatttagtttatacacctaagtttggtctttggtaccccgagggatccacctttgatttaataggatattcagatgctgattgggcagggtgtaaaattgataggaagagcacatcaaggacttgtcagtttctaggaagatccctggtgtcttgggcttcaaagaaacaaaactcagtagctctttctaccgccaaagccaagtatattgtcgcaggccattgttgtgcacaattactttggatgaggcaaaccctcagggactacagctacaaattgagcaacgtccctctcctatgtgataatgagagtgcaattcacatggcggataatcctgttgaacacagtcgcactaagcacatagacattcggtatcactttttgagggatcgccaacaaaggggggatatcgagatcgcttatgttagcaccaaagaacaattagctgatatctttaccaaaccactagatgagaaaacctttaccaaacttaggaatgagctaaacattcttgattctcagaattttgattga

SEQ ID NO: 5186 - DNA, 1722 bp, Zea mays
  Clone ID: TF_ZmC119_782
ttagacaagtatattagtacacaaaaccaatgtactaagacttagaaacatacctttgatcttgatttgcactttgttcatccattgcataaattcacattttaagcacttgagttggcactcaatcaccaaaatacttagaaatggcccaagggcacatttccctttcaataggacaggggcggcccaaggcgaggtgcttggctggatgtaacctttctctgacagctcatcaatctgcttcttaagttcaaccaactctggcccagatattctgtaagctctcttaaagatgggggcggttccagaaagaagctctatggcaaattcaactttccgctctgggggcatacccggtaagtccttgggaaacacatctggaaactcagacacaatcttgatcctctcaattgggtctgcttcacggctatcgacaaccatctgataacaacttgctttctttggctcaggcgggactaattcggtcaccacttcctctcctagtggggacaccaacttgattgtccttgtatcacaactgatgactgcctggtacttatctagccaattcatccctaggatgacatctattccctgagtacccattactatgaggttggcgggaaacgctactatcatgtcgggggtctcctgaactgcttcagcctccaagtggttcagtcttccatgattataacgcggctgagagcggttgcctgctccaggctgagacacgttctgcttcgctggggcattggggcctaactgctgctgggttgccttcttcggacattgcatcacccaatggccttgctctccacagtggaaacatgctctgtttccaacttgagctggtgctgcctgattgttctgctggtttgctcctcctgactgattgttctggcgattctgatactggtgatgaggatactgcctttggaactgctgatgttgctgaggtggacgttggttctgcctgaactgctgaggttgattgcctgagaaacgaggacggttgctgcttccaggctggggtccactgatcttgcgcttacgatcctccatctccttacgcttcctctttgtcatgattgctctgtcaatcaagtgctggaacgtcggaaaggtatgattcatcatctgatagtgcagagggtcaaccaagcctttcaggaaacggtattgtctcttggcgtcgatgttgacatcttcaggagcatagcgagacaattgcagaaacctgtctcgatactcactgactgacatcgacccttgcttaagggccaggaactcctccttcttcactgtcatcagacctgcaggaacatggtactgacgaaagctacctctgaactcttcccaggtgatggcgtcggggttggcatgggtggcgagataagactcccaccatgactgagctgctcctctcaacagacggggaccatacaagactttctccctgtcgtcacacggagcggtatgcaactcccgctccacagtgtgcagccagtcttcagcatccatggggtcagaagaatgagcgaacgttgggggatgacctctcatgaattcagcacacttgtctctgggcatctgaggcatctgaggctgaggtggtgcctgctgctgttgttgttgttgctgctgctgaatggcggctagagtctgaccgatggcttgaactgcctgagtctgcatcagaaacatctgctcgatggacat

SEQ ID NO: 5187 - DNA, 5764 bp, Zea mays
  Clone ID: TF_ZmC12418_1
atggtagtaatttggggtaatatatttccactattgcaggaactccttacaccaagaaatcatacaaggggcccaccaccaacgagcacgccgctttcctcccgagtggacagagcggaagccgatggacgagacccaggatacgctccggacctctgccttccccagctcacacgtcagagagacatgggccaagagcctctacatcgattcgatatgcgacgggcggaccgtgctctgatggcgcgcacgtgggaaatggaagtcgaagcgcctcgcatcaagagccgcgagatggcgcgtcaagtcgaaaccagtactaataataggatcagtttacctttgaagctaccgttgggtttcccccccccgcacacccccctcgtcctcccgctcgcgcgcgccccgccctcgccccccgcgctcgcgcggcgcacgaggcgacgaccccgacctcctcctccgcgcccgtccctgccaccggtcgccgatattggaaggagctgggaaggctggggcgctgacctgaattttaaggagagaggatgccagagctgcgaaaattaccaagcatacccatggtcgaagaagcttgaggatctgcagccaggagaggcgcctgcgaaaccggtgtcaccttctccagcgggggcaagagatcgtcacaaatatgaaatttgatgaagagccaaattatgccatgcttatctctattttcgctgggttgattgaagcacctgcatcgagacaattcagaattgatggggcactcaaggttggacagaaacgtggaagattggttgcaaatctagaagaagatgaacaacctaaaaagaaggttatatctagggagcagagcggcccaatggattagagtttagaaaccctagggtactcggccgctccccgttaacctggcaaaggcaaaagtcggaggaatgcctactgagcttaggattgctacggtcgatccgtgtgcaggatcaacgaagtgtgaggtggccccaatgactgagtgccgggccttgggtcaggagcttggaaccgttcgaggctccttcaatttccataaggcgtaatgaggaaaaagttactaaatgagaacaaacggtatgagatccaactgtgaccctatagcaaggtttgacctaaagaacaccttgaatccttgaaatctcacaaggtgagcgagtcgtttccttacaagtggatcaataagaagtggaaagaagggttccatgtgacatccatggccaccgctgggaatcgctggggcgtagtcatgtcaaggaattcagggttctctactcaggttgtagagttggatttcctgtaccccagcgagggcatccaccggcgctgggagagcggctacaggataacttccacggcagccaccaacgaccaagccgctttcatcctgagcatgccgaaacggaagccgatggacgagacacaggaaacgctgcggacctccgccttccccagctcacacgtcaaggagaaatgggccaagaacctctacatcgcttcgatttgcttcgggcggaccgtgtgctgatcgcgcgcgcctgggaaatggaagtcgaagcgagggccaccgatccggtacggtggcgcctcgcatcaagagatgcgagatggggcgtcaagtcgaaaccagttctaatgataggatcagtgtatctctgaagatacggtatgggttaccctaccgtatttgtaaagtaatgatgccggccgaacgacctttcctaacgcgtttgggcagaaattcgttgctgtcgccatattttgacgggagtttctcccgtgttgtcggtacatcttcaacggcgcgacatacatctacgaggcgcacgtccggcgctacttcaagatcggcagctacgtgagccccagctacagcgagcaccaccgtcgggtgctgcagatgacgagcttcaacgcgtgcagtgcagacatgatgtcagagaacaggcgcagaggaggaaggcgtgctcagcaggagcgagccgctcagcaggaggaggtgccccagcaacagcacctgccgcccccacccccgatgtcgatcgagcagatgtttctgatgcagactcaggcagttcaagccatcggtcagactctggccgccattcagcagcagcagcaacaacagcagcaagcaacacctcagcctcagatgcctcagatgcccagagacaagcgtgctgaattcatgagaggtcatccaccaacgtttgctcattcttccgaccccatggatgctgaagactggctgcgcactgtggagcgggagttgcacaccgctcagtgcgatgatagagagaaagtcttgtatggtccccgtctgttgagaggagcagctcggtcatggtgggagtcttacctcgccacccatgcccatcccgacgccatcacttgggaagagttcagaggtagctttcgtcagtatcatgttcctgcaggtctgatgacagtgaagaaggatgagttcctggccctcaagcaagggtcatcatctatcagtgagtaccgggacaggtttctgcagttgtctcgctatgctcctgaagatgtcaacaccgacgccaagcgacaataccgtttcctgagaggcttggttgaccctcttcagtaccaactgatgaatcataccttcccgacattccaacacctgattgacagagcaatcatgacagagaggaagcgtaaggagatggaggatccagcccagcagaacagccaggcagcaccagctcaggttggaaacagagcatgtttccactgtggagagcaaggccattgggtgatgcaatgtccgaagaaggcagcccagcagcagtcaggccccaatgccccagcaaagcagaacgtgtctcagcctggagcaggcaaccgccctcagccgcgctacaatcatagaagactgaaccacttggaggctgaagcagttcaggagacccccagcatgatagtaggtatgttcccagtcgactcccatattgcagaagtgttatttgatactggagcaacacattctttcattactgcatcatgggtagaagcacataatcttccaattactaccatgtcaacccccattcaaattgactcagccggtggtagaattcgagccgatagcatttgtttgaatgtgagtgtggaaataagggggatagcgtttcccgccaacctcatagtaatgggtactcagggaatagatgtcatcctagggatgaattggctagataagtttcaggcagttatcagttgtgataaaaggaccatcaagttggtgtccccactaggagaggaagtggtgaccgagttagtcccgcctgagccaaagaaaggaagttgttatcagatagctattgatagcagtgaggcagacccgatcgagagtatcaaggttgtgtccgagttcccagatgtgtttccaaaggacttaccgggtatgccaccagagcggaaagttgagtttgccatagcgcttcttcctggaacctcccctatctttaagagagcttacagaatatctggaccagagttggttgaacttaaggagcagatttatgagctgtcagagaaaggttacatccggccaagcacctcgccttgggccgctcctgtcttgtttgtggaaaagaaagatggcaccaaaaggatgtgtatcgattatcgagctctgaatgaagtcacgatcaagaacaagtaccctttgcccagaatagaagatttgttcgaccagttgagaggagctagtgtgttctccaagattgatctgaggtcagcctttttcatgaatctgatgaatagtgtattcatggactatctcgataagtttgtggtggtattcattaatgacattctgatttattctcaaagcgaaaaagagcatgcaagtcatttgaggatggtattgcagagattgcgagagcaccaattgtatgcaaagttaagcaagtgtgaattctggatcaatgaagttctatttttgggtcacataatcaacaaagagggattggctgtggatctgaagaaagtggcagacattctgaactggaaagcgccaacagatgcccgaggaatcaagagtttcattggaatggctggatattatcggcgattcattgaagggttttcgaagattgcgaaaccaatgacagtgttgctaggcaacaaggttgagctcaagtggacccagaaatgtcaagaggcctttgaagcgctgaaagggaagttgacaacagcgcctgtcctagtcttgcctgatgtgcacaagcccttcttggtgtattgtgatgcttgttacacaggtttgggatgtgtgttgatgcaagagggaagagttgtggcttactcgtcccgacagttgaaggttcatgagaagaactacccaatccatgatctagagttggcagcagtggttcacgcactgaagacatggaggcactacttgtgtggacagaaatgcgatgtttacacagaccacaagagtctaaagtacatattcacccagtcagagttgaatatgaggcagcgaaggtggttagagttgatcaaagactatgagttggagatccattaccatccaggcaaagcaaacgtagtggcagatgctttgagcaggaagagtcaagtcaatctgatggtcgctcggccgatgccttacgagttggccaaggagtttgacaggttgagtctcggatttctgaacaattcgcgaggagtcacagttgaattggaacctaccttggagcgcgaaatcaaagaagcgcagaagaatgatgagaagatcagtgagatccggcgactgattctagaaggcaaaggcaaagattttcgagaagatgcaaaaggtgtgatatggttcaaagactgcttgtgtgttcctaatgtccagtctattcgtgagttgattcttaaggaagctcatgagacagcctatttcgattcaccctggcattcagcttatcatccgcagacagatggtcagaccggaagaaccaatcaaattcttgaagacatgttgagagcctgtgcgttgcaagatcagtccggatgggacaagagattgccttatgcagagttttcctataacaacagttatcaggacagtttgaagatgtcaccatttcaggcactctatggaaggagttgtagaactcctttgcaatgggatcagcctggagaaaagcaagtgtttgggccagacattttgcttgaagccgaagagaacatcaggatggttcgagagaatctgaagatatcgcaatcgaggcagcgaagctatgcagacacaagaagaagagagctgagtttcgaagtcggagactttgtctatctgaaagtgtcaccgatcagaggagtcagaaggttcggagtcaaaggcaagctagcaccccgctacattggtccgtaccaaattctctcaaggcgtggagaagtggcctatcagctcagtctgccagagaatttgtccgctgtgcatgatgtctttcatgtgtctcagttgaagaagtgcttgcgtgtgccagaagagcagttgccagtggaaggtcttgaagtccagaaggacttgacctacgttgagaagccagtgcagatccttgaggttgcagacagagtcactcgaaggaagaccatcagaatgtgcaaagtcaaatggaatcaccactctgaggaagaagcaacctgggagcgtgaagatgatctattggctaaatacccagagctctttgctagccaaccctga

SEQ ID NO: 5188 - DNA, 1135 bp, Zea mays
  Clone ID: TF_ZmC3792_100
ttagaaaggaagcgtaaggagatggaggatcgtaagcgcaagatcagtggaccccagcctggaagcagcagccgtcctcgtttttcaagcaatcaaccccagcagttcaggcagaaccagcgtccacctcagcagcatcagcagcgtcagcagtatcagcagtttcaaaggcagtatcctcagcatcagtaccagaatcgtcagagcaatcagtcaggaggaggtcagtttcagaagcagaatcagcaagcaccccatcttcctgccccagcaaatcagcagaacagtcaggcagcaccagctcaggttggaaacagagcatgtttccactgtggagagcaaggccactgggtgatgcaatgtccgaagaaggcagcccagcatcagtcaggccccaatgccccagcaaagcagaatgtgtctcatggcgacgacagctcgagccacgacaccgacttctctgctaaccctgagccggaaggatgggttgctcgacccatcactcgcgacgctgctacaggggaccgggaaagggggataccccgaaagggatccttctccgcgaaggaaccgggctccgagccccccattactgatcaggggttcgaaggctggccccccgagggttcaacagtcgcctcagatcgcgtgggcccgacacccactactggtcaggggttcgaaggccagccccccgaagggctccatggccgcctcaggctactcgggctccgcgcccattactgatcaggggttcgaaggctggcccccgaagggttcacagtcgcctcagacaccgagcgagggatgaccaggggtacgttagataaataaccaaggctcgggctgcgctcccaaggtaccttaggacatttcccagaccaacgggaccgatcttgtaacagaataccatcggaggaaggcatcgagccctcggacccagtcgctaggggactgggtccggcaaatcaatcgcaggtacttttgggcgtgccgctgggcccctatccgacccccaacgaacggggcagggacgtccactcggattaaccgcttgcagctcaccggagacaccagttcggtgcccacaagggtaacatggcgcactcccccctcctgcctggggaaagacgac

SEQ ID NO: 5189 - DNA, 4470 bp, Zea mays
  Clone ID: TF_ZmC3792_18
atgtcgatcgagcagatgtttctgatgcagactcaggcagttcaggccatcggtcagactttggccgccattcagcagcagcagcagcaacagcagcaagcaccaccccagcctcagatgcctcagatgcccagagacaagcgtgctgaattcatgagaggtcatccaccaacgttcgctcattcttctgaccctatggatgctgaagattggctgcgcactgtggagcgggagttgcataccgctcagtgcgatgacagggagaaagttctgtatggtccccgtctgttgagaggagcagcccagtcatggtgggagtcttacctcgccacccatgcccaccctgacgccatcacctgggaagaattcagaggtagctttcgtcagtaccatgttcctgcaggtctgatgacagtgaagaaggaggagttcctggctctcaagcaagggccattgtctgtcagtgagtaccgggacaagtttctgcagttgtctcgctatgctcctgaagatgtcaacactgacgccaaacgacagtaccgttttctgagaggcttggttgaccctttgcagtaccaactgatgaatcacaccttcccgacattccaacacctgattgacagagcaatcatgacagaaaggaagcgtaaggagatggaagatcgtaaacgcaagatcagtggaccccagcctggaagcagcaaccgtcctcgtttctcaagcaatcaaccccagcagttcaggcagaaccagcgtccacctcagcagcgtcagcagcatcagcagtttcaaaggcagtaccctcagaaccagtatcagaaccgtcagagcaaccagtcaggaggtcagtttcaaaggcagaatcagcaggtacctcgtcttcctgccccagcaaatcagcagaacaatcaggtagcaccagctcaggttggaaacagagcatgtttccactgtggagagcaaggccactgggtgatgcaatgtccgaagaaggcagcccagcagcagtcaggccccaatgccccagcgaagcagaatgtgcctcagcctggagcaggcaatcgctcccagccgcgctataatcatggaaggctgaaccacttggaggctgaagcagttcaggagacccccggcatgatagtaggtatgttcccagttgattcccatattgcagaagtgttatttgatactggagcaacacattctttcattactgcatcatgggtagaagcacataatcttccaactactaccatgtcaacccccattcaaattgactcagccggtggtagaattcgagccgatagcatttgtttgaatataagtgtgaaaataagggggatagcatttcccgccaaccttatagtaatgggtactcagggaatagatgtcatcctagggatgaattggctagataagtatcaggcagttatcagttgtgataaaaggacaatcaagttggtgtccccactaggaaaggaagtggtgaccgagttagtcccacctgagccgaagaaaggaagttgttatcagatggctgtcgatagcagtgaagcagatccaattgagagtatcaaggttgtgtctgaattcccagatgtgtttccaaaggatttaccgggtatgccaccagagcggaaagttgagtttgccatagagcttcttcctggaaccgcccccatctttaagagagcctacagaatatctggaccagagttggatgaacttaagaagcaaattgatgagctgtcagagaaaggttacatccggccaagcacctcgccttgggccgcccctgtcctatttgtggagaagaaagatggcaccaagaggatgtgtatcgattatcgggctttgaatgaggtcacgatcaagaacaagtatcccttgcccagaatagaagatctgttcgaccagttgagaggagccagtgtgttctccaagattgatctgaggtcaggttatcatcagctcagaatccgaccttcggatattccgaagacggcattcatttccaagtatggtttgtatgagttcacagtgatgtcttttggtttgaccaatgcgccagcattcttcatgaacttgatgaacagtgtattcatggattaccttgataagtttgtggtggtattcattgatgacattctgatttattctcaaagcgaagaagagcacgcagatcatttgaggatggtgttgcagagattgcgagagcaccagttgtatgcaaagttgagcaagtgtgagttctggatcagtgaagtcctgttcttgggtcacataatcaacaaagaaggattggctgtggatccgaagaaagtggcagacattttgaactggaaagcgccaacagatgctagaggaatcaagagcttcattggaatggccggatattatcggcgattcattgaagggttttcgaagattgcgaaaccaatgacagcgttgctaggcaacaaagttgagttcaagtggacccagaaatgccaagaggcctttgaagcgctgaaagagaagttgactacagcgcctgtcctagtcttgcctgatgtgcacaagcccttctcggtgtattgcgatgcttgttacacaggtttgggatgtgtgttgatgcaagagggaagagttgtggcttactcgtcccgacagttgaaggttcatgagaagaattacccaatccatgatctagagttggcagcagtggttcacgcactgaagacatggaggcactatttgtatgggcagaaatgcgatgtttacacagatcacaagagtctgaagtacatattcactcagtcagagttgaacatgaggcaacaaagatggttagagttgatcaaagactatgagttggagattcattaccatccaggcaaagcaaacgtagtggcagacgctttgagcagaaagagtcaagtcaatctgatggtcgctcgtccgatgccttatgagttggccaaagagtttgacaggttgagtctcggatttctgaacaattcgcgaggagtcacagttgagttggaacctaccttggagcgcgaaatcaaagaagcgcagaagaatgatgagaaaatcagtgagatccggcgactgattctagatggcaaaggcaaagattttcgagaagatgcagaaggcgtgatatggttcaaagaccgcttgtgtgttcccaatgtccagtccattcgggagttgattctcaaggaagctcatgagacagcctattcgattcaccctggcagtgagaagatgtatcaggatctgaagaagaaattctggtggtacggaatgaagagggaaatcgcagagcatgtggctatgtgcgatagttgccgaagaattaaggcagaacaccagagacctgctggattgttgcaaccgttgcagatccctcagtggaaatgggatgaaattggtatggatttcatagtcggattgcctcgcactcgagccggctacgattccatctgggtagtagtggaccgtttgaccaagtcagcccacttcatacctgtcaagaccagctacaacagtgcagtattggcagagttgtatatgtctcgaatcgtttgtcttcatggtgtgccaaagaagatagtgtcagacagaggaacacagttcacctctcatttctggcagcagttgcatgaagccttgggcacacatctgaatttcagttcagcttatcatccgcagacagatggccagaccgaaagaaccaaccaaattcttgaagatatgttgagagcatgtgcgttgcaagatcagtccggatgggataagagattgccttatgcagagttttcctataacaacagttaccaggccagtttgaagatgtcaccatttcaggcgctctatggaaggagttgtagaactccgttgcaatgggatcagcctggagaaaagcaagtgtttgggccagacattttgcttgaagccgaagagaacatcaagatggttcgagagaatctgaagatagcgcaatcgaggcagcgaagctatgcagacacaagaagaagagagctgagtttcgaagtcggagactttgtctatctgaaagtgtcaccgatcagaggagtcagaagattcggagtgaaaggcaagctagcaccccgttacattggtccgtatcagattcttgcaagacgtggagaagtggcctatcagctcagtttgcccgagaatttgtctgctgtgcataatgtctttcatgtgtctcagttgaagaagtgcttgcgtgtgccggaagagcagttgccagtggaaggtctggaagtccaggaggacttgacctatgttgagaagccagctcagatccttgcgattgcagacagagtcacccgaaggaagaccatcagaatgtgcaaagtcagatggagtcaccactctgaggaagaagcaacctgggagcgtgaagatgatctagtggccaagtacccagagctctttgctagccagccctga

SEQ ID NO: 5190 - DNA, 4584 bp, Zea mays
  Clone ID: TF_ZmC3792_19
atgtcagagaacaggcgtagaggaggaaggcgtgctcaacaggagcgagccgctccgcaggatgaggtgccccagcagcagcacctgccgcccccgcccccgatgtcgattgagcagatgtttctgatgcagactcaggcagttcaagccatcggtcagactttggccgccattcagcagcagcagcagcagcaacagcagcaagcaccaccccagcctcagatgcctcagatgcctagagataagcgtgctgaattcatgagaggtcatccaccaacgttcgctcactcttctgaccccatggatgctgaagattggctgcgcactgtggagcgggagttgcataccgctcagtgcgatgacagggagaaagttctgtatggtccccgtctgttgagaggagcagcccagtcatggtgggattcttacctcgccacccatgccaaccccgacaccatcacctgggaagaattcaggggtagctttcgtcagtaccacgtgcctgcaggtctgatgacagtgaagaaggaggagttcctggcccttaagcaagggtcatcgtctgtcagtgagtatcgagacaggtttctgcaattgtctcgctacgctcccgaagatgtcaacaccgatgccaagcgacagtaccgtttcctgagaggcttggttgaccctctgcagtatcagctgatgaaccacaccttcccgacattccagcacctgattgacagagcaatcatgacagaaaggaagcgcaaggagatggaagatcgtaagcgcaagatcagtggaccccagcctggaagcagcagccgtccccgtttctcaggcaatcaacctcagcagttcaggcagaaccagcgtccacctcagcagcatcagcagcgtcagcagtatcagcagtttcaaaggcagtaccctcagaatcagtaccagaaccgtcagagcaatcagtcaggaggtcagtttcagaagcagaatcagcaagcacctcgtcttcctgccccaacaaatcagcagagcagtcaggcagcaccagctcaggttggaaacagggcatgtttccactgtggagagcaaggccattgggtgatgcaatgtccgaagaaggcagcccagcagcagtcaggccccaatgccccagcaaagcagaatgtgtctcagcctggagcaggcaatcgctctcagcagcgctataatcatggaagactgaaccacttggaagctgaagcagttcaggagacccccgacatgacagtaggtatgttcccagtcgattcccatattgcagaagtgttatttgatactggagcaacgcattctttcattactgcatcatgggtagaagcacataatcttccaactactaccatgtcaacccccattcaaattgactcagccggtggtagaattcgagctgatagcatttgtttaaatgtaagtgtggaaataagggggatagcgtttcccgccaaccttatagtaatgggtactcagggaatagatgtcatcctagggatgaattggttagataagtatcaggcagttatcagttgtgataaaaggacaatcaagttggtgtccccactaggagaggaagtggtgaccgagttagtcccgcctgagccgaagaaaggaagttgttatcagatggctgtggatagcagtggagcagacccaattgagagtatcaaggttgtgtctgaattcccagatgtgtttccaaaggatttaccgggtatgccaccagagcggaaagttgaatttgctatagagcttcttcctggaaccgcccctatcttcaagagagcttacagaatatctggaccagagttggatgaacttaagaagcagattgatgagctgtcagagaaaggttacatccggccaagcacctcgccttgggccgcccctgtcctatttgtggaaaagaaagatggcaccaagaggatgtgcatcgattatcgagctttgaatgaggtcacgatcaagaacaagtatccgttgcccagaatagaagatctgttcgaccagttgagaggagccagtgtgttctccaagatcgatctgaggtcaggttatcatcagctcaggatccgaccttcggacattccgaagacggcattcattaccaagtatggtttatatgagttcacagtgatgtcttttggtttgaccaatgcgccagcattcttcatgaacttgatgaacagtgtattcatggattatcttgataagtttgtggtggtattcattgatgacattctggtttattctcaaagcgaagaagagcatgcagatcatttgaagatggtgttgcagagattgcgagagcaccagttgtatgcaaagttgagcaagtgtgagttctggatcagtgaagtcctgttcttgggtcacataatcaacaaagaaggattggctgtggatccgaagaaagtggcagacattctaaactggaaagcgccaacagatgctcgaggaatcaagagcttcattggaatggccggatattatcggcgattcattgaagggttttcgaagattgcgaaaccaatgacagcgttgctaggcaacaaggttgagttcaagtggacccagaaatgccaagaggcctttgaagcgctgaaagagaagttgacaacagcgcctgtcctagtcttgcctgatgtgcacaagcccttctcggtgtattgcgatgcttgttacacaggtttgggatgtgtgttgatgcaagagggaagagttgtggcttactcgtcccgacagttgaaggttcatgagaagaattacccaatccatgatctagagttggcagcagtggttcacgcactgaagacatggaggcactatctgtatggacagaaatgcgatgtttacacagaccacaagagtctgaagtacatattcactcagtcagaattgaacatgaggcaacgaagatggttagaattgatcaaagactatgagttggagattcattaccatccaggcaaagcaaacgtagtggcagatgctttgagcagaaagagtcaagtcaatctgatggttgctcgtccgatgccttatgagttggccaaggagtttgacaggttgagtctcgggtttctgaacaattcgcgaggagtcacagttgaattggaacctaccttggagcgcgaaatcaaagaagcgcagaaaaatgatgagaagatcagtgagattcggcgattgattctagatggcaaaggcaaagactttcgagaagatgcagaaggagtggtatggttcaaagaccgcttgtgtgttcccaatgtccagtctattcgggagttgattcttaaggaagctcatgagacagcttattcgattcaccctggcagtgagaagatgtatcaggatctgaagaagaaattctggtggtacggaatgaaaagagaaatcgcagagcatgtggctatgtgcgatagttgtcgaagaattaaggcagaacaccagagaccagctggattgttgcaaccgttgcagatccctcagtggaaatgggatgaaattggcatggatttcatagtcggattgcctcgcactcgagccggctacgattccatttgggtagtagtggaccgcttgaccaagtcagcccacttcatacctgtcaagaccaactacaacagtgcagtattggcagaattgtatatgtctcggatcgtttgtcttcatggtgtgccaaagaagatagtgtcagacagaggaacgcagttcacctctcatttctggcagccgttgcatgaagccttgggcacgcatctgaatttcagttcagcttatcatccgcagacggatggtcagaccgaaaggaccaatcaaattcttgaagacatgttgagagcctgtgcgttgcaagatcagtccggatgggacaagagattgccttatgcagagttttcctataacaacagttatcaggccagtttgaagatgtcaccgtttcaagcgctgtatggaaggagttgcagaactccgttgcaatgggatcagcctggagagaagcaggtgtttgggccagatattttgcttgaagccgaagagaacatcaagatggtccgagagaatctgaagatagcgcaatcaaggcagcgaagctatgcagacacaagaagaagagagctgagtttcgaagtcggagactttgtctatctgaaagtgtcaccgatcagaggagtcagaagattcggagtgaaaggcaagctggcaccccgctacattggtccgtatcagattcttgcaagacgtggagaagtggcttatcagctcagtttgccagagaatttgtctgctgtgcatgatgtctttcatgtgtctcagttgaagaagtgcttgcgtatgccagaagagcagttgccagtggaaggtcttgaagtccaggaggacttgacctacgttgagaagccagctcagatccttgaggttgcagatagagtcacccgaaggaagaccgtcagaatgtgcaaagtcagatggagtcaccactctgaagaagaagcaacctgggagcgtgaagatgatctgatggccaaatacccggagctctttgctagccagccctga

SEQ ID NO: 5191 - DNA, 4041 bp, Zea mays
  Clone ID: TF_ZmC3792_32
atggatgctgaagactggctgcgcactgtggagcgggagttgcataccgctcagtgcgatgacagggagaaagttttgtatggtccccgtctgttgagaggagcagcccagtcatggtgggagtcttacctcgccactcatgcccaccctaacgccatcacctgggaagagttcagaggtagctttcgtcagtaccatgtacctgcaggtctgatgacagtgaagaaggaggagttcctggccctcaagcaagggtcatcgtctgtcagtgagtatcgggacaggttcctgcaattgtctcgctatgctcctgaagatgtcaacaccgacgccaagcgacagtaccgtttcctgagaggcttggttgaccctctacattatcaactgatgaaccataccttcccgacgttccagcacctgattgacagagcgatcatgacagaaaggaagcgcaaggagatggaagatccaaaccagcagaacagtcaggcagcgccagctcaggttggaaacagggcatgtttccactgtggagagcaaggccactgggtgatgcaatgtccgaagaaggcagcccagcagcagtcaggccccaatgccccagcgaagcagaatgtgcctcagcctggagcaggcaatcgccctcagccgcgctataatcatggaagactgaatcacttagaggcggaagcagttcaggagacccccggcatgatagtaggtatgttcccagtcgactcccatatcgcagaagtgttatttgatactggagcaacgcattctttcattactgcatcatgggtagaagcacataatcttccaattactaccatgtcaacccccattcaaattgactcagccggtggtaggattcgagccgatagcatttgtttgaatataagtgtggaaataagggggatagcgtttcccgccaaccttatagtaatgggtactcagggaatagatgtcatcctagggatgaattggctagataagtaccaggcagttatcagttgtgataaaaggacaatcaagttggtgtccccactaggagaggaagtggtgaccgagttagtcccgcctgagccaaagaaaggaagttgttatcagatagctgttgatagcaatgaagcagacccgatcgagagtatcaaggttgtgtccgaattcccggatgtgtttccaaaggacttaccgggtatgccaccagagcggaaagttgagttcgctatagagcttcttcctggaaccgcccctatctttaagagagcttacagaatatctggaccagagttggttgaacttaaggagcagattgatgagctgtcagagaaaggttacattcgaccaagcacctcgccttgggccgcccctgtcttgttcgtggaaaagaaggatggcaccaagaggatgtgtatcgattaccgagctctgaatgaagtcacgatcaagaacaagtatcccttacccagaatagaagatctgttcgaccagttgagaggagccagtgtgttttccaagattgatctgaggtcaggttatcaccagctcaggatccgaccttcagacattccgaagacggctttcattaccaagtatgggttgtatgagttcacagtgatgtcttttggtttgaccaatgcgccagcgttcttcatgaacttgatgaatagtgtattcatggattatctcgacaagtttgtggtggtattcattgatgatattctgatttattctcaaagcgaagaagagcacgcagatcatttgaggatggtattgcaaagattgcgagagcaccagttgtatgcaaagttgagcaagtgtgagttctggatcagtgaagtcctgttcttgggtcacataatcaacaaagaaggattggttgtggatccgaagaaagtggcaaccattttgaactgggaagcgccaacagatgctagaggaatcaagagcttcattggaatggccggatactatcggcgattcattgaagggttttcgaagattgcgaaaccaatgacagcgttgctaggcaacaaagttgagtttaagtggacccagaaatgccaagaggcctttgaagcgctgaaagagaagttgactacagcgcctgtcctagtcttgcctgatgtgcacaagcccttctcggtgtattgtgatgcttgttacacaggtttgggatgtgtgttgatgcaagagggaagagttgtggcttactcgtcccgacagttgaaggttcatgagaagaattacccaatccatgacctagagttggcggcggtggttcatgcactgaagtcatggaggcactacctgtatggacagaaatgcgatgtttacacagatcacaagagtctgaagtacatattcacccagtcagagttgaacatgaggcagcgaagatggttagagttgatcaaagattatgagttggaaattcattaccatccaggcaaagcaaacgtagtggcagatgctttgagcagaaagagtcaagtcaatctgatggtcgctcgtccgatgccttatgagttggccaaggagtttgacaggttgagtctcggatttctgaacaattcacgaggggtcacagttgagttggaacctaccttggagcgcgaaatcaaagaagcgcaaaagaatgatgagaaaatcagtgagattcggcgactgattctagatggcagagacaaagactttcgagtggatgcagaaagcgtgatatggttcaaagaccgcttgtgtgttcccaatgtccagtctattcgggagttgattctcaaggaagctcatgagacgacctattcgattcaccctggcagtgagaagatgtatcaggatctgaaaaagaaattctggtggtacggaatgaagagggagatcgcagagcatgtggctaggtgcgatagttgccgaagaattaaggcagagcaccagagacccgctggattgttgcaaccgttgcagatccctcagtggaaatgggacgaaatcggtatggatttcatagtcggattgcctcgcactcgagccggctacgattccatctgggtagtagtggaccgtttgaccaagtcagcccacttcatacctgtcaagaccaactacaacagtgcagtattggcagaattgtatatgtctcagatcgtttgtcttcatggtgtgccaaagaagatagtgtcagacagaggaacgcagttcacctctcatttctggtggcagttgcatgaagctttgggcacgcatctgaatttcagttcagcttatcatccgcagacagatggccagaccgaaaggaccaaccaaattcttgaagacatgttgagagcctgtgcgttgcaagatcagtccggatgggataagagattgccttatgcagaattttcctataacaacagttaccaggccagcttgaagatgtcaccatttcaggcgctctatggaaggagttgcagaactccgttgcaatgggatcagcctggagagaagcaagtgtttgggccagacattctacttgaagctgaagagaacatcaagatggtccgagagaatctgaagatagcgcaatcgaggcagcaaagctatgcagacacaagaagaagagagctgagtttcgaggtcggagactttgtctatctgaaagtgtcaccgatcagaggagtcagaagatttggagtgaaaggcaagctagcaccccgctacattggtccgtatcagattcttgcaagacgtggagaagtggcctatcagctcagtctgccagagaatttgtccgctgtgcataatgtctttcatgtgtctcagttgaagaagtgcttgcgtgtgccagaagagcagttgccggtggaaggtcttgaagtccaagaggacttgacctatgttgagaagccagtgcaaatccttgagattgcagaccgagtcacccggagaaagaccatcagaatgtgcaaagtcagatggaatcatcactctgaggaagaagcaacctgggagcgtgaagatgatctgatggctaaataccctgagctctttgctagctaa

SEQ ID NO: 5192 - DNA, 5568 bp, Zea mays
  Clone ID: TF_ZmC3792_4
atggctcgacttagacacactgcacgaaagtcagtcatccccttcttaccctcccgtcttgctgagcgtccgcttcgccgtcccgtggccggacagtccagccacttggagagactacaccaccgcctgcgtgaggagcaggaacgtcgacgacaggagcagcggagctcttccctctcgctccaccaggagatagagtctgtgaggagctgctctcctgtgcttcctctggagccgccccctgcaccaccactgggcgccccagcttctggagtagctgctggaggagacccagacaacggaggaggcgacgacagctcgagccacgacaccgacttctctgctaatcctgagccggaaggatgggttgctcgacccatcactcgcgacgctgctcgcgggtgtcacttccatgatgcgctcgacaccctgctacgtcgggcatttgaccggcatacttggtccgtcgagtatcgctgtgtggtctaccagcacagtcgcggggtctacccggaccgctgggaggcaacttgcttggtgcgctgcccggagaacagtctccagggtgcagaggcctgttcagagcactattctatctctgagcgggactcagctgaggcagccatgcaagatgctgcacggcgtgcgctttcgcactactgctcggttttcggtggggcagctgacggtcttgacctgaagtattacccccgccgttcatctggcagcacaggaggcgtgattgtctcacctgtcggtgagggcaatcctaggttgagcagcacagtcaacctagccgccgtgctaaacacggagctggaccatgcattagacgagctgagtagggctcgtgctgagatcgccctgctgcgggctgagcgcgcggaacgtcgttacctggacggtggttcccccgctcccgttgggactcagcacccagtgtgggtatcccctgcattttggtttacatactatgtcaataaaatgtcagagaacaggcgtagaggaggaaggcgtgctcagcaggagcgagccgctccgcaggatgaggtgccccagcagcagcacctgccgcccccgcccccgatgtccatcgagcagatgtttctgatgcagactcaggcagttcaagccatcggtcagactctggccgccattcagcagcagcagcagcagcaacagcagcaggctccaccccagcctcagatgcctcagatgcctagagataagcgtgctgaattcatgagaggtcatccaccaacgttcgctcactcttctgaccccatggatgctgaagattggctgcgcactgtggagcgggagttgcataccgctcagtgcgatgacagggagaaagttctgtatggtccccgtctgttgagaggagcagcccagtcatggtgggagtcttacctcgccacccatgccaaccccgacaccatcacctgggaagaattccgaggtagctttcgtcagtaccatgtgcctgcaggtctgatgacagtgaagaaggaggagttcctggcccttaagcaagggtcatcgtctgtcagtgagtatcgggacaggtttctgcagttgtctcgctatgctcctgaagatgtcaacaccgacgccaagcgacagtaccgtttcctgagaggcttggttgaccctctgcagtatcagctgatgaatcacaccttcccgacattccagcacctgattgacagagcaatcatgacagaaaggaagcgcaaggagatggaagatcgtaagcgcaagatcagtggaccgcagtctggaagcagcagtcgccctcgcttttcaggcaatcaacctcagcagttcaggcagaaccagcgtccacctcagcagcatcagcagcgtcagcagtatcagcagtttcaaaggcagtaccctcagaatcagtaccagaaccgtcagagcaatcagtcaggaggtcagtttcagaggcagaatcagcaaacacctcgtcttcctgccccagcaaatcagcagaacagtcaggcagcaccagctcaggttggaaacagggcatgtttccactgtggagagcaaggccattgggtgatgcaatgtccgaagaaggcagcccagcagcagtcaggccccaatgccccagcaaagcagaatgtgcctcagcctggagcaggcaatcgctctcagcagcgctataatcatggaagattgaatcacttggaagctgaagcagttcaggagacccccggcatgacaataggtatgttcccagtcgattcccatattgcagaagtgttatttgatactggagcaacacattctttcattactgcatcatgggtagaagcacataatcttccaataactaccatgtcaccccccattcaaattgattcagccggtggtagaattcgagccgatagcatttgtttgaatataagtgtgaaaataagggggatagcgtttcccgccaaccttatagtaatgggtactcagggaatagatgtcatcctagggatgaattggctagataagtatcaggcagttatcagttgtgataaaaggacaatcaagttagtgtccccactaggagaggaagtggtgaccgagttagtcccgcctgagccaaagaaaggaagttgttatcagatgactgtcgatagcagtgaagcagacccaattgagagtatcaaggttgtgtctgaattcccagatgtgtttccaaaggatttaccgggtatgccaccagagcggaaagttgaatttgccatagagcttcttcctggaaccgcccctatcttcaagagagcttacagaatatctggaccagagttggatgagcttaagaagcagattgatgagctgtcagaaaaaggttacatccggccaagcacctcgccttgggccgcccctgtcttgttcgtggagaagaaagatggcaccaagaggatgtgcatcgattatcgagctttgaatgaggtcacgatcaagaacaagtatcccttgcccagaatagaagatctgttcgaccagttgagaggagccagtgtgttctccaagatcgatctgaggtcaggttatcatcagctcaggatccgaccttcggacattccgaagacggcattcattaccaagtatggtttatatgagttcacagtgatgtcttttggtttgaccaatgcgccagcattcttcatgaacttgatgaacagtgtattcatggattatcttgataagtttgtggtggtattcattgatgacattctggtttattctcaaagtgaagaagagcatgcagatcatttgaggatggtattgcagagattgcgagagcaccagttgtatgcaaagttgagcaagtgtgagttctggatcagtgaagtcctgttcttgggtcacataatcaacaaagaaggattggctgtggatccgaagaaagtggcagacattctgaactggaaagcgccaacggatgctcgaggaatcaagagcttcattggaatggccggatattatcggcgattcattgaagggttttcgaagattgcgaagccaatgacagcgttgctaggcaacaaggttgagttcaagtggacccagaaatgccaagaggcctttgaagcgctgaaagagaagttgactacagcgcctgtcctagtcttgcctgatgtgcacaagcccttctcggtgtattgtgatgcttgttacacaggtttgggatgtgtgttgatgcaagagggaagagttgtggcttactcgtcccgacagctgaaggttcatgagaagaactaccccatccatgatctagagttggcagcagtggttcacgcactgaagacatggaggcactatctgtatggacagaaatgcgatgtttacacagaccacaagagtctaattcacatattcgctcagtcagaattgaacatgaggcaacgaagatggttagaattgatcaaagactatgagttggagattcattaccatccaggcaaagcaaacgtagtggcagatgctttgagcagaaagagtcaagtcaatctgatggtcgctcgtccgatgccttatgagttggccaaggaatttgacaggttgagtctcggatttctgaacaattcgcgaggagtcacagttgaattggaacctaccttggagcgcgaaatcaaagaagcgcagaagaatgatgagaagatcagtgagattcggcgattgattctagaaggcaaaggcaaagattttcgagaggatgcagaaggtgtggtatggttcaaagaccgcttgtgtgttcccaatgtccagtctattcgggagttgattcttaaggaagctcatgagacagcctattcgattcaccctggcagtgagaagatgtatcaggatctgaagaagaaattctggtggtacggaatgaaaagagaaatcgcagagcatgtggctatgtgcgatagttgtcgaagaattaaagcagaacaccagagaccagctggattgttgcaaccgttgcagatccctcagtggaaatgggatgaaattggtatggatttcatagtcggattgcctcgcactcgagccggctacgattccatttgggtagtagtggaccgcttgaccaagtcagcccacttcatacctgtcaagaccaactacaacagtgcagtattggcagaattgtatatgtctcggatcgtttgtcttcatggtgtgccaaagaagatagtgtcagacagaggaacgcagttcacctctcatttctggcagcagttgcatgaagccttgggcacgcatctgaatttcagttcagcttatcacccgcagacagatggtcagactgaaagaaccaatcaaattcttgaagatatgttgagagcctgtgcgttgcaagatcagtccggatgggacaagcgattgccttatgcagagttttcctataacaacagttatcaggccagtttgaagatgtcaccgtttcaagcgctgtatggaaggagttgcagaactccgttgcaatgggatcagcctggggaaaagcaagtgtttgggccagacattttgctcgaagccgaagagaacgtcaagatggttcgagagaatctgaagatagcgcaatcaaggcagcgaagctatgcagacacaagaagaagagagctgagtttcgaagtcggagactttgtttatctgaaagtgtcaccgatcagaggagtcagaagattcggagtgaaaggcaagctggcaccccgctacattggtccgtatcagattcttgcaagacgtggagaagtggcttatcagctcagtttgccagagaatttgtctgctgtgcatgatgtctttcatgtgtctcagttgaagaagtgcttgcgtatgccagaagagcagttgccagtggaaggtcttgaagtccaggaggacttgacctacgttgagaagccagctcagatccttgagattgcagatagagtcacccgaaggaagaccgtcaggatgtgcaaagtcagatggagtcaccactctgaggaagaagcaacctgggagcgtgaagatgatctgatggccaagtacccggagctctttgctagccagccctga

SEQ ID NO: 5193 - DNA, 4350 bp, Zea mays
  Clone ID: TF_ZmC3792_46
atgcctcagatgcccagggacaagcgtgctgaattcatgagaggtcatcccccagcgttcgctcactcttctgaccccatggatgctgaagattggctgcgcactgtggagcgggagttgcacaccgctcagtgcgacgacagggagaaggtcttgtatggtccccgtctgttgagaggagcagcccagtcttggtgggagtcttacctcgccacccatgccaaccccgacgccatcacctgggaagaattcagaggtagcttccgtcagtaccacgtgcctgcaggtctgatgacagtgaaggaggagttcctggccctcaagcaagggccttcgtccgtcagtgagtaccgagacaggtttctgcagctgtcccgctatgctcctgaggatgtcaacactgacgccaagcggcagtaccgtttcctgagaggcttggtcgaccccctgcagtatcaactgatgaatcacaccttccccacattccagcacctgattgacagagcgatcatgacagagaggaagcgcaaggagatggaggatcgcaagcgcaagatcagtggaccccagcctggaagcagcagccgccctcgtttctcaggcaacccacctcagcagttcaggcagaaccagcgcccacctcagcagcggcagctccatcggcagttccctcggcaccagccgcagcatcgctaccagaaccgtcagagcaatcagtcaggaggtcagtttcaaaggcagaatcagcaagcaccccgtcttcctaccccagcaaaccagcagaacagtcaggcagcaccagctcaggttggaaacagggcatgtttccactgtggagagcagggccattgggtgatgcaatgtccgaagaaggcagcccagcagcagtcaggccccaatgccccagcaaagcagaatgtgtctcagcctggagcaggcaaccgccctcaacagcgctataatcatggaagattgaatcacttggaggctgaagcagttcaggagacccccggcatgatagtaggtatgttcccagtcgactcccatattgcagaagtgttatttgatactggagcaacgcattctttcattactgcatcatgggtaaaagcacataatcttccaactactaccatgtcaacccccattcaaattgactcagctggtggtagaattcgagctgatagcatttgtttaaatataactgtggaaataagggggatagcgtttcccgccaaccttatagtaatgggtactcagggaatagatgtcatcctaggggtgaattggttagataagtatcaggcagttatcagttgtgataaaaggacaatcaagttggtgtccccactaggaaaggaagtggtgaccgagttagtcccacctgagccgaagaaaggaagttgttatcagatggctgtcgatagcagtgaagcagatccagttgagagtatcaaggttgtgtctgaattcccagatgtgtttccaaaggatttaccgggtatgccaccagagcggaaagttgagtttgccatagagcttcttcctggaaccgcccccatctttaagagagcttacagaatatccggaccagagttggttgagcttaagaagcagattgatgagctgtcagagaaaggttacacccggccaagcacctcgccttgggccgcccctgtcttatttgtggaaaagaaagatggcaccaagaggatgtgcatcgattatcgagctttgaatgaggtcacgatcaagaacaagtatcccttgcccagaatagaagatctgttcgaccagttgagaggagccagtgtgttctccaagattgatctgaggtcaggttatcatcagctcaggatccgaccttcggacattccgaagacggcattcattaccaagtatggtttgtatgagttcacagtgatgtcttttggtttgaccaatgcaccagcgttctttatgaatctgatgaacagtgtattcatggattaccttgataagtttgtggtggtattcattgatgacattctgatttattcccaaagcgaagaagagcacgcagatcatttgaggatggtattgcagagattgcgagagcaccagttgtacgcaaagttgagcaagtgtgagttctggatcagcgaagtcctgttcttgggtcacataatcaacaaggaaggattggctgtggatccgaagaaagtggcagacattctgaactggaaagcgccaacggatgctcgaggaatcaagagcttcattggaatggccggatactatcggcgattcattgaagggttttcgaagattgcgaagccaatgacagcgttgctaggcaacaaggttgagttcaaatggacccagaaatgtcaagaggcctttgaagcgctgaaagagaagttgactacctcgcctgtcctaatcttgcctgatgtgcacaagcccttctcggtgtattgcgatgcttgttacacaggtttgggatgcgtattgatgcaagagggaagagttgtggcttactcgtcccgacagttgaaggttcatgagaagaactacccaatccatgatctagagttggcagcagtggttcacgcactgaagacatggaggcactatctgtatggacagaaatgcgatgtttacacagatcacaagagtctgaagtacatattcactcagacagagctgaacatgaggcaacgaagatggttagagctgatcaaagactatgagttggagattcattaccatccaggcaaagcaaacgtagtggcagatgctttgagcagaaagagtcaagtcaatctgatggtcgctcgcccgatgccttatgagttggccaaggagttcgacaggttgagtctcgggtttctgaacaattcgcgaggagtcacagttgaattggaacctaccttggagcgagaaatcaaagaagcgcagaagaatgatgaaaagatcagtgagattcggcgattgattctagatggcagaggcaaagattttcgagaagatgctgaaggcgtgatatggttcaaagaccgcttatgtgttcccaatgtccagtctattcgggagttgattctcaaggaagctcatgagacagcctattcgattcaccctggtagtgagaagatgtatcaggatctgaggaagaaattctggtggtacggaatgaagaggaaaatcgcagagcatgtggctaagtgcgatagttgtcgaagaattaaggcagagcaccagagaccagctggattgttgcaaccgttgcagatccctcagtggaaatgggatgaaattggtatggatttcatagtcggattgcctcgcactcgagccggctacgattctatttgggtagtggtggaccgtttgaccaagtcagcccacttcatacctgtcaagaccagctacaacagtgcagtattggcagagttgtatatgtctcggatcgtttgtcttcatggtgtgccaaagaagatagtgtcagacagaggaacgcagttcacctctcatttctggcagcagttgcatgaagccttgggcacacatctgaatttcagttcagcttatcacccgcagacagatggccagactgaaaggaccaatcaaattctcgaagatatgttgagagcctgtgcgttgcaagatcagtccggatgggacaagcgattgccttatgcagagttttcctataacaacagttaccaggccagtttgaagatgtcaccgtttcaggcgctttatggaaggagttgtagaactccgttgcaatgggatcagcctggagagaagcaagtgtttgggccagacattctgcttgaagccgaagagaacatcaagatggtccgagagaatctgaagatagcgcaatcgaggcagcaaagctatgcagacacaagaagaagagagctgagttttgaagtcggagactttgtctatctgaaagtgtcaccgatcagaggagtcagaagattcggagtgaagggcaagctagcaccccgctacattggtccgtaccagatcctctcaaagcgtggagaagtggcttatcagctcagcctgccagagaatttgtctgttgtgcatgatgtctttcatgtgtctcagttgaagaagtgcttgcgtgtgccagaagagcagttgccagtggaaggtcttgaggtccaggaggacttgacctatgttgagaagccagctcagatccttgagattgcagacagagtcacccgaaggaagaccatcagaatgtgcaaagtcagatggaatcaccactctgaggaagaagcaacctgggagcgtgaagatgatctagtggccaagtacccagagctctttgctagccagccctga

SEQ ID NO: 5194 - DNA, 4473 bp, Zea mays
  Clone ID: TF_ZmC3792_6
atgtcgatcgagcagatgtttctgatgcagactcaggcagttcaagccatcggtcagactctggccgccattcagcagcagcagcagcagcaggctccaccccagcctcagatgcctcagatgcccagagacaagcgtgctgaattcatgagaggtcatccaccaacgttcgctcactcttccgaccccatggatgctgaagattggctgcgcactgtggagcgggagttgcataccgctcagtgcgatgacagggagaaagttctgtatggtccccgtctgttgagaggagcagcccagtcatggtgggagtcttacctcgccacccatgccaaccccgacgccatcacctgggaagagttcagaggtagctttcgtcagtaccacgtgcctgcaggtctgatgacagtgaagaaggaggagttcctggccctcaagcaagggtcatcgtctgtcagcgagtatcgggacaggtttctgcagttgtctcgctacgctcccgaagatgtcaacaccgacgccaagcggcagtaccgtttcctgagaggcttggttgaccctctgcagtatcagctgatgaatcacaccttcccgacattccagcacctgattgacagagcaatcatgacagaaaggaagcgtaaggagatggaagatcgtaagcgcaagatcagtggaccccagcctggaagcagcagccgtccccgtttctcaggcaatcaacctcagcagttcaggcagaaccagcgtccacctcagcagcatcagcagcgtcagcagtatcagcagttccaaaggcagtatcctcagcatcagtaccagaaccgtcagagcaatcagtcaggaggtcagtttcagaagcagaatcagcaagcacctcgtcttcctgccccagcgaatcagcagaacagtcaggcagcaccagctcaggttggaaacagggcatgtttccactgtggagagcaaggccactgggtgatgcaatgtccgaagaaggcagcccagcagcagtcaggccccaatgccccagcaaagcagaatgtgtctcagcctggagcaggcaatcgccctcagccgcgctataatcatggaaggctgaaccacttggaggctgaagcagttcaggagacccccggcatgacagtaggtatgttcccagtcgactcccatattgcagaagtgttatttgatactggagcaacacattctttcattactgcatcatgggtagaagcacataatcttccaattactaccatgtcaacccccattcaaattgactcagctggtggtagaattcgagctgatagcatttgtttaaatgtaagtgtggaaataagggggatagcgtttcccgccaaccttatagtaatgggtactcagggaatagatgtcatcctagggatgaattggttagataagtatcaggcagttatcagttgtgataaaaggacaatcaagttggtgtccccactaggagaggaagtggtgaccgagttagtcccgcctgagccaaagaaaggaagttgttatcagatggccgtcgatagcagtgaagcagacccaattgagagtatcaaggttgtgtccgaattcccagatgtgtttccaaaggacttaccgggtatgccaccagagcggaaagttgaatttgctatagagcttcttcctggaaccgcccccatctctaagagagcttacagaatatctggaccagagttggttgagcttaagaagcagattgatgagctgtcagagaaaggttacatccggccaagcacctcgccttgggccgcccctgccttgtttgtggagaagaaagatggcaccaagaggatgtgtatcgattatcgagctttgaatgaggtcacgatcaagaacaagtatcctttgcccagaatagaagatctgttcgaccagttgagaggagccagtgtgttctccaagatcgatctgaggtcaggttatcatcagctcaggatccgaccttcggacattccgaagacggcattcattaccaagtatggtttatatgagttcacagtgatgtcttttggtttgaccaatgcgccagcgttctttatgaacttgatgaacagtgtattcatggattatcttgataagttcgtggtggtattcattgatgacattctggtttattctcaaagtgaagaagagcatgcagatcatttgaggatggtgttgcagagattgcgagagcaccagttgtatgcaaagttgagcaagtgtgagttctggatcagtgaagtcctgttcttgggtcacataatcaacaaagaaggattggctgtggatccgaagaaagtggcagacattctaaactggaaagcgccaacggatgctcgaggaatcaagagcttcattggaatggccggatattatcggcgattcattgaagggttttcgaagattgcgaagccaatgacagcgttgctaggcaacaaggttgagttcaagtggacccagaaatgccaagaggcctttgaagcgctgaaagagaagttgacaacagcgcctgtcctagtcttgcctgatgtgcacaagcccttctcggtgtattgcgatgcttgttacacaggtttgggatgtgtgttgatgcaagagggaagagttgtggcttactcgtcccgacagctgaaggttcatgagaagaactacccaatccatgatctagagttggcagcagtggttcacgcactgaagacatggaggcactatctgtatggacagaaatgcgatgtttacacagaccacaagagtctgaagtacatattcactcagtcggagttgaacatgaggcaacgaagatggttagagttgatcaaagactatgagttggagatccattaccatccaggaaaagcgaacgtagtggcagatgctttgagcagaaagagtcaagtcaatctgatggtcgctcgtccgatgccttatgagttggccaaagagtttgacaggttgagtctcgggtttctgaacaattcgcgaggagtcacagttgaattggaacctaccttggagcgcgaaatcaaagaagcgcagaaaaatgatgagaagatcagtgagattcggcgattgattctagatggcagaggcaaagactttcgagaagatgcagaaggtgtggtatggttcaaagaccgcttgtgtgttcccaatgtccagtctattcgggagttgattcttaaggaagctcatgagacagcttattcgattcaccctggcagtgagaagatgtatcaggatctgaagaagaaattctggtggtacggaatgaaaagagaaatcgcagagcatgtggctatgtgcgatagttgtcgaagaattaaggcagaacaccagagaccagctggattgttgcaaccgttgcagatccctcagtggaaatgggatgaaattggtatggatttcatagtcggattgcctcgcactcgagccggctacgattccatttgggtagtagtggaccgcttgaccaagtcagcccacttcatacctgtcaagaccaactacaacagtgcagtattggcagaattgtatatgtctcggatcgtttgtcttcatggtgtgccaaagaagatagtgtcagacagaggaacgcagttcacctctcatttctggcagcagttgcatgaagccttgggcacgcatctgaatttcagttcagcttatcacccgcagacagatggtcagactgaaagaaccaatcaaatccttgaagatatgttgagagcctgtgcgttgcaagatcagtccggatgggacaagcgattgccttatgcggagttttcctataacaacagttaccaggccagtttgaagatgtcaccgtttcaagcgctgtatggaaggagttgcagaactccgttgcaatgggatcagcctggagagaagcaggtgtttgggccagacattttgcttgaagccgaagagaacatcaagatggtccgagagaatctgaagatagcgcaatcgaggcagcgaagctatgcagacacaagaagaagagagctgagtttcgaagtcggagactttgtctatctgaaagtgtcaccgatcagaggagtcagaagattcggagtcaaaggcaagctggcaccccgctacattggtccgtatcagattctcgcaaggcgtggagaagtggcctatcagctcagcctgccagagaatttgtctgctgtgcatgatgtctttcatgtgtctcagttgaagaagtgcttgcgtgtgccagaagagcagctgccagtggaaggtcttgaggtccaggaggacttgacctacgttgagaagccagctcagatccttgaggttgcagatagagtcacccgaaggaagaccgtcagaatgtgcaaagtcagatggagtcaccactctgaggaagaagcaacctgggagcgtgaagatgatctgatggccaagtacccggagctctttgctagccagccctga

SEQ ID NO: 5195 - DNA, 4482 bp, Zea mays
  Clone ID: TF_ZmC3792_8
atgtcgattgagcagatgtttctgatgcagactcaggcagttcaagccatcggtcagactctggccgccattcagcagcagcagcagcagcaacagcagcaagcaccaccccagcctcagatgcctcagatgcctagagacaagcgtgctgaattcatgagaggtcatccaccaacgttcgctcactcttctgaccccatggatgctgaagattggctgcgcactgtggagcgggagttgcataccgctcagtgcgatgacagggagaaagttctgtatggtccccgtctgttgagaggagcagcccagtcatggtgggagtcttacctcgccacccatgccaaccccgacaccatcacctgggaagaattccgaggtagctttcgtcagtaccatgtgcctgcaggtctgatgacagtgaagaaggaggagttcctggcccttaagcaagggtcatcgtctgtcagtgagtatcgagacaggtttctgcaattgtctcgctatgctcctgaagatgtcaacactgacgccaagcgacagtaccgtttcctgagaggcttggttgaccctctgcagtatcagctgatgaatcacaccttcccgacattccagcacctgattgacagagcaatcatgacagaaaggaagcgcaaggagatggaagatcgtaagcgcaagatcagtggaccccagcctggaagcagcagccgtccccgtttctcaggcaatcaacctcagcagttcaggcagaaccagcgtccacctcagcagcatcagcagcgtcagcagtatcagcagttccaaaggcagtaccctcagaatcagtaccagaaccgtcagagcaatcagtcaggaggtcagtttcagaagcagaatcagcaagcacctcgtcttcctgccccagcaaatcagcagaacagtcaggcagcaccagctcaggttggaaacagggcatgtttccactgtggagagcaaggccactgggtgatgcaatgtccgaagaaggcagcccagcagcagtcaggccccaatgccccagcaaagcagaatgtgtctcagcctggagcaggcaatcgccctcagccgcgctataatcatggaagactgaatcacttggaggctgaagcagttcaggagacccccgacatgacagtaggtatgttcccagtcgattcccatattgcagaagtgttatttgatactggagcaacacattctttcattactgcatcatgggtagaagcacataatcttccaactactaccatgtcaacccccattcaaattgactcagccggtggtagaattcgagctgatagcatttgtttaaatgtaagtgtggaaataagggggatagcgtttcccgccaaccttatagtaatgggtactcagggaatagatgtcatcctagggatgaattggctagataagtatcaggcagttatcagttgtgataaaaggacaatcaagttggtgtccccactaggagaggaagtggtgaccgagttagtcccgcctgagccaaagaaaggaagttgttatcagatggctgtcgatagcagtgaagcagacccaattgagagtatcaaggttgtgtctgaattcccagatgtgtttccaaaggatttaccgggtatgccaccagagcggaaagttgagtttgctatagagcttcttcctggaaccgcccccatctctaagagagcttacagaatatctggaccagagttggttgagcttaagaagcagattgatgagctgtcagagaaaggttacatccggccaagcacctcgccttgggccgcccctgtcttgtttgtggagaagaaagatggcaccaagaggatgtgtatcgattatcgagctttgaatgaagtcacgatcaagaacaagtatcctttgcccagaatagaagatctgttcgaccagttgagaggagccagtgtgttctccaagatcgatctgaggtcaggttatcatcagctcaggatccgaccttcggacattccgaagacggcattcattaccaagtatggtttatatgagttcacagtgatgtcttttggtttgaccaatgcgccagcgttcttcatgaacttgatgaacagtgtattcatggattatcttgataagttcgtggtggtattcattgatgacattctggtttattctcaaagtgaagaagagcatgcagatcatttgaggatggtattgcagagattgcgagagcaccagttgtatgcaaagttgagcaagtgtgagttctggatcagtgaagtcctgttcttgggtcacataatcaacaaagaaggattggctgtggatccgaagaaagtggcagacattctaaactggaaagcgccaacggatgctagaggaatcaagagcttcattggaatggccggatattatcggcgattcattgaagggttttcgaagattgcgaaaccaatgacagcgttgctaggcaacaaggttgagttcaagtggacccagaaatgccaagaggcctttgaagcgctgaaagagaagttgactacagcgcctgtcctagtcttgcctgatgtgcacaagcccttctcggtgtattgcgatgcttgttacacaggtttgggatgtgtgttgatgcaagagggaagagttgtggcttactcgtcccgacagttgaaggttcatgagaagaactacccaatccatgatctagagttggcagcagtggttcacgcactgaagacatggaggcactatctgtatggacagaaatgcgatgtttacacagaccacaagagtctgaagtacatattcactcagtcagaattgaacatgaggcaacgaagatggttagagttgatcaaagactatgagttggagattcattaccatccaggcaaagcaaacgtagtggcagatgctttgagcagaaagagtcaagtcaatctgatggtcgctcgcccgatgccttatgagttggccaaggagtttgacaggttgagtctcggatttctgaacaattcgcgaggagtcacagttgaattggaacctaccttggagcgcgaaatcaaagaagcgcagaaaaatgatgagaagatcagtgagatccggcgattgattctagatggcagaggcaaagactttcgagaagatgcagaaggcgtggtatggttcaaagaccgcttgtgtgttcccaatgtccagtctattcgggagttgattcttaaggaagctcatgagacagcttattcgattcaccctggcagtgagaagatgtatcaggatctgaagaagaaattctggtggtacggaatgaaaagagaaatcgcagagcatgtggctatgtgcgatagttgtcgaagaattaaggcagaacaccagagaccagctggattgttgcaaccgttgcagatccctcagtggaaatgggatgaaattggtatggatttcatagtcggattgcctcgcactcgagccggctacgattccatttgggtagtagtggaccgcttgaccaagtcagcccacttcatacctgtcaagaccaactacaacagtgcagtattggcagaattgtatatgtctcggatcgtttgtcttcatggtgtgccaaagaagatagtgtcagacagaggaacgcagttcacctctcatttctggcagcagttgcatgaagccttgggcacgcatctgaatttcagttcagcttatcacccgcagacagatggtcagactgaaagaaccaatcaaattcttgaagatatgttgagagcctgtgcgttgcaagatcagtccggatgggacaagcgattgccttatgcagagttttcctataacaacagttatcaggccagtttgaagatgtcaccgtttcaagcgctgtatggaaggagttgcagaactccgttgcaatgggatcagcctggagagaagcaagtgtttgggccagatattttgcttgaagccgaagagaacatcaagatggtccgagagaatctgaagatagcgcaatcgaggcagcgaagctatgcagacacaagaagaagagagctgagtttcgaagtcggagactttgtttatctgaaagtgtcaccgatcagaggagtcagaagattcggagtgaaaggcaagctagcaccccgctacattggtccgtatcagattcttgcaagacgaggagaagtggcttatcagctcagtttgccagagaatttgtctgctgtgcatgatgtctttcatgtgtctcagttgaagaagtgcttgcgtgtgccggaagagcagttgccagtggaaggtctggaagtccaggaggacttgacctatgttgagaagccagctcagatccttgaggttgcagatagagtcacccgaaggaagaccgtcagaatgtgcaaagtcagatggagtcaccactctgaggaagaagcaacctgggagcgtgaagatgatctgatggccaagtacccggagctctttgctagccagccctga

SEQ ID NO: 5196 - DNA, 5658 bp, Zea mays
  Clone ID: TF_ZM3392.C2.o1.fg
atgaggctggttatgattatgcttatggtaatgatggctcgacttagacacactgcacgaaagtctgtcatccccttcttaccctcccgccttgctgagcgtccgcttcgccgtcccgtggccggacagtccagccacttggagagactgcaccaccgcctgcatgaggagcaggaacgtcgacgacaggggcagcagggctcttctttctcgctccagcaggagatagagtctgtgaggagctgctctcctgtgcttcccctggaggcgccccctgcaccaccactgggcgccccagcttctggagtagctgctggaggagacctagacgacggagatgacgacgacagcctgagccacgacactgacttccctgctgaccatgagccggaaggatgggttgctcgacccatcactcgcgacgctgctcgcgggtgtcacttccatgatgcgctcgataccctgctacgtcgggcacttgaccgacgtacttggtccatcgagtatcgctgtgtggtctaccagcatagtcgcggggtctacccgtaccgttgggaggcgacctgtttggtgcgccgtccggagaacagtctccagggcgcggaggcttgctcagagcactattctatctctgagcgggactcagctgaggcagccatgcaagatgctgcacgacgtgcgctttcgcactactgcttggttttcggtggggtagctgacggtcttgacctgaagtattacccccgccgtccatctggcagcacaggaggcgtgattgtctcacctgtcggtgagggcaatcctaggttgagcagcacagtcaacctagccgtcgtgctaaacacggagctggaccatgcactagacgagctgagtagggctcgtgctgagatcgccctgctgcgggctgagcgcgcggaacgtcgtcacctggatgatggttcccccgctcccgttgggactcagcacccgtaccgctcacctcggcgtggacgccagtcttatgacaatcccgacttgctgttgaagaattctatactcttttcttatgctgcaagagttgccagatcagttctgatgtgtggttgcgttctgcagatgtcagagaacagacgcagaggaggaaggcgtgctcagcaggagcgagccgctccgcaggatgaggtgccccaacagcagcacctgccgcccccgcccccgatgtccatcgagcaaatgtttctgatgcagactcaggcagttcaagccatcggtcggaccttggccgccattcagcagcagcagcaacagcagcaggcaccacctcagcctcagatgcctcagatgcccagagataagcgtgctgaattcatgagaggtcatccaccaacgttcgctcattcttctgaccccatggatgctgaagactggctgcgcactgtggagcgggagttgcataccgctcagtgcgatgacagggagaaagttctgtatggtccccgtctgttgagaggagcagcccaatcatggtgggagtcttacctcgccacccatgccaatcctgacgccatcacttgggaagagttcaaaggaagcttccgtcagtaccatgttcctgcaggtctgatgacagtgaagaaagaggagttcctggctctcaagcaagggtcatcgtctgtcagtgaataccgggacatatttctgcagctgtctcgttatgctcctgaagatgtcaacaccgacgccaagcgacagtaccgtttcctgagaggcttggttgaccctctgcactatcagctgatgaatcacaccttcccgacattccagcacctgattgacagagcaatcatgacagagaggaagcgtaaggagatggaggatcgtaagcgcaagatcagtggaccccagcctggaagcagcagccgccctcgtttctcaggcaatcaacctcagcagtccaggcagaaccagcgtccacctcagcagcatcagcagtcccaaaggcagtaccctcagcatcagtaccagaaccgtcagaacaatcagtcaggaggtcagtttcagaggcagaatcagcaggcacctcgtcttcctgccccagcaagccagcagaacaatcaggcagcaccagctcaggttggaaacagagcatgttttcactgtggagagcaaggccactgggtgatgcaatgtccgaagaaggcagcccagcagcagtcaggccctaatgccccagcaaagcagaatgtgcctcagcctggagcaggcaatcgctctcagtcgcgttataatcatgggagactgaaccacttggaggctgaagcagttcaggagacccccggcatgatagtaggtatgttcccagtcaactcccgtattgcagaagtgttatttgatactggagcaacgcattctttcattactgcatcatgggtagaagcacataatcttccaattactaccatgtcaacccccattcaaattgactcagccggtggtagaattcgaaccgatagcatttgtttgaatataagcgtggaaataagggggatagcgtttcccgccaaccttatagtaatgggtactcagggaatagatgtcatcctagggatgaattggctagataagtatcaggcagttatcagttgtgataaaaggacaatcaagttggtgtccccactaggagaggaagtggtgaccgagttagtcccgcctgagccaaagaagggaagttgttatcagatggctgtcgatagcagtgaagcagatccaattgagagtatcaaggttgtgtccgagttcccggatgtgtttcaaaaggacttaccgggtatgccaccagagcggaaagttgaatttgccatagagcttcttcctggaaccgcccctatctttaagagagcttacagaatacctggaccagagttggttgaacttaagaagcaaatcgatgagttgtcagagaaaggttacatccggccaagcacctcgccttgggccgcccctgtcttgttcgtggaaaagaaagatggcaccaaaaggatgtgtatcgattatcgagctttgaatgaagtcacgatcaagaacaagtatcccttgcccagaatagaagatctgttcgaccagttgagaggagccagtgtgttctccaagattgacctgaggtcaggttatcatcagctcaggatccgaccttcggacattccgaagacgacattcattaccaagtatggtttgtatgagttcacagtgatgtcttttggtttgaccaatgcaccagcgtttttcatgaacttgatgaatagtgtattcatggattatcttgataagttcgtggtggtattcattgatgacattctggtttattctcaaagcgaagaaaaacatgcagatcatttgaggatggtattgcagagattgcgagagcaccagttgtatgcaaagttgagcaaatgtgagttctggatcagtgaagtcctattcttgggtcacataatcaacaaagaaggattggcggtggatccgaagaaagtggcagacattctgaactggaaagcgccaacggatgctcgaggaatcaagagcttcattggaatggccggatattatcgtcgattcattgaagggttttcgaagattgcgaaacctatgacagcgttgctaggcaacaaagttgagttcaagtggaccaagaaatgccaggaggccttcgaagcgctgaaagagaagttgactacagcgcctgtcctagtcttgcctgatgtgcacaagcccttctcggtgtattgtgatgcttgttacacaggtttgggatgtgtgttgacgcaagagggaagagttgtggcctactcgtcccgacagctgaaggttcatgagcagaattacccaatccatgatctagagttggcagcagtggttcacgcactgaagacatggaggcactatctgtatggacagaaatgcgatgtttacacagaccacaagagtctgaagtacatattcactcagtcagagttgaacatgaggcagcgaagatggttagagttgatcaaagactatgagttggagatccattaccatccaggcaaagcaaacgtagtggcagatgctttgagcaggaagagtcaagtcaatctgatggtcgctcgtctgatgccttatgagttggccaaggagttcgacaggttgagtctcggatttctgaacaattcgcgaggagtcacagttgagttggaacctaccttggagcgagaaatcaaagaagcgcagaagaatgatgagaagatcagtgagatccggcgactgattctagatggcagaggcaaagattttcgagaagatgcagaaggcgtgatatggttcaaagaccgcttttgtgttcccaatgtccagtctattcgggagttgatccttaaggaagctcatgagacagcttattcgattcaccctggtagtgagaagatgtatcaggatctgaagaagaaattctggtggtacggaatgaagagggaaatcgcagagtatgtggctatgtgtgatagttgtcgacggatcaaggcagagcaccaaagatcagctggattgttgcaaccgttgcagatccctcagtggaaatgggatgaaattggtatggatttcatagtcggattgcctcgcactcgagccggctacgattccatttgggtagtagtggaccgtttaaccaagtcagcccacttcatacctgtcaagaccaactacagcagtgtagtattggcagaactgtatatgtctcggatcgtttgtcttcatggtgtgccaaagaaaatagtgtcagacagaggaacgcagttcacctctcatttctggcagcagttgcatgaagctttgggcacacatctgaatttcagttcagcttatcatccgcagacagatggtcagactgaaaggaccaatcaaattcttgaagatatgttgagagcctgtgcgttgcaagatcagtccggatgggataagagattgccttatgcagagttttcctataacaacagttaccaggccagtttgaagatgtcaccatttcaggcgctttatggaaggagttgtaggactccgttgcactgggatcagcctggagaaaagcaagtgtttgggccagacattctacttgaagccgaagagaacatcaagatggttcgagagaatctgaagatagcgcaatcgagacagcgaagctatgcagacacaagaagaagagagctgagttttgaagtcagagactttgtctatctgaaagtgtcaccgatcagaggagtcagaagattcggagtcaaaggcaagttagcaccccgctacattggtccgtatcagattcttgcaagacgtggagaagtggcctatcagctcagtctgccagagaacttgtccgcagtgcatgatttttttcatgtgtctcagttgaagaagtgcttgcgtgtgccagaagagcagttgctagtggaaggtcttgaagtccaggaggacttgacctacgttgagaagccagcgcaaatccttgaggttgcagacagagtcacccaaaggaagaccatcagaatgtgcaaggttaaatggaagcatcactctgaggaagaagcaacctgggagcgtgaagatgatctgatggctaaataccctgagctctttgctagccaaccctga

SEQ ID NO: 5197 - DNA, 4077 bp, Zea mays
  Clone ID: TF_ZM3641.C5.o1.fg
atgtccatcgagcagatgtttctgatgcagactcaggcagttcaagccatcggtcagactttggccgccattcagcagcagcagcagcaacagcagcaggcaccacctcagcctcagatgcctcagatgcccagagacaagcgtgctgaattcatgagaggtcatccaccaacgtttgctcactcttctgaccccatggatgctgaagattggctgcgcactgtggagcgggagttgcataccgctcagtgcgatgacagggagaaagttctgtatggtccccggctgttgagaggagcagcccaatcatggtgggagtcttacctcgccacccatgcccatcctgacgccatcacttgggaaaagttcagaggtagctttcgtcagtaccatgtacctgcaggtctgatgacagtgaagaaggaggagttcctggccctcaagcaagggccattgtctgtcagtgagtaccgagacaagtttctgcaattgtctcgctatgctcctgaagatgtcaacaccgacgccaagcgacagtaccgtttcctgagaggcttggttgaccctcttcagtatcagctgatgaatcacaccttcccgacattccagcacctgattgacagagcaatcatgacagagaggaagcgcaaggagatggaagatccaaaccagcagagcagtcaggcagcaccagctcaggttggaaacagggcatgtttccactgtggagagcaaggacactgggtgatgcaatgtccgaagaaggcagcccagcagcagtcaggccccaatgccccagcaaagcagaatgtgcctcagcctggagcaggcaatcgctctcagccgcgctataatcatggaagactgaaccacttggaggctgaagcagttcaggagacccccggcatgatagtaggtatgttcccagtcgactcccatattgcagaagtgttatttgatactggagcaacgcattctttcattactgcatcatgggtagaagcacataatcttctaattactaccatgtcaacccccattcaaatcgactcagccggtggtagaattcgagccgatagcatttgtttgaatataagtgtggaaataagggggatagcgtttcccgccaaccttatagtaatgggtactcagggaatagatgtcatcctagggatgaattggctagataagtatcaggcagttatcagttgtgataaaaggacaatcaagttggtgtccccactaggaggagaagtggtgaccgagttagtcccgcctgagccaaagaaaggaagttgttatcagatagctgttgatagcagtgaagcagacccgatcgagagtatcaaggttgtgtccgagttcccagatgtgtttccaaaggacttaccgggtatgccaccagagcggaaagttgagtttgctatagagcttcttcctggaaccgcccctatcttcaagagagcttacagaatatctggaccagagttggatgaacttaagaagcaaattgatgagctgtcagagaaaggttacattcggccaagcacctcgccttgggccgcccctgtcctgtttgtggagaagaaagatggcacgaagaggatgtgtatcgattatcgagctttgaatgaagtcacgatcaagaacaagtatcccttgcccagaatcgaagatctgttcgaccagttgagaggagccagtgtgttctccaagattgatctgaggtcaggttatcatcagctcaggatccgaccttcggacattccgaaaacggcattcatttccaagtatggtttgtatgagttcacagtgatgtctttcggtttgaccaatgcgccagcattcttcatgaacttgatgaacagtgtattcatggattaccttgataagtttgtggtggtattcattgatgacattctggtttattctcaaagcgaagaagagcatgcaaatcatttgaggatggtattgcagagattgcgagagcaccagttgtatgcaaagttgagtaagtgtgagttctggatcagtgaagtcctgttcttgggtcacataatcaacaaggaaggattggctgtggatccgaagaaagtggcagacgttttgaactggaaagcgccaacagatgccagaggaatcaagagtttcattagaatggccggatattatcggcgattcattgaagggttttcgaagatcgcgaaaccaatgacagcgttgctaggcaacaaagttgagttcaagtggacccagaaatgccaagaggcctttgaagcgctgaaagagaagttgactacagcacctgtcctagtcttgcctgatgtgcacaagcccttctcggtgtattgtgatgcttgctacacaggtttgggatgtgtgttgatgcaagagggaagagttgtggcttactcgtcccgacagttgaaggttcatgagaaaaattacccaatccatgacctagagttgtcagcagtggttcatgcgctgaagtcatggaggcactatctgtatggacagaaatgcgatgtttacacagatcataagagtctgaagtacatattcactcagtcagagttgaacatgaggcaacgaagatggttagagttgatcaaagattacgagttggagattcattaccatccaggcaaagcaaacgtagtggcagatgctttgagcagaaagagtcaagtcaatctgatggtcgctcgtccgatgccttatgagttggccaaggagtttgacaggttgagtctcggatttctgaacaattcgcgaggagtcacagttgagttggaacctactttggagcgcgaaatcaaagaagcgcagaagaatgatgagaaaatcagtgagatccggcgactgattctagaagacaaaggcaaagattttcgaaaagacgcagaaggcgtgatatggttcagagaccgcttgtgtgttcccaatgtccagtccattcgggagttgattctcaaggaagctcatgagaccgcttattcgattcaccctagcagtgagaagatgtatcaggatctgaagaagaaattctggtggtacggaatgaagagggaaatcgcagagcatgtggctatgtgcgatagttgccgaagaattaaggcagagcaccagagacctgctggattgttgcaaccgttgcagatccctcagtggaaatgggatgaaattggtatggatttcatagtcggattgcctcgcactcgagccggctacgattccatttgggtagtagtggaccgtttgaccaagtcagcccacttcatacctgtcaagaccaactatagcagtgccgtattggcagagttgtatatgtctcggatcgtttgtcttcatggtgtgccaaagaagatagtgtcagatagaggaacgcagttcacctctcatttctggcagcagttgcatgaagctttgggcacgcatctgaatttcagttcagcttatcacccgcagacagatggccagaccgaaagaaccaaccaaattcttgaagacatgttgagagcctgtgcattgcaagatcagtccggatgggataagagattgccttatgcagagttttcctataacaacagttaccaggccagtttgaagatgtcaccatttcaggcgctttatggaaggagttgtagaactccgttgcaatgggatcagcctggagaaagcaaaggagtcagaagattcggagtgaaaggcaagctagcaccccgctacattggtccgtatcaggttcttgcaagacgtggagaagtggcctatcagctcagtttgcccgagaatttgtcagttgtgcatgatgtctttcatgtgtctcagttgaagaagtgcttgcgtgtgccagaagagcagttgccagtggaaggtcttgaagtccaggaggacttgacctacgttgagaagccagtgcaaatccttgagattgcagacagagtcacccgaaggaagaccatcagaatgtgcaaagtcagatggaatcaccactctgaggaagaagcaacctgggagcgtgaagatgatctgatggctaaataccctgagctctttgctagccaaccctga

SEQ ID NO: 5198 - DNA, 3192 bp, Zea mays
  Clone ID: TF_ZM3651.C4.o2.fg
atgtcgattgagcagatgtttctgatgcagactcaggcagttcaagccatcggtcagactttggccgccattcagcagcagcagcagcagcagcagcaagcaccaccccagcctcagatgcctcaggtgcctagagataagcgtgctgaattcatgagaggtcatccaccaacgttcgctcattcttctgaccccatggatgctgaagattggctgcgcactgtggagcgggagttgcataccgctcagtgcgatgacagggagaaagttctgtatggtccccgtctgttgagaggagcaacccagtcatggtgggagtcttacctcgccacccatgccaaccccgacaccatcacctgggaagaattcagaggtagctttcgtcagtaccatgtgcctgcaggtctgatgacagtgaagaaggaggagttcctggcccttaagcaagggtcatcgtctgtcagtgagtatcgagacaggtttctgcaattgtctcgctatgctcctgaagatgtcaacaccgacgccaagcgacagtaccgtttcctgagaggcttggttgaccctctgcagtatcagctgatgaatcacaccttcccgacattccagcacctgattgacagagcaatcatgacagaaaggaagcgcaaggagatggaagatcgtaagcgcaagatcagtggaccgcagtctggaagcagcagtcgccctcgcttttcaggcaatcaacctcagcagttcaggcagaaccagcgtccacctcagcagcatcagcagcgtcagcagtatcagcagttccaaaggcagtaccctcagaatcagtaccagaaccgtcagagcaatcagtcaggaggtcagtttcagaagcagaatcagcaagcacctcgtcttcctgccccagcaaatcagcagaacagtcaggcagcaccagctccggttggaaacagggcatgtttccactgtggagagcaaggccattgggtgatgcaatgtccaaagaaggcagcccagcagcagtcaggccccaatgccccagcaaagcagaatgtgtctcagcctggagcaggcaatcgctctcagcagcgctataatcatggaagattgaaccacttggaagctgaagcagttcaggagacccccgacatgacagtaggtatgttcccagtcgattcccatattgcagaagtgttatttgatactggagcaacacattctttcattactgcatcatgggtagaagcacataatcttccaactactaccatgtcaacccccattcaaattgattcagccggtggtagaattcgagctgatagcatttgtttgaatataagtgtgaaaataagggggatagcgtttcccgccaaccttatagtaatgggtactcagggaatagatgtcatcctagggatgaattggctagataagtatcaggcagttatcagttgtgataaaaggaccatcaagttggtgtccccactaggagaggaagtggtgactgagttagtcccgcctgagccaaagaaaggaagttgttatcagatgactgtcgatagcagtgaagcagacccgattgagagtatcaaggttgtgtccgaattcccagatgtgtttccaaaggatttaccgggtatgccaccagagcggaaagttgaatttgccatagagcttcttcctggaaccgcccctatcttcaagagagcttacagaatatctggaccagagttggatgagcttaagaagcagattgatgaactgtcagaaaaaggttacatccggccaagcacctcgccttgggccgcccctgtcttgtttgtggagaagaaagatggtactaagaggatgtgtattgattaccgagctttgaataaggtcacgatcaagaacaagtatcctttgcccagaatagaagatctgttcgaccagttgagaggagccagtgtgttctccaagatcgatctgaggtcaggttatcatcagctcaggatccgaccttcggacattccgaagacggcattcattaccaagtatggtttatatgagttcacagtgatgtcttttggtttgaccaatgcgccagcattctttatgaacttgatgaacagtgtattcatggattatcttgataagttcgcagtggtattcattgatgacattctgatttattctcaaagcgaagaagagcatgcagatcatttgaggatggtgttgcagagattgcgagagcaccagttgtatgcaaagttgagcaagtgtgagttctggatcagtgaagtcctgttcttgggtcacataatcaacaaagaaggattggctgtggatccgaagaaagtggcagacattctgaactggaaagcaccaacagatgctagaggaatcaagagcttcattggaatggccggatattatcggcgattcattgaagggttttcgaagattgcgaaaccaatgacagcgttgctaggcaacaaggttgagttcaagtggacccagaaatgccaagaggcctttgaagcgctgaaagagaagttgacaacagcgcctgtcctagtcttgcctgatgtgcacaagcccttctcggtgtattgtgatgcttgttacacagaaatgcgatgtttacacagaccacaagagtctgaagtacatattcactcaatcagaattgaacatgaggcaacgaagatggtccgagagaatctgaagatagcgcaatcaaggcagcgaagctatgcagacacaagaagaagagagctgagtttcgaagtcggagactttgtctatctgaaagtgtcaccgatcagaggagtcagaagattcggagtgaaaggcaagctagcaccccgctacattggtccgtatcagattcttgcaagacgtggagaagtggcctatcagctcagcctgccagagaatttgtctgctgtgcatgatgtctttcatgtgtctcagttgaagaagtgcttgcgtgtgccggaagagcagttgccagtggaaggtctggaagtccaggaggacttgacctacgttgagaagccagctcagatccttgaggttgcagatagagtcacccgaaggaagaccgtcaggatgtgcaaagtcagatggagtcaccactctgaggaagaagcaacctgggagcgtgaagatgatctgaaggccaagtacccggagctctttgctagccagccctga

SEQ ID NO: 5199 - DNA, 4371 bp, Zea mays
  Clone ID: TF_ZM4166.C3.o1.fg
atggagagtcatgatctccgggcagaaagggaatcacggcttgtgggtggcaatgagattgatggttttggttatgactatggtactggtaagtggtattctttccgtttggaaaggatggctcgtcttaggcacactgcacgaaagtctgtcatccccttcttaccctcccgccttgctgagcgtccgcttcgccgtcccgtggccggtcagtccagtcgcttggagaggctgcaccactgcctgcatgaggagcaggagcgtcgacgacaggagcagcaaggatcttctttctccctccaacaggagatagagtccgtgaggagctgctcccctgtgcttcccctggaggcgccccttgcaccaccactggacgccccagcctctggagtagctgctggaggagactcagacgacggaggtggcgacgacagctcgagccacgacaccgacttctctgctgaccaggagccggaaggatgggttgctcgacccatcactcgcgacgctgcacgcgggtgtcacttccacgatgcgctcggcaccctgctacgttgggcacttaaacgatgtacttggtctatcgagtatcgctgtgtggtctaccagcatagtcgcggggtctacccggaccgctgggaggcgacctgcttgatgtcagagaacaggcgcagaggaggaaggcgtgctcagcaggagcaagccgctcaacaggaagaggtgccccagcaacagcagctgccacccccgcccccgatgtccatcgagcagatgtttctgatgcagactcaggcagtccaagccatcggtcagactctggccgccatccagcagcagcagcaggcaccacctcagcctcagatgcctcagatgcccagggacaagcgtgctgaattcatgagaggtctgatgacagtgaagaaggaggagttcctggccctcaagcaagggtcatcgtctgttagcgagtaccgggataggtttctgcagctgtctcgctatgctcctaaggatgtcaacaccgacgccaagcgacagtaccgtttcctgagaggcttggtcgaccctctgcagtaccaactgatgaatcataccttcccgacatttcagcacctgattgacagagcaatcatgacagagaggaagcgtaaggagatggaggatcgtaagcgcaagatcagtggacccccgcctggaagcagcaatcgtcctcgtttctcaggcaatcaacctcagcagttcaggcagaaccagcatccacctcagtatcagcagttccaaaggcagtatcctcagcaccagtatcagaatcgtcagaacaatcagtcaggaggaggtcagtttcagaggcagaatcagcagacacctcgtcttcctgccccagcagcccagcagaacagtcaggcagcaccagctcagattgggaacagagcatgtttccactgtggagagcaaggccactgggtgatgcaatgtccgaagaaggcagcccagcagcaatcaggccccaatgccccagcaaagcagaatgtgtctcagcctggagcaggcaaccgctctcagccacgttataaccaagggagactgaatcacttggaggctgaagcagttcagaagacccccggcatgatagtaggtatattcccagtcgactcccatatagcagaagtgttatttgatactggagcaacgcattctttcattactgcatcatgggtagaagcacataatcttccaattactaccatgtcaacccccattcaaattgactcagccggtggtacaattcgagctgatagcatttgtttgaatgtaagtgtggaaataagggggatagcgttttccgctaatctcatagtaatgggtactcagggaatatatgtcatcctagggatgaattggctagataagtatcaggcagttatcagttgtgataagaggacaatcaagttggtgtccccactaggagaggaagtggtgaccgagttagtcccgcctgagccgaagaaaggaagttgttatcagatggttgtcgatagcagtgaagcagacccaattgagagtatcaaggttgtgtccgagttcccagatgtgtttccaaaggacctaccgggtatgccaccagagcggaaagttgagtttgccatagagcttcttcctggaaccgcccccatctttaagagagcttacagagtatcaggaccagagttggttgaacttaaaaagcagatcgatgaattgtcagagaaaggttacattcggccaagcacctcgccttgggccgcccctgtcctattcgtggagaagaaagatggcaccaaaaggatgtgtatcgattatcgagctctgaatgaagtcacaatcaagaacaagtatcctttgcccagaatagaagatctattcgaccagttgagaggagccagtgtgttctccaagattgatctgaggtcaggttatcatcagctcaggatccgaccttcgaacattccgaagacggcattcgttaccaagtatggtttgtatgagttcactgtgatgtcttttggtttgaccaatgcaccagcctttttcatgaatcttatgaacagtgtattcatggattatcttgataagtttatggtggtattcattgatgacattctgatttattctcaaagcgaagaagagcatgcagatcatttgaggatggtattgcagagattgcgagagcaccagttgtatccaaagttgagcaagtgcgagttctggatcagtgaagtcctgttcttggggttttcgaagattgcgaaaccaatgacagcgttgctaggcaacaaggttgagttcaagtggacccagagatgtcaagaggccttcgaagcactgaaagagaagttgactacagcgcctgttttagtcttgcctgatgtgcacaagcccttctcagtgtattgcgatgcttgttacactggtttgggatgcaaagcgaacgtagtggcagatgctttgagcagaaagagtcaagtcaatctgatggtcgctcgtccgatgccttatgagttggccaaggagtttgacaggttgagtcttgggtttttgaacaattcgcgaggagtcacagttgagttggaacctaccctggagcgggaattcaaagaagcgcagaagaatgatgagaagatcagtgagatccggcgactgattctagatggcagaggcaaagatttttgggaagatgcagaaggtgtggtatggttcaaagaccgtttgtgtgttcccaacgtccagtctattcgggagttgatcctcaaggaagctcatgagacagcctattcgattcaccctggcagtgagaagatgtatcaagatctgaagaagaaattctggtggtacggaatgaagagggagatcgcagagcatgtggctatgtgtgatagttgccggcggatcaaggcagagcaccagagaccgactggattgttgcaaccgttgcaaatccctcagtggaaatgggatgaaatcggtatggatttcatagtcggattgcctcacactcgagccggctacgattctatttgggtagtagtggaccgtttgaccaagtcagcccacttcataccagtcaagaccaactacagcagtgtagtattggtagagttgtacatgtctcggatcgtttgtcttcatggtgtgccaaagaagatagtgtcagacagaggaacacagttcacctctcatttctggcagcagttgcatgaagccttgggcacacatctgaatttcagttcagcttatcatccgcagacagatggtcagaccgaaagaaccaatcaaatccttgaagacatgttgagagcctgtgcgttgcaagatcagtccggatgggacaagcgattgccctatgcagagttctcctataacaacagttaccaggccagtttgaagatgtcaccttttcaggcgctttatggaaggagttgtagaactccgttgcaatgggatcagcctggagaaaagcaggtgtttggaccagacattctgcttgaagccaaagagaacatcaagatggtccgagagaatctgaagatagcgcaatcaaggcagcggagttatgcagacacaagaagaagagagctgagtttcgaagtcggagactttgtctatctgaaagtgtcaccgatcagaggagtcagaaggttcggagtcaaaggcaagctagcaccccgctacattggcccgtatcagattctcgcaaggcgtggagaggtggcctatcagctcagtctgccagaaaatttgtctgctgtgcatgatgtctttcatgtgtctcagttgaagaagtgcttgcgtgtgccagaagagcagttgccagtggaaggtctggaggtttag

SEQ ID NO: 5200 - DNA, 4269 bp, Zea mays
  Clone ID: TF_ZM4276.C3.o1.fg
atgtcgatcgagcaaatgtttctgatgcagactcagacagttcaagccatcggtcagactttggccgccattcagcagcagcagcagcaacagcagcaggcaccacctcagcctcagcctcagatgcctagagacaagcgtgctgaattcatgagaggtcatccaccaacgttcgctcattcttctgaccccatggatgctgaagactggctgcgcactgtggagcgggagttgcataccgctcagtgcgatgacagggagaaagtcctgtatggtccccgtctgttgagaggagcagcccagtcatggtgggagtcttacctcgccacccatgcccaccctgacgccatcacctgggaagagttcagaggaagctttcgtcagtaccatgtccttgcaggtctgatgactgtgaagaaggaggagttcctggctctcaagcaagggccatcgtctgtcagtgagtaccgagacagatttctgcagttgtctcgctatgctcctgaagatgtcaacaccgacgccaagcgacagtaccgtttcttgagaggcttggttgaccctcttcagtatcagctgatgaatcacaccttcccgacatttcagcacctgattgatagagcaatcatgacagagaggaagcgtaaggagatggaggatcgtaagcgcaagatcagtggaccccagcctggaagcagcaatcgtcctcgtttctcaggcagtcaacctcagcagttcaggcagaaccagcgtccacctcagcagcatcagcagttccaatggcagtatcctcagcaccagtaccagaaccgtcagagcaatcagtcaggaggtcagtttcagaggcagaatcagcaggcacctcgtcttcctgccccagcagcccagcagaacagtcaggcagcaccagctcaggttggaaatagagcatgtttccactgtggagagcaaggccactgggtgatgcaatgtccgaagaaggcaacccagcagcagtcaggccccaatgccccagcaaagcagaatgtgcctcagcctggagcaggcaatcgctctcatacgcgctataatcatggaaggctgaaccacttggaggctgaagcagttcaggagacccccggcatgatagtaggtatgttcccagtcgactcccatattgcagaagtgttatttgatactggagcaacgcattctttcattactgcatcatgggtagaagcacataatcttccaattactaccatgtcaacccccattcaaattgactcagccggtggtagaattcgagccgatagcatttgtttgaatataagtgtggaaataagggggatagcgtttcccgctaaccttatagtaatgggtactcagggaatagatgtcatcctagggatgaattggctagataagtatcaggcagttatcagttgtgatgaaaggacaatcaagttggtgtctccactaggagaggaagtggtgaccaagttagtcccgcctgggccaaagaaaggaagttgttatcagatggccgttgatagcagtgaagcagacccaattgagagtatcaaggttgtgtctgagttcccaaatgtgtttccaaaggacttaccgggtatgccaccagagcggaaagttgagtttgccatagagcttcttcctggaaccgcccctatctttaagagagcttacagaatatctggaccagagttggttgagcttaaggagcagattgatgagctgtcggagaaaggttacatccggccaagcacctcgccttgggccgcccctgtcttgtttgtggagaagaaagatggcaccaagaggatgtgtatcgattatcgagctttgaatgaggtcacgatcaagaacaagtatcccttgcccagaatagaagatctgttcgaccagttgagaggagccagtgtgttctccaagattgatctgaggtcaggttatcatcagctcaggatccgaccttcggacattccgaagacggcattcatttccaagtatggtttgtatgagttcactatgatgtcttttggtttgaccaatgcgccagcgttcttcatgaacttgatgaacagtgtattcatggattatctcgataagtttgtgggggtattcattgatgacattctgatttattcccaaagcgaagaagagcacgcagatcatttgaggatggtattgcagagattgcgagagcaccagttgtacacaaagttgagcaagtgtgagttctggatcagtgaagtcctgttcttgggtcatataatcaacaaagaaggattggctgtggatccgaagaaagtggcagacattttgaactggaaagcgccaacagatgctagaggaatcaagagtttcattggaatggccggatattatcggcgattcattgaagggttttcgaagattgcgaaaccgatgacagcgttgctaggcaacaaagttgagttcaagtggacccagaaatgccaagaggcctttgaagcgctgaaagagaagttgacaacagtgcctgtcctagtcttgcctgatgtgcacaagcccttctcggtgtattgtgatgcttgttacacaggtttgggatgtgtgttgatgcaagagggaagagttgtggcttactcgtcccgacagctgaaggttcatgagaagaactacccaatccatgatctagagttggcagcagtggttcacgcactgaagacatggaggcactatctgtatggacagaaatgcgatgtttacacagatcacaagagtctgaagtacatatttactcagtcagagttgaacatgaggcaacgaagatggttagagttgatcaaagactatgagttggagattcattaccatccaggcaaagcaaacgtagtggcagatgctttgagcagaaagagtcaagtcaatctgatggttgctcgtccgatgccttatgagttggccaaggagtttgacaggttgagtctcggatttctgaataattcacgaggagtcacagttgagttggagcctaccctggagcgcgaaattaaagaagcgcagaagaatgatgagaagatcagtgagatccggcgactgattctagatggcagaggcaaagattttcgagaagatgcagaaggcgtgatatggttcaaggtccgcttgtgtgttcccaatgtccagtccattcgggagttgattctcaaggaagctcatgagacagcttattcgattcaccctggcagtgagaagatgtatcaggatctgaagaagaaattctggtggtacggaatgaaaagggaaatcgcagagcatgtggctatgtgcggtagttgtcgaagaattaaggcagagcaccagagacctgctggattgttgcaaccgttgcagatccctcagtggaaatgggatgaaattggtatggatttcatagtcggattgcctcgcactcgagccggctacgattccatttgggtagtagtggaccgcttgaccaagtcagcccacttcataccagtcaagaccaactatagcagtgccgtattggcagaattgtatatgtctcggatcgtttgtcttcatggtgtgccaaagacgatagtgtcagacagaggaacgcagttcacctctcatttctggcagcagttgcatgaagccttgggcacgcatctgaatttcagttcagcttatcatccgcagacagatggtcagaccgaaaggaccaaccaaattcttgaagacatgttgagagcctccgaagagaacatcaagatggtccgagagaatctgaagatagcgcaatcgaggcagcgaagctatgcagacacaagaagaagagagctgagtttcgaagtcggagactttgtctatctgaaagtgtcaccgatcagaggagtcagaagattcggagtgaaaggcaagctagcaccccgctacattggtccgtatcagattcttgcaagacgtggagaagtggcctatcagctcagtttgccagagaatttgtctgctgtgcatgatgtctttcatatgtctcagttgaagaagtgcttgcgtgtgccagaagagcagttgccagtggaaggtcttgaagtccaggaggacttgacctacgttgagaagccagtgcagatccttgaggttgcagaccgagtcacccgaaggaagaccatcagaatgtgcaaagtcagatggaatcaccactctgaggaagaagcaacctgggagcgtgaagatgatctgatggctaagtaccctgagctctttgctagcccaccctaa

SEQ ID NO: 5201 - DNA, 4329 bp, Zea mays
  Clone ID: TF_ZM4452.C4.o1.fg
atgtcgatcgagcagatgtttctgatgcaaactcaggcagttcaagccatcggtcagactttggccgccattcagcagcagcagcagcaacaacagcaggccccacctcaacctcagatgcctcagatgcctagagacaagcgtgctgaattcatgagaggtcatccaccaacgttcgctcattcttctgaccccatggatgctgaagattggctgcgcactgtggagtgggagttgcataccgctcagtgcgatgacagggagaaaattctgtatggtccccgtctgttgagaggggcagcccaatcatggtgggagtcttacctcgccacccatgcccaccctgacgccatcacctgggaagagttcagaggtagctttcgtcagtaccatgtacctgtaggtctgatgacagtgaagaaggaggagttcctggccctcaagcaagggtcattgtctgtcagcgagtaccgggacaagtttctgcaattgtctcgctatgctcctgaagatgtcaacaccgacgccaagcggcagtaccgtttcctgagaggcttggttgaccctctgcagtaccaactgatgaatcacaccttcccgacattccagcacctgattgacagagcaatcatgacagagaggaagcgtaaggagatggaggatcgtaagcgcaagatcagtggaccccagcctggaagcagcaatcgtcctcgtttctcaggcaatcaacctcagcagttcaggcagaaccagcgtccacctcagcagcatcagcagttccaaaggcagtatcctcagcaccagtaccagaaccgtcagagcaatcagtcaggaggtcagtttcaaaggcagaatcagcaggcacctcgccttcctgccccagcaaaccagcagaacagtcaggcagcgccagctcaggttggaaacagggcatgtttccactgtggagagcaaggccactgggtgatgcaatgtccgaagaaggcagcccagcagcagtcaggccccaatgccccagcaaagcagaatgtgtctcagcctggatcaggcaaccgctctcagccgcgctataatcatggaagactgaaccacttggaagctgaagcagttcaggagacccccagcatgatagtaggtatgttcccagtcgactcccatattgcagaagtgttatttgatactggagcaacacattctttcattactgcatcatgggtagaagcacataatcttccaattactaccatgtcaacccccattcaaattgactcagccggtggtagaattcgagccgatagcatttgtttgaatataagtgtgaaaataagggggatagcatttcccgccaaccttatagtaatgggtactcagggaatagatgtcatcctagggatgaattggctagataagtaccaggcaattatcagttgtgataaaaggacaatcaagttggtgtccccactaggagaggaagtggtaaccgagttagtcccgcctgagccaaagaaaggaagttgttatcagctagctgttgatagcagtgaagcagacccgattgagagtatcaaggttgtgtccgagttcccagatgtgtttccaaaggacttaccgggtatgccaccagagcggaaagttgagtttgccatagagcttcttcccggaaccgcccctatcttcaagagagcttacagaatatctggaccagagttggttgagcttaaggagcagattgatgagttgttagagaaaggttacatccggccaagcacctcgccttgggccgcccctgtcctatttgtggagaagaaagatggcaccaagaggatgtgcatcgattatcgagctttgaatgaggccacgatcaagaacaagtatcccttgcccagaatagaagatctgttcgaccagttgagaggagccagtgtgttctccaagattgatctgaggtcaggttatcatcagctcaggatccgaccttcggacattccgaagacggcattcatttccaagtatgggttgtatgagttcacagtgatgtcttttggtttgaccaatgcaccagcgttcttcatgaacttgatgaacagtgtattcatggattaccttgataagtttgtggtggtattcattgatgacattctgatttattctcaaagcgaagaagagcacgcagatcatttgaggatggtattgcagagattgcgagagcaccagttgtatgcaaagttgagcaagtgtgagttttggatcaatgaagtcctgttcttgggtcacataatcaataaagaaggattggctgtggatccgaagaaagtggcagacattttgaactggaaagcgccaacagatgctagaggaatcaagagtttcattgggatggccggatattatcggcgattcattgaagggttttcgaagattgcgaaaccaatgacagcgttgctaggcaacaaagttgagttcaagtggacccagaaatgccaagaggcctttgaagcgctgaaagagaagttgactacagcgcctgtcctagtcttgcctgatgtgcacaagcccttctcggtgtattgtgatgcttgttacacaggtttgggatgcgtattgatgcaagagggaagagttgtggcttactcgtcccgacagttgaaggttcatgagaggaattacccaatccatgatctagagttggcagcagtggttcacgcgctgaagtcatggaggcattatctgtatggacagaaatgtgatgtttacacagatcacaagagtctgaagtacatattcactcagtcagagttgaacatgaggcaacgaagatggttagagttgatcaaagattatgagttggagatccattaccatccaggcaaagcaaacgtagtggcagatgctttgagcagaaagagtcaagtcaatctgatggttgctcgtccgatgccttatgagttggccaaggagttcgacaggttgagtctcgaatttttgaacaattcgcgaggagtcacagttgagttggaacctaccttggagcgcgaaatcaaagaagcgcagaagaatgatgagaaaatcagtgagatccggcgactgattctagaaggcaaaggcaaagattttcgaaaagacgcagaaggcgtgatatggttcagagaccgcttgtgtgttcccaatgtccagtccattcgggagttgattctcaaggaagctcatgagacagcttattcgattcaccctggcagtgagaagatgtatcaggatctgaagaagaaattctggtggtacggaatgaagagggaaatcgcagagcatgtggctatgtgcgatagttgccgaagaattaaggcagagcaccagagacctgtcggattgttgcaaccgttgcagatccctcagtggaaatgggatgaaattgagttgtatatgtctcggatcgtttgtcttcatggtgtgccaaagaagatagtgtcagacagaggaacgcagttcacctctcatttctggcagcagttgcatgaagccttgggcacgcatctgaatttcagttcagcttatcatccgcagacagatggccagaccgaaagaaccaatcaaattcttgaagacatgttgagagcctgtgcattgcaagatcagtccggatgggacaagcgattgccctatgcagagttttcctataacaacagttaccaggccagtttgaagatgtcaccatttcaggcgctttatggaaggagttgtagaactccgttgcaatgggatcagcctggagagaagcaagtgtttgggccagacattttgcttgaagccgaagagaacatcaagatgatccgagagaatctgaagatagcgcaatcgaggcagcgaagctatgcagacacaagaagaagagagctgagtttcgaagtcggagactttgtctatctgaaagtgtcaccaatcagaggagtcagaaggttcggagtgaaaggcaagctagcaccccgctacattggtccgtatcaggttcttgcaagacgtggagaagtggcttatcagctcagtttgcccgagaatttgtcagctgtgcatgatgtctttcatgtgtctcagttgaagaagtgcttgcgtgtgccagaagagcagttgccagtggaaggtcttgaagtccaggaggacttgacctacgttgagaagccagtgcagatccttgaggttgcagacagagtcacccgaaggaagaccatcagaatgtgcaaagtcagatgggaccatcactcagaggaagaagcaacctgggagcgtgaagatgatctgatggccaaataccctgagctctttgctagccaaccctga

SEQ ID NO: 5202 - DNA, 1860 bp, Zea mays
  Clone ID: TF_ZM4455.C2.o1.fg
atggggctcggtgtatgcggctcgctctgccaaggtggtgacgaggatgatggttttggttatgactatggtactagtaagtggtattctttccgtttggaaaggatggctcgtcttagacacactgcacggaagtcagtcattcctttcttgccttctcgtctcgcgaagcgtccgcttcgccgtccagtgactggtcagtctagccacttggagaggctgcaccaccgcctgcaagaggagcaggagggtcgacgacaggagctggagcagcaggactcttccttctcgcttcagcaggagatagagtctgtgaggagctgctcccctgtgctcccgctgggggcgccccctgcaccaccactgagcgccccagccgctggagtagctgctggaggagacccagatgacgaaggtggcgacagcagctcgagccacaacaccgacctttcagaggagcaggagctggaaggatgggttgcccgacccatcacccgtgacgtcgctcgcgggtgccacttccacgacgcgctcgacaccctgctacaccgggcacttgaccgacgtacttggtctatcgagtatcgatgtgttgtcttccagcacagtcgcggggtttacccggaccgctgggaggcgacctgcttggtgccccgtccggagaacagtctccagggtgcgggggtctgctcagagcactattccatctctgagcgggactcaactaaggcggacatgcaagaagccgcacggcgtgcgctttcgcactactgctcagtgctcggtggggtagccgatggtctcaacctaaactgtgggctaagcgcgcggagcatcatcacctggaggatggctcccccgctcccgtcgggactcagcactcgtaccgctcacctcagcgtggacaccatgcttaagatgtcagacaacaggcgcagaggaggaaggcgtgctcagcaggagcaggcagccccacaggatgaggcaccccatcagcagctgccacccccgcccctgatgatgatcgagcggatgttcttaatgcagactcaggtagttcaagctatcggtcagactctggccgccattcagcagcagcagccaccacctcagcctcagatgcccagagacaagcgtgctgaattcatgagaggtctgatgacagtaaagaaggaggagttcctagcgctcaagcaagggcccatgtctgtcagtgagtaccgagacaagtttctacaactgtctcgctatgctcctgaggatgtcaacacagatgccaagagagcatgtttccattgtggagagcagggccattgggtgatgcaatgtccgaagaaggcagcccagcagcagtcaggccctagtgccccagcaaagcagaatgtgtctcagcctggaccaggcaaccgctctcagccgcactataaccatgggagactgaatcacttggaggctgaagcagttcaggaaacccccggaggagaagtggtagccgagttaatctcacctgagccaaggaaaggaagttgtcatcagatggctactgatagcaaggagccagattcacttgagattatcaaagtggtgtccgaattctcagatgtgtttccagaagacttaccaggcatgccacctgagcgaaaagttgagtttgctatagagcttctttctggcaccgcccccatttctaaaagagcctacagagtgtctggaccagagttggttgaacttaagaagcagattaatgagctgtcagagaaaggttatataagaccaagcacctcgccttgggttgccctgtcctgttcgtggagaagaaagatggcaccagaaggatgtgcatcgattatcgagctctga

SEQ ID NO: 5203 - DNA, 4566 bp, Zea mays
  Clone ID: TF_ZM4455.C2.o4.fg
atgctcatctgttcagtgctgttgaagaattctattctctttccttatgctgcaagatttgccagatcagttctgatgtgtggttgcattctgcagatgtcagagaacaggcgcagaggaggaaggcgtgctcagcaggagcgagccgctcaacaggatgaggtgcctcagcagcagcacctgccgcccccgcccccgatatcgatcgagcagatgtttctgatgcagactcaggcagttcaggccatcggtcagaccttggccgccattcagcagcagcagcagcagcagcaggccccacctcagcctcagatgcctcagatgcccagagacaagcgtgctgaattcatgagaggtcatcccccaacgtttgctcactcttctgaccccatggatgctgaagattggctgcgcactgtggagcgggagttgcataccgctcagtgtgatgacagggagaaagtcttgtatggtccccgtctgttgagaggagcagcccaatcatggtgggagtcttacctcgccacccatgccaaccccgacaccatcacctgggaagaattcagaggtagctttcgtcagtaccacgtgcctgcaggtctgatgacagtgaagaaggaggagttcctggctctcaagcaagggccattgtctgtcagtgagtatcgggacaagtttctgcaattgtctcgctatgctcctgaagatgtcaacactgacgccaagcgacagtatcgttttctgagaggcttggtcgaccctctgcagtatcagctgatgaatcacaccttcccgacattccagcacctgattgacagggcaatcatgacagagagaaagcgtaaggagatggaagatcgtaagcgcaagatcagtggaccccagcctggaagcagcaatcgtcctcgtttctcaggcaatcaacctcagcagttcaggcagaaccagcgtccacctcagcagcatcagcagtttcaaaggcagtatcctcagcatcagtaccagaaccgtcagagcaatcagtcaggaggtcagtttcaaaggcagaatcagcaggcacctcgccttcctgccccagcaaatcagcagaacagtcaggcagcaccagctcaggttggaaacagggcgtgtttccactgtggagagcaaggccactgggtgatgcaatgtccgaagaaggcagcccagcagcagtcaggccccaatgccccagcaaagcagaatgtgcctcagcctggagcaggcaaccgccctcaacagcgctataatcatggaagattgaatcacttggaggctgaagcagttcaggagacccccggcatgatagtaggtatgttcccagtcgactcccgtattgcagaagtgttatttgatactggagcaacacattctttcattactgcatcatgggtagaagcacataatcttccaattactaccatgtcaacccccattcaaattgactcagccggtggtagaattcgagccgatagcatttgtttgaatataagtgtggaaataagggggatagcgtttcctgccaaccttatagtaatgggtactcagggaatagatgtcatcctagggatgaattggttagataagtatcaggcagttatcagttgtgataaaaggacaatcaagttggtatccccactaggaaaggaagtggtgaccgagttagtcccgcctgagccaaagaaaggaagttgttatcagatggctgtcgatagcagtgaagcagatccaattgagagtatcaaggttgtgtctgaattcccagatgtgtttccaaaggatttaccgggtatgccaccagagcggaaagttgagtttgccatagagcttcttcctggaaccgcccccatctttaagagagcttacagaatatccggaccagagttggttgaacttaagaagcagattgatgagctgtcagagaaaggttacatccggccaagcacctcgccttgggccgcccctgtcctgtttgtggagaagaaagatggcaccaagaggatgtgtatcgattatcgagctttgaatgaggtcacgatcaagaataagtatcatttgcccagaattgaagatctgttcgaccagttgagaggagcgattgatctgaggtcaggttatcatcagctcaggatccgaccttcggacattccgaagacggcattcattaccaagtatgggttgtatgagttcacagtgatgtcttttggtttgaccaatgcgccagcattcttcatgaacttgatgaatagtgtattcatggattaccttgataagtttgtggtggtattcattgatgatattctggtttattctcaaagcgaagaggagcatgcagatcatttgaggatggtattgcagagattgcgagagcaccagttgtatgcaaagttgagtaagtgtgagttctggatcagtgaagtcctgtttttgggtcacataatcaacaaggaaggattggctgtggatccgaagaaagtggcagacattctgaactggaaagcgccaacagatgctaggggaatcaagagtttcattggaatggccggatactatcggcgattcattgaagggttttcgaagattgcgaaaccaatgacagcgttgctaggcaacaaagttgagttcaagtggacccagaaatgccaagaggcctttgaagcgctgaaagagaagttgactacaacgcctgtcctagtcttgcctgatgtgcacaagcccttctcggtgtattgcgatgcttgttacacaggtttgggatgtgtgttgatgcaagagggaagagttgtggcttactcgtcccgacagttgaaggttcatgagaagaattacccaatccatgatctagagttggcagcagtggttcacgcactgaagacatggaggcactatctgtatggacagaaatgcgatgtttacacagatcacaagagtctgaagtacatattcactcagtcagagttgaacatgaggcaacgaagatggttagagttgatcaaagactatgagttggaaattcattaccatccaggcaaagcaaacgtagtggcagatgctttgagcagaaagagccaagtcaatttgatggtcgctcgtccgatgccttatgagttggccaaagagtttgacaggttgagtctcggatttttgaacaattcgcgaggagtcacagttgaattggaacctaccttggagcgcgaaatcaaagaagcgcagaagaatgatgagaaaatcagtgagatccggcgactgattctagaaggcaaaggcaaagattttcgagaagatgcagaaggcgtgatatggttcaaagaccgcttatgtgttcccaatgtccagtctattcgagagttgatcctcaaggaagctcatgagacagcctattcgattcaccctggtagtgagaagatgtatcaggatctgaagaagaaattctggtggtacggaatgaagagggaaatcgcagagcatatccctcagtggaaatgggatgaaattggtatggatttcatagtcggattgcctcgcactcgagccggctacgattctatttgggtagtggtggaccgtttgaccaagtcagcccacttcatacctgtcaagaccagctacaacagtgcagtattggcagagttgtatatgtctcagatcgtttgtcttcatggtgtgccaaagaagatagtgtcagacagaggaacgcagttcacctctcatttctggcagcagttgcatgaagccttgggcacgcatctgaatttcagttcagcttatcacccgcagacagatggccagactgaaaggaccaatcaaattctcgaagatatgttgagagcctgtgtgttgcaagatcagtccggatgggacaagcgattgccttatgcagagttttcctataacaacagttaccaggccagtttgaagatgtcaccatttcaggcgctttatggaagaagttgcagaactccgttgcaatgggatcagcctggagaaaagcaagtgtttgggccagacattttgcttgaagccgaagagaacatcaagatggtccgagagaatctaaagatagcgcaatcgaggcagcgaagctatgcagacacaagaagaagagagctgagttttgaagtcggagattttgtctatctgaaagtgtcaccgatcagaggagtcagaagattcggagtgaaaggcaagctagcaccccgctacattggtccgtatcagattcttgcaagacgtggagaagtggcctatcagctcagtttgccagagaaattgtctgctgtgcatgatgtctttcatgtgtctcagttgaagaagtgcttgcgtgtgccagaagagcagttgccagtggaaggtcttgaagtccaggaggacttgacctatgttgagaagccagctcagatccttgagattgcagacagagtcacccgaaggaagaccatcagaatgtgcaaagtcagatggaatcaccattcagaggaagaagcaacctgggagcgtgaagatgatctgatggctaagtacccagagctctttgctagccagccctga

SEQ ID NO: 5204 - DNA, 2163 bp, Zea mays
  Clone ID: TF_ZM4545.C13.o2.fg
atgtcgatcgagcagatgtttctgatgcagactcaggcagttcaagccatcggtcagactttggccgccattcagcagcagcagcagcaacagcagcaggccccacctcagcctcagatgcccagagacaagcgtgctgaattcatgagaggtcatccaccaacgttcgctcattcttctgaccccatggatgctgaagactggctgcgcactgtggagcgggagttgcataccgctcagtgcgatgacagggagaaagtcctgtatggtccccgtctgttgagaggagcagcccagtcatggtgggagtcttacctcgccacccatgcccaccctgacgccatcacctgggaagagttcagaggtagtttccgccagtaccatgttcctgcaggtctgatgacagtgaagaaggaggagttcctggccctcaagcaagggccatcgtctatcagtgagtaccgggacaagtttctgcaattgtctcgctatgctcctgaagatgtcaacaccgacgccaagcgacagtaccgttttctgagaggcttggttgaccctctgcagtaccaactgatgaatcataccttcccgacattccagcacctgattgatagagcaatcatgacagagaggaagcgtaaggagatggaggatcgtaagcgcaagatcagtggaccccagcctggaagcagcaatcgtcctcgtttctcaggcaatcaacctcagcagttcaggcagaaccagcgtccacctcagcagcatcagcagtttcaaaggcagtatcctcagcaccagtaccagaatcgtcagagcaatcagtcaggaggtcagtttcagaggcagaatcagcaggcacctcgtcttcctgccccaacagcccagcagaacaatcaggcagcaccagctcaggttggaaacagagcatgtttccactgtggagagcaaggccattgggtgatgcaatgtccgaagaaggcagcccagcagcagtcaggccccaatgctccagcgaagcagaatgtgcctcagccgggagcaggcaatcgctctcagccgcgctataatcatgggagactgaaccacttggaggctgaagcagttcaggagacccccgacatgatagtagtcggattgcctcgcactcgagccggctatgattccatttgggtagtagtggaccgcttgaccaagtcagcccacttcatacctgtcaagaccaactatagcagtgcagtattggcagaattgtacatgtctcggatcgtttgtcttcatggtgtgccaaagaagatagtgtcagacagaggaacgcagttcacctctcatttctggcagcagttgcatgaagccttgggcacacatctgaatttcagttcagcttatcatccacagacagatggccagaccgaaagaaccaatcaaattctcgaagacatgttgagagcctatgcgttgcaggatcagtccggatgggacaagcgattgccttatgcagagttttcctataacaatagttaccaggccagtttgaagatgtcaccatttcaggcgctctatggaaggagttgcagaactccgttgcaatgggatcagcctggagagaagcaagtgtttgggccagacattttgcttgaagccgaagagaacatcaagatggtccgagagaacctgaagatagcgcaatcgaggcagcgaagctatgcagacacaagaagaagagagctgagtttcgaagtcggagactttgtctatctgaaagtgtcaccgatcagaggagtcagaaggttcggagtcaaaggcaagctagcaccccgctacattggtccgtatcagattcttgcaagacgtggagaagtggcctatcagctcagtttgccagaaaatttgtctgctgtgcatgacgtctttcatgtgtctcagttgaagaagtgcttgcgtgtgccagaagagcagttgccagtggaaggtcttgaagtccaggaggacttgacctacgttgagaagccagtgcaggtccttgaggttgcagacagagtcacccgaaggaagaccatcagaatgtgcaaagttagatggaatcaccactctgaggaagaagcaacctgggagcgtgaagatgatctgatggctaaatatcctgagctctttgctagccaaccctga

SEQ ID NO: 5205 - DNA, 4305 bp, Zea mays
  Clone ID: TF_ZM4578.C2.o10.fg
atgtccatcgagcagatgtttctgatgcagactcaggcagttcaagccatcggtcagactttggccgccattcagcagcagcagcagcaacagcagcaggccccacctcagcctcagatgcctcagatgcccagagacaagcgtgctgaattcatgagaggtcatccaccaacgttcgctcactcttctgaccccatggatgctgaagactggctgcgcactgtggagcgggagttgcataccgctcagtgcgatgatagggagaaggttctgtatggtccccgtctgttgagaggagcagcccaatcatggtgggagtcttacctcgccacccatgcccaccctgacgccatcacctgggaagagttcagaggtagctttcgtcagtaccatgttcccgcaggtctgatgactgtgaagaaggaggagttcctggccctcaagcaagggtcattgtctgtcagtgagtaccgggacaggtttctgcagttgtctcgctatgctcctgaagatgtcaacaccgacgccaagcggcagtaccgttttctgagaggcttggttgaccctctgcagtaccaactgatgaatcacaccttccctacattccagcacctgattgacagagcaatcatgacagagaggaagcgtaaggagatggaggatcgtaaacgcaagatcagtggaccccagcctggaagcagcaatcgtcctcgtttctcaggcaatcaacctcagcagttcaggcagaaccagcgtccacctcagcagcatcagcagttccaaaggcagtatcctcagcaccagtaccagaaccgtcagagcaatcagtcaggaggtcagtttcagaggcagaatcagcaggcacctcgtcttcctgccccagcaagccagcagaacagtcaggcagcaccagctcaggttggaaacagagcatgtttccactgtggagagcaaggccactgggtgatgcaatgtccgaagaaggcagcccagcagcagtcaggccccaatgcccccgcaaagcagaatgtgcctcagcctggagcaggcaatcgctctcagtcgcgctataatcatggaagactgaaccacttggaggctgaaggagtgcaggagacccccggcatgatagtaggtatgttcccagtcgactcccatattgcagaagtgttatttgatactagagcaacacattctttcattactgcatcatgggtagaagcacataatcttccaattactaccatgtcaacccccattcaaattgactcagccggtggtagaattcgagccgatagcatttgtttgaatataagtgtggaaataagggggatagcgttttccgccaaccttatagtaatgggtactcagggaatagatgtcatcctagggatgaattggctagataagtatcaggcagttatcagttgtgataaaaggaccatcaagttggtgtccccactaggagaggaagtggtgaccgagttagtcccgcctgagccaaagaaaggaagttgttatcagatagctgttgatagcagtgaagcagacccaattgagaggatcaaggttgtgtccgagttcccagatgtgtttccaaaggacttaccgggtatgccaccagagcggaaagttgagtttgctatagagcttcttcccggaaccgcccctatctttaagagagcttacagaatatccggaccagagttggttgagcttaagaagcaaattgatgagctatcagagaaaggttacattcggccaagcacctcgccttgggccgcccctgtcttgttcgtggaaaagaaagatggcaccaagaggatgtgtatcgattaccgagctttgaatgaggtcacgatcaagaacaagtatcctttgcccagaatagaagatctgttcgaccagttgagaggagccagtgtgttctccaagattgatctgaggtcaggttatcatcagctcaggatccgaccttcggacattccgaagacggcattcatttccaagtatggtttgtatgagttcactgtgatgtcttttggtttgaccaatgtgccagcgttcttcatgaacttgatgaacagtgtattcatggattaccttgataagtttgtggtggtattcattgatgatattctggtttattatcaaagcgaagaagagcacgcagatcatttgaggatggtattgcagagattgcgagagcaccagttgtatgcaaagttgagcaagtgtgagttctggatcagtgaagtcctgttcttgggtcacataatcaacaaagaaggattggctgtggatccgaagaaagtggcagacattttgaactggaaagcgccaacagatgcccgaggaatcaagagcttcattggaatggccggatactatcggcgattcattgaagggttttcgaggattgcgaaaccaatgacagcgttgctaggcaaccaagttgagttcaagtggacccagaaatgtcaagaggcctttgaagcgctgaaagagaagttgactacaacgcctgtcctagtcttgcctgatgtgcacaagcccttctcggtgtattatgatgcttgttacacagagttggcagcagtggttcacgcacttaagacatggaggcactacctgtatggacagaaatgcgatgtttacacagaccacaagagtctgaagtacatattcactcagtcagagttgaacatgaggcaacgaagatggttagagttgatcaaagattatgagttggagattcattaccatccaggcaaagcaaacgtagtggcagatgctttgagcagaaagagtcaagtcaatctgatggtcactcgtccgatgccttatgagttggccaaagagtttgacaggttgagtctcggatttctaaataattcgcgaggagtcacagtcgagttggaacctaccttggagcgcgaaatcaaagaagcgcagaagaatgatgagaaaatcagtgagatccggcgactgattctagatggcagaggcaaagattttcgagaagatgcagaaggtgtgatatggttcaaagaccgcttgtgtgttcccaatgtccagtccattcgggagttgattctcaaggaagctcatgagacagcctattcgattcaccctggcagtgagaagatgtatcaggatctgaagaagaaattctggtggtacggaatgaagagggaaatcgcagagcatgtggctatgtgcgatagttgccgaagaattaaggcagagcaccagagaccggccggattgttgcaaccgttgcagatccctcagtggaaatgggatgaaattgtagtggaccgcttgaccaagtcagcccacttcatacctgtcaagaccaactacagcagtgcagtattggcaaaattgtatatgtctcggatcgtctgtcttcatggtgtgccaaagaagatagtgtcagacagaggaacgcagttcacctctcatttctggcagcagttgcatgaagctttgggcacgcatctgaatttcagttcagcttatcatccgcagacagatggccagaccgaaaggaccaatcaaattcttgaagatatgttgagagcctgtgcgttgcaagatcagtccggatgggataagagattgccttatgtggagttttcctataacaacagttaccaggccagtttgaagatgtcaccatttcaggcgctttatggaaggagttgtagaactccgttgcaatgggatcagcctaaagaaaagcaagtgtttgggccagaaattttgcttgaagccgaagagaacatcaagatggtccgagagaatctgaagatagcgcaatcgaggcagcgaagctatgcagacacaagaagaagagagctgagttttgaagtcggagactttgtctatctgaaagtgtcaccgatcagaggagtcagaagattcggagtgaaaggcaagctagcaccccgctacattggtccgtatcagattcttgcaagacgtggagaagtggcctatcagctcagtttgcccgagaatttgtctgttgtgcatgatgtctttcatgtgtctcagttgaagaagtgcttgcgtgtgccagaagagcagttgctagtggaaggtcttgaagtccaggaggacttgacctacgttgagaaaccagtgcaaatccttgaggttgcagacagagtcacccgaaggaagaccatcagaatgtgcaaagtcagatggaatcatcactctgaggaagaagcaacctgggagcgtgaagatgatctgatggctaaataccctgagctctttgctagccaaccctga

SEQ ID NO: 5206 - DNA, 5541 bp, Zea mays
  Clone ID: TF_ZM4581.C2.o8.fg
atgatggctcgtcttagacacactgcacgaaagtctgtcatccccttcttaccctctcgtctcgcggagcgtccgcttcgccgtcccgtggccggtcagtccagtcacttggagcggctgcaccatcacctgcatgaggagcaggagcatcgacgacaggagcagcagggctcttctttctcgctccagcaggagatagagtctgtgaggagctgctcccccgtgcttcctctggaggcgccccctgcaccacctctgggcgccccagcccctggagtagctgctggaggagacccagatgacggaggtggtgacgacagctcgagccacgacactgacttttctgctgaccaggagccggaaggatgggttgctcgacccatcactcgcgacgctgctcgcgggtgtcacttccacgatgcgctcgacaccctgctacgtcgggcacttgaccggcgtacttggtctatcgagtatcgctgtgtggtctaccagcatagtcgcggggtctacccggaccactgggaggcgacctgcttggtgcgtcgtccggataacattctccagggtgctaaggtctgctcggagcactattccatctctgagcgggactcagctgaggcagccatgcaagatgctgcacggcgtgcgctttcgcactactgctcagtgctcggtgggatgtcagaaaacaggcgcagaggaggaaggcgtgctcagcaggagcaagccgctcagcaggaagaggtaccccagcaacagcaactgccgcccccgcccccgatgtccatcgagcagatgttcttgatgcagactcaggcagtccaagccatcggtcagactctggccgccattcagcagcagcagcaacagccaccacctcaacctcagatgcctcagatgcccagagacaagtgtgctgaattcatgagaggtcatcccccaacgtttgctcattcttctgaccccatggatgctgaagactggctgcgcatgtggaacgggaattgcataccgctcagtgcgatgacagggagaaagttctgtctgatgacagtgaagaaggaggagttcctggccctcaaacaagggtcatcgtctctcagtgagtaccgggacaggtttctgcagttgccttgctatgctcctgaagatgtcaacaccgatgccaagcgacagtaccgtttcctgagaggcttggtcgaccctctacagcagaaccagcgtccacctcagcatcagcagttccaaaggcagtatcctcagcaccagtatcagaatcgtcagaacaatcagtcaggaggaggtcagtttcagaggcaaaatcagcaggcacctcgtcttcctgcccccgcaactcagcagaacagtcaagtagccccagctcaggttggaaacagagcatgtttccactgtggagagcaaggccattgggtgatgcaatgtccgaagaaggcagcccaacagcagtcaggccccaatgccccagcaaagcagaatgtgtctcagcctggagcaggcaaccgttctcaaccgcgctataaccatgggagattgaaccacttggaggctgaagcagttcaggagacccccgacatgataatatgtatgttcccagtcgactcccatattgcagaagtgttatttgatactggagcaacacattctttcattactgcatcatgggtagaagcacatagtcttccgataactaccatgtcaacccccattcaaattgactcagccggtggtagaattcgagccgacagcatttgtttgaatgtaagtgtggaaataagggggatagcgtttcccgctaacctcatagtaatgggtactcagggaatagacgtcatcctagggatgaattggctagataagtatcaggcatttatcagttgtgacaagaggacaatcaagttggtgtccccactaggagaggaagtggtgaccgaattagttccgcctaagccgaagaaaggaagttgttatcagatggctgttgatagcagtgaagcagacccaattgagagtatcaaggttgtgtccgagttcccagacgtgtttccaaaggacttaccgggtatgccaccagagcggaaagttgagtttgctatagagcttcttcctggcaccgcccccatcttgaagagagcttacagagtatcaggaccagagttggttgaacttaagaagcagatttatgagctgtcagagaaaggttacatccgaccaagcacctcgccttgggccgcccctgtcctatttgtggagaagaaagatggcaccagaaggatgtgtatcgattatcgagctctgaatgaggtcaccatcaagaacaggtaccccttgcccagaatagaagacttgttcgaccagttgagaggagccagtgtgttctccaagatagatctgaggtcaggttatcatcagctcatgattcgaccttcagacattccgaagatggcattcattaccaagtatgggttgtatgagttcactgtgatgtctttcggtctaacaaatgcaccagccttctttatgaacttgatgaacagtgtattcatggattatcttgataagtttgtggtggtattttatgatgacattctgatatactctcaaggcgaagaagaacatgctgatcatttgaggatggtattacagatattgcgagagcaccagttgtatgcaaatttgagcaagtgcgagttctggatcagtgaagtcatgttcttgggtcacataatcaacaaagaaggattggccgtggattcgaagaaagtggcagacattctgaactggaaagcgccaacggatgctcgaggaatcaagagtttcgttggaatggccggatattatcggcgattcattgaagggttttcgaaggttgcaaaaccaatgacagctttgctaggcaacaagctgaaagttcatgagaagaattacccaatccatgacctagagttggcagcagtggttcacgcattgaagacatggaggcactatctgtatggacagaaatgtgatgtttacacagaccacaagagtctgaagtacatattcactcagtcagagctgaatatgaggcaacgaagatggttagagctgatcaaagactacgagttggagattcattaccatccaggcaaagcgaacgtggtggcagatgctttgagcaggaagagtcaggtcaatctgatggtcgcttgtccaatgccttatgagttggccaaagagtttcacaggttgagtctcggatttctgaacaacacgcgaggagtcacaattgagttggaacctaccctagagcgggaaatcaaagaagcgcagaagaatgatgagaagatcagtgagatccggcgactgattctagacggcaagggcaaagattttcgggaagacgcagaaggtgtgatatggttcaaagaccgcttgtgtgttcccaatgtccaatccattcgagagttgatcctcaaggaagctcatgagacagcctattcgattcaccatggtagtgagaagatgtatcaggatctgaagaagaaattctggtggattctgccagggcctctgctgtgtgcacattttatatgcttaagggccaacataagaaggtaccctggtgactggtgcaggactggaggtggttctcaaatctcaagcccatccatggcgcctacaagtggatccggctccgggacgcaagctaatcgtccaccattgtcttcacgtggtgctgcaacgaggagggggagggtgacctcaaaccggtcaactatcaatcgtgctgatgctgctggtacacctacatcgacgccgacaccgagtgcagacccatcaagtgccggcgatgctactgctagtggcacaccaacaccatcatcaagtactaatgctccacctgcagcagcacaaccacaatcaggtatagacaatgtcattgtggaagatgatgatactgttattgttgggacgaagaggaagctgaaatctgatgtttggctagagtttgaacaagtaactgttggtggtaaattaaaagctcaatgtaattggtgtaaaaagcaattagttggagatagtaaagccggtacaactcatttgcatagtcatcttggaagttgtcaatcacggcaagttagaaaaggattaaagcaagcaaccttgaagttgagtaaggatgagcatggagcaataatagttgataagtatgtttttgatcaacaagttgctaggaaagaactcgcaataatgatatgtgtccacgagtatccactttcaatggttgatcatgttggttttaggagattttgtgcagctctacaaccacttttcaaaacaatgtctaggaacactattaaaaaggacattttagatatgttcatatatgtgcccgctccacatacaggagaaattataagtgatgttctttacgaagtcttacaagattggcaaattgagaagaaagtctcgacagtgactcttgacaactgcaccactaatgataatttgatgtgctgcatgcaagataagttgcctctttcctctctcatgctagatggaaaattgtatttggaagagccaacacttccaagaactcaagagcttgacattatttcttggtggcaacatgcgggaattaaatacccaactcttagaaaaattgctcgggatatcatggcaattccggttacaacagtggcatcagaatctgtttttagtactggagggaggtgcactgctctatgtgttgctgtccaacagtccaagaccaagacatgtgttgctgacttgctgttgctgtccaaagaaaaacatgtgttgctgtccaagttgctgtccaaactccaaagaaaatccttgctgtccaaagagatgaagcctaaaatatcattgttttcagcttatcatccacagacagatggtcagaccaaaaggaccaatcaaatcctcgaagacatgttgagagcctgtgcgttgcaagatcagtccggatgggacaagcgattgccttatgcagagttctcctataacaacatttaccaggctagcttgaagatgtcaccatttcaggcgctttatggaaggagttgtagaactccgttgcaatgggatcagcctggagaaaagcaagtgtttgggccagacattttgcttgaagctgaagagaacatcaagatggtccgagagaatctgaagatagcgcaatcaaggcagcgaagctatgcagacacaagaagaagagagctaagttttgaggttggagactttgtctatctgaaagtgtcaccgatcagaggagtcagaagatttggagtcaaaggcaagctagcaccccgctacatcggtctgtatcagattctcgcaaggcgtggagaagtggcctatcagctcagcctgccagaaaatttgtctgctgtgcatgatgtttttcatgtgtctcagttgaagaagtgtctgcgtgtgccagaagagcagttgccagttgaaggtctggaggtccaggaggacttgacctacatagagaaaccagcgtaa

SEQ ID NO: 5207 - DNA, 4455 bp, Zea mays
  Clone ID: TF_ZM4632.C2.o2.fg
atgtccatcgagcagatgtttctgatgcagactcaggcagttcaagccatcggtcagactttggccgccattcagcagcagcagcagcagcaagcaccaccccagcctcagatgcctcagatgcccaaagacaagcgtgctgaattcatgagaggtcatccaccaacgttcgctcattcttctgaccctatggatgctgaagattggctgcgcactgtggagcgggagttgcataccgctcagtgcgatgacagggagaaagttctgtatggtccccgtctgttgagaggagcagcccagtcatggtgggagtcttacctcgccacccatgcccaccctgacgccatcacctgggaagagttcagaggtagttttcgtcagtaccatgttcccgcaggtctgatgactgtgaagaaggaggagttcctggccctcaagcaagggccattgtctgtcagtgagtaccgggacaggtttctgcaattgtctcgctatgctcctgaagatgtcaacaccgacgccaagcgacagtaccgtttcctgagaggcttggttgaccctctgcagtatcaactgatgaatcacaccttcccgacattccagcacctgattgacagagcaatcatgacggagagaaagcgcaaggagatggaagatcgtaagcgcaagatcagtggaccccagcctggaagcagcagccgccctcgtttttcaggcaatcaaccccagcagttcaggcagaaccagcgtccacctcagcagcatcagcagtttcaaaggcagtaccctcagaaccagtatcagaaccgtcagagcaatcagtcaggaggtcagtttccgaagcagaatcagcaggcaccccgtcttcctgccccagcaaatcagcagaacagtcaggcagcaccagttcaggttggaaacagagcatgtttccactgtggagagcaaggccactgggtgatgcaatgtccgaagaaggcagcccagcagcagtcaggccccaatgccccagcgaagcagaatgtgtctcagcctggagcaggcaatcgctctcagccgcgctataatcatggaagattgaatcatttggaggctgaagcagttcaggagacccccggcatgatagtaggtatgttcccagtcgactcccatattgcagaagtgttatttgatactggagcaacgcattctttcattactgcatcatgggtagaagcacataatcttccaattactaccatgtcaacccccattcaaattgactcagccggtggtagaattcgagccgatagcatttgtttgaatataagtgtgaaaataagggggatagcatttcccgccaaccttatagtaatgggtactcagggaatagatgtcatcctagggatgaattggctagataagtatcaggcagttatcagttgtgataaaaggacaatcaagttggtgtccccactaggaaaggaagtggtgaccgagttagtcccacctgagccgaagaaaggaagttgttatcagatggttgtcgatagcagtgaagcagacccaatcgagagtatcaaggttgtgtccgaattctcagatgtgtttccaaaggacttaccgggtatgccaccagagcggaaagttgagtttgctatagagcttcttcctggaaccgcccctatctttaagagagcttacagaatatccggaccagagttggatgaacttaagaagcaaattgatgagctgtcagagaaaggttacatccggccaagcacctcgccttgggccgcccctgtcttatttgtggagaagaaagatggcaccaagaggatgtgtatcgattaccgagctttgaatgaggtcacgatcaagaacaagtatcctttgcccagaatagaagatctgttcgaccagttgagaggagccagcgtgttctccaagatagatctgaggtcaggttatcatcagctcaggatccgaccttcggacattccgaagacggcattcatttccaagtatggtttgtatgagttcacagtgatgtcttttggtttgaccaatgcgccagcattctttatgaacttgatgaacagtgtattcatggattatcttgataagtttgtggtggtattcattgatgacattctggtttattctcaaagcgaagaagagcacgcagatcatttgaggatggtgttgcagagattgcgagagcaccagttgtatgcaaagttgagtaagtgtgagttctggatcagtgaagtcctgttcttgggtcacataatcaacaaggaaggattggctgtggatccgaagaaagtggcagacattctgaactggaaagcgccaacagatgctaaaggaatcaagagcttcattggaatggccggatattatcggcgattcattgaaggattttcgaagattgcgaaaccaatgacagcgttgctaggcaacaaagttgagttcaagtggacccagaaatgccaagaggcctttgaagcgctgaaagagaagttgactacagcgcctgtcctagtcttgcctgatgtgcacaagcccttctcggtgtattgtgatgcttgttacacaggtttgggatgtgtgttgatgcaagagggaagagttgtggcttactcgtcccgacagttgaaggttcatgagaagaattacccaatccatgatctagagttggcagcagtggttcacgcactgaagacatggaggcactatttgtatgggcagaaatgtgatgtttacacagaccacaagagtcttaagtacatattcacccagtcagagttgaacatgaggcaacgaagatggttagagttgatcaaagactatgagttggagattcattaccatccaggcaaagcaaacgtagtggcagatgctttgagcagaaagagtcaaatcaatctgatggtcgctcgtccgatgccttatgagttggccaaggagtttgacaggttgagtctcggatttctgaacaattcgcgaggagtcacagttgaattggaacctaccctggagcgcgaaatcaaagaagcgcagaagaatgatgagaaaatcagtgagatccggcgactgattctagatggcaaaggcaaggattttcgagaagatgcagaaggcgtgatatggttcaaagaccgcttgtgtgttcccaatgtccagtccattcgggagttgattctcaaggaagctcatgagaccgcttattcgattcaccctggcagtgagaagatgtatcaggatctgaagaagaaattctggtggtacggaatgaagagggaaatcgcagagcatgtggctatgtgcgatagttgccgaagaattaaggcagagcaccagagacctgctggattgttgcaaccgttgcagacccctcagtggaaatgggatgaaattggtatggatttcatagtcggattgcctcgcactcgagccggctacgattccatttgggtagtagtggaccgtttgaccaagtcagcccacttcatacctgtcaagaccaactacaacagtgcagtattggcagaattgtatatgtctcggatcgtttgtcttcatggtgtgccaaagaagatagtgtcagatagaggaacgcagttcacctctcatttctggcagcagttgcatgaagctttgggcacacatctgaattttagttcagcttatcacccgcagacagatggccagaccgaaagaaccaatcaaattcttgaagatatgttgagagcctgtgcgttgcaagatcagtccggatgggacaagagattgccttatgcagagttttcctacaacaacagttaccaggccagtttgaagatgtcaccgtttcaagcgctttatggaaggagttgtagaactccgttgcaatgggatcagcctggagaaaagcaagtgtttgggccagacattttgcttgaagccgaagagaacatcaagatggtccgagagaacctgaagatagcgcaatcgaggcagcgaagctatgcagacacaagaagaagagagctgagtttcgaagtcggagactttgtttatctgaaagtgtcaccgatcagaggagtcagaagattcggagtgaaaggcaagttagcaccccgctacatcggtccgtatcagattcttgcaaagcgtggagaagtggcctatcagctcagtttgcccgagaatttgtctgctgtgcataatgtctttcatgtgtctcagttgaagaagtgcttgcgtgtgccagaagagcagttgccagtggaaggtcttgaggtccaggaggacttgacctatgttgagaagccagctcagatccttgagattgcagacagagtcacccgaaggaagaccatcagaatgtgcaaagtcagatggaatcaccactctgaggaagaagcaacctgggagcgtgaagatgatctagtggccaagtacccagagctctttgctagccagccctga

SEQ ID NO: 5208 - DNA, 5472 bp, Zea mays
  Clone ID: TF_ZM4640.C7.o1.fg
atgaagctgtggaaggagacttccaggagttccaagattacgacgagttctaggtgtgggttagcggcaacccccagtcggctgcctgtgaaggccgcgatggctcgacttagacacactgcacgaaagtccgtcatccccttcttaccctctcgccttgctgagcgtccgcttcgccgtcccgtggccggacagtccagccacttggagagactacaccaccgcctgcgtgaggagcaggaacgtcgacgacaggagcagcagggctcttctttctcgctccaccaggagatagagtctgtgaggagctgctcccctgtgcttcctctggaggcgccccctgcaccaccattgggcgccccagcttctggagtagctgctggaggagacccagacgatggagatggcgacgacagctcgagccacgacaccgacttctctgctaaccctgagccggaaggatgggttgctcgacccatcactcgcgacgctgctcgcgggtgtcacttccatgatgcgctcgacaccctgctacgtcgggcatttgaccgacatacttgtcgcggggtctacccggaccgctgggaggcaacctgcttggtgcgctgcccggagaacagtctccagggtgcagaggcctgttcagagcactattctatctctgagcgggactcagctgaggcagccatgcaagatgctgcacggcgtgcgctttcgcactactgctcggttttcggtggggcagctgacggtcttgacctgaagtattacccccgccgtccatctggcagcacaggaggcgtgattgtctcacctgtcggtgagggcaatcctaggttgagcagcacagtcaacctagccgccgtgctaaacacggagctggaccatgcattagacgagctgagtagggctcgtgctgagatcgccctgcttcgggctgagcgcgcagaacgtcatcacctggatggtggttcccccgctcccatgtcagagaacaggcgcagaggaggaaggcgtgctcagcaggagcgagccgctcaacaggatgaggtgccccagcagcagcacctaccgcccccgcccccgatgtccatcgagcagatgtttctgatgcagactcaggcagttcaagccatcggtcagactttggccaccattcagcagcagcagcagcaacagcagcaggcaccacctcaacctcagatgcctcagatacccagagacaagcgtgctgaattcatgagaggtcatccaccaacgttcgctcattcttctgaccccatggatgctgaagactggctgcgcactgtggagcgggagttgcataccgctcagtgcgatgacagggagaaagttctgtatggtccccgtctattgagaggagcagcccagtcatggtgggagtcttacctcgccacccatgcccatcctgacgccatcacttgggaagagttcagaggtagctttcgtcagtaccatgttcctgcaggtctgatgactgtgaagaaggaggagttcctggccctcaagcaagggtcatcgtctgtcagtgagtaccgggacaggtttctgcaattgtcccgctatgctcctgaagatgtcaacaccgacgccaagcggcagtaccgtttcctgagaggcttggttgaccctctgcagtaccaactgatgaatcacaccttcccgacattccagcacctgattgacagagcaatcatgacagaaaggaagcgtaaggagatggaagatcgtaagcgcaagatcagtggaccccagcctggaagcagcaatcgtcctcgtttctcaggcaatcaatctcagcagttcaggcagaaccagcgtccacctcagcagcatcagcagttccaaaggcagtaccctccgcaccagtaccagaaccgtcagagcaatcagtcaggaggtcagtttcagaggcagaatcagcaggcacctcgtcttcctgccccagcaaaccagcagaacagtcaggcagcaccagctcaggttggaaacagagcatgtttccactgtggagagcaaggccactgggtgatgcaatgtccgaagaaggcagcccagcagcagtcaggccccagtgcccctgcaaagcagaatgtgcctcagcatggagtaggcaatcgctctcagccgcgctataatcatgggagactgaaccacttggaggctgaagcagttcaagatacccccggcatgatagtaggtatgttcccagtcgactcccatattgcagaagtgttatttgatactggagcaacgcattctttcattactgcatcatgggtagaagcacataatcttccaattactgccatgtcaacccccattcaaattgactcagccggtggtagaattcgagccgatagcatttgtttgaatataagtgtggaaataagggggatagcgtttcccgccaaccttatagtaatgggtactcagggaatagatgtcatcctagggatgaattggctagataagtatcaggcagttatcagttgtgataagaggacaatcaagttggtgtctccactaggaaaggaagtggtgaccgagttagtcccgcctgagccaaagaaaggaagttgttatcagatagctgttgatagcagtgaagcagacccaattgagagcatcaaggttgtgtccgagttcccagatgtgtttccaaaggacttaccgggtatgccaccagagcggaaagttgagtttgccatagagcttcttcctggaaccgcccctatcttcaagagagcttacagaatatctggaccagagttggatgagcttaagaagcaaattgatgagctgtcagagaaaggttacattcggccaagcacctcgccttgggccgcccctgtcttgttcgtggaaaagaaagatggcaccaagaggatgtgtattgattaccgagctttgaatgaggtcacgatcaagaacaagtaccctttgcccagaatagaggatctgttcgatcagttgagaggagccagtgtgttctccaagattgatctgaggtcaggttatcatcagctcaggatccgaccttcggacattccgaagacggcattcatttccaaatatggtttgtatgagttcacagtgatgtcttttggtttgaccaatgcgccagcgttcttcatgaacttaatgaacagtgtattcatggattaccttgataagtttgtggtggtattcattgatgacattctggtttattctcaaagcgaagaagagcatgaagatcatttgaggatggtattgcagagattgcgagagcaccagttgtatgcaaagttgagcaagtgtgaattctggatcagtgaagtcttgttcttgggtcacataatcaacaaggaaggattggctgtggatccgaagaaagtggcagacattttgaactggaaagcgccaacagatgcccgaggaatcaagagcttcattggaatggccggatactatcgacgattcattgaagggttttcgaagattgcgaaaccaatgacagcgttgctaggcaacaaagttgagttcaagtggacccagaaatgccaagaggcctttgaagcgctgaaagagaagttgactacagcgcctgtcctagtcttgcctgatgtgcacaagcccttctcggtgtattgtgatgcttgttacacaggtttgggatgcgtgttgatgcaagagggaagagttgtggcttactcgtcccgacagctgaaggttcatgagaagaattacccaatccatgatctagagttggcagcagtggttcacgcactgaagacatggaggcactatctgtatggacagaaatgcgatgtttacacagaccacaagagtctgaagtacatattcactcagtcagagttgaacatgaggcaacgaagatggttagagttgatcaaagactatgagttggagatccattaccatccaggcaaagcaaatgtagtggcggatgctttgagcagaaagagtcaagtcaatctgatggtcgctcgtccgatgccttatgagttggctaaggagtttgacaggttgagtctcggatttctgaataattcgcgaggagtcacagttgagttggaacctaccttggagcgcgaaatcaaagaagcgcagaagaatgatgagaagataagtgagatccggcgactgattctagatggcagaggcaaagattttcgagaagatgcagaaggcgtgatatggttcaaagaccgcttgtgtgttcccaatgtccagtccattcgggaattgattcttaaggaagctcatgagacagcctattcgattcaccctggcagtgagaagatgtatcaggatctgaaaaagaaattatggtggtacggaataaaaagggaaatcgcagagcatatccctcagtggaaatgggatgaaattggtatggatttcatagtcggattgcctcgcactcgagccggctacgattccatttgggtagtagtggaccgtctgaccaagtcagcccacttcatacctgtcaagaccaactacagcagtgcagtattggcagaattgtatatgtcttggatcgtttgtcttcatggtgtgccaaagaagatagtgtcagacagaggaacgcagttcacctctcatttctggcagcagttgcatgaagctttgggcacgcatctgaatttcagttcagcttatcatccgcagacggatggccagaccgaaaggaccaatcaaattcttgaagatatgttgagagcctgtgcgttgcaagatcagtccggatgggacaagcgattgccttatgcagagttttcctataacaacagttaccaggccagtttgaagatgtcaccatttcaggcgctttatggaaggagttgtagaactccgttgcaatgggatcagcctggagaaaagcaagtgtttgggccagacattttgcttgaagccgaagagaacatcaagatggtccgagagaatctgaagatagcgcaatcaagacagcgaagctatgcagacacaagaagaagagagctgagtttcgaggttggagactttgtctatctgaaagtgtcaccgatcagaggagtcagaaaattcggagtgaaagacaagctagcaccccgctacattggtccgtatcagattcttgcaagacgtggagaagtggcctatcagctcagtttgcccgagaatttgtctgctgtgcataatgtctttcatgtgtctcagttgaagaagtgcttgcgtgtgccagaagagcagttgccagtggaaggtcttgaagtccaggaggacttgacctacgttgagaagccagtgcaaatccttgaggttgcagacagagtcacccgaaggaagaccatcagaatgtgcaaagtcagatggaatcaccactctgaggaagaagcaacctgggagcgtgaagatgatctgatggccaaataccctgagctctttgctagccaaccctga

SEQ ID NO: 5209 - DNA, 4473 bp, Zea mays
  Clone ID: TF_ZM4679.C3.o2.fg
atgtcgatcgagcagatgtttctgatgcagactcaggcagttcaggccatcggtcagactctggccgccattcagcagcagcagcagcagcaacagcagcaagcaccaccccagcctcagatgcctcagatgcccagagacaagcgtgctgaattcatgagaggtcatcccccaacgttcgctcactcttctgaccccatggatgctgaagattggctgcgcactgtggagcgggagttgcataccgctcagtgtgatgacatggagaaggtcttgtatggtccccgtctgttgagaggagcagcccaatcatggtgggagtcttacctcgccacccatgccaaccccgacaccatcacctgggaagaattcagaggtagctttcgtcagtaccacgtgcctgcaggtctgatgacagtgaagaaggaggagttcctggcccttaagcaagggtcatcatctgtcagtgagtatcgagacaggtttctgcaattgtctcgctatgctcctgaggatgtcaacactgacgccaagcgacaataccgttttctgagaggcttggtcgaccccctgcagtatcaactgatgaatcacaccttcccgacattccagcacctgattgatagagcgatcatgacagaaaggaagcgtaaggagatggaagatcgtaagcgcaagatcagtggaccccagcctggaagcagcagccgccctcgtttttcaggcaatcaacctcagcagttcaggcagaaccagcgtccacctcagcagcgtcagcagcatcagcagttccaaaggcagtatcctcagcatcagtaccagaaccgtcagagcaatcagtcaggaggtcagtttcaaaggcagaatcagcaagcaccccgtcttcctgccccagcaaaccagcagaacagtcaggcagcaccagctcaggttggaaacagggcatgtttccactgtggagagcagggccattgggtgatgcaatgtccgaagaaggcagcccagcagcagtcaggccccaatgccccagcaaagcagaatgtgtctcagcctggagcaggcaatcgccctcaacagcgctataatcatggaagattgaatcacttggaggctgaagcagttcaggagacccccggcatgatagtaggtatgttcccagtcgactcccatattgcagaagtgttatttgatactggagcaacgcattctttcattactgcatcatgggtagaagcacataatcttccaactactaccatgtcaacccccattcaaattgactcagctggtggtagaattcgagctgatagcatttgtttaaatataagtgtggaaataagggggatagcgtttcccgccaaccttatagtaatgggtactcagggaatagatgtcatcctagggatgaattggttagataagtatcaggcagttatcagttgtgataaaaggacaatcaagttggtgtccccactaggaaaggaagtggtgaccgagttagtcccgcctgagccgaagagaggaagttgttatcagatggctgtcgatagcagtgaagcagatccagttgagagtatcaaggttgtgtctgaattcccagatgtgtttccaaaggatttaccgggtatgccaccagagcggaaagttgaattcgctatagagcttcttcctggaaccgcccccatctttaagagagcttacagaatatctggaccagagttggttgagcttaagaagcagattgatgagctgtcagagaaaggttacatccggccaagcacctcgccttgggccgcccctgtcttatttgtggaaaagaaagatggcaccaagaggatgtgcatcgattatcgagctttgaatgaggtcacgatcaagaacaagtatcccttgcccagaatagaagatctgttcgaccagttgagaggagccagtgtgttctccaagattgatctgaggtcaggttatcatcagctcaggatccgaccttcggacattccgaagacgacattcattaccaagtatggtttgtatgagttcacagtgatgtcttttggtttgaccaatgcaccagcgttcttcatgaatctgatgaacagtgtattcatggattaccttgataagtttgtggtggtattcattgatgacattctgatttattcccaaagcgaagaagagcacgcagatcatttgaggatggtattgcagagattgcgagagcaccagttgtacgcaaagttgagcaagtgtgagttctggatcagcgaagtcctgttcttgggtcacataatcaacaaggaaggattggctgtggatccgaagaaagtggcagacattctgaactggaaagcgccaacagatgctagaggaatcaagagcttcattggaatggccggatattatcggcgattcattgaagggttttcaaagattgcgaaaccaatgacagcgttgctaggcaacaaagttgagttcaagtggacccagaaatgtcaagaggcctttgaagcgctgaaagagaagttgactacatcgcctgtcctagtcttgcctgatgtgcacaagcccttctcggtgtattgtgatgcttgttacacaggtttgggatgtgtgttgatgcaagagggaagagttgtggcttactcgtcccgacagttgaaggttcatgagaagaattacccaatccatgatctagagttggcagcagtggttcacgcactgaagacatggaggcactatctgtatggacagaaatgcgatgtttacacagatcacaagagtctgaagtacatattcactcagacagagctgaacatgaggcaacgaagatggttagagctgatcaaagactatgagttggagattcattaccatccaggcaaagcaaacgtagtggcagatgctttgagcagaaagagtcaagtcaatctgatggtcgctcgcccgatgccttatgagttggccaaggagttcgacaggttgagtctcgggtttctgaacaattcgcgaggagtcacagttgaattggaacctaccttggagcgagaaatcaaagaagcacagaagaatgatgaaaagatcagtgagattcggcgattgattccagatggcagaggcaaagattttcgagaagatgctgaaggcgtgatatggttcaaagaccgcttatgtgttcccaatgtccagtctattcgagagttgatcctcaaggaagctcatgagacagcctattcgattcaccctggtagtgagaagatgtatcaggatctgaagaagaaattctggtggtacggaatgaagagggaaatcgcagagcatgtggctaagtgcgatagttgccgaagaattaaggcagagcaccagagaccagctggattgttgctaccgttgcagatccctcagtggaaatgggatgaaattggtatggatttcatagtcggattgcctcgcactcgagccggctacgattctatttgggtagtggtggaccgtttgaccaagtcagcccacttcatacctgtcaagaccagctacaacagtgcagtattgacagagttgtatatgtctcggatcgtttgtcttcatggtgtgccaaagaagatagtgtcagacagaggaacgcagttcacctctcatttctggcagcagttgcatgaagccttgggcacacatctggatttcagttcagcttatcacccgcagacagatggccagactaaaaggaccaatcaaattctcgaagatatgttgagagcctgtgcgttgcaagatcagtccggatgggacaagcgattgccttatgcagagttttcctataacaacagttaccaggccagtttgaagatgtcaccgtttcaggcgctttatggaaggagttgtagaactccgttgcaatgggatcagcctggagagaagcaagtgtttgggccagacattctgcttgaagccgaagagaacatcaagatggtccgagagaatctgaagatagcgcaatcgaggcagcgaagctatgcagacacaagaagaagagagctgagttttgaagtcggagactttgtctatctgaaagtgtcaccgatcagaggagtcagaagattcggagtgaaaggcaagctagcaccccgctacattggtccgtaccagatcctctcaaagcgtggagaagtggcttatcagctcagcctgccagagaatttgtctgctgtgcatgatgtctttcatgtgtctcagttgaagaagtgcttgcgtgtgccagaagagcagttgccagtggaaggtcttgaggtccaggaggacttgacctatgttgagaagccagctcagatccttgagattgcagacagagtcacccgaaggaagaccatcagaatgtgcaaagtcagatggaatcaccactctgaggaagaagcaacctgggagcgtgaagatgatctagtggccaagtacccagagctctttgctagccagccctga

SEQ ID NO: 5210 - DNA, 4200 bp, Zea mays
  Clone ID: TF_ZM4716.C1.o4.fg
atgtcgatcgagcagatgtttctgatgcagactcaggcagttcaagccatcggtcagactctggcaggcattcagcagcagcagcaacagcagcaggccccacctcagcctcagatgcctcagatgctcagagacaagcgtggtctgatgacagtgaagaaggaggagttcttggcccttaagcaagggtcatcatctgtcaacgagtaccgagacaggtttctgcagttgtctcgctatgctcctgaagatgtcaacaccgacgccaagcggcagtaccgtttcctgagaggcttggttgaccctctgcagtaccaactgatgaatcacaccttcccgacatttcagcacctgattgacagagtaatcatgacggagaggaagcgtaaggagatggaggatcgtaagcgcaagatcagtggaccccagcctagaagcaacagccgccctcgcttctcaggcaatcaacctcagcagttcaggcagaaccagcgtccacctcagcagcatcagcagtttcaaaggcagtatcctcagcatcagtaccagaaccgtcagagcaatcagtcaggaggtcagtttcagaggcagaatcagcaagcacctcatcttcctgccccagcaaaccagcaaaacaatcaggcagcaccagctcaggttggaaacagagcatgtttccactgtggagagcaaggccactgggtgatgcaatgtccgaagaaggcagcccagcagcagtcaggccccaatgccccagcaaagcagaatgtgcctcagcctggagcaggcaaccgctctcagccgcgttacaatcatggaagactgaaccacttggaggctgaagcagctcaggagacccccggcatgatagtaggtatgttcccagtcgactcccatattgcagaagtgttatttgatactggagcaatgcattctttcattactgcattatgggtagaagcacataatcttccaattactaccatgtcaacccccattcaaattgactcggccggtggtagaattcgagctgatagcatctgtttgaatgtaagtgtggaaataagggggatagcgtttcccgctaaccttataataatgggtactcagggaatagatgtcatcctagggatgaattggctagataagtaccaggcggttatcagttgtgataaaaggaccatcaagttggtgtccccactaggagaggaagtggtgaccgagttagtcccgcctgagccaaagaaaggaagttgttatcagatggctgtcgatagcagtgaagcagacccaattgagaggatcaaggttgtgtctgagttcccagatgtgtttccaaaggacttaccgggtatgccaccagagcggaaagttgagtttgccatagagcttcttcctggaaccgcccccatctttaagagagcctacagaatatctggaccagagttggttgaacttaagaagcaaattgatgagctgtcagagaaaggttacatccggccaagcacctcgccttgggccgcccctgtcctatttgtggagaagaaagatggcaccaaaaggatgtgtatagattatcgagctttgaatgaagtcacgatcaagaacaagtatcccttgcccagaatagaagatctgttcgaccagttgagaggagccagtgtgttctccaagattgatctgaggtcaggttatcatcagctcaggatccgaccgtcggacattccgaaaacggcattcattaccaagtatggtttgtatgagttcacagtgatgtcttttggtttgaccaatgcgccagcattcttcatgaacttgatgaatagtgtattcatggattaccttgataagtttgtggtggtattcattgacgacattctgatttattctcaaagcgaagaagagcatgcagatcatttgaggatggtattgcagagattgcgagagcaccagttgtatgcaaagttgagcaaatgtgaattttggatcaatgaagtcctgttcttgggtcacataatcaacaaagaaggattggctgtggatccgaagaaagtggcagacattctgaactggaaagcgccaacagatgctcgaggaatcaagagcttcattggaatggccggatactatcggcgattcattgaagggttttcgaagattgcgaaaccaatgacagcgttgctaggcaacaaggttgagttcaagtggacccagaaatgtcaacaggccttcgaagcgctgaaagagaagttgacaacagcgcctgtcctagtcttgcctgatgtgcacaagcccttctctgtgtactgtgatgcttgttacacaggtttgggatgcgtattgatgcaagagggaagagttgtggcttactcgtcccgacagttaaaggttcatgagaagaattacccaatccatgacctagagttgacagcagtggttcacgcactgaagacatggaggcactatctgtatggacagaaatgcgatgtttacacagatcacaagagtctgaagtatatattcactcagtcagagttgaacatgaggcaacgaagatggttagagctgatcaaagattatgagttggagattcattaccatccaggcaaagcaaacatagtggcagatgctttaagcagagatagtcaagtcaatctgatggtcgctcgtccgatgccttatgagttggccaaggagttcgacaggttgagtctcgaatttctgaacaattcgcgaggagtcacagttgagttggaacccaccttagagcaggaaatcaaagaagcacagaagaatgatgagaagatcagtgagatccgacgactgattctagatggcagaggcaaagattttcgagaagatgcagaaggtgtgatatggttcaaagaccgcttatgtgttcctaatgtccagtccattcgggagttgatcctcaaggaagctcatgagacagcttattcgattcaccctggtagtgagaagatgtatcaggatctgaagaataaaatctggtggtacggaatgaagagggaaattgcagagcatgtggctatgtgcgatagttgtcgaagaattaaggcagagcaccagagaccagctggattgttgcaaccgttgcaaattcctcaatggaaatgggatgaaatcggtatggatttcatagtcggattgcctcgcactcgagccggctacgattccatttgggtagtagtggaccgcttgaccaagtcagcccacttcatacctgtcaagaccaactacagcagtgcagtattggcagagttgtatatgtctcggatcgtttgtcttcatggcgtgccaaagaagatagtgtcagacagaggaacgcagttcacctctcatttctggcagcagttgcatgaagccttgggcacacatctgaatttcagttcagcttatcatccgcagacagatggccagactgaaaggaccaatcaaattcttgaatacatgttgagagcctgtgcgttgcaagatcagtccggatgggacaagcgattgccttatgcagagttctcctataacaacagttaccaggccagtttgaagatgtcaccatttcaagcactctatgggaggagttgtagaactctattgcaatgggatcagcctggggaaaagcaagtgttcgggccagacattttgcttgaagccgaagagaacatcaagatggtccgagagaatatgaagatagcgcagtcgaggcagcgaagctacgcagacacaagaagaagagagctgagtttcgaagtcggagactttgtctatctgaaagtgtcaccgatcagaggagtcagaaggttcggagtcaaaggcaagttagcaccccgctacattggtccgtaccaaattatctcaaggcgtggagaagtggcctatcagctcagtatgccagagaatttgtctgctgtgcatgatgtctttcatgtgtctcagttgaagaagtgcttgcgtgtgccagaagagcagttgccagtggaaggtcttgaagtccaggaggacttaacctacgttgagaagccagtgcaaatccttgaggttgcagacagagtcactcgaaggaagaccatcagaatgtgcaaagtcaaatggaatcaccactccgaggaagaagcaacctgggagcgtgaagatgatctgatggctaaataccctgagctctttgctagccaaccctga

SEQ ID NO: 5211 - DNA, 4446 bp, Zea mays
  Clone ID: TF_ZM4786.C2.o2.fg
atgtcgattgagcagatgtttctgatgcagactcaggcagttcaagccatcggtcagactctggccgccattcagcagcagcagcagcagcaacagcagcaagcaccaccccagcctcagatgcctcagatgcctagagacaagcgtgctgaattcatgagaggccatcccccaacgttcgctcactcttctgaccccatggatgctgaagattggctgcgcactgtggagcgggagttgcataccgctcagtgcgatgacagggagaaagttctgtatggtccccgtctgttgagaggagcagcccagtcatggtgggagtcttacctcgccacccatgccaaccccgacaccatcacctgggaagaattcagaggtagctttcgtcagtaccatgtgcctgcaggtctgatgacagtgaagaaggaggagttcctggcccttaagcaagggtcatcgtctgtcagtgagtatcgggacaggtttctgcagttgtctcgctatgctcctgaagatgtcaacactgacgccaagcgacaataccgttttctgagaggcttggttgaccctctgcagtatcagctgatgaatcacaccttcccgacattccagcacctgattgacagagcaatcatgacagaaaggaagcgtaaggagatggaagatcgtaagcgcaagatcagtggaccccagcctggaagcagcagccgccctcgtttctcaggcaatcaacctcagcagttcaggcagaaccagcgtccacctcagcagcatcagcagcgtcagcagtaccagcagtttcaaaggcagtaccctcagaatcagtaccagaaccgtcagagcaatcagtcaggaggtcagtttcagaagcagaatcagcaagcacctcgtcttcctgccccagcaaatcagcaaaacagtcaggcagcaccagctcaggttggaaacagggcgtgtttccactgtggagagcaaggccattgggtgatgcaatgtccgaagaaggcagcccagcagcagttaggccccaatgccccaggaaagcagaatcgctataatcatggaagattgaatcacttggaggctgaagcagttcaggagacccccggcatgatagtaggtatgttcccagtcgactcccatattgcagaagtgttatttgatactggagcaacacattctttcattactgcatcatgggtagaagcacataatcttccaactactaccatgttaacccccattcaaattgactcagccggtggtagaattcgagctgatagcatttgtttaaatgtaagtgtggaaataagggggatagcgtttcccgccaaccttatagtaatgggtactcagggaatagatgtcatcctagggatgaattggttagataagtatcaggctgttatcagttgtgataaaaggacaatcaagttggtgtccccactaggagaggaagtggtgaccgagttagtcccacctgagccaaagaaaggaagttgttatcagatggctgttgatagcagtgaagcagacccaattgagagtatcaaggttgtgtctgaattcccagatgtgtttccaaaggatttaccgggtatgccaccagagcggaaagttgagtttgctatagagcttcttcctggaaccgcccccatctctaagagagcttacagaatatctggaccagagttggttgagcttaagaagcagattgatgagctgtcagagaaaggttacatccggccaagcacctcgccttgggccgcccctgtcttgtttgtggagaagaaagatggtactaaaaggatgtgtatcgattatcgagctttgaatgaagtcacgatcaagaacaagtatcctttgcccagaatagaagatctgttcgaccagttgagaggagccagtgtgttctccaagatcgatctaaggtcaggttatcatcagctcaggatccgaccttcggacattccgaagacggcattcattaccaagtatggtttatatgagttcacagtgatgtcttttggtttgaccaatgcgccagcgttctttatgaacttgatgaatagtgtattcatggattaccttgataagtttgtggtggtattcattgatgacattctggtttattctcaaagcgaagaagagcacgcagatcatttgaggatggtgttgcagagattgcgagagcaccagttgtatgcaaagttgagcaaatgtgagttctggatcagtgaagtcctgttcttgggtcacataatcaacaaagaaggattggctgtggatccgaagaaagtggcagacattctaaactggaaagcgccaacggatgctcgaggaatcaagagcttcattggaatggccggatattatcggcgattcattgaagggttttcgaagattgcgaaaccaatgacagcgttgctaggcaacaaagttgagttcaagtggacccagaaatgtcaagaggcctttgaagcgctgaaagagaagttgacaacagcgcctgtcctagtcttgcctgatgtgcacaagcccttctcggtgtattgcgatgcttgttacacaggtttgggatgtgtgttgatgcaagagggaagagttgtggcttactcgtcccgacagctgaaggttcatgagaagaattacccaatccatgatctagagttggcagcagtggttcacgcactgaagacatggaggcactatctgtatggacagaaatgcgatgtttacacagatcacaagagtctgaagtacatattcactcagtcagagttgaacatgaggcaacgaagatggttagaattgatcaaagactatgagttggagattcattaccatccaggaaaagcaaacgtagtggcagatgctctgagcagaaagagtcaagtcaatctgatggttgctcgcccgatgccttatgagttggccaaggagtttgacaggttgagtctcgggtttctgaacaattcgcgaggagtcacagttgaattggaacctaccttggagcgcgaaatcaaagaagcgcagaaaaatgatgaaaagatcagtgagattcggcgattgattctagatggcagaggcaaagattttcgagaagatgcagaaggtgtggtatggttcaaagaccgcttgtgtgttcccaatgtccagtctattcgggagttgattcttaaggaagctcatgagacagcttattcgattcaccctggcagtgagaagatgtatcaggatctgaagaagaaattctggtggtacggaatgaaaagagaaatcgcagagcatgtggctatgtgcgatagttgtcgaagaattaaggcagaacaccagagacctgctggattgttgcaaccgttgcagatccctcagtggaaatgggatgaaattggtatggatttcatagtcggattgcctcgcactcgagccggctacgattccatttgggtagtagtggaccgtttgaccaaatcagcccacttcatacctgtcaagaccaactacaacagtgcagtattggcagaattgtatatgtctcggatcgtctgtcttcatggtgtgccaaagaagatagtgtcagacagaggaacgcagttcacctctcatttctggcagcagttgcatgaagccttgggcacgcatctgaatttcagttcagcttatcacccgcagacagatggtcagactgaaagaaccaatcaaattcttgaagatatgttgagagcctgtgcgttgcaagatcagtccggatgggacaagcgattgccttatgcagagttttcctataacaacagttatcaggccagtttgaagatgtcaccgtttcaagcgctgtatggaaggagttgcagaactccgttgcaatgggatcagcctggagagaagcaggtgtttgggccagatattttgcttgaagccgaagagaacatcaagatggtccgagagaatctgaagatagcgcaatcgaggcagcgaagctatgcagacacaagaagaagagagctgagttttgaagtcggagattttgtctatctgaaagtgtcaccgatcagaggagtcagaagattcggagtgaaaggcaagctggcaccccgctacattggtccgtatcaaattctctcaaagcgtggagaagtggcttatcagctcagcctgccagagaatttgtctgctgtgcatgatgtctttcatgtgtctcaattgaagaagtgtttgcgtgtgccagaagagcagttgccagtggaaggtcttgaagtccaggaggacttgacctatattgagaagccagctcagatccttgaggttgcagatagagtcacccgaaggaagaccatcagaatgtgcaaagtcagatggaatcaccactctgaagaagaagcaacctgggagcgtgaagatgatctgatggccaagtacccggagctctttgctagccagccctga

SEQ ID NO: 5212 - DNA, 4479 bp, Zea mays
  Clone ID: TF_ZM4888.C3.o2.fg
atgtcgattgagcagatgtttctgatgcagactcaggcagttcaagccatcggtcagactttggccgccattcagcagcagcagcagcagcagcagcaagcaccaccccagcctcagatgcctcaggtgcctagagataagcgtgctgaattcatgagaggtcatccaccaacgttcgctcattcttctgaccccatggatgctgaagattggctgcgcactgtggagcgggagttgcataccgctcagtgcgatgacagggagaaagttctgtatggtccccgtctgttgagaggagcagcccagtcatggtgggagtcttacctcgccacccatgccaaccccgacaccatcacctgggaagaattcaggggtagctttcgtcagtaccatgtgcctgcaggtctgatgacagtgaagaaggaggagttcctggcccttaagcaagggtcatcgtctgtcagtgagtatcgagacaggtttctgcaattgtctcgctatgctcctgaagatgtcaacaccgacgccaagcgacagtaccgtttcctgagaggcttggttgaccctctgcagtatcagctgatgaatcacaccttcccgacattccagcacctgattgacagagcaatcatgacagaaaggaagcgcaaggagatggaagatcgtaagcgcaagatcagtggaccgcagtctggaagcagcagtcgccctcgcttttcaggcaatcaacctcagcagttcaggcagaaccagcgtccacctcagcagcatcagcagcgtcagcagtatcagcagttccaaaggcagtaccctcagaatcagtaccagaaccgtcagagcaatcagtcaggaggtcagtttcagaagcagaatcagcaagcacctcgtcttcctgccccagcaaatcagcagaacagtcaggcagcaccagctcaggttggaaacagggcatgtttccactgtggagagcaaggccattgggtgatgcaatgtccaaagaaggcagcccagcagcagtcaggccccaatgccccagcaaagcagaatgtgcctcagcctggagcaggcaatcgctctcagcagcgctataatcatggaagattgaatcacttggaagctgaagcagttcaggagacccccgacatgacagtaggtatgttcccagttgactcccatattgcagaagtgttatttgatactggagcaacacattctttcattactgcatcatgggtagaagcacataaacttccaataactaccatgtcaacccccattcaaattgattcagccggtggtagaattcgagccgatagcatttgtttgaatataagtgtgaaaataagggggatagcgtttcccgccaaccttatagtaatgggtactcagggaatagatgtcatcctagggatgaattggctagataagtaccaggcagttatcagttgtgataaaaggacaatcaagttagtgtccccactaggagaggaagtggtgactgagttagtcccgcctgagccaaagaaaggaagttgttatcagatgactgtcgatagcagtgaagcagacccgattgagagtatcaaggttgtgtccgaattcccagatgtgtttccaaaggatttaccgggtatgccaccagagcggaaagttgaatttgccatagagcttcttcctggaaccgcccctatcttcaagagagcttacagaatatctggaccagagttggatgagcttaagaagcagattgatgaactgtcagaaaaaggttacatccggccaagcacctcgccttgggccgcccctgtcttgtttgtggagaagaaagatggtactaagaggatgtgcatcgattaccgagctttgaatgaagtcacgatcaagaacaagtatcctttgcccagaatagaagatctgttcgaccggttgagaggagccagtgtgttctccaagatcgatctgaggtcaggttatcatcagctcaggatccgaccttcggacattccgaagacggcattcattaccaagtatggtttatatgagttcacagtgatgtcttttggtttgaccaatgcgccagcattctttatgaacttgatgaacagtgtattcatggattaccttgataagtttgtggtggtattcattgatgatattctggtttattctcaaagtgaagaagagcatgcagatcatttgaggatggtattgcagagattgcgagagcaccagttgtatgcaaagttgagcaagtgtgagttctggatcagtgaagtcctgttcttgggtcacataatcaacaaggaaggattggctgtggatccgaagaaagtggcagacattctgaactggaaagcaccaacagatgctagaggaatcaagagcttcattggaatggccggatattatcggcgattcattgaagggttttcgaagattgcgaagccaatgacagcgttgctaggcaacaaggttgagttcaagtggacccagaaatgccaagaggcctttgaagcgctgaaagagaagttgacaacagcgcctgtcctagtcttgcctgatgtgcacaagcccttctcggtgtattgtgatgcttgttacacaggtttgggatgtgtgttgatgcaagagggaagagttgtggcttactcgtcccgacagctgaaggttcatgagaagaactacccaatccatgatctagagttggcagcagtggttcacgcactgaagacatggaggcactatctgtatggacagaaatgcgatgtttacacggaccacaagagtctgaagtacatattcactcagtcagaattgaacatgaggcaacgaagatggttagaattgatcaaagactatgagttggagattcattaccatccaggcaaagcaaacgtagtggcagatgctttgagcagaaagagtcaagtcaatctgatggtcgctcgtccgatgccttatgagttggccaaggaatttgacaggttgagtctcggatttctgaacaattcgcgaggagtcacagttgaattggaacctaccttggagcgcgaaatcaaagaagcgcagaaaaatgatgagaagatcagtgagattcggcgattgattctagatggcagaggcaaagactttcgagaagatgcagaaggtgtggtgtggttcaaagaccgcttgtgtgttcccaatgtccagtctattcgggagttgattcttaaggaagctcatgagacagcctattcgattcaccctggcagtgagaagatgtatcaggatctgaagaagaaattctggtggtacggaatgaaaagagaaatcgcagagcatgtggctatgtgcgatagttgtcgaagaattaaggcagaacaccagagaccagctggattgttgcaaccgttgcagatccctcagtggaaatgggatgaaattggtatggatttcatagtcggattgcctcgcactcgagccggctacgattccatttgggtagtagtggaccgcttgaccaagtcagcccacttcatacctgtcaagaccaactacaacagtgcagtattggcagaattgtatatgtctcggatcgtttgtcttcatggtgtgccaaagaagatagtgtcagacagaggaacgcagttcacctctcatttctggcagcagttgcatgaagccttgggcacgcatctgaatttcagttcagcttatcacccgcagacagatggccagaccgaaagaaccaatcaaattcttgaagatatgttgagagcatgtgcgttgcaagatcagtccggatgggacaagcgattgccttatgcggagttttcctataacaacagttaccaggccagtttgaagatgtcaccgtttcaagcgctgtatggaaggagttgcagaactccgttgcaatgggatcagcctggggaaaagcaagtgtttgggccagacattttgcttgaagccgaagagaacatcaagatggtccgagagaatctgaagatagcgcaatcaaggcagcgaagctatgcagacacaagaagaagagagctgagtttcgaagtcggagactttgtctatctgaaagtgtcaccgatcagaggagtcagaagattcggagtgaaaggcaagctagcaccccgctacattggtccgtatcagattcttgcaagacgtggagaagtggcctatcagctcagtctgccagagaatttgtctgctgtgcatgatgtctttcatgtgtctcagttgaagaagtgcttgcgtgtgccggaagagcagttgccagtggaaggtctggaagtccaggaggacttgacctacgttgagaagccagctcagatccttgagattgcagacagagtcacccgaaggaagaccgtcagaatgtgcaaagtcagatggagtcaccactctgaggaagaagcaacctgggagcgtgaagatgatctgaaggccaagtacccggagctctttgctagccagccctga

SEQ ID NO: 5213 - DNA, 4461 bp, Zea mays
  Clone ID: TF_ZM4897.C1.o18.fg
atgcaagatgctgcacggcgtgcgcttttgcactactgcttggttctcggtggggtagctgacggtcttgacctgaagtattacccccgctgtccatctggcagcataggaggcgtgattgtctcacctgtcggtgaggacaaccctaggttgaacagcacagtcaacctagccgctgtgctaaacacggagctggaccatgcattagacgagctgagtagggctcgtgctgagatcgccctgctgcgggctgagcgcgcggaacgtcgtcacctggacgatggttcccccgctcccgtcgggactcagcacccgtaccgctcacctcgatgtcagagaacaggcgcagaggaggaaggcgtgctcagcaggagcgagccgctcagcaggaagaggtgtcccagcaacagcatctgccgccccccgcccccgatgtcgatcgagcagatgtttctgatgcagactcaggcagtgcaagccatcggtcagactctggccgccattcagcagcagcagcagcaacagcagcaggccccacctcagcctcagatgcctcagatgcccacagacaagcgtgctgaattcatgagaggtcacccaccaacgtttgctcactcttctgaccccatggatgctgaagactggctgcgcactgtggagcgggagttgcacaccgctcagtgtgatgatagggagaaagtcttgtatggtccccgtctgttgagagaagcagctcagtcatggtgggagtcttaccttgccacccatgcccacctcgacgccatcacctgggaagagttcagaggtagctttcgtcagtaccatgttccggcaggtctgatgacagtgaagaaggaggagttcctggccctcaagcaagggccgttgtctgtcagtgagtaccgggacaggtttctgcagttgtctcgctatgctcctgaagatgtcaacaccgacgccaagcggcagtaccgtttcctgagaggcttggttgaccctctacaagcaatcatgacagagaggaagcgtaaggagatggaagatcgtaagcgcaagatcagtggaccccagcctggaagcaccaatcgtcctcgtttctcaggcaatcaacctcagcagttcaggcagaaccagcgtccacctcagcagcatcagcagttccaaaggcagtatcctcagcatcagtaccagaaccatcagagcaatcagtcaggaggtcagcttcagaggcagaatcagcaggcacctcgtctcccttccccagcaaaccagcagaacaatcaggcagcaccagctcaggttggaaatagagcatgtttccactgtggagagcaaggccactgggtgatgcaatgtccgaagaaggcagcccagcagcagtcaggcccaatgcccagcaaagcagaatgtgtctcagcctggaaagtgttatttgatactggagcaacgcattctttcattactgcatcatgggtacaagcacataatcttccaattactaccatgtcaacccccattcaaattgactcagccggtggtagaatccgagccgatagcatttgtttgaatataagcgtggaaataagggggatagcgtttcccgccaaccttatagtaatgggtactcagggaatagatgtcatcctagggatgaattggctagataagtatcaggcagttatcagttgtgataagaggacaatcaagttggtgtccccactaggagaggaagtggtgaccgagttagtcccgtctgagccaaagaaaggaagttgttatcaaatagctgtcgatagcagtgaagcagacccaattgagagtatcgaggttgtgtccgagttcccagatgtgtttccaaaggacttaccgggtatgccaccagagcggaaagttgagtttgccatagagcttcttcctggaaccgcccccatctttaagagagcttacagaatatccggaccagagttggttgaacttaaggagcagattgatgagctgtcagagaaaggttacatccggccaagcacctcgccttgggccgcccctgtcctatttgtggagaagaaagatggcactaagaggatgtgtatcgattatcgagctctgaatgaagtcacgatcaagaacaagtaccctttgcccagaatagaggatctgttcaaccagttgagaggagccagtgtgttctccaagattgatctgaggtcaggttatcatcagctcaggattcgaccttcagacattccgaagacagcattcattaccaagtatggtttgtatgagttcactgtgatgtcttttggtttgaccaatgcgccagcctttttcatgaatctgatgaacagtgtattcatggactatctcgataagtttgtggtggtattcattgatgacattttgatttattctcaaagcgaagaagagcacgcagatcatttgaagatggtgttgcagagattgcgagagcaccagctgtatgcaaagttgagcaaatgcgaattctggatcaatgaagtcctgttcttgggtcacataatcaacaaggaaggattggctgtggatccgaagaaagtggcagacattctgaactggaaagcgccaacagatgctcgaggaataaagagtttcattggaatggccggatattatcggcgattcattgaaggggttttcgaagattgcgaaaccaacaacaaggttgagttcaagtggacccagaaatgtcaagaggccttcgaagcactgaaagagaagttgacaacagcgcctgtcctagtcttgcctgatgtgcacaagcccttctcggtgtattgcgatgcttgttacacaggtttgggatgtgtgttgatgcaagagggaagagttgtggcttactcgtcccgacagctgaaggttcatgagaagaattacccaatccacgatctagagttggcagtagtggttcatgcactgaagacatggaggcactacatgtatggacagaaatgcgatgtttacacagaccacaagagtctgaagtacatattcactcagtcagagttgaatatgaggcagcgaagatggttagagttgatcaaagattatgagttggagattcattaccatccgggcaaagcgaatgtagtggcagatgctttgagcaggaagagtcaagtcaatctgatggtcgctcgtccgatgccttatgagttggccaaagagttcgacaagttaagtctcggatttctgaacaattcgcgaggagtcacagttgagttggaacctaccttggagcgagaaatcaaagaagcgcagaagaatgatgagaagatcagtgagatccggcgactgattctagatggcagaggcaaagattttcgagaagatgcagagggtgtgatatggttcaaagaccgcttgtgtgttcccaatgtccaatccattcgggagttgattctcaaggaagctcatgagacagcttattcgattcaccctggtagtgagaagatgtatcaggatctgaagaagaaattctggtggtacggactgaagagggaaatcgccgagcatgtggctatgtgcgatagttgtcgaagaattaaggcagagcaccagagaccagctggattgttgcaaccgttgcagatccctcagtggaaatgggacgaaatcggtatggatttcatagtcggattgcctcgcactcgagccggctacgattccatttgggtggtagtggaccgcttgaccaagtcagcccacttcatacctgtcaagaccaactatagcagtgcagtattggcagagttgtatatgtctcggatcgtttgccttcatggtgtgccaaagaagatagtgtcagacagaggaacacagttcacctctcatttctggcagcagttgcatgaagccttgggcacacatctaaattttagttcagcttatcatccgcagatagatggccagaccgaaagaaccaatcaaattcttgaagatatgttgagagcctgtgcgttgcaagatcagtccggatgggacaagagattgccttatgcagagttttcctataacaacagctaccaggccagtttgaagatgtcaccatttcaggcgctctatgggaggagttgtagaactccgttgcaatgggatcagcctggagagaagcaagtgtttgggctagacattctacttgaagctgaagagaacatcaagatggtccgagagaatctgaagatagtgcaatcgagacagcgaagctatgcagacacaagaagaagagagctgagtttcgaagtcggagactttgtctatctgaaagtgtcaccgatcagaggagtcaggaggttcggagtcaaaggcaagctagcaccccgctacattggtccgtaccaaattctctcaaggcgtggagaagtggcctatcagctcagtctgccagagaatctgtccgcagtgcatgatgtttttcatgtgtcttag

SEQ ID NO: 5214 - DNA, 4116 bp, Zea mays
  Clone ID: TF_ZM4906.C4.o1.fg
atgtcagagaacaggcgcagaggaggaaggcgtgctcagcaggagcaagccgctcaacaggaagaggtgcctcagcaacaacaactgccgcccctgcccccgatgtccatcgagcagatgtttctgatgcagactcaggcagtccaagccatcggtcagactctggccaccattcagcagcagcagcagcaggcaccacctcagcctcagatgcccagggataagcgtgctgaattcatgagaggtctgatgacagtgaagaaggaggagttcttggccctcaagcaagggtcatcgtctgtcagtgagtaccgagacaggtttctgcagttgtctcgctatgctcttgaagatgtcaacaccgacgccaagcgacagtaccgtttcctgagaggcttggttgatcctctgcagtatcaactgatgaatcataccttctcgacattccagcacttgattgacagggcaatcatgacagagaggaagcgtaaggagatggaggatcgcaagcgcaagatcagtggaccccagcctggaagcagcattcgtcctcgtttctcaggcaatcaatctcagcagttcaggcagaaccagcgtccacctcagcagcatcagcagttccaaaggcagtatcctcagcaccagtatcagaatcgtcagaacaaccagtcaagaggaggccagtttcagaggcagaatcagcagacacttcgtcttcctgccctagcagcccagcagaacagtcaggcagcaccagctcaggttggaaatagagcatgtttccactgtggagagcaaggccactgggtgatgcaatgtccgaagaagacggcccagcagcagtcaggccccaatgccccagcaaagcagaatgtgtctcagccaggagcaggcaaccgctctcagccacgctataatcatggaagactgaatcacttggaggctgaagcaattcaggagacccccgacatgatagtaggtatgttcccagtcgactcccatattgcagaagtgttatttgatgctggagcaacacattctttcattactgcatcatgggtagaagcacataatcttccaattactaccatgtcaacccccattcaaattgactcagccggtggtagaattcgagccaatagcatttgtttgaatgtatgtgtggaaataagggggatagcgtttcccgccaacctcatagtaatgggtactcagggaatagatgtcatcctagggatgaattggctagataagtatcaggcagttatcagttgtgataagaggacaatcaagttggtgtccccactaggagacgaagtggtgaccgagttagtcccgcctgagccaaagaaaggaagttgttatcagatggttgtcgatagcagtgaagcagacccaattgagagcatcaagattgtgtctgagtttccagatgtgtttccaaaggacttaccaggtatgccaccagagcggaaagttgaatttgctatagagcttcttcctggaaccgcccccatctttaagagagctttcagaatatccgtaccagagttggttgaacttaagaagccgattgatgagctatcagagaaaggttacattcggccaagcacctcgccttgggccgcccctgtcctatttgtggaaaagaaagatggcaccaaaaggatgtgtatcgattatcgagctctgaatgaagtcacgatcaagaacaagtaccctttgcccagaatagaagatctgttcgaccagttgagaggagccagtgtgttctccaagattgatctgaggtcaggttatcatcagctcaggatccgaccttcggacattccgaagacggcattcattaccaagtatggtttgtatgagttcactgtgatgtcttttggtttaaccaatgcaccagccttcttcatgaatctgatgaacagcgtattcatggattatcttgacaagtttgtggtggtattcattgatgacatcctgatatactctcaaagcgaagaagagcatgcaagtcatttgaggatgaaagtggcagacattctgaactggaaagcgccaacagatgctcaaggaatcaagagtttcattggaatggccggatattatcggcgattcattgaagggttttcgaagattgcaaaaccaatgacagcgttgctaggcaacaaagttgagtttaagtggacccggaaatgtcaagaggcctttgaagcgctgaaagaaaagttgactacaacgcccatcttagtcttgcctgatgtgcacaagcccttctcggtgtattgcgatgcttgttacactggtttgggatgcgtgttgatgcaagagggaagagttgtggcttactcgtcccgacagctgaaagttcatgagaagaattacccaatccatgacctagagttggcagcagtggttcacgcactgaagacatggaggcactacctgtatggacagaaatgtgatgtttacatagaccacaagagtctgaagtacatattcactcagtcagagttgaatatgaggcaacgaagatggttagagttaattaaagactatgagttggagattcactaccatccaggtaaagcgaacgtagtggcagatgcgttgagcaggaagagtcagatcaatctgatggtcgctcgtccgatgccttatgagttggccaaggagttcgacaggttgagtctcggatttcttaacaacacgcgtggagtcacagttgagttggaacctaccctagagtgggaaatcaaagaagcgcagaagaacgatgagaagatcagtgagatccggcgactgattctagacggcagaggcaaagactttcgagaagatgcagaaggtgtgatatggttcaaagaccgcctatgtgttcccaatgtccagtctattcgggagttgatcctcaaggaagctcatgagacagcttattcgattcaccccggaagtgagaagatgtatcaggatctgaagaagaaattctggtggtacggaatgaagagggaaatcgcagagcatgtggctatgtgcgatagttgtcgaaggatcaaggcagagcaccagagaccagctggattgttgcagccgttgcaaatccctcagtggaaatgggatgaaatcggtatggatttcatagtcggattgcctcgcattcgagccggctacgattctatttgggtagtggtggaccgcttgaccaagtcagcccacttcatacctgtcaagaccaattacagcagtgcagtattggcagagctgtatatgtctcggatcgtctgtcttcacggtgtgccaaagaagatagtgtcagaccgaggaacgcagttcacctctcatttctggcagcaattgcatgaagccttgggcacacatctgaatttcagttcagcgtatcatccgcagacagatggtcagactgaaaggaccaatcaaattcttgaagacatgttgagagcctgtgcgttgccagatcagtccggatgggacaagagattgccttatgcagagttttcctataacaacagttaccaggccagtttgaagatgtcaccatttcaggcgctttatggaaggagttgtagaactccgttgcaatgggatcagcctggagaaaagcaagtgttcgggccagacattctgcttgaagccgaagagaacatcaagatggtccgagagaatctgaagatagcgcaatcaaggcagcgaagttatgcagacacaaggagaagagagctgagtttcgaagtcggagactttgtctatctgaaagtgtcaccgatcagtggagtcagaaggttcggagtcaaaggcaagctagcaccccgctacatcggtccgtatcagattctcgcaaggcgtggagaattgaagaagtgcttgcgtgtgccggaagagcagttgccagtggaaggtcttgaagtccaggaggacttgacctacacagagaaaccagcgcaaatccttgagattgcagacatagtcacccgaaggaagaccatcagaatgtgcaaagtcaaatgggatcaccactctgaggaagaagcaacctgggagcgtgaagatgatctgatggctaaatacccagagctctttgctagccaaccctga

SEQ ID NO: 5215 - DNA, 882 bp, Zea mays
  Clone ID: TF_ZM4999.C2.o18.fg
atggatgctgaagactggctgcgcactatggagcgggagttgcataccgctcagtgtgatgacggggagaaagtcctgtatggtccccgtctgttgagaggagtagcccagtcatggtgggagtcttatctcgccacccatgccaacctcgacaccatcacctgggaagagttcagaggaagctttcgtcagtaccatgttcctgccggtctcatgacaatgaagaaggaggagttcctggccctcaagcaagggtcatcgtcttatcagctgatgaatcacaccttcccgacattccagcacctgattgacagagcaatcatgacagagaggaagcgtaaggagatggaggattgcaagcgcaaaatcagtggaccccagcctggaagcagcaatcgccctcgtttctcaagcaatcaacctcagcagttcaggcagaaccagcgtccacctcagcagcagcagtttcaaaggcagtttcctcagcatcagaatcgccagaacaatcagtcaggaggaggtcagttccagaggcagaatcagcaggcacctcgtcttcctgccccagcaaaccagcagaacagtcaggcagcaccagctcaggttggaaacagagcatgtttccactgtggagagcaaggccattgggtgatgcaatgtccgaagaaggcagcccagcagcagtcaggcccaaatgccccagcaaagcagagtgtgtctcagcctggagcaggcaactgctctcagccgcgctataaccatgggagactgaaccacttggaggctgaagcagttcaggagacccccggcatgatagtaggtatgtttctagtcgactcccatattgcagaagtgttatttgatactggagcaatgcattaa

SEQ ID NO: 5216 - DNA, 5091 bp, Zea mays
  Clone ID: TF_ZM5011.C3.o1.fg
atggagagtcatgatctccgggcagaatgggaatcacggcttgtgggtggttatgagatcgatgattctggttatgactatggtgctggtaagtggtattctttccgtttggaaaggatggctcgacttagacacactgcacgaaagtcagtcatccccttcttaccctcccgccttgctgagcgtccgcttcgccgtcccgtggccggacagtccagccacttggagagactacaccaccgcctgcgtgaggaccaggaacgtcgacgacaggagcagcagggctcttccttctcgctccagcaggagatagagtccgtgaggagctgctcccctgtgcttcctctggaggcgccccctgcaccaccactgggcgccccagcttctggagtagctgctggaggagacccagacgacggaggtggcgacgacagctcgagccacgacaccgacttctctgctaaccctgagccggaaggatgggttgctcgacccatcactcgcgacttctctgcattttggtttatctattatgttaatgaaatgtcagagaacaggcgcagaggaggaaggcgtgctcagcaggagcgagccgctcaacaggaggaggtgccccagcagcagcacctgccgcccccgcccccgatgtccatcgagcagatgtttctgatgcagactcaggcagttcaagccatcggtcagactttggccgccattcagcagcagcagcaggccccacctcagcctcagatgcctcagatgcccagagacaagcgtgctgaattcatgagaggtcatccaccaacgttcgctcattcttctgaccccatggatgctgaagactggctgcgcactgtggagcgggagttgcataccgctcagtgcgatgacagggagaaagttctgtatggtccccgtctgttgagaggagcagcccagtcatggtgggagtcttacctcgccacccatgcccaccctgacgccatcacttgggaagagttcagaggtagctttcgtcagtaccatgtccctgcaggtctgatgacagtgaagaaggaggagttcctggctctcaagcaagggccattgtctgtcagtgagtaccgggacaggtttctgcagttgtctcgctatgctcctgaagatgtcaacaccgacgccaagcgacagtaccgtttcctgagaggcttggttgaccctcttcagtatcagctgatgaatcacaccttcccgacattcaagcacctgattgacagagcaatcatgacagagagaaagcgtaaggagatggaagatcgtaaacgcaagatcagtggaccccagcctggaagcagcaatcgtcctcgtttctcaggcaatcaacctcagcagttcaggcagaaccagcgtccacctcagcatcagcagtttcaaaggcagtatcctcagcaccagtatcagaaccgtcagagcaatcagtcaggaggtcagtttcaaaggcagaatcagcaggcacctcatcttcctgccccagcaaaccagcagaacagtcaggcagcaccagctcaggttggaaacagagcatgtttccactgtggagagcaaggccactgggtgatgcaatgtccgaagaaggcagcccagcagcagtcaggccccaatgccccagcaaagcagaatgtgtctcagcctggatcaggcaaccgctctcagccgcgctataatcatggaagactgaaccacttggaggctgaagcagttcaggagacccccggcatgatagtaggtatgttcccagtcgactcccatattgcagaagtgttatttgatactggagcaacacattctttcattactgcatcatgggtagaagcacataatcttccaattactaccatgtcaacccccattcaaatcgattcagccggtggtagaattcgagccgatagcatttgtttgaatataagtgtgaaaataagggggatagcatttcccgccaaccttatagtaatgggtactcagggaatagatgtcatcctagggatgaattggctagataagtatcagacagttatcagttgtgataaaaggacaatcaagttggtgtccccactaggagaggaagtggtaaccgagttagtcccgcctgagccaaagaaaggaagttgttatcggatagctgttgatagcagtggagcagacccaattgagagtatcaaggttgtgtctgagttctcagatgtgtttccgaaggacttaccgggcatgccaccagagcggaaagttgaatttgccatagagcttcttcccggaaccgcccctatcttcaagagagcttacagaatatctggaccagagttggttgagcttaaggagcagattgatgagctgtcagagaaaggttacatccggccaagcacctcgccttgggccgcccctgtcctgtttgtggagaagaaagatggcaccaagaggatgtgtattgattatcgagctttgaatgaggtcacgatcaagaacaagtatcccttgcccagaattgaagatctgttcgaccagttgagaggagccagtgtgttctccaagattgatctgaggtcaggttatcaccagctcaggatccgaccttcggacattccgaagacggcattcatttccaagtatggtttgtacgagttcacagtgatgtcttttggtttgaccaatgcgccagcgtttttcatgaacttgatgaatagtgtattcatggattaccttgataagtttgtggtggtattcattgatgatattctggtttattctcaaagcgaagaagagcacgcagatcatttgaggatggtattgcagagattgcgagagcaccaactgtatgcaaagttgagcaagtgtgagttctggatcagtgaagtcctgttcttgggtcacataatcaacaaagaaggattggctgtggatccgaagaaagtggcagacattctgaactggaaagcgccaacagatgctagaggaatcaagagtttcattggaatggccggatattatcggcgattcattgaagggttttcgaagattgcgaaaccaatgacagcgttgctaggcaacaaagttgagttcaagtggacccagaaatgccaagaggcctttgaagcgctgaaagagaagttgactacagcgcctgtcctagtcttgcctgatgtacacaagcccttctcggtgtattgcgatgcttgttacacaggtttgggatgtgtgttgatgcaagagggaagagttgtggcttactcgtcccgacagttgaaggttcatgagaagaattacccaatccatgatctagagttggcagcagtggttcacgcactgaagacatggaggcactatctgtatggacagagatgcgatgtttacacagatcacaagagtctgaagtacatattcactcagtcagagttgaacatgaggcaacgaagatggttagagttgatcaaagactatgagttggagatccattaccatccaggcaaagcaaacgtagtggcagatgctttgagcagaaagagtcaagtcaatctgatggtcgctcgtccgatgccttatgagttggctaaggagtttgacaggttgagtctcagatttctgaataattcgcgaggagtcacagttgagttggaacctaccttggagcgcgaaatcaaagaagcgcagaagaatgatgagaaaatcagtgagattcggcgactgattctagatggcagaggcaaagattttcgagaggacgcagaaggcgtgatatggttcaaagaccgcttgtgtgttcccaatgtccagtctattcgggagttgattcttaaggaagctcatgagacagcctattcgattcaccctggcagtgagaagatgtatcaggatctgaagaagaaattctggtggtacggaatgaagagggaaattgcagagcatgtggctatgtgcgatagttgccgaagaattaaggcagagcaccagagacctgccggattgttgcaaccgttgcagatccctcagtggaaatgggatgaaattggtatggatttcatagtcggattgcctcgcactcgagccggctacgattccatctgggtagtagtggaccgtttgaccaagtcagcccacttcatacctgtcaagaccaactatagcagtgccgtattggcagagttgtatatgtctcggatcgtttgtcttcatggtgtgccaaagaagatagtgtcagacagaggaacgcagttcacctctcatttctggcagcagttgcatgaagctttgggcacgcatctgaatttcagttcagcttatcatccgcagacagatggccagaccgaaaggaccaatcaaattcttgaagatatgttgagagcctgtgcgttgcaagatcagtccggatgggacaagagattgccttatgcagagttttcctataacaatagttaccaggccagtttgaagatgtcaccatttcaggcgctctatggaaggagttgtagaactccgttgcaatgggatcagcctggagagaagcaagtgtttgggccagacattttgcttgaagccgaagagaacatcaagatggtccgagagaatctgaagatagcgcaatcgaggcagcgaagctatgcagacacaagaagaagagagctgagtttcgaagtcggagactttgtctatctgaaagtgtcaccgatcagaggagtcaagaggttcggagtcaaaggcaagctagcaccccgctacattggtccgtatcaggttcttgcaagacgtggagaagtggcttatcagctcagtttgcccgagaatttgtctgctgtgcatgatgtctttcatgtgtctcagttgaagaagtgcttgcgtgtgccagaagagcacttgccagtggaaggtcttgaagtccaggaggacttgacctacgttgagaagccagtgcagatccttgaggttgcagaccgagtcacccgaaggaagaccatcagaatgtgcaaagtcagatgggatcatcactctgaggaagaagcaacctgggagcgtgaagatgatctgatggccaaataccctgagctctttgctagccaaccctga

SEQ ID NO: 5217 - DNA, 4113 bp, Zea mays
  Clone ID: TF_ZM5011.C5.o1.fg
atgtcgatcgagcagatgtttctgatgcagactcaggcagttcaagccatcggtcagactttggccgccattcagctgcagcagcagcaacagcagcaggccccacctcagcctcagatgcctcagatgctcagagacaagcgtgctgaattcatgagaggtcatccaccaacgttcgctcattcttctgaccccatggatgttgaagactggctgcgcactgtggagcgggaattgcataccgctcagtgcgatgacagggagaaagtcttgtatggtccccgtctgttgagaggagcagcccaatcatggtgggagtcttacctcgccacccatgcccaccctgacgccatcacctgggaagagtttagaggaagctttcgtcagtaccatgttcctgcaggtctgatgatagtgaagaaggaggagttcctggctctcaagcaagggccattgtctgtcaatgagtaccgagataggtttctgcaattgtctcgctatgctcctgaagatgtcaacaccgacgctaagcgacagtaccgtttcctgagaggcttggttgatcctctgcagtaccaactgatgaatcacaccttcccgacattccagcacctgattgacagagcaatcatgacagagaggaagcgtaaggagatggaggattgtaagcgcaagatcagtggaccccagcctggaagtagcaatcgtcctcgtttctcaggcaatcaacctcagcagttcaggcagaaccagcgtccacctcagcagcatcagcagtttcaaaggcagtatcctcagcatcagtaccagaaccgtcagagcaatcagtcaggaggtcagtttcagaggcagaatcagcaagcacctcgtcttcctgccccagcaaaccagcagaacagtcaagcagcaccagctcaagttggaaacagagcatgtttccactgtggagagcaaggccactgggtgatgcaatgtccgaagaaggcagcccagcagcagtcaggccccaatgccccagcgaagcagaatgtgcctcagcctggagcaggcaaccgctctcagccgcgttacaatcatggaaggctgaaccacttggaggctgaagcagttcaggaaacccccgacatgatagtaggtatgttcccagtcgactcccatattgcagaagtgttatttgatactggagcaacacattctttcattactgcgtcatgggtagaagcacataatcttccaattactaccatgtcaacccccattcaaattgactcagccggtggtagaattcgagccgatagcatttgtttgaatataagtgtggaaataagggggatagcgtttgccgccaaccttatagtaatgggtactcagggaatagatgtcatcctagggatgaattggctagataagtaccaggcagttatcagttgtgataaaaggaccatcaagttggtgtccccactaggagaggaagtggtgaccgagttagtcccgcctgagccaaagaaaggaagttgttatcagctagctgttgatagcagtgaagcagacccaattgagagtatcagggttgtgtccgagttcccagatgtgtttccaaaggacttaccgggtatgccaccagagcggaaagttgagtttgccatagagcttcttcctggaaccgcccctatcttcaagagagcttacagaatatccggaccagagttggttgagctgaaggagcagattgatgagctgtcagagaaaggttacatccggccaagcacctcgccttgggccgcccctgtcctatttgtggagaagaaagatggcaccaagaggatgtgtattgattatcgagctttgaatgaggtcacgatcaagaacaagtatcccttgcccagaatagaagatctgttcgaccagttgagaggagccagtgtgttctccaagattgatctgaggtcaggttaccatcagctcaggatccgaccttcggacattccgaagacggcattcattaccaagtatgggttgtatgagttcacagtgatgtcttttggtttgaccaatgcaccagcgttcttcatgaactcgatgaacagtgtattcatggactaccttgataagtttgtggtggtattcattgatgacattctggtttattctcaaagcgaagaagagcacgcagatcatttgaagatggtattgcagagattgcgagagcaccagttgtatgcaaagttgagcaagtgtgagttctggatcagtgaagtcctgttcttgggtcacataatcaacaaagaaggattggctgtggatccgaaaaaagtggcagacattttgaactggaaagcgccaacagatgctagaggaatcaagagcttcattggaatggccggatactatcggcgattcattgaagggttttcgaagattgcgaaaccaatgacagcattgctaggcaacaaagttgagttcaattggacccagaaatgtcaagaggcctttgaagcgctgaaagagaagttgactacagcgcctgtcctagtcttgcctgatgtgcacaagcccttctcggtgtattgcgacgcttgttacataggtttgggatgtgtgttgatgcaggagggaagagttgtggcttactcgtcccgacagctgaaggttcatgagaagaattacccaatccatgatctagagttggcagcagtgaaatgcgatgtttacacagaccacaagagtctgaagtacatattcactcagtcagagttgaacatgaggcaacgaagatggttagagttgattaaagattatgagttggagattcattaccatccaggcaaagcaaacgtagtggcagatgctttgagcagaaagagtcaagtcaatctgatggtcgctcgtccgatgccttatgagttggccaaggagtttgacaggttgagtctcggatttctgaacaattcgcgaggagtcacagttgagttggaacctaccttagagcgcgaaatcaaagaagcgcagaagaatgatgagaaaatcagtgagatccggcgactgattctagatggtagaggcaaagattttcgagaagatgcagaaggcgtgatatggttcaaagaccgcttgtgtgttcccaatgtccagtccattcgggagttgattctcaaggaagctcatgagacgtcctattcgattcaccctggcagtgagaagatgtatcaggatctgaaaaagaaattctggtggtacggaatgaagagggaaatcgcagagcatgtggctatgtgcgatagttgccgaagaattaaggcagagcaccagagacctgctggattgttgcaaccgttgcagatccctcagtggaaatgggatgaaattggtatggatttcatagtcggattgcctcgcactcgagccggctacgattccatttgggtagtagtggaccgcttgaccaagtcagcccacttcatacctgtcaagaccaactatagcagtgtcgtattggcagaattgtatatgtctcggatcgtttgtcttcatggtgtgccaaagaagatagtgtcagacagaggaacgcagttcacctctcatttctggtcagcttatcatctgcagacagatggccagaccgaaaggaccaaccaaattcttgaagatatgttgagagcctgtgcgttgcaagatcagtccggatgggataagagattgccttatgcagagttttcctataacaacagttaccaggccagtttgaagatgtcaccatttcaggcgctctatggaaggagttgtagaactccgttgcaatgggatcagcctggagaaaagcaagtgtttgggccagacattttgcttgaagccgaagagaacatcaagatgttgaagaagtgcttgcgtgtgccagaagagcagttgccagtggaaggtcttgaagtccaggaggacttgacctacgttgagaagccagtgcagatccttgaggttgcagacagagtcacccgaaggaagaccattagaatgtgcaaagttagatggaatcatcactctgaggaagaagcaacctgggagcgtgaagatgatctgatggccaagtaccctgagctctttgctagccaaccctga

SEQ ID NO: 5218 - DNA, 4506 bp, Zea mays
  Clone ID: TF_ZM5030.C4.o1.fg
atgctcatctgttcagtgctgttgaagaattctattctctttccttatgctgcaagatttgccagatcagttctgatgtgtggttgcattctgcagatgtcagagaacaggcgcagaggaggaaggcgtgctcagcaggagcgagccgctcaacaggaggaggtgcctcagcagcagcacctgccacccccgcccccgatgtccatcgaacagatgtttctgatgcagactcaggcagttcaagccatcggtcagactttggccgccattcagcagcagcaacaacagcaggctccacctcagcctcagatgcctcagatgccaagagacaagcgtgctgaattcatgagaggtcatccaccaacgttcgctcattcttctgaccctatggatgccgaagattggctgcgcactgtggagcgggagttgcataccgctcagtgcgatgacagggagaaagttctgtatggtccccgtctgttgagaggagcagcccagtcatggtgggagtcttacctcgccacccatgcccaccctgacgccatcacttgggaagagttcagaggtagctttcgtcagtaccatgtccctgcaggtctgatgacagtgaagaaggaggaattcctggccctcaagcaagggcccttgtctgtcagtgagtaccgggacaagtttctgcaattgtctcgctatgctcctgaagatgtcaacaccgacgccaagcgacagtaccgttttctgagaggcttggttgaccccctgcagtaccaactgatgaatcataccttcccgacattccagcacctgattgacagagcaatcatgacggagagaaagcgcaaggagatggaagatcgtaagcgcaagatcagtggaccccagcctggaagcagcagccgtcctcgtttctcaggcaatcaacctcagcagttcaggcagaaccagcgtccacctcagcagcatcagcagtttcaaaggcagtaccctcagaatcagtaccagaaccgtcagagcaatcagtcaggaggtcagtttcaaaggcagaatcagcagccacctcgccttcctgccccagcaaatcagcagaacagtcaggcagcaccagctcaggttggaaacagagcatgtttccactgtggagaacaaggccactgggtgatgcaatgtccgaagaaggcagcccagcagcagtcaggccccaatgccccagccaagcagaatgtgcctcagcctggagcaggcaatcgctctcagccgcgctataatcatggaagattgaaccacttggaggctgaagcagttcaggagacccccggcatgatagtaggtatgttcccagtcgactcccatattgcagaagtgttatttgatactggagcaacgcattctttcattactgcatcatgggtagaagcacataatcttccaattactaccatgtcaacccccattcaaattgactcatccggtggtagaattcgagccgatagcatttgtttgaatataagtgtgaaaataagggggatagcatttcccgccaaccttatagtaatgggtactcagggaatagatgtcatcctagggatgaattggctagataagtatcaggcagttatcagttgtgataaaaggacaatcgagttggtgtccccactaggagaggaagtggtgaccgagttagtcccgcccgagccaaagaaaggaagttgttatcagatggctgtcgatagcagtgaagcagacccaattgagagtatcaaggttgtgtccgagttcccagatgtgtttccaaaggatttaccgggtatgccaccagagcggaaagttgagtttgccatagagcttcttcctggaaccgcccctatctttaagagagcttacagaatatctggaccagagttggatgaacttaagaagcaaattgatgagctgtcagagaaaggttacattcggccaagcacctcgccttgggccgcccctgtcctgtttgtggagaagaaagatggcaccaagaggatgtgcattgattaccgagctttgaatgaggtcacgatcaagaacaagtatcccttgcccagaatagaagatctgttcgaccagttgagaggagccagtgtgttctccaagattgatctgaggtcaggttatcatcagctcagaatccgaccttcggacattccgaagacagcattcatttccaagtatggtttgtacgagttcacagtgatgtcttttggtttgaccaatgcgccagcgttcttcatgaacttgatgaacagtgtattcatggattatcttgataagtttgtggtggtattcattgatgacattctgatttattctcaaagcgaagaagagcacgcagatcatttgaggatggtgttgcagagattgcgagagcaccggttgtatgcaaagttgagcaagtgtgagttctggatcagtgaagtcctgttcttgggtcacataatcaacaaagaaggattgtctgtggatccgaagaaagtggcagacattttgaactggaaagcgccaacagatgctagaggaatcaagagtttcattggaatggccggatattatcggcgattcattgaagggttttcgaagattgcgaaaccaatgacagcgttgctaggcaacaaggttgagttcaagtggacccagagatgtcaagaggccttcgaagcgctgaaagagaagttgactacaacgcctgtcctagtcttgcctgatgtgcacaagcccttctcggtgtattgcgatgcttgttacacaggtttgggatgtgtgttgatgcaagagggaagagttgtggcttactcgtcccgacagttgaaggttcatgagaagaactacccaatccatgatctagagttggcagcagtggttcacgcactgaagtcatggaggcactatttgtatgggcagaaatgcgatgtttacacagaccacaagagtctgaagtacatattcactcagtcagagttgaacatgaggcagcgaagatggttagagttgatcaaagactatgagttggagattcattaccatccaggcaaagcaaacgtagtggcagatgctttgagcagaaagagtcaagtcaatctgatggtcgctcgtccgatgccttatgagttggccaaagagtttgacaggttgagtctcggatttctgaacaattcgcgaggagtcacagttgagttggaacctaccttggagcgcgaaatcaaagaagcgcagaagaatgatgagaaaatcagtgagatccggcgattgattctagaaggcaaaggcaaagattttcgagaagatgcagaaggcgtgatatggttcaaagaccgcttgtgtgttcccaatgtccagcccattcgggagttgattcttaaggaagctcatgagatagcttattcgattcaccctggcagtgagaagatgtatcaggatctgaagaagaaattctggtggtacggaatgaagagggaaatcgcagagcatgtggctagatcccttagtggaaatgggatgaaatcgtcagcccacttcatacctgtcaagaccaactacaacagtgcagtattggcagaattgtatatgtctcggatcgtttgtcttcatggtgtgccaaagaagatagtgtcagacagaggaacgcagttcacctctcatttctggcagcagttgcatgaagctttgggcacacatctgaattttagttcagcttatcatccgcagacagatggccagaccgaaaggaccaatcaaattcgtgaagatatgttgagagcctgtgcgttgcaagatcagtccggatgggataagagattgccttatgcagagttttcctataacaacagttaccaggccagtttgaagatgtcaccatttcaggcgctctatggaaggagttgtagaactccgttgcaatgggatcagcctggagagaagcaagtgtttgggccagacattctgcttgaagccgaagagaacatcaagatggtccgagagaatctgaagatagcgcaatcgaggcagcgaagctatgcagacacaagaagaagagagctgagttttgaagtcggagactttgtctatctgaaagtgtcaccgatcagaggagtcagaagattcggagtgaaaggcaagctagcaccccgctacattggtccgtatcagattcttgcaagacgaggagaagtggcttatcagctcagtttgcccgagaatttgtctgctgtgcataatgtctttcatgtgtctcagttgaagaagtgcttgcgtgtgccagaagagcagttgccagtggaaggtctggaagtccaggaggacttgacctacgttgagaagccagtgcaaatccttgagattgcagatagagtcacccgaaggaagaccatcagaatgtgcaaagtcagatggaatcaccactctgaggaagaagcaacctgggagcgtgaagatgatttgatggccaagtacccagagctctttgctagccagccctga

SEQ ID NO: 5219 - DNA, 4551 bp, Zea mays
  Clone ID: TF_ZM5033.C3.o1.fg
atgtcagagaacaggcgcagaggaggaaggcgtgctcagcaggagcgagccgctcaacaggatgaggtgccccagcagcagcacctgccgcccccgcccccgatgtccatcgagcagatgtttctgatgcagactcaggcagttcaagctatcggtcagactttggtcgccattcagcagcagcagcaggccccacctcagcctcagatgcctcagatgcccagagacaagcgtgctgaattcatgagaggtcatccaccaacgttcgctcattcttctgaccccatggatgctgaagactggctgcgcactgtggagcgggagttgcataccgctcagtgtgatgacagggagaaggtcctgtatggtccccgtctgttgagaggagcagcccagtcatggtgggagtcttacctcgccacccatgcccatcctgacgccatcacctgggaagagttcagagggagctttcgtcagtaccatgttcctgcaggtctgatgactgtgaagaaggaggagttcctggctctcaagcaagggccattgtctgtcagtgagtaccgggacaggtttctgcaattgtctcgctatgctcctgaagatgtcaacaccgacgccaagcgacagtaccgtttcctgagaggcttggttgaccctctgcagtaccaactgatgaatcacaccttcccgacattccagcacctgattgacagggcaatcatgacagaaaggaagcgtaaggagatggaggatcgtaagcgcaagatcagtggaccccagcctggaagcagcaatcgtcctcgtttctcaggcaatcaacctcagcagttcaggcagaaccagcgtccacctcagcagtatcagcagtttcaaaggcagtatcctcagcatcagtaccagaaccgtcagagcaatcagtcaggaggtcagtttcagaggcagaatccacaagcacctcgtcttcctgccccagcaaaccagcagaacaatcaggcagcaccagctcaggttggaaacagagcatgtttccactgtggagagcaaggccactgggtgatgcaatgtccgaagaaggcagcccagcagcagtcaggcctcaatgccccagcaaagcagaatgtgcctcagcctggatcaggcaatcgctctcagccgcgctataatcatggaaggctgaaccacttggaggctgaagcagttcaggagacccccggcatgatagtaggtatgttcccagtcgactcccatattgcaaaagtgttatttgatactggagcaacgcattctttcattactacatcatgggtagaagcacataatcttccaattactaccatgtcaacccccattcaaattgactcagccggtggtagaattcgagccgatagcatttgtttgaatataagtgtggaaataagggggatagtgtttcccgccaaccttatagtaatgggtactcagggaatagatgtcatcctagggatgaattggctagataagtatcaggcagttatcagttgtgataagaggacaatcaagttggtgttcccactaggagaggaagtggtgaccgagttagtcccgcctgagccaaagaaaggaagttgttatcagatagctgttgatagcagggaagcagacccaattgagaggatcaaggttgtgtccgagttcccagatgtgtttccaaaggacttaccgggtatgccaccagagcggaaagttgagtttgccatagagcttcttcctggaaccgcccctatcttcaagagagcttacagaatatccggaccagagttggttgagcttaagaagcagattgatgagctgtcagagaaaggttacatccggccaagcacctcgccttgggccgcccctgtcctatttgtggagaagaaagatggcaccaagaggatgtgtattgattatcgagctttgaatgaggtcacgatcaagaacaagtatcctttgcccagaattgaagatctgttcgaccagttgagaggagccagtgtgttctccaagattgatctgaggtcaggttatcatcagctcaggatccgaccttcggacattccgaagacggcattcatttccaagtatggtttgtatgagttcacagtgatgtcttttggtttgaccaatgcgccagcgttctttatgaacttgatgaacagtgtcttcatggattaccttgataagtttgtggtggtattcattgatgacattctgatttattctcaaagcgaagaagagcacgcagatcatttgaggatggtattgcagagattgcgagagcaccagttgtatgcaaagttgagcaagtgtgagttctggatcagtgaagtcctgttcttgggtcacataatcaacaaagaaggattggctgtggatccgaagaaagtggcagacattttgaactggaaagcgccaacagatgcccgaggaatcaagagtttcattggaatggccggatattatcggcgattcattgaagggttttcgaagattgcgaaaccaatgacagcgttgctaggcaacaaagttgagttcaagtggacccagaaatgccaagagacctttgaagcgttgaaagagaagttgactatagcgcctgtcctagtcttgcctgatgtgcacaagcccttctcggtgtattgtgatgcttgttacacaggtttgggatgtgtgttgatgcaagagggaagagttgtggcttactcgtcccgacagttgaaggttcatgagaagaattacccaatccatgatctagagttggcagcagtggttcacgcactgaagacatggaggcactatttgtatgggcagaaatgtgatgtttacacagaccacaagagtctgaagtacatattcactcagtcagagttgaacatgaggcagcgaagatggttagagttgataaaagactatgagttggagattcattaccatctaggcaaagcaaacgtagtggcagatgctttgagcagaaagagtcaaatcaatctgatggttgctcgtccgatgccttatgagttggccaaagagttcgacaagttgagtctcggattcctgaataattcgcgaggagtcacagttgagttggaacctaccttggaacgagaaatcaaagaagcgcagaagaatgatgagaagattagtgagatccggcgactgattctagatggcagaggcaaagattttcgagaagatgcagaaggcgtgatatggttcaaagaccgcttatgtgttcccaatgtccagtccattcgggaattgattcttaaggaagctcatgagacagcctattcgattcaccctggcagtgagaagatgtatcaggatctgaagaagaaattttggtggtacggaatgaagagggaaatcgcagagcatgtggctatgtgcgatagttgccgaagaattaaggcagagcaccagagacctgctggactgttgcaaccgttgcagatccctcagtggaaatgggatgaaattggtatggatttcatagtcggattgcctcgcactcgagccggctacgattccatttgggtagtggtggaccgcttgaccaagtcagcccacttcatacctgtcaagaccaactacagcagtgcagtattggtagaattgtatatgtctcgaatcgtttgtcttcatggtgtgccaaagaagatagtgtcagacagaggaacgcagttcacctctcatttctggcagcagttgcatgaagccttgggcacgcatctgaatttcagttcagcttatcatccgcagacagatggccagaccgaaaggaccaaccagattcttgaagacatgttgagagcctgtgcgttgcaagatcagtccggatgggacaagcgattgccttatgcagagttttcctataacaacagttaccaggccagtttgaagatgtcaccatttcaggcgctctatggaaggagttgcagaactccgttgcaatgggatcagcctggagaaaagcaagtgtttgggccaggcattttacttgaagccgaagagaacatcaagatggtccgagagaatctgaagatagcgcaatcgaggcagcgaagctatgcagacacaagaagaagagagctgagtttcgaagtcggagactttgtctatctgaaagtgtcaccgatcagaggagtcagaagattcggagtcaaaggcaagctagcaccccgctacattggtccgtatcagattcttgcaagacatggagaagtggcctatcagctcagtttgccagagaatttgtcagctgtgcatgatgtctttcatgtgtctcagttgaagaagtgcttgcgtgtgccagaagagcagttgccagtggaaggtcttgtagtccaggaggacttgacctacgttgagaaaccagtgcaaatccttgaggttgcagacagagtcacccgaaggaagaccatcagaatgtgcaaagtcaaatggaatcatcactctgaggaagaagcaacctgggagcgtgaagatgatctgatggctaaataccctgagctctttgctagccaaccctga

SEQ ID NO: 5220 - DNA, 4287 bp, Zea mays
  Clone ID: TF_ZM5035.C1.o2.fg
atgcgcttgacaccctgctacgtcgggcatttgaccggcatacttggtccgtcgagtatcgctgtgtggtctaccagcacagtcgcggggtctacccggaccgctgggaggcaacctgcttggtgcgctgtccggagaacagtctccagggtgctgaggtctgctcagagcactattttatctctgagcgggactcagctgaggcagccatgcaagatgctgcacggcgtgcgctttcgcactactgctcggttttcgatgtcagagaacaggcgcagaggaggaaggcgtgctcaacaggagcgagccgctccgcaggatgaggtgccccagcagcagcacctgccgcccccgcccccgatgtccatcgagcagatgtttctgatgcagactcaggcagttcaagccatcggtcagactttggccgccattcagcagcagcagcagcagcagcaacaacaacaggccccacctcagcctcagatgcctcagatgcctagagacaagcgtgctgaattcatgagaggtcatccaccaacgttcgctcattcttctgaccccatggatgctgaagattggctacgcactgtggagcgggagttgcataccgctcagtgcgatgacagggagaaagtcttgtatggtccccgtctgttgagaggagcagcccagtcatggtgggagtcttacctcgccacccatgcccaccctgacgccatcacttgggaagagttcagaggtagcttttgtcagtaccatgttcctgcaggtctgatgacagtgaagaaggaggagttcctggctctcaagcaagggccgttgtctgtcagtgagtatcgagacaggtttctgcagctgtctcgttatgctcctgaagatgtcaacaccgacgccaagcagcagtaccgtttcctgagaggcttggttgaccctctgcagtaccaactgatgaatcacactttcccgacattccagcacctgattgacaaagcaatcatgacagagaggaagcgtaaggagatggaggatccaaaccagcagaacagtcaggcagcaccagctcaggttggaaacagagcatgtttccactgtggagagcaaggccactgggtaatgcaatgtccgaagaaggcagcccagcagcagtcaggccccaatgccccagcaaagcagaatgtgcctcagcctggagcagacaatcgccctcagccgcgctataatcatggaagactgaaccacttggaggctgaagcagttcaggagacccccggcatgatagtagccggtggtagaattcgagccgatagcatttgtttgaatataagtgtggaaataagggggatagcgtttcccgccaaccttatagtaatgggtactcagggaatagatgtcatcctagggatgaattggctagataagtatcaggcagttatcagttgtgataagaggacaatcaagttggtgtccccactaggagaggaagtggtgaccgagttagtcccgcctgagccaaagaaaggaagttgttatcagatagctgttgatagcagtgaagcagacccaatcgagaggatcaaggttgtgtccgagttcccagatgtgtttccaaaggacttaccgggtatgccaccagagcggaaagttgagtttgccatagagcttcttcctggaaccgcccctatctttaagagagcttacagaatatctggaccagagttggatgaacttaagaagcaaattgatgagctgtcagagaaaggttacattcggccaagcacctcgccttgggccgcccctgtcctatttgtggagaagaaagatggcaccaagaggatgtgtattgattatcgagctttgaatgaggtcacgatcaagaacaagtatcctttgcccagaatagaagatctgttcgaccagttgagaggagccagtgtgttctccaagattgatctgaggtcaggttatcatcagctcaggatccgaccttcggacattccgaagacggcattcatttccaagtatggtttgtatgagttcacagtgatgtcttttggtttgaccaatgcgccagcgttcttcatgaacttgatgaacagtgtattcatggattatctcaataagtttgtggtggtattcattgatgacattctggtttattctcaaagcgaagaagagcatgcagatcatttgaagatggtattgcagagattgcgagagcatcagttgtatgcaaagttgagcaagtgtgagttctggatcagtgaggtcctgttcttgggtcacataatcaacaaagaaggattggatgtggatccgaagaaagtggcagacattttgaactggaaagcgccaacagatgctcgaggaatcaagagcttcattggaatggccggatattatcggcgattcattgaagggttttcaaagattgcgaaaccaatgacagcgttgctaggcaacaaagttgagttcaagtggacccagaaatgccaagaggcctttgaagcgctgaaagagaagttgactacagcgcctgtcctagtcttgcctgatgtgcacaagcccttttcggtgtattgtgatgcttgttacacaggtttgggatgcgtgttgatgcaagagggaagagttgtggcttactcgtcccgacagttgaaggttcatgagaagaactacccaatccatgacctagagttggcagcagtggttcatgcactgaagtcatggaggcactatctgtatggacagaaatgtgatgtttacacagatcataagagtctgaagtatatattcactcagtcagagttgaacatgaggcaacgaagatggttagagttgatcaaagactatgagttggagattcattaccatccaggcaaagcaaacgtagtggcagatgctttgagcagaaagagtcaagtcaatctgatggttgctcgtccgatgccttatgagttggccaaggagtttgacaggttgagtctcggatttctgaacaattctcgaggagtcacagtcgagttggaacctaccttggagcgcgaaatcaaagaagcgcagaagaatgatgagaagatcaatgagatccggcgactgattctagatggcagaggcaaagattttcgagaagatgcagaaagcgtgatatggttcaaagaccgcttgtgtgttcccaatgtccagtctattcgggagttgatccttaaggaagctcatgagacagcctattcgattcaccctggcagtgagaagatgtatcaggatctgaagaagaaattctggtggtacggaatgaagagagaaatcgcagagcatgtggctatgtgcgatagttgtcgaagaattaaggcagagcaccagagacctgctggattgttgcaaccgttgcagatccctcagtggaaatgggatgaaattggtatggatttcatagtcggattgcctcgcactcgagccggctacgattccatttgggtagtagtggaccgcttgaccaagtcagcccacttcatacctgtcaagaccaactatagcagtgccgtattggcagaattgtatatgtctcggatcgtttgtcttcatggtgtgccaaagaagatagtgtcagatagaggaacgcagttcacctctcatttctggcagcagttgcatgaagccttgggcacgcatctgaatttcagttcagcttatcatccgcagacggatggtcagaccgaaaggaccaatcaaattcttgaagacatgttgaaagcctgtgcgttgcaagatcagtccggatgggataagagattgccttatgcagagttttcctataacaacagttaccaggccagtttgaagatgtcactatttcaggcgctctatggaaggagttgcagaactccgttgcaatgggatcagcctggagagaagcaagtgtttgggccagacattttgcttgaagccgaagagaacatcaagatggtccgagagaatctgaagatagcgcaatcgaggcagcaaagctatgcagacacaagaagaagagagctgagtttcgaagtcggagactttgtctatctgaaagtgtcaccgatcagaggagtcagaagattcagagtgaaaggcaagctaccaccccgctacattggcccgtatcagattcttgcaagacgtggagaagtggcctatcagctcagtttgcccgaaaatttgtctgctgtgcatgatgtctttcatgtgtctcagttgaagatgtgcttgcgtgtaccagaagagcagttgccagtggaaggtcttgaagtctag

SEQ ID NO: 5221 - DNA, 1941 bp, Zea mays
  Clone ID: TF_ZM5061.C1.o5.fg
atggatacccataggccaccacacttcgacgccactaacttcccatattatagtgctagaatggcttgttacctagaggccgttgatctaggtgtttggagagtcactcgtgacgggatgaaacccctcaataatcgcgagaaacccaccacgagtgaggaaaaagaaattcatttaaatgctagagccaaaaattgcttgtatgaatatcttagcatggatattttcaatcaagtatttaccttgaaaactgctaatgagatttggctaaaattgcatgagctccataacggcacttccaatgtccgtgagcaaaaacattgcctagtcttaaatgagtataattcttttgccatgaaagatgatgagcttgttagagacatgtattctcgtttgaatctaattatcaatgagctcaattctattggcattaataagctaggtgatgcggacattgtgaggaagattatctccctgctacctcaacaaagatatgggagcatcatcaccatccttcacaacatggaggacttgagcaacatgaccccgaccattgtgattgggaaaatcgcggcctttgaaatgtcgcgtaaaatgagtcgtggagaggagccaacttcctcaagaccatatgcttttgcatgtgatgaaagaaagggcaaaaagaaggctcccactccaagttcctcaagtgaagaagaggaagaagaagaaagtgatgatgacgaagataatcaaccatgcacatcatcctccgaggacgaagaaacagtcgaggatcttctctttaacattgacaggaaaaagcaaaggaagagaggatgcttcgcatgtggggagaagggccacttcagggacaactgtccaaatatggccaaacccaaaaaggagaggagcaaaggcaaggcgctaacaagtgttagaacttgggatgattcttcaagtgaagatgaacctccaaggacgcacagccaccagtcctcgtcacgatcatcacggtcatcacacaaatgccttatggcaagaggtaacaaaagcattccatcctctagtgatgaaagtagtagtgatgatgaaggtgagggaaagccctctctagatgagcttgcggaagccgtagaatttttccaggatgtttgcactaagcaaaaagctcaacttaaaactttgaaaaataagttggttagctctcaaaatgattacaaaggtttgctagaaaaatttgaaacttttgcaaacttaaataatgagctatcaactaaaattgagctattagaatctagtgctccatccactgctaccgatgatggccttattaaaaagaatgaaaaacttaaggctaagttagctagctcccaagaagctattgaaaatttgctagagaaaatggaaattcttagcatacacaacaatgagctaactactaagctagaaaacattggtagcaccccagcagcatctttagttgaaatacctgaaataattaagaaagatgcttctacttcctgctttgatttaattgatgattctaacccctgcaaccaagtcgttgttgagaatattgttgtagagacatgttcggatgaggttgcaaaggaaaatgaacaattaaagcaagaagtggctcgccttggcaaggctttgctatgccacatggaaggccacaagtctttccaatgcaaggcgatgaccggggataaacaaaggcaaaagctcaagcaaaagccatcaagcaaaatctccaacacctacatcaaaaaggtgaacaaaaaggatgctacaccatatttgatcaaaaagaaaaagaatggaaaggtgatagcaatcaaggccaacaagcaaaccaacaaaggaaaaggggccaaacgcatctgggtgccaaaggagataatctcaaccatgaaaagcaccaagaaggtttggatcccgaaagggaagtga

SEQ ID NO: 5222 - DNA, 4914 bp, Zea mays
  Clone ID: TF_ZmC951_374
tcaatcaaaattcctagaatcaagaatatttagctcatgcctaagtttggtaaatgtttgctcatctaatggcttggtaaagatatcggctaattgttctttggtgttaatataagaaatctcgatatcccccttttgttggtgatccctcaaaaagtgataccgaatggctatgtgtttagtgcggctatgttcaacaggattatccgccatgcggattgcactctcattatcacatagaagatgaactttggttaatttataaccatagtccctaagggtttgcctcatccaaagcaattgcgcgcaacaatggcctgcggcaatatactcggcttcggcggtagaaagagcgacagaattttgcttctttgaagcccaagacaccagagatcttcccaagaattggaaagtccctaatgtgctctttctattaattttacaccctcccgtgtcaaggtcgagatgcccattagttcccatgggtgtcttgatgggcttggcatccttcatcccaaactttgtgagtatgtcttgaatgtacttcgtttggctaatgaaggtgccctcttggagttgcttcacttgaaatcctaagaaatacttcaactcccccatcatagacatcttgaatttttgagtcatgatcctactaaactcttcacatgtagattcgttagtagacccaaatatgatatcatcaacataaatttggcatataaacaaatcatttgcaagtgttttagtaaagagagtaggatcggcttttccgactttaaatccattagtgataagaaaatctcttaggcattcataccatgctcttggggcttgcttgagcccataaagcgccttagagagtttatatacatggttaggatactcactatcttcaaagccgggaggttgttcaacatagacctcttccttgattggtccattaaggaaggcactttttacgtccatttggtaaagcttaaagccatggtaaatagcataggcaagtaaaatgcgaattgactcaagtctagctacgggtgcataggtttcaccgaaatccaaacctttgacttgtgaatatcccttggccacaagtcgggctttgttccttgtcaccacaccatgctcatcttgtttgttgcggaagacccacttggttcctacaacattttggttaggacgtggaactaaatgccatacctcattcctcgtgaagttgttgagctcccttgcgtcgccaacacccaatccgaatcttgaagtgcttcctcccttatgaatgtcgccgaggatggtgttcacggggtggtctcgttgtattgcttgatggactcttgggtgtggcggtcttggaccctcatcatcttccttgtcttgatcattatcatttcccccttgatcattgtcctcctcttgaggtggctcctcttgatcttcatcatcatcatcttgagcttgatcctcatcttgagttggtggagatgcttgcattgaggaagatggttgatcttgtgcatgtggaggctcttcggattccttaggacacacatccccaatggacatgttccttagcgcgacgcatggagcctcttcatcatctagctcatcaagatcaacttgctctacttgagagccgttagtctcatcaaacacaatgtcacaagaaacttcaattagtccagaggacttgttaaagactctatatgtccttgtgtttgaatcataacctagtaaaaagccttctatagccttaggagcaaatttagattttctacctcttttaacaagaataaagcatttgctaccaaagactctaaaatatgaaacattaggctttttaccggttaagagttcataagatgtcttcttgaggattcggtgaagatataaccggttgatggcgtagcaagcggtgttgaccgcctcggcccaaaaccgattcgaagtcttgtactcatcaagcatggtccttgccatgtccaatagagttctattcttcctctccactacaccattttgttgtggcatgtagggagaagagaactcatgcttgatgccctcctcctcaagaaagctttcgatttgtgagttcttgaactcggtcccgttgttgcttctaatctttttgatccttaagccgaactcattttgagcccatctcaagaatcccttcaatgtctcttgggtttgtgatttttccttgatttccatccccgaatgtgatagctctttggggatcatggttttttcgtaggaggagaaaatcttcttctcccttgtcatgtggtttgtgcacccgctatcgatgatccaacttgagcccccggatgcataaaccttgggtacccaaatacaagtctttgagcccttgtgtttggccccaacatatttggcaactactttgcctgatttgttagttaaaacatatgatgcatcaaaagtcttaaatgaaatgttatgttcatttgatgcaatatgagttttcttcttaggcaatttagcacgggttgattgcctagaactagatgcctcactcttatacataaaagcatgattagagccagagtgagacttcctagaatgaattctcctaattttgtgctcgggataaccggtaggatacaaaatgtaaccctcattatcctgaggcatgggagccttgcccttaacaaagttagataatcttttaggaggggcattgagtttgacatttcctcccttttggaagccaatgtcatccttaatgccagggcgtctcccactataaagtatgctacgagcaaatttaaatttctcattttctagttcatgctcggcaattttagcatctaattttgctatatgatcatttttttgtttaatcatagcaatgtgatcatgaatagcatcaatgttaacatctctacatctagtgcaaatagtaacatgctcaacggtagatgtagagggtctgcaagaatttagttcaacaatcttagcatgtaaaatgtcattctcatctctaagattgaaaatagaaacattgcaaacatctaattccttagccttagcaattaatttttcattctcatttctaaggctagcaagagaggcatttaatttttcaatcttagcaattgaactagcattatcatttctaagattgtcaattgaatcatcacaaatatttgatttctcaaccttagcaattaatttggcattttcatttctaaggttggaaataacatcatggcaagtgcttagctcactagataatttttcacatttttctacctctagagcataagcatttttaaccttaacatgctttttattttctttaactaggaagtcctcttggctatccaagaattcatccttctcatgaatagcactaatcaattcatttaatttttctttttgttgcatgttcaagttggcaaaaagggtgagcaaatcatcctcatcatcactagagctagcctcatcactagaagttgcatatttagtggaagctctagattttaccttcttccttttgtcgtcctttgccatgaggcacttgtggccgacgttggggaagaggagtcctttggtgacggcgatgtttgcggcatcatcgtcggaggaggagtcagtggagctctcgtcggagtcccactcccggcaaacatgagcatcgccgccctttttcttgtagtacctcttcttttctctcctctttcccttcttgtcgttatccctgtcactatcactagacaaagggcatttagcgataaaatgaccgggcttaccatatttgtagcaaaccttcttggagcgggacttgtagtctttccccctcctttgcttgaggatttggcggatgctcttgatgatgagcgccatttcctcattgtcgagcttggaggcatcgatggggaccctactaggtgtagagtcttctttcttctcctccgttgctttgaatgcaacgggttgcacatcgggtgtggaggaggcgccttgctcgatgattttcttggagcctttgatcatcaactcaaagctcacaaattttcctatcacttcctcgggagacattagtttgtatcttggatcgccacgaattaattgaacttgggtggggttaagaaaaacgagtgatctaagaataacattgaccatttcatggtcatcccacttggagctcccaaggttgcgcacttggttcaccaaggtttttagccggttgtacatggcttgcgggtcttctccttggttgagcataaagcgaccgagctccccctcgatcgtttcccgcttggtgattttggtcacttcatcttcttcgtgcgcggtcttgagtacgtcccaaatctctttgacgctcttcaacccttgcaccttaatatactcctctcgacttagagaggtgaggagtatagtagttgcttgagagttgaagtgctcgatttgggccacctcgtcctcatcataatcttcatcccctacggatggtacctgtactccaaactcaacaacatcccatatgcttttgtggagtgaggttaggtgatatctcaccatatcactccacctagaataatcttcaccgtcaaatgtcggtggtttgtctaatgggacagaaagtattggagtatgtttaggaatgcgaggatagcgtagggggatcttactatacttcttgggctcttggcgcttagaagtgatggacgcggcgtcggatcccgatgtagagggcgatgaagagtcggtctcgtagtagaccactttcttcattttcttcttcttctcgccactcttgtgcgtcctattgcgtgaaggggatccctccttctttttgttgccggactcccttgatggagccttcccgtggcttgtggcgggcttctcgccggtcaccatctccttcttggcgtgatcttccgacat

SEQ ID NO: 5223 - DNA, 3486 bp, Zea mays
  Clone ID: TF_ZM4351.C4.o2.fg
atgacgctcatcatcaagagcttccgccaaatcctcaagcaaaggagggggaaagattacaagtcccgctccaagaaagtttgctacaaatatggtaagcccggtcattttattgctaaatgtccattgtctagtgatagtgacaggggcgacgacaagaggaaggaaaagaagagatactacaagaagaagggcggcgatgcccactttaactacttatctatagatgtatgtgtgacgtttagaaacatgaatgtctcacacacgcaattcttattcgtacacacagccgcaataatgggtgatagacgtgattggatgtatgaaggtttcaagaagggctataaggtctggtatctccacggggagtcacgccttgaacgagtagcagaagtagaagttgatgacggtgaagatgatgttgataggatggaccagatgcttgaggatctgcagcctgaactggcaccagatcatcatgattcacctacaccggaggttcagaagttcttcgacctacttaaagcgtcagaagagcctcttcacgggcacactaactccaagtttgcattctcaattaattgttacaaggagctcgtggatttgattagcgaggttcttcctacgggtcacaagatgcccaaagacatgtaccagtccaagaaattgcttgaaggtcttggtatggagtatgagaagattgatgtttgccaagacaactgtatgcttttttggaaggaacatggcagagaacagaaatgcttaaaatgtgggaagtcgaggtacgtggagcttgtaaatgaagatggggagaaggtggtgacaaaggttgcacataaacagcttcggtacatgcctctcactcctagagtgaaacatttgtttctctcgaggaagaccgctatgcacatgaggtggcataaagattgtacgaacagacaagatgggttaatggtgcacccgtcagatggtgatgcatggaaggctcttaacaaatttgatccagattttgccagcgatgcaagaaacgttcgtatcagcttggcaactgatggtttcatgtcgttcaatatgaccgctgcgtcgtattcatgttggcctgtcattgccataccgtacaaccttccatctgctctttgcatgaaatatgagtttatgttcctatgtcttgttatacctgggcctgagcatcctggcgtacgcctcaatgtgatgcttcaaccactgattgaagagttaaagaagctatggcaaggtgtggaagcctatgattgcttcaagaagcagaaattcaatcttcgtgttgcatatctgttctcggttcatgattttatggcatatggtattttctctggatggagcgtgcatggtagattgacgtgtccttattgtgctaaagatacatattgttttcgtcttagtgctggtggcaagatatgttactttgattgccatagatgttttctacccttcaatcaccccttcagaaggcagagaaaggaatttaggaagggcaccatcgtcacgaagggaccgcccaagcgacgtagtgggatagaaattacagaagagcatatgaaacttgtcctagacgagagtgggaaaaggtatcaaggttttggtgaggagcataactggactcacatatgtggcttgtgggagcttccttatgctaagtcattgattttgatgcacaacatcgacgtcatgcatcaagagagtaacttttgccaagacctcataaatacatgcatggatttccctgataaaacgaaagacaatgacaaggcacgcatggacttagcagtgatatgtgatcgtccaacccaagtgcttagagaaaacggaggcaaaccaaaagctgactattgtctgaaatctaagcaacggaaagaagtgatgaagtggatgaaggatattaatttccccgatggttatgccgctggttttagaagatctgtgaacttgaagacaatgaagatgaatggattgaagagccatgacttccacataattatggagaggctcatgcctgtaatgtttcgtgggtacatttccgaagctgtgtggaaaacattagctgaagttagctatttctacagacagttatgtgctaaaggaatcagaagagatgtgatggaacaactggaggaagaggcaccagtgcttttgtgcaaattggaaaaaatatttccaccgggtttcttcaatcctatgcagcatctctttatacatcttccatatgaggctaaggtcggtggtcctgttcagtataggtggatgtttcatatagaaagagctttaaaaaagcttagagcaatgatgggcaataaggcaagagttgaaggatgtattgcggaacaatttaaacttaaggaggtagcacacttcacaagttgttactttgcagaagaacataatgtatttgctcgaaagaaaaggtaccatgatgatgaacgagagatgcctccttgtagtgatctttcgatttttcagacaaacggcaaagccgttggtccacccaaggcatatcacctcagtatggaagaacggaagtctgctttactgtacatgttcacgaatatgcctgaggtggagaaatactttgtcgagtttgatgaacaaaacatgaggtgtctcggtaggccaacagcgagagacatagacaaattgcgacgcgatggtatgcatgggcgacctaatttcattatgtggctttgggaccgtgtgatggttccatggatggcgcccgtgcctgatgcgtactatgcttggtgtcgatattgggcttccgaaggcttccagaaagtgttagcgcatcacagacaatgtcgaggaaccaatcctaaccacaagtttggcggtgacgacatgatacgaaaagctaaaagaatggaagctactagtggccaaaagcctagtgacattgaggtctaccaggagggccacaaaggaccagacccgaacaaccctgaccagctctgcagccagacagccacggatcgcttggcggcatatggggaggagatggttcgtcgccatggccctgacttcgactggcgccatgaaccggtggatcccttggtggtatacacactcttcgacggattcattgactcgtcgtcggatttggagattatgaggatgcgtgaagagatgagacaacaacacgaatttatggaggcttgcaatgcacataaccaagcgatgtatcaattaatgcagcaacagggcatggcaacaaattttccaccgccaccacaatggagccaatttgctaacacactagttccaccaccacagttcaacacccctccgacacatatacctgcacctggagatagggttacgcctgaagcgggtggtagtgggtctgatccagcagtagggactggatttgttgactcgctcttcgcgttccctcctcctggtggtggtggcgacagcggtcaaagctctaaccacccaagtggtggttatctctaa

SEQ ID NO: 5224 - DNA, 2355 bp, Zea mays
  Clone ID: TF_ZM4904.C4.o1.fg
atgtcgggagatcacgccaagaaggagatggtgaccagcgagaagcccaccacaagtcatgggaaggctccatccggggagtccgacaacaaggtgaagggatccccttcacacgacaagtcgcgtcggagtggtgagaagaaaaagaagatgaagaaagtggtctactacgagaccgactcttcatcgccatccacctctggctccgacacaccgtccgtcacttctaagcgccatgagcgcaagaagtttagcaaaccacccatgtttgatggtgaagattataatatgtggagtgacaaaatgaggcaccatctaacctcactccacactagtatttgggatgttgttgagattggagtacaggtgcaagggttgaagagtgccaaagagatttgggacgtggtcaaaaccgcgcacgaaggagacgaggtgaccaagatcaccaagagggagacaatcgagggggagctcggtcgcttcatgcttcaccaaggggaggagccacaagcaatgtacaatcggctcaagacattagtgaaccaagtgcgcaacctcgggagcaccaagtgggatgaccatgaaatggtcaaggttattcttagatcactcatttttcttaatcccactcaagttcatttaattcgtgatgatccaagatataaactaatgtatcccgatgaagtgataggaaaatttgtgagctttgaattgatgatcaaaggctccaagaaaatcatcgagcaaggcgcctcctccacacccgatgtgcaacccgttgcattcaaggcaacggaggagaagaaagaagactctacaccaagtagggtccccatcgacgcctccaagctcgacaatgaggagatgacactcatcatcaagagcttccgccaaatcctcaagcaaaggagggggaaagactacaagtcctgctccaagaaggtttgctacaaatatggtaagcccggtcattttatcgctaaatgtcctttgtctagtgatagttacagggataacgacaagagggggaagaagaaggagaagaagagatattacaagaagaagggcggcgatgcccatgtttgccgggagtgggactccggcgagagctccaccgactcttcctccaacgaggacgccgccaacatcgccgtcaacaagggacttctcttccccaacgtcggccacaagttcctcatggcaaaggacggcaagaaaaagaaggtaaaatcaagatcctccactaaatatgcaatctctagtgatgaggataattctagtgatgatgaggataacttgctcactctttttgccaatcttaacatgcaacaaaaggagaaattaaatgaattaattagtgctattcatgagaaggatgaactcttggatagccaagaggacttccttattaaggaaaacaaaaagcatgttaaggttaaaaatgcttatgctctagaggttgagaaatcaaatgtttgtgatgattcaattgttaatcttagaaatgaaaatactagtttaattgctaagattgataaatcgaatgcatccctttctagccttaggaatgagaatgaaaaattaattgctaaggctaaagacttagatgtttgcaatgtttctattaccaatcttagagatgagaatgctattttacatgctaagattgttgaattaaatgattgcaagccctctacatctacgattgatcatgcttctatttgcactagatgtagagatgttaacattgatgctattcatgatcactttgctatgattaaacaacaaaatgatcatatagctaaattagatgctaaaattgccgagcatgaactagaaaatgagaaatttaaatttgctcgtagcatgctttatagtgggagatgccctggcattaaggatggcattggcttccaacagggagacaatgtcaagcttaatgcccctcctaaaagattgtctaattttgttaagggcaaggctcccatgcctcaggataacgagggttatattttatatcctactggttatcctgaggataagattaggagaattcatgcaaagaagactcattctcatcatgcttttatttataagaatgaggcttctagctctaggcgttctacacatgttaaaatgcctaagaagaaaacacctattgcatcaaatgaacctaatgtttcatttaagacttttgatgcatcatatgttttaactaacaaatcaggcaaagtagttgccaaatatgttgggggcaaacacaaggggtcaaagacttgtgtttgggtacccaaggtgcttgtttctaatgtcaaaggacccaagaccgtttgggtacttaagaacaaggcctaa

SEQ ID NO: 5225 - DNA, 897 bp, Zea mays
  Clone ID: TF_ZM4636.C4.o12.fg
atggccatccagatagtccgggttaacctccaggacttcagcccccgccgtgaagcagcgacgaatagaggcctccgaccactgctccggagggaagtcagtgagggccaccagagccaaccattcgggggtgcgggtgaacctgttagaggtctcctccgggtgctccaaggcggggacgctgtcgccatccccgggggaagcggatgccttggaggtgccaagtgggaggggagcgaggctgaggaggcccgcatcggcaacgggggagctgggggcggatgggggggaacgtctgtcgtcaggcgagtgaggcgacgacagctcccgaccaaggcgattcttcccgccacaaacgaccatgcggacgtcaaagcactggggggtaatgggtggggcgggggtggcaagggggcggggcagcacagcagccgctgccgcgcagacgcggcaatcggggtgtggtgccagggtgccggagggcggcgtggtggagctgaggggagggaggttgacatgggggtggtgagcttcaacggtggggcgggggcggccgcgcccggcgacagcgaggactcctcagggaaggggcagctgacacggggacacagggggcgggtgctgggctggaggaacagcggcgagggtggggggttagcacccgggcaatcagcatcggacaacttttgtgccgatgcccgaagcgactgcaaccgcggcagcgaactgggtcacgacagtcacgaacctggtggtccgcggcgaggcagcgaaaacagcgggaaggggcgggtgggaggcaaaaggggtggcgggggcggcgagggggagctttggcgggagagagcatcgcgtttaaaaagggggtgtagctcccgggggaagcggctgtcgtga

SEQ ID NO: 5226 - DNA, 1557 bp, Zea mays
  Clone ID: TF_ZM4269.C2.o4.fg
atggctgctttaattgtgggaagtctggacactttatcaaggactgtccctatccaaagcaaaataaaccaaattctcaacagacttctaggaacacgtctcaaggcaagggaaatgtggccaacactccagcgggcaaaaatacaaggaaaactaggcgagtctactaccacctcggaaggagaaccggtgatgatgggtaatccgagggatgtattccctgaagatttgctcggattacctccggagagggatgtggagtttgtgattgaattgaaactcgcccgggtattttctaaaattgatctcagatcgggctatcatctgatcagaattcgacccgagaatatacccaagaccgctttcaccactcggtttatcccagatttctccaaaatcgttaaacctattactaagttactgaagaatgatgttaagtttgactggtctcccaagtgcaaagaggcctttgaacaattgaaaatattgctgaccactgcaccagttttggctcaaccggatattgagaagccatttgatgtttattgtgacgcattaggcattggacttggtttaaagtacattttcacccagtcggagctaaacatgagacagagaaggtggctcgacctgatcaaggattatgacctagaaattcattatcacccaagaaaggctaatgtggtggcagatgctttaagttgtaaagtcttttgtcattgtctcactatgggatttcctgacaccaccttatgtcaggaaatggaaatattaaatctagggatagtgcaacaaggaaccttgatgcatttaaagcttgggtcaattattctacaaaagattattgatgctcaaaggatcgataagggtatgaaatatatacatgagaaagtggaggctggcaaagctaattgttttaggaaagatgataaaggaataatatggtttaaagaccgcatagtggtgcataaggatgctgaacttcgtcaacaaatcttggatgaagctcatcttagtcgacgtgtcaaggcgatacatatgaaaactgctggacctctacaatccttgtcgatccccacatggaaatgggaagaccttagtatggattttgttgtgggattacccaagacatctaaagggtatgactctatttgggtgatagtggactggcatacaaagacagcacattttcttcaggttaaaacagatcacccagttgctatttatgctcagttgtaccttgctcgtattctcatcctgcatggagttccaaagacgatagtgtcagaccgaggaccacaatttgtatccatgttttgggaagagctgcacaaatctttgggcactaaattgctccacgattcagcctatcatccacaaacaagtgggcaaactgaaagggtaaatcaaatattggaagatatgctacacgcctatgtcttggagttcctacaaaaatgggatgattgtctgtcgctggcagaattttcttataataacagttaccaagaaagtattaaaatggcaccgtttgaagccctgtacggacggcgatga

SEQ ID NO: 5227 - DNA, 1593 bp, Zea mays
  Clone ID: TF_ZM4443.C1.o3.fg
atggctgctttaattgtgggaagtctggacactttatcaaggactgtccctatccaaagcaaaataaaccaaattctcaacagacttctaggaacacgtctcaaggcaagggaaatgtggccaacactccagcgggcaaaaatacaaggaaaactaggcgagtctactaccacctcggaaggagaaccggtgatgatgggtaatccgagggatgtattccctgaagatttgctcggattacctccggagagggatgtggagtttgtgattgaattgaaactcggacatgttttatctgctaaagggattacggttgatcccagcaaggttaaggatattctggaatggaaatctcctacctcggtacatcaagttagaagtttccttggattgtatggttattaccgcaggtttatcccagatttctccaaaatcgttaaacctattactaagttactgaagaatgatgttaagtttgactggtctcccaagtgcaaagaggcctttgaacaattgaaaatattgctgaccactgcaccagttttggctcaaccggatattgagaagccatttgatgtttattgtgacgcattaggcattggacttggtttaaagtacattttcacccagtcggagctaaacatgagacagagaaggtggctcgacctgatcaaggattatgacctagaaattcattatcacccaagaaaggctaatgtggtggcagatgctttaagttgtaaagtcttttgtcattgtctcactatgggatttcctgacaccaccttatgtcaggaaatggaaatattaaatctagggatagtgcaacaaggaaccttgatgcatttaaagcttgggtcaattattctacaaaagattattgatgctcaaaggatcgataagggtatgaaatatatacatgagaaagtggaggctggcaaagctaattgttttaggaaagatgataaaggaataatatggtttaaagaccgcatagtggtgcataaggatgctgaacttcgtcaacaaatcttggatgaagctcatcttagtcgacgtgtcaaggcgatacatatgaaaactgctggacctctacaatccttgtcgatccccacatggaaatgggaagaccttagtatggattttgttgtgggattacccaagacatctaaagggtatgactctatttgggtgatagtggactggcatacaaagacagcacattttcttcaggttaaaacagatcacccagttgctatttatgctcagttgtaccttgctcgtattctcatcctgcatggagttccaaagacgatagtgtcagaccgaggaccacaatttgtatccatgttttgggaagagctgcacaaatctttgggcactaaattgctccacgattcagcctatcatccacaaacaagtgggcaaactgaaagggtaaatcaaatattggaagatatgctacacgcctatgtcttggagttcctacaaaaatgggatgattgtctgtcgctggcagaattttcttataataacagttaccaagaaagtattaaaatggcaccgtttgaagccctgtacggacggcgatga

SEQ ID NO: 5228 - DNA, 1980 bp, Zea mays
  Clone ID: TF_ZmC158438_1
aggcaatcgtacgtgaacaagtgaatcatccagtttggggagcatatgctcagcgacttctaaatcctgaagcaagactttggaggaatcccagtaatggtggtcatgatgacaaggcacatcctcctattcatccaaccaaattttcagaaggtgaaagaaactggagtccagaccacactagattgtatgagtttgttgtccgacatttccttgcatgttgctctcaaccggctgttggagctgaaacaactgtggaaattgacatagctggtgaacagtttaatgcatcagggcgtgtcatacttgctaaaaattatctggatgtttaccgctttgactcatggggtggaacgttacttccaacatacaacattgggcagcagtttgttccgacaactttaacacttgattctggagtgactcggccaccgcctcttctggctgaagccgaccttcttagctgtatggataaagcaggaattggcactgatgcaaccatgcatgatcacataaaaaagttgcttgaccgttgttatgcaaccaaagatgaaaacacacgtttctccccgacaaatcttggtgaggcattggtgatgggttatgatgaaatggggtatgagctttggaagccttatttaagatcaatgatggaagctgatatgaaatcagttagcgtgggtactaagagtaaatcagaagtacttgagagttgtttgcagcagatgaaggcctgttttcttgacgcaagggtgaagaaagcaaaactccttgatgcaatggggacattctttgcaaggtctaataggcctataaatgaaactcaaaatccagtagaggttgtgaggccttgtggtgcatgcaatggatctgaaatgttgcttaagcgaagggcgagtggtgaatttatggttgggtgccgaagttatccacaatgtagaaacgtggtatggctcccaggatctctttcagaagcggctgtaactaatcaagtttgtcctatctgcgcaccaggccctgtttataagattcaattcaagttccgtcggagggatattccaccaaatttcgatgttgatcacctaggttgtgttggtggttgtgatgatatcctcaaagaccttatggagataagtaggtttggaagtcgcagccaggctgcaacaccagcaagaggaccaactccaaatggtgtgggtcaggggactccaagacaggatttacatactatttttcgtccggcaagccagcttaataatgataacccatcggttatgcattctcaaggtttccgttcaacccatacccaaaatccaagtaatgcatcagatgcaggtcaagtgctgtgcacctcatgtggagcgctttgcatatcacgaattgctaatacagaggctaacagggggaggaggttctacaaatgtcaagatcctggctgtggcttcttcaaatgggaagacgaagtggacaatggtacggggagaggccgccgtgggcgcggcagcagcaggcaggcgtctgcgtctgcgtctgcatctgcaggacggagaggcggaggccggagaggcagaggccgtaacgctgacggcgggatgttcgtttcagcgacgggcgacaccgtgctcggctgctgctttaactgcggcgatccttcccacttcgcaaacgcctgcccgaaccggagatagttatcagggagctgctcgctatgcgtgtacagagactggcagcgtccgccaaacgatgaagccttcggatgggtttcgtgtactgaggtgcatataagtgcacctgacaagctcattttctagacaattactaatatttttaaacaaaatgcagctattaggctgatgctagttcagcaaatctgacggcacttatttacaaaagttagggcggtaccagaaaaaactgacaaaggaagagatatggaaacacgagctgattcactaaggtttcgataacaagtttctactc

SEQ ID NO: 5229 - DNA, 4311 bp, Zea mays
  Clone ID: TF_ZmC951_281
tcaacaaaagaagttcctagaatcaaggatatttagctcatgcctaagtttgttaaaagtttgttcatcaagtggcttggtaaagatatcggctaattgatctttagtgttaatgtatgcaatttcgatgtctcccttttgttggtgatcccttagaaaatgataccgaatggctatgtgtttagtgcgactatactcaacgggattatccgccatgcggattgcactctcattatcacatagaagaggaactttggttaatttgtaaccgtagtccctaagggtttgcctcatccaaagtagttgcgcgcaacaatggcctgaggcaatgtactcggcttcggcggtagaaagagctacggaattttgcttctttgaagcccaagacaccaaggatcttcccaagaactggcaagtccccgatgtgctctttctattaattttacacccttccgtgtcgaggtcgagatgcccattggttcccatgggtgtcttgatgggtttggcatccttcatcccaaacttgcttagaatatcttgagtatacttcgtttggctaaggaatgtgccctcttggagttgctttacttgaaatcccaagaaatacttcaactcccccatcatagacatctcgaatttttgtgtcatgatcctactaaacttatcttcaaagtcgggaggttgctcaacatagacctcttccttgattggtccattgaggaaggcactcttcacgtccatttggtaaagctcgttcctagtgaagttgttgagctcctcttgcatcgccaccacccaatctgaatcttgaagtgcttcctctaccccccttatgaatgtcgccgaggatggtgtcgacggggtgatctcgttggattgcttggtggactcttgggtgtggcggcctttgctcttcatcctccttgtcttgatcatttgcatctccccttgatcattgtcgtcatcttgaggtggctcatctctttgatcttctacttcatcaacttgagcctcatcctcattttgagttggtggagatgcttgcgtggaggaggatggttgatcttgtgcatttggaggctcttcggattccttaggacacacatccccaatggacatgttccttagcgcgatgcacggagcctcttcatcacctatctcatcaagatcaacttgctctacttgagagtcgttagtctcatcaaacacgacgtcacacgaaacttcaacttgtccggaggacttgttaaagactctatatgcccttgtgtttgaatcatatcctagtaaaaatccttctacagtcttaggagcaaatttagattttctacctcttttaacaagaataaagcatttgctaccaaagactctaaaatatgaaatgttgggctttttaccggttaggagttcgtatgaggtcttcttgaggattcggtgtagatacaaccggttgatggtgtagcaggcggtgttgaccgcctcggcccaaaaccgatccgaagtcttgtactcatcaagcatggttcttgccatgtccaatagagttctattcttcctctccactacaccattttgttgtggggtgtatggagaaaagaactcatgcttgatgccctcctcctcaaggaagccttcaatttgacagttcttgaactccgtcccgttgtcgcttctaattttcttgatccttaagccgaactcattttgagcccgtctcaagaatccttttaaggtctcttgggtatgagatttttcattagtaaaaagacagttgtagcccatttgacataattgagatacggaaagcaaattgtaatctaaggaatcttgatttccatccccgaatgtgatagctcgttggggatcttggtttttctcataggaggagaacatcttcttctccccagtcatgtggtttgtgcacccgctatctatgatccaacttgagcccccggatgcataaaccttgccggatttgttagttaacacataagttgcatcaaaagttttaaatgaaatgctatgttcatttgatgcattaggagttttcttcttaggcaacttagcacgggttggttgcctagaactagatgcctcacccttatacataaaagcatggttagggccagagtgagacttcctagagtgaattctcctaatcttgctctcgggataaccgacagggtataaaatgtaaccctcgttatcctgaggcatgggagccttgcccttaacaaagttggacaatttcttaggaggggcattaagtttgacattgcctccctgttggaagccaatgccatccttaatgccagggcgtctccctctatagagcatgcttctagcaaatttaaatttttcgttttctaagtcatgctcggcaattttagcatctaattttgctatatgatcattttgttgtttaattaaagccatgtgatcatgaatagcatcaatgttaacatctctacatctagtgcaaatagtagtatgttcaacggtagatgtagagggtttgcaagattttaattctacaaccttagcatgtaatatatcatttttacttctaaggtcggaaatggaagcattgcaaacatctaattctttagccttagcaagcaatttttcattttcatttctaaggctagcaagagaaatattcaattcttcaatcttagcaagtaaatcaacattatcatttctaagatttggaattgaaacatcacaaacatttgaatcaaccttagctaacaaattagcattcttatttctaaggttgtcaatggtctcatggcaagtgcttagctcactagatagtttctcacatttttcaacttctagagcataagcatttttaaccttaacatgctttttattttccttaatgaggaagtcctcttgggtatccaagagatcatccttttcatgaatagcactaatcaattcatttaatttttctttttgttgcatgtttaggttggcaaaaagaatacgcaagttatcctcctcattactagcattttcctcatcactagaggtttcatatttggtggaggatcttgattttaccttcttccttttgccgtccgttgccatgaggcacttgtggccgacgttggggaagagaagtcccttggtgacggcgatgtttacggcgtcctcgtcggaggaggagtcggtggagctctcttcggagtcccactcccggcaaacatgggcatcgccgcccttcttcttgtagtatttcttcttctcctttcttctccccttcttgtcgtcgcccctgtcactgtcactataaataggatattttgctataaagtgaccgggcttaccacacttgtagcaaactttcttggagcggggtttgtaatcttcccccctcctttgcttgaggatttggcggaagctcttgatgatgagcgtcatttcctcgttgtcgagcttggaggcgtcgatgggagttcgacttggagtagattcctccttttcttccatcgccttgaatgcgaccggttgtgcttcggacgtggaggggccgtcaagctcgttgatcttctttgagcctttgatcatcaattcaaagctcacaaaattcccgattacttcctcgcgagtcattagtgtatatctaggattgccacgaattaattgaacttgagtagggttaaggaaaacaagtgatcttaaaataaccttaaccatttcgtggtcatcccattttttgctcccgaggttgcgcacttggttcaccaaggttttgagccggttgtacatgtcttgtggctcctcccctgggcgaagtcggaagcgaccgagctccccctcgatcgtttcccgcttggtgattttggtcacctcgtctccttcgtgcgcggtctttagtatgtcccaaatctccttggcatttttcaacccttgcaccttattatactcctgtacaccaaactcaacaacatcccatatacttttgtggagtgaggttagatgaaatcgcattaagtcactccacctagcataatcttcaccatcaaacgttggtggtttgctaaacttcttgcgctcatggcacttagaagtgatggacggcgcgtcggagccggaggtggatggtgatgaggtgtcggtctcgtagtagaccactttcctcatcttctttttcttgtccccactccgatgcgacttgtgggaagaggatttcttctccttccccttccctttgttgtgggactcttccgatgaagccttcccgtggcttgtagtgggcttgttgccggtcaccatttccttcttggtgtgatctcccgacat

SEQ ID NO: 5230 - DNA, 5313 bp, Zea mays
  Clone ID: TF_ZM4508.C2.o1.fg
atggctagtaacaacaatgtgcacattgggaagccaccacattttgatgggaataactacgactattggaaaataagaatgtcaatgcatcttagagcaatgggtggaaaaaattggccaattgtcaaggatgggtttgttgtgctgaaagaagatgaaccatcggttagtgacaatgaaaacattcttacaaatgatcaagccatgaatgtattatatgatgctcttgatataaatgagttcaaccgtatcaagaatctcacaaccgctcatgagatttggattaagctaatggaaattcatgaaggaactacaattgtgaagagtgccaagctatatgtgtgcaaaggaaaatttgagcaattcattatggaagaagatgcaagtgtatccgatatgttcaaccggttaaatgagatagtgaatgaactcaagggacttggttttaatgtaccggatgtgggtttcactcataagttccttagatctcttccggagaagtatgagaccattgtgaccatgttagtaagaagtgatctatctacaacttctccaaccgaagtattgggggaaattcttactcaagatatattcaagaaatctcaagccgatgctataagtttggcaaagaaagtgaagaatgaatcaatcgctctcaaagataaagcttctaaagcaattgaaaaagaagatagtgatgatgaagaaaatgaaagtgagagtgatggagatatggctctatttttaaagaaattcaacaaattcataaagatgaagagaggtcaacttagaagaggccaaacatcaagaaggaatgctttcaatgatagaaaatgttttgagtgcggggaacccagtcacattgccatgaattgccctaacaagaagaagaagggcaaagatggagatgataagaagaagaagaaattttacaacaagaagaaagatggcaaagcctacctagttgaatgggattcggatgatagctcggatgatgatgatgatgacacctcatccaagcttaatgctggaattgccatcaaggaagctccctcacttttctcatcccctcattgtctcatggaaaagggagatgctaatgccgatgactacatgcacaaagaaaaagaaaaatttaagaccttgaaggaatcgtataaaaacgtccaagtgtcttttgaggagctcaagacctctaacaacaatctaaaagagaattgtgagaagcttgtggaagctcaaaactcatctattgtgcatgaagttgtggtggtcaccgaggatgttggagtcacttgtgacttacttgatagtcctacaagtgaaccactacctactaactctatttgtgataaatgcaaaatttctcttatgaatgataatattgctcttgatgaatcacaaatcattgttgagaatgaagtgttagtagatagagtaaatgctctaactcatgatctagagaaggcatatggtggaaaggctaaattggatttcatattgggaagtcaacggtgctcacttaatcgtgagggtcttggatatgttcccaagaaaggaaagaatgcttttataaagcaaaagacattgtttgtgaaagaatgtggcaaagtgtgtcacaagaagggacatattaagaaaatttgtcctaagctcaagaatgtatcctacacttgttttgagcattgttatgttctttctcataatgcaaaaggtgttcatgctaaatttgttagtacttcaattgttggcaacaagaaagctatttgggtgccaaagaccttggtcactaacatccaaggacccaagcaagtttgggtgaactacaaggcgggagggaatcattgggtgttggatagtggatgcactcaacacatgactagagatatgaaaatgttcacccaaatgagtgaggaagattgctcaaattatgatagtatcacatttggagataatcgcaaaggaaaggttaaaggcttgggtaaaattgctattttgaatgatcattccatatcaaatgtgctcttggttgagtctttgaattttaatttactattcgtagctcaattacgtgatttaggatttagttgcaatttcactgttgatgatgttattatctctattgttgatggtagcaatcttaagtttaaaggttttagatatgaaaatctttaccttgttgatttctcatctagtgagccaaagctcacaacttgcttattctcaaaggcttcactaggttggttatggcatagaagacttggtcatgttggaatgaagcaactcaatcgttcaaccaaacatgatttagtccgtggtttgaaagatgtgaaatttgagaagaacaaattgtgtagctcttgtcaagccgggaagcaagtggcaaatactcatccaaataaaagtcaaatgtctactcatcgacctttggaattacttcacatggatttatttgggccaacatcgtttgtgagtattggcggtaattcctattatcttgtgattgtggatgattattatagattcacttgggtttactttcttcgggataaatctaatgtgtttgaaacattcaagtcatttgctatattggctcaaaaccaatttgattttgatatcaagaaagttagaagtgataatgggtcggaattcaaaaatacaagaattgatgaatattgtgatgacaagggtattaaacatgaattatcttccaaatatactccggaacaaaatggtattgttgaaagaaagaataggactctcattgatatggctaggtctatgttagcggaatataatgtgtcggattcttattgggccaaagcaataaacactgcatgtcactcatcaaataggctatattgtcacaagcttttgaagaaaactccctatgaattgctcattggtagaaagccaaatatctcatattttagagtattcggttgcaaatgctatattttgagaaagggaagccggctctctaaatttgagaagaaatgtgatgagggttttctacttggatattcatcaaatagtaaggcttatagagttttcaacaaaactcatggtattattgaagaagcatatcatgttgagtttgatgaaactaatgggtctcaagatgaaagttataatcttgatgatgttagtggcactcaattgaaaaatgctatgaaaacaatggccattagtgaaataaagccaaagaaagatgatgatgagaatagtgtggttgtcattccatcctcttcaaccctaaatgaagaaaatcaccaaagccaaaataatgatgaaattatggatactcatgatcaagatacttcaagtcattcggttcctcctcatgcttcaactagcaattatcaaacagtatcaagaattcatcattctattgtgaaggatcacccggttgatcaaattgtggttgatattaatgaagctctacttgatgttgattgggtgaatgcaatgcatgaagaattaaataacttcactcgaaatgaagtttgggagcttgttgagagaccaaagaaccacaatgttattggtacaaaatgggtgtttcgcaacaagcacaatgaagatggattagtagtaaggaacaaggcaagattagttgctcaagggtatactcgaatagagggattggattttggtgagagatttgctcccgtggcaaggttggaagcaatccggatccttcttgcttatgcttgtgctcacaatatcaaactctaccaaatggatgtaaagagtgcctttctaaatggtaagattagtgaactagtgtatgttgaacaaccccccgattttgaggaccccaaaagacctatccacgtgttcaagctttctaaagctctctatgggcttaagcaagctccacgcgcttggtacgaaaggcttagggatttcttgctttccaaagactttagaattgggaaggttgacactaccctattcactaaaataattggcaaagatttgtttgtttgtcaaatttatgttgatgatattatttttggatctactaatgaattattttgtgaggaatttggaaaaatgatgtcaaaagaatttgaaatgtctatgataggagaattgagcttcttccttggtcttcaaatcaaacaattgaaagatggaatctttataagtcaatcaaaatatttgaaggatatgctcaagaagtttggcttagagaatgcgaagcctatcaagactcctatggcaacaaatggtcatctagacttagatgagggagcttcacctagagagattcacttgaaggccgcaaaaagaattctaagatatttgaagtatactcccaatattggtctatgtggtctaggtggtcttcggaagaagcttgccggtcgtttcaaatcaaagcgccctcgtgtagacgatgcagactataatccaaccacagactcagaggcccaatctttagctgggggtagtgtctctatggacacagaagatgttccacatgctcatcctgactatccgattgagatcacgggatggccttatccaaagaggaggaccgatttcagtgagatggctgtaaaacaattgttagccactgctgagattgatatcgatgaggaatccatcacatggatgactagtttcaagaggtattatgcaacatttgctgaatttgctactccaaacagtctggattatgatacaatttcagctgggattgatttgtacactgaagataactttgaagaatttgtgcaattttatgagccagcaaggctgggaattcctaggaggtttggtgagactgtagaactgaggcatcatcctgctgtgattaacaaaatttctagagttacaattcttcccaagagtggagacaagagcaaaattagagacaagttctggaacattatccaccatgtcatgaatggtgaggtaatgaatgttgtgctattcatgatgagacaattaaatgacctcaaaatggacaaaaaccagaacttagcctatgctccatacattatggttctcattaaagccaagactaaatttgaggggcactgtgagatagttcacacaccttttaggcccttgaagaatgagattgggttcctcaccaggcctcttactcccttcccagatgatgaggaagaagctggtgatgatgcaggagaagctcctgaagctgatgcagagcagatgcctcctcctctacctcctcctcagcctcagcagtactggcagcctggtccaggctattttgacccttactttcagaacatgcaacaagggctccagacccacatggatggccgcttctag

SEQ ID NO: 5231 - DNA, 4341 bp, Zea mays
  Clone ID: TF_ZM4550.C1.o1.fg
atggatcctaagggaaaggggatggtggtcaacgacaaagagaaggagtccatcttcaacgagccaagagacgacaagcccactgactctagctcgagtcacaagaagaaggacgggaagaagaagaggcgcatcaagaagatcatttactacgatagcgacgcctcctcttcttcaccaagagacgacgacgaaaatgactcgtcgaaaaagaaatcggtgagaggcttggacaacgccaaacaaatctgggacaccctcaagatatctcatgagggaaacgacgccaccatgatcaccaaaatggagttggtggaaggcgggctagggagatttgcgatgatcaggggagaggagccaacacagacctacaacaggctcaagaccctcatcaacaagattagaagctatggaagcacaagatggacggaccacgacgtcgtccgacttatgctaaggtcattcacagtaattgacccccatcttgtaaaccttattcgtgaaaatcccagcagggaggcgctaccaagcaaggtggcacaagttgaggctgccgggctaaacgaagaagagatggctctaatcatcaagcgcttcaagaccgcactaaaaggacgcaaggagtaccccaacaagaacaaagcaaggggaaagtgctcctgcttcaaatgcggtaagactagtcatttcatagcacaatgccccgataatgataatgaccaggaacaagaaaagcatgggaagagggagaagaagaaggtttacaagaaggcgaagggcgaggagcaccttggcaaagaatgggattcagactgctcttcatccgactctgacgatgaaggattggttgcctcgaccatcgacaaatcttcgctcttccccaacgaacgccatacatgtcttatggctaaggaaaagaaggtatgtattcggaacactcccaagtatacttcttctagtgatgaagagtcatctgatgatgaagtggactatattgatttgtttaaaggcttagatcgaaacaaagtagacaaaattaatgaattaattgatgcccttaatgaaaaggatagattgctagagaagcaagaagatattttgtatgaagagcatgacaaatttattagtgttcagaaatctctcgctttagaaattaaaagaaatgaagtgctatcctctgaattgtttgcttgccatgaatctgtctctagtttaaggagtttaaaggatgaattaaatactaagctagaggaggttagtaaaataaattcatgtgtagagcatgttagtatttgtaatagatgcaaggactttgatgttgatgcatgtaacgaacatcttatttctattactaagttgaatgatgaagtggcaggtcttaatgctcaacttaagacttgcaaaaataattttgataaattaaagttttctagggatgcctacactgttggtagacacccctcaattaaggatggtcttggttttcaaaggaaaaccaagaactcaacaagccaaaaggctcccattctcaccaaggagaaagggaaggcccctatggctagtagtcctcaaagaaaccatgcttttatttatgataggaaaagtgctagtcacaataagagtcatattcatgttgcttataatgattcccatgctatgtttgcctctagctctacttttgtgcatggtagaagtaggcctaggagaagtaatattgtacctcatgtgcctaggagaatgtgcaatgaaccttctaccatttaccatgcttgcaatacttcatttgcgctcttatgtttatgcatccgggggctcaagctggattatcgacagcggatgcacaaaccacatgacgggggagaagaagatgttcacctcctacgtcaagaacaaggattcctaggattcgatcatctttggagatgggaaccaaggcaagatgtatctgtctttataaggagtgatggttcattagcttttaagggtgtattagacggcaaattctacttagttgatttttcgaaagaggagaccgatctagatgcatgcttaatagctaagactagtatgggctggctgtggcatcgtcgtctagcacatgttgggatgaagaaccttcataaacttctaaagggagaacatgtgttaggactaaccaatgtttgcttcgagaaagatagaccttgtgcagcttgtcaagcagggaaacaggtgggaagcactcatcacagcaagaatgtgatgacaacatcaagacctctggagcttcttcacatggacctcttcggacccgttgcctaccttagcatcgggggaagtaagtatggtcttgtaattgttgatgatttttcccgcttcacttgggtgttctttttgcaggataaatcagaaacccaagggaccctaaagcgctttctaaagagggctcaaaacgaatttgagctcaaggtgaaaaagataagaagcgacaacgggtccgagttcaaaaaatttcaagttgaggaatatcttgaggaggaaggcgtcaagcacgagttctccgctccctacacaccacagcaaaacggtgtagtagagaggaagaacaggacgcttattgacatggtgaggacgatgcttggagagtccaagatgcccgagcggttttggtcggaagctgtgaacgcagcctgccacgccataaaccggctatatctgcatcgcctcctcaagaagacctcctacgaactccttatcggtaacaaacccaatgtctcttactttcgtgtatttgggagcaaatgctacattttggtgaagaaagtctctagcgatgttgtatttgatgagactaatggctctccaagagagcaagttgatcttgatgacatagatgaagatgatgttctgacggccgcaatgcgcacgatggcgataggagaggtgcgaccacaggaacaacaggagcaagatcaaccatcttcctctacaatggtgcatcccccaactcgagatgatggacaggttcctcaagaagaggcgcgtgatcaaaggggagcacaagaagaacaagttatggaggaagaagcaccactggcccctccaactcaagtccgagcgatgatccaaataaatcaccccgtcgatcagattctaggtgacataagcaagggagtaacaactcgctcacgtttagctaatttttgtgaacattactcgtttgtctctactattgagcctttcagggtagaagaggccttgcaggatccggactgggtgttggccatgcaggaagagctcaacaacttcaagaggaacgaagtttggagcctggtgccacgtccaaagcaaaatgttgtgggaaccaagtgggtgttccgcaacaaacaagacgagcacggggtggtgataagaaacaaggctcgacttgtggcaaaaggttatgcccaagtcgcaggtttggatttcgaggagacttttgctcctgtggctaggctagagtcaattcgaatattattagcctatgccgctcaccactctttcaggttgtttcaaatggatgtgaagagtgctttcctcaatgggccaatcaaggaggaggtgtacgtggaacaaccccctggctttgaggatgacaggtatcccgaccatgtgttcaaactctctaaggcgctctatggacttaagcaagccccaagagcatggtatgaatgccttagagatttcttaattgctaatgctttcaaggttgggaaagccgatcccactcttttcactaagacttgtgatggtgatctttttgtgtgccaaatttatgtcgatgacataatatttggttctactaaccaaaagtcttgtgaggagtttagcagggtgatgactcaaaaatttgagatgtcgatgatgggcaagttgaactacttccttgggttccaagtgaagcaactcaaggacggcaccttcatctcccaaacgaagtacactcaagatcttctcaagcggtttgggatgaaggacgccaagcccgtgaagacacctatgggaaccgacgggcatgtcgacctcaacaaaggaggtaagtccgttgatcaaaagacataccggtctatgatagggtcattactttatttatgtgctagtagaccggatattatgcttagcgtatgcatgtgtgctagatatcaatccgaccccagggaatgtcaccttgtggccgttaagcgaattcttagatatttagtttatacgccttgcttcgggatctggtatccaaaggggtctacctttgacttgattggatactcagactctgattatgctggatgcaaggttgataggaagagtacatcagggacgtgctaa

SEQ ID NO: 5232 - DNA, 2353 bp, Zea mays
  Clone ID: TF_ZM4646.C1.o1.fg
atgtcgggagatcacgccaagaaggagatggagaccggcgaaaagcccactacaagccatgggagcacttcattcgaagagtcccgcaccaagagaaaggagaagaagaactcctccaaagggaaggagaagaagacttcttcacaccaaaaggagaagaaggagaaaaccttttctcacaagacgcgtcgaagtggggacaagaaaaagaggatgaggaaagtggtctactacgagaccgattcttcatcgccatccacctccggctccgacgcggcttccgtcacttctaagcgccaagagcgcaagaagtatagtaagattcccctacgctatcctcgcatttccaaacatacacctttactttccgtcccattaggcaaaccaccaacttttgatggtgaagattatgctaggtggagtgatttaatgcgatttcatctaacctcactccacaaaagtatatgggatgttgttgagtttggtgcacaggtaccatctgtaggggatgaagactatgatgaggatgaggtggcccaaatcgagcacttcaactctcaagcaacaacaatactcctcgcctctctaagtagagaagagtataacaaagtgcaagggttgaagagcgccaaggaggtttgggatgtgctcaaaaccgctcacgaaggagatgagctcacaaagatcaccaagcgggagacgatcgagggggagctcggtcggttccggcttcgcaaaggggaggagccacaaaacatgtacaaccggctcaagaccttggtgaatcaagtgcgcaacctcgggagcaaaaagtgggatgaccacgaggtggataaggttattctaagatctcttattttccttaaccctactcaagttcaattaatccgtggcaacccaaggtatacactaatgacccccgaggaagtaatcgggaattttgtaagttttgagtgcatgatcgaaggctcgaggaagatcaacgagcttgatgatccctccacatccgaagctcaacccgtcgcattcaaggcgacggaggaaaagaaagaggagtctacaccaagtagacaaccaatcgacgcctccaagctcgacaatgaggaaatggcgctcgtcatcaagagcttccgccaaatcctcaaacaaaggagagggaaagactacaagtcccgctccaggaaggtttgctacaagtgtggtaagcccggtcactttatagctaaatatccattatcaagtgatagtgacaggggcgacgacaagaaggggagaagaaaggagaagaagaggtactacaaaaagaagggcggcgatgcccatgtttgtcgggagtgggactccgacgaaagctctagcgactcctccgacgacgaggacgccgccaacatcgccgtcaccaagggacttctcttccccaacatcggccacaagtgcctcatggcaaaggacggcaaaaagaaggttaaatctaaatcccccactagatatgaatcctctagtgatgataacgctagtgatgaggaagataatttgtgcactctttttgccaacctcaacatgcaacaaaaagagaaacttaatgaattgattagtgccattcatgaaaaggatgatctcttggatacccaagaggacttccttattaaagaaaataagaagcatgttaaggttaaaaatgcttatgctctagaaattgagaaatgtgaaaaattatctagtgagctaagcacttgccatgagacaatagacaaccttagaaatgaaaatgctaatttgttagctaaggttgattctcatgtttgtaatggatcaacttccaatcctagagatgttaatgatgatttgcttgctaggattgaagaattaaacttatatcttgctagccttagaaatgaaaatgaaaaattgcttgctaaggctaaagatgttgatgtttgcaatgctactatttccgaccttagaagtaaaaatgaaatattgcatgctaaggttgtagaactaaaatcttgcaaatcctctacatctaccgttgagcacacttctatttgcactagatgtagagatgttaacattgatgctatacatgatcacatggctttaattaaacaacaaaatgatcatatagctaaattagatgctaaaattgccgagcataacttagagaatgaaaaatttaaatttgctagaagtatgctctataatgggagacgccctggcatcaaggatggcattggcttccaaaggggagacaatgtcaaacttagtgcccctcctaaaagattgtcaaattttgtaaagggcaaggctcccatgcctcaggataacgagggttacattttgtaccctgccg

SEQ ID NO: 5233 - DNA, 3998 bp, Zea mays
  Clone ID: TF_ZM5007.C4.o1.fg
atggtggtcaacgataaggagaaggaatccctcttcaatgagccaagagacgacaagcccactgactcaggctcgagtcacaagaagagggatgggaagaagaagagacgcatcaataagatcatctactacgacagtgatgcatcatcttcttcaccaagggacgacaacgacgacgacgactcttcatcaaagaaaaagatggttaatcaaaattattcttttgattactctcgcattccctataattcaaatgtgcttctacattcaatcccccttggaaaacctccacactttgatggagaggactattcgttttggagtcataaaatgtgtagtcatttattctctcttcatcctagcatatgtgaaattgtagaaaatgggatgcattttgatagcactgataatcctgtgattattaatgagcaaatccataaaaatgcccaagctactactgtgttgttagcatctctttgcagggacgagtataataaagtgagtggcttggacaatgccaaacaaatctgggataccctcaagatatcacatgagggaaatgatgccactatgatcacaaagatggaactagtggaaggcgagctggggaagttcacgatgatcaagggagaggagccaactcagacctacaacaggctcaagaccctggtcaacaagatccgaagctacagaagcacaagatggacggatcatgatgtcatccgactcatgctaaggtcatttactataattgacccctatcttgtgaatcttattcgtgaaaaccccaggtacaccaaaatgacatccgaggagatcctcagaaatttcgagagcgggcgcatgatggtgaaggaggctcgatacatggacgatgcactaaacggcccactacccgtctacgagccacaacccgtttctctcaaagcaaccagcagcaggaaggcgctaccaagcaaggtgacacaagtggaggctgccgggctcaatgaagatgaaatggcgcttatcatcaagcacttcaagaccgcgcttaaaggacgcaaggagtactccaacaagaacaaaacaagaggaaaacgctcctacttcaaatgtggtaagactggtcatttcattgcacaatgtcccgataatgataatgagcagggacaagaaaagagcgggaagaaggaaaggaagaagaactataggaagacaaagggcgaggcacattttggaaatgagtgggattctgactgctcctcatctgactccgacgatgaaggattggctgcctcggccttcgacaagtattcgctcttccccaacgaacgccacacttgcctcatggccaaggagaagaaggtacgtattcgatattcccctaagtactcttcttctagtgatgaggaatcctccgatgatgaagtagattactctagtttatttaaaggtctagataaagccaaagtagagaaaattaatgaattaattgatgctctaaatgaaaaagatagactgctagaaaagcaagaggacattttgtatgaggaacatgacaaatttgttagtgtacaaaaatctcttgctttagaaactaagagaaatgaaatgctatcttttgagttatctgcttgccatgaatctatctctagtctaaagaatgtaaatgatgaattaaatgctaagctagaggaagttagtaaaacaagttcatgtgtagagcatgttagtatttgtaatagatgtaaggactttgatgttgatgtctgtgatgaacatcttatttctattactaaattaaatgatgaggtggcaagtcttaatgctcaacttaagacttgcaaaattgattttgataaattaaaatttgctagggatgcctacactattggtagacacccctcaattaaagatggacttggttttcgaaaggaaaccaagaacttaacaagccaaaggattcccgttctcaacaaggagaaagggaaggcccctttggcgagtagtcctcaaaggaaccatgcctttatttatgataggaaaattgctagttgttctcattataataagagttatgttcatactgcttataatgattcacatgctatgtttgcctctagatctacttttgttcatggtagaggaaaatgtgcaatgaacccactactgtttttcatgcttgcaacacttcttttgtactttcatgtttatgcatccgggggttctagctggataatcgacagtggatgcacaaaccacatgatgggggaaaataagatgttcacctcctacgtcaagaacaaggattcccaggattcgatcatctttggagatgggaaccaaggcaaggtcaaaggattaggaaaaatagccatttcatccaagcattctatctctaatgtgtttttagttgaatcgctcggctataacctgttatctctttggcatcgccgtctagcacatgttgggatgaagaaccttcataagcttctaaagggagatcatgtgttaggactaactgatgtctgttttgagaaagacagaccttgtgcagcatgtcaggcaggaaaacaggtgggaagcactcatcacggcaagaatgtgatgacaacatcaagaccactagagcttcttcacatggacctcttcggacccgttgcctatctaagcatcgggggaagtaagtatggtcttgtaattgttgatgatttttcccacttcacttgggtgttcttcttacaggataaatcagaaacccaagggaccctaaagcggttcttaaggagagctcaaaatgagtttgagcttaaagttaaaaagataaggagcgacaatgggtccgaattcaagaatctacaagttgaagagtttcttgaggaggaaggcatcaagcacgaattctccgctccctacacaccacaacaaaacggtgtggtagagaggaagaacaggacgcttatcgacatggcaagaacgatgcttggagagtttaagatgcccgagcggttttggtcggaagctttgaacacagcctgccacgccataaaccggctctatttgcatcgcctcctcaagaagacctcctacgaacttcttactggtaacaaacccaatgtctcttactttcgtgtatttgggagcaaatgctacattctggtgaagaaaggtagacactctaaatttgctcccaaggctgtagaaggttttttactaggatatgactcaaatacaaagctgtatagtgtcttcagcaaatcatcgggattagttgaaatctctagcgacgttgtatttgatgagactaatggctctccaagagagcaagttgatcttgatgatatagatgaagatgaagttccgacggccgcaatgcgcacaatggcgatagatgatggacaaatacctcaagaagaagggaaggatcaagggggagcacaggaagatcaagtggtggaggaagaagcaccacgggcccgtccaactcaagtccgagcgtcgatccaaaaacatcaccccgtcgaccagattttgggtgacattatcaagggagtaactactcgctcacgattagctaatttttgtgagaattactcgtttgtctcttctattgagcctttcagggtagaagaggccttgcaggatccgaacttggcgttggccatgcaggaagagctcaacaacttcaaaaggattgaagtctggagcctggtgccacgtccaaagcaaaacattgtgggaaccaagtgggtgttccgcaacaagcaagacgagcacggagtggtgacgagaaacaaggctcgacttgtggcaaaaggttatgcccaagtcgcaggtttggattttgaggagacttttgctcgtgtggctaggctagagtcaattcgaatattattagcctatgccgctcaccattcctttaggctatttcaaatggacatgaagagcgctttcctcaacgggccaatcaaggaggaggtatacgtggaacaaccccctggctttgaggatgacag

SEQ ID NO: 5234 - DNA, 1025 bp, Zea mays
  Clone ID: TF_ZmC4916_455
caggccgactctagatgttcggagatcactcatgacgggatgaaaccacctaaaactcccgagatgtctcactacgagtgaagaaaaaagaaatgcatttgaatgttagagccgaaaattgcttgtatggatctcttaacatgaaagtttttaatcaagtttttactttaaaaactgctaatgagatttggcttaaattacatgagctccatgacgacacatccaatgtccatgagcaaaaacattgcctagctttaaatgattataattcttttgccatgaaagagaatgagcttgttagagacctgtactctcgtttgaatctaaccatcaatgagtttaattctattggaattaataagctaggtgatgcggacattgtgaggaagattatctccctgctaccacaacaaagatatgggagcatcatcaccatccttcacaacatggaggacttgagcaacatgaccccgaccattgtgattgggaaaatcgcggcctttgagatgtcgcgaaaaatgagtcggggagaggagccaacttcctcaaggccatatgcttttgcatgtgatgaaaggaagggcaaaaagaaggctcccactccaagttcctcaagtgaagaagaggaagaagaagaaagtgatgatgatgaagataatcaaccatgcacatcatcctccgaggacgaagaaacaatccgacgcgtcagaaaggtcaaggatcttctctttaacattgacaggaaaaagcaaagaaagagaggatgctttgcatgtggggagaagggccacttcagggatagctgtccaactatggccgaacccaaaaaggagaggagcaaaggcaaggcgctaacaagtgttagaacttgggatgactcttcaagtgaagacgaacctccaagaacgcgcagccaccggtcctcatcacgctcatcacacaaatgccttatggcaagaggtaacacaaacactccatcctctagtgatgaaagtagtagtgatgatgaaggtgagggaaagtga

SEQ ID NO: 5235 - DNA, 837 bp, Zea mays
  Clone ID: TF_ZM4623.C4.o7.fg
atgacaagggaagctggacaagaatctggatcctcagagcgcatgggaggaggttttgctgttgtgctaaagcctgatccttttaatggtaaaaacttcttgattcggaaagctaaaatgaaattgtggcttactgcaatgtcttgttttcatgccgttgagggcaagcctgccaacttacctcctgaggatgaggctaagtttaaggctaaagacaacctctttcgaggagcagtaattagcgcacttgatacaaaatttcagaaaagctatatcatccttcctacagggaaagagctgtgggatgcacttgttggaaagtttggagtaactgacgctgagctcattggtactctcgatgttgaggaaagggctagaacgaaggacaatggaaaaggtgtggagacctctactgctaatgtggtgcagaagagaaacttccgtaagttcaacaagaagaaaaaccagaacaaacaagagaatacaaataaacctgttcaaacaacacagtttaaaaagaagaacaacaacaataacaagggaaagggaggatgctttgtctgtggcagtgatcaacattgggctagagagtgccctcatcgcaagttcacacaggacaagaaatcagctaatgttgtaaccactgaaactggagatggaacatctgggtatggtcaggaggtctggcgccttgttaatgggaaatgggtcatgtgcttatgttcttggtgttggtacggtcattctgaagtttacttcgggaaagacggtgtctgtcggtaccctgaaactagggtaccccttgtaaggaaaatggaccccgggccttttggctaa

SEQ ID NO: 5236 - DNA, 1562 bp, Zea mays
  Clone ID: TF_UC-ZMFLMO17035D05_FLI
ggagagggagggctcttccagacacgcgaattgcctcacgcgaattgcaagcaacacattcccgtcccaccttctgcgagcacagagagagtgggagagcaggcctccgaaatcaccgaccgcagagatacacttgcacgggtgtgcgggcgatcagatttttggggagcgtcttcgcgactgctcgcgtgatctgcttcgtcttcttcccggcgaccgttcgagggactgcactgcgtacaccttcctgcatcgacttcgtacggctacatcgaacaaacacacgagatgactcgtgtgaatggagccactgatgccttgagcatcggtccctccgctgggcatttttccgctggtggttttgctgctgcgttaaaaccaagtgaaccttttgatgggacattttacaagagatggcgtagtaagatgatactgtggttgaccgcaatgaactgctatcacgccgcacaggggaaacccgaacagttcactcctgaagaggagagaatgttcgacgttgccgataacctgtttcgaggcgccgtgattggcgctcttgccaacaagtatgttgattcttatctaacgtgcacatctgcaaaagagttatgggatgcattagatgagaagtttggtgtttctgatgctggtagcgagctgtacatcatggagcagctgtttgactataagatggtggaaaaccgtcctgtagttgaacaggctcatgaaatacaggcactggctaaagaactcgaacaattcccatgtgtcttacctgacaagttcgtggccggcggtattatcgctaaactgccaccttcttggacggattttgctaccactctaaaacataagagacaagagtttagcgtggctgagcttattggttctcttgatgttgaggagagggcgagagcaaaagacactcgtggaaaaggagttgagacttctagtgccaatatggtacaaaagaagaactccaatgcatcacataataataaaaagaaaaacaagcaacagaatgccacgaagcccaagcaggcagcctcgttcaaaaagaagaacaaaggagctggttgctttgtttgcggaagtactgatcattgggcaagcgcttgtccagaccgcaaatttaagcaagagaaaaaaccagctcaagagaagaaaacagtaaacatggttgttagcgagactgcagaaggaacatcgggtgcaaagggactggagccttgctgatggggaacggatcacatgcgcgtgttcttggtgttggtacagtcattctgaagtttacttcgggaaagacggtgctattgaagaacgtgcagcatgtcccctccatcaaaaagaatctagttagtggctctcaattgtgccgagatggctacaaaattgtctttgagtctaataaatgtatactgtctaagtatggaacgtttgttggaaaaggctatgacagcggaggcttgttccgcttatctttgcatgatgcgtgtaataagtctgtgaacaatgttgtttcgaatgagtcgtatatttggcattcacgactttgtcatatc

SEQ ID NO: 5237 - DNA, 589 bp, Zea mays
  Clone ID: TF_ZmC119_896
attctttaagctagagatagattcatgataggtagacagctcaaagcatagcatttcatttctcttaatttatagagcaagagatttttgaacactaatgaatttatcatgttcctcatagaaaatatcttcttgcttttctagcaatctatccttttcattaagagcatcaattaattcatttattttgtctaccttagttctatctaatcccttaaacaaattagtgtagtctacttcatcatcagatgattcttcacactagaagaagtatatttgggagtgtcccgaatacataccttctttttcttagccataaggcatgtatggcgttcgttggggaagaacgaagatttgtcgaaggccaaggcggccagtccttcatcgtcggagttggatgagtaacagtcggagtcccattcctttccaaggtgcgcctcgcccttcgccttcctatagttcttcttttctccttcccatgcttttcttgtgcctggtcattctcattatcgggacattgagctataaaatgaccagtcttactgcatttgaagcaggagtgttttccccttgacttgttcttgttggg

SEQ ID NO: 5238 - DNA, 1230 bp, Zea mays
  Clone ID: TF_ZmC3792_76
atgtcagagaataggcgcagaggaggaaggcgtgctcagcaggagcgagccgctcaacaggaggaggcgccccagcagcagcagctgccgcccccgcccccgatgtccatcgagcagatgtttctgatgcagactcaggcagttcaagccatcggtcagaccttggccgccattcagcagcagcagcagcaacagcagcaagcaccacctcagcctcagatgcctcagatgcccagagacaagcgtgctgaattcatgagaggtcatccaccaacgttcgctcattcttctgaccccatggatgctgaagattggctacgcactgtggagcgggagttgcataccgctcagtgcgatgacagggagaaagttctgtatggtccccgtctgttgagaggagcagcccagtcatggtgggagtcttacctcgccacccatgccaaccccgacaccatcacttgggaagaattcaggggtagctttcgtcagtaccatgttcctgcaggtctgatgacagtgaagaatgaggagttcctggccctcaagcaagggccattgtctgtcagtgagtaccgggacaagtttctgcaattgtctcgctatgctcctgaagatgtcaacactgacgccaagcgacaataccgttttctgagaggcttggtcgaccctctgcagtatcagctgatgaaccacaccttcccgacattccagcacctgattgatagagcgatcatgacggagagaaagcgcaaggagatggaagatcgtaagcgcaagatcagtggaccgcagcctggaagcagtagtcgtcctcgtttctcaggcaatcaacctcatcagttcaggcagaaccagcgtccacctcagcagcatcagcagtttcaaaggcagtaccctcagaatcagtaccagaaccgtcagagcaatcagtcaggaggtcagtttcagaagcagaatcagcaagcacctcgtcttcctgccccagcaaatcagcagaacagtcaggcagcaccagctcaggttggaaacaaggcatgtttccactgtggagagcaaggccactgggtgatgcaatgtccaaagaaggcagcccagcagcagtcaggccccaatgccccagcaaagcagaatgtgcctcagcctggagcaggcaatcgccctcaacagcgctataatcatggaagattgaatcacttggaggctgaagcagttcaggagaccccggcatga

SEQ ID NO: 5239 - DNA, 4476 bp, Zea mays
  Clone ID: TF_ZM3641.C4.o2.fg
atgtcgattgagcagatgtttctgatgcagactcaggcagttcaagccatcggtcagactctggccgccattcagcagcagcagcagcagcagcaggctccaccccagcctcagatgcctcagatgcctagagacaagcgtgctgaattcatgagaggtcatccaccaacgttcgctcattcttctgaccccatggatgctgaagattggctgcgcaccgtggagcgggagttgcataccgctcagtgcgatgacagggagaaagttctgtatggtccccgtctgttgagaggagcagcccaatcatggtgggagtcttacctcgccacccatgccaaccccgacaccatcacctgggaagaattcagaggcagctttcgtcagtaccatgttcctgcaggtctgatgacagtgaagaaggaggagttcctggcccttaagcaaggatcatcgtctgtcagtgagtatcgagacaggtttctgcaattgtctcgctatgctcctgaagatgtcaacaccgatgccaagcggcagtaccgttttctgagaggcttggttgaccccctgcagtatcagctgatgaaccacaccttcccgacattccagcacctgattgacagagcaatcatgacagaaaggaagcgtaaggagatggaagatcgtaagcgcaagatcagtggaccccagcctggaagcagcagccgtccccgtttctcaggcaatcaacctcagcagttcaggcagaaccagcgtccacctcagcagcatcagcagcgtcagcagtatcagcagttccaaaggcagtaccctcagaatcagtaccagaaccgtcagagcaatcagtcaggaggtcagtttcagaagcagaatcagcaagcacctcgtcttcctgccccagcaaatcagcagaacagtcaggcagcaccagctcaagttggaaacaaggcatgtttccactgtggagagcaaggccactgggtgatgcaatgtccgaagaaggcagcccagcagcagtcaggccccaatgccccagcaaagcagaatgtgtctcagcctggagcaggcaatcgctctcagcagcgctataatcatggaagattgaatcacttggaggctgaagcagttcaggagacccccgacatgacagtaggtatgttcccagtcgattcccatattgcagaagtgttatttgatactggagcaacacattctttcattactgcatcatgggtagaagcacataatcttccaactactaccatgtcaacccccattcaaattgactcagccggtggtagaattcgagccgatagcatttgtttgaatgtaagtgtggaaataagggggatagcgtttcccgccaaccttatagtaatgggtactcagggaatagatgtcatcctagggatgaattggttagataagtatcaggcagttatcagttgtgataaaaggacaatcaagttggtgtccccactaggagaggaagtggtgaccgagttagtcccgcctgggccgaagaaaggaagttgttatcagatggctgtcgatagcagtgaagcagatccaattgagagtatcaaggttgtgtctgaattcccagatgtgtttccaaaggatttaccgggtatgccaccagagcggaaagttgagtttgctatagagcttcttcctggaaccgcccccatctctaagagagcttacagaatatctggaccagagttggttgagcttaagaagcagattgatgagctgtcagagaaaggttacatccggccaagcacctcgccttgggccgcccctgtcttgttcgtggaaaagaaagatggttctaagaggatgtgtattgattatcgagctttaaatgaggtcacgatcaagaacaagtatcctttgcccagaatagaagatctgttcgaccagttgagaggagccagtgtgttctccaagattgatctgaggtcaggttatcatcagctcaggatccgaccttcggacattccgaagacggcattcattaccaagcatggtttatatgagttcacagtgatgtcttttggtttgaccaatgcgccagcattctttatgaacttgatgaacagtgtattcatggattatcttgataagttcgtggtggtattcattgatgacattctggtttattctcaaagtgaagaagagcatgcagatcatttgaggatggtattgcagagattgcgagagcaccagttgtatgcaaagttgagcaagtgtgagttctggatcagtgaagtcctgttcttgggtcacataatcgacaaagaaggattagctgtggatccgaagaaagtggcagacattctaaactggaaagcgccaacggatgctcgaggaatcaagagcttcattggaatggccggatattatcggcgattcattgaagggttttcgaagattgcgaagccaatgacagcgttgctaggcaacaaggttgagttcaagtggacccagaaatgccaagaggcctttgaagcgctgaaagagaagttgacaacagcgcctgtcctagtcttgcctgatgtgcacaagcccttctcggtgtattgcgatgcttgttacacaggtttgggatgtgtgttgatgcaagagggaagagttgtggcttactcgtcccgacagctgaaggttcatgagaagaattacccaatccatgatctagagttggcagcagtggttcacgcactgaagacatggaggcactatctgtatggacagaaatgcgatgtttacacagaccacaagagtctgaggtacatattcactcagtcagaattgaacatgaggcaacgaagatggttagaattgatcaaagactatgagttggagattcattaccatccaggcaaagcaaacgtagtggcagatgctttgagcagaaagagtcaagtcaatctgatggtcgctcgtccgatgccttatgagttggccaaggagtttgacaggttgagtctcgggtttctgaacaattcgcgaggagtcacagttgaattggagcctaccttggagcgcgaaatcaaagaagcgcagaagaatgatgaaaagatcagtgagattcggcgattgattctagatggcagaggcaaagattttcgagaagatgcagaaggtgtggtatggttcaaagaccgcttgtgtgttcccaatgtccagtctattcgggagttgattctcaaggaagctcatgagacagcttattcgattcaccctggcagtgagaagatgtatcaggatctgaagaagaaattctggtggtacggaatgaaaagagaaatcgcagagcatgtggctatgtgcgatagttgtcgaagaattaaggcagaacaccagagaccagctggattgttgcaaccgttgcagatccctcagtggaaatgggatgaaattggtatggatttcatagtcggattgcctcgcactcgagccggctacgattccatttgggtagtagtggaccgcttgaccaagtcagcccacttcatacctgtcaagaccaactacaacagtgcagtattggcagaattgtatatgtctcggatcgtttgtcttcatggtgtgccaaagaagatagtgtcagacagaggaacgcagttcacctctcatttctggcagcagttgcatgaagccttgggcacgcatctgaatttcagttcagcttatcacccgcagacagatggtcagaccgaaagaaccaaccaaattcttgaagacatgttaagagcctgtgcgttgcaagatcagtccggatgggacaagagattgccttatgcagagttttcctataacaacagttaccaggccagtttgaagatgtcaccgtttcaagcgctgtatggaaggagttgcagaactccgttgcaatgggatcagcctggagagaagcaggtgtttgggccagacattttgctcgaagccgaagagaacatcaagatggtccgagagaatctgaagatagcgcaatcaaggcaacgaagctatgcagacacaagaagaagagagctgagtttcgaagtcggagactttgtttatctgaaagtgtcaccgatcagaggagtcagaagattcggagtcaaaggcaagctagcaccccgctacattggtccgtatcagattcttgcgagacgtggagaagtggcttatcagctcagcctgccagagaatttgtctgctgtgcatgatgtctttcatgtgtctcaattgaagaagtgtttgcgtgtgccagaagagcagttgccagtggaaggtcttgaggtccaggaggacttgacctatgttgagaagccagctcagatccttgagattgcagatagagtcacccgaaggaagaccgtcagaatgtgcaaagtcagatggagtcaccactctgaggaagaagcaacctgggagcgtgaagatgatctgatggccaagtacccggagctctttgctagccagccctga

SEQ ID NO: 5240 - DNA, 2301 bp, Zea mays
  Clone ID: TF_ZM4598.C1.o4.fg
atggatcctaagggaaaggggaacatgatcaacgacaaggaaaaggagaccctctatgttgatgagccaaaaggtgacaagcccaccaactcaggctcaaacaaaaagaggaaagatggaaagaagaagaggcacatcaagaagatcatctactacgatagcgatgcctcctcttcttcaccaagggatgacgacgacgaagactcatccacgaacaagaaaacgcaaattcataagaatgcccaagctactacaatgttgttagcatctctatgcagggatgagtacaataaagtcagcgacttggacaatgccaagcaaatatgggacacccccaagatctctcatgagggaaatgacaccaccatgattacaaagatggaattggtggaaggtgagcttgggagattcgccatgaaaaggggagaggagccaaccgaaacatacaacatgcacaagaccctggtgaacatgatccgaagctatgggagcacaagatggacggatcatgatgtcattcgactcatgctaaggtcatttactgttattgatcctcatcttgtaaaccttatacgtgagaatcctaggtacatcaagatgacacccgaggaaattctcggaaaatttgtaagagggcgcatgatggtaaaggaagttaggtgcgttgatgacattgccaacagaccactcccactaaacgagccgaagcccactgccctcaaggcaacaagcagcaaggacacgctacctaacaaggtggcacaagtggaggctgcagggctcaacgaggatgaaatgacgcttgtaatcaagcgcttcaagaccgctttgaagggacacaaggaatatcctaacaagaataaatcaagggggaagcgctcctgcttcaaatgtggtaagtctggtcattttatagcacaatgtccctgtcccgataatgacaatgaccagccacaagaaaagaaagagaaggagaggaagaaaaactacaggaaggcgaagggcgaggcgcacattggcaagtgtaaagattttgatattgatgcttacaatactcatccttttaccattcttaagttgaataacgatgttgcaaatcttaatgctcaacttaagacttgcaagagtgaaaatgataaaataaaatttgctagggatgcctacaccattggtagacatccatccattaaggatggacttggtttccaaaagagcatcaagaacttaacaagccaaaggacttccaatctcgtcaaggagaaagggaaggttcctatggctagtatcactcattcttctcatgatagaaagaatcatgcttatttgtgtgctcatgttaagaatgcctctaacattgctcatcatgataattgttataatcatgttgttttacctgaacatcatgatgctatttttgattctcatgccatgtttgcatactctaactctttttatgttcatggtttatgcatccggggcacaagctggattattgatagcagatgcacaaaacacatgacgggggagaagaaaatgttcacctcctacatcaagaacaaggattcccaagacacgatcatctttggagatgggaatcatggcaaggtcaaagttttggggaaaatagccatcactaccgagcattcaatttctaatgtgtttttagtagaatcgcttggttacaatttactttctgataaatcagaaacccaagtggaagagtatcttgaggaggaaggtatcaagcatgagttctctgctccctacacaccacaacaaaatggtgtagtagagaggaagaacatgacgctcatcgacatggcgaggacaatgcttggggaatacaagatgcttgtgcggttttggtcagaagttgtaaacacagtgtgccatgccataaaccggctctatcttcatcgcctcctcaagaaaacgtcttatgagcttctaaccggtaacaaatccaatgtttcgtactttcgtgtatttggaagcaaatgctacatcttggttaagaaaggttataattcaaatacaaaggcatatagggtcttcaacaaatcgtcgggtttagttgaagtctctagtgatgttgtatttgatgagactaatggctctccaagagagcaagttgatcttgatggtgtagatgaggatgaagtttcaacgatcgcaatgaggactatggcaataggtgatgtgcaacctcaggaacaacaagataaggatcaaccatcttcctcaacattggtgcaaccccaactcaagatgaggaacaggtacctcaagacggaggcatga

SEQ ID NO: 5241 - DNA, 2835 bp, Zea mays
  Clone ID: TF_ZM4328.C2.o7.fg
atgacgaggaggaatatgaggatgatagcgaggatgagtcttcatcaccacaagaccggcgatgtggaagaagaggagattcgccggttctacacccatctcaataaagaagacaaagtgttcttggttaagctgttgaggaggaacaaggaacaaggcgagacgcttctcaggctagaggaaactctcatcaaaaccaacaacagcctggagaagatgaccaaagaacatgaggagctaaagtgctctcatgataatttggtccaacaatatgaatctgttttatttgagcaaagaaataatcatgatgtattatctgatgttgctcaacttaaaactgagatttctatgcttaagagtcaagtagaaatgataaatttagaaaaaaaaattgctttaagtgaaaaatatgatatgctatcttattctcataatgaattagttgatgaccatatcatgcttgatgttgctcatgaggttgtaattgcgaacttaaattcatgtgaacctcattcttgcacacgtgcgcatttagataatatatcaccatgtgctaacctctgttgctcaaaagaaagccaatttttgaatgagcatcaagctgcaggatcaaaagaaaagcttctcatcaataaagaaaggaacaagaaagcaaaacaactaaggagaagacgcattgctcaacctcctcaagatatccatggacgcgtggtgaagaagcttgagacgggagaaaccgcagcaagtgtccataagaaggatgttcccaaagcaataaatgaagaaatcaacatgaacaaggaaaaaggtaaaaattcaattactcatgttgtttgcattgatcatctctctatgtcatctaagagcaaaaagggaagaggaaaaaggaggtgcttcaagtgcaaggaattaggtcacttcattgcgtcttgtccacacaaagacaaggatgaaggaatgaggagatgttttggatgcaacgataaggaccatatgttcacttcatgtccactcatgaagaatcaaagatgtgcaccctccaagatgaccctcactaagaaaaaagacaaacagcaagtgtcatgtcaggttgagcgatgcttctgctacatgtgtggtgagcatggtcatctacctaaggtaaaaggcaaagagacaaccgatcaagccaatgatggaggcaagaagagcttcaaggtaccgagtgcacgggagaaggtcaaggagaccaggaacccaaagccaggggtgaagaagaagacttgcaaagtcaaggttgatcaagttaagaagagttatgggaccaatgtgagtcaaatccaaaagagcaaaggaagtccagctgaaaggccagtggagtacctgctgcgggtgcaccgtccgattgtaagcagccatgacatcgttgtaactgacatcaacatagtggaaggctctatctgtcacactgacatatctgagcaaacggaggaaggagttgaaatagactccaagccaaggcgacatccagatcctgttcccgggcatagggaactttcatcttctccctacacaccccaacaaaatggtgtagtggagaggaagaatagaactctactggacatggcaaggaccatgcttgatgagtacaagactccggaccgagtctttggaagcaaatgttttattcttgttaaaagaggtagaaaatctaaatttgctcctaaggctatagagggctttttatttggttatgactcaaacacaagggcatatagagtcttcaacaaatccactagattagttgaggtttcttgtgacattgtgtttgatgagactaatggctcccaagtggagcaagttgatcttgatgagctagatgatgaagaggctccgtgcgtcgcgctaaggaacatgtccattggggatgtgtgtcctaaggaatccgaagagcccactcatgcgcaagatcaaccgtcatcttccaatcaagcatctccaccaactcaagatgaggatcaggctcaaaacaatgaagatgaagatcaagaggatgagccacctcaagaggaggacaataatcaagggggagatgaagttgatcaagacaaggaagatgatcaagaaattcagggtcaaagaccaccacacccaagagtccaccaagcgattcaaagagatcaccctgtgaactcaattctctgtgatattcataagggggtaaccactccatctcgagtcgctcatttttgtgaatattactcttttgttttctctattgagccatacagggtggaggatgcactaagagattcggattgggtgctggcaatgcaagaggaactcaacaacttcacgaggaatgagtgggtattccgcaacaagcaagttgagcatggtgtggtgacaaggaacaaagcccgacttgtggccaagggatattcacaagtcgaaggtttggattttggtgaaacttatgcacccatagctaggcttgagtcaattcgtatattacttgcctatgctactcaccatggctttaagctttaccaaatggacgtgaaaagtgccttcctcaatggaccaatcaaggaagaggtctatgttgagcagcctcccggcttcgaagataagtttagtaggataatgattcaaaaattcgagatgtcaatgatgggagagttgaaatattttctgggatttcaagtcaagcaactccaagagggcaccttcatcagccaaacaaagtatattcaagacatactcaacaagtttggaatgaaggatgtcaagcccatcaagacaccctgggaactaatgggcatctcgaccttgacacgggaggtaagtccgtag

SEQ ID NO: 5242 - DNA, 4042 bp, Zea mays
  Clone ID: TF_ZM4993.C10.o4.fg
atgttcggtggggatggacctcctcccgttttttatggtgacaattttccatattggaaaattcgtatggaagcatatttagagtctatagacattggtgtctacaaagccgctacacaaggattctcctcacctagagatcccacaaatcctgtaggtgatgagtttaattatgagaaatggaatgctaaggccaaaaacaccctttttagaggcctttgcaaagatgtgtttaatagagttagaaatcataaaaatgctcatgatttgtggatggacatttgtgctctacatgaaggaactagaagtgagcgtgaggagagatatcacattgctatgagaaagttaaattcttttgaaatgcttgctaatgaaaatgccaatgctatgtactcacgtctcaatattcttgtagaggaagtaaatggattggggcttacacaaatttcacaaccagatgttgtgaggaagattctcagtgtcctcccaattgacaaatatggacacattgtcactgtactgcatcaaatggatctttcagttaccacacctacacagatattgggaaagatcaatgctcatgaaatgtacatgcacatcaatgacaaagatgagtcatcttccaagagaaaggatttggctctcaaagcaaatcaagaaagaaaaggaaaagctaaagtacaaattgaggaagaatcctcaagtgatgatgaccttgatgctaacatttccttgatggtgaggaataccaccaagatgttaaagaagctcaatagagaaggcatcaaatttgattcaagaaagaagaaattcttttctagcaaaagaaagcccatttctgagatggattgctacaactgtggagagcttggtcatcttgctcatcaacgtaacaagcccaaaaagaacaagttcaagggcaagaaagaagattacagcgatgatgagaaaaaggaaaagagattcttcaagaagaaggatgggaagcacaagaggttccacaaaaagaaaatggaaaggcatatattgttggtgactggctcactgacattgagtcatcaagtggatcttcttcaagtgaagaagagaatgatgaaaaagttgtcgccatcgctggggacttctcttcaccaccaccatcgccatcatcgacttctcacctatgcctcatggctagaggtgaacggaagtgatagtgatactgatgaggaatttgcttcaccttcctatgataaactagctgacttgctaaaagaatacactcaaatcattaggaagtcaaaagctaaatgtgataagttgaaaaatgaaaatgaatctttgaatgccaaatatgacatagttatgaaagctagtgatgaaatgaaagaagaaaacaaaactatgtcatccactgtaaatgagctcacatcctccctaaaagatgctaaggacaaatgtgacaagttaaatgaagctgatagggagttgaaagatagactagtgaaaatcaaggaagactatactaagattaaatttgatcatgataatcttcttattgaaaatgaacttttatcttgcaatacacatgaggctattaaccctgttgttaagattgatgtagcaacctcatgtgatgatttgagtcaaggagagcaaactagtctacatgatgaattgaccgaaaaagttgaagtcttgactttagacaaccaaaaattaaagagatacttgactgatgcaactactagaggaaaggttgccattgagaacaatgatttcaacaatgagttggcaatggataatgaaaggcttaaaaatgagagtggtattggatacaatgcttttgtgcaaaagaaagctactactcaatacaagccaaagcagactcataagcctatcaaatgctttgaatgtggaaaagaaggtcactttgcccacaactgcaaagccaaaccaccaactcccttgcctaagcactcaagaatatttgctttcaatgctcattatgttctaagaaaagttgcaaatggaaaggtgaactacaagaccggtgggagccattgggttattgacagtggatgcacacaacatatgacaggcaacccatggatgttcacctcacttgatgagaatgttgatggacaagacaaaatcacatttggggacaattcaaaagggaaagttcaaggacttggcaaggtggcaatttcaaatgatctatcaatttcaaattttctcttggttgcacctttgagcttcaatttattatcagtgggtcaactctgtgatcttggacttcaatgcttatttactccaatagaggttattatatcaaaaatggatgatgaatcaatggtgttcaaaggatttagatacaacaatctctacttagtggatttcacctcagaagatgtagacttaagaacttgcctcttcaccaaagcttcacttggatggctttggcataggaggcttgcacatgttgggatgagcacactcaagaaggtattaaagaaggacatggttagaggattaaaggatgttgtatttgaaaaggagaagccttgtagtgcatgtcaagctgggaagcaagttgctaacacacatcctacaaaagctttcatgtcaacatcaaggccactggaactacttcatatggatttatttggacctacaaactatgtaagtgttggtggcaacctctactgtctagtgattgttgatgatttctcaagatacacttgggtgttctttctccatgataaatctgaagttacatctatattcaagaagtttgccaagaaagctcaaactgaatttgattgcaagatcaagaagattagaagtgataatggtaaagaatttgacaacaccaacattcatgagtactgtgatgagattgggatcaagcatgaagtatctgcaacatatacacctcaacaaaatggagttgttgaaaggaaaaataggaccttgatcactcttgcaagaacaatgattgatgagtataacacaccggagaggttttggtccaaagcatatcgagtattcaatcatgccactgtcatggtagaagaaacatatgatgtggaatttgatgagactaatggctcccaaggagcacttgaaaatcttgatgatgtaggtgatgagccacttagggaagcaatgaagaacatgccaattggagctatcaaaccaaaagaagatgaagaagagcctacatgtatagatgaggcgctacaggatccggacttggtgaacgccatgcatgaagaactaaacaacttcacccgtaaccaagtttggaccctggagaagcctccacaaggtacaagaatcattggaacaaagtgggtgttcaggaacaaacaagatcatcatggcgtgattgtaaggaacaaggcaagacttgttgcaaaaggattctctcaagttgaaggcttatattttggagagacctttgcatcggttgttcgactggaagccatctgtatcctactcgcatatgcatcatgctatgatataaagctttatcaaatggatgtaaaaagttcaattttaaatggcttcataaatgaacttgtatatgttgagcaaccacctggatttgaagaccctagatatcctaaccatgcttacaggttgtccaaggcgctatatgggctaaagcaagctccaagggcttggtatgagcgtcttcgtgacttcctgatcgaaaagggcttcaagatcgggaccgtcaacacaactctattcacaaagaaacataacagtgatattttcatttgtcaagtatatgttgatgacataatctttggctcgacaaatgactatcattgcaaggaatttggtgagttgatgtcgaaggagttcgagatgtcaatgattggtgagctgacatacttcctcggctttcaagtcaagcaaatgaaagatggtaactttctctcacaagagaagtataccaaagacttgttgaaaaggttcaacgtggagaagtgcaaaccaatcaagacacctatgccaacaaatggacatctcgacctagatgagggag

SEQ ID NO: 5243 - DNA, 10722 bp, Zea mays
  Clone ID: TF_ZM4450.C3.o13.fg
atgtccggtggggatggacctcctcccgtttttgatggtgacgattttccttattggaaaattcgtatggaagcatacttagaggctatagacattggtgtctataaagccgccacacaagggttccccgaacctagagatcccacaaatcttgtaggtgatgagttcaattatgagaaatggaatgctaaagccaaaaacaccctttttagaggcctttgcaaagatgtgttcaatagagtaaggaatcataaaaatgctcatgatttgtggatggacatttgtgctctacatgaaggaactagaagtgaacgtgaggaaagatatcacatagccatgcgaaagttaaattcctttgaaatgcttactaatgaaaatgcaaatgctatgtactcacgacttaatattcttgtagaggaagtcaatggattggggcttactcaaatctcacaaccggatgttgtgaggaagattctcagtgtcctcccaatagacaaatatggacacattgtcactgtgctacatcaaatggatctttcagttaccacacctacacaaattttgggaaagatcaatgcccatgaaatgtacatgcacatcaacgacaaagaagaatcatcttccaaaagaaaggatttggctctcaaagcaaatcatgaaagaaaaggaaaagcaaaaatacaagttgaggaagaatcctcaagtaatgatgaccttgatgcaaacattgccttgatggtaaggaagaccaccaagttgttgaagaagctaaatagagaaggcatcaaatttgattcaagaaagaagaagttcttttccaacaaaagaaagcccatttctgagatggactgctacaactgtggtgagcttggtcatcttgctcatcaatgtaacaagcccaagaagaataagttcaagggcaagaaagaagatgacaacgatgatgaaaagaaggaaaagaaattcttcaagaggaaggatgggaagcaaaagaggttccacaagaagaagaatggaaaggcatatattgttggcgactggctcaccgacatcgaatcatcaagtgggtcttcttcaagtgaagaagagaatgatgaaaaagttgcggccatcgccggggacttctcttcaccaccaccatcgccatcatccacttctcacctatgcctcatggctaggggtgaacgaaaggtacaaaatgatattaatattgatgatgatagtgatagtgatagtgatgaagaatttgcttcaccttcatatgatgagttagctgacttacttaaagaatatactcaaatcattagaaagtcaaaagctaaatgtgataggttgaaaaatgaaaatgaatctttaaatgccaagtatgacatagttataaaggctagtgatgaaataaaagaagaaaataaaactatgtcatcaactgtaaatgagctcacaaactccctaaaagatgctaaggaaaaatatgtcaaattaaatgaagctaatagggagttgcaaagtagactagtaaagatcaaggaagactatactcaaattaaatttgatcatgacaatcttcttgttgaaaatgaacttttatcttgcaaaacacatgaggctattaaccctgttgttaagcttgatgtagcaacctcatgtgatgatttgattcaagaagagcaaactagtctacatgctgaattgactgaaaaagttgaagtcctgactttagacaaccaaaaattgaagaattacttgactgatgcaactactagaggaaaagttgctattgagaacaatgatttcaacaatgagttggcagtggataatcaaaggcttaagaatgaggtcaagaaactaaaaagtgaaaatgaacatcttgcaacaagtgtgcaaaagttcaacaagggtcaatacctccaaaatgagctgcttatgaacactgttatgaaaaataacaagagtggtattggatacaatgcttttgtgcaaaagaaagctatcactcaatacaagccaaagcagactcacaagcctatcaaatgctttgagtgtggaaatgaaggtcattttgcccacaactgcaaagctaaaccaccaactcccttgcctaagcactcaagaccatttgctttcaatgctcactatgttctaagaaaggttgcaaatggaaagattaaggtgaactacaagaccggtgggagccattgggttattgacagtggatgcacacaacatatgacaggcaacccacggatgttcacctcactagatgagaatgttgatggtcaagataaaatcacatttggagacaattcaaaaggaaaagtgcaaggacttggcaaggtggcaatctcaaatgatttatcaatatcaaatgttctcttagttgcacctttgagcttcaatttattatcagtgggacaactctgtgatcttggacttcaatgcttatttaccccatcagaggttattgtaacaaaaatggatgatgaatcaatggtattcaagggatttagatacaacaacctctacttagtggatttcacttcagaagatgcagacttaagaacttgcctcttcaccaaagcttctcttggatggctttggcataggaggcttgcacatgttgggatgagcacactcaagaaggcattaaagaaagatatggttagaggattaaaggatgtggtgtttgaaaaagacaagccatgcagtgcatgtcaagctggaaagcaagttgctaatacacatcctactaaagctttcatgtcaacatcaaggccactggaactacttcatatggatttatttggacctacaaattatgtcagtgccggtggcaacctctactgtctagtgattgttgatgacttctcaagatacacttgggtgttctttctccatgacaaatctgaagttgcatcaatattcaagaaatttgccaagaaagcacaaaatgaatttgattgcaagattaagaagattagaagtgacaatggcaaagaatttgacaacaccaacattcatgagtactgtgatgaaattgggatcaagcatgaagtatctgccacatatacacctcaacaaaatggagttgttgaaaggaaaaataggaccttgatcactcttgcaagaacaatgattgatgagtataacacaccagagatgttttgggccgaagctgtcaacactgcttgttatgcatcaaacaggctatttcctcaccggctacttgcgaagactccttatgaactgctaaatgggaaaaagccagacgtctccttcttccgggtatttgggtgcaaatgctacatttacaagaaacgccatcacctagggaagtttcaaagacgttgtgatattggttttcttttgggttattcattaaagtccaaagcatatcgagtattcaaccatgccactggcatggtagaagaaacatatgatgtggaatttgatgagactaatggctcccaaggagcacttgaaaatcttgatgatgtaggtgatgagccacttagggaagcaatgaagaacatgcctattggagctatcaaaccaaaagaagatgaagaagaggtgcaaatcattgacaggccttcttcatcaaatgtaccacaaaatgatgaaaaagatgagaggcatgcaaatgaagatacatttgtctctcatgaacaagcaagggtacaagccgaagatgttgatgctccaggatcttcttcccaagtggttgacaggagaaattcatcattacttcaagctcatcctcaaaaccaaatcatcgggagtccttcacaaggggttattactcgatcacatagacatgctaattttattgaacatcactcttttgtttcttgtgttgagcctacttgtatagatgaggcgctacaggatccggactgggtgaatgccatgcatgaagaacttaacaacttcactcgtaacgaagtctggaccctggagaagcccccacaagatgcaagaatcattggaacaaagtgggtgttcagaaacaaacaagatgatcaaggtgtgattgtaagaaacaaggcaagacttgtcgcaaaaggattctctcaagttgaaggcttagattttggagagacctttgcaccggttgctcgactggaagccatccgtatcctacttgcatatgcatcatgctatgatataaaactttatcaaatggatgtaaaaagtgcatttttaaatggcttcataaatgaacttgtatatgttgagcaaccgcctggatttgaagaccctagatatcctaaccatgcttacaggttgtccaaggcgctttatgggctaaagcaagctccaagggcttggtatgagcgtcttcgcgacttcctcatcgaaaagggcttcaagatcgggaccgtcgacacaactctcttcacaaagaaacataacggtgatattttcatttgtcaagtatatgttgatgatataatctttggctcgacaaatgactatcattgcaaggaatttggtgagttgatgtcgaaggagttcgagatgtcaatgattggtgagctaacatacttcctcggctttcaagtcaagcaaatgaaagatggtaactttctctcacaagagaagtataccaaagacttgttgaaaagattcaacatggagaagtgcaaaccaatcaagacccccatgccttcaaatggacatctcgacttagatgagggaggtaacccggttaatcaaactctctaccattctatgattggtagtctattataccttaccgcatctaggcccgatattatgttcagtgtttgcatgtgtgctagatttcaatctaatcctaagaaagctcatcttcgcgctgttaagagaattcttaggtatctcaggcacaccacaagcgttggtctgtggtatcccaaaggagctacttttgatttaattggctattccgattcggattatgccggttgcaaaattgataggaaaagtacttctgggggatgccatctgcttggtagatcattagtttcatggacatccaaaaagcaaaatagtgttgccttgtcaactgccgaagcggaatacattgccgcaggtgcttgttgcacacagattttatatatgaaacaaactcttctagactatggcgtagttctagaaaaggtacctttgttgtgtgataatgagagtgctgttaaaattgctaataatcctgtacaacactctcgcaccaagcacattgatatccgtcaccacttccttagagatcatgttgctaaaggagatatcattttagaaggagtgagtcatcagatcaggatgccgcgcacgaagaatgcgtcggcgccagggggtggggatgatgaggagcctcgtcgccccttcaggcaggtcaagggcaagactgtgtatttggagcagcaggaaggccgcaagaagtggcgtatggacagagaagcccgtgcagcggcagcagctgcagcagccgctgcgcaggccgctcttggagatcagccgcagactccatccgatcagattgcattccgtgctcgtcgtctcacctcccggcctcgctcctcctctcacacctccgcttccactccgccacccactctgcctgctcccgtcactcctattgctccatccacctccacagccatacccactacctccactacgcccgcttccactgcttcccctgctcccgctcccgcttcagctcctcctgtccctccacctcgcttccgggagcgtgatgagactgaggtccgtcctctggtttcggatcctcgtctgtttgatcttcagcgtgctactgcagcatgggtacgtcggttcaggtacgtacccgtggagtcttggctaccagctcagagagacccagcagcaggtgttcttttcagcacatggattcaggagtcattcttcagagctcagatgtctgctcagatagctctgcgagtgcaccgccttttggatcttccagcttttctgcttgcagctggtgctgactctgaggcgcatctcacctatctgcctggccttctgacccttctgactatcagcggcagatatgttgaggagtgggtccgtgtcttctacgcctctgtttggattgacctggatcatcactggatgaggttccgctttgagcgagaggatgtcacgatcactgccagtcagatccgtcagctctttggattcccagagtcgatgactcgccttcacagtctctgctacggctcttctgaccctcctcgtcgccctcacggcggtgtggctccagggacagctcacgtcgcggctctgttccgcccgcctttcacagatgggtcgcgacgttcaccggcagactttactacagcagcgaagtacttatatgagctcatcagacggacacttctgccgaggatgggatacagggaggctaccactcatattcagctttggctccttggtgccctggtctcccactctgagtttgatgttgtggacttcctgatttgtgagatcgaggacaccgttctggatgggattcgtgctcgtcggcagttgccttatgctcactacttaccgaggatgcagctcttcgacagtttgacactcagggtacagcagctgatgatgatgatgatgatgatgatgattttggggttcctcctccgcctccgcctcctatgcctccacgctcacatgatcatgaggctgggagttctagtgctgcccctcctcatcctcaggctatggaccctgctcttgcttcgattctccagactctcacctagcagcaggctcacctggcagccgagcaggcccgtttatccgacaggatgctctcgatgtttcagaacatgcaggacaggcaggatgcgcttcagcagcagctacttcaggatcgggctgagactgccagtgccaccagcatctgctgttaccactaccgctgtggcagtatctatgaccgcttctgttctgagacaaatgacggcttggtggcgttgggagctcggtgatcaccgtgaagatcttgttggtgacccgactcaagttttggtctactacgagaccgactcttcgtcaccctccacctctggctcggaatcggcctccactacttcaaagcgcaatgagcgcaagaagtatagcaaaccacctatgtttgaagatgaagattattctatgtggagtgataaaatgaggcatcacctaacctcactccacaaaagcatatgggatattgttgagtatggagtgcaggtaccaaagaagggagacaaggattacgactcggaggaggtcgaacaaatccaacacttcaactcccaagccacaactatactcctcgcctctctaagtcgagaggagtataataaggtgcaagggttgaaaagcgcaaaggagatttgggacatgctaaagaccgcgcacgaaggagacgatgtgaccaaaatcaccaagcgggagacgatcgagggggagctcggtcgcttccggcttcgccaaggggaggagccacaagacatgtacaaccggctcaaaaccttggtgaaccaagtgcgcaacctcgggagcaaaaaatgggatgaccacgaaatggttaaggttattcttagatcacttgttttccttaaccctactcaagttcaattaattcgtggtaatcttagatatacactaatgactcccgaggaagtaatagggaattttgtgagctttgaattgatgatcaaaggctcaaagaaaatcgtcgagctagatggcccctccatgttcgaagcacaactggtcgcattcaaggcgatggaggaaaagaaggaggaatctacatcaagtagaacacccatcgacgcctccaagctcgacaacgaggaaatggcgctcatcatcaagagctttcgccaaatcctcaaacaaaggaggggggaggattacaagccccgctccaagaaagtatgctacaaatgtggtgagcccggtcatttcattgctaaatgtccattatctagtgatagtgacatgggtgacgacaagaaggggagaagaaaggataagaagaggtattacaagaagaagggcggcgatgcccatgtttgccaggaatgggactccgacgagagctccaccgactcctcctcctatgaggacgccgcaaacatcgccgtcaccaagggtcttctcttccccaacatcggccacaagtgtctcatggcaaaggacaacaaaaggaagaaggtaaaatcaagatcctccactaaatatgaaacctctagtgatgaggataattgtagtgatgaggaggataacttgcgcaccctttttgccaacctaaacatgcaacaaaaggaaaagttaaatgaattaattagtgctattcatgagaatgatgaactcttggatacccaagaggacttcctaattaaggaaaataagaagcatgttaaggttaaaaatgcttacgctctagaagtagaaaaatatgaaaaattatctagtgagctaagcacttgccatgatactattgccaaccttagaaatgaaaatgctaaacttattgctaaggttgattctaatgtttgtgatgattcgatttccaatcttagaaatgataatgctaatttgcttgctaagattgagaaattgaataattctcttgctagccttagaaatgaaaatgaaaatttgattgctaaggctcaagactttgatgtttgcaatgttactatttgtaaccttagaagtgaaaatgatatattacatgctaaggttgttgaattaaaatcttgcaaaccttctacatctatcgttgagcatacttccatttgtactagatgtagagacattaatgttgatgttatccatgaccacctagccttaattaagaaacaaaatgatcacatagctcaacttaatgcaaaaattaatgagcatgacttggaaaatgaaaaatttaaatttgctagaagcatgctctataatgggagacgccctggcatcaaggatggcattggcttccaaaagggggacaatgtcaaacttaatgcccctcctaaaagattgtcaaactttgttaagggcaaagctcccatgcctcaggataacgagggttacattttgtaccatgtcggttatcctgagagcaaaattaggagaattcattctaggaagtctcactctggccctaatcatgcttttatgtataagagtgagacatctagctctaggcaattaacccatgctaaattgcctagaaagaaaactcatattgcatcaaatgatcataatatttcatttaaaacttttgatgcatcgtatgttttaactaacaaatccggcaaggtttatgcatccgggggctcaagttggattatcgatagcgagtgcacaaaccacatgacaggggagaagaagatgttctcctcttatgagaaaaaccaagatccccaaagagcggtcagattcggggatggaaaccaaggcgttactgtctttagaagatgtgacgattcaatagcatttaagggagtgttagagggtaagctatacttagtagattttgatagagctggactcgacacttgcttaattgctaagactaacatgggctggctctggcatcgccgactagcacatgttggaatgaagaatcttcacaagcttctaaagggagaacacattttgggactaacaaatgttcattttgagaaagacagaatttgtagcgcatgtcaggcagggaagcaagttggtgttcatcatccacacaagaacatcatggcaactgacaggccactcgagctcctacacatggacctattcggcccgatagcttacataagcatcggcgggagtaagtactgtctagttattgtggatgattattctcgcttcacttgggtgttctttttgcaggaaaaatcgcatacccaagagaccttaaagggattcttgagacgagctcaaaatgagttcggcttaaggatcaagaaaattagaagcgacaacgggacggagttcaagaactctcaaattgaaggcttccttgaggaggagggcatcaagcatgagttctcctctccctacaccccacaacaaaatggtgtagtggagaggaagaatagaactctattggacatggcaagaaccatgcttgataagtacaagacttcggatcggttttgggccgaggcggtcaacgccgcctgctacgccatcaaccggttgtatctacaccgaatcctcaagaagacatcatacgaactcctaaccggtaaaaagcccaacgtttcatttttagagtctttggctgtagaaggctttttactaggatatgattcaaacacaagggcatatagagtctttaacaagtcctctggacaagttgaagttttttgtgacattgtgtttgatgagactaacggctctcaagtagagcaagttgatcttgatgagataggtgatgaagaggctctgtgcgtcgcattaaggaacatgtccattggggatgtgtgtcttaaggaatccgaagagccaccacatgcacaagatcaaccatcttcctccatgcaagcatctccaccaactcaagatgaggataagtctcaaaatgatgaaggagaagatcaagaagttgagccacctcaagaggagagcaatgatcaagggggagatgcccatgatcaagatgaggaagatgaacaagttccaaggccgccacacccaagagtccatcaagcaatccaatga

SEQ ID NO: 5244 - DNA, 693 bp, Zea mays
  Clone ID: TF_ZmC441998_1
cctggccggacacgatccaactcataattggtgccagtacgattcaatcgaccctttgaatctcttaccagaagacaccgtctttcaacgtcactccctccattactcgtacgacacttccaatctcttccacaaactcaatcatggaataccaagcacctgctcctgctgctggcgccggcggccgtggctgctacaactgcggcgatgcgtctcaccgcgctgccgagtgccctaccaagggcaccccaacctgctacaactgtggcgagaagggtcacgttagccgtgagtgcagctctcctcaggctgagaagacctgctaccgctgtggcggcactggacacatctctcgtgagtgcaccaaggacggcggtgccccaatgggaggccgtggtggcggcagccaggagtgctacaagtgcggccaggtcggtcacattgcccgcaactgctcccagggaggcggctacggcaacggtggctttggaggaggtcgtggtggctactgcggcggtgccggtggctacggtggtgctcgccagaccacctgctactcgtgcggtggtttcggtcacatgagccgtgactgcacccagggccaagagtgctacaactgcggcgaggttggccacttgtctcgtgactgcccccaggagacatcttctgagcgtgggtgctaccgtttcaagc

SEQ ID NO: 5245 - DNA, 2614 bp, Zea mays
  Clone ID: TF_ZmC31167_1
atgctgcactatccgaagggcaggcctggtgcagtggtgagagctgtcccactgagtcaccaggtcgcagggatctcgtatgcaagaactgccggagacctgggcactttgctaaggagtgcccatctgcgcctacgtgcaataactgtaaccttccaggtggaccataaccccatcccctttattttctacagccacttcgcagcagaatgcacctcaaaaactgtttgctggaactgcaaagagcctgggcacattgcgagtgagtgcaagaacgaggccctgtgccacacctgcaacaaaacaggtcacttggcgcgtgattgccctacttcaggggctaacgtcaagctatgcaacaaatgttttaaatcaggccacatcgccgttgactgcaccaacgaacgggcatgcaacaactgccgtcagccagggcacatagctcgagagtgcaagaacgatcctgtttgcaacctgtgcaatgtctctggccatgtcgcgcgcgtctgtccaaagacgactctggcttcagagatacacatacagggtggcccgttccgtgatatcctgtgccgcatctgtggtcagccagggcacatcagccgcaactgcatggccaccgtcatctgtgacacatgtggcgggagggggcacatgtcttacgagtgcccgtcggcaaggattttcgggttccgcaggctctgaagagcttttcgccaagggctccgctttggtctgatggctgagaattcgccaggatgtttcatttgtttctgacagtattggaacagtttccttctgccgttgtagttgaggaatgattctgtaggatgtgttgcgggtgaaaacttcttttttccccccttttaatcaggatagccctttgtgggctcaaacattgctgtaacggctcgtgtgaaaattgccaggtcatgatttaactcttgtgctcgtgctctgctgtgtcttttgaaaaaaaagggtacacccccagggcccgcggggcgcaccccctcagtccctccccgctcaccaccagtcaccaacgcccaccgggcctcgtccctcgtggcggcaactgggcggccgtcgctgccgccctacgccaggtgccgaggcgaccttcaggcccttggctggcgacgagcaccagtgcaccaccaatactctgagcctggctgccgaaagtgccttttggggttcttgtaatcttgttacattaggattcatttttgatgacttcatcaagaagcaagagcaagagcagaagtaggagccgcagtcgcagcaggagcaggagccgcagtcctcggcgaagagatagattgcgcagtgaacgtgcaccccaccgcagtcgcagccggagccgcagcccataccgtcgcagagaacggcgtggtcacagggattttgcatgcaagaactgccggagacctgggcacttcgctaaggagtgtccatctgcgcctatgtgcaataactgtaaccttccaggccactttgcagcagaatgcaccttacaaactgtttgctggaactgcaaagagtctgggcacattgccagtgagtgcaagaacgaggccctatgccacgcctgcaacaagacaggtcacttggcacgtgactgccctacttcaggtgctaacgtcaagctatgcaacaaatgctttaaatcaggccacatcgccgttgactgcaccaacgaacgggcctgcaacaactgccgtcagccagggcacatagctcgggagtgcaagaacgacccggtctgcaacctgtgcaatgtctccggccacgtcgcgcgcgtctgcccaaagacgactctggcttcagtgatacagggcggcccgttccgagatatcctgtgccgcatctgcggtcagccggggcacatcagccgcaactgcatggcgaccatcatctgcgacacatgcggtgggagggggcacatgtcttatgagtgcccttcggcaagaatattcgggctccgcaggctctgaagagcttttcgccaagagctccgctttgttctgatggctgagaattcgccaggatgtttcatttgtttctgacagtattggaacagttttccttctgccgttgtagttgaggaatgattctgtaggatgtgttgcgggtgaaaacttccttttttccccccttttaatcaggatagccctttgtgggctcaaacattgctgtaacggctcgtgtgaaaattgccaggtcatggtttaactcttgtgctcgtgctctgctgtgtcttttgaacgctaaaaaaaaaagcggtgttttgtgtactcacttatactgtattgtaacgtcacgtagaactgtgaaatttgtatggtgacgttggtggtttgatctggactccttttttactttttgttcggttactctagtatttccctcaatacacatggattaatacacatggattgaggtgtattggggtagcttacccctcaatacacatcaatacatgtgttgtattgaggtaaatcctagagcacccaaacaaagcttaatccctaatcaggatatagggccctttgtgggctaacagtgctgtaacggctcatgtgaaaattgccaggtcatgtttaactct

SEQ ID NO: 5246 - DNA, 7608 bp, Zea mays
  Clone ID: TF_ZmC36592_121
ctagggccaaaacaagtgtgcggccaaaatctcatgtgtcttgtatacaccaaagtgtcccattagtctgccaccatgcggttcatggaatttaccccatggtctaccatccttgcaatgcatcaaattgtccttaaaatcagaatcattggcgtattgttctttcacagtttgtaagccaaaaattttaaaatctaactgagatagcatggtgtatccacgtgacaaagcatcggcaatagtgttatctttcgtgttcttgtgtttaatgatgtaaggaaaagacctaggagaaagggatgcccttcttggtgagttcatgcaacaaagcggcgatggagctgaaatcacgcataaaccgtcggtagaatccttggagaaaatagcagcaccactaagctcatcaagcatatcatcaaggcgaggtataggatagccataatgaattgtgatgttgttaatcgctcgacaatcaacgcacatgtgccaggtaccatccttcttgggaataagtaaaataggaatagagatagggctaagagactcacgaatgtagccgtcatcaaaattagatttagtggcgagcaaaataggagctttcagtttaatttcatttggtatgggtggttgctggtattgttgtttagctctagctatgtcagattttacaatctgttcaggggtcattggatgaagaattattttcttacccttaaacatcaaagagtaattgtttgtgcgaccatgatgtaagctatctgtatcatatttccaaggcctaccgagcagaagtgaacaagcttccattggaacaacatcgcaatcagcataatcatggtaggaccccatagagaaatgaacatgtatcgagcgtgttaccttgagtttaccgccccggttaagccattgaatatggtaggggtgtgggtgtggacgtgtggggagagacaacttctccatcagttgcatccttgccaagttgttgcagctgccaccgtcaataatgatgtgaatggaacgttcttgcacaacacctttggtatggaacaaggtgtggcgctggtgctgctcgggttgtgcaacctgcgtgctgagtacgcattgcacaacaagactctcatacttgttagtatccgtggcatccacatgttcttcttgggttcctgcaacgtcagtggcaagcatagcatatatggtttcttcggaatcactagctgaagaatactcaccattgttatgtataatcagtgtgtgtttgttgggacggtctcgtattacgtgaccaaaccctttacagcgataacattgaatatccttggtgcgtccagcgaaagaagaaccctttgttgatggaggtggcgctagactttttgctacgatcttgtcacgtggagtgctggtagatggcgatgtcgctgctggtggtgccacggcgacaggcttggagtggaacgatgtggtgcgacctgtagaagagttagcttgtgtcctcgcatgtcgtccccggtgtgaggagtctactcctctacctctagacatgcagctgtttggctgtggggtttggttgccaaaagcactagctgagtttcggggcttgccttccaaagcagtggcaggcaggtcctctggtgcaggcttgggtgctgggtccggggctacctcctgagcagctccttgctccggcacgaggatgtactctccgtcagcaagattacagtcgactcctttgggcagaaagtcggggaagcgagagcatagaaaatcctcagtctcccatgtagcttcttcggctgaatggtgactccactgaaccttatacattctgatcgaccttgcccgagttgatctctctttttgatctagtaccttgacggggtactcttggtaggacaagtccggttctatctcaatgtctggttccggtatcacttcagtgggtagacgaacacatttccgcagctgagatacatggaacacattgtgaactgttgacatgcggggtggcaattccaattggtaagctacgggtccacaacttgccttaatctcatagggtccaatgtagcgaggagctaacttgcccttgatcccgaatctctggacacccttggtgggggatactttaagatagacatgatctcccacctcaaactgtagaggcttccgcctcttatcatgatagctcctttgcctggcctgagcagcttccaagttcttggtaataaccctgacctttgcctctgcctcgagtaccaagtctgacccaaaaatttccctttctcccgcttgagaccaatttagtggggtcctacaccttctcccatataatgcctcaaaaggtgccatcttcagactggactgatagctattattgtaagaaaactctgccaaggacagacacttgtcccaatcctttccataatgtagtgcacatgctcgcaacatgtcttccaaaatctgattcaccctttctgtctggccatccgtttgagggtgatatgctgagcttcggattacttgggtcccaagtgattcttgcagtttctcccaaaagcgtgccacaaacagtgctcctctgtcagatataatggtctttggaataccatgcaatcttactatctgatcaacataaatttcagcgtacttctccgtcttgtgggtggtgtgcactggcaagaaatgagcagtcttggtcaacctgtccatgataacccaaatagaatcatggtgtctggaggtattgggtaatcccactatgaagtccatgcaaatgtcctcccatttccaagatggtatgggaaggggttgcaaagggcctgctgccttcaagtgactggctttaattctctggcaggtgtcacattcagatatgtacttggcaatttcccttttcattctagtccaccaatatagagatctgagatcatgatacatcttgttgctaccagggtgcatggagaattttgaaaggtgagcttcatccagtatttgctttctgagctcagggtccttgggaacaaccaatcgatctccaaaccatagaattcccttgctgtcctgtcggaaacacttgtatttttctgccttttgcttgatcatatccttgataacctgaacacccttatcctcaacctgtgccctgactatctgttcttgcaatgtgggctccaccgagatatagcttaggtcacccgcagaaacaacttccaggttcaatctgcacaactcatcacacagggtggtcactcctacatccatgttcatacaattgcactgggcctttcggctcaaggcatctgccacaacattggccttaccagggtggtaatgcacctccaaatcgtagtccttgatcaattctaaccatctcctttgcctcatgttcagatctgcctgagtgaagatgtatttgagactcttgtgatcagtgtagatgttgcagtgagctcccatcaagtagtgtctccatatctttagagcatgaactacagctgccaattctagatcatgtgtagggtagttctgctcatggggcctgagtgccctggaagcataagcaatcactctgttctcttgcatcaagacacatcccaaaccagtaccagaagcatcacaataaacttcaaagggcttggtgttgtcaggttgggccagcactggggctgttgtcaaatgctgcctcaaggtatgaaaggcatcatcacacttttggctccactcaaatttgactcccttctttaacagttcagtcattggcttggcaattctggagaaatccggaataaatcgtcgataataccctgccaatcccagaaaactccgaatctgcttcactgtagtcgggggtttccaatccatcaccttctgcaccttctcaggatcaactgatatcccatcctgagaaattgtgtgacccaagaatttgatttccttcagccagaactcacacttactcagcttagcatacaactgatgatcacgcagtctctgaagtacagtatgcaagtgtttggtgtgctcggcttcattcttggaataaaccagtatatcatcaatgaagacgaccacgaacttgtccaattctggcataaacactgagttcatcaagtacataaaataagccggggcattggtcagcccgaaggacattaccagaaactcatacagcccatatctggttgagaaagccgtcttggaaatatcactggcatggatcttgatctgatggtaacctgagcgaaggtctatcttggagaagaccttggctcctaccaactgatcaaacagaacatcaatacggggcagcgggtatttgttcttgatagtcaccgcattaagaggacggtagtcaacacacatcctcaaactctcgtcctttttcttcacaaataaagctggacatccccatggtgaagtacttggacgaataaaccccttgtccagcaattcttgcaattgcttcttcaattctgccaattccgcgggaggcatcctatagggtctcttggagataggagcagtcccgggttgcaattcgatggcgaactcaatatctcggtcaggtggcattcctggcaattcatctgggaaaacatctgggtagtcacagaccactgggatcttttccactggggaatctatcataacgaaagcacaagaacgggtgcatccctgatcgggcaaatataatgtagtttcaccacaggttggtgagtgcacctcaatggccctggctgcaatatcaataactgctcgatgcctggttaaccagtcagttcccaatataatatccacactatctaaccccaaaatgaggagggtggttttaattattaagctaccaaactttatgggcacgtgtctgttgatttgataggtggcaaccctgcctcctggtgttgaaattgtgatacctccattggtgtggtgaaaaggcaattggcacttggcactaaattttgcactgataaaactcttgccttggttctgattagcattctgcccctgcctttgctgattcctggggcaattcttggcatagtgccccgtgttgccacaggtgaagcatctgttgtcatttgcctggcggtactgctgctgctgctgattgcccctctgagctggaaattgggtgcggttgggtgccggctgctgctgctgctgaggtcggatcacccatcgcccttgctgctgctggggtcccctgccctgggtgtcggacacaatcctgaagcgctgtggctgagctgagggtcctgccacaggggtcttcctcttcttctctgcctgtctagctgtaatacagtcctcttgggagatagccatgttgaccaactcattgtagctgttggccctgacggtgttgagacgatcccggagcttagtgctgagcccccttctgaatctgtctctcttcttctcatctgtatctgcatgatatcccgcatactggcacaagtcattaaaggcctgggcatactgcaacactgtcctgttgccctgagtgagtgccaaaaactcattgagcttcctatccatgatcccggctggtatatggtgtactctaaaagctgccttgaactccctccactccacctctcggtcctctggctgcatagcaagaaaatgatcccaccaagtccttgcaggtccgcgaagctgctgggtggcgaacctgactttggtgacctctgagcaaactccatgtagtagtgggaatttggattccaccactcgcagccacacatctgcatcaagtgggtcctccgcccttgtgaacaatggaggttgggtgctaaggaattcctggtatgtagccgccgcggggtgacgctggtggtctccaccaccataatgctgaggtggtggctgacgttgagccagctgcctcaggatctcattctgctgagccatgagctcctgcagagtgggaggtggtggcggcggtggaggaacgtgctcgttctggccacgacgctgcctcccggccatactcgactcgggggaaggtggtcttcccgagccagcagtgtccacactggaggcaggctcatctcctccctcaatgtcgacgtcctcgtttgcctcttggtcctggatctcctggtgatgcatgtccaggtgctcgttagcctcagcaagctgctgctgagtgttaatgagctgatcctctaggacctcgatggtgttctccctggtgcctaccagctcctccaactcttgaatatcagtggatagctgctccacctgcaagtccttctccaccatttcttgggacaagtcaaccacaagttcctctctgttgtccaatgtaatctttgttgcctccaacagtgccatcagatgggacattgcctcaccgcgcatcacctgcagacggtacagagcattcatgcaccgtattgtcaagtgcgcagtctgacctgggtagatggcccagatgtccttggcatgctccacccgatccttccacattgggtcgtcctccctctcagcggggaacaagccaatggggtgggtagccagctccaagggatggaatccgcagaaagtagtcaatccatgcagagcgatcgcctcgatcgtgtcctccgctcggtatccgaaggactcggagtccaaagagcgccagcctggctgcaggggatgaggctccaaggtcatcctcacccgacagcgaggcactcggtgcttctcgaactgctgcaccgcgtactgagggggtgtcgtgtatccagccccctgaagtacttcccacaaaatgcggggaaagccctctcgtgcaagtccgtcagtgtgggtcagtgcatttccgtcattggaggatccgtgggaagtcatctggtgtgaggagtctactcctctacctctagacatgcagctgtttggctgtggggtttggttgccaaaagcactagctgagtttcggggcttgccttccaaagcagtggcaggcaggtcctctggtgcaggctcgggtgctgggtccggggctacctcctgagcagctccttgctccggcacgaggatgtactctccgtcagcaagattacagtcctggtcaaacaatattcctatttttccttctaatattgagttttgagtagttttcttatttaattcaaaacggcggcagtagggctccggcggggtggtcagtgacgtccgggaggtcgcgacggtcacgtcggtgtgcgggtcggtgttggaggtggtcggagttaccctggccacgagcacaggcggcgggggtcgtcggcggctcgtgtcaggattatatgtagcattgaattcaggtatagtgagttcaatcttagaggaaaaattattttggttacgtaccacacgacgaggtccgtaccggtgacgacggggctgaccgtcgtactcggtgtcgccaccataatcagtgtcaccatgtatctcactaagatgttgggacaactcctccagtcgtgtcatgatggtgtcgagggtggtgttggtggtggcttggggtgtcatattcctggagcgtcgtaccacttcgatttgtgttgtttcaagcgggaaaaggtgcacgttggtgatgtgaatgtctttagcgaggccatcaagttgcagacgcat

SEQ ID NO: 5247 - DNA, 811 bp, Zea mays
  Clone ID: TF_ZmC1373_8
agaactctctccccccgccctccttatctccaggccggacgagcccgcagccgcagcgtccgacctagggttctgcgccgccgccgcccccctgctcccgaggagatgcctcgttacgatgatcgttatggaaacgcacgcttgtatgttggtagattgtcctcccgtactcgttcgcgcgacctagaatatcttttcagcaaatatggaagaatacgggaagtggaattgaagcgcgactatgcattcattgaatacagtgatcctcgtgatgctgatgaggcccgatacaacctagatggcagggatgtggatgggagccgcattattgttgagtttgctaaaggggttccacgtggttctggtggttcacgagaacgtgaatatgtgggaagagggcctcctccaggaacaggccgttgtttcaactgtggtattgatggtcattgggccagggactgcaaggctggtgactggaagaacaaatgctaccgctgtggagaaaggggccatatagaaagaaattgccagaatagcccgaggagtctcaggcgtgagagaagctattcacggtccccatctccacgtcgtggacgggctcgcagtcggagctacagcagaagccgtagttacagccgatctaggtccagatcctattcagagtctcccagagggcgtcgcactgagcgtgatgagaggagatcaaggagcattagctacagcaggagccccaggcgatcgctctccccagaagctaaggacatggatcgcagccctacacctgatcgcagtcggagccccaggcgatcca

SEQ ID NO: 5248 - DNA, 6822 bp, Zea mays
  Clone ID: TF_ZM5008.C2.o12.fg
atggcaaggaccatgcttgatgagtacaagacttcagaccgagtctttggtagcaaatgctttattcttgttaaaagaggtagaaaatctaaatttgctcctaaggctgtagaaggctttttacttggttatgactcaaacacatgggcatatagagtcttcaacaaatccactggattagttgaggtttcttgtgacattgtgtttgatgagactaatggctctcaagtagagcaagtagatcttgatgagctagatgatgaagaggctccatgtgtcgcgctaaggaacatgaccattggggatgtgtgccctaaggaatccaaagagcctccacaagcacaatatcaaccatcatcttcaaatcaagcatctccaccaactcaagatgaggatcaggctcaagacaatgaagaagaagatcaagaagatgagccacctcaagaggaggacaatgatcaagggggagatgacaataatcaagacaaggaagatgatcaagaagaacagggtcaaagacagccacacccaagagtccaccaagtgattcaaagagatcaccacatgaactccatcctcggcgatattcataagggggtaactactcgatctcgagtcgctcatttttgtgaacattactcttgtgtctcctctattgagccatacaaggtagaggatgcactaagagattcggattgggtgctggcaatgcaagaggagctcaacaacttcacaaggaatgagctttaccaaatggacgtgaaaagtgccttcctcaatggaccaatcaaggaagaggtctatgttgagcaacctcccggctttgaagatagtgagtaccctaatcatgtttataaactgtctaaggcgctttatgggctcaagcaagccccaagagcatggtatgaatgcctaagagatttccttatcactaatggcttcaaagtcggaaaggccgatcatacactctttactaagaccattgcaaatgatttgtttgtatgccaaatatatgttgatgatatcatatttgggtctactaacaaatctacatgtgaagagtttagtaggatcatgattcaaaaattcaagatgtctatgatgggggagttgaagtattttctaggatttcaagtcaagcaactccaagagggcaccttcatctgccaaacaaagtacatacaagacatacttaccaagtttggaatgaaggatgccaagcccatcaagacacccatgggaaccaatgggcatctcgacctcgacacgggaggtgctaaaggttcaacacaaaccaataaaaagatccaagttggggttcaaaataaaggagcaaaagaaaccgaagagaaccctggtctgccgcaccggactgtccggtgcaccactgggcagtgtccgttttcgcctattcaccccccctctaggcgacttttagtgtgctacaagtgtggtaagcccggtcattttattgctaaatgttctatgtctagtgatagtgacaggggcgacgacaagagggggaataagaaggagaagaagagatattacaagaagaagggcggcgatgcccacatgtgtcgggaatgggactccaacgagagctccaccgactcctcctctgacgaggatgccgccaacatcgtcgtcaacaagagcctcctcttccccaacgtcggccacaagtgcttcatggcaaaggacgacaagaggaagaaggtacaatctagaacctcacccaaatatactacatctagtgatgagggtagttctagtgatgatgaagatgatttgcttaccctttttgccaacattaacatgcaacaaaaggaaaagttaaatgaactgataggtgccattcatgagaaggatgaactcttggacaaccaagactcaattaaagcaaaaattaatgagcatgagaaagaaaataaaaaatttaaatttgctagaagcatgctctataatgggagatgcccaggcattaaggatggcattggtttccaacatggaagcaatgtcaaaattaatgcccctaaaagattgtctaactttgttaagggcaaagctccaatgatacagaataatgagggctatattttatatcctgctaattatcctgagcacaaaattaggagaattcatgctaggaaatctcatactatttcacatcatgcttttatgtataacaatgaggcttctagctctaggcaatcaacccatgttaaattgcctaaaaataaaactcctactgcatcaaatgagcctaacatttcatttaagacttttgatgcatcttatgatttaactaacaaatcaggcaaaatagttgccaaatatgttgggggcaaacacaagtggggtagaaaatctaaatttgctcctaaggctgtagaaggctttttacttggttatgactcaaacacaagggcatatagagtcttcaacaaatccactggattagttgaggtttcttgtgacattgtgtttgatgagactaatggctcccaagtggagcaagttgatcttgatgagctagatgatgaagaggctccatgcgtcgcgctaaggaacatgtccattggggatgtgtgtcctaagaaatccgaaggcctacacaagcacaagatcaaccgtcatcttccaagcaagcatctccaccaactcaagatgaggattaggctcaagacaatgaaaatgaagaccaagaggatgagccacctcaagaggaggacaatgatcaagggggagatgaagttaatcaagacaaggaagatgatcaagaaatacagggtcaaagatcaccacacccaagagtccatcaagcaattcaacgagatcaccccgtcaactccatccttgccatacaaggtggaagatgcactaagagattcagattgggtgttggcaatgcaagaggagctcaacaacttcacgaggaatgaggtatggcatttagttccacgtcctaaccaaaatgttgtaggtaccaagtgggtattccgcaacaagcaagacaagcatggtgtggtgacaaggaacaaagcccgacttgtggccaaaggatattcacaagtcgaaggtttggactttggtgaaacctatgcacccgtagctaggcttgagtcaattcgtatattacttgcctatgctacttaccatggctttaagctttatcaaatggatgtgaaaagtgccttcctcaatggaccaatcaaggaagaggtctatgttgagcaacctctcggctttgaaaatagtgagaaccctaaccatgtttataaactctcaaaggcgcttaatgggctcaagcaagccccaagagcatggatcatgattcaaaaattcgagatgtctatgatgggggagttgaagtattttctaggatttcaagtgaagcaaatccaagatggcaccttcatcagccaaacaaaatacattcaagacatacttaacaagtttggaatgaaggatgccaaacccatcaagactcccatgcgaacaaaagggcatctcgacctcgacacgggtgatggacatcttagcatgtaccaccataagtttagaaactaccacattcctgctggattgatgaagatcaagaagaaggagtttctgtcattaaaacaaggcaacatgtctgtcagcgagtaccgtgacaaattcatccagctgtcaagatatgttcctgatgaggtggcagatgataaaaggaagcaagagcacttcacagaaggactcaataggcccctacagtatgcactggttgctcacacatttccatcatttcagaagctgctggataaggctcttgctattgaacacaagcgtgttcaattgggagatttgaagaggaaggccattacccaggggcagggctacaccaactcatctaggaggaggaccacgcccagctcagtagactccacaggggtctccacgacacctcccactcgtcaagctacccccactggcaccccgacgaggcctacaggacagaagataggccccacatgcttcaagtgcagtcaggttgggcattatgctaatgcttgtccggcggggaattctagtgcatcagctcagaacaagcaacagactcctggcaagggattcagcattgccagggttaatcaagtcagtgctgaggccactgctgacggtgcagacatcactattgatagggaagtcgaatttgttattgatctcttacctggtactgctcccatttcaaaaaggccatataggatgtcagtggaagagttaaaagaactgaagaaacaattaacggagttacaggaagcagggtacattcgtccgagttcctcaccttggggagcaccggtactgtttgtacagaagaaggatggttcacaacggatgtgtgtggactatagatcacttaataatgttactgtaaagaacaagtatctgttaccccgcattgaggatttatttgatcaaatgagaggtgctagggtattcttgaagattgatctccgatcgggttaccatcaaatgaagattaggccatcagatattcccaagacgactttctcgacccgatatggtttatatgagttcacgtttatgtcatttagactaactaatgcaccggcttatttcatgaatctgatgaataaggtgtttatggagtatctggacagatttgtcatagtattcatcgacgatattcttatttattccaagagtgatagcgatcatgaggaacatctgagattggtgctacagaagctacgaaataaccaactctacgccaagtacagtaaatgtgagttctggattgatgaggtgccattccttggacatatcgtttctaatggtgggatatcagtggatcctgctaaagtcagggagatagtggcgtggagcatacccagtatagttattgaagtccggagtttcttgggacttgcaggctattatcggcgatttattgaagggttctctaagattgctaagcctatgacctcacttctggagaagggaagagagtttaagtgggactcgaagtgccaagataaactggcagtcgtagtgcatgcactcaagatatggagacactatattatgggaaccaagtgccaagtgtacacagatcataagagtttgaagtacatattcacccagaaggatctcaaccttaggcaacgccgatggttggagctcattaaggactatgacttggagattcattatcatccgagcaaggcgaatctggttgcggatgccttgagtcggaaggaacacgttcattccgctattgttgcccagctacccgatgagattgtagaggatttcaggagactcaacctgggaattgttgcgcacactgaaggagtcaccatcgaattggaacctaccttggagcatgaaattcataggggtcaggttggtgatgctaaaattcaagagattaaagatctgattactgaaggtagaggtccagaattcacggaggatgagcaaggcactgtatggttcaaggagcggatatgtgttccggagattgatagccttcgtgagactatattgaaggaagcccatgattctgattactctatccaccctggtagcactaagatgtatcaggatttgaagcaaaagtactggtggtatgggctaaaaagagatgttgctgcagacgtggctaagtgtgatgtgtgtcaaagagtcaaggccgaacatcaaagaccagctggactattgcacccgcttaagatacccgagtggaaatgggaagaaattggcatggatttcattgttggactaccctgcactcctgcagggtatgactctatttgggtaattgtggatagactgaaaaaagtggctcacttcataccagtgaggactaattacacgggagccaagctagcagaattgtatatgactcggatagtttgtctacatggggtgcctaagaagatcgtgtcagaccgagggtcacagtttacttctcagttttggaagaagttgcatgagagcttggttacacagttgaattttagttcggcctaccatcctcaaactaatggacagaccgagaggactaaccaagtgctggaggatatgttaagagcttgtgctcttaaacatggtggtagttgggataagagcttacaatatacagagttctcttataataatagttaccaggctagtctgaagatgtcaccatttgaggctttatatgacaggaagtgcatgactcctctatattgggatcagactggagaaagacagttctttgggcctgaacttatacaagagacagaagaacaagtgcgaatgataaaagagaatttgagaattgcacaatcaagacagaagagctattctgatacccggagaagactactgaagtttaaggagggtgatcacgtgtatctgaaggtgtcaccgatccggggtatgaggagatttaaagttaaagggaagttgtcccctcgcttcattggacctttcttgatcttaaagcgagtgggagtagttgcatatcaactagaactacccgatcacctggcagatgtacatgatgtcttccatgtatctcagctgaagaaatgtctcagggtacctgaaaagcagctaccactggaggatcttagtgttcaggatgatctgacatatgctgagtatcctatcaagattcttgatacattgactcgtgtcacaaggagcaaagtgattaaaatgtgcaaagtacaatggagtcaccatggagaagatgaggctacttgggaaagagaagaagagcttcgcatagactttccccacctctttcctagttctacctaa

SEQ ID NO: 5249 - DNA, 588 bp, Zea mays
  Clone ID: TF_LIB4729-106-A1-K1-A4
gtgtgaatgtgaaaccgaccacccaaagtcccaaaccctaacttactatttgtattcggatctgatctaattgcaagtgtatatatactctgagcctggctgccgaaacttcctttttgagtccctgttacattcggattcgtttttgatgacttcatcaagaagcaacagcaggagccacagtcgcagcaggagcaggagcaggagccgcagtcctcagcgaagagataggttgcgcagcgaacgtgcaccccgccgcagtcgcagtcacagcaggagccgcagcccataccgtcgcagagaacggcgtggatgcaaggatctcgtatgcaagaactgccggagacctgggcactttgctaaggagtgcccatctgcgcctacgtgcaataactgtaaccttccaggccacttcgcagcagaatgcacctcaaaaactgtttgctggaactgcaaagagcctgggcacattgcgagtgagtgcaagaacgaggccctgtgccacacctgcaacaaaacaggtcacttggcgcgtgattgccctacttcagggggctacgtcaagctatgcaacaaatgttttaaatc

SEQ ID NO: 5250 - DNA, 2109 bp, Zea mays
  Clone ID: TF_ZmC4916_404
atggatacccataggccaccacacttcgacggcactaacttcccatattatagtgctagaatggcttgctacctagaggccgttgatctaggtgtttggagagtcactcgtgacgggatgaaacccctcaagaatcccgagaaacccaccacgagtgaggaaaaagaaatccatttaaatgctagagccaaaaattgcttgtttgaatctcttagcatggatattttcaatcaagtatttactctgaaaactgctaatgagatttggctaaaattgcatgagctccatgacggcacatccaatgtccgtgagcaaaaacattgcctagtcttaaatgagtataattcttttgctatgaaagatgatgagcttgttagagacatgtattctcgtttgaatcaaataatcaatgagctcaactctattggcattaataagctaggtgatgcggacattgtgaggaagattatctccctgctaccacaacaaaaatatgggagcatcatcaccatccttcacaacatggaggacttgagcaacatgaccccgaccattgtgattgggaaaatcgcggcctttgagatgtcgcgaaaaatgagtcggggagaggagccaacttcctcaaagccatatgcttttgcatgtgatgaaaggaagggcaaaaagaaggctcccactccaagttcctcaagcaaagaagaggaagaagaagaagaaagtgatgatgatgaagataatcaaccatgcacatcatcctccgaggacgaagaaacaatccgacgcgtcggaaaggtaatgaggatgatccgcaagattaatctaatgggtgtgcctctgcaggtcgaggatcttctctttaacattgacaggaaaaagcaaaggaagagaggatgcttcgcatgtggggagaagggccacttcagggacaactgtccaaatatggccaaacccaaaaaggagaggagcaaaggcaaggcgctcacaagtgttagaacttgggatgactcttcaagtgaagatgaatctccaaggacgcgcagccaccggtcctcgtcacgatcatcacggacatcacacaaatgccttatggcaagaggtaacaaaagcattccatcctctagtgatgaaagtagtagtgatgatgaaggtgagggaaaggcctctctagatgagcttgcagaagccgtagaatttttccaggatgtttgcactaagcaaaaagctcaacttaaaaatttgaaaaataagttggttagctctcaaaatgattacaaaggtttgctagaaaaatttgaaacttttgcaaacttaaatagtgagctatcaactaaaattgagctgttagaatctagtgctccatccactgctaccgatgatagccttattaaaaagaatgaaaaacttaaggctaagttagctagctcccaagaagctattgaaaatttgctagagaaaatggaaattcttagcatacacaataatgagctaactactaagctagaaagcattggtagcaccccagcagcatctttagttgaaatatctgaaataattaagaaagatgcttctacttcctgctttgatttaattgatgattctaacacctgcaaccaagtcgctgttgagaatattgttatagagacatgtacggatgaggttgcaaaggaaaatgaacaattaaagcaagaagtggctcgccttggcaaggctttgtatgacaagaaaggcaaagccaaacaaatccaacctccacaggataacaccactgcgggagtgaacaagcctatggagggagaaactgtgatttgtaggatatgccacaaggaaggccacaagtctttccaatgcaaggcgatgaccggggataaacaaaggcaaaagctcaagcaaaagccatcaagcaaaatctccagcacctacatcaaaaaggtgaacaaaaaggacgctacaccatatttgatcaagaagaaaaagaatggaaaggtgatagcaatcaaggccaacaagcaagccaacaaaggaaagggggccaaacgcatctgggtgccaaaagagataatttcaaccatgaaaagcaccaagaaggtttggatcccgaaagggaagtga

SEQ ID NO: 5251 - DNA, 1428 bp, Zea mays
  Clone ID: TF_ZM4448.C1.o2.fg
atggaaagcccgtctgattttggtctatcaaaagactctactcaaaagcactacaagatgatcaagctaggattgcggaacttgaagcgaagtttgccagaagaaaccctctcgaagctatcgacgatgccctattctctatcttatccccactccgcaagaagttttgttatggatcctttggatctattaccagacttcttgatgttagaccttggaatgtcaactacaagtgatgtcactaaatgcaaggaatgtggtgtgttgacaagtcaaaacaacactataaatgaaacagctgatgaacagaccttcaagacacaaaaggatgcacaaccaaaccaacaaacaagtgaccttggaacatgttgttgttgtgagtactatggaattccttgtcgccagatcagtacaaacgaaagtaaaactacaaaacagaagaaccagattttattttatggcataaacagacaaatgtctccccaagaacaacttatagcagattctctcatacctaatgcactgtcagttgatgaattgcaaagtattccaaaaaggaaacatcacaaggatgcccagccccaagaagaaacacaggagtgttacattgatggatggactatcacctgcacacagtttcagccccatcgtcgcatcaggtccaagaaacaaaaagggaaacatggaaagagtcaagaaataacttcaagaaaagcttgctatcaatgtggacgtgaaggtcattacttccgtaactgtcctgagaagagttcactatcggacacccccgagatgaagcaacctcagtctccagacatggaatatgaacaaaaatgcacagaaacttctaccaacaacgtaaagacaactccaccatgtaacttatcaagtcgtacttgctttggctgtggtgatatcgaccatcttgttaatggttgtcctaagaaggatgtggagatcaataaggtccaaaagaaaagacaacgccctcaaacccatgcatcaacaaagaataaacaacggaaagagtccacaggaaggataagttatgcagtgacaggaaccattccatatgatgatgcagtaatttttggaacactagtcattcacacaaccatcgccaccgtgttgtatgatcctcgtacaacacattctcttatcagtgcccagtttgcaacaaagtatggtatcttcaagtgtcccttaagatcaagaaagaccatcagtacacctgaaaggaaagtgttagcgaactacatatgtccgaaagtaagtattaaaatcaacgggatagtgttgggcccatgcttcgttgcgccgaaggtcttgcgtgaagaagcagcttcggctgaaatcgtccccagaaaatggccgaaggttcctttttatagagcttcggcgttgcaaaccgacataaagatagaatga

SEQ ID NO: 5252 - DNA, 1875 bp, Zea mays
  Clone ID: TF_ZmC71_26
tcaagcacattttggtacccatcgcttgatgggtccgttaaggttagtgaacaaagatctaggaacccaagtgtcctttgtgctagcgcttggtaaacttgttacctttctagcacaagttgcaatcttgggttgcctagttatatatgaatctaatgacaagttaggagtgggaattttaccaatgggacaatctttgcattgatgtcccttctttcggcatgtgtagcatagccgttttccaagttttgaagatttcttctttccttgtttgttgcctgctacatggttagtaaaaaccttcttttctaaccctatgcctttttgttttaaatggggacaagatctaagcatgtgtcccttcttggagcatttaaaacaaagcctatcatccttgttaataatcaagccttttttaatgtagggacacgacctaatcaagtgcccctcttcaaagcattcactacacctcttaatgtgaagtgtgacttgatcattaccttggatgttaccttttgtggaggcgtggttgaggcttttggaggaggtgttgaatttcatattttgttccctcctcattgcaatcctcaaatccttgacattttcttcaagggatgtagtgcatgcaacggttgttcccgtctcaagcttcttcaccatgtgatcacagttatcttgagaaggttgggcaatgcatttccctttaagttgtgtcaagctcttctttagcctctcattttcttctttgagcttttgatatgaatcatcatttgttcctgcaaattctagctcaaaggaagatttgcttgtcgacggacaacaagcattagcacatggtaatatagtattaatttgaacacatgtgcacgagtgaggttgttgggattttaaattttctatcacaacctcatgagcaatgtttaatatgatatgatcatctctaagattttcataagagcataggagcatatcatatttttcttgaaaagctagattttcaatttttagcttttccacttggtccttaagcaaggtattcctatttactaattgagcgatacaatgtgaagcgttattttgctcaattgaaatagtttcatacctttggaccaaatcaacatgagagcactttagctccttatgttctttagtcaactcgtcaaagtgttgcatctttatggagagaatatcttctagcctttgacgagcttcgctttgctctctcgctctttctagaagtttgagcatgaccgccttatcttcttggcttaggcgagcgtagagatgcacaaaacttctttcttcctcctcatcctcatttgtgcttccgctatcattttcattagccacacaacacatgtgggaatcgaaatgggaagacaaaccttttggagaggtggattcatcgtttggtctccatcgttcattttctccttcttccttgcaagggttagtatcacaaaaactaaaggaagtagaggcatcaaatgaactattatgtttggactcatcaaacttgattttaattctagtccaaatatcatgcgcatcgggaatggattcgttatagtttgatatgaaggcatgataatcttctttgctaagagaattgtttaagatgtcaaaagctaggtagtttaagcgataacatctttgatcctcttcggaattaatttttccattaaaactagagggaaaaatactcttgtcaataatttgttctaattgaggatgtatggttctaaaggcatttatcacactagtagaccatgaatcataattagaacaatcatcacataatatctcaagagttacctccttccgagttgggttctcctgggttttcttgttcttttgggatcttctacgagccat

SEQ ID NO: 5253 - DNA, 9869 bp, Zea mays
  Clone ID: TF_ZmC36592_151
ggccgccccttttttttttttttttttgcaataaagcataaaaccatacatgtcacaatgttaaattattacatcaccatcatcatcatcggagttttgcaaaagtaaccatcattgttcgaagtgcagcggaataaaactaacggtcattaaacagagagatggggaagcctgtcccatcactcctcatgctcctccccggccgaggcagggtcccactcaacagtccaacccggtggcagggtggacggccaagttatcccagcaaccatctcctccagagaaccttccaaagcagtggcaggcaggtcctctggtgcaggctcgggtgctggatctggggctacctcctgagcagctccttgctccggcacgaggatgtactctccgtcagcaagattacagtcgactcctttgggtagaaagtcggggaagcgagagcgtagaaaatcctcggtctcccatgtagcttcttctgctgaatggtgactccactgaaccttgtacattctgaccgaccttgcccgagttgatctttccttttgatctagcaccttgacggggtactcttggtaggataaatctggttctatctcaatgtctggttctgggagtacttcagtgggtagacgaacgcatttccgcagctgagatacatggaacacattatgaactgctgacatgtgaggtggcaattccacttgataggctacggttccacaagcttccttgatcttgtagggtccaatatagcgaggagctaacttgcctttgatcccgaatctctgaacacccttggtgggtgataccttaaggtagacatgatctcccacctcaaactgtagaggcttccgcctcttatcatgatagctcctttgcctggcctgagcagcttctaagttcttggtaataaccctgacctttgcctctgcctcgagtaccaagtctggcccaaaaatttctctttctcctgcttgagaccaattcagtggggtcctacaccttctcccatacaatgcctcaaaaggtgccatcttcaaactggactgatagctgttattgtaagaaaactccaccaaagacagacacttgtcccaatcctttccataatgtagtgcacatgctcgcaacatgtcttccaaaatttgattcaccctttctgtctggccatctgtttgggggtgatatgctgagcttcggatgacatgggtcccaagtgactcttgcaattgctcccaaaatcgtgccacaaatgatgctcccctgtcagatataatggtcttgggaataccatgcaacctcactatttgatcaacataaagttcagcgtacttctctgccctgtgggtggtatgcactggcaagaaatgagcagtcttggtcaacctgtccacgataacccaaatagaatcatggtgcctggaagtattgggtaatcctactatgaagtccatgcaaatatcctcccatttccaagatggtatgggaaggggttgtaaagggcctgctgccttcaagtgactagcctttattctctggcaagtatcacactcggatatgtacttggcaatttcccttttcattctagtccaccaatataaggatctgaggtcatggtacatcttgttgctaccagggtgcatggagaattttgaaaggtgagcttcatctagtattttccttctaagctcagggtccttaggaacaaccaatcgatctccaaaccatagaattcccttgctgtcctgtcggaaacatttgtatttttctgccttctgcttgatcatatccctgataacctgaacacccttatcctcaacctgtgccctgattatctgctcttgcaatgtgggttccactgagatatagcttaggttacccgaagaaacaacttccaagttcagcttgcacaactcatcacacagggtggtcactcccacatccatgctcatacaattacactgggcctttctgctcaaggcatctgccacaacattggccttccttggatggtaatgcacttccaaatcataatccttgatcaactctaaccacctcctttgcctcatgtttagatctgcctgagtgaagatgtatttgagactcttgtgatcagtgtagatgttacagtgagctcccatcaggtagtgtctccatatcttaagagcatgaactacaactgccaattctagatcatgtgtagggtagttctgctcatggggcctgagtgcccgggaagcataagcaatcactctgttctcttgcatcaagacacatcccaaaccagtaccagaagcatcacaataaacttcaaatggcttggtgttgtcaggttgagctagcactggggctgttgtcaaatgctgcctcaaggtatggaaggcatcttcacacttttggctccactcaaatttgactcccttctttaacagttcagtcattggtttggcaatcctggagaaatccggaataaatcgtcgataataccctgccagtcccagaaaactccgaatctgcttcactgtagtcgggggtttccaatccattacctcttgtaccttttcaggatcaactgatatcccatcctgagagattgtgtgacccaagaatttaatctccttcagccaaaactcacacttagacaacttagcataaagatgatgatcgcgcagtcgttgaagcacaacatgcaggtgctcagtatgttcgtcttcattcttggaatagaccagaatatcatcaatgaagacgaccacgaacttatccaattctggcataaacactgagttcatcaggtacatgaaataagccggggcattggtcagcccaaaagacatcaccagaaactcatacagtccatatctggtagagaaagccgtcttgggaatatcgctggcacggatcttgatctgatggtatcccgagcgaaggtctatcttggagaataccttggccccaaccaactgatcaaacagaacatcaatgcggggcagtgggtatttgttcttgatagtcaccgcattgagagggcggtagtcaacacacatcctcaaactctcatcctttttcttcacaaataatgctggacatccccatggtgaagtgcttggacgaataaaccccttatccaacaactcttgcaattgcttcttcaattctgccaattccgcgggaggcatcctatagggtctcttggagataggagcagtcccgggttgcaattcgatggcgaactcaatatctcggtcaggtggcatccctggcaattcgtctgggaaaacatctgggtagtcgcagaccactgggatcttttccaccggggattctatcagaacaaaggcacaagatcgggtacaaccctggttgggtaaatacaacacagtctcgccataagcaggggaatgaatttcaatggctctggctgcaatgtccaatactgcctgatgcctggtcaaccagtcagctcccaaaataatatccacactatccaatcctaagatatgaagggtggttctaatcaccagactaccaaattttataggcacttgcctgttgatttggtaagtggcaactctgcctcctggcgttgaaattgtaatgcccccatcggtatggtgaaagggcaactggcatttggcactaaacttagtactgataaaactatgcgatgcacccgaatcaaataaaataatcgcaggataattcaaaactgtaaagataccggtcatgacgggtgctccctctgggatatcaaccatggtggtgaagtttagtctgccctgcctcacttgcaccttctgtctcttgccttggttctgattgacattctgcccctgcctctgctggttcctggggcaattcttggcataatgcccagtgttgccacaagtgaagcacctgttgtcattggcttggcggtactgctgctgattattcctctgagctggaaactggttgcggttgggtgcctgctgctgctgctgctgaggtcggattacccatcgcccttgctgctgctggggtcccctgccctgggtgtcggatacaatcctgaagcgctgtggctgagctgagggtcctgccacgggggtcttcctcttcttctctgcctgcctagctgtaatgcagtcctcttgggagatagccatgttgaccaactcattgtagctgttggccctgacggtgttgagacgatcccggagcttagtgctgagcccccttctgaatctgtccctcttcttctcatctgtatcagcatgatatcccgcatactggcacaagtcattaaaggcctgggcgtactgcaacactgtcctgttgccctgagtgagtgccaagaactcattgagcttcctgtccatgatcccggctggtatatggtgtcctctaaaagctgccttaaactccctccactccacctctcggtcctctggctgcatagcaagaaagtgatcccaccaagtccttgcaggtccacgaagctgctgggtggcgaacctgactttggtgacctctgagcaaactccatggagcagtggaaatttggattccaccactcgcagccacacatctgcgtcaagtgggtcctccgcccttgtgaacagtggaggctgggtgctgaggaattcctgataggtggccgccgcggggtgacgctggtggtctccaccaccataatgctggggtggtggctgacgttgagccagctgcctcagaatctcattctgctgagccatgagctcctgcagagtgggaggtgggggcggcggtggaacgtgctcgttctggccacgacgctgcctcccggccatctgaaaaatccacatacttattgactcgggggaaggtggtcttcccgagccagcagtgtccacactggaggcaggctcatctcctccctcaatgtcgacgtcctcgttggcctcctggtcctggatctcctggtggtgcatgtccaggtgctcgttagcatcctcaagctcctgctgcacattgtggagctggttttcctgtagatctttttctaccaactctgaggataggtcgaccacgaagtcctctcggctgtcgagggtgagcttagtagtctgagcgaggttagcaagatgtgccatagcatcgctctgcagggcctgtaggcggtacagtgcgctcatgcacatctccaggggatggtagccgcaaaaagtcgtcagagtcttcgtagctaccgcctcggtggtgtcgtccgtcctgaatccaatggcctcagagtcaagggaacgccaactcggctgaagggggtgtgcctccaatgtcagccagactcggcaacgtggcacccgatgatcctcgtacagctgcaccgtgtacaaaggggcatagggtagccggtggagttgagcacctcccacaagatggaagggaaaccctcgtgagaaaggaaatcggaactgaaacgagtgtctcctccactggcgggggtgggtgaagtcatctggtggcaaggtggacggccaagttatcctagcaaccatctcctccagagaaccggggcttgccttccaaagcagtggcaggcaggtcctctggtgcaggctcgggtgctggatctgggctacctcctgagcagctccttgctccggcatgaggatgtactctccgtcagcaagattacagtcgactcctttgggtagaaagtcggggaagcgagagcgtagaaaatcctcagtctcccatgtagcttcttctgctgaatggtgactccactgaaccttatacattctgaccgaccttgcccgagttgatctttccttctgatctaataccttgacgcggtactcttggtaggacaagtctggttctatctcaatgtctggttctggtagcacttcagtgggtaggcgaacgcatttccgcagttgagatacatggaacacattgtgaactgacgacatgtgaggtggtaattccacttgataggctacgggtccacaagcttccttgatctcgtagggtccaatatagcgaggagctaacttgcccttgatcccgaatctctgaacacccttggtgggtgataccttaagatagacgtgatctcccacctcaaactgtagaggcttccgcctcttatcatgatagctcttttgcctggcctgagcagcttccaagttcttggtaataactctgacttttgcctctgcctcgagtaccaagtctggcccaaaaatttccctttctcctgcttgagaccaatttagtggggtcctacaccttctcccatataatgcctcaaaaggtgccatcttcagactggactgatagctattattgtaagaaaactctgccaaagacagacacttgtcccaatccttcccataatgtagtgcgcatgctcgcaacatgtcttccaaaatctgattcaccctttccgtttggccatctgtttgagggtgatatgctgagcttcggatgacatgggtcccaagtgattcttgcaatttctcccaaaagcgtgccacaaacagtgctcctctgtcagatataatggtctttggaataccatgcagtcttactatctgaacacccttatcctcgacctgtgccctgactatctgttcttgcaatgtgggctccaccgagatatagcttaggtcacccgaagaaacaacttccaggttcaatctgcacaactcatcacacatggtggtaacccctacatccatgctcacacaattgcactgggcctttctgctcaaggcatctgccacaacattggccttccctgggtggtaatgcacctccaaatcgtagtccttgatcaattctaaccatctcctttgcctcatgttcaggtctgcctgagtgaagatgtatttgagactcttgtgatcaatgtagatgttacagtgagctcccatcaagtagtgtctccatatctttagagcatgaactacagctgccaattctagatcatgtgtagggtagttctgctcatggggcctgagtgcccaggaagcataagcaatcactctgttctcttgcatcaagacacatcccaaaccagtaccagaagcatcacaataaacttcaaatggcttggtgttgtcaggttgggccagcactggggctgttgtcaaatgctgcctcaaggtatgaaaggcatcttcacacttttggctccactcaaatttgactcccttcttcaacagttcagtcattggcttggcaattctggagaaatccggaataaatcgtcgataataccctgccaatcccagaaaactccgaatctgcttcactgtagtcgggggtttccagtccattacctcttgcaccttctcaggatcaactgatatcccatcctgagaaattgtgtgacccaagaatttaatctccttcagccagaactcacacttagacaacttagcataaagatgatgatcgcgcagtcgttgaagcacaatgtgcaggtgctcagtatgtccgtcctcattcttggaatagaccaaaatatcatcaatgaaaacgaccacgaacttgtccaattctggcataaacactgagttcatcaggtacatgaaataagccggggcattggtcagcccaaaagacatcaccagaaactcatatagtccatatctggtagagaaagctgtcttgggaatatcgctagcgcggatcttgatctgatggtatcctgagcgaaggtctatcctggagaataccttggctccaaccaactgatcaaacagaacatcaatgcggggcagcgggtatttgttctttatagtcactgcattgagagggcggtagttaacacacatcctcaaactctcatcctttttcttcacaaataatgctggacatccccatggtgaagtgcttggacgaataaaccccttgtccaacaactcttgcaattgtttcttcaattccgccaattccgcgggaggcatcctatagggtctcttggagataggagcggtcccgggttgcaattcgatggcgaactcaatatctcggtcaggtggcatccctggcaattcatccgggaaaacatccagatagtcacagaccactgggatcttttccactggggattctaacataacaaaggcacaagaacgggtgcatccttgcaccttctgcctcttgccttggttctgattagcattctgcccctgcctctgctggttcctggggcaattcttggcataatgcccagtgttgccacaagtgaagcacctgttatcatttgcctggcggtactgctgctgctggttattcctctgagctggaaactggttgcggttgggtgcctgctgctgctgaggtcggattacccatcgcccttgctgttgctggggccccctgcccaactcattgtagctgttggccctgacggtgttgagacgatcccggagcttagtgctgagcccccttctgaatctgtccctcttcttctcatctgtatccgcatgatatcccgcgtactggcacaagtcattaaaggcctgggcatactgcaacactgtcctgttgccctgagtgagtgccaataactcattgagcttcctgtccatgatcccggctggtatatggtgccctctaaaagctgccttgaactccctccactccacctctcggtcctctggctgcatagcaagaaaatgatcccaccaagtccttgcaggcccgcgaagctgctgggtggcgaacctgactttggtgacctctgagcaaactccatggagcagtgggaatttggattccaccactcgcagccacacatctgcgtcaagtgggtcctccgcccttgtgaacaatggaggctgggtgctaaggaattcctgataggtggccgccgcggggtgacgttggtggtctccaccaccataatgctgaggtggtggctgacgttgagccagctgcctcaggatctcattctgctgagccatgagctcctgcagagtgggaggtggtggcggcggtggaggaacgcgctcgttctggccacgatgctgcctcccggccatactcgactcgggggaaggtggtcttcccgagccagcagtgtccacactggaggcaggctcatctcctccctcaatgtcgacgtcctcgttggcctcctggtcctggatctcctggtgatgcatgtccaggtgctcgttagcctcagcaagctgctgctgagtgttaatgagctgatcctctaggacctcaatggtgttctccctggtgcctaccagctcctccaactcctgaatatcagtggatagctgctccacctgcaaatccttctccaccatctcttgagataaatcaaccacgagctcctctctgttatccaacgtgatctttgttgcctccagtagtgccatcagatgggacattgcctcaccgcgcatcacctgtagacggtacagagcattcatgcaccgtactgtcaagtgcgcagtctgacctgggtagatagcccagatgtccttggcatgctccacccgatccttccacattgggtcgtcctccttctccgcggggaacaagccaatggggtgggtagccagctccaagggatggaatccgcagaaagtagtcaatccatgcagagcgatcgcctcgatcgtgtcctctgcccggtatccgaaagactcggagtccaaagagcgccatcctggctgcaggggatgaggctccaaagtcatcctcaccctacagcgaggcactcggtgcttctcgaactgctgcaccgcgtactgagggggtgtcgtgtatccagccccctgaagtacctcccacaaaatgcggggaaagccctctcgtgcaagtccgtcagtgtgggtcagtgcatttccgtcatcggaggatccgtgggaagtcat

SEQ ID NO: 5254 - DNA, 762 bp, Zea mays
  unsure (1)..(762): unsure at all n locations
  Clone ID: TF_ZmC1373_10
gctatgggaatacacgcttgtatgttggaagattgtctccccgcacccgttctcgtgacctagaataccttttcagcaaatatgggaggnttttcggtgtttttacacaaccatggaggtgtggtggaagggtgcccttgatggaattggtggccatagttccaatgtttgtggaggactttggtgaagggcgcccttggtaattcgagaagtggagttgaagcgtgactatgcattcattgaattcagtgacccccgtgatgctgatgatgcacagtacaacctatatggcagggacgtcgatggaagccgcattattgttgaatttgctaaaggggttcctcgtggttctggtggttcacgtgattacaacggaagaggaccttcaccaggaacaggccgttgttttaactgtggagttgatggtcactgggcaagagactgtcaggctggtgactggaagaacaaatgctaccgttgtggcgaaaggggccatatagaaagaaattgccagaacagtccaaggaacctcaggcgtgagagaagctattcacggtctctatccccacgccgaggacggggccgcagccggagctacagcagaagccggagctatagccgatccagatccccgtctggatctcctaggggtggacgccgagaccgtgatgagaggagatcaaggagtcttatctacagcaggagcgcaagccctaggcgttctgtgtcacctgtaaaggaaaaagagcgcaaccgcacacc

SEQ ID NO: 5255 - DNA, 1396 bp, Zea mays
  Clone ID: TF_ZmC1373_11
cttctcctccgcgccgccacagccgggcgcgcctctcgatcgagatccaggagatatgcctcgttatgatgatcgccatgggaatacacgcttgtatgttggaagattggcccctcgcacccgttcccgcgacctagaatatcttttcagcaaatatggaaggttttcggttttttacccaaccatggaggtgtggtggaagggtgcccttgatggaattggtggccattgttccaatgtttgtggaggactttggtgaagggcgcccttggtgtaatcttattgactgttgtagatgatgaagttgcaagttaatgtatttgagtacttcgactcacgtcagcttattgtttgtggcaaccatttccgcagaattcgagaagtggagttgaagcgcgactatgcattcattgaattcagtgacccccgtgatgctgatgatgcacagtacaacctagatggcagggaagtcgatggaagccgcattattgttgaatttgctaaaggggttcctcgtggttctggtggttcacgtgattacaacggaagaggacctccaccaggaacaggccgttgttttaactgtggagttgatggtcactgggcaagagactgtcaggctggtgactggaagaacaaatgctaccgttgtggcgaaaggggccatatagaaagaaattgccagaacagtccaaggaacctcaggcgtgagagaagctattcacggtctccatccccacgccgaggacggggccgcagccggagctacagcagaagccggagctatagccgatccagatccccgtctggatctcctaggggtgaacgccgagaccgtgatgagaggagatcaaggagtcttagctacagcaggagcgcaagccctaggcgttctgtgtcacctgcaaaggaaaaggagcgcagccgcacacctgatggcagtaggagccccagcccaagggacaaggtgagcccaccaccaaaggataatggtgcacacaatggctcggaccgtgaagacagccctgggggcagggagatgagcaagaggagtcggagcccgtctgatggctaccgtagccctgtgggcaatgggcgcagcccgagcccgagggatgaccgtagcccaagcccaaaggtcaacaatggtgacgacccaagccccaagggcaacaatggtgacgacgagcaccgcggttcaccaagaggaagtcagtccccctgaactgaaaaactccccgtgcaatttggggagcagtgtgcctgatttgagaaaacaaactgtattttgccatttctcagacttgtgatctttttgagcaagaaaactcggtgtaagaatttgttgccctcgggtgtaagacagatttgtggtatttgagcttttcatcctgcc

SEQ ID NO: 5256 - DNA, 1126 bp, Zea mays
  Clone ID: TF_ZmC1373_12
cccaccccgcatcgtcggaaccctccaagtccaaaccctctccccgccgcatcgccgccgccggaagcgcctccctcgatccagatccaggagatatgcctcgcaatgatgatcgctatgggaatacacgcttgtatgttggaagattgtctccccgcacccgttctcgtgacctagaataccttttcagcaaatatgggaggtttttcggttttttacacaaccatggaggtgtggtggaagggtgcccttgatggaattggtggccatagttccaatgtttgtggaggactttggtgaagggcgcccttggtgtaatcttattgactgttgtagatgatgaagttgcaagttaatgtatttgagtacttcgactcacgtcagcttattgtttgtggcaaccatttccgcagaattcgagaagtggagttgaagcgtgactatgcattcattgaattcagtgacccccgtgatgctgatgatgcacagtacaacctagatggcagggacgtcgatggaagccgcattattgttgaatttgctaaaggggttcctcgtggttctggtggttcacgtgattacaacggaagaggacctccaccaggaacaggccgttgttttaactgtggagttgatggtcactgggcaagagactgtcaggctggtgactggaagaacaaatgctaccgttgtggcgaaaggggccatatagaaagaaattgccagaacagtccaaggaacctcaggcgtgagagaagctattcacggtctccatcaaggagtcttagctacagcaggagcgcaagccctaggcgttctgtgtcacctgtaaaggaaaaggagcgcagccgcacacctgatggcagtaggagccccagcccaagggacaaggtgagcccaccaccaaaggataatggtgcccacaatggctcggaccgtgaagacagccctgggggcagggagatgagcaagaggagtcggagctcgtctgatggctaccgtagccctgtgggcaatgggcgcagcccgagccgtagcccaagccccaaggtcaacaatggtgatgacccaagccccagggcaacaatggtgacgacccaagccccaagggcaacaatggtgatga

SEQ ID NO: 5257 - DNA, 1314 bp, Zea mays
  Clone ID: TF_ZmC1373_18
accgcattatcggacgccctccaagtccaaaccctctccccgccgcatcgccgccgccggaagcgcctccctcgatccagatccaggagatatgcctcgctatgatgatcgctctgggaatacacgcttgtatgttggaagattgtctccccgcacccgttctcgtgacctagaataccttttcagcaaatatggaagaattcgagaagtggagttgaagcgtgactatgcattcattgaattcagtgacccccgtgatgctgatgatgcacagtacaacctagatggcagggaagtcgatggaagccgcattattgttgaatttgctaaaggggttcctcgtggttctggtggttcacgtgaatacaacggaagaggacctccaccaggaacaggccgttgttttaactgtggagttgatggtcactgggcaagagactgtcaggctggtgactggaagaacaaatgctaccgttgtggcgaaaggggccatatagaaagaaattgccagaacagtccaaggaacctcaggcgtgagagaagctattcacggtctccatccccacgccgaggacggggccgcagccggagctacagcagaagccggagctatagccgatccagatccccgactggatctcctaggggtggacgccgagaccgtgatgagaggagatcaaggagtcttagctacagcaggagcgcaagccctaggcgttctgtgtcacctgcaaaggaaaaggagcgcagccgcacacctgatggcagtaggagccccagcccaagggacaaggtgagcccaccaccaaaggataatggtgcccacaatggctcggaccgtgaagacagccctgggggcagggagatgagcaagaggagtcggagcccgtctgatggctaccgtagccctgtgggcaatgggcgcagcccgagccgtagcccaagccccaaggtcaacaatggtgatgacccaagccccaagggcaacaatggtgacgacccaagccccaagggcaacaatggtgatgacgagcaccgcggttcaccaagaggaagtcagtccccctgaactgaaaaactccccgtgcaatttggggagcagtgtgcctgatttgagaaaacaaactgtattttgccatttctcagacttgtgatctttttgagcaagaaaactcggtgtaagaatttgttgccctcgggtgtaagacagatttgtggtatttgagcttttcatcctgccaaaagctgaatattcattcaattgccaagtttctcgagtttaagaaaaaaaaaaaaaaaaaaaaaaagcttgtc

SEQ ID NO: 5258 - DNA, 2290 bp, Zea mays
  Clone ID: TF_ZmC1373_25
tcctttccccaccccgcatcgtcggacaccctccaaagtccaaaccctctccccgccgcatcgccgccgccggaagcgcctccctcgatccagatccaggagatatgcctcgcaatgatgatcgctatgggaatacacgcttgtatgttggaagattgtctccccgcacccgttctcgtgacctagaataccttttcagcaaatatgggaggtaagcatcacattatatgcacatagaactattctgaaactcagagtgtgctggcgtgctgctttttgttatgtggtcggacaccagttatgctctactacctccgtttttatatatttgacgccatacaattccacttttacatgccgacgtcaaataaaaatgaacggagggagtagtatatatcatgagcacgtgatgttaactctgcatggttaaattttgtggtacacaactacacatcaatccagatataaaatacaatagcaagctaggggctttcctatcgtgttcaaaaaaaactcgacctgtgggggtaagaccgtctgtacaatattatattaagaagaccttctcacacaggtcaagaagaccttccacgcaggtcgagaaaacctctaaactcctgccccaccacccccacccatacacaatggcaccgtagcccaagtgagaacgaccgggccaggcctgtgctttggcttgggacaggcgaggggatgttttaacttttaaccacagcctgaaaattcgctcccacggggagtcaaacctagaacctgacaagtgctactcagaccacctaaccaactcgcctgttcataataggtagtttatgaaggtgttgggttttgtgatgcttgacatcattttgaggtttttgtggatggggtcatacaagtcttctgattttattggtgtatgttctgttacatcactaagcacaaaataaatgtttgacctgggcctatttgacttgaatgatcttgttgaaggtttttcggttttttacacaaccatggaggtgtggtggaagggtgcccttgatggaattggtggccatagttccaatgtttgtggaggactttggtgaagggcgcccttggtgtaatcttattgactgttgtagatgatgaagttgcaagttaatgtatttgagtacttcgactcacgtcagcttattgtttgtggcaaccatttccgcagaattcgagaagtggagttgaagcgtgactatgcattcattgaattcagtgacccccgtgatgctgatgatgcacagtacaacctagatggcagggacgtcgatggaagccgcattattgttgaatttgctaaaggggttcctcgtggttctggtggttcacgtgattacaacggaagaggacctccaccaggaacaggccgttgttttaactgtggagttgatggtcactgggcaagagactgtcaggctggtgactggaagaacaaatgctaccgttgtggcgaaaggggccatatagaaagaaattgccagaacagtccaaggaacctcaggcgtgagagaagctattcacggtctccatccccacgccgaggacggggccgcagccggagctacagcagaagccggagctatagccgatccagatccccgtctggatctcctaggggtggacgccgagaccgtgatgagaggagatcaaggagtcttagctacagcaggagcgcaagccctaggcgttctgtgtcacctgtaaaggaaaaggagcgcagccgcacacctgatggcagtaggagccccagcccaagggacaaggtgagcccaccaccaaaggataatggtgcccacaatggctcggaccgtgaagacagccctgggggcagggagatgagcaagaggagtcggagcccgtctgatggctaccgtagccctgtgggcaatgggcgcagcccgagccgtagcccaagccccaaggtcaacaatggtgatgacccaagccccaagggcaacaatggtgacgacccaagccccaagggcaacaatggtgatgacgagcaccgcggttcaccaagaggaagtcagtccccctgaactgaaaaactccccgtgcaatttggggagcagtgtgcctgatttgagaaaacaaactgtattttgccatttctcagacttgtgatctttttgagcaagaaaactcggtgtaagaatttgttgccctcgggtgtaagacagatttgtggtatttgagcttttcatcctgccaaaagctgaatattcattcaattgccaaaaaaaaaaaaaaaaaagcggcc

SEQ ID NO: 5259 - DNA, 1569 bp, Zea mays
  Clone ID: TF_ZmC1373_26
gcacgagactggatagagatctgaccttatggaaatgggaaatgcctatgctttttcgactctgacttccccataacctggcgcttcgcccgtggtcaatggtacactggccaacggcactacggaaaaaggtctagttgatactagagaatccccgctccaatttcctacggcactctttcttcctgtgtgagtgcatacctactttccggatagtttcccacttcttaaccagcggcaggcttgcccgtcaccccgcatcgtcggacaccctccaaagtccaaaccctctccccgccgcatcgccgccgccggaagcgcctccctcgatccagatccaggagatatgcctcgcaatgatgatcgctatgggaatacacgcttgtatgttggaagattgtctccccgcacccgttctcgtgacctagaataccttttcagcaaatatgggagaattcgagaagtggagttgaagcgtgactatgcattcattgaattcagtgacccccgtgatgctgatgatgcacagtacaacctagatggcagggacgtcgatggaagccgcattattgttgaatttgctaaaggggttcctcgtggttctggtggttcacgtgattacaacggaagaggacctccaccaggaacaggccgttgttttaactgtggagttgatggtcactgggcaagagactgtcaggctggtgactggaagaacaaatgctaccgttgtggcgaaaggggccatatagaaagaaattgccagaacagtccaaggaacctcaggcgtgagagaagctattcacggtctccatccccacgccgaggacggggccgcagccggagctacagcagaagccggagctatagccgatccagatccccgtctggatctcctaggggtggacgccgagaccgtgatgagaggagatcaaggagtcttagctacagcaggagcgcaagccctaggcgttctgtgtcacctgtaaaggaaaaggagcgcagccgcacacctgatggcagtaggagccccagcccaagggacaaggtgagcccaccaccaaaggataatggtgcccacaatggctcggaccgtgaagacagccctgggggcagggagatgagcaagaggagtcggagctcgtctgatggctaccgtagccctgtgggcaatgggcgcagcccgagccgtagcccaagccccaaggtcaacaatggtgatgacccaagccccaagggcaacaatggtgacgacccaagccccaagggcaacaatggtgatgacgacgagcaccgcggttcaccaagaggaagtcagtccccctgaactgaaaaactccccgtgcaatttggggagcagtgtgcctgatttgagaaaacaaactgtattttgccatttctcagacttgtgatctttttgagcaagaaaactcggtgtaagaatttgttgccctcgggtgtaagacagatttgtggtatttgagcttttcatcctgccaaaagctgaatattcattcaattgccaagtaaaaaaaaaaaaaaaaaaaaaaaaaaaaaaaaaactcgtgc

SEQ ID NO: 5260 - DNA, 6024 bp, Zea mays
  Clone ID: TF_ZmC24260_1
atggctagtaacaacaatgtgcacattgggaagccaccgcactttgatggaaacaattatgattattggaaaataacaatgtcaatgcatcttcgagcaatggttgtaaaagtttggccaattattagggttggatttcttctgttgaaggaagatcaaccctccattagtgataatgttaatattcacacatcgaatcttggtatgaatgtcttttattatgctcttgatataaattagtgcaattgtatcctaaatctcacaaccgctccttatatttgggtaaaattattggaaattcatgaaggaacttcatttttgcagattgccaaactatatgtgtgaaaaggggggtttgagcattttattatgaaagaagaggagagtgtatccgatatgttcaatcggttgtatgagatagtaaaagaactcaaaggacttggtttttatgtaccggatgtggatttctcgggcaaattccttagatcctttccggagaaatatgagactattgtgacaatgctagtaaggagtgatctatctacaacttctccaaccgaagtattgggagaaattctcactcaagatatatttaagaagtcacaagccgatgctttaagtttggcaaagaaggtgaaaaatgaatctattgctctcaaagccaaggcctcaaaggcaattgaaaaagaagatagcaatgatgaagaaaatgaaagtgagagtgatggtgacatggctttatttgtaaggaaattcaataaattcatgaagatgaaaagaggtcaacctagaagaggtcaaacatctagaagaaatgctttcaatgatagaaaatgttttgagtgtggggaacccggtcacattgccatgaattgcccaagcaagaagaagaagggcaaagatgaaagtgacaagaagaaaaagaaatactataacaagaagaaagatggcaaagcctacttagttgaatgggactcggatgatagctcggatgatgatgatgatgacacctcatccaagcttaatgccggaattgccatcaaggaagctccctcactcttctcatcccccccttggcccctggccaaggggggtgcctaggtaaaaatcatcaccgatttaaatgatataaaagatgatgatgatatcgatgatgttgatgatgatggctattcatatgatgatcttgttagaatgttaggtgaggccgatgactacatgcacaaagaaaaagaaaaatttaagaccttgaaggaattgtataaaaacctccaagtgtcttttgaggagctcaagacctctcacaatgacctcaaagaaaattgtgagaagcttgcggatgctcaaaaatcatctattgtgcatgaagttgaggtggtcactaaggatgttggagtcacttgtgacttacttgatagtcttacaagtgaaccactacctactaactctatttgtgataaatgcaaaatttctctcaatgataacattgctcttgatgaatcaaaaattattgttgagaatgaagtgttagtggatagaataaatactctaactcatgacctagaaaaggcatatggtggtaagactaaattggatttcatattgggaagtcaacgatgctctcttaaccgtgaaggtcttggatatgttcccaagaaaggaaagaatgcttttgtaaagcaaaagacattgtttgtgaaagaatgtgacaaagtgtgtcacaagtgtcacaaaaagggacatgttaagaaaaattgtcccaagttcaaacatgtatcctccacttgttttgagcattgttatgttctttctcataatgcaaaaggtgttcatgctaaatttgttggtacttcaattgttggaaacaaaaagaaagctatttgggtgccaaagaccttggtcactaacatccaaggacccaagcaagtttgggtaaactacaaggcgggagggaatcattgggtgttggatagtggatgtactcaacacatgaccggggatatgaagatgtttacccaaatgagtgaggaagattgctcaaattatgatagtatcacatttggagataatcgtaaaggaaaggttaaaggtttgggtaaaattgctatctcaaatgatcattctatatcaaatgtgctattggttgagtatttgaattttaatttactttccgtagctcaattatgtgatttaggattttgttgcaatttcacggttgaagatgttattatctctagtgttgatggtagcaatcttaaatttaaaggttttagacatgaaaatctttatcttgttgatttctcatctaatgaggcaaagctcacaacttgcctattttcaaaagcttcactaggttggttatggcatagaagacttggtcatgttgggatgaagcaactcaatcggttaaccaagcatgacttagttcgaggcttaaaagatgtgaagtttgaaaagaacaaattgtgtagctcttgtcaagccgacaaatccaatgtgtttgaaacattcaagtcatttgctatattggctcaaaatcaatttgatttcgacatcaaaaaggttagaagtgataatgggtcagaattcaaaaatgcaagaattgatcaatattgtgatgacaagggtatcaaacatgaattctcttccaaatataccccggaacaaaatggtattgttgaaaggaagaatagaactcttattgacatggctaggtctatgttagcggaatatagtatatcggattcttattgggccgaggcaataaataccgcttgtcattcatcaaatagactatattgtcacaagctcttgaagaaaactccatatgaattgctcattggtagaaagccaaatatctcatattttagggtattcggttgcaaatgttatattttgagaaaggggagccgactttctaaatttgagaagaaatgtgatgagggttttcttcttggatattcatcaaatagtaaggcttatagagtcttcaacaaaactcatggtattattgaggaagcatatgatgttgaattcgatgaaacaaatgggtctcaagatgagagtgaaaatctcgatgatgttgggggaactcaattgatagatgcaatgaaaacaatggccattggtgaaataaaaccaaaggaagatgatgatgaaaatagcgtggttgtcattccttcatcctcaactataaatgaggaagatcaccaaggccaacaactcaatgaaaccatggatactcatgatcaaggtacttcaagaccttcggttcctcctaatgcttcaacaagcaattatcaaacggtatcaagaattcatcattccattgtgaaggatcacccggttgatcaaattgtgggtgatattagtaagggtgttcaaactcgctctcgtatagcttcattttgtgaacatttctcttttgtatcttgtatggaacctaaccgtgtagatgaagctctacttgatgttgattgggtgaatgcaatgcatgaagaattaaataacttcgctcgaaatgaagtttgggagcttgttgagagaccaaagaaccacaatgttattggtacaaaatgggtgtttcgcaataagcacaatgaagatggtgtggtagtaagaaacaaggcaagattagttgcacaaggatatactcaaattgaaggattggattttggggagacatttgctcccgtagcaagattagaagcaatccggattctacttgcttatgcttgtgcacacaatatcaagctctaccaaatggatgtaaagagtgccttcctaaatggtaagattagtgaactagtgtatgttgaacaacctcccggttttgaggaccccaaaagacctaaccatgtgttcaagctttctaaagctctctatgggcttaagcaagctccacgcgcttggtatgaaaggcttagggatttcttgctttccaaagacttcaaaattgggaaggttgacactactctattcactaaaagaattggcaaagatttatttgtttgtcaaatctacgttgatgatattatttttggatctactaatgaattattttgtgaggagttcggaaaaataatgtcaaaagaatttgaaatgtctatgataggagaattgagcttctttcttggccttcaaatcaaacaattgaaagatggaatttttataagtcaatcaaaatatttgaaggacatgctcaagaagtttggtttagaaaatgctaagcctatcaagactccaatggcaacaaatggtcatctagacttagatgaaggaggtactatggttgatcaaaaactttatcgttcaataattggtagtttgctttatattaccgcatctaggcccgatgttatgtttagtgtatgcatgtgtgctcgatttcaagcttctcctagagagattcacttgaaggccgctaaaagaattctgagatatttgaagtatactcccaatattggtctatgtggttttggtggtctccgcaagaaacttgcaggtcgctttaaatccaagcgccctcgtggcaatgatgatgactataccccaaccactgattcagaggcccaatcctcagctgggggcactgaatccatggatgctgaagattttcctcatgttcatcccgattatcccattgatatccaaggatggacttatccaaagcggagattttctatggctgagtattgctctagacggactgtgaaccagtacactctgccatctgatacaaatattcagtttttccacactcagctgcagtttgatgtcttttggggcaccctggtggataccaattttcataagcatcaggtgattgattggtccttcttgctaagtcaatctgtcatggagggtctgatccccaagtttgaaacatgtggactatatcagtttatgggacaacgcacagatttcaatgaaatggctgttaagcaattcctggctacctctgagattgatattgaagaagaatctatcacctggatgactggcttcaagcgctattctgcttcttttgctgactttgccgctgccaacagtctggactatggcaccatctctgctgggatggatctttatactgaagataattttgaggattttgtgcagttttatgagctagccaggctcggtatacccaggaggtttggagagacagcaggactcagacatcatcctgctgtcatcaacaagattgccagagtcaccattcttcccaagagtggtgataagagtaaaattcgagataagttctggaacataatccagcacatcatgaatggtgaagtcatgaacatagttcttttcatgatgaggcagcttaatgatttgaaaatggacaagaatcaaaatttggcatatgctccatacattatggctctcatcaaatccaagacaagatttgagggcccttgcgagattgttcacaccccattcaggccttttaagaatgagatagggtttctcaccaggccactcactcccttcccagatgatgaggaagaccctggctatgagggtggagcagctcctaatgttgagggacagcagatgcctcctcctccacctcctcctcagcctcagcactattgggagcctgctccaggatactttgatccttattttcacaatatgcagcaagagctggagactcatattgatactcgctttgatggcctgatgtcacatgtggatcaccgcctcgatgacatgcagtctcgctttgacagtaactgggatgcactcaactctgaattttctgagtttcgtgatcaaattcacactaatgtcactgatcccatcatgtccaggctgaataatatgcaacagagttttcaagataacatgggtgctctctccagtcagtttgataatctttctacaaatgacaacatgcatgatataagtcagaggcagcagcagctccagcaggattttggccagttctcctccctgtttgacaccttcagcactcattactacaacatgcatcctccgccgagtgatcagtga

SEQ ID NO: 5261 - DNA, 4260 bp, Zea mays
  Clone ID: TF_ZM4840.C3.o3.fg
atggctagtaacaacaatgtgcacattgggaagccaccgcactttgatggaaacaattatgattattggaaaataagaatgtcaatgcatcttagagcaatgggtggaacaatttggccaattgttagagatggatttgttgtattaaaggaagatgaaccatctgttagtgataatgagaatatcctcacaaatgatcaagccatgaatgtcttttatgatgctcttgatataaatgagttcaatcgtatcaagaatctcacaaccgctcatgagatttgggtaaaactaatggaaattcgtgaaggaactacaattgtgaagagtgccaaactatatgtgtgcaaagggaagtttgagcaatttattatgaaagaagatgagagtgtatccgatatgttcgatcgattgaatgagattgtaaatgaactcaaaggacttggttttaatgtaccggatgtggatttcacacacaagttccttagatcacttccggagaaatatgagactattgtgacaatgctagtaaggagtgatctatctacaacctctccaaccgaagtattgggagaaattctcactcaagatatatttaagaagtcacaagccgatgctttaagtttggcaaagaaggtgaaaaatgaatctattgctctcaaagccaaggcctcaaaggcaattgaaaaggaagatagcaatgatgaagaaaatgaaagtgagagtgatggtgacatggctttatttgtaaggaaattcaataaattcatgaagatgaaaagaggtcaacctagaagaggtcaaacatctagaagaaatgctttcaatgatagaaaatgttttgagtgtggggaacccggtcacattgccatgaattgtccaagcaagaagaagaagggcaaagatgaaagtgacaagaagaaaaagaaatactataacaagaagaaagatggcaaagcctacttagttgaatgggactcggatgatagctcggatgatgatgatgatgacacctcatccaagcttaatgccggaattgccatcaaggaagctccctcactcttctcatccccccattgcctcatggcaaagggagatgctaaggtaaaaatcatcaccgatttaaatgatataaatgatgatgatgatatcgatgatgttgatgatgatggctattcatatgatgatcttgttagaatgttaagtgaggccgatgactacatgcacaaagaaaaagaaaaatttaaggccttgaaggaattgtataaaaacctccaagtgtcttttgaggagctcaagacctctcacaatgacctcaaagaaaattgtgagaagcttgcggatgctcaaaaatcatctattgtgcatgaagttgaggtggtcactaaggatgttggagtcacttgtgacttacttgatagtcttacaagtgaaccactacctactaactctatttgtgataaatgcaaaatttctctcaatgataatattgctcttgatgaatcaaaaattattgttgagaatgaagtgttagtggatagaataaatactctaactcatgacctagaaaaggcatatggtggtaagaagaaattggatttcatattgggaagtcaacgatgctctcttaaccgtgaaggtcttggatatgttcccaagaaaggaaagaatgcttttgtaaagcaaaagacattgtttgtgaaagaatgtgacaaagtgtgtcacaagtgtcacaaaaagggacatgttaagaaaaattgtcccaagttcaaacatgtatcctccacttgttttgagcattgttatgttctttctcataatgcaaaaggtgttcatgctaaatttgttggtacttcaattgttggaaacaaaaagaaagctatttgggtgccaaagaccttggtcactaacatccaaggacccaagcaagtttgggtaaactacaaggcgggagggaatcattgggtgttggatagtggatgtactcaacacatgaccggggatatgaagatgtttacccaaatgagtgaggaagattgctcaaattatgatagtatcacatttggagataatcgtaaaggaaaggttaaagttgaagatgttattatctctagtgttgatggtagcaatcttaaatttaaaggttttagacatgaaaatctttatcttgttgatttctcatctaatgaggcaaagctcacaacttgcttattttcaaaagcttcactaggttggttatggcatagaagacttggtcatgttgggatgaagcaactcaatcggctaaccaagcatgacttagttcgaggcttaaaagatgtgaagtttgaaaagaacaaattgtgtagctcttgtcaagccgacaaatccaatgtgtttgaaacattcaagtcatttgctatattggctcaaaatcaatttgactttgacatcaaaaaggttagaagtgataatgggtcggaattcaaaaatgcaagaattgatcaatattgtgatgacaagggtatcaaacatgaattctcttccaaatataccccggaacaaaacggtattgttgaaagaaagaatagaactcttattgatatggcaaggtctatgttagcggaatataatatatcagattcttattgggccgaggcaataaataccgcttgtcattcatcaaatagactatattgtcacaagctcttgaagaaaactccatatgaattgctcattggtagaaagccaaatatctcatattttagggtattcggttgcaaatgttatattttgagaaagggaagccggctttctaaatttgagaagaaatgtgatgagggttttcttcttggatattcatcaaatagtaaggcttatagagtcttcaacaaaactcatggtattattgaggaagcatatgatgttgaattcgatgaaacgaatgggtctcaagatgagaatgataacctcgatgatgttgggggaactcaattgataaatgcaatgaaaataatggccattggtgaaataaaaccaaaggaagaagatgatgaagatagtgtggttgtcattccttcatcctcaactataaatgagaaagatcaccaaagccaacaactcgatgaaaccatggatactcatgatcaaggtacttcaagacctacggttccttctaatgcttcaacaagcaactatcaaacggtatcaagaattcatcattccattgtgaaggatcacccggttgatcaaattgtgggtgatattagtaagggtgttcaaactcgctctcgcatagcttcattttgtgaacatttctcttttgtatcttgtatggaacctaaccgtgtagatgaagctctacttgatgttgattgggtgaatgcaatgcatgaagaattaaataacttcgctcgaaatgaagtttgggagcttgttgagagaccaaagaaccacaatgttattggtacaaaatgggtgtttcgcaacaagcacaatgaagatggtgtggtagtaagaaacaaggcaagattagttgcacaaggatatactcaaattgaaggattggattttggggagacatttgctcccgtagcaagattagaagcaatccggattctacttgcttatgcttgtgcacacaatatcaagctctaccaaatggatgtaaagagtgcctttctaaatggtaagattagtgaactagtgtatgttgaacaacctcccggttttgaggaccccaaaagacctaaccatgtgttcaagctttctaaagctctctatgggcttaagcaagctccacgcgcttggtatgaaaggcttagggatttcttgctttccaaagacttcaaaattgggaaggttgacactactctattcactaaaagaattggcaaagatttatttgtttgtcaaatctacgttgatgatatcatttttggatctactaatgaattattttgtgaggagttcggaaaaatgatgtcaaaggaatttgaaatgtctatgataggagaattgagcttctttcttggccttcaaatcaaacaattgaaagatggaatttttataagtcaatcaaaatatttgaaggacatgctcaagaagtttggtttagaaaatgctaagcctatcaagactccaatggcaacaaatggtcatctagacttagatgaaggaggtactatagttgatcaaaaactttatcgttcaataattggtagtttgctttatattaccgcatctaggcccgatgttatgtttagtgtatgcatgtgtgcttga

SEQ ID NO: 5262 - DNA, 1776 bp, Zea mays
  Clone ID: TF_ZM4351.C1.o2.fg
atgtcgtcacaagaggtaactgtagaacttcttttaggcgatggctctaattacaaatcttggtctgtctctatttataatgctttcatgagtgttgattctgatttgagacagatctttagtagaagtatttttccatctgatattagtaaaaatccctctaatgatgaactaagatgtttttctctcaatcaccgtgcttgcagcatcttagttgattctctttctagaggtgcttattttgccatcatgagtagtgataatgatttaattgttgatgctcatgatttatggaatagaattaaagtaaaatattgtgtggcaaattgtactacttctactccctatattgcttgtgatactaacctttcaaagggagaagatcaagaacgatgggcacccaacgatgaatccacctcgtcgacaggtttggtctccactaataataagtgttttattgctaacaatgatggtggagacaaaagccatgatgaggaggaatatgaggatgatagcgaggatgaatcttcatcacctcaaggtacattttcccgtttggcttccactgacattaatgacagggaaaatgagaccgatgatgtggaagaagaggaaattcgccgtttctacaaccatctcaacaaagcagacaaagctctcttggttaagttgttgagaagaaacaaggaacaaggcgagacgcttctcaggctagaggaaacactcatcaaaaccaacaacagcctagagaagatgaccaaagaacatgaggagctaaagtactctcatgggaatttggtccaaaggtatgaatatgttttaattgagcaaagaaatagtcatgatgcattatctaatattgctcaacttaaaacggaaaattctatgcttaagagtcaagtagaaacaatggacttagaaaaacgtgctctagaaagccaatcattgattgagcaacaagttttagggtcacaaaagaaattctgtgggaataagaaacaacgacaactgaggagaagacactttgctcaactctctcaagatatccacgggcgcgtggtgaagaagcttgagaaaggaaaaactgcagcaagtgtcaagctcaataagaaaagtgttcctaaagatggagaaatcaacatgagcttggaaaaaggtaaagattcaattaatcatgttgtttgcactgatcatctctccatgtcattcaagcacaaaaagggaagagggaaaaggaggtgcttcaaatgcaaggagataggccacctcatcgcgtcttgtccgtacaaaaacaaggatgaagggacaataagttgttttggatgcaacaataaggaccacacgatcacttcatgtccggtcatgaagaatcaaggatgtgcatcctccaaggtgaccctcaccaaggaaagtgacacacagcaagcgtcatgtcaggttgagcgacgcttctgctacaagtgtggtgagcagggtcatatatccaagtctctaggtggaaaagagaagatgtgcaagaaatggagcaatcaggacttgggtacctctcatcatggtttgattcttgacacaatgcattccaaaattgctaagggcgtagctcggagacaactgatcaagccaaggacggaggcaagaagagcttcgaggtaccaagtgcacgggagaaggtcaaggtggctgaggaacccaaagccaaaggtgaagaagaaggcttgcaaagtcaagggtgatcgagttgagaacagcttcggctcatcaaggatcactacataa

SEQ ID NO: 5263 - DNA, 891 bp, Zea mays
  Clone ID: TF_ZmC18109_7
tcaattattgcttaggtcatgcttggcagatttcttctctattcggtctagacgcttcttggggcattcgcgaataagatgtccttcgtttttgcagtagtagcaagcacctcttgctttgagttctttgcgagtcaactttgcttgaccaacagggggtgagggttgactgggtgtctgtatctcatataactgggtctgacttgattcttctgtttgggtatccaagtgtttcggggcttttgcttgtggttgagatgaactaatcatgtatccaaacatttttctattccttttgttgttcttcgttccattcatcgaatatctcggtgactcatttttctcgttcatagtcattaaggtaggaatattcttgttggcatcatttacttcatttccattggggttcatcatagttggacgtatgtagtttactaacatttttccttcgggtgcattgatagtcttccttgatctcaagggacacttaaagataccatactttgttgcaaactgggcactgataaaagaatgtgtcgtacgaggatcatacaacacggtggcgatagttgtgtgaatgactagtgttccaaaaattactgcatcatcatatggaatggttcttgtcactgcataacttatctttcttgtggtctctttctgttgtttattctttgttgatgcatgggtttgagggtgttgtcttttcttttggaccttattgatctccacatccttcttaggacaaccattaacaagatggccggtatcaccacatccaaagcaagcacgacctgatggtttatatggtggagttgtctttacgttgttggtagaagtttctgtgcatttttgttcatattccatgtctgatgactgagataacttcat

SEQ ID NO: 5264 - DNA, 7497 bp, Zea mays
  Clone ID: TF_ZM3646.C1.o1.fg
atggatcctaaggggaagggaatcgtgatcaacgataaggagaaggagtccttcgtcaacgagcccaaagatgacaagcctaccgactccggctcgggccatagacggaaggaagggaagaagaagaagacaaggcgcatcaaggagatcgtctactacgacgacagcgacggatcttcctcttcccaaaaggacgacgacaacgactacaggaagacgattcataaaaatgcacaagctactactgtgttgctagcctctttgtgcagggacgagtacaataagttggtggagggcgagcttggaagatttgcgatgataaggggcgaggagccaacccaaacatacaaccggctcaagacccttatcaacaaaataaggagctatggaagcacacgatggacggaccatgacgtcgtccgactattactaaggtcctttaccattcttgatcctcatttggtgaataatattcgtgagaatcccaggtacaccaaaatgtcgcccgaagaagttcttgggaagttcgtaagcgggcgaatgatgatcaaggaggcaagatacgtggacgacgcgttgaacggtcctattcatgagcctcaacccattgctctcaaggcaacgaggagcaaggaggcgctaccaagcaaggtggcgcaagttgaggcggccgggctaaataatgaggagatggccctcatcattaagcgcttcaagacggcgcttaaaggtcgcaagggacagccaagcaagaccaaaacaaaggagaagcgctcgtgcttcaaatgtggtaagattggtcatttcattgctaactgtcccgataatgaaagtgaccaggaaaaaggggacaaaagggagaagaagaagcattacaagaaggccaagggcgaagcacatatcggaaaggagtgggattcggattgctcctcctccgactccgacaatgaaggacttgccgccaccgccttcaacaaatcaaccctcttccccaacgagcgtcacacatgccttatggcaagagagaagaaggtgagtactcgagacaccacttatgtctcttctagtgatgatgaatctagcgatgaggaaatagattactctagcttgttcaagggattggatagaaataagattgataaaatcaatgaattgattgatgccttgaatgagaaggatagactcttagagaaacaagaggatttattgtatgaagaacatgataaatttatagaagcacaaaaatcctatgctttagaagttaaaagaaatgaaatgctttcttttgaactatctacttgtcatgaaaccatttctactttaaaaggtgtcaacaatgatttaaatgctaaattagaagtagcaaataaatccaattcttgtgtagaacatgttgtaatttgtactaggtgtaaagattttgacattgatgcttgtagtgaacacctagtttcaatttccaagcttaatgatgaattggctagtcttaatgctcaacttaagactagcaagaatgatttggataaactaaaatttgcaagggatgcctacacgatcggtagacacccctcaattaaggatggacttggcttcaagagagaagccaagaacttaacaagccataaggctcccattcccgccaaggagaaagggaaggcccctatggctagtagtgtgcaaaagaaccatgcgtttatgtaccatgataagagacaaactagaaatgcttataggagttacaatgcttatgatgattttgattctcatgacatgtttgtttctagttcttcccatatgcatggtagaaatatgtctaggagaaatgctattcatcattgtgacaccccagtgtcacctagggtttctcttaaacagccaaaccaaaaaccatcattttatgtgaaccaaaattgtaatcttgccgacggagagtacgtgctcatccccgagcaaggacctgtccaagaggaggaccaggagcaggctccagaggctgctattgaggatctccccgcagccccagcaattgaaggcaagccccgctatggtgggtacaagtgtggtcactgcacggcggcagccggggtcagtggagcattgtatgccaagccgatgaattcacccacccccgccagtggaggagactctcgtttcagttctgacttcctttctcgcgatggctttccctccatcttgtgggaagtgcttaactccgccggttaccctacgccccctttgtacacggtgcagttgtatgaggagcatcgggtacctcgttgtcaggtctggctaactttggaggctcatccccttcagccgggttggcgttctcttgactctgagacgataggactcatgacggacgacaccgttgaggcagcagccatgaagactctgacgactttctgtggctaccatcccctggagatggtgatgcaccccttgggactcttccctgctgagaagaaggatgatcccatgtggtgcaaccgcgtgagccatgtgaaggatgtgtgggcaatgtatcctgacttggttgggagggtcactgttcagtgcatgagtgcgctgtaccgccttcaggcccttcagagcgatgctatgacacttcttgctaacaccgctcaggctgccaagctcactctcgacaatcgggaagattttgtggtcgacctatccacagagttggtggaaaaggatctgcaggtggagaggctgagccagcgtattaccaccctggagcagcaagtggagatccgagataacactattgatgtcttggagaaccagcttcacgacgtgcagagggaacttgaggaagccaatgaccacttggacatgcaccaccaggagatggaggccaatgaagcaggaagcgagggagaagaggctcccgaggagctaggaccagcccctggtgccaatgggactacctccgtgatacctccttcacccgagtttctgagcacgcagccgcccttgttcaccaaggcagaggatccgttggacgccgacgtgtggcttcgcgtcgtcgagtccaagtttcccctcctcacgggagactgccctgatgaggccaaggctcgcttcgccgcacagcagcttcgcggccctgctcggacttggtgggaccacttccgtgctatgctccccgctgatcatgaggtgtcttgggaggaattcaagactgccttcagaggacaccacattccagctagcattcttgatcggaagttgaacgaattcctggccctcaatcaaggaacccgcacggtactgcagtatgcgcaagccttcaacgacttatgccagtatgcagggtatcatgctgattccgatgaaaagaagagggatcgcttccgcaggggtctcaataccaagctgcgggaacgactcaacactgtccgggccgatagcttcaatgagttggtcaacatggccatctctcaggaggattgcattgttgctcaccgggcagagaagaagaggaaggcaccaatggcagcaccatccgctcaggctcagaggttccggattgtttctcacaatcagagcaggggttttcagcagcaggcaggcagatgggtgatcaggccacctcagcagcagcagcagccgacacccaaccgctatccagctcccgccccaagaaacaatcagcctccgcagcagcagcagttccgccagggcaatgggaacaagtgtttcacttgtggcaatatgggccactatgccaagaattgtcccaggaaccagcagaggcagatgccagcaccaaatcaagacaagggaagaaagcagaaggtgcaagtcaggcaagggaagctcaacttcactgctctagaggaagtgccagaaggagctcctatcatgaccggtaccttttcagtttataatcaacctgctttaattctgtttgattctggtgcatctcatagtttcattagccaaaagttcagtgctaattgcaaactgccattctctcactcgaaagggtcattcatgatagtcacacctgggggtaaaattgcaactaatcaattaaaccaaagtgtgcctattcgactgggaagccacattatcaaaaccactcttcttgtattgggattggaaaatgtggacattattctaggagcaaattggatgaccttgcaccaagttgtgcttgatgtagccagtcgtaccgtggaagttaattctcctttctgcgggaatttcactttgattctgcctagtcagggttcttctcagtcatgtgctttctctatgacggagttacccctgaagaagatcccagtggtctgtgagtatgcagatgtctttcctgatgaattgccgggaatgccaccggaccgggatattgaattcgccatcgagttgcaaccgggaacggccccaatttccaagaggccctaccgaatgccacccgctgagttggcagagttgaaaaagcagttgctggataagggatttattcgcccaagcacttcgccttggtgctgtccagcactatttgtaaagaagaaggatgaaagcttgaggctgtgtatagattaccgccctcttaatgcggtaactatcaaaaacaagtatcctttgcctcgtattgatgttctctttgaccagttggtcggggccaaggtgttttccaagatagaccttcgctctggctaccatcagatcaaaatacgagcaagtgatattccgaagacggcattctcaaccagatatgggctatatgaattcttggtgatgtcattcgggctgacaaatgcaccagcatatttcatgtatctgatgaattctgtttttatgccggaattggacaagttcgtggtggttttcatcgatgatatcctggtgtactcaaagaacgaagaagaacatgccgggcatttgcatgtagtgcttcaacgtctacgtgagcaccacctttatgccaagttatccaagtgtgatttttggctaaaggaaatcaaattcttgggtcacactatctctcaggatggaatagctgttgatcctgataaagtgcaagaggtgatgaactggaggccaccaacgactgttcgccagattcagagttttctgggattggctggttattaccgaagatttattccggacttctctcgaattgcgaaacctattactgagttgctgaagaaagaggtcaagtttgtgtggagtcagaagtgcgaagatgccttccatgcattaaggcagcatctgaccacagcaccagttttggcgcaacccgacagcagcaagccttttgatgtgtattgcgatgcctctggcaccgggctaggttgtgtcttgatgcaagacaaccgagtcattgcttatgcctcaagagcactcaggcctcatgagcaaaattatcccactcatgaccttgagttagcagcagtggttcatgcattgaagatgtggaggcactatctaatgggaacccactgcaacatcttcactgatcataagagccttaagtacatttttactcaggctgatctcaacatgaggcagagaagatggctagagctgatcaaggattatgacctggaggtacattatcacccagggaaagctaatgtggtagcagatgccttgagtcggaagttgcaatgcaactgtattctgatggattctcgtgtaaacaccttgtgtgatgagttgagcaagatgcaaattgaagtgattccttctggttctttgtctcacatttctgttgagccaactttgcaagaccagattatcatggcccagctcagtgacaagggagtgcagattatcaagaagaatctccatcagaaggtcgagaagtataattgtttccgccaggatgaaaaaggtgtgttatggttcaaaaacagattggtaattcctaaggatcaggatctgaagaagaaaattttggatgaggctcatctctccaaattctctatgcatccgggaagcaccaagatgtaccatgatttgaagcttttgtactggtggaccagaatgaagagggagatagcccagtatgtatcagagtgtgacacctgtcagaggataaaggcaagccacttgaagtccgctggagctttgcaaccactgtccgtaccttcgtggaagtgggacgacatcagcatggatttcattgtgggtctacccaacacctctcgtcatcatgattcaatttgggttattgtggaccgattgacgaaagtggcacattttcttcctgtgcacaccactgataaggctcagaagtatgcagaattgtatatcgaccggatcgtgtgtttgcatggattacctcggaccattgtttctgaccgaggagcccaatttgttgccagattttgggaacaattgcaagagtctttgggaaccaagctaatcaggagttcagcttaccacccacagactgatggtcagacggaaagggtaaaccagattctggaagatatgctgagagcttgtgcgatcgattgtggcaagaactgggataagcacctctccttggcagagtttgcttataacaatagttatcaatccagcctaaagatggcaccttttgaagctctctatggaagaaggtgcagaacaccactcaattggtctcagcctggtgaaagagaagtttttggacctggtttggtgactgaagccgaaaggaaggtcaagctaatcaggaagaatctagaagctgctcaggccaggcagaagagctatcatgatagaagaaggaaacctctccagttcgaggtgggaagttttgtatacctcaaggtatcacccaccaagggagtgcagaggtttgggatcaaaggcaagctagcccctcgttacattggaccttatgagatcatcgaagcatgtggacccgtggcatacaagctgaagttaccttcaagaatgtctgccattcacaatgtatttcatgtatctcagcttaagaagtgtgttcgattgccgactgagatcatagcagagccagaattggagatagagccagatctctcgtaccaagagtacccctccaagattctggattgcaaggaaagatcaactcgggctaaatcaatcaagatgtttaaggtccagtggagtaatcactcagaggaggaagctacttgggaaaccgaggaattcctgagatccaacttccccgattgcctacctaaggaagctgttgcaaagagaatgacattcgaagagcagttttgccctaataataacaatccccacccttttcctatcagtctcacccttcgcttcaccccgaaaggactctggcccgaatctcgggacgagattcctttaaggggggaaggctgtgacaccccagtgtcacctagggtttctcttaaacagccaaaccaaaaaccatcattttatgtgaaccaaagtaagcatgagcatcaaaacaatttaagtgagaaagaattcaccaagtatatacttaaaagtgtcatgatcaaaacaattgagacttttgaaagataa

SEQ ID NO: 5265 - DNA, 732 bp, Zea mays
  unsure (1)..(732): unsure at all n locations
  Clone ID: TF_LIB4826-025-R2-N1-C6
cctcgaggnnccggccgggaaaaaaaaaaaaaaaaaaaaaaanagtccctccccgctcaccaccagtcaccaacgcccaccgggcctcgtccctcgtggcggcaactgggcggccgtcgctgccgccctacgccaggtgccgaggcgaccttcaggcccttggctggcgacgagcaccagtgcaccaccaatactctgagcctggctgccgaaagtgccttttggggttcttgtaatcttgttacattaggattcatttttgatgacttcatcaagaagcaagagcaagagcagaagtaggagccgcagtcgcagcaggagcaggagccgcagtcctcggcgaagagataggttgcgcagtgaacgtgcaccccaccgcagtcgtagccggagccgcagcccataccgtcgcagagaacgacgtggtcacagggattttgcatgcaagaactgccggagacctgggcacttcgctaaggagtgtccatctgcgcctatgtgcaataactgtaaccttccaggccactttgcagcagaatgcaccttacaaactgtttgctggaactgcaaagagtctgggcacattgccagtgagtgcaagaacgaggccctatgccacgcctgcaacaagacaggtcacttggcacgtgactgccctacttcaggtgctaacgtcaagctatgcaacaaatgctttaaatcagggcacatcgccgntgactgcaccaacga

SEQ ID NO: 5266 - DNA, 2701 bp, Zea mays
  Clone ID: TF_ZmC26852_1
atggctcggagaagatcccaaaagaacaagaagactcctccagcagaacgcaactcagaaggaggtaactcttgagattttatttgatgattgttctaactatgattcatggtctactagtgtgctaaatgcctttagaaccatacatcctcaattagaacaaattattgacaagagtatcttcccctctagttttaatggagaaattgtttccgaggaggatcaaagatgttttcgcttaaactacctagcttttgacatcttaagcaattctcttagcaaagaagattatcgtgccttcatatcaaactatgacgaatccgtccatgatgcgcacgatatttggactagaattagaagcaaatttgatgagtccaaacatgatagttcattttgtgtctctgcttcctttggtatttgtgatactaacccttgcaaggaagaagaagagaatgaacgatggagaccaaacgatgaatccacctctccaaaaggtttgtcttcccatttcgattcccacatgtgttgtgtggctaatgaaaatgatagcggaagcacaaatgaggatgaggaggaagaaagtagctttgtgcatctctacgctcgcctaagccaagaagataaggcggtcatgctcaaacttctagaaagagcgagagagcaaagcgaagctcgtcaaaggctagaggatattctctccatgaagatgctacactttgacgagttgactaaagaacatgaggagctaaagtgctctcatgttgatttggtccaaaggtatgaaactatttcaattgagcaagataacgcttcacattgtatcgctcaattagtaaataggaataccctgctcaaggaccaagtagaaaagctaaaggttgaaaatctagcttttcaagataaatatgatatgctcctatgctctcatgaaaatcttagggatgatcatatcatgttaaacattgctcatgaggttgtgatagaatacttaaaatcccagcaacctcactcttgcacatgtgttcatattgatactatattaccatgtgctaatgcttgttgtccgtcgacaagcaaatcttcctttgagctagaatttgcaggaacaaatgatgatacatatcaaaagctcgaagaagaaaatgagaggctaaagatgagcttgacacaacttaaagggaaatgcatcgctcaaccttctcaagataaccgtgatcacatggtgaaggagcttgagacgggaacaaccgtggcatgcactacatcccttgaagaaaatgtcaaggacttgaggattgccaagaggaagaaacaaaagatgaaattcaatacctcttccaaaagcctcaaccatgcctccatacaaggtaacatccaaggtaatgatcaagccacacttcacactaagaaaagtaagaagtgtagtgaatgctttgaagaggggcacttgattaggtcatgtccctatattaaaaatggcttgattattaacaaggatgatagacattgttttaaatgctctaagaagggacacttagttaaatcttgtccccatttaaaacaaaaaggcatagggttagaaaagaaaatatttactaaccatgtagcaagcaagaaacaaggaaagaagaaatcttcaaaacttgaagatcgcctttgctacatatgccgaaagaagggacatcaatgcaaggattgtcccattggtaactatcccactcctagcttgtcaattgattcatatgtaactaggcaacccaaaattgcaacttgtgctagaaaggtaatgagtttaccaagtgctagcacaaaggacatttgggttcctagatctttgttgactaaccttgatggacccatcaagagatgggtaccaaaatatgcttgacaagctttgcaggggaaaggagatgatatgaagctttggaggtgcttgagagggtcaattcaattcttattaactcaagctatcaatcttacaatgatctatatccctaagattgacccaaagttatttttcgaattattatatctaaaactcatatcatctcgagcaagatattgatgttgtaggaaataaagaattatcctgtgcggaaaagtcaaggcctacaacatggaggaaagccaaaggatggtaacacttatgcttttaagtgcaagtatcttaaattatcatttcttatgtgtcttgtgtagtcacatagaaaaagaaagcacttcaaatatttttaaattatgtcaccattctttgaagaaattcctctcatatggtagattgtatattcatcatttctataccatggcaatctacatgctttaattgttgtaagtatctcatggcatgctttacactaatcatcctattattgccatgttctagttatagagatattccaagctcttaagagaataaggtgtcacgtaaggaattcaatttcttaggacacttataaagggaatctctctttatatctagaaatcgtgggactaatgtttttgtctaaataacctaagtagtctcacatgaagagaataagtttctctttggagatgtgcaatctaacatgaaaagaaaagtcaatccaatgatttatgggtgttttgcctcttgcttaaattggatatgattcttctatgtctatcgctctccatgctatgaattagatctattcccctaatctttaagaattaactatgc

SEQ ID NO: 5267 - DNA, 3255 bp, Zea mays
  Clone ID: TF_ZmC1236750_1
atgccagtgccagccgagctctcgccgccgtcccctcacggcgcgccgcggaccagagccggcgagcaggacgacagcacgcttcctccgacggcggccgccaccgccacggccacgcggggcggcactggcaggaagcgccggcgcggggcgcgggacccgcgcgccagctgggcctgggagacggagtgggaccgcgcgtacctgctcgcctgcgcggcggggctcctggtggacccgctcttcctgtacgccgtcgccgtcagcgcgccgctcatgtgcgtcttcctcgacgcctggttcgcggccgcggtcaccgcgctccggtgcgcggtggacgccatgcacgcatccaacctgctgctgcggctccgaggggcgtgctcgccgaggcgggaagacacggacgaggaggaggcgcagccggggcgcgacggcggcgtgccgggacgggggacgaggtccaaggagggggttttcttggacgtgctggtcatcctaccggtgatgcaggtggtcgtctgggtggcgacgccggcgatgatacgcgccgggtcgacgaccgacgtcatgatcgtgctgctgacggcgttcctgctggagtacctgcccaagatctaccacgccgtccgcgtcctgcgccggatgcagggcgtctccggctacctcttcggcaccatctggtgggggatcgcgctcaacctcatggcctacttcgtcgccgctcacgcggtgggcgcgtgctggtacctgctcggcgcgcagcgggccaccaagtgcctcagggagcagtgcgcccaggccgggagcgggtgcgcgccctgggcgctggcgtgcgcggagccgctctactacggcgccaccgccagcagcgtgggggcggccaggctcgcctgggccggcaacgccacggccaggggcacgtgcctcgacagcgccgacaactaccagtacggggcctaccagtggactgtcatgctggtggccaaccccagcagggtcgagagggttctgctccccatcttctgggggctaatgactctcagcacctttgggaatctggagagcacgacggagtggctggagatcgtgttcaacatcgtcaccatcaccggcgggctgattctcgtgacgatgctcatagggaacatcaaggtgttcctgaacgcgacgacgtcgaagaagcaggcgatgcacacgcggctgcgcagcgtggagctgtggatgaagcgcaaggacctgcccaggagctaccggcaccgggtgcgccagtacgagcggcagcggtgggcggccacgcgcggcgtcgacgagtgccgcatcgtccgtgaccttccggaggggctccgccgggacatcaagtaccacctctgcctcggcctcgtgcgccaggtgccgctgttccaacacatggacgacctggtgctcgagaacatctgcgacagggtcaagtccctcattttccccaaaggagaagttattgtcagagaaggggacccagtgaagaggatgctgttcatcgtgcgtggccacctgcagagcagccaggtgctccgcaacggcgccgagagctgctgcatgctggggccgggcaacttcagcggcgacgagctcctgtcgtggtgcctgcgccggccgttcctggagcggctgccggggtcgtcttccacgctggccacgctggagagcacggaggccttcgggctggacgccgcggacgtcaagtacgtcacgcagcacttccggtacaccttcaccaacgacaagagcccaagagacatgtatatttatgtgtactgtatcagctgcaatagagagggttctagagacttcaaaaccctacctcaacatgatatcagagccaaagcgcggcggcgtgctactgtagcagcgacgacctacgcggagcaggcgtggccgacggcgagcttcagactgtgcaggacgcgagtagagcggtctgccgtgctgaaggaaggaggaggtgaaggtggggcggcaagcgcagcaagaagcaggcggggaagacagatatctggcaccgcgtggagcttggaggcaccaccagcttggacgcagctgccttcgccggcgctggcatcgactagaaggagacgtaggccagctcttgctctggaagaaggctaccgccgtcgagggccagctcgacccggcagctgctgccatcaacttgctctgctccaactccaagaagactgctgtcggctttgggttcttacccatcggaacacaagagaatgggagagaatcaagggattgagcaagttcttgggggtaaagaattatttagcttggtctaggagagccttgcgattattgaaagcaaaaagactcgagggctatgttgatggaactgtcgttgagcccaaagacaagccaagtgctgaatggaaggattgggatgctataaactctttggtagcagcatggatgttaagttctatgatcccagcaattgctagcactgttgatacaattataagtgctgcagaaatgtggaaagcgcttgaagaaatgtattcgggagctggaaatgttatgttgatggtggagactgaagatcgcctccataatatcaaacagggggagcgaactgtggcggagtatgttcaggaattacagtgtttgtgggctgatgttgaccattatgatcctattgagctaccacactcagagtgtgttgtttgggcaaagaaatgggtggaaataagacgtgtgcttcaatttttaaggggtctaaacccagagtttgagggaagacgagcctccatgtttcatcaatccactcttcctagcctacaagaggcaatagctgctatatcccaggaggagtcacgactcaaagtgatgagggaaagtcctccagtgtcatctcaccctgtgttttcagctatgagaactaaagatgctagagagtgttacaattgtggtgatgttggacacattgctcgtaattgtactaaacctttcaagtttaaccgcgggagaggaagaggggctgctagaggtggtagaggtcgtggaggtagaagttgggcaagagctaatgcaacaactacaaaagaagaccttgagatctttatggagaatgaagctgaaacaaagtcgactgagcaacataaaattcctggaaataaaaatcaggagtcctacactagggattttgtcaacttcgcctacacagatgaaggagaggagaacagggaaaagacttgggacagctaccaggcgtag

SEQ ID NO: 5268 - DNA, 2106 bp, Zea mays
  Clone ID: TF_ZmC4916_437
atggatacccataggccaccacacttcgacggcactaacttcccatattatagtgctagaatggcttgttacctagaggtcgttgatctaggtgtttggagagtcactcgtgacgggatgaaacccctcaagaatcccgagaaacccaccacgagtgaggaaaaagaaattcatttaaatgctagagccaaaaattgcttgtatgaatctcttagcatggatatttttaatcaagtatttaccttgaaaactgctaatgagatttggctaaaattgcatgagctccatgacggcacatccaatgtccgtgagcaaaaacattgcctagtcttaaatgagtacaattcttttgctatgaaagatgatgagcttgttagagacatgtattctcggttgaatctaataatcaatgagctcaactctattggcattaataagctaggtgatgcggacattgtgaggaagattatctccctgctaccacaacaaagatatgggagcatcatcaccatccttcacaacatggaggacttgagcaacatgaccccgaccattgtgattgggaaaatcgcggcctttgagatgtcgcgaaaaatgagtcggggagaggagccaacttcctcaagaccatatgcctttgcatgtgatgaaaggaagggcaaaaagaaggctcctactccaagtacctcaagtgaagaagaggaagaagaagaaagtgatgatgatgaagataatcaaccatgcacatcatcctccgaggacgaagagacaatccgacgcgtcggaaaggtaatggggatgatccgcaagattaatctaatgggtgtgcccctgcaggtcgaggatcttctctttaacattgacaggaaaaagcaaaggaagagaggatgcttcgcatgtggggagaagggccacttcagggacaactgtccaaatatggccaagcccaaaaaggagaggagcaaaggcaaggcgctaacaagtgttagaacttgggatgattcttcaagtgaagatgaacctccaaggacgcgcagccaccgatcctcgtctcgatcatcacggtcatcacacaaatgccttatggcaagaggtaacaaaagcactccatcctctagtgatgaaagtagtagtgatgatgaaggtgagggaaaagcctctctagatgagcttgcagaagccgtagaattttttcaggatgtttgcactaagcaaaaagctcaacttaaaactttgaaaaataagttggttagctctcaaaatgattacaaaggtttgctagaaaaatttgaaacttttgcaaacttaaatagtgagctatcaactaaaattgagctattggaatctagtgctccatccactgctaccgatgatagccttattaaaaagaatgaaaaacttaaggctaagttagctagctcccaagaagctattgaaaatttgctagagaaaatggaaattcttagcatacacaataatgagctaactactaagctagaaaacattggtagcacccctgcagcatctttagttgaaatacctgaaataattaagaaagatgcttctacttcctgctttgatttaattgatgattctaacccctgcaaccaagtcgttgttgagaatattgttgtagagacatgtacggataaggttgcaaaggaaaatgaacaattaaagcaagaagtggctcgccttggcaaggctttgtatgacaagaaaggcaaagccaaacaaatccaacctccacaggataacaccactgcgggagtgaacaagcctatggagggagaaactgtgatttgtaggctatgccacaaggaaggccacaagtctttccaatgcaaggcgatgaccggggataaacaaaggcaaaagctcaagcaaaagccatcaagcaaaatctccaacacctacatcaaaaaggtgaacaaaaaggatgctactccatatttgatcaagaagaaaaagaacggaaaggtgatagcaatcaagaccaacaagcaagccaacaaaggaaagggggccaaacgcatctgggtgccaaaagagataatttcaaccatgaaaagcaccaagaaggtttggatcccgaaagggaagtga

SEQ ID NO: 5269 - DNA, 2634 bp, Zea mays
  Clone ID: TF_ZmC4916_467
atggatacccataggccaccacacttcgacggcactaacttcccatattatagtgctagaatggcttgttacctagaggccgttgatctaggtgtttggagagtcactcgtgacgggatgaaacccctcaagaatcccgagaaacccaccacgagtgaggaaaaagaaattcatttaaatgctagagccaaaaattgcttgtatgaatctcttagcatggatatttttaatcaagtatttaccttgaaaactgctaatgagatttggctaaaattgcatgagctccatgacggcacatccaatgtccgtgaacaaaaacattgcctagtcttaaatgagtataattcttttgctatgaaagatgatgagcttgttagaaacatgtattctcgtttgaatctaataatcaatgagctcaattctattggcatgaataagctaggtgatgcggacattgtgaggaagattatctccctgctaccacaacaaagatatgggagcatcatcaccatccttcacaacatggaggacttgagcaacatgaccccgaccattgtgattgggaaaatcgcggcctttgagatgtcgcgaaaaataagtcggggagaggagccaacttcctcaagacaatatgcttttgcatgtgatgaaaggaagggcaaaaagaaggctcccactccaagttcctcaagtgaagaagaggaggaagaagaaagtgatgatgatgaagataatcaaccatgcacatcatcctccgaggacgaagagacaatccgacgcgtcggaaaggtaatggggatgatccgcaagattaatctaatgggtgtgcccctgcaggtcgaggatcttctctttaacattgacaggaaaaagcaaaggaagagaggatgcttcgcatgtggggagaagggccacttcagggacaattgtccaaatatggccaaacccaaaaaggagaggagcaaaggcaaggcgctaacaagtgttagaacttgggatggttcttcaagtgaagatgaacctccaaggacgcgcaaccaccggtcctcgtcacgatcatcacggtcatcacacaaatgccttatggcaagaggtaacaaaagtattccatcctctagtgatgacagtagtagtgatgatgaaggtgagggaaagccctctctagatgagcttgcagaagccgtagaatttttccaggatgtttgcactaagcaaaaagctcaacttaaaactttgaaaaataagttggttagctctcaaaatgattacaaaggtttgctagaaaaatttgaaacttttgcaaacttaaatagtgagctatcaactaaaattgagctattagaatctagtgctccatccactgctaccgatgatagccttattaaaaagaatgaaaaacttaaggctaagttagctagctcccaagaagctattaaaaatttgctagagaaaatggaaattcttagcatacacaacaatgagctaactactaagctagaaaacattggtagcaccccagcagcatctttagttgaaatgcctgaaataattaagaaagatgcttctacttcctgctttgatttaattgatgattctaacccctgcaaccaagtcgttgttgagaatattgttgtagagacatgttcggatgaggttgcaaaggaaaatgaacaattaaagcaagaagtggctcgccttggtaaggctttgtatgacaagaaaggcaaagccaaacaaattcgacctccacaggataacaccactgcgggagtgaacaagcctatggagggagaaactgtgatttgtaggctatgccacaaggaaggccacaaatctttccaatgcaaggcgatgaccggggataaacaaaggcaaaagctcaagcaaaagccatcaagcaaaatctccaacacctacatcaaaaaggtgaacaaaaaggatgctacaccatatttgatcaagaagaaaaagaacggaaaggtgatagcaatcaaggccaacaagcaagccaacaaaggaaagggggccaaacgcatctgggtgccaaaggagataatttcaaccatgaaaagcaccaagaaggtttggatcccgaaagggaatttagcgaaagttttagaagtcctaattcacccccctcttaggcgtcacccgtttcctacagaggctttatgggctcatagaatatctaaacatagggctactaaagtatctccttttgagcttgtctatgggcaggaagcagtgttgcctatggaaataagtttgaatactatcaggttcgccagacaaaatgatctaactgctaccgattattatgattcaatgatggataatattgatgaggtgactgacaaaaggatgatagctttgggagcaatagaaaaggacaaaatcatggtagccagggcctacaacaagaaggtcaaagcaaaatcatttcaagtaggggacctggtgtggaagaccattctgcctctaaggaataaagaccggaagttcgggaaatggtcaccaagctgggaaggcccttataaagtaaaacaggtgatgtctggcaacgcctatttgctacaaacattacaaggcaaggacttgcctaaggctttgaatgagcgtttcctcaaacagtga

SEQ ID NO: 5270 - DNA, 2404 bp, Zea mays
  Clone ID: TF_ZmC4916_482
atgaaagtagcacacaacgcctatagcatgactaattacgaacagaacctagacggcgatgtctgtggtcagtcaaactatgcgtcttccaagcacatgtttggcacggtgaacaatactcgtcgctcgcgaagagacggtcgatctacggacatgtttggttctatgcctaggacaccacagcctaacattaggacttgttgcaagctgagggcaccaggagacccttgtttgctactgctcaagttcacaggatgcgttgaggattggaccaaggaaatgaggatgcaacacctcaaaagaagtcataaaaagatgcatagaagtccaagactcaagaacaaaagaagcccaaagaaatcagcgaagaaacctgagaagagggctgtcagccagcgactggtgacgcaccggacagtgcatagtacctgtccggtcgaagatcttctctttaatattgacaggaaaaagcaaaggaagagaggatgcttcgcatgtggggagaagggccacttcagggacaactgtccaaatatggccgaacccaagaaggggaggagcaaaggcaaggcgctaacaagtgttagaacttgggatgactcttcaagtgaagatgaacctccaaggacgcgcagtcaccggtcctcatcacgctcatcacggtcatcacacaaatgccttatggcaaaaggtttgctagaaaaatttgaaacttttgcaaacttaaatggtgaactgtcaactaaaattgagctattagagtctagtgctccatccattgctaccgatgatggccttattaaaaagaatgaaaaacttaaggctaagttagctagctctcaagaagctattgaaaacttgctagagaaaatggaaattcttagcatacacaatgatgagctaactactaagctagaaaacattggtagcaccctaggagcatctttagttgaaattcctgaaattattaagaaagatgcttctacttcttgctttgatttaattgatgactctaacccctgcaaccaagttcttgttgagaatattgttgtagaaacatgttcggacgaggttgcaaaggaaaatgaacaattaaggcaagaagcggctcgccttggtaaggctttgtatgacaagaaaggcaaagccaaacaaatccgacctccaaaggataacaccactacgggagtgaacaagcctatggaggtagaaaccgtgatttgtaggctatgccacaaggaaggccacaaatctttccaatgcaaggcgatgaccggggataggcaaaagcaaaagctcaagcaaaagccaacaagcaaaatctccaacacctacataaaaaaggtggacaaaaagactgctacaccatatttgatcaagaagaaaaagaatggaaaggtgatagcaatcaaggccaacaagcaagccaacaaagaaaaggggggcaaacgcatctgggtgccaaaggaaataatttcaaccatgaaaagcaccaagaagttcacaggatgcgttgaggattggaccaaggaaatgaggatgcaacacctcaaaagaagtcataaaaagatgcatagaattccaagactcaagaacaaaagaagcccaaagaaatcagcgaagaaacctgagaagagggctgtcagccagcgcctggtgacgcaccggacagtgcacagtacctgtgtgccgccaccgtgtatcggagggaacgaggcccgcggcgtttcggccggaagctcgatagtggagacggcggggagcgtccgagaggagccggaagcggagcaccacttgcgcgtggagaaggcccgtggctctctacggagttactcgaccgtggtgcttggccctcgcgtgggctaaccttttcgtaggggcaccaacaaggattagtcggaaccttgtgtggttccagatacctcggcaaaaatatcggtgtcatccatgagagtttgatttctctactagctcttttaccttccgcatttacattaagtacttaagtttcaatctctcctttctaattagaatatttaggattgaaacttaggttttgtggtagagatagcaacacttagacaaaacctagtttgcacattctggattgcttatttacataagttttgttctatggatttatttgtggcttagtttagaaagaagttttttagaagtcctaattcacctcgctcttaggcgtcaccatttcccatagcatgctacatacacaagttgatcttgcgaaattccaaatgaggtatagatagttcaccaagctagaatcaaactctagtgcatgtgaatacctagtgattaattggaacattattgggtaaagaagagtgatcaagggcacaacttgccttcaacgagctcctgcttagtattttccacatgctga

SEQ ID NO: 5271 - DNA, 2106 bp, Zea mays
  Clone ID: TF_ZM4291.C1.o10.fg
atggatacccataggccaccacactttgacggcactaacttcccatattatagtgctagaatggcttgttacctagaggccgttgatctaggtgtttggagagtcactcgtgacgggatgaaacctcccaagaatcccgagaaacccaccacgagtgaggaaaaagaaatacatttaaatgctagagccaaaaattgcttgtatgaatctcttagcatggacatttttaaccaagtatttaccttgaaaactgctaatgagatttggctaaaattgcatgagctccatgacggcacatccaatgtccgtgagcaaaaacattgcctagtcttaaatgagtataattcttttgctatgaaagataatgagcttgttagagacatgtattctcgtttgaatctaataatcaatgagctcaactctattggcattaataagctaggtgatgcggacattgtgaggaagattatctccctgctaccacaacaaagatatgggagcatcatcaccatccttcacaacatggaggatttgagcaacatgaccccgactattgtgattgggaaaatcgcggcctttgagatgtcgcgaaaaatgagtcggggagaggagccaacttcctcaaagccatatgcttttgcatgtgatgaaaggaagggcaaaaagaaggctcccactccaagttcctcaagtgaagaagaggaagaagaagaaagtgatgatgatgaagataatcaaccatgcacatcatcctccgaggacgaagaaacaatccgacgtgtcggaaaggtaatgaggatgatccgcaagattaatctaatgggtgtgcccctgcaggtcgaggatcttctctttaacattgacaggaaaaagcaaaggaagagaggatgcttcgcatgtggggagaagggccacttcagggacaactgtccaaatatggccaaacccaaaaaggagaggagcaaaggcaaggcgctcacaagtgttagaacctgggatgactcttcaagtgaagatgaacctccaaggacgcgcagccaccggtcctcgtcacgatcatcacggtcatcacacaaatgccttatggcaagaggtaacaaaagcattccatcctctagtgatgaaagtagtagtgatgatgaaggtgagggaaaggcctctctagaagagcttgcggaagccgtaaattttttccaggatgtttgcactaagcaaaaagctcaacttaaaactttgaaaaataagttggttagctctcaaaatgattacaaaggtttgctagaaaaatttgaaacttttgcaaacttaaatagtgagctatcaactaaaattgagctattagagtctagtgctccatccactgctaccgatgatagccttattaaaaagaatgaaaaacttaaggctaagttagctagctcccaagaagctattgaaaatttgctagagaaaatggaaattcttagcatacacaataatgagctaactactaagctagaaaacattggtagcaccccagcagcatctttagttgaaatacctgaaataattaagaaagatgcttctacttcctgctttgatttaattgatgattctaacccctgcaaccaagttgttgttgagaatattgttgtagagacatgttcgaatgaggttgcaaaggaaaatgaacaattaaagcaagaagtggctcgtcttggcaaggctttgtatgacaagaaaggcaaagccaaacaaatccgacctccacaggataacaccactgcgggagtgaacaagcctgtagagggagaaactgtgatttgtaggctgtgccacaaggaaggccacaagtctttccaatgcaaggcgatgaccggggataaacaaagacaaaagctcaagcaaaagccatcaagcaaaatctccaacacctacatcaaaaaggtgaacaaaaaggatgctacaccatatttgatcaagaagaaaaagaacggaaaggtgatagcaatcaaggccaacaagcaagccaacaaaggaaaaggggccaaacggatctgggtgccaaaggagataatttcaaccatgaaaagcaccaagaaggtttggatcccgaaagggaagtga

SEQ ID NO: 5272 - DNA, 2106 bp, Zea mays
  Clone ID: TF_ZM4323.C2.o1.fg
atggatacccataggccaccacactttgacggcactaacttcccatattatagtgctagaatggcttgttacctagaggccgttgatctaggtgtttggagagtcactcgtgacgggatgaaacctcccaagaatcccgagaaacccaccacgagtgaggaaaaagaaattcatttaaatgctagagccaaaaattgcttgtatgaatctcttagcatggatattttcaatcaagtatttaccctgaaaactgctaatgagatttggctaaaattgcatgagctccatgacggcacatccaatgtccgtgagcaaaaacattgcctagtcttaaatgagtataattcttttgctatgaaagatgatgagcttgttagagacatgtattctcggttaaatctaataatcaatgagctcaactctattggcattaataagctaggtgatgcggacattgtgaggaagattatctccctgctaccacaacaaaaatatgggagcatcatcaccatccttcacaacatggaggacttgagcaacatgaccccgactattgtgattgggaaaatcgcggcctttgagatgtcgcgaaaaatgagtcggggagaggagccaactacctcaagaccatatgcttttgcatgtgatgaaaggaagggcaaaaagaaggctcccactccaagttcctcaagcgaagaagaggaagaagaagaagaaagtgatgatgatgaagataatcaaccatgcacatcatcctccgaggacgaagaaacaatccgacgcgtcggaaaggtaatgaggatgatccgcaagattaatctaatgggtgtgcccctgcaggtcgaggatcttctctttaacattgacaggaaaaagcaaaggaagagaggatgcttcgcatgtggggaaaagggccacttcagggacaactgtccaaatatggccaaacccaaaaaggagaggagcaaaggcaaggcgctcacaagtgttagaacttgggatgactcttcaagtgaagatgaacctccaaggacgcgcagccaccgatcctcgtcacgatcatcacggtcatcacacaaatgccttatggcaagaggtaacaaaagcattccatcctctagtgatgaaagtagtagtgatgatgaaggtgagggaaaggcctctctagaagaacttgcggaagcagttaattttttccaggatgtttgcactaagcaaaaagctcaacttaaaactttgaaaaataagttggttagctctcaaaatgactacaaaggtttgctagaaaaatttgaaacttttgcaaacttaaatagtgagctatcaactaaaattgagctattagaatctagtgctccatccactgctaccaatgatagccttattaaaaagaatgaaaaacttaaggctaagttagctagctcccaagaagctattgaaaatttgctagagaaaatggaaattcttagcatacacaataatgagctaactactaagctagaaaacattggtagcaccccagcagcatctttagttgaaatacctgaaataattaagaaagatgcttctacttcctgctttgatttaattgatgattctaacccctgcaaccaagttgttgagaatattattgtagagacatgttctgatgaggttgcaaaggaaaatgaacaattaaagcaagaagtggctcgtcttggcaaggctttgtatgacaagaaaggcaaagccaaacaaatccgacctccacaggataacaccactgcgggagtgaacaagcctgtagagggagaaactgtgatttgtaggctgtgccacaaggaaggccacaagtctttccaatgcaaggcgatgaccggggataaacaaaggcaaaagctcaagcaaaagccaacaagcaaaatctccaacacctacatcaaaaaggtgaacaaaaaggatgctacaccatacttgatcaagaagaaaaagaacggaaaggtgatagcaatcaaggccaacaagcaagccaacaaaggaaagggggccaaacgcatctgggtgccaaaggaaataatttcaactatgaaaagcaccaagaaggtttggatcccgaaagggaagtga

SEQ ID NO: 5273 - DNA, 2106 bp, Zea mays
  Clone ID: TF_ZM4789.C1.o5.fg
atggatacccataggccaccacacttcgacggcactaacttcccatattatagtgctagaatggcttgttacctagaggccattgatctaggtgtttggagagtcactcgtgacgggatgaaacccatcaagaatcccgagaaacccaccacgagtgaggaaaaagaaattcatttaaatgctagagccaaaaattgcttgtatgaatctcttagcatggatatttttaatcaagtatttaccttgaaaactgctaatgagatttggctaaaattgcatgagctccatgacgacacatccaatgtccgtgagcaaaaacattgcctagtcttaaatgagtataattcttttgctatgaaagatgatgagcttgttagagacatgtattctcgtttgaatctaattatcaatgagctcaattcgattggcattaataagctaggtgatgcggacattgtgaggaagattatctccctgctaccacaacaaagatatgggagcatcatcaccatccttcacaacatggaggacttgagcaacatgaccccgaccattgtgattgggaaaatcgcggcttttgagatgtcgcgaaaaatgagtcgaggagaggagccaacttcctcaaggccatatgcttttgcatgtgatgaaaggaagggcaaaaagaaggctcccactccaagttcctcaagtgaagaagaggaagaagaagaaagtgatgatgatgaagataatcaaccatgcacatcatcctccgaggacgaagaaacaatccgacgcgtcggaaaggtaatgaggatgatccgcaagattaatctaatgggtgtgcccctgcaggtcgaggatcttctctttaacattgacaggaaaaagcaaaggaagagaggatgcttcgcatgtggggagaagggccacttcagggacaactgtccaaatatgaccaagcccaaaaaggagaggagcaaaggcaaggcgctaacaagtgttagaacttgggatgattcttcaagtgaagatgaacctccaaggacgcgcagccaccggtcctcgtcacgatcatcacggtcatcacacaaatgccttatggcaagaggtaacaaaagcattccatcctctagtgatgaaagtagtagtgatgatgaaggtgagggaaagccctctctagatgagcttgcggaagccgtagaatttttccaggatgtttgcactaagcaaaaagctcaacttaaaactttgaaaaacaagttggttagctcccaaaatgattacaaaggtttgctagaaaaatttgaaacctttgcaaacttaaatagtgagctatcaactaaaattgagctattagaatctagtgctccatccactgctaccgatgatagccttattaaaaataatgaaaaacttaaggctaagttagctagctcccaagaagctattgaaaatttgctagagaaaatggaaattcttagcatacacaataatgagctaactactaagctagaaaacattggtagcaccccagcagcatctttagttgaaatacctgaaataattaagaaagatgcttctacttcctgctttgatttaattgatgattctaacccctgcaaccaagtcgttgttgagaatattgttgtagagacatgtacgaatgaggttgcaaaggaaaatgaacaattaaagcaagaagtggctcgccttggcaaggctttgtatgacaagaaaggcaaagccaaacaaatccaacctccacaggataacaccactgcgggagtgaacaagcctatggagggagaaactgtgatttgtaggctatgccacaaagaaggccacaagtctttccaatgcaaggcaatgaccggggataaacaaagacaaaagctcaagcaaaagccatcgagcaaaatctcaaatacctacatcaaaaaggtggataaaaagactgctacaccatacttaatcaaaaagaagaagaatggaaaggtgatagcaatcaaggccaacaagcaagccaacaaaggaaagggggccaaacgcatctgggtgccaaaggagataatttcaaccatgaaaagcaccaagaaggtttggattccgaaagggaagtga

SEQ ID NO: 5274 - DNA, 2100 bp, Zea mays
  Clone ID: TF_ZM5010.C3.o2.fg
atggatacccataggccaccacacttcgacggcactaactttccatattatagtgctagaatggcttgttacctagaggccgttgatctaggtgtttggagagtcactcgtgacgggatgaaacctctcaagaatcccgagaaacccaccacgagtgaggaaaaagaaattcatttaaatgctagagccaaaaattgcttgtatgaatctcttagcatggatattttcaatcaagtatttaccctgaaaactgctaatgagatttggctaaaattgcatgagctccatgacggcacatccaatgtccgtgagcaaaaacattgcctagtcttaaatgagtataattcttttgctatgaaagatgatgagcttgttagagacatgtattctcgcttgaatctaataatcaatgagctcaactctattggcattaataagctaggtgatgcggacattgtgaggaagattatctccctgctaccacaacaaaaatatgggagcatcatcaccatcctccacaacatggaggacttgagcaacatgaccccgaccattgtgattgggaagatcgcggcctttgagatgtcgcgaaaaatgagtcggggagaggagccaacttcctcaaagccatatgcttttgcatgtgatgaaaggaagggcaaaaagaaggctcccactccaagttcctcaagcgaagaagaggaagaagaagaagaaagtgatgatgatgaagataatcaaccatgcacatcatcctccgaggacgaagaaacaatccgacgcgtcggaaaggtaatgaggatgatccgcaagattaatctaatgggtgtgcccctgcaggtcgaggatcttctctttaacattgacaggaaaaagcaaaggaagagaggatgcttcgcatgtggggaaaagggccacttcagggacaactgtccaaatatggccaaacccaaaaaggagaggagcaaaggcaaggcgctcacaagtgttagaacttgggatgactcttcaagtgaagatgaatctccaaggacgcgcagccaccggtccttgtctcgatcatcacggtcatcacacaaatgccttatggcaagaggtaacaaaagcattccatcctctagtgatgaaagtagtagtgatgatgaaggtgagggaaaggcctctctagaagaacttgcggaagccgttaattttttccaggatgtttgcactaagcaaaaagctcaacttaaaactttgaaaaataagttgattagctctcaaaatgattacaaaggtttgctagaaaaatttgaaacttttgcaaacttaaatattgagctatcaactaaaattgagctattagaatctagtgctccatccactgctaccgatgatagccttattaaaaagaatgaaaaacttaaggctaagttagccagctcccaagaagctattgaaaatttgctagagaaaatggaaattcttagcatacacaataatgagctaactactaaactagaaaacattggtagcaccccagcagcatctttagttgaaatacctgaaataattaagaaagatgcttctacttcctgttttgatttaattgatgattctaacccctgcaaccaagttgttgagaatattgttgtagagacatgttctgatgaggttgcaaaggaaaatgaacaattaaagcaagaagtggctcgtcttggcaaggctttgtatgacaagaaaggcaaagccaaacaaatccgacctccacaggataacaccactgcgggagtgaacaagcctgtagagggagaaactgtgatttgtaggctgtgccacaaggaaggccacaagtctttccaatgcaaggcgatgaccggggataaacaaaggcaaaagctcaagcaaaagccaacaagcaaaatctccaacatcaaaaaggtgaacaaaaaggatgctacaccatatttgatcaagaagaaaaagaatggaaaggtgatagcaatcaaggccaacaagcaagccaacaaaggaaaagggaccaaacgcatctgggtgccaaaagagataatttcaaccatgaaaagcaccaagaaggtttggatcccgaaagggaagtga

SEQ ID NO: 5275 - DNA, 5829 bp, Zea mays
  Clone ID: TF_ZM4874.C2.o9.fg
atggctagtaacaacaatgtgcacattgggaagccaccgcattttgatggaaataattatgactattggaaaataagaatgtcaatgcatcttagagcaatgggtggaaaaatttggccaattgtcagggatggatttgttgtgttgaaagaagatgaaccatccgttagtgataatgagaatatcctcacaaatgatcaagccatgaatgtcttttatgatgctcttgatataaatgaattcaatcgtatcaagaatctcacaaccgctcatgagatttggattaagctaatggaaattcatgaaggaactacaattgtgaagagtgccaaactatatgtgtgcaaagggaagtttgagcaatttattatgaaagaagatgagagtgtatctgatatgttcaatcagttaaatgagaaagtaaatgaactcaagggacttggttttaatgtaccggatgtggatttcactcacaagttccttagatcacttccggagaaatatgagaccattgtgacaatgttatttggcaaagaaggtgaaaatgaatcaattgctctcaaagctaaggcctcaaaggcaattgaaaaggaagatagtaatgatgaagaaaatgaaagtgagagtgatggtgacatggctctatttgtaaggaaattcaataaattcatgaagatgaagagaggtcaacctagaagaggtcaaacatctagaagaaatgctttcaatgatagaaagtgttttgagtgtggggaacccggtcacattgccatgaattgcccaagcaagaagaagaagggcaaagatgaaagtgacaagaagaaaaagaaatactataacaagaagaaagatggcaaagcctacttagttgaatgggactcggatgatagctcggatgatgatgatgatgatacctcatccaagcttaatgccggaattgccatcaaggaagctccctcactcttctcatccccccattgtctcatggcaaagggagatgctaaggtaaaaatcatcaccgatttaaatgatataaaagatgatgatgatatcgatgatgttgatgatgatggctattcatatgatgatcttgttagaatgttaggtgaggtcgatgactacatgcacaaagaaaaagaaaaatttaagaccttgaaggaattgtataaaaacctccaagtgtcttttgaggagctcaagacctctcacaatgacctaaaagaaaattgtgagaagcttgtggatgctcaaaaatcatctattgtgcatgaagttgaggtggtcactaaggatgttggagtcacttgtgacttacttgatagtcttacaagtgaaccactacctactaactctatttgtgataaatacaaaatttctctcaatgataacattgctcttgatgaatcaaaaactattgttgagaatgaagtgttagtagatagagtaaacactctaactcatgacctagaaaaggcatatggtggtaaggctaaattggatttcatattgggaagtcaacggtgctctcttaaccgtgaaggtcttggatatgttcccaagaaaggaaagaatgcttttgtaaagcaaaagacattgtttgtgaaagaatgtgacacagtgtgtcacaagtgtcacaaaaagggacatgttaagaaaaattgtcccaagttcaaaaatgtatcctccacttgttttgagcattgttatgttctttctcataatgcaaaaggtgttcatgctaaatttgttggtaaactacaaggcgggaggaatcattgggtgttagatagtggatgcactcaacacatgaccgaagatatgaaaatgtttacccaaatgagtgaggaagattgctcaaattatgatagtatcacatttggagataatcgcaaaggaaaggttaaaggtttgggtaaaattgctatttcaaatgatcattctatatcaaatgtgctcttggttgagtctttgaattttaatttactctccgtagctcaattatgtgatttaggattttattgcaatttcacggttgaagatgttattatctctagtgttgatggtagcaatcttaagtttaaaggttttagacatgaaaatctttatcttgttgatttctcatctaatgaggcaaagctcacaacttgcctattctcaaaagcttcactaggttggttatggcatagaagacttggtcatgttggaatgaagcaactcaatcgattaaccaagcatgactcagttcgtggcttaaaagatgtgaagtttgagaagaacaaattgtgtagctcttgtcaagccgacaaatctaatgtgtttgaaacattcaagtcatttgctatattggctcaaaatcaatatgatttcgacataaaaaaggttagaagtgataatgggtcggaattcaaaaatgcgagaattgatgaatattgtgatgacaagggtattaaacatgaattctcttccaaatataccccgaaacaaaacggtattgttgaaagaaagaatagaactctcattgatatggctaggtctatgttagcggaatataatatatcggattcttattgggccgaggcaataaataccgcttgtcattcatcaaatagactatattgtcacaagcttttgaagaaaactccatatgaattgctcattggtagaaagccaaatatctcatattttagggtattcggttgcaaatgttatattttaagaaagggaagccggctttctaaatttgagaagaaatgtgatgagcgttttcttcttggatattcatcaaatagtaaagcttatagagtcttcaataaaactcatggtattattgaagaagcatatgatgttgaattcgatgaaacaaatgggtctcaagatgagagtgataatctcgatgatgttgggggaactcaattgataaatgcaatgaaaacaatggccattggtgaaataaaaccaaaggaagatgatgatgaaaacagtgtggttgtcattccttcatcctcaactctaaatgaggaagatcaccaaagccaacaacatgatgaaactatggatactcatgatcaaggtacttcaagacattcggttcctcctaatgcttcaactagcaattatcaaacggtatcaagaattcatcattccattgtgaaggatcacccggttgatcaaattgtgggtgatattagtaaaggtgttcaaactcgctctcgcatagcttcgttttgtgaacatttctctttcgtatcttgtatggaacctaaccgtgtagatgaagctctacttgatgttgattgggtgaatgcaatgcatgaagaattaaataacttcgctcgaaatgaagtttgggagcttgttgagagactaaagaaccacaatgttattggtacaaaatgggtgtttcgcaacaagcacaatgaagatggtgtggtagtaagaaacaaggcaagattagttgcacaaggatatactcaaattgagggattggattttggggagatatttgctcccgtggcaagattagaagcaatccgaattcttcttgcttatgcttgtgcacataatatcaagctctaccaaatggatgtaaagagtgcttttctaaatggtaagattagtgaactagtgtatgttgaacaacctcccggttttgaggaccccaaaagacctaaccatgtgttcaagctttctaaagctctctatgggcttaagcaagctccacgcgcttggtatgaaaggcttagagatttcttgctttccaaagacttcaaaattgggaaggttgacactactctattcactaaaagaattggtaaagacttatttgtttgtcaaatctatgttgatgatattatttttggatctactaatgaattattttgtgaggaattcagaaaaatgatgtcaaaagaatttgaaatgtctatgataggagaattgagcttctttcttggccttcaaatcaaacaattgaaagatggaatttttataagtcaatcaaaatatttgaaggacatgctcaagaagtttggtttagaaaatgcaaaacctatcaagactccaatggcaacaaatggtcatctagacttagatgaaggagttctactcactgtgaatgctgtgcaaaattttgaactcgtttggatgggtattctctgcaaagtcatcaattcaacatttgtggcggctagggttctttggagtcgcccctggtcggtcgcggaccgtccgcctggtgggcacggaccgtccgggcctctggcgcggacagtccggccccctagcgcggaccgtctggaccctggcagagaaatgcagttctattcctttttattgtgtggttttggtggtctccgcaagaaacttgcaggtcactttaaatcaaagcgccctcgtggagatgatgatgactatacaccaaccactgattcagaggcccaatcctcagctaggggcactgaatctatggatgctgaagactttcctcatgttcatcccgattatcccattgacacctcaagatggacatatccaaagcggaggttttctatggctgagtactgctcaaggcggactatgaaccaatacactctgccatctgacaccaatattcaaattttccacactcagctgcagtttgatgttttttggggcaccttggtggatacaaattttcataaacatcaagtgattgattggtccttcatgctaggtcaatcagtcatggagggtctgatccctaagtttgagacgtgtggcctgtatcagtttatggggcaacgaacagacttcagtgaaatggctgtcaagcaattcctggccacctcagagattgatatagaagaagaatccgtcacctggatgactggcttcaagcgctattctgcctcttttgctgactttgccactaccaacagtctagattatggcaccatttcagctggactggatctctacactgaggataattttgaggacattgtgcaattctatgagccagcacggctgggaatacccaggaggattggagagacaacaggactcaggcatcatcctgctgtgatcaacaaaattgccagagtcactattcttcccaagagtggggataagagcaaaatacgggacaaattctggaatattatccatcacatcatgaatggtgagatggacaagaatcaaaatttagcatatgctccttatattatggctctcatcaaagccaagacaagatttgaggggccctgcgagattgttcacacaccattcagaccctttaagaatgagatagggtttctcaccaggcctctcactcccttcccagatgatgaggaagaccctggctataatgcaggagcagctcctgatgttgaggccgagcagatgcctcctcctcagcctcagcagtattggcagcctggtccaggctactttgatccctattttcacaatatgcagcaggggcttgagacccatattgatactcgctttgagggcatgatgacacatgtggatcaccgcctagatgacatgcagtctcactttgacagtaactgggatgcgctcaactctgagttttctgagtttcgtgatcacattcacactaatgtcactgatcctatcatgaccaggctgaataatgtgcagcagagttttcaagataacatgggcgctctctccagccaatttgaccatctttctacaaatgacagcatgcatgatatcagtcagaggcagcagcaactccagcgagattttggccagttctcctctctatttgacacattcagcactcactactacaacatgcatcctccgcccagtgatcagtga

SEQ ID NO: 5276 - DNA, 1175 bp, Zea mays
  Clone ID: TF_ZmC19722_1
ccggccggggctcagtgctcacacacttctccctttccgccgccgccaccgaggaagacaccaggtcaccagccataggcccatagcaaaccaagcgcgaggaggaacaggcgtagctccgtagccatagatggctaacaagcgtcagcgggatgcgcggaagcgcttccgggaggcgaacccagacctattccctccgcaaaccgccccttctgccgacggaaccaagaacaagagcaagaagaagaagaataagagcatgttcaagaaggccaataagggcggcacgggaaggtttaagcacccgctacgggttcccgggatgcggcccggggaacgctgcttcatctgcaagtccaccgaccacgtcgccaaggcttgccccgagaaggccctctgggacaagaaaaagatttgcttgctttgcagggagcggggtcatagtctgaagaactgtcctgacaaaagcgagggaaatttgatgaaattttgctataactgtggtgaatctggacactctctttccaagtgccccaagcccattgagaatgggggtacgaattttgcaagctgttttatctgcaatcagcaagggcatttgagcaagaactgccctgaaaacaaacatggcatctatccaaagggtggttgttgtaaggtatgtggcgaagttacccacttggccagacattgtccgaataaagggagacaagatttgatatcctccagagatgatgatgtcaacatggaagagcacagtcaggaatgtcctgcggttcaccatggtggagatgacctagaagatgatttcgttaatgaagaagaaccaaaacccgccaaatcaaagaaggcaaagcaatcaggttcaagaccagccacagggacgggaaatgacgtgaagagcgccagtgccaagacaaaagcgaaacaagctcctaaagttgtaaaattctttggttaaagaatgggaattttgttgtagcttaagatacgaatgttccatctggacaaccttgtactgtcaagcggttgtgtgtaacgctgatgacgatgagaatacgtctgccaactgcatacgcctctcgttgcccctaggtgctcttctgtcttctcattgtttggctagcattgggttatgcgagaccagtagacccattacaatatggaattcgctc

SEQ ID NO: 5277 - DNA, 282 bp, Zea mays
  Clone ID: TF_701161114H1
ctacaactgacgtgaatcgggacatctgactagcgcacgcagctgatgcacgagtgactacaggtacggcatgaacgcgtggaggtgccagatatggagtcagtggcggctggaggtacggagtaggtggaggcggcggcttcggcggaggaagctgctacagctgtggagagtctgggcattttgccagagattgcccatcaagtgctcgttgaatttactgttagggttgtttatgttttgcggattgttttaagtttttactttaatatgtcttaggga

SEQ ID NO: 5278 - DNA, 1936 bp, Zea mays
  Clone ID: TF_ZmC951_447
tcacccttgactttgcaagccttcttcttcacccttggctttgggttcctcagcctccttggccttctcccgtgcacttggtacctcgaagctcttcttgcctccgtccttggcttgatcagttgtctttgacttacagaggtacccaagtcctgattgctctatttcatgctcatcttctcttttccaccttgagacttggtcaaggcatactctatcactttcatcacacaaagataccaatttgaatgtcaagtgaaagattgacttggatagatgaccctgctcgccacacttgtagcagaagcgtcgttcaacttgacatgacacttgctgtttgttattttccttagtgggagtcatcttggagggtgcacgtgcttggttcatcaatagcggacaagacgtgatcatgtggtccttattgttgcatccaaaacaactccttgtcccttcatccttgtctttgtatggacaagatgcgataaggtggcctagcttcttgcacttgaaacacctcctttttcctcttctctttttgctctttgatgacatagagaaaaggtcagtgcaaacaacatgattaaataaatctttacctttttccaagctcatgttgatttcttcatctttaggaacaatctttttatgaagctcagcacttgctgcagtttttcctttctcaagcttcttcaccacgcgcccgtggatatcttgagagagttgagcaatgcgtcttctccttagttgtctttgcttcttgttcccacacaatttcttttgtgaccctgcatcttgatgcttattcaaaaattggctttcttttgaacagcaggggttagcacatggtgatatacaattcaaatgcgcactcgtgcgagagtgaggttcacatgaatttaagttcgcaattataacctcatgagcaacattaagcatgatatggtcatcaatcattttattatgagaatatgataacacatcgtactcttcacctagagcaaggttatcatgactcaacaatttttacttctctctcaagcatgacattttccattttaagttgagcaacacaagatatagcatcatcattactattttgctcaattaaaattgaatcataccgttggaccaagacatcatgagagcactttagctcctcatgttctttggtcatcttctccaggctgttgtttgttttgatgagagtctcctctagcctgagaagcatctcgctttgttccttgttccttctcaacagcttaatcaagagcgctttgtcttctttgttgagatgggtgtagaaacggcgaatctcctcttcttccacatcatcggtctcattttccctgtcattaatgtcagtggaagcaatataggaaaatgtaccttgtgatgatgaagattcatcctcgctatcatcctcatactcttcctcatcatggcttttgtctccaccgtcattgttagcaataaaacacttattattagtggagaccaaacctgttgacgaggtagattcatcgttgggtgtccatcgttcttgatcttctccctttgaatggttagcatcacaagcaatatagggagtggaagtagtacaatttgccacaaaatatttttctttaattctattccataaatcatgagcatcaacaattaaatcattaccattactcaagatggcaaaataagcacctctagaaagagaatcaactaagatgctgcaagcacggtgattgagagaaaaacatcttagttcatcattagagggatttttactaagatcagatgggaaaatacttctcctaaagatctgtctcaaatcaggatcaacactcatgaaagcattataaatagagacagaccaagatttgtaattagagccatcgcctaaaagaagttcagcagttacctcttgtgacgacatcgtcat

SEQ ID NO: 5279 - DNA, 1734 bp, Zea mays
  Clone ID: TF_ZmC18109_3
ttacttctttgctccgaaatgtatactaatcaagcgaccttcatcatcatacttataaaatggtgggtcttctgaattattgcttaggtcatgcttggcagctttcttctttattcggtctagacgcttcttggggcactcgcgaataagatgtccttcatttttgcagtagtagcaagcacctcttgctttgagttctttgcgagtcaactttgcttgaccaacaggggatgagggttgattgggtgtctgtatctcatatagctgagcctgacttgattcttctgtttgggaatccgtgtgtttcgtgacttttgcttgcggttgaggtggtctaatcatgtatccgaacatttttctattccttttgttgttcttcattccattcatcgaatatctctgtgactcatttttctcgctcgtagttgttaaggtaggaatattgtcgttggcaccgtttacttcatttccattggggttcatcattttcggacatatgtagtttactaacatttttccttcgggtgcactgatggtcttccttgatctcaagggacacttaaagataccatactttgttgcaaactgggcactgataagagaatgtgttgtacgaggatcatacaacacggtggcgatggttgtgtgaatgactagtgttccaaaaatcgccgccttatcatatggaatggttcctgtcactgcataacttatccttcctgtggtctctttccgttgtttattctttgttgatgcatgggtttgagggtgttgtcttttcttttggaccttattgatctccacatccttcttaggacaaccattaacaagatggccggtatcaccacagccaaagcaagcacgacttgataagttacatggtggagttgtctttacgttgttggcagaagtttctctgcatttttgttcatattccatgtctggagactgaggtagcttcatctcggaggtgatctgtagtgaacacttctcaagacagttacggaagtaatgaccttcacgtccacattgatagcaagcttttcttgaagttatttcttgactttttgcacgtttccctttttgtttcttggatctgatgcgaccatgaggctgaaactgtgtgcaagtaatagtccatccatcaatgtaacactcatgtgtttcttcttggggctgggcatccttgtgatgtttcctttttggaatactttgcaattcatcaactgacagtgcattaggtatgagagaatctgttattagttgttcttggggagacatttgtctttttatgccagaaaataaaatctggttcttctgttttgtagtttcactttcatttgtactgatcttaaccaagaagaatggtaatagatccaaagaatccataacaaaacttcttgtggagtagggataagacagagaatagggactcgacaatagctttgaaagggtttcttctggcaaactttgcttcaagttccgcaatcctagcttgatcatcttgtagtgcttctgagtagagtcttctgatagaccagaatcagacatttggaacatcaatatcataagcgagagtgatagatcaatcagtgctgtttcagtcgcggtggcgaacggcgtgcggatgcggacggtccggcgagttccatgggcggtccgagcacgacgaggcgatgtatggtccagccggggtgctgcgcggttgcgtcgacggtggtcggtgagcgccat

SEQ ID NO: 5280 - DNA, 757 bp, Zea mays
  unsure (1)..(757): unsure at all n locations
  Clone ID: TF_LIB4977-008-R1-K1-B11
gcttgctctctctctcgttgcgacgactgtgtggagtaccgcccccgccccctcaggccctcaccccccgacgccgacgccctaggcggctacgccaggtcccgagggacgggcccttcatcttcgtcagtctattcgccgggcgacgagcacccgccaggtttcgtaatgatttgtgcaacaattgtaagcgtcctgggcattttgctagagagtgtcctagcgtggctgtctgccatacctgcgggcttcctgggcacattgcagccgaatgttcttccaaaggtgtttgctggaactgcaaagagcctggccacatggctaacagctgcccaaatgaagggatatgccgtaactgtggcaagtccggtcacattgcaagagactgcaccgctccaccagtgccgccaggagaagtgatcctttgcagcaactgctacaaaccagggcattttcgtgaggaatgcaccaatgagaaggcctgcaataattgccggcagagcggccaccttgcccgtaactgcaccaatgatcctgtttgcaacctgtgcaatgttgctggccatctggcccgtcagtgccccaagtctgatacattgnngtgagaggggtgggcctcctnccttccgtggtgttggcgctcccttccatgatgttggcgctcccttccgtggtggcttcagtgacgtggtctgtcgggcctgcaaccagattggtcatacgagtcgtgattgcatggctggtgncttcatgatct

SEQ ID NO: 5281 - DNA, 838 bp, Zea mays
  Clone ID: TF_ZmC519073_1
gatgcatggggtgccttcggtgtccggaccaacccaatcccaatccaacatcgcgagtcggggtctctgtccctcaccgtcgccgccgcggcttccccccgctgacctccgccggagttcgccggactcgtagggtttcttcagtcgtcctcttccctgctggagatccgtaccctaggaaggaagggaggaaggaagcagggtgagttgtggtgattttgtggtttggacgtgtggtgttcacagtttggtgggagcttggaggcaggagatttagaaggaagggttgacgatgagcagccgaagcccgccgcagggaccggaggatgcgtactgaacgcaccttgtaccgtgacgcgccataccggagagacagggacggccgccgtggtccaaacaggtctgctagtgatttgtgcaacaactgtaagcgtccagggcattttgctagagattgtccaaatgtgtctgtctgccatgcctgtggccttccagggcacattgcagctgagtgttcttccaaagatctctgctggaactgcaaagagcctggacacatggctaatgcctgcccgaacgaagggatatgccgcaactgtggcaaatcaggccacattgcaaaagactgcactgctccgccaatgctgcctggagaagtgaagctctgcaacaactgctacaaaccagggcacattgccgtggagtgcaccaacgagaaggcctgcaacaactgtaggaagagtggccatcttgcccgtaactgcaccaatgagcctgtttgcaacctctgccatgttgcagggcatttggcccgtcaatgccccaaatctgacgagat

SEQ ID NO: 5282 - DNA, 809 bp, Zea mays
  unsure (1)..(809): unsure at all n locations
  Clone ID: TF_ZmC6609_12
ccggccggggcgacgactgtgtggagtaccgcccccgcccccgccccctcaccccccgacgccgacgccctaggcggctacgccaggtcccgagggacgggcccttcatcttcgtcagtctattcgccgggcgacgagcacccgccagtttggttggagcttggagtttagagggaagatttggtgatgagcagccgcagcctgccgccgaaggatcgcaggatgcgtactgaacgcacctcataccgtgatgcaccatatcggagggacagccgccatggtccaagcaggtttcgtaatgatttgtgcaacaattgtaagcgtcctgggcattttgctagagagtgtcctagcgtggctgtctgccatacctgcgggcttcctgggcacattgcagccgaatgttcttccaaaggtgtttgctggaactgcaaagagcctggccacatggctaacagctgcccaaatgaagggatatgccgtaactgtggcaagtccggtcacattgcaagagactgcaccgctccaccagtgccgccaggagaagtgatcctttgcagcaactgctacaaaccagggcattttcgtgaggaatgcaccaatgagaaggcctgcaataattgccggcagagcggccaccttgcccgtaactgcaccaatgatcctgtttgcaacctgtgcaatgttgctggccatctggcccgtcagtgccccaagtctgatacattgggtgagagggggtgggcctccttccttncgtggtgttggcgctcccttccatgatgttggcgctcccttccgtggtggct

SEQ ID NO: 5283 - DNA, 5145 bp, Zea mays
  Clone ID: TF_ZmC951_444
tcagggtgttacaggtgcataccctagggtggagttaaccaccacgttcccttctttgcgctgaggtggaggaccttttccctttctaagtttgcacctccgagctgtatgctcggagacaccacaaacgtagcagataaagtcctcctttttcttcttcatctttttggacttaggttggttcatattcttctgtggagagttcttcttcttcttctggaattttctatctccacccttctcaacaacgtgagcctggagttgctgggatggcttgttactggaccttgcacgctcttccacattaatcgtagctgacaactcagtgagagtcatttgcttcttcatgtggcggcgtgaagtcacaaagtctcgccaagacggcgggagctttgccagtattgcattcacctgaaaactgtctggtaggacgcagccatattggaccaagtccctaacaaggagttgaatctcctgtagctgctccataacagaccttccctcaaccattttatagttgaggtagttttctgttgtgaatgactcattgccattgtcaacttcagagaactcgttctcaagttcagtccatagacccttagcggaggtaaaactagagtacacgtcaaataagcggttcgacaagacgttcaccagacgagacaagcatgcctcatcggcttcgtcccacttggccttctccgctagtgcggcggcctttgctgcatcatcagcattatctgatgcagcctcgggaacagccaacgtcactaccagctcagcgaacacaaggttctgtcccagaaaaccaattccgccgcccacgtccggcccggacggtccgcgcctgaggccggacggtccgcgcgaggtcttggacggtccttgctttttccttcggacggtctgtagtgtagacttagatttttgcattggttctgtccgagggtcatcctggtgttgcggacggtccgccgcaagggcccggacggtccgcgcttggcctatttttccaaaaagcttctcctgtccggaataatctacggtatttcggacagtcgatttagtatagttgtagatgaacctttgacactttctccccctttggcatgaatcgccaaaaacggagtcattagagcccttagaaatactctctccccctccttcgtcgaggtcgagatgcccattggttcccatgggtgtcttgatgggtttggcatccttcatcccaaacttgcttagaatatcttgagtatacttcgtttggcttaggaaggtgccctcttggagttgcttcacttgaaatcctaagaaatacttcaactcccccatcatagacatctcgaatttttgtgtcatgatcctactaaattcttcacatgtagactcgttagtagacccaaatataatatcatcaacataaatttggcatacaaacaagtcattttcaagagttttagtgaataaagtaggatcggcctttccgactttgaatccattagtgataagaaaatccctaaggcattcataccatgctcttggggcttgcttgagcccataaagcgccttagagagcttatagacatggttaggatactcactgtcttcaaagccgagaggttgctcaacatagacctcttcctcattcctagtgaagttgttgagctcctcttgcattgccaccacccaatccgaatcttgaagtgcttcctctatcctgtgtggctcaatagaggaaacaaaagagtaatgctcacaaaaatgtgcaacacgagatctagtggttacccccttttgaatgtcgccgaggatggtgtcgatggggtgatctcgttggattgcttggtggactcttgggtgtggcgacctttgttcttcatcctcctcatcttggtcatttgcatctcccctttgatcattgccgtcatcttgaggtggctcatttgcttgatcttctatttcatcaacttgagcttcatcctcattttgagttggtggagatgcttgagtggagaaggatggttgatcttgtgcatttggaggctcttcggattccttaggacacacatccccaatggacatgttccttagcgcgatgcacggagcctcttcaatacctatctcatcaagatcaacttgctcggtaaggagttcgtatgaggtcttcttgaggattcggtgtagatatagccggttgatggcgtagcaggcggtgttgactgcctccgcccaaaaccgatctgaagtcttgtactcatcaagcatggtccttgccatgtccaatagagttctattcttcctctccatcccgccgatgcttatgtaagtgatcgggccgaatagatccatgtgtaggagctccagtggcatgtcagttgtcatgatgttcttgtgtggatggtgagcaccaacttgctttcctgcttggcatgcgctacaaaccctgtctttctcaaaatgaacattggttaatcctaaaatgtgctctccctttagaagcttatgaagattcttcatcccaacatgtgctagtcggcgatgccagagccagcccatgttagtcttagcaattaagaaagtgtcgagttcagctctatcaaaattcactaagtatagctgaccctctaacactcccttaaatgctattgaatcatcacttcttctaaagacagtgacaccttgatttccatccccaaatgtgatagctcgttggggatcttggtttttctcgtaggaggagaacatcttcttctcccctgtcatgtggtttgtgcacccgctgtcgataatccaacttgagcccccggatgcataaaccttgccggatttgttagttaacacatatgatgcatcaaaagttttgaatgaaaagctatgttcatttgatgcactaggagttttcttcttaggcaacttagcatgggttggttgcctagagctagatgtctcacccttatacatgaaagcatggttagggccagagtgagacttcctagaatgaattctcctaattttgtcctcgggataaccggcagggtataaaatgtaaccctcgttatcctgaggcatgggagccttgcccttaacaaagttggacaatttcttaggaggggccattaagtttgacattgcctccctgttggaagccaatgccatccttaatgccagggcgtctcccactataaagcataatctagtacaaatagaagtgtgctcaacggtagatgtagagggtttgcaagattttaattctacaaccttagcatgcaatatatcatttttagttctaaggtcggaaattgtagcattgcaaacatcaaaatctttagccttagcaagcaatttttcattctcaattctaaggctagcaagagaaatgtttaattcttcaatcctagcaagcaaatcatcattatcattcctaagattgggaattgaaacattacaagcaatagaatcaaccttagctaacaaattagaattctcatttctaagtttgtctatagtctcatggcaagtgcttagctcactagataatttttcacatttttcaacttctagagcataagcatttttaaccttaacatgctttttgttttccttgattaggaagtcctcttgggtgtccaagaggtcatccttctcatggatggcactaattaattcatttaacttttctttttgttgcatgtttaggttggcaaaaagagtgcacaagttatcttcctcatcactagcattttcatcactagaggattcatatctagtggaggatttagatttaaccttcttctttttgccgtcctttgccatgaggcacttgtggccgacgttggggaagagaaggcccttggtgacggcgatgttggcggcgtcctcgtcgtcggaggagtcgctagagctttcgtcgaagtcccactcccgacaaacatgggcatcgccgcccctcttcttgtagtatctcttcttctcctttcttctccccttcttgtcgtcgcctctgtcactgtcactagatataggacattttgcaataaaatgaccgggcttaccacatttgtaacacactttcttggagcgaggtttgtagtccttccccctcctttgtttgaggatttggcggaagctcttgatgacgagcgccatttcctcattgtcgagcttggaggcatcgattggttgtctacttggtgtagactcctccttcttctcctccgtcgccttgaatgcaaccggttgagcttcggacgtggagggaccgtcaagctcgttgttcttccgtgagcctttgatcataaattcaaagctcacaaaattcccgataacttcctcgggagtcattagtgtatatcttaaccacctcgtggtcatcccattttttgctcccgaggttgcgcacacttggttcaccaaggttttgagccggttgtacatatcttgtggttcctccccttggcgaaggcggaagcgaccgagcttcccttcgattgtttcccgcttggtgatcttggtgagttcatcaccctcgtgcgtcgtcttgagcacgtcccaaacttccttggcgctttttagtccttgcaccatgttgtactcctccctacttagagaggcgaggagtatggttgtggcttgggagttgaagtgctcgatttgggccacctcgtcctcatcataatcctcatcccctacggatggtacctgtgctccaaactcaacaacattccatatacttttgtggagtgaggttagatgaaatttcattaaatcactccacctagcataatcttcaccgtcaaaggttggcggtttgcctaatggaacggaaagtaatggagtatgtctagaggtacgaggataatgtaaggggatcttactaaacttcttgcgctcatggcgcttagaagttatggagggcgcgtcggagccagaggtagaaggtgacgaagtgtcggtctcgtagtagaccaccttcctcatcttctttattttgtcgccactctgatgcgacttgtgagaagaagtcttcttctccttcttctccttcatcttctccttgttgtgggactctcccgatgaagccttcccgtggcttgtagcgggcttgtcgccggtctccatctccttcttggcgagttctcccgacat

SEQ ID NO: 5284 - DNA, 1419 bp, Zea mays
  Clone ID: TF_ZmC1373_13
ctcgaggccggccggggaggcttagaattcggatccctcccagcacatccatccccttcccttccctcgtgccccgccggctctccagcgcgccgtctctgcccagatccaggagatatgcctcgctatgatgatcgctatggaggcacgcgcttgtatgttggcagattggccccccgtactcgttctcgtgatttagaatatctcttcggcaaatatggaaggcttactgtttgtggcaaccctttccgcagaatacgagaagtggagttgaagcgcgactatgcatttattgagttcagtgaacatcgtgatgccgatgaagctcggtaccaactagatggcagggatgtcgatggaagtcgcattgttgttgagtttgctaaaggggtcccacgtggtccaggtggctcacgtgaatatatgggaagaggccctccaccaggcacaggtcgttgtttcaactgtggaatggatggtcactgggcaagagattgtaaggctggtgactggaaaaataaatgctaccgttgtggagaaagagggcatatagaaagaaattgccagaacagtcctaggagcgtcaggcgtgaaagaagttactcacgctccccatctccacgccgtggaagaggtcgcagtccaagctatagcaggagcaggagtcgtagccggagctatagccgatcgaggtccctatctggatctcctaggggaggccgccgtgaccgtgatgataggagatcgaggagtcttagctacagcaggagccccgtgcggtcgccacctgcaaaggaaaaggagcgcagtcccacacctggcggaagcaggagcccaaggagtcgcagcccacaggatcaggtgatgagcccaccacctaaggataacggcgacaggaatggttcagaccgtggcgacagccccagagggagggaagacagcaggagccgcagccgcagcccatccggtggtaaccgcagccctgcagctaatgggcgtagcccgagccccagaggtgaccgtggcccgagccccatggctgaccgtagcccgagcccaaagggcaatggtaacaacgatggtggtgatgatgatactggccgtggtggttcccccacaggaagcaagtcaccctgaacgctgcaccgtctcagttcttaggtgcttcgtgatgcagtgggcaaacataccaaagacgtgatagctgtatcgtttccctatctgagacgtggacttatttagcttgctttgatcttggactcttattttttctcttatggatatatgatatgatgccttcgggctggcttggatctgaataagtgaatgtggacacgcatgttgtgtcgccctatgttggtatttacctgcaatgctatagcgtcagtcttgttgaaaaaaaaaaaaaaaaaagcggcc

SEQ ID NO: 5285 - DNA, 1474 bp, Zea mays
  Clone ID: TF_ZmC1373_24
ccggccgggacaccgcctccggcttcagttccccgaggcttagaattcggatccctcccacggtcccaccacatccatccccttcccttcccttccttcgtgccccgccggctctccagcgcgccgtctctgcccagatccaggagatatgcctcgctatgatgatcgctatggaggcacgcgcttgtatgttggcagattggccccccgtactcgttctcgtgatttagaatatctcttcggcaaatatggaagaatacgagaagtggagttgaagcgcgactatgcatttattgagttcagtgaacatcgtgatgccgatgaagctcggtaccaactagatggcagggatgtcgatggaagtcgcattgttgttgagtttgctaaaggggtcccacgtggtccaggtggctcacgtgaatatatgggaagaggccctccaccaggcacaggtcgttgtttcaactgtggaatggatggtcactgggcaagagactgtaaggctggtgactggaaaaataaatgctaccgttgtggagaaagagggcatatagaaagaaattgccagaacagtcctaggagcgtcaggcgtgaaagaagttactcacgctccccatctccacgccgtggaagaggtcgcagtccaagctatagcaggagcaggagtcgtagccggagccggagctatagccgatcgaggtccctatctggatctcctaggggaggccgccgtgaccgtgatgataggagatcgaggagtcttagctacagcaggagccccgtgcggtcgccacctgcaaaggaaaaggagcgcagtcccacacctggcggaagcaggagcccaaggagccgcagcccacaggatcaggtgatgagcccaccacctaaggataacggcgataggaatggttcagaccgtggcgacagccccagagggagggaagacagcaggagccgcagccgcagcccatccggtggtaaccgcagccctgcagctaatgggcgtagcccgagcccagagggggccccagaggtgaccgtaccccgagccccatggctgaccgtggcccgagccccatggctgaccgtagcccgagcccaaagggcaatggtaacaacgatggtggtgatgatgatactggccgtggtggttcccccacaggaagcaagtcaccctgaacgctgcaccgtctcagttcttaggtgcttcgtgatgcagtgggcaaacataccaaagacgtgatagctgtatcgtttccctatctgagacgtggacttatttagcttgctttgatcttggactcttatttttttctcttatggatatatgatatgatgccttcgggctggcttggatctgaataagtgaatgtggtcaaacgcatgttgtgtcgccctatgttggtatttacctgcaatgctatagcgtcagtcttgttgaggcctgaccaaaaaaaaaaaaaaaaaagcggcc

SEQ ID NO: 5286 - DNA, 1580 bp, Zea mays
  Clone ID: TF_ZmC1373_28
cattgggtacctcgaggccggccgggaccgcctccggcttcagttccccgaggcttagaattcggatccctcccaccacatccatccccttcccttcccttccctcgtgccccgccggctctccagcgcgccgtctctgcccagatccaggagatatgcctcgctatgatgatcgctatggaggcacgcgcttgtatgttggcagattggccccccgtactcgttctcgtgatttagaatatctcttcggcaaatatggaagaatacgagaagtggagttgaagcgcgactatgcatttattgagttcagtgaacatcgtgatgccgatgaagctcggtaccaactagatggcagggatgtcgatggaagtcgcattgttgttgagtttgctaaaggggtcccacgtggtccaggtggctcacgtgaatatatgggaagaggccctccaccaggcacaggtcgttgtttcaactgtggaatggatggtcactgggcaagagattgtaaggctggtgactggaaaaataaatgctaccgttgtggagaaagagggcatatagaaagaaattgccagaacagtcctaggagcgtcaggcgtgaaagaagttactcacgctccccatctccacgccgtggaagaggtcgcagtccaagctatagcaggagcaggagccggagccggagccggagctatagccgatcgaggtccctatctggatctcctaggggaggccgccgtgaccgtgatgataggagatcgaggagtcttagctacagcaggagccccatgcggtcgccacctgcaaaggaaaaggagcgcagtcccacacctggcggaagcaggagcccaaggagccgcagcccacaggatcaggtgatgagcccaccacctaaggataacggcgacaggaatggttcagaccgtggcgacagccccagagggagggaaaacagcaggagccgcagccgcagccgcagcccatccggtggtaaccgcagccctgcagctaatgggcgtagcccgaggagccccagaggtgaccgtaccccgagccccatggctgaccgtagcccgagcccaaagggcaatggtaacaacgatggtggtgatgatgatactggccgtggtggttcccccacaggaagcaagtcaccctgaacgctgcaccgtctcagttcttaggtgcttcgtgatgcagtgggcaaacataccaaagacgtgatagctgtatcgtttccctatctgagacgtggacttatttagcttgctttgatattggtgtcttatttctcttatgaataatgtggacacgcatgttgtgtcgccctatgttggtatttacctgcaatgctatagcgtcagtcttgttgaggcctgagcaaaaacaaccagataccccctttgaaaggtactgctttgttgtgggtgaatcggggactcggggtggcataggttcacggcagagtcgttttccgcgactcgtgctgccggttagccgagtcctgctcgctagtcttcagcctgttttgctttaaatcgtaccggcttttactacttataaagtgtttgttttatctc

SEQ ID NO: 5287 - DNA, 1264 bp, Zea mays
  Clone ID: TF_ZmC31167_2
cccacgcgtccgcccacgcggccgcccacgcgttctgctgcaaccctgtgttttcttcctccattaacccccagcgacgagcgtgcgagcactccctcgccgcccaccgcgcctcgtggcggcaactgggcggccgtcgctgccgccctacgccaggtgccgaggtgattttccgcccctttgccggcgacgagcactaccagatactctgagcctggctgccgaaacttccttttggtgtccctgttacattcggtttcgtttttgatgacttcatcaagaagcaagagcaggagccacagtcgcagcaggagcaggagcaggagccgcagtcctcagcgaagagataggttgcgcagcgaacgtgcaccccgccgcagtcgcagtcacagcaggagccgcagcccataccgtcgcagagaacggcgtggatacaaggatctcgtatgcaagaactgccggagacctgggcactttgctaaggagtgcccatctgcgcctacgtgcaataactgtaaccttccaggccacttcgcagcagaatgcacctcaaaaactgtttgctggaactgcaaagagcctgggcacattgcgagtgagtgcaagaacgaggccctgtgccacacctgcaacaaaacaggtcacttggcgcgtgattgccctacttcaggggctaacgtcaagctatgcaacaaatgttttaaatcaggccacgtcgccgttgactgcaccaacgaacgggcatgcaacaactgccgtcagccagggcacatagctcgagagtgcaagaacgatcctgtttgcaacctgtgcaatgtctctggccatgtcgcgcgcgtctgctcaaagacgactctggcttcaatacgaggaacacatacagggtggccccgttccgtgggggcgaagcgaggggcggcaggaaaagaagggtcgatcagtgagtaactagactagagcatgtgtccagcgcctaacgcgcttatcctctgttggaatcgatggccctaatggtaacgggacatcatgaggcgtctgcctaaattgacttggtttctgagagagtggagcgggaatagcggatccgctaaaacaagatctttaaaagtgtccagtgcatccaaatctgaacctgcgaaacctttctatctttgttcttcccactttcgcgctttcgaactactggttatgtcatcacttttctttgatgtttactctttttggttaggagatcagctgctaacctattttcatttctaactta

SEQ ID NO: 5288 - DNA, 5259 bp, Zea mays
  Clone ID: TF_ZmC951_428
ttaagtacattttggtacccatctcatgataggtccatcaaggttagccaataaggacttaggcacccaaatagccttggtcctagaatgtggtgaactcatcacctttctagcacaagagtcaaatttgggtctcctaagcatatttgaatgtattgacaagttaggcttaggagttttaccctttggacaaaccttgaatagatgacctttttcacggcaattgtagcaaatgtgatgcttgtccttgcaatgcttttgccttttgctttcatcctttttgatggtcatctttcttgatcgtgcaaggtcttgattcttcatgtgggggcatgaatcaatttcatggcccttctccttgcatccatagcatctcctatcgcttctctttgatctttctttgttgaagcacataggtacattgttagagcaaatcatatgagcattaattttctcaccatggattttgctcatgcccttcttggaaagcttggtattcttttgaaggggttttgtgcatgctacggttgtccccttctcaagctttttcaccatattatcacggttatcttgagaaggttgagcatgacactttcccttcaaacgagttaagctccttcttagcattccaacttcttccttgagctctttattttcttgtgtgatagaaatatcactaattcctgaaatttctagctcaatggaagattggcttgcttgataacaacaattgttagcacatgataatgtagtttctacttgagtacatgtgcatgtgtgaggtttgtatgatttaaaattagttaacacaacctcatgagccatttctaacatgatatgtgaatccataaatttattatgagagcatacaagcatatcatgtttttcttgcaaagctagattttcaatgtttagcttttctaccgtgttcttgagcatagcatttttattttctaattgagcaatatatgatgaatgattaatagctttaatttgctcaattgaaatgtcttcatacctttggaccaaatcatcatgagagcactttagcttctcatgctctttggtcaacttctccaagtctttgattttttcgatgaggatatcttcttgcttatgaagcatttccttttgttcttccgctcttttcatgagtttgagcaagctcatccggttcttcttacttagttgagcgaagaatttttgaagatcatcctcatcttcactatcactttcatgctcctcctcatcctcactttcgctttcactgtcactctcattagcaacaaagcacatatgagaagtggatttgaaagacgaaccttgtgaagaggtggattcgtcgtttggtctccatcgatcattttcttcttcttcaataatgttcttcgcctcatcttccttcattttgaggaacatcctttcggcgattctcatggcaaggtctattgccctaggatcaacatctgcagactggtcaagttgaccaagaccggttgaaccgccccaggggggggcggttgaacccgcccccctgacagctctggcgacctgtttgccagtctgactggcagaccccttatgaatgtcgccgaggatggtgtcgacggggtgatctcgttggattgcttggtggactcttgggtgtggcggcctttgctcttcatcctccttgtcttgatcatttgtatctcccccttgatcattgtcgtcattttgaggtggctcatttgcttgatcttctatttcatcaacttgagcttcatcctcattttgagttggtggagatgcttgcgtggaggaggatggttgatcttgtgcatttggaggctcttcgaattccttaggacacacatccccaatggacatgttccttagcgcgatgcacggagcctcttcaatacctatctcatcaagatcaacttgctctacttgggagccgttagtctcatcaaacacaacgtcacaagaaacttcaacttgtccagtagacttgttaaagactctatatgcccttgtgtttgaatcatatcctagtaaaaagtcttctacagtcttaggagcaaatttagactttctacctcttttaataagaatgaagcatttgctaccaaagactctaaaatatgaaatgttgggctttttaccggttaggagttcgtatgatgtcttcttgaggatttggtgtagatataaccggttgatggcgtagcaggcggtgttgaccgcctcggcccaaaaccgatccgaagtcttgtactcatcaagcatggttcttgccatgtccaatagagttcgattcttcctctccactacaccattttgttgtggcgtgtagggggaggagaactcatgcttgatgccctcctcctcaaggaagccttcaatttgagagttcttgaactccgtaccgttgtcgcttctaattttcttgatcctcaagccgaactcattttgagcccgtctcaagaatccctttaaggtctcttgggtatgagatttttccctgtctttctcaaaatgaacatttgttaatcctaaaatgtgttctccctttataagcttatgaagattcttcatcccaacatgggctagtcggcgatgccagagccaacccatgttagtcttagcaattaagcaagtgtcgagttcagctctttcaaaatctaccaagtatagctgaccctctaacactcccttaaatgctattgaatcatcacttcttctaaagacagtgacaccttgatttccatccccgaatgtgatagctcgttggggatcttggtttttctcatatgaggagaacatcttcttctcccctgtcatgtggtttatgcatccgctgtcgatgatccaacttgagcccccggatgcataaaccttgccggatttgttagttaaaacatatgatgcatcaaaagttttaaatgaaatgtcatgatcatttgatgcactaggagttttcttcttaggcaacttagcacgggttggttgcctagaactagatgtctcacccttatacataaaagcatggttagggccagagtgagacttcctagaatgaattctcctaattttgctctcagggtagccggcagggtacaaaatgtaaccctcgttatcctgaggcatgagagccttgcccttaacaaaattagataaccttttaggaggggcattaattttgacattgcctccctgttggaagccaatgccatccttaatgccagggcgtctccctctatagagcatgcttctagcaaatttaaatttttcatcttctaagtcatgctcggcaatcttagcatctagttttgctatatgatcattttgttgtttaattaaagccatgtgatcatgaatagcattaacatcaacatctctacatctagtacaaatagaagtgtgctcaatggtagatgtagagggtttgcaagattttaattctacaaccttagcatgcaaaatatcatttttagttctaaggtcggaaatagtagcattgcaaacatcaaaatctttagccttagcaagcaatttttcattctcaatcctaaggctagcaagagatatgttcaattcttcaatcttagtaagcaaatcatcattatcatttctaagattggaaattgaagcattacaaacatttgaatcaaccttagctaataaattagcattctcatttctaaggttgtctattgtctcatggcaagtgcttagctcactagataatttttcatatttttcaacttctagagcataagcatgtttaaccttaacatgttttttgttttccttgattaggaagtcctcttgggagtccaagaggtcatccttctcatggatggcactaattaattcatttaacttttccttttgttgcatgtttaggttggcaaagagagtacgtaaattatcttcctcatcactagaattgtcatcactagaggattcatatctagtggaggatttagatttaaccttcttctttttgccgtccttagccatgaggcacttgtggccgacgttggggaagaggagtcccttggtgacggcgatgttggcggcgtcctcgtcgtcggaggagtcgctagagctttcgtcggagtcccactcacgacaaacatgggcatcgccgcccttcttcttgtagtacctcttcttctcctttcttctccccttcttgtcgtcacccctgtcactgtcactagaaatgggacatttagctataaagtgaccgggcttaccacatttgtaacaaaccttcttggagcggggcttgtaatctttctccctcctttgtttgaggatttggcggaagctcttgatgacgagcgtcatttcctcattgtcgagcttggaggcatcgattggttgtctacttggtgtagattcctccttcttctcctccgtcgccttgaatgcaaccggttgagcttcggacgtggagggaccgtcaagctcgttgatcttccgtgagcccttgatcataaattcaaagctcacaaaattcccgattacttcctcaggagtcattagtgtatatcttggattaccacgaattaattgtacttgagtagggttaaggaaaataagagatcttagaataaccttaaccacctcgtggtcatcccactttttgctcccgaggttgcgcacttgattcaccaaggtcttgagccggttgtacatatcttgtggctcctccccttggcgaagacgaaagcgaccgagctccccctcgatcgtttcccgcttggtgatcttgttgtactcctccctacttagagaggcgaggagtattgttgtggcttgggagttgaagtgctcgatttgggccacctcgtcctcatcataatcctcatcccctacggatggtacctgtgctccaaactcaacaacattccatatacttttgtggagtgaggttagatgaaatttcattaaatcactccacctagcataatcttcaccgtcaaaggttggcggtttgctaaacttcttgcgctcatggcgcttagaagttatggagggcgcgtcggagccggaggtagaaggtgatgaagtgtcggtctcgtagtagaccaccttcctcatcttctttattttgtcgccactccgatgcgacttgtgagaagaagtcttcttctccttcttcttcttctctttgttgtgggactctcccgatgaagccttcccgtggcttgtagcgggcttgtcgccggtttccatctccttcttggtgagttctcccgacat

SEQ ID NO: 5289 - DNA, 2049 bp, Zea mays
  Clone ID: TF_ZM4989.C10.o4.fg
atggcttgttacctagaggccgttgatctaggtgtttggagagtcactcgtgacgggatgaaaccccccaagaatcccgagaaacccaccacgagtgaggaaaaagaaattcatttaaatgctagagccaaaaattgcttgtatgaatctcttagcatggatatttttaatcaagtattcacattgaaaactgctaatgagatttggctaaaattgcatgagcttcatgacggcacatccaatgtccgtgagcaaaaacattgcctagtcttaaatgagtataatacttttgctatgagagatgatgagcttgttagagacatgtattctcgtttaaatctaatcatcaatgagctcaactctattggcattaataagctaggtgatgcggacattgtgaggaagattatctcccttctaccacaacaaagatatgggagcatcatcaccatccttcacaacatggaggacttgagcaacatgaccccgaccattgtgattgggaaaatcgcagcttttgagatgtcgcgaaaaatgtgtcggggagaggagccaacttcctcaagaccatatgcttttgcatgtgatgaaaggaagggcaaaaagaaggctcccactccaagttcctcaagcgaagaagaggaagaagaagaagaaagtgatgatgatgaagataatcaaccatgcacatcatcctccgaggacgaacaaacaatccgacgcgtcggaaaggtaatgaggatgattcgcaagattaatctaatgggtgtgcccctgcaggtcgaagatcttctctttaacattgacaggaaaaagcaaaggaagagaggatgcttcgcatgtggggagaagggccacttcagggacaactgtccaactatggccgaacccaaaaaggagaggagcaaaggcaaggcgctaacaagtgttagaacttgggatgactcttcaagcgaagatgaacctccaaggacgcgcagccaccgatcctcatcacgctcgtcacggtcatcacacaaatgccttatggcaagaggtaacaaaagcattccatcctctggtgatgaaagtagtagtgatgatgaaggtgagggaaaggcctctctagatgaacttgcggaagccgtagaatttttccaggatgtttgcactaagcaaaaagctcaacttaaaactttgaaaaataagttggttagctctcaaaatgattacaaaggtttgctagaaaaatttgaaacttttgcaaacttaaatagtgagctatcaactaaaattgagctattagaatcttgtgctccatccactgctaccgatgatagccttattaaaaagaatgaaaaacttaaggctaagttagctagctcccaagaagctattgaaaatttgctagagaaaatggaaattcttagcatacacaataatgagctaactactaagctagaaaacattggtagcaccccaggagcatccttagttaaaattcctgaaattattaaaaaggatgcttctacttcttgctttgatttaattgatgattctaacccctgcaaccaagttcttgttgagaatattgttgtagaaacatgttcggacgaggttgcaaaggaaaatgagcaattaaggcaggaagtggctcgccttggcaaggctttgtatgacaagaaaggcaaagccaaacaaatccaacctccacaggataacaccaccgcgggagtgaacaagcctatggagggagaaactgtgatttgtaggctatgccacaaggaaggccacaagtctttccaatgcaaggcgatgaccggggataaacaaaggcaaaagctcaagcaaaagccatcaatcaaaatctccaacacctacatcaaaaaggtggacaaaaaggatgctacaccatatttgatcaagaagaaaaagaatggaaaggtgatagcaatcaaggccaacaagcaagccaacaaaggaaagggggccaaacgcatctgggtgccaaaggaaataatttcaaccatgaaaagcaccaagaaggtttggatcccgaaagggaagtga

SEQ ID NO: 5290 - DNA, 992 bp, Zea mays
  Clone ID: TF_ZmC65805_1
acctgtcatgctagtcatctgggaaagcattgcggaaggataaaccttcacaagatgtagaagggacctcggttaaagaatcaaaaccatcagctggtgaagatgattcgtcaaaaatatgttataaatgcaaaaaggctggacatctttctcgcgattgcccagaaagcacatctgaggtggaccgaaatgatggcagtattagtagaagcagagacgatacgggtaccaatactgctcctgctggtggcaacagtcctatggacgaagacgatgttcaagaaattggtgatgaagagaaagaaaagttgattgacttggactacttaactggaaacccactaccaaatgatattttgctatatgctgtacctgtgtgtgccccttacaacgcattgcagacatacaaatatcgtgtaaagattaccccaggcactgcaaagaaagggaaagctgcaaaaaccgcgatgagcttgttcctgcacacacctgatgctaccaaccgtgagaaggagctcatgaaggcatgcacagaccctgagctggtggctgcaatcgtcgggaatgccaagatcacagcgcctggcctcactcaactgaagcagaaacagaagcagaaggggaagaagtctgcaaaacagaactagtgtgaaactggtgggtccaaagaactgatccatccccgattcgcaggaagtgaagctttgcctttgcagaaagtctgtggatgttgtggtttgtcagttgtcgctcgaggcgcatttgggggtatatgcagcctgtcagggagtacacccctttggcgtcacactggtgaggccagagcgacaggcacgcagtaggggacccaagctgcacgtctatgatgcaattgcgatatacagctcataataaaagaagtattgatttcatatgcaaaaaaaaaaaaaaaaaacccccctgtgataccctggaaagaattccgacatacatttcatgtgcaattcccactt

SEQ ID NO: 5291 - DNA, 1931 bp, Zea mays
  Clone ID: TF_ZmC12531_2
gaaatttattccggacatgtaatgccgcatcagtgatgcactgcccactcaaacatcagggaaaggctcaaagcacagttacagactttcagttgccgtttttgcaaaaggcatcaacgccatgccatggaagacagtaaaaaaaaataataaatagtttgaaccacgattacatatataataatctcagaacaaacaactatcgaaagggcatgaaccgacgacaggtagagttcatccccaggagataattggtatctatctatggctaaaacgaacaacaatatcaggcgcgtgcatccagctaatttctcccgaaccggacatgggtgttgctggcggcagccgcggcgaatcttgatgacgagaacccatgcttcctggcgctgggtgaataattccagttcggtgacatggtaccatggctgtgccctcgtgaagactcgggagtgaagtagtcacagccagacaagaattggtgattcggtgaagacatggtaccatggtagttgtgccttcgtgaaggctggggagtgaggtagtcgcaaccagacaagaactggtggtttgcgtaagacttcttgggagtagatggagagccccacccattggatttgtacttcttcaatggtagatcatctccaccagtccagccacccctcgatttgggtttatgacgaggtgtgcccactctttcctcgagatgggggcttttccttttgcttgtttttcgggcgtcataaggagctgatctagcactactggaagcctttttccatttctccttcctctgaatatgcgacgatgacttgcctttcgaccgatcggacttagcgttctttgtgcagccacgtgcaaagtgaccttcctcgccacatttgaagcataaggttggagttgtgacagcactggtttccctgcgtttggcacatcccagaccagaatgaccagattgggcacaattataacagctaatttgtttcggacaatcgtcagagaagtcggaacaacatagatggcccttctggttacacacgtagcatcttattttctcgatatcatctggtgggtaatcattggtacatccaaacatatcatgacctatttctccacattttaaacataatgtggattgatgatcattcctcctgtgcttatcagggcagtcctttgccatatggcctccttttttacagataaaacagtcttgaccctgcgtgcactgctttgcattgtgcccaaacaacccacaaacaaagcaaggcttctttcgcttttccaatggacagtttgcagctacatgcccttcctcgctacaattaaaacaagtctccaacagtgtttccccaggatcaaagtatctcggtatgcgaaggagcttccgcagaaccatattatcagatgcaggggcatcagccccattttcagttaacaccgattctgctgtcccaatgggctcctcctgggtgctacaaaccgccttctcttcctcgtccacggcggcccccgccgcagcggtcgcctccttccgttgccttttcctttgcttccagtgctgcctcttcttctgtttcctccggggctcatccgcctcagcgagctccaccacggcgtcctcatcgtcgccggaggacactgagagcaggttggcgaagccggtgactccaccgcaggacgcccaacgccgcttccgctgcgcgcgcgcgatgatctccaggctgaggtcctcgttccccacctcgtcgtcctcctcgtcgctcccgcccctgcgcggcttccgaaaaggcggggaaccatcttcgtccaggtctgagtcccaccgcgccctggagcgccagcgctgggccatcagcgttctgcggcggcgggtgagggacagagaaaaccaaataacgcgctcgatctcgaggcggcgcaagaaagtcccggcc

SEQ ID NO: 5292 - DNA, 789 bp, Zea mays
  Clone ID: TF_ZmC12531_3
tttttaccagataaaacagtcttgaccctgcgtgcactgctttgcattgtgcccaaacaacccacaaacaaagcaaggcttctttcgcttttccaatggacagtttgcagctacatgcccttcctcgctacaattaaaacaagtctccaacagtgtttccccaggatcaaagtatctcggtatgcgaaggagcttccgcagaaccatattatcagatgcaggggcatcagccccattttcagttaacaccgattctgctgtcccaatgggcccctcctcggtgctacaaaccgcattctcatccacctctacggcggcccccgccgcagcctctgtagtctccttccgatgcttcttcctttgcttccggcgctgcttcttcttctgcttcctccggggctcatccgcctcatcgagctccaccacggcgccctcctcgtcggcggaggacaccgaaagaaggtcggcgaacacgggcactccgccggctgattccccgcgccgcttccgctgcgcgcgcgcgacgatctccaggctgagatcctcgttccccagctcatcgtcctcctcgtcgcccccgctgtggcgcggctgccgggacggcggggaagcatcttcgtccaggtctgggtcccgccgcgccctcgagcgccagcgctcggccatcggcggctgcggcggcgggcgaggggcagagaaaaccctagcgcactcgatgtggaggaggcgccgacaataggatgggaaagccttcccagcgggtctccccgtctccggccggggtcgagg

SEQ ID NO: 5293 - DNA, 1299 bp, Zea mays
  Clone ID: TF_ZmC6609_1
gctgcgctccctccgagcccgagcccgagcccgaggaccgggctactgccgtccgccgcaagccccgtcctgcactcctgcatccgggaacgttttaccccgtccggccgtccccctcgttctttctctcccccttctctctcgctgcgacgactgggtaggctgccgccgccgccctacgccaggtcccgaggaccaaggcattcgtattcgtcagtctcttcgccgggcgacgccagtttggttggaacttggagtgtagagggaagatttggtgatgagcagccgcagcccgccgccgaaggaccgcaggatgcgtactgaacgcacctcataccgtggcgcaccatatcggagggacagccgccatggtccaagcaggtttcggaatgatttgtgcaacaattgtaagcgtcctgggcattttgctagagagtgtcctagcgtggctgtctgtcatacctgcgggcttcctgggcacattgcagctgaatgttcttccaaaggtacctgctggaactgcaaagagcctggccacatggctaacagctgcccaaatgaagggatatgccgtaactgtggcaagtccggacatattgcaagagactgcactgctccaccagtgccgccaggagaagtgatcctttgcagcaactgctacaagccagggcattttcgtgaggaatgcaccaatgagaaggcctgcaacaattgccggcagagtggccatattgcccgtaactgcaccaatgatcctgtttgcaacctgtgcaatgttgctggccacctggcccgtcagtgccccaagtctgatacattgggcgagaggggtgggcctcctcccttccatggtgttggcgctcccttccgtggtgttggcgttcccttccgtggtggcctcagtgacgtgatctgccgggcctgcaaccagattggccatgcgagtcgtgactgcatggctggtgctttcatgatctgccacaactgtggcggccgtggccacacggcatatgagtgtccctctgtgagtctcattgagaggttcccacctcgccgtttctgaaggacgtccaagggctatccagatgactgttgttttcagcccattgtgtcaagaacactcatttccgttttcttttttttttccaaaccctaatggattctagatctttcagattcttaacttgtcagcactatttgtgattccctaatggattctagatatttcagattaataactcgtcagcaccatttataattctggattttctaccaaaaaaaaaaaaaaaacctcgagag

SEQ ID NO: 5294 - DNA, 2439 bp, Zea mays
  Clone ID: TF_ZmC6609_10
gtaatttaaaaataactagccaaattgattacaaactgcaatcactaaacctatatgttacattttagaatgaacgattccatgtgaattttagcacacaaccaactacccctaggtctgtatcatttttcaatttgcaagcacaaataacaaagttttctaatactatcacagaactaatttatcacgatgatgggaaaagtatataatttacgaaaaaaaaatctactaatctatttccatcgaactgaagaatcaagaatgtaaagaggaactaggatgagcttggtttctgcctctcctggctggaggtgtcccaaacatcttgctcctttgggctcgaagcatatgagccacatggcatcccagtgcagccttctacatggttcacaagtgtatgatagaacaaatgattcaccatggaaaaccctagcacaaagggaggagggaggggggagggcaagtaccagccgccaccttacagggagaagaacaatgggaaggagctttgctggcattgcttctagtcttggtcctgttggcgcattggacgcgcgagggtcacatgacaacaaaacccagcctcaagtggcgatgctcctcctttccctctgggttgatgcgaattgggcttagaacaaatccaaccacatcattaccaaattctcttttggccgaaggcagttcctttcctggatgccgtggatctgcccctggaccacgccattccataggcttccaaatgaggcctttcaggacccttgtgacctaccatgggaacttgagcatgctcatagtgaaggttggtgatttttgtgggacatagccacataggattggattttagtctggttttggtgttttgctgtggacagaaagaagaccagaggtttgtgggagtatcgaaggtggtggtgattttgtagcgtggtgttgcagtttggttggaacttggagtgtagagggaagatttggtgatgagcagccgcagcccgccgccgaaggaccgcaggatgcgtactgaacgcacctcataccgtggcgcaccatatcggagggacagccgccatggtccaagcaggtttgagctaatctaagtcaaacaggacgagtgtttggcattgttcttccaaacatcactgcttcctcttgttatcatgtatatatttggctaaatgctatgtgaaattaccataattgttattttatttagatgtaaactttgcctatatttatcccattgcaaccacttatgcatgtatgtagcttaaataagggcacttgatattggttaatgtagcactatttttttttctgaaagtctagtaaaaagtgtatggtaaagtgatctgggattgaaattttttggatgaattcatgttgtgccatggttttaggagaaagcctatgcaggattgtaactagaaatgagtcatgacaagaatggtgaaattacttaaaaatttatgtgaatggaactgtaatatcttattattcagacatttggaatcttatgtatcctttagttatttccctttccattgtgcaggtttcggaatgatttgtgcaacaattgtaagcgtcctgggcattttgctagagagtgtcctagcgtggctgtctgtcatacctgcgggcttcctgggcacattgcagctgaatgttcttccaaaggtacctgctggaactgcaaagagcctggccacatggctaacagctgcccaaatgaagggatatgccgtaactgtggcaagtccggacatattgcaagagactgcactgctccaccagtgccgccaggagaagtgatcctttgcagcaactgctacaagccagggcattttcgtgaggaatgcaccaatgagaaggcctgcaacaattgccggcagagtggccatattgcccgtaactgcaccaatgatcctgtttgcaacctgtgcaatgttgctggccacctggcccgtcagtgccccaagtctgatacattgggcgagaggggtgggcctcctcccttccatggtgttggcgctcccttccgtggtgttggcgttcccttccgtggtggcctcagtgacgtgatctgccgggcctgcaaccagattggccatgcgagtcgtgactgcatggctggtgctttcatgatctgccacaactgtggcggccgtggccacacggcatatgagtgtccctctgtgagtctcattgagaggttcccacctcgccgtttctgaaggacgtccaagggctatccagatgactgttgttttcagcccattgtgtcaagaacactcatttccgttttcttttttttttccaaaccctaatggattctagatctttcagattcttaacttgtcagcactatttgtgattccctaatggattctagatatttcagattaataactcgtcagcaccatttataattctggattttct

SEQ ID NO: 5295 - DNA, 1153 bp, Zea mays
  Clone ID: TF_ZmC6609_2
attcggctcgaggcccgaggaccgggctactgccgtccgccgcaagccccgtcctgcactcctgcatccgttcacgttttaccccgtccggccgtccccctcgttctttctctcccccttctctctcgctgcgacgactgggtaggctgccgccgccgccctacgccaggtcccgaggaccaaggcattcgtattcgtcagtctcttcgccgggcgacgccaggtttcggaatgatttgtgcaacaattgtaagcgtcctgggcattttgctagagagtgtcctagcgtggctgtctgtcatacctgcgggcttcctgggcacattgcagctgaatgttcttccaaaggtacctgctggaactgcaaagagcctggccacatggctaacagctgcccaaatgaagggatatgccgtaactgtggcaagtccggacatattgcaagagactgcactgctccaccagtgccgccaggagaagtgatcctttgcagcaactgctacaagccagggcattttcgtgaggaatgcaccaatgagaaggcctgcaacaattgccggcagagtggccatattgcccgtaactgcaccaatgatcctgtttgcaacctgtgcaatgttgctggccacctggcccgtcagtgccccaagtctgatacattgggcgagaggggtgggcctcctcccttccatggtgttggcgctcccttccgtggtgttggcgttcccttccgtggtggcctcagtgacgtgatctgccgggcctgcaaccagattggccatgcgagtcgtgactgcatggctggtgctttcatgatctgccacaactgtggcggccgtggccacacggcatatgagtgtccctctgtgagtctcattgagaggttcccacctcgccgtttctgaaggacgtccaagggctatccagatgactgttgttttcagcccattgtgtcaagaacactcatttcccttttcttttttttttccaaaccctaatggattctagatctttcagattcttaacttgtcagcactatttgtgattccctaatggattctagatatttcagattgaagacggggatacttgcccttacgaactcaaaaaaaaaaaaaaaagacaaaaaacagaaaaaaaaaaaaagggcggc

SEQ ID NO: 5296 - DNA, 1245 bp, Zea mays
  Clone ID: TF_ZmC6609_5
cgttttaccccgtccggccgtccccctcgttctttctctcccccttctctctcgctgcgacgactgggtaggctgccgccgccgccctacgccaggtcccgaggaccaaggcattcgtattcgtcagtctcttcgccgggcgacgccagaaagaagaccagaggtttgtgggagtatcgaaggtggtggtgattttgtagcgtggtgttgcagtttggttggaacttggagtgtagagggaagatttggtgatgagcagccgcagcccgccgccgaaggaccgcaggatgcgtactgaacgcacctcataccgtggcgcaccatatcggagggacagccgccatggtccaagcaggtttcggaatgatttgtgcaacaattgtaagcgtcctgggcattttgctagagagtgtcctagcgtggctgtctgtcatacctgcgggcttcctgggcacattgcagctgaatgttcttccaaaggtacctgctggaactgcaaagagcctggccacatggctaacagctgcccaaatgaagggatatgccgtaactgtggcaagtccggacatattgcaagagactgcactgctccaccagtgccgccaggagaagtgatcctttgcagcaactgctacaagccagggcattttcgtgaggaatgcaccaatgagaaggcctgcaacaattgccggcagagtggccatattgcccgtaactgcaccaatgatcctgtttgcaacctgtgcaatgttgctggccacctggcccgtcagtgccccaagtctgatacattgggcgagaggggtgggcctcctcccttccatggtgttggcgctcccttccgtggtgttggcgttcccttccgtggtggcctcagtgacgtgatctgccgggcctgcaaccagattggccatgcgagtcgtgactgcatggctggtgctttcatgatctgccacaactgtggcggccgtggccacacggcatatgagtgtccctctgtgagtctcattgagaggttcccacctcgccgtttctgaaggacgtccaagggctatccagatgactgttgttttcagcccattgtgtcaagaacactcatttccgttttcttttttttttccaaaccctaatggattctagatctttcagattcttaacttgtcagcactatttgtgattccctaatggattctagatatttcagattaataactcgtcagcaccatttataattctggattttct

SEQ ID NO: 5297 - DNA, 2993 bp, Zea mays
  Clone ID: TF_ZmC11384_1
gtcctctccattctgccgtctcctctcctactcctcccccctgccgccgcaagatccaccagggctctcgaccgcaatggagccgcagctgacgcccggcgcggtggcggcggtctccgcccacgccgacggcaacggcacgctgcagccggtgctgcaggtggtggacgtgcggatggtcaacaacgccaagaacccctccgccgagcgcttccggatggtgctctccgacggcgaacacaccatgcagtccatgctcgccaccgccgagaacgcgcgcgtccgggacggctccatccagaagggctccatcgtccacctcctggagtgcacctgcagcaccatccagtctcgcaggatcattatcgttatcaaacttgatgttctgcaaagtgagtgtgccataattggaaaccccaggccctatgaaatgagaaaccaacctaatgagcagggcaccaacataccggccaatgctgctcaagctaatactggaacgtattccagtggccctggtcctctgtgatcacctgctgcttctgaacgagcacaagttgctaataatgtaccatacagtggtttttattaggtgcctcatggtaatggcatccctgcgtccatgtgtgcaggatgcaaaccacccccttttatgtttgtgtgtgaagttagaactatgtatcagtacttctttatgttttcgtcttataaatcctcgttgctgtgtcaaaaaaaaaagaactctcaccagaaccaaaggtttgcagttccttccatggctggtggcagtggtgctcctgggaatacatatggacaacctgcacagtcgttttatcagcaaccgcctccagggcatatgaatagaactcctgtgtctaagaacgatgcatatcgtcttgtcccattggctcaattgaacccttatctagataaatggacaatcaaggtcagggtaactgcaaagactgatctcaggttctacaacaatgctagaggtgctggaaaagtcttttcctttgatctccttgatgaacagcgtggagaaatccgtgcaacatgcttcaatacgcaggctgatcagttttttaacctcattgaggttgataaggtgtacctgatatctaaagggtcgttgaaaccagcacagaagaagtttaactccttgaatcacgagtatgagataagtctggattccagaacatctattgaagtttgtgctgatgatgatagcaacatccctaggcagcagtataatttccggaagataagtgaaattgagaacattgagaaagatgctattttggacttgattggaattgtcacatcagttggcccttctgtcacgtttatccgaaaggatggcgtggaaacccagagaagaacacttgaactgaaagacatgtctggtcgaagtgtacaacttaccttatgggggaagttgtgtgttgctgaaggcaaccagctgcagtcgctgtgcgattctggtttgaatcctgttctagctttgaaaggtgcccgcgttactgactacagtggtagatctgtgtcctcagccggctcaactcagttaaaaatagacccagaaattcctgaggctgagagtctgcggcgctggtacgcaactggaggaaagacagctgcttgtgtttctctgtcagtggtaagtatgggtggtacttgtgtccggaaatcaatcgctcagatcaaggatgaaaatctggggcagttagagaagccagactttatcactgttaaagctgcaatttcacatctgatagcagacaatttttgttatcctgcttgcaccattgatgtgaatggtaggatgtgcaacaaaaaggtaacagataatggtgatgggacatggcgttgtgacaaatgcgaccagagcttaccaaattgtgagtacaggtacgtgctgaatggccagatccaggaccacagtggggtcaccaattttactgcattcgaagatgctgctaaggtgatgattggccacagtggccacgagctcaacaacattagtgtagaagactcggaacgatttgcagagatcttgcaggcggctcgttggcagcagtttctgttcacgctgaaagtcaaggaggagatctataatgatgcgccgcaagtcaagtgcaacattactaaagcagagaagctggatccggcaatagagagttcttaccttctaggggtaatcaatggcctgttgcaggatgacactggctcatcttctggggcgcaaggtgccatggcctacaatgctggtatcagcaacactggcgctggacgaagtgtgccaaccaccaacagtgcctacaccaccaatttgagtggtccaaggtatggcgagtctgcaaaccagctcgcgcagcaggaaagcacgtacaccggggtgaccactccagtgtcggcggcacggaatgtgcagcagacctgcgtgtcttgcgggtcaagtgggcacaacgtgcagaactgccctgcaggaacgtacaggcagcaggcggctgcaagcgcagcaagctcctacggttcttcgcagcctcgcaatggactgtgcttcaaatgcaatcagcctggacactttgccaactcttgtccactactggctcctgctccccagcagcagcagcagcagtatcggagcggcggcgctccctcaggcggttatggtaggcagcagccctatgttggggctaccaactactgaaagtcattatctctgtcgagtcaggcgtgatgttggttttgcttagatgcctgtcctgaatggcatcgctgcgtccatgtgaagtagatgcaaaccattcctttttatgtttgtgtgtgaactatgtatcagtacttctttatgttttcgtcttataaatcctcgttgctgtgtcagttctgttgaattcgtttcgtggtttgtctccctgaataactcactgtatggtgggtgtaaattaaatggaaatcacttatcaggagacaaaaaaaaacgaacagag

SEQ ID NO: 5298 - DNA, 3096 bp, Zea mays
  Clone ID: TF_ZM3971.C7.o8.fg
atggattgctacaactttggagagcttggtcatcttgctcatcaatgtaacaagcccaagaagaacaagttcaagggcaagaaagaagatgacaacgatgatgagaaaaaggaaaagagattcttcaagaggaaggatgggaagcacaagaggtttcacaaaaagaaaaatggaaaggcatatattgttggtgactggctcactgacattgagtcatcaagtggatcttcttcaagtgaagaagaaaatgatgaaaaagttgtcgccatcattggggacttctctagaccaccaccatcgccatcatcgacttctcacctatgcctcatggctagaggtgaacggaaggtacaaaatgataatgatattgacgatagtgatagtgatagtgatgatgaatttgcttcaccttcctatgatgaactaactgacttgcttaaagaatacactcaaatcattaggaagtcaaaatctaaatatgctaaggataaatgtgagaagttaaatgaagctaatagggagttgaaagatatactagtgaaaatcaaggaagactatactaagattaaatttgatcatgataatcttcttgttgaaaatgaacttttatcttgcaatacacatgaggctattaaccatgttgttaagattgatgtagcaacctcatgtgatgatttgagtcaaggagatcaaactagtctacatgatgaattgactgaaaaagttgaagtcttgacattagacaaccaaaaattgaagagatacttgactgatgcaactactaggggaaaggttgccattgagaacaatgatttcaacaatgagttggcagtggataatgaaaggcttaaaaatgaggtcaagaaacttaagagtgaaaatgaacatcttgcaacaagtgtgcaaaaattcaacaagggccaatacctccaaaatgaattgttcatgaacactgtcataaaaaacaacaagagtggtattggatacaattcttttgtgcaaaagaaagctgcaactcaatacaagccaaagcaaactcataagcctattaaatgctttgagtgtggaaaagagggtcattttgcccacaattgcaaagctaaaccaccaactcccttgcctaagcacttaagaccatttgccttcaatgctcattatgttctaagaaaagtagcaaatggaaaggtgaactacaagaccggtgggagccattgggttattgatagtggatgcacacaacatatgacatgcaacccacggatgttcacctcacttgatgagaatgttgatggacaagacaaaatcacatttggggataattcaaaagggaaagttcaaggacttggcaaggtggcaatttcaaatgatctatcaatttcaaatattctcttagttgcacctttgagcttcaacttattatcagtggatgttattgtatcaaaaatggatgatgaatcaatggtgttcaaaggatttagatacaacaatctctacttagtggatttcacccctgaagatgtagacttaagaacttgcctcttcacaaaagcatcacttggatggctttcgcataggaggcttgcacatgttggaatgagcacactcaagaaagtattaaagaaggacatggttagaggattaaaggatgttgtatttgaaaaggacaagccttgtagtgcattgatagttgatgatttctcaagatacacttgggtgttctttctccatgataaatctgaagttgcatctatattcaagaagtttgccaagaaagctcaaaatgaattttattgcaagatcaagaagattagaagtgataatggtaaagaatttgacaacaccaacattcatgaatattgtgatgagattgggatcaagcatgaagtgtcagcaacatatacacctcaacaaaatggagttgttgaaaggaaaaacaggaccttgatcacacttgcaagaacaatgattgatgagtataacacaccagagaggttttgggctgaagctgtcaacactgcatgttatgcatcaaataggttatttcctcaccgactacttgcgaagactccctatgaactgctaaatgggaaaaagccagacgtctccttcttccgggtgtttggatgcaaatgctacatctacaagaaacgccatcacctcgggaagtttcaaagacgttgtgatattggttttctattgggttattcatcaaagtccaaagcatatcgagtattcaatcatgccactggcgtgttagaagaaacatatgatgtggaatttgatgagactaatggctcccaaggagcacttgaaaatcttgatggtgtaggtgatgagccacttagggaagctatgaagaacatgccaattggagctatcaaaccaaaagaagatgaagaagaggtgcaaaacattgacatgccttcttcatcaagtgtaccacaagatgatgaaaaagatgagagacatgcaaatgaagacacatttgtctctcatgaacaagcaagggatccggactgggtgaacgccatgcatgaagaactaaacaacttcacccgtaaccaagtttggaccctggagaagcccccacaagatgcaagaatcattggaacaaagtgggtgttcagaaacaaacaagatgatgaaggtgtgattgtgaggaacaaggcaagacttgttgcaaagggattctctcaagttgaaggcttagattttggagagacctttgcaccgcaaccacctgggtttgaagaccctagatatcctaaccatgcttacaggttgtccaaggcactatatggattaaagcaagctccaagggcttggtatgagcgtcttcgtgacttcctcatcgaaaagggcttcaagatcgggaccatcgacacaactctattcacaaagaaacataacagtgatatattcatttgtcaagtatatgttgacgacataatctttggctcgacaaatgactatcattacaaggaatttggtgagttaatgtcgaaggggttcgagatgtcaatgattggtgagctgacgtacttatttggctttcaagtcaagcaaatgaaagatggtaacttcctctcacaatag

SEQ ID NO: 5299 - DNA, 539 bp, Zea mays
  Clone ID: TF_jC-zmshLIB3587P037h11b1
gcgctgcatgcgctgaggcgcgccatcacggacgaccccaagaagctgacggagaactggtgcgggcccgacgtgtgcaactacttcggcgtgtactgcgcgccggcgcccgacgacccctgccagcgcaccgtggcctccgtggacctcaaccacggcgacctcgccgggacgctccccgaggagctgggcacattgcagctgaatgttcttccaaaggtacctgctggaactgcaaagagcctggccacatggctaacagctgcccaaatgaagggatatgccgtaactgtggcaagtccggacatattgcaagagactgcactgctccaccagtgccgccaggagaagtgatcctttgcagcaactgctacaagccagggcattttcgtgaggaatgcaccaatgagaaggcctgcaacaattgccggcagagtggccatattgcccgtaactgcaccaatgatcctgtttgcaacctgtgcaatgttgctggccacctggcccgtcagtgccccaagtctgatacattgggcgag

SEQ ID NO: 5300 - DNA, 846 bp, Zea mays
  Clone ID: TF_ZmC515769_1
cggccgctcgaggcgatggcgcatccctctagtcttgtcccctcccgcggctagggtttcctccgcttcgctctcgcagaatgcctcgctacgatgagcgtgatcgttatggcggcaacacaaggctgtacgtgggtcgtcttccctcgcgcacccgcacaagggaccttgaagacctcttcggcagatatgggagagtgcgacatgtggatatgaagcacgagtttgcatttgttgagtttagtgatcccagggatgctgatgaagcaaggtacaatcttgatggtcgtgactttgatggaagccgcatgattgttgagtttgctaaaggggttccgcgtggccaaggaggaggaggtgaccgtgaccgtggccgtggtggtgaccgtgaatatatgggtcggggacctcctcctggttctgggcgttgctttaactgtgggattgatgggcattgggctcgtgactgcaaagctggcgactggaaaaataggtgctatcgttgtggagatagtggccacatagaaagggattgtcagaacagccctaagaacctcaagcgtggaaagagttactccagatctccatctcctcgccgcggaagggtgcgtgataggagctacagcaggagccgcagtaggagctacagccgctctgtttccccaaggagggatgaaaggcgatcaaggagccctcgcgacagtcgcagcccaaggaggagcccccgtgacagtcgcagcccaaggaggagcccccgagacagtcgcagccctatgaagagcccccgtggcagtcgcagccctatgaggagcccccgtgacagccgcagccctatgaggagcgctt

SEQ ID NO: 5301 - DNA, 6282 bp, Zea mays
  Clone ID: TF_ZmC951_402
ctactggaccgctgccaagtgagcctgctgttgagtgagagtctggagaatctccgcaagagcagggtcaatggcaggaggggcagcaggggcagcaccattggaactcccagcctcatgatcatgagaacgtggaagcataggaggcggaggtggaatcccaaaatcatcatcatcattatcatcatcatcatcaactgttgtgtcctgagcttcgaactgatgaagagcagtatcctcggcctgagtgtcaaatactggagcaggtgctggcacaggatcctcaggcgctggacggtaggacccaaagaggaggtgtgaggcctcaagtgtgccctggaactgtggaggccgaatcagctgagcaaaaatgtgacacagatagtgagcataaggcagctgtcgacgagcacgcagaccatccagtacggtgtcctcgatctcacaaataaggaaatccacaacatcaaactctgagtgagagactagggcaccaagaagccagagctggatatgagtggcagcctccctgtaccccatccgcggcagaagtgtccgtctcataagctgatataaaaactttgctgctgtggtgaagtctgccggagagcgtcgcgacccatcaggagcaacaccaccgtgagggtgacgaggagggtcagaggtgccatagcataagttgtgaagacgagtcgatgactcatgaaatccaaatagctggcgaatctggctggcatgaatagtgacatcctctcgctcaaaacgaaatctcatccagtggtgatcagggtcgatccatacagtagcgtagaaaactcggacccattcctcaacatatctgccgctggtagtcaaaagagtgagaagtccaggcagataggagagatgaacctcagagtcagcaccggggctagcagaaaagcgggaaggtccaaaagctggtgcacatgcagagcaatctgtgcagacatctgggccctgaagaaggactcctgaatcctggtgctgaagagatcgacggcaacagtgtccctctgagccggtagccaggtctccatgggtacgtgtctgaaccgatgtacccgtgccgctcagtctcatcgcgctcccggaagcgagcaggtgggataggaggagcagaagcgggagcaggaggaggagcagtggaagatggtgtagtggaggtggtggatggcgcagcagggtgacgggagcaggcaaagtgggtggtggagtggaagcagtgatgggagtggaggagcgaggccgggaggcgaggcgacgaactcggtacgcaatctgatctgaaggagtctgtggctgatctcctagctcggcctgctcagtggctgttgctgccgctgctcgggctgctctgtccatacgccgcttcctgcggccttcctgctgctccaagtacatggtctttcccttgacctgcctgaaggggcgacgaggatcctcatcatcgcctccccctggcgccgacacattcttcgtgcgcggcatcctgacctgacgaacgagaggtgaaaatccaggcaggacaggagacggctcacgggcaggcaaggtcactccctcatctaggtcgagatgtccatttgttggcataggtgtcttgattggtttgcacttctccatgttgaaccttttcaacaagtctttggtatacttctcttgtgagagaaagttaccatctttcatttgcttgacttgaaagccgaggaagtacgtcagctcaccaatcattgacatctcgaactcttgacaaatgaaaatatcaccgttatgtttctttgtgaatagagttgtgtcgatggtcccgatcttgaagccctttttaatgaggaagtcgcgaagacgctcataccaagcccttggagcttgctttagcccatatagcgccttggacaacctgtaagcatggttaggatatctagggtcttcaaatccaggtggttgctcaacatatacaagttcatttatgaagccatttaaaaatgcactttttacatccatttgataaagctttatatcatagcatgatgcatatgcaaggaggatacgaatggcttccagtcgagcaaccggtgcaaaggtctctccaaaatctaagccttcaacttgagagaatccttttgcaacaagtcttgccttgttccttacaatcacaccttgatcatcttgtttgtttctgaacacccactttgttccaatgattcttgcatcttgtgggggcttctctagggtccaaacttggttacgggtgaagttgttaagttcttcatgcatgacgttcacccagtccggatcttgtagcgcctcatctatacaagtaggctcaacacaagaaacaaaggagtgatgttcaataaaagaagcatgtctatgtgatcgagtaataaccccttgtgaaggactcccaatgatttggttttgaggatgagcttgaagtagtgatgaatttctcctgtcaaccacttgggaagaagatcctggagcatcaacatcttcagcttgtatccttgcttgttcatgagagacaaatgtatcttcatttgcatgcctctcatctttttcatcatcttgtggtacatttgatgaagaaggtctgtcaatgttttgcacctcctcttcatcttcttttggtttgatagctccaattggcatgttcttcattgcttccctaagtggctcatcacctacatcatcaagattttcaagtgctccttgggagccattagtcacgccagtggcatgattgaatactcgatatgctttggactttaatgaataacccaataaaaaaccaatatcacaacgtctttgaaacttccctaggtgatgacgtttcttgtaaatgtagcatttgcatccaaacacccggaagaaggagacgtctggctttttcgcatttagcagttcatagggagtcttcgcaagcagccggtgaggaaatagcctgtttgatgcataacatgcagtgttgacagcttcggcccaaaacctctctggtgtgttatactcatcaatcattgttcttgcaagagtgattaaggtcctattttttctttcaacaactccattttgttgaggtgtatatgttgcagatacttcatgcttgatcccaatttcatcacagtactcatgaatgttggtgttgtcaaattctttgccattatcacttctaatcttcttgatataatttgtaggtccaaataaatccatatgaagtagttccagtggccttgatgttgacataaaagcttttgtaggatgtgtgttagcaacttgcttcccagcttgacatgcactacatggcttgtccttttcaaataccacatcctttaatgatctaaccatgtccttctttaataccttcttgagtgtgctcatcccaacatgtgcaagcctcctctgttggagtgaataagcattgaattccaagatcacagagttgacccacttgccaagtctttgcactttcccttttgaattgtctccaaatgtgattttgtcttgtccatcaacattctcatcaagtgaggtgaatatccgtgagttgcctgtcatatgttgtgtgcatccactgtcaataacccaatggctcccaccggtcttgtagttcacctttccatttgcaacttttcttagaacataatgagcattgaaagcaaatggtcttgagtgcttaggcaagggagttggtggtttggctttgcagttgtgggcaaagtgaccttcttttccacactcgaaggatttgataggcttgtgagtctgctttggcttgtattgagtagtagctttcttttgcacaaaagcattgtatccaataccactctcatttttaagactttcattatccactgccaactcattgttgaaatcattgttctcaatggcaacctttcctctagtagttgcatcagtcaagtatctcttcaatttttggttgtctaaagtcaagacttcaactttttcggtcaattcatcatgtaggctagtttgctctccttgactcaaatcatcacatgaggttgctacatcaatcttaacaacagggttaatagcctcatgtgtattgcaagataagagttcattttcaacaagaagattatcatgatcagatttaatcttagtatagtcttccttgattttcactagtctatctttcaactccctattagtttcatttaacttgtcacatttatccttagcatcttttagggaggttgtgagctcatttacagtggatgacatagttttgttctcttctttcatttcatcactagctttcataactatgtcatatttggcatttaaagattcattttcatttttcaacttatcacatttagcttttgacttcctaatgatttgagtatattctttaagtaagtcagctagttcatcatatgaaggtgaagcaaattcctcatcactatcactatcactatcatcaataatatcaatatcattttgtaccttccgttcacctctagccatgaggcataggtgagaagtcgatgatggcgatgatggtggtgaagagaagtccccggcgatggcggcaacttttttatcattctcttcttcacttgatgaagatccacttgatgactcaatgtcagtgagccagtcaccaacaatatatgcctttccatttttctttttgtggaacctcttttgctttccatccttcctcttgaagaatctcttttcctttttctcatcatcgttgtaatcttctttcttgcccttgaacttgtttttcttgggtttggtacattgatgagcaagatgaccaagctctccacagttgtagcaatccatctcagaaatgggctttcttttgctggaaaagaatttcttctttcttgaatcaaatttgatgccttctctgttgagcttctttaacatcttggtggtcttcctcaccatcaaggcaatgttagcatcaagatcatcatcacttgaggattcttcctcaatttgtactttagcttttccttttctttcttgatttgctttgagagccaaattctttctcttggaagatgactcatctttgtcattgatgtgcatgtacatctcatgagcattgatctttcccagtatctgtataggtatggtaactgaaagatccatttgatgtagcacagtgacaatgtgtccatatttgtctattgggaggacactgagaatcttcctcacaacatccggttgtgagatttgtgtaagccctaatccatttacttcctctacaagaatattgagaattgagtacatagcattggcattttcattagcaagcatttcaaaagaatttaactttctcatagcaatgtgatatctctcctcacgctcacttctagttccttcatgtagagcacaaatgtccatccacaaatcatgaggatttttatgatttcttactctattgaacacatctttgcaaaggcctctaaaaagggtgtttttggccttagcattccatttctcataattaaactcatcacctacaagatttgtgggatctctaggtgcggggaatccttgtgtggcggctttgtagacaccaatgtctatagcctctaaatatgcttccatacgaattttccaatatggaaaatcgtcaccataaaaacgggaggaggtccatccccaccggacatcgttactcggtgcgccaacggcgcgccaacggtcgactccaacggctagttctgacaagtagtcgttgggcatttgtctaccctgtcggaaggccgtgatgatagaagcatcagaaatacgaggtatcgtacctcgcaccttggtgaagcgggagatgaacttccggagagtctcccctggctcctgcctcactgcatggaggtgggcctccacaccgtgcttttggtaagcactggcgaagttcgccacgaaccgcgcaaatagttcttcccatgagtagacggccaaggggacacccgtttgggaccgggtgcccattggtgtctgcggtgcaatcgcagcaaagtcttgattgaggtcgcgaccatcgatgtttttgcgacgctcacgcgccctttccaaggatacccaagcgtcctctcccgcacgcctgcggttgagctctgcccgaaggtcgttggtctgtgcgccccttactgagggcgagcgcacagatgctggtgcctcgtgttggcgtcgggatgaccgtgtcttcaacctggtcgaggtagaatgcaccatactgagcagttggtcgacatcgtcccgccattgcttcat

SEQ ID NO: 5302 - DNA, 2003 bp, Zea mays
  Clone ID: TF_ZmC12531_1
tccttcccttctctcctttttttttttttctttgttcacagtagaaataatcagtttcaaccgcgcttacatatgtaaatatgtaatctcagacaagacacctatctaagggcatgaaccagcagctagagttcaaccccaggagataactgttatcaatggctaaacaagcaacaaaaacagacacgtgcatccggctagcttcttttgaaccggacatgggtgttgctggcggcgaatattgacgacgagaacctgtgtttcctagcaccgggtgacgcggtaccatggttgtgccttcgtgaggactggggagtgaagtagtcaccaccaccagacaagtactggtgattcgtgtaagacctcttgggagtagctggtgaaccccatccattgggtttgtacttcttcgatggtagatcgtcatcaccagtccaaccacccctccatttcgatttatgattagatgcgcccattctttcctcgaaagaggggctattgcttttgcttgttgtacaggcatcatgaggagctgatctagcactggaatctttcttccatttttccttcctccggatgtgtgatggtgacttgccatcgtttttccatcttcccttcctctgactgtgtggtgacgaccagccttttggcccatcggacttggcattcttcgtgcagccgcgtgcgaagtgaccttcctcgccacatttgaagcataaggttggggttgtgacagcactagcttccctgcgttgcttagcacatcccagaccagaatggccagattgggcacagttataacagctaacttgttccagagaattgtcaaagaagtcggaacaacatagatggcccttctggttacacacgtagcatcttattttctcgatatcatctggtgggtaatcattggcacatccaaacatatcatgacctgtttctccacatcttatacataatgtggattgatgatcattcctcttgtgcttatcagggcaatccttcgccatatgccctccttttttgcagatgaaacagtcttgaccctgcgtgcactgctttgcattgtgcccaaacaacccacaaacaaagcaaggcttctttcgcttttccattggacagtttgcagctacatgtccttcctcgctacaattaaagcaagtctccaacaatgtttccccaggatcaaagtatcttggtatgcgctggtcacaagtagaagtaacacaatgtcaagtgttcaagtataagtgaactgcccacctctcccgatcaacttaagcttttggccgaactggtcagtgcatgcaatcaaagctagaggtctcaagctcgaatcaaggagcttccgcagaaacatactgtgagatgtaggggcatcagccccatcttcagttagcaccgattctgctgtcccaatttgctcctcctgggtggtaccaacctccttctcttcctcgtccacggcagccgcagccgcagcagcagcggtcgcctccttccgttgccttttcctttgcttccagtgctgcctcttcttctgtttcctccggggctcatccgcctcagcgagctccaccacggcgtcctcgtcgtcgccggaggacaccgagagcaggttggcgaacccggtgactccaccgcaggacgcccaacgccgcttccgctgcgcgcgcgcgatgatctccaggctgaggtcctcgttccccacctcgtcgtcctcctcgtcgctcccgcccctgcgcggctgccgaaaaggcggggaaccatcttcgtccaggtctgagtcccaccgcgccctggagcgccagcgctgggccatcagcgttctgcggcggcgggtgagggacagagaaaacctaataacgcgctcgatctggaggcggcgcggagaagtgggatggtggcagcgccgcagcggcaatttttcggcagcggctcgggaaaatcaatttgcctgcggctgtccagaaaacgaccagccggccagcctcgggggtacc

SEQ ID NO: 5303 - DNA, 568 bp, Zea mays
  Clone ID: TF_ZmC83001_1
tgtgactgtgattaccgcacaacgcacgccttcatacacgtgcatgctaacaaacttgcactcgcgccgggcacgcacacgaacgcgacacacgctaaccacggcaacatgcagacacacgcacacacatcgacctgaccagcgcacacacacccggtgtcgagtttattcctaacaatctccccctaaacacggcacggctttctgcactcacaggagcgtcgcctcctcttcggcattggcgaatagtgcctcttccttcttcggcttggggcagtcccgtgcaaagtggccgcggttgccacagttgaagcatttgccgatcgtcgacttcttcttttttcgagctttccactcggcctccgtgaggaggagctgatcgtcgcgccgttcaccaccggcatgagtacgccgccgagaacgctcatcgaacgccttgagacgtccgagcgcctcctcgaacggcatcgtctcgacgtcgcagaactgctcgatgcccgcgacgacggggaagagccgatctggaacggtgtcgaggagcttcttcaccatggcagcgtcgtcgagc

SEQ ID NO: 5304 - DNA, 1339 bp, Zea mays
  Clone ID: TF_ZmC6609_3
gttttaccccgtccggccccgtccccctcgttcttttcccccttctctctcgctgcgacgactgggtggagtaccgcccccgccccctcaccctcaccccccgacgccgacgccctaggcggctacgccaggtcccgagggacgggcccttcatcttcgtcagtctattcgccgggcgacgagcacccgccagaaagaagatcagcggtttgttggagtatcgaaggtggtgatttcgtagcgtggtgttgcagtttggttggagcttggagtttagagggaagatttggtgatgagcagccgcagcctgccgccgaaggatcgcaggatgcgtactgaacgcacctcataccgtgatgcaccatatcggagggacagccgccatggtccaagcaggtttcgtaatgatttgtgcaacaattgtaagcgtcctgggcattttgctagagagtgtcctagcgtggctgtctgccatacctgcgggcttcctgggcacattgcagccgaatgttcttccaaaggtgtttgctggaactgcaaagagcctggccacatggctaacagctgcccaaatgaagggatatgccgtaactgtggcaagtccggtcacattgcaagagactgcaccgctccaccagtgccgccaggagaagtgatcctttgcagcaactgctacaaaccagggcattttcgtgaggaatgcaccaatgagaaggcctgcaataattgccggcagagcggccaccttgcccgtaactgcaccaatgatcctgtttgcaacctgtgcaatgttgctggccatctggcccgtcagtgccccaagtctgatacattgggtgagaggggtgggcctcctcccttccgtggtgttggcgctcccttccatgatgttggcgctcccttccgtggtggcttcagtgacgtggtctgccgggcctgcaaccagattggccatacgagtcgtgattgcatggctggtgccttcatgatctgccacaactgtggcggccgtggccacatggcttatgagtgtccctctgccagtctcatggaccggttcccccctcgccgtttctgaaggaaggacatccaagggctgttcagatggctgttgttttcagcccattttgtcaggagcacctgttttgctttgctttatgtatttctaaacccgaatggattctagatatttcagattcataactcgtcagcgctatttgtaattctggatatgttacccgactccgatgttcttgatgataatgtttgaagacggggatacttgcccttacgaactcaaaaaaaaaaaaaaaaaaaaaaaaaaaaaaaaaaagcggcc

SEQ ID NO: 5305 - DNA, 752 bp, Zea mays
  Clone ID: TF_ZmC218_59
aggacgcgtggggcggaggaggcggcggcggcggtggctgcttcaagtgcggcgagcctggccacatggccagggactgctccagcggcggcggcggctacggcggtggcggcggcggtggtggtggcggctgctacaactgcggccaggccggccacatggccagggactgcccaagcggtggcggcggtggcggagggaggttcggcggcggcgggggtggaggcgaccgctcctgctacaactgcggcgaggccggccacatcgcccgcgactgtcccacgtgaggtgtgtccgcgtccgtccagccagccagatcggatcggatcgctccaccacctgctggtctgatggcgccgcccccttctagatctcgcttaaaaaaacacccccctctcgctgtgtgtcggagtaccgctttagttttgccgatccgggcacgagtgcccgctgcctctttcctctcatgcgtaagaggaacccgtccgccgttttcagatttcgttcggtccgtagaagaactctcaagttaagttaagttatcatggtgtgtgcttggtcgttgttcgtcgtcgtcgttaaggttttaagagatgatttggtcctgtgttgccgaggggaagtcgaatctgcttttttctttttttgtggtttgttccaccagactgaggaaggagatgagatgattattctcccagattataatcctgcctgcttgtgcttgatttggttaaaaaaaaaaaaaaaaaaaa

SEQ ID NO: 5306 - DNA, 1527 bp, Zea mays
  Clone ID: TF_ZmC71_35
ctatatcatcctttgacagtcctccatgttgtaggccttgattttccgcacatgatgattcttcaattcctttctagcacaagttacaatcttgggttgcctagttatatatgaatcaaatgacaagttaggagtaggatttttaccaatgggacaatctttgcattgatgtcccttcttccggcatgtgtagcataggcgttttccaagttttgaagatttcttctttcgttgtttgttgcttgctacatggttagtaaaaactttcttttctaacatcatgcatttttgttttaaatagggacaagatttaactaagtgtcccttctttgagcatttaaaacaaagtctatcatccttgttaataatcaagccatttttaatgtagggacatgacctaatcaagtgtccctcttcaaagcattcattgtacttcttatttatcttagtgtgaagtgtggcttgatcattaccttggatgttaccttttgtggaggcgaggttgaggcttttggaggaggtattgaatttcctcttttgtttcctcctcttggcaatcctcaagtccttgacattttcttcaagggatgtagtgcatgccacggttgttcccgtctcaagctccttcaccatgtgatcacggttatcttgagaaggtcgggcaatgcacttcccttttagttgtgtcaagctcttctttagcctctcattttcttctttgagcttttgataggtatcatcatttgttcctgcaaattcttgctcaaaggaagatttgctttggaccaaatcaacatgagagcactttagctcctcatgttctttagtcaactcgtcaaagtgttgcatcttcatggagagaatatcttctagcctttgacgagcttcgctttgctctctcgctctttctagaagtttgagcatgaccgccttatcttcttggcttaggcgagcgtagagttgcacaaagctcctttcttcctcctcatcctcgtttgtgcttccgctatcattttcattagccacacaacacatttttggagaggtggattcatcgtttggtctccatcgttcattttctccttcttccttgcaagggttagtatcacaaaaactaaaggaagttgaggcattaaatgaactattatgtttggactcatcaaacttgattttaattctagtccaaatatcatgcgcatcgggaatggattcgtcatagtttgatatgaaggcacgataatcttctttgctaagagaattgtttaagatgtcaaaagctaggtagtttaagcgataacatctttgatcctcctcggaattaatttttccattaaaactagagggaaaaatactcttgtcaataatttgttctaattgaggatgtatggttctaaaggcatttatcacactagtagaccatgaatcataattagaacaatcatcaagtaatatctcaagagttacctccttttgagttgcgttcgttggaggagtcttcttgttcttttgggatcttctacgagccat

SEQ ID NO: 5307 - DNA, 1093 bp, Zea mays
  Clone ID: TF_ZmC17063_1
caatccgtgccaaacacggggggaggaggtcagatcggcggtggcggtgacggtggcggtggtggcggcggcggatatgtaaatgcgggcgtggaggtggaggacaaggcgtgcccctgcggtgtcgggagctgcctcgtgctcacgtccaacacgccgaagaaccccggtcgcaagttctacaagtgccccatgcgggatgggggttgcaacttctttgagtggtgcgatgctccatctcccgcccctgccaatgcacgaaataacatggttgtacactcagagacatcagcaacagatatgctttgcccatgcagtgctggaacttgcttaattctcaccacaaagacagggaaaaattctatttctggtgcacgacggggacaaatcacccagggtggtggtggtggctcttgtggctttttcaagtggtgtgacgagctacagcctagggttggtgcaccactgcaagcttcagcgcaataccaagcggattccatgccaagcatccaaaaccccagccagaggagctcgtcttcctgcttcaagtgcgggcaggagaaccactgggctcgagactgtccgaatcaaccgtcggatccttatcctgacaagggtgggagaccagtagctccagcgggctcacctggtgcgtgctacaactgtggtcggtccggccactggtcccgcgactgcccaacctcgaatagtggtggtggtggtggtaccggcaccagccgtgccaggtcgtcctcagccttgagctcgtggaatagtcagagatactgataggaggctcctgtgaactcaattgaactgacatggacatgctgtacgaaacttggacaattgcccccctccacgtgttgcttaggtatgtgctcacgtcgatgccttttgctgctctacgctatctctatatgtaagagagaactgttgctgttctctgtcttcaccctcaccctgttttatgctcctatctctgtcgaacttgggtatactgtttttttatctactctaggatttttttcatataaaatattgtatgtgtgggtctaaggagaaccatatcgtccaagcatttctttccatg

SEQ ID NO: 5308 - DNA, 830 bp, Zea mays
  Clone ID: TF_ZmC17063_2
caatccgtgccaaaaaggggagatgaagtcagaacggcggtagcggtgacggtagcagtagtggcagcggcggatatgtaatagcgggcgtggaggtagagagcaaggcgtgcccctgcggtgtcgggagctgcctcgtgctcacgtccaacacgccgaagaaccccggtcgcaagttctacaagtgccccatgcgggatgggggttgcaacttctttgagtggtgcgatgctccatctcccgcccctgccaatgcacgaaataacatggttatacgctcagagacatcagcaacagatatgctttgcccatgcagtgctggaacttgcttaattctcaccacaaagacagggaaaaatgttgggaggcagttcttttgctgcccattaaatcagggtggtggtggtggctcttgtggctttttcaagtggtgtgacgagctacagcctagggttggtgcaccactgcaagcttcagcgcaataccaagcggattccatgccaagcatccaaaaccccagccagaggagctcgtcttcctgcttcaagtgcgggcaggagaaccactgggctcgagactgtccgaatcaaccgtcggatccttatcctgacaagggtgggagaccagtagctccagcgggctcacctggtgcgtgctacaactgtggtcggtccggccactggtcccgcgactgcccaacctcgaatagtggtggtggtggtaccggcaccagccgtgccaggtcgtcctcagccttgagctccgtggaatagtcagagatactgataggagggccctgttgaatcaattgaactgacatggacatgctg

SEQ ID NO: 5309 - DNA, 308 bp, Zea mays
  unsure (1)..(308): unsure at all n locations
  Clone ID: TF_21626426
gcacgaggccagatgggggacatctaccctttactattgatcctggataccatgatctagtctgctataactgcggtgaacctggtcattttgtgggcatttgttcaaaaccaaaaatctgtttcatctgtgggattccgggtcaccatatgaatgaatgccccgcttggaaagtgttgacgccttttcggagcgccaaatactcaagaagatgtaatacccactttgtaagaaaaaaaaatctaaaaggaggnaattatataaaaaaaaaaaaaaaaaaaaaaaaaaaaaaaaaaaaaaaaaaaaaa

SEQ ID NO: 5310 - DNA, 751 bp, Zea mays
  unsure (1)..(751): unsure at all n locations
  Clone ID: TF_LIB4719-018-Q1-K1-B4
ccctgttcttttaaacaatgcagtaatgcacaatgttgtgtatttctttttcttctggatgaagttgcatccgctaaggttcatgctaacagcctagcacctcataagacctaatgctggtccagagtgtctttaggcacaccatggtttactactgaaaaaggggcactcggcactcacacattcttctcatcttttaccaagataagctttatcttatgttaatggaaaccttgctttgctcttcatacatggtcatgccaatgtttaatatgctttatgtgaatcacattccaggcttatcgaagatgaaacattttttaaatgaatgattttgcagggattttgcatgcaagaactgccggagacctgggcacttcgctaaggagtgtccatcttcacctatgtgcaataactgtaaccttccaggccactttgcagcagaatgcaccttacaaactgtttgctggaactgcaaagagtctgggcacattgccagtgagtgcaagaacgaggccctatgccacgcctgcaacaagacaggtcacttggcacgtgactgccctacttcaggtgctaacgtcaagctatgcaacaaatgctntaaatcaggccacatcgccgttgactgcaccaacgaacggccctgcaacaactgccgtcagccagggcacatagctcgggagtgcaagaacgaccccggnctgcaacctgtgcaatgtcttcggccacgtcgcgcgcgtctgcccaa

SEQ ID NO: 5311 - DNA, 212 bp, Zea mays
  Clone ID: TF_jC-zmXLIB3526P093be10b1
cggacgcgtggggcggaagaggcggcagcgatggtggctgcttcaagtgcggcgagcctggccacatggccagagactgctccagcggcggcggcagctaacgcggtggaggcggtggtggtggtggccggtgctacaactgagggcaggccggccacatgagcagggactgcccaagcggaggcgagcggtggcagaaggaggttcggcgg

SEQ ID NO: 5312 - DNA, 1451 bp, Zea mays
  unsure (1)..(1451): unsure at all n locations
  Clone ID: TF_ZmC1068_2
tcgaggccggccgggctccaactcccgccagaaccctcgatttccctttttttccccttgcccaggaccaggagcaagatccatccatccatccccgattccccaaccctaagcagccatggccgcgccgccgcccacgggctgcttcaagtgtggccgccccggccactggtcccgcgactgcccctcctccgcctccaccaaccctcctgccgccgccgacgcgcccaccaaccctagccacctctccggcgccgcctcccgcttcaacgccaagcccaggccccccgcggcggcggtggatggcgaggacggcaaggggaagaagaagaaggagagggccacgcgccccaagctcacgccggacctgctcctctccgacggcggcatcggcttcgtgctccgctacttccccaaggcgttcaagccccgcgcccgcccaggccacgaggtggacgacctcgccaacctcatcaagctctacgcggactggcactcccgcctgatcccctactactccttcgaacagttcgtgcgcaaactcgagaaattgggtgccggcaaccgcgtcaggagatgtgtttccgaactcagggatagggtcgccagaggcggtgatcctacgcttctgcacgaaccgccagtccacgaagacatgccattgccaggcggaggtgaacatggtactgaagacccagttctcggcaccgatgctccgctgtcggacaaccatggcactggccccgtggtgcaggaagacgcagatccaccgatggagagcaacgacgtggtggatcccatggaagaggatctgcttaacgaaatctacgaaaacacagctgatatcccggctggtgagggagccagcaaggagtctccggagcagtcggctccaaaagaagccaactcgctggcgcaggaaccccaggacggcgacgtccccaagccggcgaaggttgagctcactgaggcgcagaaggcacgcatggaggccaacaggctcaaggccttggagagagcggcggcacgggctcgtgcctcgcagcagcccacctagatacgcaagatgctgctgtcttcacttcacttcaatagttggttggttggttgagatgatgcatcattctgtggtgtgtcattgacaaggacacgtagttcgctggtgtctgattgaatctgggtctgctctagtcgatttggtccctagtagtatgtaacaggagaagataagagtttgttggatgtgcttgaaagcttcgtcctgttctcgcttccccaaccattctagagtcagaattccatgtcattcaagctgatcttctcattcatcgttttgctgcatagtgcgtcttggtccaattgtcttcatttaggttctagtttgagaaccctattttttcaatggatttttatttttacaagaaaaaaatagntnnntcattnnttccccc

SEQ ID NO: 5313 - DNA, 1352 bp, Zea mays
  Clone ID: TF_ZmC4152_2
cccacgcgtccgcccacgcgtccgggattttctcagccaccttcttcacgttctctgatcagttgtgagcagggatgggtgacattgcaactaactagagaaccaggatatggcagaggcttcttttctcctagatctgttactggttttctatctgatgtttgttcagctgctgcagatgaagttggcaaaatatacataacagcagatgagaatgtccaaggagcagtcttcgatttacctgaggaaattgcaaaggacctgcttactatggaggtccccccgggaaacacactaacgtccggcttccagctgcctgcgttgcaagatgatagtcctgctactgatagctatggtcgcttttcaaacgaccgaggttccaggaacaggcgttcaaggggtggaggcgcttcaagaggccggggtggttgggacaccgacagtgaggaccgataccggcgtggtggcaggagcttgaggtctgacaacgatagttggtcagatgatgactggtcaggcggtgggagaaaatcaaaccgttcctcctcatcctttggtggccgctcatcatcctacggcagccgtggctcaccatcaccatccttcggtgtccgctcatcatccttgggcggtagggagagcagcagaagcttcagtggcgcttgtttcaactgcggcgaatccggtcaccgtgcatcggactgcccaaacaagtagatggcgcattcttccctgcccaagcaagtagacagctcgagcatcaggacgcacgcagagcgaaaacccaagcgcgcccctgatcgaccagtatactacgcctgacagccagctacagtttttgtgtggctgtctcgtcaggactgaagattttggcatgctgattccagttatttagatccagaggagtccttactctacagggatatgttgagtctcagtagaattgtgtaaccagtaaccacacacacgaacaatggcggaggactaaaatataaaatcatagctggcatattgaacacgtaacatatattgcagttggcatggctcttttcttttccttccaatttgactccagtggtcgcactgtgtcgatcgtttttacatgcactactacacatgcagcctcctttgcttgctggcagctatgcatagttgcgtgtgcgacacagcatctccaagctctggcaatcgcttgtcaaatgtctgctcctcagagctgtcctccgtatcaatcctctttctgacttttctagtcttctctagagattttatcttgtatatcttatttctcttcaacattttctaaatcatgtcctctatatgtaaatatctatattagaaacaatttcttc

SEQ ID NO: 5314 - DNA, 1681 bp, Zea mays
  unsure (1)..(1681): unsure at all n locations
  Clone ID: TF_ZmC4152_4
cgtccgaccaaagtgttgatttgattattccattacgagattgccaaancgatcgcagaaacttttgtccatcggtgctggacgcactaggacggtgctgggaaagcaggaactgcaatcttgatgtttaccagcagccagaaaaggacagttatgtcacttgagcgtgatgttggttgcaagtttgagtttataagccctccgtccatagaagaagtgctggagtcatctgctgagcatgtcattgctacattgcgaggggtgcacccagagtcaactcaatactttcttggagcagctgagaaattaacagaagaactaggacctcatgcccttgcttctgcactggcacatctgagtggattttctcagccaccttcttcacgttctctgatcagttatgagcaggtaagaagtgacacaacaaaattacatatgcattgttctatattatacctagcatagagggactggtcaggcggtgggagaaaatcaaaccgttcctcgtcattcggtagccgttcctcatcatcctacagcagccgtggctcaccatccttcggtggccgctcatcatccttcggcggtagggagagcaacagaagcttcagcggtgcttgtttcaactgcggcgaatctggtcaccgcgcatcggactgcccaaacaagtagtaagatggaaagagatggcgcagtctcccctgccgcacggggtcgattatcctgatcggccggagcatcaatcaggacgcacgcagagcgaaatcaatcccaaagaccactccacctgctgatcggtgtactacgcccgacacccagccgacgttattactggctacagttttgcgtggtcgtctggcgtcggaaaacagaggaaggttttggcatgctgactacagttactacatcaagagttccttcagcttattcatgtcacacggacactcctctacactacagggatatatatggtagtattttttttatatgtattttttgtggtgctcttgattgaggatctcggtataactgtaaccacacgcactggttacggttgcttctgcttcacaatcgctggcgacggttggattctttgaatgttatagatctgtatgctgtcttgcttcgggacgtgaacgtccatccctaggttagccagccccctttcgcttcttttggcacagaaaatactgccagacttcgttgcgttagataaaaaaaaggggggttggttacgctaccccgacccgggttgctctggcagctcgtcctcctgatctgaccttgcaggaaagaaacacgggttagtcaacgcggtcgcagcgcacggcacgactgcagggagaaagtaaaaataataaaccatccaggggtgcaacatgctagtcggtggttggccgtcgaggcgaaacagccagccagaccccacccacccccgggtggatgcgtcgcagcgtggtgtgttgtacatgtactagatggaatgcggggagtttgacagcgtggggagcttctgccggtccatcggccgatggagtgggtggcgaatgctataccgagcgatcctgcatgcagatagtagtatcaaaaaagacctgagcctgagactattcccgtcagacgtgaggtcaaggtccatgtcccggccagccaggcctgtgtgtgtacatacccgctccag

SEQ ID NO: 5315 - DNA, 984 bp, Zea mays
  Clone ID: TF_ZM4871.C1.o2.fg
atggaaacatggaaaagtcaagaaataaccgcaagaaatgcttgctatctatgtggacgtgaagatcattaccttcgtaattgtcctaagaagagttcactaccgaacatccccgagataaagctatctcagtcttcagacatagaatatgaacaaaaatgcacagaaacttctatcaacgtcatgaaggcaactcaaccaagtaacttatcaagtcgtgcttgctttggctgtggtgataccggccatcttattaatggttgtcctaagaaggatgtggagatcaataaggtccaaaagaaaagacaacaccctcaaacccatgcatcaacaaagaataaacaacggaaagagaccaatggaaagataagttatgtagtaacaggaaccattcaaagtgataatgcagtaatttttggaacactgtgtcccttgagatcaaggaagaccatcagtgcacccgaaggaaaaatgttagtaaactacatatgtccaaaaatgatgaaccccaatggaaatgaagtaaatggtgccaacgacaatattcctaccttaacaactatgaacgagaaaaatgagtcacagagatattcgatgaatggaatgaagaacaacaaaaggaatagaaaaatgtttggatacatgattagtccaccccaaccacaagcaaaagccacgaaacacatggatacccaaacagaagaatcaagtcaagctcagctatatgagatacagacacccagtcaaccctcaccccctgttggtcaaacaaagttgactcgcaaagaactcaaagcaagaggtgcttgctactactgcaaaaatgaaggacatcttattcgcgaatgccccaagaagcgtctagatcgaataaagaagaaagctgccaagcatgacctaagcaataattcagaagacccgccattttataagtacgatgatgaaggtcgcttgattagtatacattacggagcaaagaaataa

SEQ ID NO: 5316 - DNA, 655 bp, Zea mays
  Clone ID: TF_ZmC3007_2
gtggaggcggtgaccgcggctatggcggcggcggcgaccgtgtctacggtggtggaggtgaccgcggctacggccgcggcggcggaggcggctacggtggtggtggcggcggcggtcgcggctgcttcaagtgcggcgaggagggccacatggcaagggactgctcccagggcggcggcggcggcggctacggaggtggcggcggcggtggttacggaggtggcggcggtggccgcgagtgctacaactgccaccaggagggccacatctcccgcgactgccccgagaagatgcgctaggcgcggcgccaccgtcgcgtcggatccggcggagtcccatgtcgtctctcgcccgcttccctacccgctcaaggtatcgctcggctgactctgcctgaagtcgtcggagccagttatctatcagtagtagcagtgtcgtgtttcgttctcgtcgatgctatcgtatcgtaggtggtggtagcaagaaaagcaagccgtatggggctatctttagtagtttggatctgtgttggagcagtatcagtttctttctgttggaatcgtcagttgtatggcagccttttcatggatggctctgcctaatctatcagtcatgaactatctataatatatcaatgcaatcgtgtcggttggcc

SEQ ID NO: 5317 - DNA, 591 bp, Zea mays
  Clone ID: TF_LIB3969-006-Q1-M6-F9
gcccgcccccgcctccccctccgtagccgccgccctgggagcagtcccttgccatgtggccctcctcgccgcacttgaagcaggggattgcggagggcggttggggattgcggcgggcgggcgtgggagaggcgggggcagtctacattaggctcttaatagttgtagagatatgtggcacaccagccacgtactataagacagtggctacatgaagggcataacaaatagtagtaattaagctcaatggacaaagtaactgcaaaaatgactaaatttcccaattacagcatatatggttaagcatcagcatcccacgagcttattcaacataatacgccgtctagatgacggctcgccggcaatatagagtattaattgggagatagtgacgaacctaaagattgcgaggctaacttgcaggtagttgaccgccttggtcctcgtgatgtactttgccgcattcccttccttcttcttacccgcagggcggtagtgcttcggcattcgtggcggcagcgcaggtcgttccccgtgctggaaaagggaggggaaaagagaggaggagaggggaaaaggcggtagcgcttg

SEQ ID NO: 5318 - DNA, 630 bp, Zea mays
  unsure (1)..(630): unsure at all n locations
  Clone ID: TF_LIB4729-111-A1-K1-F3
ngaaagttggcaatcttcattacatccaaagcttctttcataaccgggtcgggctcagggttgtacggctccagtggtggtgaaagcctattaacccccactctcccagcgaagagcgtgcgagcactccctcgccgcccactgcgcctcgtggcggcaactgggcggccgtcgctgccgccctacgccaggtgccgaggtgattttccgcccctttgccggcgacgagcaccaccagatactctgagcctggctgccgaaacttccttttggtgtccctgttacattcggtttcgttttttatgacttcatcaagaagcaagagcaggagccacagtcgcagcaggagcaggagccgcagtcctcagcgaagagatagattgcgcagcgaacgtgcaccccgccacagtcgcagtcgcagcaggagccgcagcccataccgtcgcagagaacggcgtggatacaaggatctcgtatgcaagaactgccggagacctgngcactttgctaaggagtgcccatctgcgcctacgtgcaataactgtaaccttccaggccacttcgcagcagaatgcacctcaaaaaactgtttgctggaaactgcaagagcctgggcacattgccagtgag

SEQ ID NO: 5319 - DNA, 1157 bp, Zea mays
  Clone ID: TF_ZmC172453_1
gaagagttttttttttttttttttatcaaatactccttcaatatatctcaattcactctaatacgactcattactagaatacctacactaggcctcagtagtcgtactggccagactgttccacatgcacctactagaacttcacacgatccagcggctttgtcaatatatccgtgagctgatcttgagttgtaatctgcttaaggataattttcctcctgtagaagaacaacccgcttgtgctccttctgtcgtcaacatctcctgcgtggtcactgtcactgaatccaaccaattccttgtgttccgtgaatccaaccatctcctgcgtggtcatcaacatctccttctgtcatccaccagatgtacgtgctgctgctccgtcgcggcgcgtggcttctccagcgctggcagcagggtcactggcccctccacagcactgggcgactcctccagcgctggggctagggttagaggtggtggatccggcgccgccttctccagcaggggccaggccacctgcttcgggggatgatctgtcggcgcctcctccaccagggacgggaccgctagctgcaacagttgtcccggcggcgcctccaatgccccgaccggggtctcctgtgggtggatctgagcccgagaagcctccagcgccggggattctgccgacgatgcggtctccaccgcagagcgggcggagctggacggaggagacccgtgcgaggagcagagtcccctcctcctcttcggcctgcgcgacataggccttccccttgttggacttagacgggcaatctctggcccagtggccagttttgccgcagctccggcactggtcgcggcctttcccagcaccggttcgctcgccagttgcttgtcgcgcctcgacgtagacgtcgcctgtggttaccggacttcgacgcgccggcgtcatttcggtgcttctccttccaccgagcctcccactgctcctccgttaggtacagcttaccccccgtcgacggtggtgaggcatcatcagcatgctcggccgctttcagtcggccggtgatatcctccatcgacagggtcgacacatccagtcggaaactactagttgcttgtaccttgactcccgatccaaagatacttctccacgaaaaaaaaaaaaaaaa

SEQ ID NO: 5320 - DNA, 619 bp, Zea mays
  unsure (1)..(619): unsure at all n locations
  Clone ID: TF_ZmC18109_12
atggnggttttctaaacacatggttctctcagacaactattaacaagatggttgatatcaccacaaccaaagcaagcacgacttgataagttacatggtggagttgtctttacgttgttggtagaagtttctctgcatttttgttcatattccatgtctgaagactgagatagcttcatctcggaggtgatctgtagtgaactcttctcaggacagttacgaaagtaatgaccttcacgtccacattgatagcaagcttttcttgaagttatttcttgactttttccatgtttccttttttgtttcttggacctgatgcgaacacgaggctgaaactgtgtgcaagtaatagtccatccatcaatgtaacactcctgtgtttcttcttggggctgggcatccttgtgatgtttcctttttggaataccttgcgattcatcaactgacagtgcattagtttcactttcgtttatactgatctggcgacaaggaattccatagtactcacaacaacaacatgttccaaggtcacttgtttgttggtttggttgggcatccttttgtgtcttgaatgtctgttcatcaactattttatttaaagtgttgttttgacttgccc

SEQ ID NO: 5321 - DNA, 3116 bp, Zea mays
  Clone ID: TF_ZmC4152_1
gaattcggcaccgggccatttcttatcccctctcctccggtcctcccccctccccccgatggcgtccctcacgctcccagcactcgctctcgccctctctaaccccggcgccgtccgcctacgcgctgcggccttccgctgctgggcgctccggcggcgcggctgggcggcggcgggcgccctggcctcgcccaactccgtgcttagcgagcatgccttcaagcggctccagctcgggagcgacgacgaggacggggaagggccgtacgggagcgacgccgacgaggggttcgaggcgggggagggggacaacgaggaactcgccattgccaggctcggcctgcccgacgagctcgtcgccacgctcgagaagcgcgggattacgcacctgttccccatccagagggctgtgttgattcccgctctcgagggccgtgacctgattgctagagcaaagactggaactggaaagacactggcctttggcatacccatgatcaagcaattaatcgagcaagacgatggtcggattacaaggagaggtcgtactcctcgggttctggttctagcacctaccagagagttagccaaacaagtcgagaaggaaataaaggaatcagcacccaagctcggcacagtgtgtgtttatggcggtgtctcatataatgtccagcagaatgcactctctcgtggtgtcgatgttgttgttggaacacctggccgcataatcgatttgataaatggcggaagcctccagttgggagaagttcagtatttggtcctggatgaggctgaccaaatgcttgcagtggggtttgaggaagatgtggaaacaatattacaacagcttcctgcaggcaggcaaagcatgttgttctctgcgacgatgcctagctgggtgaagaaactgtccaggcggtacttgaacaaccctttgacgattgacttggttggcgatcaagatgaaaagcttgctgaaggaatcaaactccatgctatcccactcacagcaacatcaaagcgtaccattcttagtgatctaatcacggtttatgcaaagggtgggaaaaccatagttttcactcgcacaaagaaagatgcagatgaggtatcattggcactgacaaacagtattgcttctgaggcacttcatggtgatatttcacagcatcagcgtgaaaggacactaaatggattccgtcaagggaaatttactgttctagtagcaacagatgttgctgcccgtggtcttgatataccaaatgttgatctgattatccattacgaattgccaaatgatccagaaacttttgtccatcgttctggacgcactggacgtgctgggaaagcaggaactgcaatcttgatgtttaccagcagccagaaaaggacagttaagtcacttgagcgtgatgttggttgcaactttgagtttataagccctccgtccatagaagaagtgctggagtcatctgctgagcatgtcattgctacattgagaggtgtgcacccagagtcaactaaatactttcttggagctgctgagaaattaacagaagaattgggacctcatgctcttgcttctgcactggcacatctgagtggattttctcagccaccttcgtcacgttctctcatcagtcatgagcagggatgggtgacgttgcaactaactagagaacagggatttggcagaggcttcttttctcctagatctgttactggttttctatctgatgtttgttcagctgctgcagatgaagttggcaaaatatacctaacagcagatgagaacgtccaaggagcagtcttcgatttacctgaggaaattgcaaaggacctgcttactatggagctccccccaggaaacacattaaccaaaatttccaagctgcctgcgttgcaagacgatggccctgctactgatagctacggtcgcttttcaaacgaccgaggttccaggaacaacaggcgttctaggggtggcggcgcttcaagaggccggggtggttgggacactgacggcgaggaccgattccgccgtggtggtaggagcttgaggtctgacaatgacagttggtcagatgatgactggtcaggcggtgggagaaaatcaaaccgttcctcatcattcggtagccgctcatcatcctacagcagccgtggctcaccatccttcggtggccgctcatcatccttcggcggtagggagagcaacagaagcttcagcggtgcttgtttcaactgcggcgaatccggccaccgcgcaacggactgcccaaacaagtagtaagatggaagagatggcgcggtctcccctgccgcacggggtcgatgatcctgattggccggagcatgcagagcgaaatcccaaagcccactccacctgctgatcggtgtactacgcccgacacccagccgacgttattactggctacagttttgcgtggtcgtctggcgtcggaaaacagaggaaggttttggcatcctgactacagttactacatcaagcggagttccttcagcttattcatgtcacacggacactactctacactacagggatatgttagtatttcttttatatatatgtattttttttgtggtgctcttgattgaggatctcggtataactgtaaccacacgcactggttacggttgcttctgcttcacaatcgctggcgacggttggattctttgaatgttatagatggcgcattcttccctgcccaagcaagtagacagctcgagcatcaggacgcacgcagagcgaaaacccaagcgcgcccctgatcgaccagtatactacgcctgacagccagctacagtttttgtgtggctgtctcgtcaggactgaagattttggcatgctgattccagttatttagatccagaggagtccttactctacagggatatgttgagtttcagtagaattgtgtaaccagtaaccacacacacgaacaatggcggaggactaaaatataaaatcatagctggcatattgaacacgtaacatatattgcagttggcatggtcttttcttttcgaaaaaaaaaaaaaaaaaaaaaaaaaaaaaaaaaaaaaaaaaaaaaaaaaaaaactcgaggaggggc

SEQ ID NO: 5322 - DNA, 769 bp, Zea mays
  Clone ID: TF_LIB4740-106-A1-K1-D8
gttcccctgcccccctcgttctctctctcgttgcgacgactgtgtggagtaccgcccccgccccctcaccccccgacgccgacgccctaggcggctacgccaggtcccgagggacgggcccttcatcttcgtcagtctattcgccgggcgacgagcacccgccaggcacattgcagccgaatgttcttccaaaggtgtttgctggaactgcaaagagcctggccacatggctaacagctgcccaaatgaagggatatgccgtaactgtggcaagtccggtcacattgcaagagactgcaccgctccaccagtgccgccaggagaagtgatcctttgttttttctgctacaaaccagggcattttcgtgaggaatgcaccaatgagaaggcctgcaataattgccggcagagcggccaccttgcccgtaactgcaccaatgatcctgtttgcaacctgtgcaatgttgctggccatctggcccgtcagtgccccaagtctgatacattgggtgagaggggtgggcctcctcccttccgtggtgttggcgctcccttccatgatgttggcgctcccttccgtggtggcttcagtgacgtggtctgccgggcctgcaaccagattggtcatacgagtcgtgattgcatggctggtgccttcatgatctgccacaactgtggcggccgtggccacatggcttatgagtgtccctctgccagtctcatggaccggttcaccccctcgcccgtttctgaaggaaggaccatccaa

SEQ ID NO: 5323 - DNA, 1077 bp, Zea mays
  Clone ID: TF_ZmC31167_4
atggcctacacggtcacacggagttatacggaccaggttcggccgttctgccaatatgctgcaacccaacggtttcttccaacattaacccccagcgggcagcggccgcgcactccctcagtccctccccgctcaccaccagtcaccaacgcccaccgggcctcgtccctcgtggcggcaactgggcggccgtcgctgccgccctacgccagaagcaagagcaagagcagaagtaggagccgcagtcgcagcaggagcaggagccgcagtcctcggcgaagagataggttgcgcagtgaacgtgcaccccaccgcagtcgtagccggagccgcagcccataccgtcgcagagaacgacgtggtcacagggattttgcatgcaagaactgccggagacctgggcacttcgctaaggagtgtccatctgcacctatgtgcaataactgtaaccttccaggccactttgcagcagaatgcaccttacaaactgtttgctggaactgcaaagagtctgggcacattgccagtgagtgcaagaacgaggccctatgccacgcctgcaacaagacaggtcacttggcacgtgactgccctacttcaggtgctaacgtcaagctatgcaacaaatgctttaaatcaggccacatcgccgttgactgcaccaacgaacgggcctgcaacaactgccgtcagccagggcacatagctcgggagtgcaagaacgacccggtctgcaacctgtgcaatgtctccggccacgtcgcgcgcgtctgcccaaagacgactctggcttcagtgtatacagggcggcccgttccgagatatcctgtgccgcatctgcggtcagccggggcacatcagccgcaactgcatggcgaccatcatctgcgacacatgcggtgggagggggcacatgtcttatgagtgcccatcggcaagaatattcgggctccgccggctctgagagcctttcaccgctttgtttctgatggtttgagtttcgccaggatgtttaatttgtttctgacaatattggaacaattttccctatggttgttgaggaatgattctgtgagg

SEQ ID NO: 5324 - DNA, 4537 bp, Zea mays
  Clone ID: TF_ZmC14816_1
atgtccctacgctcgaccacttcgagtgcgcagcgccagcaggaggccgaggtcgccgcggcacaggaacgcgagcgagcagcagcagcggctgcagcgacagcggcgagggcagcacggttggcggcggcggaactgacagcggcgagagcggaagtagaagcagcggaggcgacggatgctgcacgtgcggcggcagcagagctcgaggttctgcgcggcagtagagcaggcagctatgcttctgtcgacgacaacaccgacgaagagcttaggctggcgagggaagcagcgcgagagcaggcggcacagtgggcagccgcgcacccccatgggggcgcgcgtggcggcagcccagataggcgccgacacgctgacagcgccccgcgggagggcgcacgcggcggcagcccagacgggcgtagacgcgccggcggtgctcccggcggcggcgaccgggtcgacggagatcgcggcctctacaggcggcgcgactctccctccccggatcggtaccatggtcgccgcatggcccaggcctttgtcagggacatcggtcccggcggtgggtggcctaccctcaccaagaccaactacattgagtgggccgcggtgatgagggtacggctccaggttcgccaaatgtgggaagcagttcggtacggcgacgtcgactaccacgaggatcggcgagcgctggatgccctcattgctgcagtcccgctcgagatgcagttttcgctttcccagaagcggactgccaaggaggcctgggacgccatcgctgcgacccgcatcggcagcgaccgtgcccgcaagaccacactgcagacacttcgcaaggagtgggagaacctggccttcaagccaggtgaggatgttgatgactttgctctccgcctcaacactctgttgcagaagatggtgcagttcggcgacgaaacctacgatgaggagagagctgttgagaagctcttctgttgcatccccgagaagtacaagcagattgctcgctcgatcgagtctctgctagacctctccacgatgacgatcgaagaggcgataggtcgtctcaaggtggtcgacggcgacgaaccacaggctccctctgggcctatcactatcggcgggaagctacatctcactcgggaacagtgggaggcctgccagggtgacaagaagaaggagtcctcctcgacacgaggccgcaaacgcggcaagcagcgcaaggcacgtggaggcacccaggccggggcgcgaggacatgttgagggtggtgcacgtggaggtgcccaaggcggcgtcgtcggcaacaagaagccggcacgagacgacggctgtcacaactgcggcaagcttggccactgggccagggactgtcggcagccacgacgtggtcaggccaacgtcgcacaggcggaggcggaggaggccctgctcctggcacatgcaagcatcgagccatctccagcggcaccggccgcagcggcactcctccaccttgatgagtcgaaagcacgcgctttcctcggcgacggctccaacaaggacatgatcgaaggatggtgcctcgacaccggcgccactcatcacatgaccggccgacgggagttcttcaccgagcttgactctagcgtccgaggctccgtcaagtttggggacgcctccggtgtagagatcaagggcgtcggctcagtcgtcttcaccgtcacgtctggtgagcacaggctgctcaccggagtctactacatccccgcattgagaaactctatcatcagcttgggacagctggatgagaacgcaagggaggtcgctgcggaggcggtgtgcggtcgcaagctgcgcgtgttgcgcaccgacaacggcagcgaattcacggcggctgagttcgcgtcgtactgcgcggatgagggcgttcagcgccactactccgcgtcgtacaacctgcagcagaacggcgtcgtcgagcggcgcaaccagacggttgtgggaatggctcgggctctcctcaaacagaggggaatgtcggctgccttctggggagaggcggtggtgacagcggtctacatcctcaaccgctcgcccaccaaggcactcaacgggatgacaccgtacgaggcttggcatgggcgcaagccggcggtctctcacctacgggtcttcggctgcctcgcgttcaccaaggagcttggccacatcggcaagctcgacgacaggagcaccccgggggtgttcattggctacgcggagggctcgaaggcctaccgcatccttgacccaagaacacagcgtgtgcgcacggcgcgagacgtagtgttcgacgaagggcgaggatgggcgtgggacaaggcggtggacgatggcgcgactccgacgtacgacttcaccatcgagtacgtccactttgagggagctgggggagtaggcaactcttctccgagcaggtctaccccagccctcaagtctccaccgactccagcgccacactctccagctcttgctacaacgagctcttcaccaccacgcactccagccacgactccggctacagcgagctcttcgccaccacctcgtgtcgagcacgacccagtggagctcgtgaccccgctctcccgcgacgaggagcgcgtcgacgcgtgctacgacggcgagtcattgaggtatcgaagggtggagggccttctcatcgactcgtcgatgccaggccctgcatctcgcattctggcaggagagttgcatcttgcatgcgacgatggtgagcctcggtctttcgcggaggccgagaaacatgcggcttggcgtgccgcgatgcagtcgaagatggacgcgcaggaggggatcgacttcgacgatgctttcgcccccgtggcacggatggaatctgtgcgactccttgcgctgtcagcccagcagggctggcacgttcatcacatggacgtcaagtcggcgtttcttaacggcgacttaaaggaggaggagggcaaggtgttgcgcctgcgcaaggctctctatagcctgcgacaggcaccgagggcgtggaatgccaagctggattccacgctcaaaggaatgggtttcacgccaagcccgcacgaggcgaccatctatcggcggggcaatggaggaagtgccctgctggtgggtgtctacgtcgacgacttggtgatcaccggcgccaaggatgcagaggtggcaacgttcaaggaagagatgaaggccaccttccaaatgagtgacctggggcatctctccttctacctggggattgaggtgcaccagggagactccgggatcacacttcgccagaccgcctacgccaagcgcattgttgagctggctgggctcaccgactgcaacccagctctcactccgatggaggagaggctgaagctgagtcgcgacagcacgacggaggaggtggatgctacacagtaccggcgtcttgtggggagccttcgctacctcgtccacacacggcctgacttggcatactccgtcggctatgttagtcggttcttgcagcgaccgacgacggagcatgagcaggctgtgaagaggatcatccgctatgttgcggggactctcgaccacggtctctactacccgaggtgccctggggaggcacaccttgtcgggtacagcgacagcgaccacgccggtgacatcgacactagcaagagcacaagcgggatcctcttcttcctcggcaagtgcctcattagctggcagtcggtcaagcagcaggtggtggccatgtccagctgcgaggccgagtacatacggcgtccactgcttcgactcaggcgctcttgctggctcgactgctcggtgatctcctcgggagagacactggagcggtggaactcagggtggacagccagtccgctctggcattggccaagaaccccgtgttccatgaacggagcaagcacatccggctaagataccacttcatccgagactgcttggcagaagggagcatcaaggcgcgctacatcaacaccaaggatcagcttgcagacctgctcaccaagccccttgggaagatcaagtttgttgagctttgctccaggtccgggatgacccaactttctcacaagacgacacccaagacttagggggagaatgatggaataagtcttgagcatctagaggacaacagtcgcttttgactgtcctctgtagtcctttagcatctagaggacagcttgactgtcctctgtagtctctttagcatctagaggacaacagtcgctttttgactgtcctctgtagtctctttagcatctagaggacaacagtcgcttttgactatcctctgtagtttctttagcatctagaggacaatcctgttgtatagtgtgtgtgagaaggtgtggtagtgcagcctctagggctataaatatgggtctccaacccttagatgagtatgtcattgtgtagtgtttgaggaaataaacagaaaattgccccaactcatagtgtcatcctcttgatgagagttagagtccctctacttacagtttatagcatgtag

SEQ ID NO: 5325 - DNA, 1670 bp, Zea mays
  Clone ID: TF_ZmC5443_1
atgtgggaagcagtttggtacggcgacgtcgactaccacgaggatcggcgggcgctggatgccctcattgctgcagtcccgcccgagatgcagttttcactttctcagaagtggactgccaaggaggcctgggacgccatcgctgcgacccgcatcggcagcgaccgtgcccgcaagaccacactacaggcacttcctaaggagtgggagaacctggccttcaagccaggtgaggatgttgatgactttgctctccgcctcaacactctgttgcagaagatggtgcagttcggcgacgacaactacgatgaggagagagctgttgagaagctctcccgttgcatccccgagaagtacaagcagattgctcgctcgatcgagtctctgctagacctctccacgatgacaatcgaagaggcgataggtcgtctcaaggtggtcgatggcgacgaaccacaggctccctctgggcctatcactatcggcgggaagctacatctcactcgggagcagtgggaggcctgccagggtgacaagaagaagggggagtcctcgacacgaggccgcagacgcggcaaaccgcgcaaggcgcgtggaggcgcccaggccggggtgcgaggacatgctgaggttggtgcccatggaggtgcccaaggcggcgccgtcggcaacaagaagccggcacgagatgacggctgtcacaactgcggtaagcttggccactgggccagggactgtcgacagccacgacgtggccaggtcaacgttgcacaggcagaggcggaggaggagaccctgctcttggcacatgcaaacatcgagccatctccagcggcatcggctgcagcggcactcctccaccttgatgagtcgaaagcacgcactttcctcggcgacggctccagcaaggacatgatcgaaggatggtgcctcgacaccggcgccactcatcacatgaccggccgacgggagttcttcaccgagcttgactctagcgttcgaggctccgtcaagtttggggacacctccggcgtagagatcaagggcgccggctcagtcgtcttcaccgccgcatctgatgagcacaggctgctcaccggagtctactacatccccgcgtcgaggaactctatcattagcttgggacagctgaatgagaacggttcgcgcgtggaggtcgagcacggagtcatgaggatctgggacccctctcgtcgccttcttgccaaggtacgcaggggtccaaatcggctatacatcctcaatgtgaaggtggcacaaccttgctgctcgtcgagacgacgtggcatggcagtggcacgagcgcttcgggcaccttaacttcgaggccctgaagcggctcagtgccaaggagatggtacgaggcctgccgtgccttgaccatgtggagcaattctgcgatgtctgcatgttgacaaagcagagacgactcccctttccccagcagtcaagcttccgagccaaggagaggctcgagctcgtgcatgggaacttgtgtggcccggtgacaccagccacaccaggaggacgacgctacttcttgctgctcgtcgacgatctctcccgctacatgtgggtgatgatccttggcagcaagggagaggctgcgaacgccatcaggcgtgtgcaggtcgctgcggaggcggagt

SEQ ID NO: 5326 - DNA, 1649 bp, Zea mays
  Clone ID: TF_ZM3738.C8.o2.fg
atgggggcgcgcgtggcggcagcccagataggcgccgacacgctgacggcgctccgggcgagggcgcacgcggcggcagcccagacgggcgtagacgcgccggcggtgctcccggcggcggcgaccgggtcgacggagatcgcggcctctacaggcggcgcgactctccctccccggatcggtaccatggtcgccgcatggcccaggcctttgtcagggacatcggtcccggcgaagatggtgcagttcggcgacgaaacctacgatgaggagagagctgttgagaagctcttctgttgcatccccgagaagtacaagcagattgctcgctcgatcgagtctctgctagacctctccacgatgacgatcgaagaggcgataggtcgtctcaaggtgccccaaggcggcgtcgtcggcaacaagaagccggcacgagacgacggctgtcacaactgcggcaagcttggccactgggccagggactgtcggcagccacgacgtggtcaggccaacgtcgcacaggcggaggcggaggaggccctgctcctggcacatgcaagcatcgagccatctccagcggcaccggccgcagcggcactcctccaccttgatgagtcgaaagcacgcgctttcctcagcgacggctccaacaaggacatgatcgaaggatggtgcctcgacaccggcgccactcatcacatgaccggccgacgggagttcttcaccgagcttgactctagcgtccgaggctccgtcaagtttggggacgcctccggtgtagagatcaagggcgtcggctcagtcgtcttcaccgtcacgtctgcaagggaggtcgctgcggaggcggtgtgcggtcgcaagctgcgcgtgctgcgcaccgacaacggcggcgaattcacggcggctgagttcgcgtcgtactgcgcggatgagggcgttcagcgccactactccgcgccatacagcccgcagcagaacggcgtcgtcgagcggcgcaaccagacggttgtggggatggctcgggctctcctcaagcagagaggaattccagctgtcttctggggagaggcggtggtgacagcggtttacatcctcaaccgctcgcccaccaaggctctcaacgggatgacaccgtacgaggcttggcatgggcgcaagccggcggtctctcacctacgggtcttcggctgcctcgcattcaccaaggagcttggccacatcagcaagctcgacgataggagcaccccgggggtgttcattggctacgcggagggctcaaaggcctaccgcatccttgacccaagaacacagcgtgtgcgcacggcgcgagacgtagtgttcgacgaagggcgaggatgggcgtgggacaaggcggtggacgatggcgcgactccgacgtacgacttcaccatcgagtacgtccactttgagggagctgggggagtaggcaactcttctccgagcagctcttgctacaatgagctcttcaccaccacgcactccagccacgactccggctacagcgagctcttcgccaccacgtactccagcaccgacgctcatgtcgagcacgacccagtggagctcgtgaccccgctctcccgcgacgaggagcgcgtcgacgcgtgctacgacggcgagtcattgag

SEQ ID NO: 5327 - DNA, 1519 bp, Zea mays
  Clone ID: TF_ZmC1373_16
cctctcgcgcgccggctccacgcagatccaggagatatgcctcgctatgatgaccgctatggaggcacgcgcttgtatgttggcagattggccactcgtactcgttcccgcgatttagaacatctgtttggcagatatggaaggtttttcggtttttaccggaggtctttggtggaagggtgcccttggtggacttggtgaccatttggtgaagggtgcccttggtgtaatgttattgactgttttagtggaagttccaagttggtgatgcatttgagtacttgacacatgacgtgacggcttactgtttgtggcaaccctttgcgcagaatacgagaagtggagttgaagcgtgactatgcatttattgagttcagtgatcatcgcgatgctgatgaggctcgataccagctagatggcagggatgttgatgggagtcgtattgttgttgagtttgctaaaggggtcccacgtggttcaggtggctcacgtgaatatatggggagaggccctccaccaggtacaggtcgttgtttcaactgtggagttgatggtcactgggcaagagactgtaaagctggtgactggaaaaacaaatgctaccgttgtggagaaaggggccatatagaaagaaattgccagaacagtcctaggagtctcaggcgagagagaagttactcacggtccccatctccccgccgtggacggggccgcagtcgaagctatagcaggagcaggagccggagtcggagctatagtcgatcaagatccctgtctagatctcctaggggaggtcgtcgtgaccgtgacgataggagatcaaggagtcctagctatagcaggagccccatgcgatctgcctcgccaccagtaaaggaaaaggagcgcagccccgcacctgatggaagcaggagcccaaggagtcgcagcccccaggatcaggtgatgagcccaccaccaaaggataatggcgaaggcaatggctcagaccgtggcggcagccccagagggagggagaacagcaggagctgcagccgcagccgcagtccatctggtagtaaccgcagccctgcggccaatggacgtagccggagtcctggaggtgagcggagcccgagtcctggaggtgagcggagcccgagtcctagaggtgagcggagcccgagtcctagggctgaccgtagcccaagccccaatggcaatggtaacaatgatgctgctgctgatgtcgatgctgatgctgctgcccgcagtggctcccccactggaagcaagtcaccctgagcgctggcggtcccagattgtggtggtgcttctcaatgcaatgggcaatcgtattgctattttttgctaccatatcgaagacacaatagctacatcattttcttctctgaaacaaggactttattttgcttgctttgagatatgactcttaccctctcatggataatatatatatgatatgatgccactggtgcttgcttgcatctgaataagtgaatgctcgcatgttgaggtt

SEQ ID NO: 5328 - DNA, 1357 bp, Zea mays
  Clone ID: TF_ZmC1373_20
attgggtccctcgaggccggccgggagtttctctctagtagaattgagatccctcctaccacatccgttccccttcccttccctcctctcgcgcgccggctccacgcagatccaggagatatgcctcgctatgatgaccgctatggaggcacgcgcttgtatgttggcagattggccactcgtactcgttcccgcgatttagaacatctgtttggcagatatggaagaatacgagaagtggagttgaagcgtgactatgcatttattgagttcagtgatcatcgcgatgctgatgaggctcgataccagctagatggcagggatgttgatgggagtcgtattgttgttgagtttgctaaaggggtcccacgtggttcaggtggctcacgtgaatatatggggagaggccctccaccaggtacaggtcgttgtttcaactgtggagttgatggtcactgggcaagagactgtaaagctggtgactggaaaaacaaatgctaccgttgtggagaaaggggccatatagaaagaaattgccagaacagtcctaggagtctcaggcgagagagaagttactcacggtccccatctccccgccgtggacggggccgcagtcgaagctatagcaggagcaggagccggagtcggagctatagtcgatcaagatccctgtctagatctcctaggggaggtcgtcgtgaccgtgacgataggagatcaaggagtcctagctacagcaggagccccatgcgatctgcctcgccaccagtaaaggaaaaggagcgcagccccgcacctgatggaagcaggagcccaaggagtcggagcccccaggatcaggtgatgagcccaccaccaaaggataatggcgaaggcaatggctcagaccgtggcggcagccccagagggagggagaacagcaggagccgcagccgcagtccatctggtagtaaccgcagccctgcggccaatggacgtagccggagtcctggaggtgagcggagcccgagtcctggaggtgagcggagcccgagtcctggaggtgaccgtagcccaagccccaatggcaatggtaacaatgatgctgctgctgatgtcgatgctgatgctgctgcccgcggtggctcccccactggaagcaagtcaccctgagcgctggcggtcccagattgtggtggtgcttctcaatgcaatgggcaatcgtattgctattttttgctaccatatcaaagacacaatagctacatcattttcttctctgaaacaatgactttattttgcttgctttgagatatgactcttaccctctcatggataatatatatatgatatgatgccactggtgcttgcttgcatc

SEQ ID NO: 5329 - DNA, 1467 bp, Zea mays
  Clone ID: TF_ZmC1373_23
ggaccctcgaggccggccgggactcctttccccccttcccttccctcctctcgcgcgccggctccacgcagatccaggagatatgcctcgctatgatgaccgctatggaggcacgcgcttgtatgttggcagattggccactcgtactcgttcccgcgatttagaacatctgtttggcagatatggaagaatacgagaagtggagttgaagcgtgactatgcatttattgtacgctaagtttacctccctcagttcaattcagtatctattttcgttttctgtgcccatttgttattgtgtgggaaatgtatttcttttatatacatggttttgtttgttttgcttcttgccaaattaccatacaggagttcagtgatcatcgcgatgctgatgaggctcgataccagctagatggcagggatgttgatgggagtcgtattgttgttgagtttgctaaaggggtcccacgtggttcaggtggctcacgtgaatatatggggagaggccctccaccaggtacaggtcgttgtttcaactgtggagttgatggtcactgggcaagagactgtaaagctggtgactggaaaaacaaatgctaccgttgtggagaaaggggccatatagaaagaaattgccagaacagtcctaggagtctcaggcgagagagaagttactcacggtccccatctccccgccgtggaaggggccgcagtcgaagctatagcaggagcaggagccggagtcggagctatagtcgatcaagatccctgtctagatctcctaggggaggtcgtcgtgaccgtgacgataggagatcaaggagtcctagctatagcaggagccccatgcgatctgcctcgccaccagtaaaggaaaaggagcgcagccccgcacctgatggaagcaggagcccaaggagtcgcagcccccaggatcaggtgatgagcccaccaccaaaggataatggcgaaggcaatggctcagaccgtggcggcagccccagagggagggagaacagcaggagctgcagccgcagccgcagtccatctggtagtaaccgcagccctgcggccaatggacgtagccggagtcctggaggtgagcggagcccgagtcctggaggtgagcggagcccgagtcctagaggtgagcggagcccgagtcctagggctgaccgtagcccaagccccaatggcaatggtaacaatgatgctgctgctgatgtcgatgctgatgctgctgcccgcagtggctcccccactggaagcaagtcaccctgagcgctggcggtcccagattgtggtggtgcttctcaatgcaatgggcaatcgtattgctattttttgctaccatatcgaagacacaatagctacatcattttcttctctgaaacaaggactttattttgcttgctttgagatatgactcttaccctctcatggataatatatatatgatatgatgcc

SEQ ID NO: 5330 - DNA, 5588 bp, Zea mays
  Clone ID: TF_ZmC27331_11
caccaaatgtggccgttggggagccagtctggtgaatggcgcaccggacagtccggtgcacaccggacatgtccggtgcccctgccacgtcatcagtgccgttggaatatgaccgttggagttctgacttgtgggccacccctgatgtccggtggcgcaccggacagctcctgttcattgtccggtgcgccagtatgggcaaacctgacgtctgcgcgcgctgcggcgcatttaatgcctctgcaggtggggatggacctccgcccgtttttgatggtgacgattttccttattggaaaattcgtatggaagcatacttagaggctatagacattggtgtctacaaagccgccacacaagggttccccgaacctagagatctcacaaatcttgtaggtgatgagttcaattatgagaaatggaatgctaaggccaaaaataccctttttagaggcctttgcaaagatgtgttcaatagagtaaggaatcataaaaatgctcatgatttgtggatggacatttgtgctctacatgaaggaactagaagtgaacgtgaggaaagatatcacatagccatgcgaaagttaaattccattgaaatgcttactaatgaaaatgcaaatgctatgtactcacgacttaatattcttgtagaggaagtcaatggattggggcttactcaaatctcacaaccggatgttgtgaggaagattctcagtgtcctcccaatagacaaatatggacacattgtcactgtgctacatcaaatggatctttcagttaccacacctacacaaattttgggaaagatcaatgcccatgaaatgtacatgcacatcaacgacaaagaagaatcatcttccaaaagaaaggatttggctctcaaagcaaatcatgaaagaaaaggaaaagcaaaaatacaagttgaggaagaatcctcaagtgatgatgaccttgatgcaaacattgccttgatggtaaggaagaccaccaagatgttgaagaagctaaatagagaaggcatcaaatttgattcaagaaagaagaagttcttttccaacaaaagaaagcccatttctgagatggactgctacaactgtggtgagcttggtcatcttgctcatcaatgcaacaagcccaagaagaacaagttcaagggcaagaaggaagatgacagcgatgatgaaaagaaggaaaagaaattcttcaagaggaaggatgggaagcaaaatagattccacaagaagaagaatggaaaggcctatattgttggcgactggctcaccgacatcgaatcatcaagtgggtcttcttcaagtgaagaagagaatgatgaaaaagttgcggccatcgccggggacttctcttcaccaccaccatcgccatcatccactgctcacctatgcctcatggctaggggtgaacgaaaggtacaaaatgatattaatattgatgatgatagtgatagtgatagtgatgaagaatttgcttcaccttcatatgatgagttagctgacttacttaaagaatatactcaaatcattagaaagtcaaaagctaaatgtgataggttgaaaaatgaaaatgaatctttaaatgccaagtatgacatagttataaaggctagtgatgaaataaaagaagaaaataaaactatgtcatcaactgtaaatgagctcacaaactccctaaaagatgctaaggaaaaatatgacaaattaaatgaagctaatagggagttgcaaaatagactagtaaagatcaaggaagactatactcaaattaaatttgatcatgacaatcttcttgttgaaaatgaacttttatcttgcaaaacacatgaggctattaaccctgttgttaagcttgatgtagcaacctcatgtgatgatttgattcaagaagagcaaactagtctacatgctgaattgactgaaaaagttgaagtcctgactttagacaaccaaaaattgaagaattacttgactgatgcaactactagaggaaaagttgctattgagaacaatgatttcaacaatgagttggcagtggataatcaaaggcttaagaatgaggtcaagaaactaaaaagtgaaaatgaacatcttgcaacaagtgtgcaaaagttcaacaagggtcaatacctccaaaatgagctgcttatgaacactgttatgaaaaataacaagagtggtattggatacaatgcttttgtgcaaaagaaagctatcactcaatacaagccaaagcagactcacaagcctatcaaatgctttgagtgtggaaatgaaggtcattttgcccacaactgcaaagctaaaccaccaactcccttgcctaagcactcaagaccatttgctttcaatgctcactatgttctaagaaaggttgtaaatggaaagattaaggtgaactacaagaccggtgggagccattgggttattgacagtggatgcacacaacatatgacaggcaacccacggatgttcacctcactagatgagaatgttgatggtcaagataaaatcacatttggagacaattcaaaaggaaaagtgcaaggacttggcaaggtggcaatctcaaatgatttatcaatatcaaatgttcttctagttgcacccttgagcttcaatttattatcagtgggacaactctgtgatcttggacttaaatgcttattcactccatcagagggatttagatacaacaacctctacttagtggatttcacttcagaagatgcagacttaagaacttgcctcttcaccaaagcttctcttggatggctttggcataggaggcttgcacatgttgggatgagcacactcaagaaggtattaaagaaagatatggttagaggtttaaaggatgtggtgtttgaaaaagacaagccatgcagtgcatgtcaagctggaaagcaagttgctaatacacatcctactaaagctttcatgtcaacatcaaggccactggaacttcttcacatggatttatttggacctacaaattatgtcagtgccggtggcaacctctactgtctagtgattgttgatgacttctcaagatacacttgggtgttctttctccatgacaaatctgaagttgcatctatattcaagaagtttgccaagaaagcacaaaatgaatttgattgcaagattaagaagattagaagtgacaatggcaaagaatttgacaacaccaacattcatgagtactgtgatgaaattgggatcaagcatgaagtatctgccacatatacacctcaacaaaatggagttgttgaaaggaaaaataggaccttgatcacccttgcaagaacaatgattgatgagtataacacaccggagaggttttgggccgaagctgtcaacactgcttgctatgcatcaaacaggctatttcctcaccggctacttgcgaagactccttatgaactgctaaatgggaaaaagccagacgtctctttcttccgggtgtttgggtgcaaatgctacatctacaaaaaacgccatcatctagggaagtttcaaagacgttgtgatattggttttcttttgggttattcattaaagtccaaagcatatcgagtattcaaccatgccactggcgtggtagaagaaacatatgatgtggaatttgatgagactaatggctcccaaggagcacttgaaaatcttgatgatgtaggtgatgagccacttagggaagcaatgaagaacatgcctattggagctatcaaaccaaaagaagatgaagaagaggtgcaaatcattgacaggccttcttcatcaaatgtaccacaagatgatgaaaaagatgagaggcatgcaaatgaagatacatttgtctctcatgaacaagcaagggtacaagccgaagatgttgatgctccaggatcttcttcccaagtggttgacaggagaaactcatcactacttcaagctcatcctcaaaaccaaatcatcgggagtccttcacaaggggttattactcgatcacataaacatgctaattttattgaacatcactcttttgtttcttgtgttgagcctacttgtatagatgacgcgctacaggatccggactgggtgaatgccatgcatgaagaacttaacaacttcacccgtaacgaagtttggaccctggagaagcccccacaagatgcaagaatcattggaacaaagtgggtgttcagaaacaaacaagatgatcaaggtgtgattgtaagaaacaaggcaagacttgtcgcaaagggattctctcaagttgaaggcttagattttggagagacctttgcaccggttgctcgactggaagccatccgtatcctacttgcatatgcatcatgctatgatataaaactttatcaaatggatgtaaaaagtgcatttttaaatggcttcataaatgaacttgtatatgttgagcaaccgcctggatttgaagaccctagatatcctaaccatgcttacaggttgtccaaggcgctttatgggctaaagcaagctccaagggcttggtatgagcgtcttcgcgacttcctcatcgaaaagggcttcaagatcgggaccgtcgacacaactctcttcacaaagaaacataacggtgatattttcatttgtcaagtatatgttgatgatataatctttggctcgacaaatgactatcattgcaaggaatttggtgagttgatgtcgaaggagtttgagatgtcaatgattggtgagctaacatacttcctcggctttcaagtcaagcaaatgaaagatggtaactttctctctcaagagaagtataccaaagacttgttgaaaagattcaacatggagaagtgcaaaccaatcaagacccccatgcctacaaatggacatctcgacttagatgagggaggtaacccggttaatcaaactctctaccgttctatgattggtagtttattgtaccttaccgcatctaggcccgatattatgtttagtgtctgcatgtgtgctagatttcaatctaatcctaagaaagctcaccttcgcgctgttaagagaattctgaggtatctcaggcacaccacaagcgttggtctgtggtatcccaaaggagctacttttgatttaattggctattccgattcggattatgccggttgcaaaattgataggaaaagtacttctagaggatgccatctgcttggtacatcactagtttcatggacatccaaaaagcaaaatagtgttgccttgtcaactgccgaagcggaatacattgccgcaggtgcttgttgcacacagattttatatatgaaacaaactcttctagactatggcgtagttctagaaaaagtacctttgttgtgtgataatgagagtgctgttaaaattgctaataatcctgtacaacactctcgcaccaagcacattgatatccgtcatcacttccttagagatcatgttgctaaaggagatatcattttagaaggagtgaggtcggaagatcaattcgcggatattttcactaagccacttgataagacccgcttttgcatgttgaggaatgaactaaatattcttgatctcagaaattttatgtga

SEQ ID NO: 5331 - DNA, 7536 bp, Zea mays
  Clone ID: TF_ZmC951_441
ctaaacacctgatgtaggaggaggcggcgggggcgcatccggtcgaggtcgaggtagcagagcaaacgccgacggagggtcagagtcagtctcggatccaggatctgcggtagaagctggagctggtactgactcggacgcaggcagcgctgcaggagctaccggaacagaagcagtcacagatactgccacagcggtagtggtaacagcagatgctggtggcactagcggctgtgggcagacagagctgaggaccggagacgtgaacgccaaggtgaccggccggagcggagaggtaacagcagggggtgcagacaagatcgaaggcaccactggagcgtaaagcgaagaaggcggagcagactgaactggaggtgctgagatacccgaatgctgaagcatgagggccatgaatgccctattctctgccctatcctgaataagctgctgctgaagtgaatcctgcctgtcctgcatagtctgaaacattgagagcatcctctcggacatacgggcctgctcggctgccagctgagcctgctgctgagtgagagtctgaagaatcgaagctagagcagggtccatagcctgaggggtagcaggagcagcactagagctcccagcctcatgatcatgtgagcgtggaggcataggaggcggaggcggaggaggaatcccaaaatcatcatcatcatcatcatcagctgctgcaccctgggtgtcaaactgtcgaagtgctgcatcctcggcctgagtgtcaaacacaggagcataagctggtactggaatctctggagcaggacggtaagatccaaacacaaggcgtgaggcctcaagggtgctctgaaaacgaggtggctggatcagctgcgcaaatatgtggcataagtagtgagcatagggtagctgccgccgagcacgaatcccatccagaacagtgtcctcaatctcacagatcagaaagtccacaacatcaaactcagagtgggataccagggcaccaaggagccatagctgaatatgagtagtagcctccctgtatcccatccgaggcaggagagtccgtctgataagctcatataagtactttgctgctgtggtgaaatctgcaggagaacgtcgcgacccatctgagaaaggcgggcggaacagagccgcgacgtgagctgtccctggagctataccgccgtgagggcgacgtggaggatctgaagtgccatagcagagactgtgcaggcgagtcgtcgactcaaggaagccaaatagctgtcggatctgatcggcagtgatcgtgacatcctcgcgctcaaagcggaacctcatccaatgatgatccgggtcaatccaaacagaggcatagaagacgcggacccactcctcaacatatctgccgctgatagtcagaaaggacagaagccctggcaaataggtgagatgtgcctcagactcagcaccggctgctagcaagaaggctggaagatccaataggcggtgaactcgtagcgcaatctgagcagacatctgagccctgaagaaagactcctgaatccgtgtgctgaagagaactcctgctgctgggtctctctgagcaggcaaccaagactccacgggtatgtacctgaaccgacgtacccgggctgcagtagcacgctgaagatcaaacagacgaggatccgaagccagaggacgaacctcagtctcatcacgctcccggaagcgaggtggagggacaggtggagctgaagcgggagcgggggcaggagaagcagtggaagctggcgtggtgctggtagtgggtatggcggtggaggtggatggagcaataggagtgactggggcaggcagagtgggtggtggagtggaagcggaggtatgagtggaggagcgagaccgggaggcgagacgacgagcacggaaagcaatctgatctgaaggaacatccggctgatctccaagtgctgcctgcgcagcggctgctgcagctgctgctgctgcacgagcctctctgtccgaacgccgcttcttgcggccttcctgctgctccagatacacagtcttgcccttcacctgcctgaaggggcgacgagggtcctcatcgtcgccaccccctgatgccgacgcattcttcgtgcgcggcatcttgacctgacgaataaaatttctgagatcaagaatatttagttcattcctcaacatgcaaaagcgggtcttatcaagtggcttagtgaaaatatccgctaattgatcttccgatctcactccttctaaaatgatatctcctttagcaacatgatctctaaggaaataatgacggatatcaatgtgcttggtgcgagagtgttgtacaggattattagcaattttaacaacactctcattatcacacaacaaaggtaccttttctagaactacgccatagtctagaagagtttgtttcatatatagaatttgtgtgcaacaagcacctgcggcaatgtattccgcttcggcagttgacaaggcaacactattttcctttttggatgtccataaaactagtgatctaccaagcagatggcatcccccagaagtactcttcctatcaattttgcaaccggcataatccgaatcggaatagccaattaaatcaaaagtagctcctttgggataccacagaccaacgcttgtgctgtgcctgagatacctaagaattcttttaacagcgcgaagatgagctttcttaggattagattgaaatctagcacacatgcagacactaaacatgatatcgggcctagatgcggtaaggtacaataaactaccaatcatagaacggtagagagtttgattaaccgggttacctccctcatctaggtcgagatgtccatttgttggcataggtgtcttgattggtttgcacttctccatgttgaaccttttcaacaagtctttggtatacttctcttgtgagagaaagttaccatctttcatttgcttgacttgaaagccgaggaagtacgtcagctcaccaatcattgacatcttgaattccttcgacatcaactcaccaaattccttgtaatgatagtcatttgtcgagccaaagattatatcatcaacatatacttgacaaatgaaaatatcaccgttatgtttctttgtgaatagagttgtgtcgacggtcccgatcttgaagcccttttcgatgaggaagtcacgaaggcgctcataccaagcccttggagcttgctttagcccatatagcgccttggacaacctgtaagcatggttaggatatctagggtcttcgaatccaggtggttgctcaacatatacaagttcatttatgaagccatttaaaaatgcactttttacatccatttgataaagttttatatcatagcatgatgcatatgccagtaggatatggatggcttccagtcgagcaactggtgcaaaggtctctccaaaatctaagccttcaacttgagagaatccctttgcaacaagtcttgccttgttccttacaatcacaccttgatcatcttgtttgtttctgaacacccactttgttccaatgattcttgcatcttgtgggggcttctccagggtccaaacttgattatgggtgaagttgttaagttcttcatgcatggcgttcacccagtccggatcctgtagcgcctcatctatacaagtaggttcaacacaagaaacaaaggagtgatgttcaataaaagaagcatgtctatgtgatcgagtaataaccccttgtgaaggactcccgatgatttggttttgaggatgagcttgaagtagtgatgagtttctcctgtcaaccacttgggaagaagatcctggagcatcaacatctttggcttgtacccttgcttgttcatgagagacaaatgtatcttcatttgcatgcctctcatctttttcatcatcttgtggtacatttgataaagaaggcctgtcaatgttttgcacctcttcttcatcttcttttggtttgatagctccaattggcatgttcttcattgcttccctaagtggctcatcacctacatcatcaagattttcaagtgctccttgggagccattagtctcatcaaattccacatcatatgtttcttctaccacgccagtggcatggttgaatactcgatatgctttggaatttaatgaataacccaaaagaaaaccaatatcacaacgtctttgaaacttccctaagtgatggcgtttcttgtagatgtagcatttgcacccaaacacccggaagaaggagacgtctggctttttcccatttagtagttcatagggagtcttcgcaagtagccggtgaggaaatagcctgtttgatgcataacatgcagtgttgacagcttcggcccaataactctccggtgtgttatactcatcaatcattgttcttgcaagtgtgatcaaggtcctgtttttcctttcaacaactccattttgttgaggtgtgtatgttgcagatacttcatgcttgatcccaatttcatcacagtactcatgaatgttggtgttgtcaaattctttgccattatcacttctaatcttcttgatcttgcaatcaaattcattttgtgctttcttggcaaacttcttgaatatagatgcaacttcagatttgtcatggaaaaagaacacccaagtgtatcttgagaagtcatcaacaatcactagacaatagaggttgccaccagcacttacataatttgtaggtccaaataaatccatatgaagtagttctagtggccttgatgttgacatgaaagctttagtaggatgtgtattagcaacttgcttcccagcttgacatgcactacatggcttgtccttttcaaataccacatcctttaatcctataaccatgtctttctttaatacctccttgagtgtgctcatcccaacatgtgcaagcctcctatgccaaagccatccaagtgaagctttggtgaagaggcaagttcttaagtctgcatcttctgaagtgaaatccactaagtagagattgttgtatctaaatcccttgaacaccattgattcatcatccatctttgatacaataacctctgttggagtgaataagcattgaagtccaagatcacagagttgacccactgataataaattgaagctcaaaggtgcaaccaagagaacatttgatattgataaatcatttgaaattgccaccttgccaagtccttgcacttccccttttgaattgtctccaaatgtaattttgtcttgtccatcaacattctcatcaagtgaggtgaacatccgtgggttgcttgtcatatgttgtgtgcatccactgtcaataacccaatggctcccaccggtcttgtagttcaccttaatctttccatttgcaacctttcttagaacatagtgagcattgaaggcaaatggtcttgagtgcttaggcaagggagttggtggtttagctttgcagttgtgggcaaaatgaccttcatttccacactcaaagcatttgataggcttgtgagtctgcattggcttgtattgagtgatagctttcttttgcacaaaagcattgtatccaataccactcttgttatttttcataacagtgttcataagcagctcattttggaggtattggcccttgttgaacttttgcacacttgttgcaagatgttcattttcactttttagtttcttgacctcattcttaagcctttgattatccactgccaactcattgttgaaatcattgttctcaatagcaacttttcctctagtagttgcatcagtcagataattcttcaatttttggttgtctaaagtcaggacttcaactttttcagtcaattcagcatgtagactagtttgctcttcttgaatcaaatcatcacatgaggttgctacatcaagcttaacaacagggttaatagcctcatgtgttttgcaagataaaagttcattttcaacaagaagattgtcatgatcaaatttaatttgagtatagtcttccttgatcttaactagtctattttgcaactccctattagcttcatttaatttgtcatatttttccttagcatcctttagggagtttgtgagctcatttacagttgatgacatagttttattttcttcttttatttcatcactagcctttataactatgtcatacttggcatttaaagattcattttcatttttcaacctatcacatttagcttttgactttctaatgatttgagtatattctttaagtaagtcagctaactcatcatatgaaggtgaagcaaattcttcatcactatcactatcactatcatcatcaatattaatatcattttgtacctttcgttcacccttagccataaggcacaggtgagaagtggatgatggcgatggtggtggtgacgagaagtccgcggcgatggccgcaactttttcatcatcctcttcttcacttgaagaagatccacttgatgattcgacgtcggtgagccagtcgccaacaatataggcctttccattcttcttcttgtggaacctcttttgcttcccatccttcctcttgaagaatttcttttccttcttttcatcatcgctgtcatcttccttcttgcccttgaacttgttcttcttgggcttgttgcattgatgagcaagatgaccaagctcaccacagttgtagcagtccatctcagaaatgggctttcttttgttggaaaagaacttcttctttcttgaatcaaatttgatgccttctctatttagctttttcaacatcttggtggtcttccttaccatcaaggcaatgtttgcatcaaggtcatcatcacttgaggattcttcctcaacttgtatttttgcttttccctttttttcatgatttgctttgagagccaagtcctttcttttggaagatgattcttctttgttgatgtgcatgtacatctcatgagcattgatctttcccaaaatttgtgtaggtgtggtaactgaaagatccatttgatgtagcacagtgacaatgtgtccatatttgtctattggaaggacactgagaatcttcctcacaacatccggttgtgagatttgagtaagccccaatccattgacttcctctacaagaatattaagtcgtgagtacatagcgtttgcattttcattagtaagcatttcaaaagaatttaactttcgcatagctatgtgatatctttcctcacgttcacttctagttccttcgtgtagagcacaaatgtccatccacaaatcatgagcatttttatgattcctgactctattgaacacatctttgcaaaggcctctaaaaagggtgtttttggccttagcattccatttctcataattgaactcatcacctacaagatttgtggcgtctctaggttcggggaacccttgtgtggcggctttatagacaccaatgtctatagcctctaagtatgcttccatacgaattttccaataaggaaaatcgtcaccatcaaaaacgggaggaggtccatccccaccggacat

SEQ ID NO: 5332 - DNA, 5341 bp, Zea mays
  Clone ID: TF_ZmC951_461
taagtgcagtacgtcatgcaatatttcaagaaccaacaattgcatagcaagtaagaatttaagtgctaaaagcttaaaactaagacttgtcaagtttgacccgagttaagctttttcactcgctttgttggcggttatctcaactaggttagacaagccctagatgcaatacaagaaatttaaacatgcaatgcaagcttgacaacaccatttgacattttacattaaatttctgagatcaagaatatttagttcattcctcaacatgcaaaagcgggtcttatcaagaggcttagtgaaaatatccgctaattgatcttccgacctcactccttctaaaatgatacctcctttagcaacatgatctctaaggaagtgatgacggatatcaatgtgcttggtgtgagagtgttgtacaggattattagcaattttaacagcactctcattatcacacaacaaaggtaccttttctagaactacgccatagtctagaagagtttgtttcatatataaaatttgtgtgcaacaagcacctgcggcaatgtattccgcttcggcagttgacaaggcaacactattttgctttttggatgtccatgaaactagtgatctaccaagcagatggcatcccctagaagtacttttcctatcaattttgcaaccggcataatccgaatcggaatagccaattaaatcaaaagtagctcctttgggataccacagaccaacgcttgtggtgtgcctgagatacctaagaattttcttaacagcgcgaagataagctttcttaggattagattgaaatctagcacacatgcagacactaaacatgatatcgggcctagatgcggtaaggtataataaactaccaatcatagaacggtagagagtttgattaaccgggttacctccctcatctaagtcgagatgtccatttgtaggcatgggggtcttgattggtttgcacttctccccatgtgaaccttttccacaagtctttggtatactcttcttgtgagagaaagttaccatctttcatttgcttgacttgaaagccgaggaagtatgttagctcaccaatcattgacatctcgaactccttcaacatcaactcaccaaattccttgcaatgatagtcatttgtcgagccaaagattatatcatcaacatatacttgacaaatgaaaatatcaccgttatgtttctttgtgaagagagttgtgtcgacggtcccgattttgaagcccttttcgatgaggaagtcgcgaagacgctcataccaagcccttggagcttgctttagcccataaagcgccttggacaacctgtaagcatggttaggatatctagggtcttcaaatccaggcggttgctcaacatatacaagttcatttatgaagccatttaaaaatgcactttttacatccatttgataaagttttatatcatagcatgatgcatatgcaagtaggatacggatggcttccagtcgagcaaccggtgcaaaggtctctccaaaatctaagccttcaacttgagagaatccctttgcgacaagtcttgccttgtttcttacaatcacaccttgatcatcttgtttgtttctgaacacccactttgttccaatgattcttgcatcttgtgggggcttctccagggtccaaacttcgttacgggtgaagttgttaagttcttcatgcatggcattcacccagtccggatcctgtagcgcctcatctatacaagtaggctcaacacaagaaacaaaagagtgatgttcaataaaagaagcatgtctatgtgatcgagtgataaccccttgtgaaggactcccgatgatttggttttgaggatgagcttgaagtagtgatgagtttctcctgtcaaccacttgggaagaagatcctggagcatcaacatcttcggcttgtacccttgcttgttcatgagagacaaatgtatcttcatttgcatgcctctcatctttttcatcatcttgtggtacatttgatgaagaaggcctgtcaatgatttgcacctcttcttcatcttcttttggtttgatagctccaataggcatgttcttcattgcttccctaagtggctcatcacccaaaagaaaaccaatatcacaacgtctttgaaacttccctagatgatggcgttttttgtagatgtagcatttgcacccaaacacccggaagaaagagacgtctggctttttcccatttagcagttcataaggagtcttcgcaagtagccggtgaggaaatagcctgtttgatgcatagcaagcagtgttgacagcttcggcccaaaacctctccggtgtgttatactcatcaatcattgttcttgcaagggtgatcaaggtcctgtttttcctttcaacaactccattttgttgaggtgtatatgtggcagatacttcatgcttgatcccaatttcatcacagtactcatgaatgttggtgttgtcaaattctttgccattgtcacttctaatcttcttaatcttgcagtcaaattcattttgtgccttcttggcaaacttcttgaatatagatgcaacttcagacttatcatgaagaaagaacacccaagtgtatcttgaaaagtcatcaacaatcactagacagtagaggttgccaccggcactgacataatttgtaggtccaaataaatccatgtgaagtagttccagtggccttgatgttgacatgaaagctttagtaggatgtgtattagcaacttgctttccagcttgacatgcactgcatggcttgtctttttcaaacaccacatcctttaatcctctaaccatatccttttttaatactttcttgagagtgctcattccaacatgtgcaagcctcctatgccaaagccatccaagagaagctttggtgaagaggcaagttcttaagtctgcatcttctgaagtgaaatccactaagtagaggttgttgtatctaaatcccttgaataccattgattcatcatctatttttgttacaataacctctgatggagtgaataagcattgaagtccaagatcacagagttgtcccactgataataaattgaagctcaagggagcaactaagagaacatttgatattgataagtcatttgagattgccaccttgccaagtccttgcacttttccttttgagttgtctccaaatgtgattttatcttgaccatcaacattctcatctagtgaggtgaacatccgtgggttgcctgtcatatgttgtgtgcatccactgtcaataacccaatggctcccaccggtcttgtagttcaccttaatctttccatttgccacctttcttagaacatagtgagcattgaaagcaaatggtcttgagtgcttaggcaagggagttggtggtttagctttgcagttgtgggcaaaatgaccttcatttccacactcaaagcatttgataggcttgtgagtctgctttggcttgtattgagtgatagctttcttttgcacaaaagcattgtatccaataccactcttgttatttttcataacagtgttcataagcagctcattttggaggtattgacccttgttgaacttttgcacacttgttgcaagatgttcattttcactttttagtttcttgacctcattcttaagcctttggttatccactgccaactcattgttgaaatcattgttctcaatagcaacttttcctctagtagttgcatcagtcaagtaattcttcaatttttggttgtctaaagtcaggacttcaactttttcagtcaattcagcatgtagactagtttgctcttcttgaatcaaatcatcacatgaggttgctacatcaagcttaacaacagggttaatagcctcatgtgttttgcaagataaaagttcattttcaacaagaagattgtcatgatcaaatttaatttgagtatagtcttccttgatctttactagtctagtttgcaactccctattagcttcatttaatttgtcatatttttccttaacatcttttagggagtttgtgagctcatttacagttgatgacatagttttattttcttcttttatttcatcactagcctttataactatgtcatacttggcatttaaagattcattttcattttcaacctttcgttcacccctagccatgaggcataggtgagaagtggatgatggcgatggtggtggtgaagagaagtccccggcgatggccgcaactttttcatcattctcttcttcacttgaagaagacccacttgatgattcgatgccggtgagccaatcgccaacaatatatgcctttccattcttcttcttgtggaacctcttttgcttcccatccttcctcttgaagaatttcttttccttcttttcatcatcgctgtcatcttccttcttgcccttgaacttgttcttcttgggcttgttgcattgatgagcaagatgaccaagctcaccacagttgtagcagtccatctcagaaatgggctttcttttgttggaaaagaacttcttctttcttgaatcaaatttgatgccttctctatttagcttcttcaacatcttggtggtcttccttaccatcaaggcaatgtttgcatcaaggtcatcatcacttgaggattcttcctcaacttgtatttttgcttttccttttctttcatgatttgctttgagagccaaatcctttcttttggaagatgattcttctttgtcgttgatgtgcatgtacatttcatgggcattgatctttcccaaaatttgtgtaggtgtggtaactgaaagatccatttgatgtagcacagtgataatgtgtccatatttgtctattgggaggacactgagaatcttcctcacaacatccggttgtgagatttgagtaagccccaatccattgacttcctctacaagaatattaagtcgtgagtacatagcatttgcattttcattagtaagcatttcaaaggaatttaattttcgcatggctatgtgatatctttcctcacgttcacttctagttccttcatgtagagcacaaatgtccatccacaaatcatgagcatttttatgattccttactctattgaacacatctttgcaaaggcctctaaaaagggtgtttttggccttagcattccatttctcataattgaactcatcacctacaagatttgtgggatctctaggttcggggaacccttgtgtggcggctttatagacaccaatgtctatagcctctaagtatgcttccatacgaattttccaataaggaaaatcgtcaccatcaaaaacgggaggaggtccatccccaccggacat

SEQ ID NO: 5333 - DNA, 7482 bp, Zea mays
  Clone ID: TF_ZmC951_462
ctaaacacctgaagcaggaggaggcggcgggggcgcatccggtcgaggtcgaggtagcagagcgaacgccgacggagggtcagagtcagtctcggatccaggatctgtggtagaggctggagctggtactgactcggacgcaggcagcgctgcaggagctaccggaacagaagcagtcacagatactgccacaacggtagtggtaacagcagatgctggtggcactagcggctgtgggcagacagagctgaggaccggagacgtgaacgccaaggtgaccggccggagcggagaggtaacagcagggggtgcagacaagatcgaaggcaccactggagcgtaaagcgaagaaggcggagcagactgaactggaggtgctgagatacccgaatgctgaagcatgagggccatgaatgccctactctctgccctatcctgaataagctgctgctgaagtgcatcctgcctgtcctgcatgctctgaaacatcgagagcatcctgtcggataaacgggcctgctcggctgccagaagagcctgctgctgggtgagagtctgctgctgctgagtgagagtctgctgctgctgggtgagagtctgaagaatcgaagcaagggcagggtccaaagctggaggaggagcaggggcagcacgggaactcccagcctcatgatcatgtgagcgtggaggcataggaggcggaggcggaagaggaaccccaaaatcatcatcatcatcatcatcatcagcagctgtaccctgagtgtcaaactgatgtagagctgcgtcctcggcctgagagtcaaacacagaagcagaagctggcactggaatctcaggagcagggcggtaagatccaaacacaaggcgtgaggcctcaagagtgctctgaaatcgaggtggctgaatcagctgcgcaaagatgtggcataagtagtgagcatacggtagctgccgtcgagcacgaatcccatccagaacagtatcctcaatctcacagatcagaaagtcaacaacatcaaactcagagtgggataccagggcaccaaggagccaaagctgaatgtgagtggtagcctccctgtatcccatcctaggcaggagtgtccgcctgacgagctcatacaagtacttcgctgcagtagtgaagtctgctggagaacgtcgcgacccatctgtgaaaggcgggcggaacagagccgcgacgtgagctgtccctggagccacaccgccgtgagggcgacgtggaggatctgaagtgccatagcagagactgtgcaggcgagtcgtcgactcagggaagccaaatagctgtcggatctgatcggcagtgatcgtgacatcctcgcgctcaaagcggaacctcatccaatgatgatccgggtcaatccaaacagaggcatagaagacgcggacccactcctcaacatatctgccgctgatagtcagaaatgacagaaggcctggcaaataggtgagatgcgcttcagactcagcacctgctgctagcaagaaggctggaagatccaataggcggtgaactcgtagcgcaatctgagcagacatctgagccctgaagaaagactcctgaatccgagtgctgaaaagaactcctgctgctgggtctctctgagctggcagccaagactccacgggtacgtacctgaaccgacgtacccgggctgcagtggcacgctgaagatcaaacagacgaggatccgaaaccagtggacggacctcagtctcgtcacgctcccggaagcgaggagggggtacaggtggagcagaagcgggagcgggagcaggggtagcagtggaagctggcgtggaactggtagtgggtatggcggtggaggtggatggagcaataggggtgactggggcaggcagagtgggtggcggagtggaagcggaggtgtgagtggaggagcgagaccgggaggcgagacgacgagcacggaaagcaatctgatctgaaggaatatccggctgatctccaagtgctgcctgtgcagcggctgctgcagctgctgctgctgcacgagcctctctgtccgaacgccgcttcttgcggccttcctgctgttccaaaaagacagtcttccccttcacctgcctgaaggggcgacgagggtcctcgtcatcgccaccccctgatgccgacgcattcttcgtgcgcggcatcctgaactgaagtctcactccttctaaaataatatctcctttagcaacatgatctctaaggaagtgatgacggatatcaatgtgcttggtgcgagagtgttgtacaggattattagcaattttaacagcactctcattatcacacaacaaaggtactttttctagaactacgccatagtctagaagagtttgtttcatatataaaatctgtgtgcaacaagcacctgcggcaatgtattccgcttcggcagttgacaaggcaacactattttgctttttggatgtccatgaaactagtgatctaccaagcagatggcatcccccagaagtacttttcctatcaatcttgcaaccggcataatccgaatcggaatagccaattaaatcaaaagtagctcctttgggataccacagaccaacgcttgtggtgtgcttgagatacctaagaattctcttaacagcgcgaagatgagctttcttaggattagattgaaatctggcacacatgcagacactaaacataatatcgggcctagatgcggtaaggtataataaactaccaatcatagaacggtagagagtttgattaaccgggttacctccctcatctaagtcgagatgtccatttgtaggcatgggggtcttgattggtttgcacttctccatgttgaaccttttcaacaagtctttggtatacttctcttgtgagagaaagttaccgtctttcaattgcttgacttgaaagccgaggaagtatgttagctcaccaatcattgacatctcgaactccttcgacatcaactcaccaaattccttgcaatgacagtcatttgtcgagccaaagattatatcatcaacatatacttgacaaatgaaaatatcaccgttatgtttctttgtgaagagagttgtgtcgacggtcccgattttgaagcccttttcgatgaggaagtcgcgaagacgctcgtaccaagcccttggagcttgctttagcccataaagcgccttggacaacctgtaagcatggttaggatatctagggtcttcaaatccaggcggttgctcaacatatacaagttcatttatgaagccatttaaaaatgcactttttacatccatttggtaaagttttatatcataacatgatgcatatgcaagtaggatacggatggcttccagtcgagcaaccggtgcaaaggtctctccaaaatctaagccttcaacctgagagaatccctttgcgacaagtcttgccttgtttcttacaatcacaccttgatcatcttgtttgtttctgaatacccactttgttccaatgattcttgcatcttgtgggggcttctccagggtccaaacttcgttacgggtgaagttgttaagttcttcatgcatggcattcacccagtccggatcctgtagcgcctcatctatacaagtaggctcaacacaagaaacaaaagagtgatgttcaataaaattagcatgtttatgtgatcgagtaataaccccttgtgaaggactcccgatgatttggttttgaggatgagcttgaagtagtgatgagttcctcctgtcaaccacttgggaagaagatcctggagcatcaacatcttcggcttgtacccttgcttgttcatgagagacaaatgtatcttcatttgcatgcctctcatctttttcatcatcttgtggtacatttgatgaagaaggcttgtcaatgatttgcacttcttcttcatcttcttttggtttgatagctccaataggcatgttcttcattgcttccctaagtggctcatcacctacatcatcaagattttcaagtgctccttgggagccattagtctcatcaaattccacatcatatgtttcttctaccacgccagtggcatggttgaatactcgatatgctttggactttaatgaataacccaaaagaaaaccaatatcacaacgtctttgaaacttccctagatgatggcgttttttgtagatgtagcatttgcacccaaacaccctgaagaaagagacgtctggctttttcccatttagcagttcataaggagtcttcgcaagtagccggtgaggaaatagcctgtttgatgcatagcaagcagtgttgacagcttcggcccaaaacctctccggtgtgttatactcatcgatcattgttcttgcaagagtgatcaaggtcctatttttcctttcaacaactccattttgttgaggtgtgtatgtggcagatacttcatgtttgatcccaatttcatcacagtactcatgaatgttggtgttgtcaaattctttgccattgtcacttctaatcttcttaatcttgcaatcaaattcattttgtgctttcttggcaaacttcttgaatatagatgcaacttcagatttgtcatggagaaagaacacccaagtgtatcttgagaagtcatcaacaatcactagacagtagaggttgccaccggcactgacataatttgtaggtccaaataaatccatgtgaagtagttccagtggccttgatgttgacatgaaagctttagtgggatgtgtattagcaacttgctttccagcttgacatgcactgcatggcttgtctttttcaaacaccacatcctttaatcctctaaccatatctttctttaataccttcttgagtgtgctcattccaacatgtgcaagcctcctatgccaaagccatccaagagaagctttggtgaagaggcaagttcttaagtctgcatcttctgaagtgaagtccactaagtagaggttgttgtatctaaaacccttgaataccattgattcatcatccatttttgttacaataacctctgatggagtgaataagcattgaagtccaagatcacagagttgtcccactgataataaattgaagctcaaaggtgcaactaagagaacatttgatattgataagtcatttgagattgccaccttgccaagtccttgtacttttccttttgagttgtctccaaatgtgattttatcttgaccatcaacattctcatctaatgaggtgaacatccgtgggttgcctgtcatatgttgtgtgcatccactgtcaataacccaatggctcccaccggtcttgtagttcaccttaatctttccatttgcaacctttcttagaacatagtgagcattgaaagcaaatggtcttgagtgcttaggcaagggagttggtggtttagctttgcagttgtgggcaaaatgaccttcatttccacactcaaagcatttgataggcttgtgagtctgctttggcttgtattgagtgatagctttcttttgcacaaaagcattgtatccaataccactcttgttatttttcataacagtgttcataagcagctcattttggaggtattgacccttgttgaacttttgcacacttgttgcaagatgttcattttcactttttagtttcttgacctcattcttaagcctttgattatccactgccaactcattgttgaaatcattgttctcaataacaacttttcctctagtagttgcatcagtcaaataattcttcaatttttggttgtctaaagtcaggacttcaactttttcagtcaattcagcatgtagactagtttgctcttcttgaatcaaatcatcacatgaggttgctacatcaagcttaacaacggggttaatagcctcatgtgttttgcaagataaaagttcattttcaacaagaagattgtcatgatcaaatttaatttgagtatagtcttccttgatcttaactagtccattttgcaactccctattagcttcatttaatttgtcatacttctccttagcatcttttagggagtttgtgagctcatttatggttgatgacatagttttattttcttcttttatttcatcactagcctttataactatgtcatacttggcatttaaagattcattttcatttttcaacctatcacatttagcttttgactttctaatgatttgagtatattctttaagtaagtcagctaactcatcatatgaaggtgaagcaaattcttcatcactatcactatcactatcatcatcaatattaatatcattttgtaccttccgttcacccctagcaatgaggcataggtgagaggtggatgatggcgatggtggtggtgaagagaagtccccggcgatggcagcaaccttttcatcattttcttcttcacttgaagaagacccacttgatgattcgatgtcggtgagccagtcgccaacaatatatgcctttccattcttcttcttgtggaacctcttttgcttcccatcctttctcttgaagaatttcttttccttcttttcatcatcgctgtcatcttccttcttgcccttgaacttgttcttcttgggcttgttgcattgatgagcaagatgaccaagctcaccacagttgtagcagtccatctcagaaatgggctttcttttgttggaaaagaacttcttctttcttgaatcaaatttgatgccttctctatttagcttcttcaacatcttggtggtcttccttaccatcaaggcaatgtttgcatcaaggtcatcatcacttgaggattcttcctcaacttgcattttcgcttttccctttctttcatgatttgctttgagagccaaatcctttcttttggaagatgattcttctttgtcgttgatgtgcatgtacatttcatgggcattgatctttcccaaaatttgtgtaggtgtggtaaccgaaagatccatttgatgtagcacagtgacaatgtgtccatatttgtctattgggaggacactgagaatcttcctcacaacatccggttgtgagatttgagtaagccccaatccattgacttcctctacaagaatattaagtcgtgagtacatagcgtttgcattttcattagcaagcatttcaaaagaatttaattttcgcatagctatgtgatatctttcctcacgttcacttctagttccttcgtgtagagcacaaatgtccatccacaaatcatgagcatttttatgattccgaactctattgaacacatctttgcaaaggcctctaaaaagggtgtttttggccttcgcattccatttctcataattgaactcatcacctacaagatttgtgggatctctaggttggggaaacccttgtgtggcggctttatagacaccaatgtctatagcctctaggtatgcttccatacgaattttccaataaggaaaatcgtcaccataaaaaacgggaggaggtccatccccaccggacat

SEQ ID NO: 5334 - DNA, 4809 bp, Zea mays
  Clone ID: TF_ZM4588.C2.o2.fg
atggattggggcttactcaaatctcaaccggatgttgtgaggaagattctcagtgtcctcccaatagacaaatatggacacattgtcactgtgctacatcaaatggatctttcagttaccacacctacacaaattttgggaaagatcaatgcccatgaaatgtacatgcacatcaacaaagaagaatcatcttccaaaagaaaggatttggctctcaaagcaaatcatgaaagaaaaggaaaagcaaaaatacaagttgaggaagaatcctcaagtgatgatgaccttgatgcaaacattgccttgatggtaaggaagaccaccaagatgttgaagaagctaaatagagaaggcatcaaatttgattcaagaaagaagaagttcttctccaacaaaagaaagcccatttctgagatggactgctacaactgtggtgagcttggtcatcttgctcatcaatgcaacaagcccaaaaagaacaagttcaagggcaagaaagaagatgacagcgatgatgaaaagaaggaaaataaattcttcaagaggaaggatggaaagcaaaagaggtttcacaagaagaagaatggaaaggcatatattgttggcgactggctcaccgacatcgaatcatcaagtgggtcttcttcaagtgaagaagagaatgatgaaaaggttgctgccatcgccggggacttctcttcaccaccaccatcgccatcatccacttctcacctatgcctcatggctaggggtgaacggaagttagctgacttacttaaagaatatactcaaatcattagaaagtcaaaagctaaatgtgataggttgaaaaatgaaaatgaatctttaaatgccaagtatgacatagttataaaggctagtgatgaaataaaagaagaaaataaaactatgtcatcaactgtaaatgagctcacaaactccctaaaagatgctaaggaaaaatatgacaaattaaatgaagctaatagggagttgcaaaatagactagtaaagatcaaggaagactatactcaaattaaatttgatcatgacaatcttcttgttgaaaatgaacttttatcttgcaaaacacatgaggctattaaccctgttgttaagcttgatgtagcaacctcatgtgatgacttgattcaagaagagcaaactagtctacatgctgaattgactgaaaaagttgaagtcctgactttagacaatcaaaaattgaagaattacttgactgatgcaactactagaggaaaagttgctattgagaacaatgatttcaaaaatgagttggcagtggataatcaaaggcttaagaatgaggtcaagaaactaaaaagtgaaaatgaacatcttgcaacaagtgtgcaaaagttcaacaagggtcaatacctccaaaatgagctgcttatgaacactgttatgaaaaataacaagagtggtattggatacaatgcttttgcacaaaagaaagctatcactcaatacaagccaaagcagactcacaagcctatcaaatgctttgagtgtggaaatgaaggtcattttgcccacaactgcaaagctaaaccaccaactcccttgcctaagcactcgagaccatttgctttcaatgctcactatgttctaagaaaggttgcaaatggaaagattaaggtgaactacaagactggtgggagccattgggttattgacagtggatgcacacaacatatgacaggcaacccacggatgttcacctcattagatgagaatgttgatggtcaagataaaatcacatttggagacaactcaaaaggaaaagtgcaaggacttggcaaggtggcaatctcaaatgatttatcaaaatcaaatgttctcttagttgcacctttgagcttcaatttattatcagtgggacaactctgtgatcttggacttcaatgcttattcactccatcagaggttattgtaacaaaaatggatgatgaatcaatggtattcaagggatttagatacaacaacctctacttagtggatttcacttcagaagatgcagacttaagaacttgcctcttcaccaaagcttctcttggatggctttggcataggaggcttgcacatgttgggatgagcacactcaagaaggtattaaagaaagatatggttagaggtttaaaggatgtggtgtttgaaaaagacaagccatgcagtgcatgtcaagctggaaagcaagttgctaatacacatcctactaaagctttcatgtcaacatcaaggccactggaactacttcacatggatttatttggacctacaaattatgtcagtgtcggtggcaacctctactgtctagtgattgttgatgacttctcaagatacacttgggtgttctttctccatgacaaatctgaagttgcatctatattcaagaagtttgccaagaaagcacaaaatgaatttgattgcaagattaagaagattagaagtgacaatggcaaagaatttgacaacaccaacattcatgagtactgtgatgaaattgggatcaagcatgaagtatctgccacatatacacctcaacaaaatggagttgttgaaaggaaaaataggaccttgatcacccttgcaagaacaatgattgatgagtataacacaccggagaggttttgggccgaagctgtcaacactgcttgttatgcatcaaacaggctatttcctcaccggctacttgcgaagactccttatgaactgctaaatgggaaaaagccagacgtctctttcttctgggtatttgggtgcaaatgctacatctacaagaaacgccatcacctagggaagtttcaaagacgttgtgatattggttttcttttgggttattcattaaagtccaaagcatatcgagtattcaactatgccactggcgtggtagaagaaacatatgatgtggaatttgatgagactaatggctcccaaggagcacttgaaaatcttgatgatgtaggtgatgagccacttagggaagcaatgaagaacatgcctattggagctatcaaaccaaaagaagatgaagaagaggtgcaaatcattgacaggccttcttcatcaaatgtaccacaagatgatgaaaaagatgagaggcatgcaaatgaagatacatttgtctctcatgaacaagcaagggtacaagccaaagatgttgatgctctaggatcttcttcccaagtggttgacaggagaaactcatcactacttcaagcacatcctcaaaaccaaatcatcgggagtccttcacaaggggttattactcgatcacatagacatgctaattttattgaacatcactcttttgtttcttgtgttgagcctacttgtatagatgaggcgctacaggatccgaactgggtgaatgccatgcatgaagaacttaacaacttcacccgtaacgaagtttggaccctggagaagcccccacaagatgcaagaatcattggaacaaagtgggtgttcagaaacaaacaagatgatcaaggtgtgattgtaagaaacaaggcaagacttgtcgcaaagggattctctcaagttgaaggcttagattttggagagacctttgccccagttgctcgactggaagccatccgtatcctacttgcatatgcatcatgttatgatataaaactttatcaaatggatgtaaaaagtgcatttttaaatggcttcataaatgaacttgtatatgttgagcaaccgcctggatttgaagaccctagatatcctaaccatgcttacaggttgtccaaggcgctatatgggctaaagcaagctccaagggcttggtatgagcgtcttcgcgacttcctcatcgaaaagggcttcaaaatcgggaccgtcgacacaactctcttcacaaagaaacataacggtgatattttcatttgtcaagtatatgttgatgatataatctttggctcgacaaatgactatcattgcaaggaatttggtgagttgatgtcgaaggagttcgagatgtcaatgattggtgagctaacatacttcctcggctttcaagtcaagcaaatgaaagatggtaactttctctcacaagagaagtataccaaagacttgttgaaaaggttcaacatggagaagtgcaaaccaatcaagacccccatgcctacaaatggacatctcgacttagatgagggaggtaactcggttaatcaaactctctaccgttctatgattggtagtttattataccttaccgcatctaggcccgatattatgtttagtgtctgcatgtgtgctagatttcaatctaatcctaagaaagctcaccttcgcgctgttaagagaattcttaggtatctcaggcacaccacaagcgttggtctgtggtatcccaaaggagctacttttgatttaattggctattccgattcggattatgccggttgcaaaattgataggaaaagtacttctgggggatgccatctgcttggtagatcactagtttcatggacatccaaaaggcaaaatagtgttgccttgtcaactgccgaagcggaatacattgccgcaggtgcttgttgcacacagattttatatatgaaacaaactcttctagactatggtgtagttctagaaaaggtacctttgttgtgtgataatgagagtgctgttaaaattgctaataatcctgtacaacactctcgcaccaagcacattgatatccgtcatcacttccttagagatcatgttgctaaaggagatatcattttagaaggaggcttgtctaacctagttgagataaccgccaactaa

SEQ ID NO: 5335 - DNA, 2034 bp, Zea mays
  Clone ID: TF_ZM4694.C3.o20.fg
atgtccggtggggatggacctcctcccgtttttgatggtgacgattttccttattggaaaattcgtatggaagcatacttagaggctatagacattggtgtctataaagccgccacacaagggtttccccaacctagagatcccacaaatcttgtaggtgatgagttcaattatgagaaatggaatgcgaaggccaaaaacaccctttttagaggcctttgcaaagatgtgttcaatagagttcggaatcataaaaatgctcatgatttgtggatggacatttgtgctctacacgaaggaactagaagtgaacgtgaggaaagatatcacatagctatgcgaaagttaaattcttttgaaatgcttgctaatgaaaatgcaaacgctatgtactcacgacttaatattcttgtagaggaagtcaatggattggggcttactcaaatctcacaaccggatgttgtgaggaagattctcagtgtcctcccaatagacaaatatggacacattgtcactgtgctacatcaaatggatctttcagttaccacacctacacaaattttgggaaagatcaatgcccatgaaatgtacatgcacatcaacaaagaagaatcatcttccaaaagaaaggatttggctctcaaagcaaatcatgaaagaaaaggaaaagcaaaaatacaagttgaggaagagtcctcaagtgatgatgaccttgatgcaaacattgccttgatggtaaggaagaccaccaagatgttgaagaagctaaatagagaaggcatcaaatttgattcaagaaagaagaagttcttttccaacaaaagaaagcccatttctgagatggactgctacaactgtggtgagcttggtcatcttgctcatcaatgcaacaagcccaagaagaacaagttcaagggcaagaaggaagatgacagcgatgatgaaaagaaggaaaagaattttttcaagaggaaggatgggaagcaaaagaggtttcacaagaagaagaatggaaaggcctatattgttggcgattggctcaccgacatcgaatcatcaagtggatcttcttcaagtgaagaagaggatgatgaaaaagttgcggccatcgccggggacttctcttcaccaccaccatcgccatcatccacttctcacctatgcctcatggctaggggtgaacgaaaggtacaaaatgatattaatattgatgatgatagtgatagtgatagtgatgaagaatttgcttcaccttcatatgatgagttagctgacttacttaaagaatatactcaaatcattagaaagtcaaaagctaaatgtgataggttgaaaaatgaaaatgaatctttaaatgccaaggagttgcaaaatagactagttaagatcaaggaagactatactcaaattaaatttgatcatgacaatcttcttgttgaaaatgaacttttatcttgcaaaacacatgaggctattaaccctgttgttaagcttgatgtagcaacctcatgtgatgatttgattcaagaagagcaaactagtctacatgctgaattgactgaaaaagttgaagtcctgactttagacaaccaaaaattgaagaattatttgactgatgcaactactagaggaaaagttgctattgagaacaatgatttcaacaatgagttggcagtggataatcaaaggcttaagaatgaggtcaagaaactaaaaagtgaaaatgaacatcttgcaacaagtgtgcaaaagttcaacaagggtcaatacctccaaaatgagctgcttatgaacactgttatgaaaaataacaagagtggtattggatacaatgcttttgtgcaaaagaaatctatcactcaatacaagccaaagcagactcacaagcctatcaaatgctttgagtgtggaaatgaaggtcattttgcccacaactgcaaagctaaaccaccaactcccttgcctaagcactcaagaccatttgctttcaatgctcactatgttctaagaaaggttgcaaatggaaagattaag

SEQ ID NO: 5336 - DNA, 6690 bp, Zea mays
  Clone ID: TF_ZM4875.C1.o2.fg
atggacctcctcccatttttgatggtgacgattttccttattggaaaattcgtatgtgatgagttcaattatgagaaatggaatgctaaggccaaaaacaccctttttagaggcctttgcatagatgtgttcaatagaattttgggaaagatcaatgcccatgaaatgtacatgcacatcaacgacaaagaagaatcatcttccaaaagaaaggatttggctctcaaagcaaatcatgaaagaaaaggaaaagcaaaaatacaagttgaggaagaatcctcaagtgatgatgaccttgatgcaaacattgccttgatggtaaggaagaccaccaagatgttgaagaagctaaatagagaaggcatcaaatttgattcaagaaagaagaaattcttttccaacaaaagaaagcccatttctgagatggactgctacaactgtggtgagctcggtcatcttgctcatcaatgcaacaagcccaagaagaataagttcaagggcaagaaagaagatgacagcgatgatgaaaagaaagaaaagaaattcttcaagaggaaggatgggaagcaaaagaggttccacaagaagaaaaatggaaaggcatatattgttggcgactggctcaccgacattgaatcatcaagtgggtcttcttcaagtgaagaagagaatgatgaaaaagttgccgccatcgccggggacttctcttcaccaccaccatcgccatcatcgacttctcacctatgcctcatggctaggggtgaacggaaggtacaaaatgatattaatattgctgatgatagtgatagtgatagtgatgaggaatttgcttcaccttcatatgatgagctagctgacttgcttaaagaatatactcaaatcattagaaagtcaaaagctaaatgtgataggttgaaaaatgaaaatgaatctttaaatgccaaatatgacatagttataaaggctagtgatgaaataaaagaagagaataaaactatgtcatcaactgtaaatgagctcacaaactccctaaaagatgctaaggaaaaatgtgacagagtaaatgaagttaatagggagttgcaaaatagactagtaaagatcaaggaagactatactcaaattaaatttgatcatgacaatcttcttgttgaaaatgaacttttatcttgcaaaacacatgaggctattaaccctgttgttaagattgatgtagcaacctcatgtgatgatttgagacaagaagagcaaactagtctacatactgaattgactgaaaaagttgaagtcctgactttagacaaccaaaaattgaagaattacttgactgatgctactactagaggaaaggttgctattgagaacaatgatttcaacaatgagttggcagtggataatcaaaggcttaaaaatgaggtcaagaaactaaaaagtgaaaatgaacatcttgcaacaagtgtgcaaaagttcaacaagggtcaatacctccaaaatgagctgcttatgaacactgtcatgaaaaacaacaagagtggtattggatacaatgcttttgtgcaaaagaaagctaccactcaatacaagccaaagcagactcacaagcctatcaaatgctttgagtgtggaaatgaaggtcactttgcccacaactgcaaagccaaaccaccaactcacttgcctaagcactcaagaccatttgctttcaatgctcattatgttctaagaaaggttgcaaatggaaagatcaaagtgaactacaagaccggtgggagccattgggttattgacagtggatgcacacaacatatgacaggcaacccacggatgttcacctcactggatgaaaatgttgatggtcaagataaaatcacatttggagacaattcaaaaggaaaagtgcaaggacttggcaaggtggcaatctcaaatgatttatcaatatcaaatgttctcttagttgcacctttaagcttcaatttattatcagtgggtcaactctgtgatcttggacttcaatgcttattcactccaacagaggttattgtaacaaagatggatgatgaatcaatggtattcaagggatttagatacaacaacctctacttagtggatttcacttcagaagatgtagacttaagaacttgcctcttcaccaaagcttcacttggatggctctggcataggaggcttgcacatgttgggatgagcacactcaagaaggtattaaagaaagatatggttagaggattaaaggatgtggtgtttgaaaaagacaagccatgcagtgcatgtcaagctggaaagcaagttgctaatacacatcctactaaagctttcatgtcaacatcaaggccactggaactacttcatatggatttatttggacctacaaattatgtgagtgtcggtggcaacctctactgtctagtgattgttgatgacttctcaagatacacttgggtgttctttctccatgacaaatctgaagttgcatctatattcaagaagtttgccaagaaagcacaaaatgaatttgattgcaagatcaagaagattagaagtgacaatggcaaagaatttgacaacaccaacattcatgagtactgtgatgaaattgggatcaagcatgaagtatctgccacatacacaccacaacaaaatggagttgttgaaaggaaaaataggaccttgatcactcttgcaagaacaatgattgatgagtataacacaccggagaggctatttcctcaccggctacttgcgaagactccttatgaactgctaaatgggaaaaagccagacgtctccttcttccgggtgtttggatgcaaatgctacatctacaagaaacgccatcacctagggaagtttcaaagacgttgtgatattggttttcttttgggttattcattaaagtccaaagcatatcgagtattcaaccatgccactggcatggtagaagaaacatatgatgtggaatttgatgagactaatggcacccaaggagcacttgaaaatcttgatgatgtaggtgatgagccacctagggaagcaatgaaaaacatgcctattggagctatcaaaccaaaagaagatgaagaagaggtgcaaatcattgacaggccttcttcatcaaatgtaccacaagatgatgaaaaagatgagaggcatgcaaatgaacaagcaagggtacaagccgaagatgttgatgctccaggatcttcttcccaagtggttgacaggagaaactcatcactacttcaagctcatcctcaaaaccaaatcatcgggagtccttcacaaggggttattactcgatcacatagacatgcttcttttattgaacatcactcctttgtttcttgtgttgagcctacttgtatagatgaggtgctacaggatccggactgggtgaatgccatgcatgaagaacttaacaacttcacccgtaacgaagtttggaccctggagaagcccccacaagatgcaagaatcattggaacaaagtgggtgttcagaaacaaacaggatgatcaaggtgtgattgtaagaaacaaggcaagacttgttgcaaagggattctctcaagttgaaggcttagattttggagagacctttgcaccggttgctcgactggaagccatctgtatcctacttgcatatgcatcatgctatgatataaaactttatcaaatggatgtaaaaagtgcatttttaaatggcttcataaatgaacttgtatatgttgagcaaccgcctggatttgaagaccctagatatcctaaccatgcttacaggttgtccaaggcgctatatgggctaaagcaggctccaagggcttggtatgagcgccttcgcgacttcctcatcgaaaagggcttcaagatcgggaccgtcgacacaactcttttcacaaagaaacataacggtgatattttcatttgtcaagtatatgttgatgacataatctttggctcgacaaatgactatcattgcaaggaatttggtgagttgatgtcgaaggagttcgagatgtcaatgattggtgagctaacgtacttcctcggctttcaagtcaagcaaatgaaagatggtaactttctctcacaagagaagtataccaaagacttgttgaaaaggttcaacatggagaagtgcaaaccaatcaagacccccatgcctacaaatggacatctcgacttagatgagggaggtaacccggtcaatcaaactctctaccgttctatgattggtattttattataccttaccgcatctaggcccgatattatgtttagtgtctgcatgtgtgctagatttcaatctaatcctaagaaagctcatcttcgcgctgttaagagaattcttaggtatctcaggcacaccacaagcgttggtctgtggtatcccaaaggagctacttttgatttaattggctattccgattcggattatgccggttgcaaaattgataggaaaagtacttctgggggatgccatctgcttggtagatcactagtttcatggacatccaaaaagcaaaccagtgttgccttgtcaactgccgaagcggagtacattgcccgcagacatcagttcaggatgtcgcgcacgaagaatgtgtcggcaccagggggaggcgatgatgaggatcctcgtcgccccttcaggcaggtcaagggcaagacagtttacttggagcagcaggaaggccgcaagaagcagcgtacggacagagcagcccgtgcagcggcagcagctgcagcagccgctgcgcaggccgagcttggagatcagccgcagactccgtcagatcagatcgcataccgtgttcgtcgtctcgcctcccggcctcgctcctccactcacacctctgcttccactccgccacccactctgcctgctcccgtcacccctgttgcgccatccaccaccacagccatacccgctacctccactacgccagcttccactgctcctcctcccgctcccgctacagctcctcctatccctccacctcatttccgggagcgcgatgagactgaggtacaaccacttgctgcggatcctagattgtttgaccttcagcgtgctacagcagcacgggtacgtaggttcagatacgtacccgtggagtcttggttaccagctaagagggaccctgtggcaggtgacctattcagcacacgtattcaggagtcgtttttcagagcccagatgtctgctcagatagctctgcgagtgcaccggctcttggaccttctagcttttctgctcaccgtcggtgctgactctgaggcgcacctcacatatctgcctggccttctgacccttttgactaccagcggcaggtatgttgaggagtgggtacgagtcttctacgcctctgtatggattgacccggatcatcactggatgaggttttgttttgagcgagaggatgtcaccattactgccagtcagatccgccagctttttggattccccgagtcgacgactcgtcttcacagcctttgctacggcacttctgaccctcctcgtcgccctcacggcggtgtggctccgggtacagctcacgtcgcggccctgttccgcccgcccttctctgatgggtcgcgacgttcaccggcagattttactacagcagccaagtatttatatgagcttatcagacggactcttctgccgaggatgggatacagggaggctaccacacatattcagctctggctccttggtgccctggtctctcactctgagtttgatgtcgtggacttccttatttgtgagatcgaggacaccgttttggataggattcgtgctcgtcgtcagttgccatatgctcactacttatgccacatctttgcgcagctgattcagcctcctcggtttcagggcacacttgaggcctcacgcctcgtttttggattctaccgtcctgcgcctgagactcctgtgccagcttctgctcctgtttttgactctcaggccgaggatgcagctcttcatcagttcgacactcaggctacagcagttgatgatgatgatgatgatgattttggggttcctcctccgcctcctatgcctccacactcacatgatcatgaggctgggagttctagtgctgcccccgctgccccttcggctatggaccctgctctggcttcgattctccagtctatcactcagcagcaggctcacctggcagtcgagcaggcccggttatccgagaggatgctctcgatgtttcagaacatgcaggacaggcaggatgcgcttcagcagcagctactccaggatcgggctgagagcagggcattcatggctcttatgctacagcagtctggtgtctcagttcctccggttcagtctcctccacctcctccgcttcacgctccagttgtgccatcgattctgtcaggaccccctgttggtccttctccgctccggccggtcactttggctttcacctctccggttctcagctctgtctgcccgcagccgccagtgccaccagcctctgctgttaccactactgttgtggcagtatctgtgacctcttctgttccggtagctcctgcagcgcgacctcagtccgagtcagtactagctctagcttctaccacagatcctggatccgagactgactctgaccctccgccggcgttcgctctgctgcctcgaccgtga

SEQ ID NO: 5337 - DNA, 832 bp, Zea mays
  unsure (1)..(832): unsure at all n locations
  Clone ID: TF_LIB5074-003-R1-XP1-D9
cggccgggccgggatacctgttcagaagacacaatcttctaacgtcactcccttggacatttgatacttcggtctcttccccaaaactctaccaaaatggactcttaccaagcacctgctgctggcgccggtggccgtggctgctacaactgcggagactcgtctcaccgcgctgccgagtgccccaccaagggtaccccaacttgctacaactgtggtgagaagggccacgttagccgtgaatgcacttctccccaggctgagaagacgtgctaccgctgcggtggcaccggccacatctcgcgcgagtgcaccaaggacggcggtgcccagatgggtggccgtggcggcggcagccaagagtgctacaagtgtggtcaggtcggtcacattgcccgcaactgctcccagggtggcggctacggcggtgctgctggtggatacggtggcggccgtggaggctacggtggcggtgccggtggctacggaggcgctcgccagaccacctgctactcgtgcggtggtttcggtcacatgagccgtgactgcacccagggccagaagtgctacaactgcggtgaggtcggccatctgtcgcgcgactgcccccaggagacttcatnctgagcgtgtgtgctaccgctgcaagcagcccggccacgtccagagcgcctgccccaactagggtgttccagatgccgttcgatgttttgatctggaacgagtttcgatgcaccgaagcgcttcgttgtaaagcgatgtcggtccttgcgcccacgatgtgacgaatcatcgacatgattacgaattctttttctgatattttcattca

SEQ ID NO: 5338 - DNA, 721 bp, Zea mays
  Clone ID: TF_LIB4759-029-Q1-K1-E9
aaccctctctacatagaagggttccgttaacgagattcttgtgtatggaagggacatgatgcacgttcttcagctgcacgatctttcccgaagtaaacttcagatccaccgtgccagtgccatgaacagaagcatgtgacccattccccattagcacggaagaatcccgggcgccctgataagaagagaacaagttaatgtgagagggcacatgaacattagcaccagtatcaagccaccaactaggtgattgaaatactgagaagatgaaaggtagattaccataccctttgtcttcctcattgctagcgatcactgtgttgacattgccctttttgccacggcgatccgctcgatcaggacaatccttggcaaaatgacccgcctcgccacatgcgaaacatgtcaattcagccttgttcttcttcttcttgaagttggtagttttattgggcttgttagattttggcttccctttgcccttgttgtggtccttctgaaccatgttggcgctggagtggccctcgcctcctttagatcccgtgtccttagcccgagctttcttctcaacatccagagacgctatcagatttatcccccacgccacgctctccaacgccacagcttgcgcccgcaatggcactcgtgtccgcctccttgtactgcaccacgggcgatacgggtgctccccaggaatgggcaatgggccgtcgaactactt

SEQ ID NO: 5339 - DNA, 3881 bp, Zea mays
  Clone ID: TF_ZmC13579_1
atggctgcttttgccgacgcgctgaagccagaaaagtttaatggtatgcactttaagagatggcaagtcaaggccacgctctggcttactgctatgaatgtcttccatgttagtaaaggcagacctgagggtccactgactcctgaacaggagaaagagtacgaccatgccaatactatgttcacgggagccgttcttagcgcccttgttgaccgtctggttgatgcgaatatgcagtacacagacgggaaacagttgtgggatgcacttactactaagtatggtgcatcagatgctggcagtgacctgtatatcatggagagctttcatgattataagatggttgataatcgctctattgtagagcaagctcatgaaatacagtgtatagccaaggagctcgaccaccttaagatagtccttcctgaccgatttgtggccggatgcattattgcaaagttgccttctacatggaggaacttcgccacagctctgaaacataagagacaggagatatcagttgaaaatctgatagcgtctctggatgttgaggagaaagctcgggctaaggacacgggatctaaaggaggcgagggccactccagcgccaacatggttcagaagaaccacaacaagggcaaagggaagccaaaatctaacaagcccaacaaaactaccaacttcaagaagaagaagaacaaggctgaattgacatgtttcgcatgtggcgaggcgggtcattttgccaaggattgtcccgatcgagcggatcgccgtggcaaaaagggcaatgtcaacacagtggtcgctagcaatgaggaagacaaagggtatggtaatttacctttcatcttctcagtatttcaatcacctagatggtggctggaggagtacagggatgttcggatgggtgcggtgcatgtgcacgacgccgccatggcgcatatcctggtgttcgagagcccggcagcgtccgggaggcacatctgcgcccagtccatctcccactggagcgacttcgcggccaaggtcgccgagctgtaccctgagtacaaggtgcccaagttccccaaggatacccagcctgggctggtgcgacagggagccgaggaggggtccaagaagctcgtcgcgttggggctgcacttcagccctctggagaagatcatcagggacgctgtggaggccctcaagagcagaggctacatttcgtagctagccgaccgacggcagctatagtggagtagtatgcctgtcgaatttcgattcccaagtggcaaattctgcaaaacgagttcgccaatatgaacaataaataaagaacgttgtgataaaataaagcagattttctgttgcaaggttctaagtgccatagttgtgtgcagtcgaagcaacctcgaaagcctcataaggctgctgaggagagacacctggcaccactagaactcatacattctgatctttgtgagatgaatggtgtgttgacaaaaggtggtaagagatacttcatgacattgattgatgatgcgtctagattttgctatgtatacttgctaaaaactaaagatgaggctttagactactttaaaatctataaggctgaggttgaaaaccaactagagagaaagatcaaacgtcttagatcagatcgtggtggcgagttctttcccaaagtctttgatgatttctgtgcagaacatggcattattcatgagaggactcctccctattcacccgagtcaaacgggattgctgaaaggaaaaaccgtacgttgactgacctggtgaatgccatgttagacacttgtggtttatctaaggcatggtggggggaggcagtcctgacttcatgtcatgttctgaatagaattcctatgggcaaagaagagaaaaccccttatgagaagtgggttgggagaaaaccatcactttcatacttgcgcacttgggggtgcatggcgaaagtcaatgtaccaattaataaaaagcgcaagcttggtccaaggacagtggattgtgtctttcttggatatgcttcgtgtagcatagcatatagatttttagtagttaaatctgaagttcctgatgtgtatgttgatactattatggaatcacgtgatgctactttctttgagcatatatttccaatgaaagacattcatagcaattctagatactcttctgagataattcctgaacataatacacctattgagagttttgaacagccacatgaaattgtcctagaggaggatgacaatgatgctcctaaaaggagcaagagacaaagggttgaaaaatcctttggtaatgatttcattgtgtaccttgtggacgatactcctactaccattgcagaagcatttgcatctccagatgcagatgattggaaagaagcagttcataatgagatggactctattctttcaaatggtacgtgggaagtcactgatcgaccctatggatgcaaacccgtgggttgtaagtgggtgtttaaaaagaagctcaagcctgatggtacaattgaaaagtacaaggctaggcttgtggctaaaggctatactcagaaagaaggagaagacttctttgatacttactcacctgttgctagaatgaccactattcgagtactactttctttggctgcctcgtatggtctccttgttcatcagatggatgtaaagacagcttttcttaatggagagctggacgaggaaatctatatggaacagcctgatggatttgtagtaaagggtcaagaaagcaaggtgtgcaagttattgaaatctttgtatggtctgaagcaagcaccaaagcagtggcatgagaagtttgacactactctaacgtctgcaggctttgccattaatgaggcagacaggtgtgtatattatcgctgtggtgggggcgaaggagttatattgtgcttatatgttgatgatatattgatatttggcacaaacattgatgtgatcaatgaagtcaagtcttttctatcaaagagttttgatatgaaagatctgggagaagctgatgtgattctaaacatcaagctgattaaggcagatggtgggattactctctcgcaatctcactatgttgaaaaggttttgaagcgatttggcttctctgagtgcaaaccttctccaacaccttatgatcccagtgtgacactgcgaaagaacaagagaattggtttagaccaattgagatactctcagattgtcggttcactcatgtatcttgctggtgcaacaaggcccgatatctcgtttgctgtgagcaaattgagtaggttcatgtcaaaccccgggactgatcattggcatgcacttgagcgggttatgcgctacctgcaaggtacaatgagttatggaattcactattctggtcagcatgcagtacttgaaggatatagtgattcgaactggatatctgatgcagacgagctttatgccaccagtggttatgtctttactattggtggaggtgcggtatcatggaggtcatgcaagcagaccattttgacgaggtcaaccatggaagccgagctagctgcacttgacacagcaaccgttgaggcagaatggttgcgtgaactcttgatggacttgccggtggttgagaaaccaataccagctatccttatgaactgtgacaatcagacagtgattgctaaagtgacgagttctaaggataatggaaagtcatcaagacatgtcaaaagacgattgaagtctgtcagaaagttgagaaactccggagttataagtgtgacttatatttcaacagataaaaatctggcagatccttttaccaagggactaccacgtaatgtgatagaaatcgcatcgagagagatgggtatgagacccgaataa

SEQ ID NO: 5340 - DNA, 243 bp, Zea mays
  Clone ID: TF_ZmC13579_19
atggttcagaagaaccacaacaagggcaaagggaagccaaaatctaacaagcccaataaaactaccaacttcaagaagaagaagaacaaggctgaattgacatgtttcgcatgtggcgaggcgggtcattttgccaaggattgtcctgatcgagcggatcgccgtggcaaaaagggcaatgtcaacacagtgatcgctagcaatgaggaagacaaaggggcgcccgggattcttccgtgctaa

SEQ ID NO: 5341 - DNA, 3567 bp, Zea mays
  Clone ID: TF_ZmC13579_2
atggctgcttttgccgatgcgctcaagccagaaaagttcaatggtatgcactttaagagatggcaagtcaaggccacgctctggcttactgctatgaatgtcttccatgttagtaaaggcagacctgagggtccactgactcctgaacaggagaaagagtacgaccatgccaatactatgttcacgggagccgttcttagcgcccttgttgaccgtctggttgatgcgaatatgcagtacacagacgggaaagagttgtgggatgcacttactactaagtatggtgcatcagatgctggcagtgacctatatatcatggagagctttcatgattataagatggttgataatcgctctattgtagagcaagctcatgaaatacagtgtatagccaaggagctcgaccaccttaagatagtccttcctgaccgatttgtggctgggtgcattattgcaaagttgccttctacatggaggaacttcgccacagctctgaaacataagagacaggagatatcagttgaaaatatgatagcgtctctggatgttgaggagaaagctcgggcaaaggacacgggatctaaaggaggcgagggccactccagcgccaacatggttcagaagaaccacaacaagggcaaaggaaagccaaaatctaacaagcccaacaaaactaccaacttcaagaacaagaagaacaaggctgaattgacatgtttcgcatgtggcgaggcgggtcattttgccaaggattgtcccgatcgagcggatcgccgtggcaaaaagggcaatgtcaacacagtggtcgctagcaatgaggaagacaaagggtatgataatttacctttcatcttctcagtatttcaatcacctagctggtggcttgatactggtgctaatgttcatggcgcccgggattcttccgtgctaatggggaatgggtcacatgcttctgttcatggcactggcacggtggatctgaagtttacttcgggaaagatcgtgcagctgaagaacgtgcatcatgtcccttctatacacaagaatctcgttagcggaacccttctatgtagagatgggttcaagtcgaagcaacctcgaaagcctcataaggctgctgaggagagacacttggcaccgctagaactcatacattctgatctttgtgagatgaatggtgtgttgacaaaaggtggtaagagatacttcatgacattgattgatgatgcgtctagattttgctatgtatacttgctaaaaactaaagatgaggctttagactactttaaaatctataaggctgaagttgaaaaccaactagagagaaagatcaaacgtcttagatcagatcgtggtggcgagttctttcccaaagtctttgatgatttctgtgcagaacatggcattattcatgagaggactcctccctattcacccgagtcaaacgggattgctgaaaggaaaaaccgtacgttgactgacctggtgaatgccatgttagacacttgtggtttatctaaggcatggtggggggaggcagtcctgacttcatgtcatgttctgaatagaattcctatgggcaaagaagagaaaaccccttatgagaagtgggttgggagaaaaccatcactttcatacttgcgcacttgggggtgcatggcgaaagtcaatgtaccaattaataaaaagcgcaagcttggtccaaggacagtggattgtgtctttcttggatatgcttcgtgtagcatagcttatagatttttagtagttaaatctgaagttcctgatgtgtatgttgatactattatggaatcacgtgatgctactttctttgagcatatatttccaatgaaagacattcatagcaattctagatactcttctgagataattcctgaacataatacacctattgagagttttgaacagccacatgaaattgtcctagaggaggatgacaatgatgctcctaaaaggagcaagagacaaagggttgaaaaatcctttggtaatgatttcattgtgtaccttgtggacgatactcctactaccattgcagaagcatttgcatctccagatgcagatgattggaaagaagcagttcataatgagatggactccattctttcaaatggtacgtgggaagtcactgatcgaccctatggatgcaaacctgtgggttgtaagtgggtgtttaaaaagaagctcaagtctgatggtacaattgaaaagtacaaggctaggcttgtggctaaaggctatactcagaaagaaggagaagacttctttgatacttactcacctgttgctagaatgaccactattcgagtactactttctttggctgcctcgtatggtctccttgttcatcagatggatgtaaagacagcttttcttaatggagagctggacgaggaaatctatatggaacagcctgatggatttgtagtaaagggtcaagaaagcaaggtgtgcaagttattgaaatctttgtatggtctgaagcaagcaccaaagcagtggcatgagaagtttgacacaactctaacgtctgcaggctttgccattaatgaggcagacaggtgtgtatattatcgctgtggtgggggcgaaggagttatattgtgcttatatgttgatgatatattgatgtttggcacaaacattgatgtgatcaatgaagtcaagtcttttctatcaaagagttttgatatgaaagatctgggagaagctgatgtgattctaaacatcaagctgattaaggcagatggtgggattactctctcgcaatctcactatgttgaaaaggttttgaagcgatttggcttctctgagtgcaaaccttctccaacaccttatgatcccaagaacaagagaattggtttagaccaattgatatactctcagattgtcggttcactcatgtatcttgctggtgcaacaagacccgatatctcgtttgctgtgagcaaattgagtaggttcatgtcaaaccccgggactgatcattggcatgcacttgagcgggttatgcgctacctgcaaggtacaatgagttatgggattcactattctggtcagcatgcagtacttgaaggatatagtgattcgaactggatatctgatgcagacgagctttatgccaccagtggttatgtctttactattggtggaggtgcggtatcatggaggtcatgcaagcagaccattttgacgaggtcaaccatggaagccgagctagctgcacttgacacagcaaccgttgaggcagaatggttgcgtgaactcttgatggacttgccggtggttgagaaaccaataccagctatccttatgaactgtgacaatcagacagtgattgctaaagtgacgagttctaaggataatggaaagtcatcaagacatgtcaaaagacgattgaagtctgtcagaaagttgagaaactccggagttataagtgtgacttatatttcaacagataaaaatctggcagatccttttaccaagggactaccacgtaatgtgatagaaatcgcatcaagagagatgggtatgagacccgaataa

SEQ ID NO: 5342 - DNA, 1991 bp, Zea mays
  Clone ID: TF_ZmC13579_4
acaggactcctcctcccccttccctccccctaaaagctaaaaacatttggagagagagagagagggagatcgaggggaaaccgagcaaccaagacgcacacgacgatggagcgagaggacgcgtgccgggtggcgctgctggacgcggccggcggcgagggcggcaagaagcagcagcagctcgcggcgcgggtgtgggaggagtcgaggaagctgtgggacatcgtggcgccggccatcttcagccgcgtcgtcacctacagcatgaacgtcatcacgcaggccttcgccggccacctcggcgacctcgagctcgccgccatctccatcgccaacaccgtcgtcgtcggcttcaacttcggcctcatgttgggcatggcgagcgcgctggagacgctgtgcgggcaggcgttcggcgcgaagaagttccacatgatgggcgtgtacatgcagcggtcgtggatcgtgctgttcatgtgcgcggtgctgctgctgcccatgtacttcttcgcggaggacgtgctgctgctgacggggcagccgccggagctggcggcgatggcggggaaggtgtgcgtgtggttcatcccgctgcacttctccttcgccttcctcttcccgctgcagcgcttcctgcagtgccagatgaggaactccgccaacgccgccgccgccgcagccgcgctctgcgtccacctcctcgccagctggctcctcgtctccaggctccgcttcggcctcgcgggcatcgccctcacgctcaacttctcctggtgggccaccggcgccatgctcttcgcctacgtcgcatgcggcggctgccccgacacctggcacggcttctcgctcgaggccttcgccggcatgtgggagttcgtcaagctatcctccgcgtccggtgtcatgctatgcttggagaactggtactaccggatcctcgtcttgttgacgggaaacctaaaagatgcagccattgccgtcgacgctctgtccatatgcatgtcaattaacgggtggcagatgatgattccgttggcgttcttcgccggcaccggtacacagacgggaaacagttgtgggatgcacttactactaagtatggtgcatcagatgctggcagtgacctgtatatcatggagagctttcatgattataagatggttgataatcgctctattgtagagcaagctcatgaaatacagtgtatagccaaggagctcgaccaccttaagatagtccttcctgaccgatttgtggccggatgcattattgcaaagttgccttctacatggaggaacttcgccacagctctgaaacataagagacaggagatatcagttgaaaatctgatagcgtctctggatgttgaggagaaagctcgggctaaggacacgggatctaaaggaggcgagggccactccagcgccaacatggttcagaagaaccacaacaagggcaaaggaaagccaaaatctaacaagcccaacaaaactaccaacttcaagaagaagaagaacaaggctgaattgacatgtttcgcatgtggcgaggcgggtcattttgccaaggattgtcccgatcgagcggatcgccgtggcaaaaagggcaatgtcaacacagtggtcgctagcaatgaggaagacaaaggggcgcccgggattcttccgtgctaatggggaatgggtcacatgcttctgttcatggcactggcacggtggatctgaagtttacttcgggaaagatcgtgcagctgaagaacgtgcatcatgtcccttctatacacaagaatctcgttagcggaacccttctatgtagagatgggttcaaggtagttttggagtccaataaattagttgtgtccaagtctggacaatttattggtaaaggctatgattgcggaggcttgttccgcttttctttgttagatttcaataataagtctgtgaaccatatttgtgctaaaaaaaaaaatcttgcgggtatttggcatt

SEQ ID NO: 5343 - DNA, 1269 bp, Zea mays
  Clone ID: TF_ZmC13579_7
ggtacccccgagctgccgggttactcaacaatccaaaaccttattgtagacaatttcctagtttttcaatggctgcttttgccgacgcgctgaagccagaaaagtttaatggtatgcactttaagagatggcaagtcaaggccatgctctggcttactgctatgaatgtcttccatgttagtaaaggcagacctgagggtccactgactcctgaacaggagaaagagtacgaccatgccaatactatgttcacgggagtcgttcttagcgcccttgttgaccgtctggttgatgcgaatatgcaatacacagacgggaaagagttgtgggatgcacttactactaagtatggtgcatcagatgctggcagtgacctgtatatcatggagagctttcatgattataagatggttgataatcgctctattgtagagcaagctcatgaaatacagtgtatagccaaggagctcgaccaccttaagatagtccttcctgactgatttgtggctgggtgcattattgcaaagttgccttctacatggaggaacttcgccacagctctgaaacataagagacaggagatatcagttgaaaatctgatagcgtctctggatgttgaggagaaagctcgggctaaggacacgggatctaaaggaggcgaggacaactccagcgccaacatggttcaaaggaaccacaacaagggcaaaggaaagccaaaatctaacaagcccaacaaaactaccaacttcaagaagaagaagaacaaggctgaattgacatgtttcgcatgtggcgaggcgggtcattttgccaaggattgtcctgatcgagcggatcgccgtggcaaaaagggcaatgtcaacacagtggtcgctagcaatgaggaagacaaaggggcgcccgggattcttccgtgctaatggggaatgggtcacatgcttctgttcatggcactggcacagtggatctgaagtttacttcgggaaagatcgtgcagctgaagaacgtgcatcatgtcccttctatacataagaatctcattagcggaacccttctatgtagagatgggttcaaggtagttttggagtccaataaattagttgtgtccaagtctggacaatttattggtaaaggctatgattgcggaggcttgttccgcttttctttgttagatttcaataataagtctgtgaaccatatttgtgcgaaaaaaaaaaaaaaaaggggcccttggcattctcgtttgtgtcatattaattttggctc

SEQ ID NO: 5344 - DNA, 2094 bp, Zea mays
  Clone ID: TF_ZM4584.C2.o5.fg
atggagagctttcatgattataagatggctgataatcactctattgtagagcaagctcatgaaatacagtgtatagccaaggagctcgaccatcttaagatagtccttcctgaccgatttgtggctggatgcattattgcaaagttgccttctacatggaggaacttcgccacatctctgaaacataagagacaggagatatcagttgaaaatatgatagtgtctctggatgttgaggagaaagctcgggctaaggacacgggatctaaaggaggcgagggccactccagcgccaacatggttcaaaggaaccacaacaatggcaaaagaaagccaaaatctaacaagcccaacaaaactaccatcttcaagaagaagaagaacaaggctgaattgacatgtttcgcatgtggcgaggcgggtcattttgccaaggattgtcctgatcgagcggatcgtcgtggcaaaaagggcaatgtcaacacagtggtcgctagcaatgaggaagacaaagggtatggtaatttacctttcatcttctcagtatttcaattacatagttggtggcttgatactggtgctaatgttcatgtgtgttctgacattaacttgttctcctcttatcagggtgcccgggattcttccgtcctaatggggaatgggttacatgcttctgttcatggcactagcacggtggatctaaagtttacttcgagaaagatcgtgcagctgaagaacgtgcatcatgtcccttctatacacaagaatctcgtcagcggaacccttctatgtagagatgggttcaagaacatggcattattcatgagaggacgcctccctattcacccgaatcaaacgggattgctgaaaggaaaaaccgggtgcatggcgaaagtcaatgtaccaattaataaaaagcgcaagcttggtccaaggacaatggattgtgtctttcttggatatgcttcgtgtagcatagcatatagatttttagtagttaaatctgaagttcctgatgtgtatgttgatactattatggaatcatgtgatgctactttctttgaacacatatttccaatgaaagacattcatagcaattctagatactcttctgagataactcctgaacatagtacatctgttgagagttctgaacagccacatgaaattgtcctagagaaggatgacaatgatgctcctaaaaggagcaagatacaaagggttgaaaaatcctttggtgatgatttcattgtataccttgtggacgatactcctactaccattgtagaagcatttgcatctctagatgcagatgattggaaagaagcagttcataatgagatggactccattctttcaaatggctttgccattaatgaggcagacaggtgtgtatattatcgctgtggtgggggcgaaggagttatattgtgcttatatgttgatgatatattgatatttggcacaaacgttgatgtgatcaatgaagtcaagtcttttctatcaaagagttttgacatgaaagatctgggggaagctgatgtgattctaaacatcaagctgattaaggcagatgtgagcaaattaagtaggttcatgtcaaaccccaggactgatcattggcatgcacttgagcgggttatgcgctacctgcaagatgagctttatgccaccagtggttatgtctttactattggtggaggtgcggtatcatggaggtcatgcaagcagaccatcttgacgaggtcaaccatgcaagtcgagctagctgcacttgacacagcaaccgttgaggcagaatggttgcgtgaactcttgatggacttgtcggtggttgagaaaccaataccagctatccttatgaactgtgacaatcagacagtgattgttaaagtgacaagttctaaggataatgggaagtcatcaagacatgtcaaaagacgatcgaagtctgtcagaaagttgagaaactccagagttataagtgtgacttatatttcaacagataaaaatctggcagatccttttaccaagggactaccacgtaatgtgatagaaatcgcatcaagagatatgagtatgagacccatataa

SEQ ID NO: 5345 - DNA, 2247 bp, Zea mays
  Clone ID: TF_ZM5107.C1.o13.fg
atggctgcttttgccgacgcgctgaagccagaaaagtttaatggtatgcactttaagagatggcaagtcaaggccacgctctggcttactgctatgaatgtcttccatgttagtaaaggcagacctgagggtccactgactcctgaacaggagaaagagtacgaccatgccaatactatgttcacgggagccgttcttagcgcccttgttgaccgtctggttgatgcgaatatgcagtacacagacgggaaacagttgtgggatgcacttactactaagtatggtgcatcagatgctggcagtgacctgtatatcatggagagctttcatgattataagatggttgataatcgctctattgtagagcaagctcatgaaatacagtgtatagccaaggagctcgaccaccttaagatagtccttcctgcccgatttgtggccggatgcattattgcaaagttgccttctacatggaggaacttcgccacagctctgaaacataagagacaggagatatcagttgaaaatctgatagcgtctctggatgttgaggagaaagctcgggctaaggacacgggatctaaaggaggcgagggccactccagcgccaacatggttcagaagaaccacaacaagggcaaaggaaagccaaaatctaacaagcccaacaaaactaccaacttcaagaagaagaagaacaaggctgaattgacatgtttcgcatgtggcgaggcgggtcattttgccaaggattgtcccgatcgagcggatcgccgtgacaaaaagggcaatgtcaacacagtggtcgctagcaatgaggaagacaaagggtatggtaatttacctttcatcttctcagtatttcaatcacctagctggtggcttgatactggtgctaatgttcatgtgtgttctgacatcaacttgttctcttctcatcagggcgcccgggattcttccgtgctaatggggaatgggtcacatgcttctgttcatggcactggcacggtggatctgaagtttacttcgggaaagatcgtgcagctgaagaacgtgcatcatgtcccttctatacacaagaatctcgttagcggaacccttctatgtagagatgggttcaaggtagttttagagtccaataaattagttgtgtccaagtctggacaatttattggtaaaggctatgattgcggaggcttgttccgcttttctttgttagatttcaataataagtctgtgaaccatatttgtgctaatgttgatgatcttgcgagtatttggcattctcgtttgtgtcatattaattttggctctatgtctcggcttgcaaccatgagtttaattccgaatatcaccatagtcaaaggttctaagtgccatagttgtgtgcagtcgaagcaacctcgaaagcctcataaggctgctgaggagagacacctggcaccactagaactcatacattatgatctttgtgagatgaatggtgtgttgacaaaaggtggtaagagatacttcatgacattgattgatgatgcgtctagattttgctatgtatacttgctaaaaactaaagatgaggctttagactactttaaaatctataaggctgaggttgaaaaccaactagagagaaagatcaaacgtcttagatcagatcgtggtggcgagttctttcccaaagtctttgatgatttctgtgcagaacatggcattattcatgagaggactcctccctattcacccgagtcaaacgggattgctgaaaggaaaaaccgtacgttgactgacctggtgaatgccatgttagacacttgtggtttatctaaggcatggtggggggaggcagtcctgacttcatgtcatgttctgaatagaattcctatgggcaaagaagagaaaaccccttatgagaagtgggttgggagaaaaccatcactttcatacttgcgtacttgggggtgcatggcgaaagtcaatgtaccaattaataaaaagcgcaagcttggtccaaggacagtggattgtgtctttcttggatatgcttcgtgtagcatagcatatagatttttagtagttaaatctgaagttcctgatgtgtatgttgatactattatggaatcacgtgatgctactttctttgagcatatatttccaatgaaagacattcatagcaattgttgggggccttcggcttccgaaggtcctcaaaaacatgatttaacaatgtttctggagtataatgtgtga

SEQ ID NO: 5346 - DNA, 1371 bp, Zea mays
  Clone ID: TF_ZM4454.C3.o3.fg
atggctcgaagaagatcccaaaagaacaagaagaccaaggagaacaaggaggaagaagaagaaaatgaacgatggagaccaaacgatgaatccacctctccaaaaggtttgtcttcccatttcgattcccacatatgttctgtggctaatgaaaatgatagcggaagcacaaatgaggatgatgaggatgaaagaagcttcatgcaactctacgctcatctaagcctagaagataaggcagtcatgctcaaacttctaaaaagagcgagagagcaaagcgaagctcgtcaaatgctagaagatgttctctccatgaaaatgctacactttgacgagttgactaaagaacatgaggagctaaagtgctctcatgttgatttggtccaaaggaatgccttgcttaaggaccaagtagaaaaggtaaaagatgataatctagcttttcaagaaaaatatgatatgcttctatattctcatgaaaatcttatggatgatcatatcatattaaacattgctcatgaggttgtaatagaaaacttaaaatcccaacaacctcactcatgcacatgtattcaaattgaaactatattaccatgtgctaatgcttgttgtccgtcgacaagcaaatcttcctttgagctagaatttgcaggaacaaaagatgatacatatcaaaagctcaaagaagaaaatgagaggctaaagataagcttgacacaacttaaagggaagtgcattgctcaaccttctcaagataaccatgatcacatggtgaagaagcttgagacaggaacaaccgcggcatgcactaaatcccttgaagaaaatgtcaaggacttgaggattgtcaagaggaaggaacaaaagaagaaaatcaatgcctctgacaaaagcgtcaaccatgcctccatgcaaggtaatatccaaggtaataatcaagtcacacttcatactaagagaagtaagaagtgtagtgaatgctttgaaaagggacactcgattaggtcatgtccctatattaaaaatgacttgattactaacaaggatgataaactttgttttaaatgctcaaagaagggacacttaattaagtcttgtccctatttgaaacaaaaaggcatagtgttagaaaagaaaatattaactaaccatgtagcaagcaagaaacaagaaaagaagaaatcttcaaaacttgaagagcgcctttgctacatatgccgaaagaagggacatcaatgcaaggattgtcccattggtaactatcccatctctagcctgtcaattatttcacatgtaactaggcaacccaaaattgcaacttgtgctagaaaggtaatgcgtttaccaaatgctaacacaaaggactcttga

SEQ ID NO: 5347 - DNA, 549 bp, Zea mays
  Clone ID: TF_ZmC2309_4
gttgataaagctcagccacaaggacctggtagagaccgtaatggtgaccgtgattatgaccgcgagcgtggatctcgttatgaacgtggtcgtgactatggtggtgggcgtgcaccgcgaggtggtggtggtggtggtggtggtggtgactgcttcaagtgtgggaaacctggtcattttgctagagagtgcccatctggggatggtgggagaggggacagatatggtgggagagatgacaggtatggtggcggtggcggtggcggtggcggtcgttatggttctgaccgtggtggtgaccgatactctggccgtagccgagatggcggcagctatgggggtggcgatcgctacagccgtgaccgatcaggtccttactgatggccttagttcttgattgagaagtatgtgccatccaggcttctttttggttatttgttcttgttgtggcttggttgatactgtggttctggatttgggtacttgcgtcctatgatcattttattctgaccaattgatccccgaatgccccgagattcttctttgttt

SEQ ID NO: 5348 - DNA, 977 bp, Zea mays
  unsure (1)..(977): unsure at all n locations
  Clone ID: TF_ZmC218_17
ggtcggcctcgccacgccgatcggcggcggcggctacggctcccgcggcggtggcggatctggcggcggcggtcgcagctacggtggtagctggggcggcggccggagatccggcggcgggggcggtcctggcgcgtgctacaagtgcggcgagcccggccacatggccagggactgccctagcgccgacggcggaggctacggcggaggcggctacgggggaggcggctacggaggaggaggaggcggcggtggcggagggaggttcggcggcggcgggggntggaggcgaccgctcctgctacaactgcggcgaggccggccacatcgcccgcgactgtcccacgtgaggtgtgtccgcgtccgtccagccagccagatcggatcggatcgctccaccacctgctggtctgatggcgccgcccccttctagatctcgcttaaaaaaacatccccctctcgctgtgtgtcggagtaccgctttagttttgccgatccgggcacgagtgcccgctgcctctttcctctcatgcgtaagaggatcccgtccgccgttttcagatttcgttcggttcgtagaagaactctcaagttaagttaagttatcatggtgtgtgcttggtcgtcgtccgtcgttcgtcgtcgtcgttaaggttttaagagatgatttggtcctgtgttgccgaggggaagtccaatctgcttttcttttcttttttgtggtttgttccatcagactgaggaaggagatgagatgattattctcccagattaaaaaaaaaaaaaaaaaaaaaaaaaaaaaaaaaaaaaaaaaaaaaaaaaaaaaaaaaaaacaaacaaaaaaaatacaaaaaaaatagactcttctatagtgaaaaaaaaaatataattaaaggggcccccgttttaaaatacccagactgacgaacaccctggtgaaacctaaattattttttttggagcacataaaattaatt

SEQ ID NO: 5349 - DNA, 816 bp, Zea mays
  unsure (1)..(816): unsure at all n locations
  Clone ID: TF_LIB4765-074-R1-K2-E9
gggtacctcgaggccggccgggcccacccggatcgtcggaaccctccaagtccaaaccctctccccgccgcatcgccgccgccggaagcgcctccctcgatccagatccaggagatatgcctcgcaatgatgatcgctatgggaatacacgcttgtatgttggaagattgtctccccgcacccgttctcgtgacctagaataccttttcagcaaatatgggaggtttttcggttttttacacaaccatggaggtgtggtggaagggtgcccttgatggaattggtggccatagttccaataattcgagaagtggagttgaagcgtgactatgcattcattgaattcagtgacccccgtgatgctgatgatgcacagtacaacctagatggcagggacgtcgatggaagccgcattattgttgaatttgctaaaggggttcctcgtggttctggtggttcacgtgattacaacggaagaggacctccaccaggaacaggccgttgttttaactgtggagttgatggtcactgggcaagagactgtcaggctggtgactggaagaacaaatgctaccgttgtggcgaaaggngccatatagaaagaaattgccagaacagtccaaggaacctcaggcgtgagagaagctattcacggtctccatccccacgccgaggacggggccgcagccggagctacagcagaagccggagctatagccgatccagatccccgtctggnatctcctaggggtggacgccgagaccgtgatgagaggagatcagggagtcttagctacagcaggagcgcaagcccta

SEQ ID NO: 5350 - DNA, 2179 bp, Zea mays
  Clone ID: TF_ZmC18109_2
cattcaaacaataatttttccctatgtatattttttaacaatttcatcattatcgttttgtaaaaatgagattttattcacaagatcagatccataaattggattcacaaatcgattcaaagaagatatatgcttcgacatgagtgcatcaaacacttggtaagattttactacttaagaaattgtttaattttcttataccatttcattatttgaaaatataaatattttcctttctactgccaactaataattcaaactggattgttttcagttgatataatttagggtgttacaaaatctacccctctaaaaagaatctcgtcctcgagattagggaaggttagcaagaaaacaaaggtgatacatggtttatttgtaggttcttagttctcattgaactcctccaaacttaaggaacttccttacttctttgctccaaaatgtatactaatcaagcgatcttcatcgtcgtacttatcactggttggtcttctggattattgtttgggtcttgcttggcagctttcttctctagtcggtctagacgcttcttggggcatttgcgaataagatgtccttcgtttttgcagtagtagcaagcacctcttgctttgagttctttgcgagtcaactttgcttgaccaatagggggtgagggttgattgggtgtctgtatctcatgtagctgagcctgacttgatccttcagtttgggtatccatatgttttgtggcttttgcttgtggttgaggtgaactaatcatgtatcgaaacatttttctattccttttgttgttcttcattccattcatcggatatctcggtgactcatttttctcgttcatagtcgttaaggtaggaatattgtcgttgtcaccatttacttcatttccattggggttcatcattttcggacatatgtagttcgctaacactttcctttcaggtgtactgatggtctttcttgatcttaagggacacttgaagataccatactttgttgcaaactgggcactgataagagaatgtgttgtacgaggatcatacaacacggtggcgatggttgtgtgaatgactagtgttccaaaaattactgcatcatcatatggaatggttcctgtcactgcataacttatccttcctgtggactctttccgttgtttattctttgttgatgcatgggtttgagggcgttgtcttttcttttggaccttattgatctccacatccttcttaggacaaccattaacaagatggccgatatcaccacagccaaagcaagtacgacttgataagttacatggtggagttgtctttacgttgttggtagaagtttctgtgcatttttgttcatattccatgtctggagactgaggttgcttcatctcgggggtgtccgatagtgaactcttctcaggacagttacggaagtaatgaccttcacgtccacattgatagcaagcttttcttgaagttatttcttgactctttccatgtttccctttttgtttcttggacctgatgcgacgatggggctgaaactgtgtgcaggtgatagtccatccatcaatgtaacactcctgtgtttcttcttggggctgggcatccttgtgatgtttcctttttggaatactttgcaattcatcaactgacagtgcattaggtatgagagaatctgctataagttgttcttggggagacatttgtctgtttatgccataaaataaaatctggttcttctgttttgtagttttactttcgtttgtactgatctggcgacaaggaattccatagtactcacaacaacaacatgttccaaggtcacttgtttgttggtttggttgtgcatccttttgtgtcttgaaggtctgttcatcagctgtttcatttatagtgttgttttgacttgtcaacacaccacattccttgcatttagtgacatcacttgtagttgacattccaaggtctaacatcaagaagtctggtaatagatccaaaggatccataacaaaacttcttgcggagtggggataagatagagaatagggcatcgtcgatagcttcgagagggtttcttctggcaaacttcgcttcaagttccgcaatcctagcttgatcatcttgtagtgcttttgagtagagtcttttgatagaccaaaatcagacgggctttccat

SEQ ID NO: 5351 - DNA, 4704 bp, Zea mays
  Clone ID: TF_ZM4931.C2.o5.fg
atgtccgatggggatggacctcctcccgttttttatggtgacgattttccatattggaaaattcgtatggaagcatatttagaggctatagacattggtgtctacaaagccgccactcaaggattccccgaacctagagatcccacaaatcttgtaggtgaagagtttaactatgagaaatggaatgctaaggccaaaaacaccctttttagaggcatttgcaaagatgtgtttaatagagttagaaaccataaaaatgttcaagatttgtggatggacatatgtgctctacatgaaggaactagaagtgagcgtgaggatagatatcacattgatatgagaaagttaaattcttttgaaatgcttgctaatgaaaatgtaaatgctatgtactcatgtctcaatattcttgtagaggaagtaaatggcttggggcttacacaaatttcacaaccggatgttgtgaggaagattctcagtgtcctcccaattgacaaatatggacacattgtcacaatgctgcatcaaatggatctttcagttaccacacctacaccgatattgggaaagatcaacgctcatgagatatacatgcacatcaatgacaaggatgagtcatcttccaagagaaaggatttggctctcaaagcaaatcaagaaagaaaaggaaaagctaaagtacaaattgaggaagaatcctcaagtgatgatgaccttgatgctaacattgccttgatggtgaggaagaccaccaagatgttaaagaagctcaacagagaaggcatcaaatttgattcaaggaagaagaaattcttttccagcaaaagaaagcccatttctgaaatggattgctataactgtggagagcttggtcatcttgctcatcaatgtaacaagcccaagaagaacaagctcaagggcaagaaagaagatgacagcgatgatgagaaaaaggaaaagagattcttcaagagcaaggatgggaagcacaagaggttccacaaaaagaaaaatggaaaggcatatattgttggtgactggctcactgacattgagtcatcaagtggatcttcttcaagtaaagaagaaaatgatgaaaaagttgcctccatcgctagggacttctcttcaccaccaccgtcgccatcatcgacttctcacctatgcctcatggctagaggtgaacggaaggtacaaaatgaaaatgatcttactgatgatagtgatagtgatgatgaatttgcttcaccttcctatgatgaactagctgacttgcttaaagaatacactcaaatcgttaggaagtcaaaagctaaatgtgataagttgaaaattgaaaatgaatctttgaatgccaaatatgacatagttatgaaagctaatgctaaggataaatgtgacaagttaaatgaagctaatagggagttgaaagatagactagtgaaaatcaaggaagactatactaagattaaatttgatcatgataatcatcttgttgaaaatgaacttttatcttgcaatacacatgaggctattaaccctgttgttaatattgatgtagcaacctcatgtgatgatttgagtcaaggagatcaaactagtctacatgatgaactgacagaaaaagttgaagtcttgacattagacaaccaaaaattgaagagatacttgactgatgcaactactagaggaacggttgccattgagaacaatgatttcaacaatgagttggcagtggataatgaaaggcttaaaaatgaggtcaagaaacttaagactgaaaatgcacatcttgcaacaagtgtgcaaaagttcaataagggccaatatctccaaaatgaattgctcatgaacactgtcatgaaaaataacaagagtgatattggatacaattctcttgtgcaaaagaaagctaccactcaatacaagccaaagcagacatataagcctatcaaatgctttgagtgtggaaaagaaggtcactttgcccacaactgcaaagccaaaccaccaactcccttgcctaagcactcaagaccatttgccttcaatgctcattatgttctaagaaaagtagcaaatggaaaagtcaaggttacatttcgaggcaacccacgtatgttcacctcacttgatgagaatgttgatggacaagacaaaatcacatttggggataattcaaaagggaaagttcaaggacttggcaaggtggcaatttcaaatgacctatcaatttcaaatgttctcttggttgcacctttgagcttcaacttattatcagtgggccatctctgtgatcttagacttcaatgcttattcactccaacagaggttattgtatcaaaaatggatgatgaatcaatggtgttcaaaggttttagatacaacaatctctacttagtggacttcacctctgaagatgcatacttaagaatttgcctctttaccaaagcatcacttggatggctatggcataggaggcttgcacatgttggaatgagcacactcaagaaagtattaaaaaaggacatggttagaggattaaaagatgttgtgtttgaaaaggacaaaccttgtagtgcatgtcaagatgggaagcaagttgctaacatacatcctacaaaagctttcatgtcaacatcaaggccactggaactacttcatatggatttatttggacctacaaattatgtaagtgcttgtggcaacctctactgtctagtgatagttgatgatttctcaagatacacttgggtgttctttctccataataaatctgaagttgcatctatatttaagaagtttgccaagaaagctcaaaatgaatttgattgcaagatcaagaagattagaagtgataatggtaaagaatttgacaacaccaacattcatgaatactgtgatgagattgggatcaagcatgaagtatctgcaacatatacacctcaacaaaatggagttgttgaaaggaaaaataggacctttatcacacttgcaagaacaatgattgatgagtataacacaccggagaggttttgggccgaagctgtcaacactgcatatgtctccttctgggtgtttggatgcaaatgctacatttacaagaagcgccatcacctagggaagtttcaaagatgttgtgatattggttttctattgtgttattcatcgaagtctaaagcatatcaagtattcaatcatgccactggcgtggtagaagaaacatatgatgtggaatttaatgagactaatggctcccaaggagcacttgaaaatcttgatgatgtaggtgatgagccacttagggaagccatgaagaacatgccaattgtagctatcaaaccaaaagaagatgaagaagaggtgcaaaacattgacaggccttcttcatcaagtgtaccacaagatgatgaaaaagatgagaggcatgcaaatgaagatacctttgtctctcatgaacaagcaagggtacaagccaaagatgttgatgctccaggatcttcttcccaagtggttgacaggagaaactcatctctacttcatgctaacccaaaagaccaaatcattgggagtccttcacaaggggatccggactcggtgaacgctatgcacaaagaactaaacaacttcacccataaccaagtttggaccctggagaagcccccacaagatgcaagaatcattggagcaaagtgggtgttcagaaacaaacaagatgatcaaggcgtgatggttaggaacaaggcaagacttgttgcaaagggattctctcaagttgaaggcttagattttggagagacctttgcaccggttgctcgactggaagacatctgtatcctactcgcatatgcttcatgctatgatataaagctttatcaaatggatgtaaaaagtgcatttttaaatggcttcaaaaatgaactcgtatatgttgagcaaccacccgggtttgaagaccctagatatcctaaccatgcttacaggttgtccaaggcgctatatggattaaagcaagctccaagggcttggtatgagcgtctttgcgacttcctcatcgaaaagggcttcaagatcgggaccgtcgacacaactctattcacaaagaaacataatggtgatattttcatttgtcaagtatatgttgatgacataatctttggctcgacaaatgactatcattgcaaggaatttggtgagttgatgtcgaaggagttcgagatgtcaatgattggtgagctgacgtacttcctcggctttcaagtcaagcaaatgaaagatggtaactttctctcacaagagaagtataccaaagacgtgttcaaaaggttcaacatggagaagtgcaaaccaatcaagacacctatgccaacaaatggacatctcgacctagatgagggaggtaacccggttaatcaaactctctaccgttctatgattggtagtttattgtatcttaccgtatctaggcccgatatcatgtttagtgtctgcatgtgtgctagatttcaatcaaatcctaagaaagctcatcttcgcgctgttaaaagaattattaggtatctcaagcacaccccaagcattggcctttggtatcccaaaggagctacttttgacttgattggctattccgattcggattataccggttgcaaaattgatagaaaaagtacttctgggggtgccatttgcttgggagatcactag

SEQ ID NO: 5352 - DNA, 1183 bp, Zea mays
  Clone ID: TF_ZmC1373_17
ccggccgggctcccaaatccttctcctccgcgccgccacagccgggcgcgcctctcgatcgagatccaggagatatgcctcgttatgatgatcgccatgggaatacacgcttgtatgttggaagattggcccctcgcacccgttcccgcgacctagaatatcttttcagcaaatatggaagaatacgtgaagtggagttgaagcgtgactatgcattcattgaattcagtgacccccgtgatgctgatgatgcgcagtacaacctagatggcagggaagtcgatggaagccgtattattgttgaatttgctaaaggagttcctcgtggttctggtggttcacgtgagtacatgggaagaggacctccaccaggaacaggtcgttgttttaactgtggaatggatggtcactgggcaagggactgcaaggctggtgactggaagaacaaatgctaccgctgtggtgaatcgggccatatagagagaaattgccagaacagtccaaggaatctcaggcgtgagaaaagctattcacggtctccatccccacgtggtggacgtggccgcagccggagctacagcagaagccggagctatagccgatccagatccccatctggatctcccaggggtggacgccgtgaacgtgacgagaggagatcaaggagtcttagctacagcaggagcgcaagtcccaggcgttctgtctcacctgcaaaggaaaaggagcgcagtcgcacacccaatggcagtaggagccccagcccaagggctgaggtgagcccaccactgaaggataatggtgcacgcaatggctcagaccatgaaggcagccctggtggtggagagaacagcaagaggagtcggagcccatctgatggctaccgtagccctgtggccaatgggcgcagcccgagcccgagggacgatcggagcccaagccccaagggcaacaacgaagatgacgagcgccctggttcacctagaggaagtcagtcccccctgaactgagaaattctgatcaaatttgggccgcacgattcggttgtaactgttatattttagtttgagacaacaaactgtatttgctcatttatcatacagtcaggtttatgcttttgagctagaaaacttgtgtaagaatttgttaccttcaagttattcctggtttgtgatatggtaat

SEQ ID NO: 5353 - DNA, 1348 bp, Zea mays
  Clone ID: TF_ZmC1373_27
ctcgaggccggccggagcgagttggattcagagtcagagcaaccctatctcttccccactccgctcctcgctcaccctctcaccaaatccttctcctccgcgccgccacagccgggcgcgcctccccgatcgagatccaggagatatgcctcgttatgatgatcgccatgggaatacacgcttgtatgttggaagattggcccctcgcacccgttcccgcgacctagaatatcttttcagcaaatatggaagaatacgtgaagtggagttgaagcgtgactatgcattcattgaattcagtgacccccgtgatgctgatgatgcgcagtacaacctagatggcagggaagtcgatggaagccgtattattgttgaatttgctaaaggagttcctcgtggttctggtggttcacgtgagtacatgggaagaggacctccaccaggaacaggtcgttgttttaactgtggaatggatggtcactgggcaagggactgcaaggctggtgactggaagaacaaatgctaccgctgtggtgaatcgggccatatagagagaaattgccagaacagtccaaggaatctcaggcgtgagaaaagctattcacggtctccatccccacgtggtggacgtggccgcagccggagctacagcagaagccggagctatagccgatccagatccccatctggatctcccaggggtggacgccgtgaacgtgacgagaggagatctaggagtcttagctacagcaggagcgcaagtcccaggcgttctgtctcacctgcaaaggaaaaggagcgcagtcgcacacccaatggcagtaggagagcccaaggagccccagcccaagggctgaggtgagcccaccactgaaggataatggtgcacgcaatggctcagaccatgaaggcagccctggtggtggagagaacagcaagaggagtcggagcccatctgatggctaccgtagccctgtggccaatgggcgcagcccgagcccgagggacgatcggagcccaagccccaagggcaacgatcggagcccaagccccaagggcaccaacgaagatgacgagcgccgtggttcacctagaggaagtcagtcccccctgaactgagaaattctgatcaaatttgggccgcacgattcggttgtaactgttatatttttagtttgagacaacaaactgtatttgctcatttctcagacagtcaggtttatgctttttgagctagaaaacatgtgtaagaatttgttaccttcaagctattcctggtttgtgatatggtaatacttgaactatttagcttgccaaaaaaaaaaaaaaaaaaaaggcccctagggcc

SEQ ID NO: 5354 - DNA, 643 bp, Zea mays
  Clone ID: TF_ZmC1373_9
cattgggtacctcgaggccggccgggaccaaatccttctcctccgcgccgccacagccgggcgcgcctctcgatcgagatccaggagatatgcctcgttatgatgatcgccatgggaatacacgcttgtatgttggaagattggcccctcgcacccgttcccgcgacctagaatatcttttcagcaaatatggaagaatacgtgaagtggagttgaagcgtgactatgcattcattcaggaattcagtgacccccgtgatgctgatgatgcgcagtacaacctagatggcagggaagtcgatggaagccgtattattgttgaatttgctaaaggagttcctcgtggttctggtggttcacgtgagtacatgggaagaggacctccaccaggaacaggtcgttgttttaactgtggaatggatggtcactgggcaagggactgcaaggctggtgactggaagaacaaatgctaccgctgtggtgaatcgggccatatagagagaaattgccagaacagtccaaggaatctcaggcgtgagaaaagctattcacggtctccatccccacgtggtggacgtggccgcagccggagctacagcagaagccggagctatagccgatccagatccccatctggatctcc

SEQ ID NO: 5355 - DNA, 3240 bp, Zea mays
  Clone ID: TF_ZM4884.C5.o1.fg
atgggccgctccttcagtagtacagcggcgcctgttcggcctgctgcgctcgcggcgccgcccctcctcctcttcctcttgctcgggctcctgggagctgcggctgccaatgtcggggactcctgctccacgagcgcggactgcggcgccggccagtggtgcttcgactgcgagccccagctctccggctcccactgcgtccgctccgccgccaccaaccccttccagctcattaacaactcgttgccgttcaacaagtacgcctacctcacgacgcacaacgcgtacgccatcgtcggggagccctcgcacaccgggatcccgcgcgtcaccttcgacaaccaggaggacacgaacggagtccgggcgctgatgctcgacacgtacgacttcaagggagacgtgtggctgtgccattcgagcggagggaaatgcaacgacttcaccgcgttcgaacctgcactggacactttcaaggagatcgaggcgttccttgcagcaaacccgtccgaaatcgtcacgctgatcctagaggactacgtccacgcgccgaacgggctgacgaacgtgttcaacgcgtctggcctgctcaagtactggttcccggtgtcgaggatgccgccgagcggccaggactggcctctcgtcagcgacatggtcgcgaccaaccagcgcctcctggtgttcacctccgtcagctccaaacagagcgcggaaggcatcgcttaccagtggaacttcatggtcgagaacaactacggtgatgacgggatggatgccgggaaatgctcgaaccgtgccgagtctgctcctctcaacgacaacaccaagtcgctggtcctcatgaactacttcccgtcgctccctgtcaagtttacagcgtgcctgcagcactcccagagccttgttgacatggtgagtacgtgctacggcgccgcggggaaccgatgggctaattttgtcgcggttgattactacaagagaagcgacggaggcggggccttccaggccacggacttgctcaatggtagactgttatgcgggtgccaggacatcagggcatgctcgcaagcattccctaagagcacgtacaacggcattgaatatgttgtccctgagcagccacataagcaacaattaaataaaaaaaatccaacgtggacgctaattaaggagaagagaggcattcggttgtcttttcgtgaggagacaacttcagctcgtgctctaatgtcaagagacgtcaaaaccgtctattcaccccctttagccaatgtcctagatcctacaagtggtattggagccgaggactccattgtttgtggtctaatcatcccggagtggaacaaaatggctagtaacaacaatgtgcatattgggaagccaccacattttgataggaataactacaattattggaaaataagaatgtcaatgcatcttagagcaatgggtggaaaaatttggccaattgtcaaggatagatttgttgtgttgaaagaagatgaaccatccattagtgataatgaaaatattcttacaaatgatcaagccatgaatgtattttatgatgctcttgatataaatgagttcaaccgtatcaagaatctcacaaccgctcatgagatttggattaagctaatggaaattcatgaaggaactacaattgtgaagagtgccaagctatatgtgtgcaaaggaaaatttgagcaattcattatgaaagaagatgaaagtgtatccgatatgttcaaccggttaaatgagatagtgaatgaactcaagggacttggttttaatgtactggatgtggatttcactcataagttccttagatctcttccggagaagtatgagaccattgtgaccatgttagtaagaagtgatctatctacaacttctccaaccgaagtattgggggaaattcttactcaagatatattcaagaaatctcaagccgatgctataagtttggcaaagaaagtgaataatgaatcaattgccctcaaagctaaagcttctaaggcaattgaaaaagaagatagtgatgatgaaaaaaatgaaagtgagagtgatggagatatggctctatttgtaaagaaattcaacaaattcatgaagatgaagagaggtcaatctagaagaagccaaacatcaagaagaaatgctttcaatgatagaaaatgttttgagtgtggggaacccggtcacattgccatgaattgccctaataagaagaagaagggcaaagatgaagatgataagaagaagaagaaattctacaacaagaagaaggatggcaaagcctacctagtagaatgggattcggatgatagctcggatgatgatgatgacgacacctcatccaagcttaatgccggaattgccatcaaggaagctccttcacttttctcatcccctcattgtctcatggcaaatggagatgctaaggtaaaaatcttcaccgatttaaatggtataaatgatgatgatgatgttgatgatgatggctattcatatgatgatcttgttagaatgttaggtgaggtcaatgactacatgcacaaagaaaaagaaaaatttaagactttgaaggaattgtatataaacctccaagtgtcttttgaggagctcaagacctctcacaacgatctaaaagagaattgtgagaagcttgcggaagctcaaaactcatctattgtgcatgaagttgtggtggtcaccgaggatgttggagtcacttgtgacttacttgatagtcctacaagtgaaccactacctactaactctatttgtgataaatgcaaaatttctcttataaatgataatattgctcttgatgaatcacaaatcattattgagaatgaagtgttagtagatagagtaaatgctctaacttatgatctagagaaggcatatggtggaaaggctaaattggatttcatattgggaagtcaacgatgctcacttaaccgtgagggtcttggatatgttcccaagaaaggaaagaatgcttttgtaaagcaaaagacattgtttgtgaaagaatgtgacaaagtgtgtcacaagtgtcacaagaagggacatattaagaaaaattgtcctaagctcaagaatgtatcctccacttgttttgagcattgttatgttctttctcataatgcaaaaggtgttcatgctaaatttgttggtacttcaattgttggcaacaagaagaaagctatttgggtgccaatgtaa

SEQ ID NO: 5356 - DNA, 460 bp, Zea mays
  Clone ID: TF_jC-zmX700430855a1
tacgtaagctcggaattcggctcgagggtctccagcggcatccttctcgtgactcccggagcagaggcatggacaccgacttttaactggaactggggctagagacggagcagaagccagaggctgggtactggaacgtggtgagcgcgcgcgcttgagacacatgcacctcggcgcctgcacggctgcactgtcacacggacgggtcgtcactgtgcccagggtgctacgcccgggcgcacagcgccgggtagcgccacgcgcgcatctaaatacacgagggctgcgagcattcccacggctgcgggacctggcatgccgactaccgccgcgctgtgcgccgcctgcgacgtcgacatccactgagtcaacccgctggcgcgccgacacgagcgcctacccgttgcccctctgttctgcgcgctcgctgacactccgcaaccctttccgagcccggact

SEQ ID NO: 5357 - DNA, 524 bp, Zea mays
  Clone ID: TF_ZmC17423_4
tcccggggtggagctgcacaagtactggggcgtggggggccggcggtgcggcagctgcgagggggccccggcggcggtgcactgccgcacgtgcgttggtggatccttcctctgcacgacgtgcgacgcccggcccgcgcacgcgcgcctgggccacgagcgcgtgtggatgtgcgaggtctgcgagctggcccccgccgccgtcacgtgcaaggccgacgccgccgtggtgccagaggccttcggcggcagcggcagcggcggcgggagctttgagctcgacttcacaaggcccaagcctcaggcctacatgccatacaccgggactccccagagccacagcgtgccatccgcggacgtggaggtggtgccggagcggggagacttggctgcggtgaggccggtgccgctgatgggggagagcagggaggcgcgcctgatgcggtaccgtgagaaaaggaagaacaggcgcttcgagaagaccatccggtacgcgtcccggaaggcctacgccgagacccggc

SEQ ID NO: 5358 - DNA, 380 bp, Zea mays
  Clone ID: TF_LIB143-024-Q1-E1-F4
gggtccacgcacgcgtccggataaatccctgccattagtagcacgcacaaaacaattggaataaggtgcaaccaaaacggttttccacggttcccggttggaaccaaccgaggagattgtcgtcacgctcgattggaggcctgattgggacgtactggggtctggggggaccgctgtgctgggcgtgcagcgggtcgccggcagcggcgcactgccggacgtgcccgggcggcgcgtacctgtgcccggggtgcgacactgggcacgctcgggcggtgcacgaacgggtgtgggtctgcgaagtgtgcgagtgcgcgccggccgccgtgacgtgccgcgccgacgccgccgcgctctgcgccgcgtgcgacgccgacatc

SEQ ID NO: 5359 - DNA, 412 bp, Zea mays
  Clone ID: TF_uC-zmflteosinte79f03b1
ggcccgtctttttctccactccgcagaggcgcagactaccgtctcatcctactactctagcccagtctcacgatccagcactcagtcactaacgtttgtcgtcgccagtacaacggcatgggtgagggtgacgacgaccggcgggacgagttgctgggcgcggggcgggaccatgaaccggagcgggcggacgcggaggaggccaagaaacccgcacccggcgaggcggaggcctgcgccggcgccggcacggaggcggcgacctgcgactactgcgggaccgcggcggcggcggtctactgccgcgccgactccgccaggctctgcctgccgtgcgaccgcctcgtgcacggcgccaacggggtctgctcccgccacgcccgcgccccgctctgcgccggctgctgcgccg

SEQ ID NO: 5360 - DNA, 1436 bp, Zea mays
  Clone ID: TF_ZmC11847_1
ggcgcacgggcacaggcacaggcacgggcgaacaaattgacccgggagccgggacggcgacttccgtggtcagtcggtcctccacgtcgctcgttcgcgccgaagacccgcccgggccgccccacacggccacagctcaaatcatgagcagggtgcgaaagcttggcggagaatcgcttcgtcccgacagccactactaggaattgccgagcgagcgagcttgcgccgtgcgcgatggagggtgacgagaagtcggcgggcggggcccctgcttactggggcctgggcgcgcggccctgcgacgcgtgcggcgccgaggcggcgcgcctctactgccgcgcggacgcggcgttcctgtgcgccgggtgcgatgcgcgggcgcacggcgccgggtcgcgccacgcgcgggtctggctctgcgaggtctgcgagcacgcgccggcggcggtcacgtgccgcgcggacgctgccgcgctctgcgcctcctgcgacgccgacatccactcggcgaacccgctcgcgcgccgccacgagcgcctccacgtggcacccttcttcggcgcgctggccgacgcgcccaagcccttcgcctcggcggcgccgcccaaagcaaccgacgacgacgggagcaacgaggacgaggcggcgtcgtggctcctccccgagcccgaccacgggcagaaagaaggcgccacgacggaggtgttcttcgcggactccgacccgtacctcgacctcgacttcgcgcgttccatggacgacatcaagaccatcggcgtccagcagagcgggtcaccagagctcgacctcgccggcaccaagctcttctactccgatcactccgtgaaccacagtgtgtcatcgtcggaggcagcggttgtgcccgacgcggcgtctggcatggcgcccatggtggcagtggtcagcaggggcctggagcgggaggcgcggctgatgcggtaccgggagaagcgcaagagcaggcggttcgagaagacgatccggtacgcgtcccgcaaggcgtacgcggagacgcggccgcgcatcaagggccggttcgccaagcgcacgcccggggctggggaggacacgctggaggagcacgaggagatgtactcctccgccgctgccgccgtggctgcgctcatggcccccggcggagccgatgcggactacggcgtcgtgcccacatattgatctatgcaattgcaacgccgacatgtacactagttagcctcgtgctctggggctgtaatttttgctgcatgcattgcatgcaaagctcttattgattgcctgtatgattaacggaagccattacaagcaaggacttcctccctccttttcaattcctatgtatattactatcatcatttttgttaacattgatacccgattacacagttctgtttccattttgaagatattaatattgc

SEQ ID NO: 5361 - DNA, 542 bp, Zea mays
  Clone ID: TF_ZmC153_1
tcgggaacagcttccaccatcgaccatccatcacctcacctccaagctccaaggaatctaccctcgttcttctcacaaagcgctgcagcggacagcagcgcagcacgagagagccgagcgcgaggtgcaggaccgcaaaacagaggcgaagcgaaggacctaacctacgtagcaacgctccgctccgcggcgatgggccacgaggggtcgtgccgctgcgagctctgcggcgcgcccgcggccgtgcactgcgcggcggacgaggctttcctctgcgccgcctgcgacgccaaggtgcacggcgccaacttcctcgcgtcgcggcaccgccgcacgcgcctccgcctcgcggccgccgccgacccgccgccggacgacgaggccgggtacgggtccgccgcgagctcctgcgtgtccacggccgactccgcgccgcggccgaggcgtggggcccgcgcgccggcccggagcgtgcgccccgagggcgtgctcgagggctggggccagcggatggggctcggggcgggggggcgcccgcgcgt

SEQ ID NO: 5362 - DNA, 638 bp, Zea mays
  Clone ID: TF_jC-zmshLIB3587P024c06b1
gcctccaaccggttcatgaatgcgacgcctacttcttctgcctggaggaccgcgcgctgctctgccggagctgcgacgtcgccgtgcacactgccaactccttcgtctcggcgcaccggcggttcttgttaaccggcgtccaggtcggccaggagctcgagcctgacgacctctccctggagcagcgagaggcagaggcgtcgtctcccccgccggcgaagagcgagccgaccccgccgctctacagcgagagcgacttcggctgggcggctggcgccggcgccggtgccaccggaagcctcacggactggttggccgtggaggaggagttcgactcccctgccccccgcctcgcggaggtggcgcccagggccacgccgaagcggactccgcgggcgccggctttcggtgccgggcagggccgcatcgccggcggggtcatggattggccactgggcgagttcttccgtggcgttagcgacttcaacggcggcttcagcttcggcgagagcggcaactccaaggccgacagcgggaagctcggggacagcgcgggtggctccccgtactaccgctcgtcggaggaggagcgggacgccaacgagctcttcggccaggtgccggagatccagtggtcg

SEQ ID NO: 5363 - DNA, 1632 bp, Zea mays
  Clone ID: TF_ZmC8680_1
aaagtacacttgggcacttggcatcgcggccgaggtccccgaaaaagagccatgctgggccctaatccagacgtgatattttctcgcgattttgtcacgttagcggccagctacatcctgacgatcctgtcacccgctcgatcggcgggcgctggagcgcgcgcatctagctttgtgcaagtttcacgggatctctagctttgtcggcggcacatgagcagctccaagcacgccgcgggcgccgtaggcggcaaggccgcgcgcgcctgcgacagctgcctgaggcggcgcgcgcggtggtactgcgctgccgacgacgccttcctgtgccagggctgcgacgcctcggtgcactcggcgaacccgctcgccaggcggcacgagcgcctgcgcctgcgcccgacggacccgcactcgacgacgctcgaggccggcgtggcgacggcgacgtggaagaagcgccagcagcaggtcgcgccggcgtggtccaagcgcaaggcgcgcactcggaggccgcacgtcaagagcgtcggggagctcctgtcgaggaagctcgtcgtcgtgcctgaggtgtcccccatcgaatcgtcggaggagcggaaggccgaggaggaggaggaagaggaggaggggcagctgctgtactgcgtgccgacctttgaccgcgccctggccgagctctgctcgccaccgcctccggtcgatgacccgacggcctcatcctgctgcagggatgacgtcgacggcgccgtggagaacaacacaaaggcaccaccggtcgtggtcgcggaatcgcccgtgcagcagctcccggacagctttgccggcttcggccccacggacgccgagctcagagagttcgccgcagacatggaagcccttcttggccagggcctggacgacggcaacgagctggatagatcgttctacatggagagcctagggctaatggcgcagcaggcggaagacgtcggccggataaagatggagcccaacggcatcgtaagctcccgctcccgcggcgagggcgctcccgggtttggccctacggagatgaagccagaggcgtcgtcagctgctgctgaggtgctggacacagacttcaactgctgctcgcccacggtgatgatggataacgaggatgaggacagtttcgaacagaaggcgtcggcgagcaacgctgccgccgccgccgcgggtacgcaattcttgaagaggagcctggatctcagcctcaactacgaggccatcatcgagagctggggaagctcgccgtggaccgatggccaacggccaagcgtccagctcgacgatttctggccccacgcccacctcacggtacgtttatttccaaattcacgctgctcctcctcctcgaccgatcgattgcgagcgctgtcgacgcgtgcttaattatgcttcgacttgcaaagtacaatcgggttcatgtgccaggtttgcgtgcagggctggatggcgggaggaggacggttgggtggggaggcggcggtgactccacggctggggatgggcggcgggcgagaggcgcgggtaacacggtaccgggagaagcggcggacgaggctgttcgccaagaagataaggtacgaggtccggaagctcaacgcggag

SEQ ID NO: 5364 - DNA, 716 bp, Zea mays
  Clone ID: TF_LIB4756-131-A1-K1-D8
cctcgaggccggccggggctgccttcctacactactacgccactctgccttccctcccccaccaccacaagaaccgcttcaccattgccgcgccgcgtccagctgagcctcctcttagccgcgtccagccaggagaaggcgggcgcgcacacctgctgcttggtgaccacgttcgatggagctgcacaagtactggggcgtggggggccggcggtgcggcagctgcgagggggccccggcggcggtgcactgccgcacgtgcgttggtggatcgttcctctgcacgacgtgcgacgcccgccccgcgcacgcgcgcctgggccacgagcgcgtgtggatgtgcgaggtctgcgagctggcccccgccgccgtcacgtgcaaggccgacgccgccgtgctctgcgccgcttgcgactccgacatccacgacgccaacccgctggcccggcgccacgcgcgggtccccgtcgcccccatcggctccgaggccgccgccgcggccgtggaggccatgctgttcggaggttggcgtggtgccagaggccttcggcggcagcggcagcggcggcgggagctttgagctcgacttcacaaggcccaagcctcaggcctacatgccatacaccgggactccccagagccacagcgtgccatccgcggacgtggaggtggtgccggagcggggagacttggctgcggtgaggccggtgccgctg

SEQ ID NO: 5365 - DNA, 1633 bp, Zea mays
  Clone ID: TF_ZmC17423_1
cattgggtacctcgaagtcggcaggggcgctgcctccctccactactacgccagccactctgccttccctcccccaccaccacaagaaccgcttcaccattgccgcgtccagctgagcctcctcttagccgcgtccagccaggagaaggcgggcgcgcacacctgctgcttggtgaccacgttcgatggagctgcacaagtactggggcgtggggggccggcggtgcggcagctgcgagggggccccggcggcggtgcactgccgcacgtgcgttggtggatccttcctctgcacgacgtgcgacgcccggcccgcgcacgcgcgcctgggccacgagcgcgtgtggatgtgcgaggtctgcgagctggcccccgccgccgtcacgtgcaaggccgacgccgccgtgctctgcgccgcctgcgactccgacatccacgacgccaacccgctggcccggcgccacgcgcgggtccccgtcgcccccatcggctccgaggccgccgccgcggccgtggaggccatgctgttcgggaccggcgaggcggccgcttccgaggccgacgagcagcacgcggcggccgagcacgcgcacgcgcacgcgcacgcgctgaacctcaacgtggaggccaaggacatgaagctggactacctcttctctgaactggatccctacctcagcgtcgagatcccgcgcttccagcacgctgacagcgtcgtccccaacggcgccggcgctgccgtcgagctggacttcacgtgcggcatcggcgttaagcactcctcctacagctcctacacggccacctccctcgctcatagcggctcctcgtcggaggttggcgtggtgccagaggccttcggcggcagcggcagcggcggcgggagctttgagctcgacttcacaaggcccaagcctcaggcctacatgccatacaccgggactccccagagccacagcgtgccatccgcggacgtggaggtggtgccggagcggggagacttggctgcggtgaggccggtgccgctgatgggggagagcagggaggcgcgcctgatgcggtaccgtgagaaaaggaagaacaggcgcttcgagaagaccatccggtacgcgtcccggaaggcctacgccgagacgcggccgcgaatcaagggccggtttgccaagcgtgctgaccacgacggggacgccgacgccgacgacgctgaggccgaggccgaggccgccgtgccgatgtcatatgtgctcgacttcggctacggcgtcgtaccgagcttttgatgtgcccgggcccaacacgcgcgcacatggccggccgcgcgcttgaaccggcatggcacgccgctgcgcgcgcgccttgtacttgtatcgatcgatgtatagggaggagtagtaatcccatgtactctctttttgagcaagctcttgcgtaaactagtgatgtataatttgtactactagtaagaaactgcagtagccgctgctaatggatcaccaatctataccgcgcaaaaaaagtcttaatagggccattccgagtgcacgcgtggggggcccggttctcaaaaatacacatcagtttttttaaaaaaatttaaaatcgtgtatctgaagttatatgcagaaaaaaaaaa

SEQ ID NO: 5366 - DNA, 2110 bp, Zea mays
  Clone ID: TF_ZmC460_11
tgattttcttcaaattttttccaatcctgtttaatccatatataacgggattaaccgacaagaccttaattggaagtgtcagctaaatcagacaaatgttctgttaaaacatcagtgtctctcaggctggtattagcatagcaacaaaagtggcttaagatgttcacaattgagcgatactacagtcaaagatgcacaacacatgacactagcttgtacacagtaaaattcttctctggtacacatcaggagaagaaacaaaactcctgcgctctcttatttaaccaagatcagggactatgaggtagtcctcgtcgtcggtgacctcgatccgggccttcttgctctggcgaaccccagcgccgccgccgccggcggctttggccggcctgtagtacgccgcgtcgttcgccgcctggtatccgaaaagctctggcacctccgccaacgtcctgctggctttgggcgcctgctcgtggaagaggtcgatgtcggcgaaccactccagctccttgaacccgagcgtcggctccttgtgcagcttgtcgctggactcgtagtcggagaactgcaggagctcgtcgacggcccagccctgcggcaggaactgcggcggcgagggcacctgctgcaccgcggcggagacggcggcgtgcggcggctcgatggtggccttgggcggggcgtggtggtcggagtcgtgggcgtcgcaggcgtcgctgcaggcggaagcggaggcgaggccgacgcggatgccggtggccaggtagcgctgatggttcccggagagcgtgcccgggacgtggatgggctcgtcgcagtcccggcagaagagcgcccggtcctccacgcagaagatgaacgccgctttctcctggcagacgtcgcagcgcgggagcttggcggagagcgcctcgagcgggaggcgctggtgcttgctggcgagcttgttggcggcgtccccctcgacgtcgcagcgcgcgcacagcgcggcctctaggcgcagcagtttttccctactgatgaccgccccccgatagtaattcaacctagtacgagaggaaccgtttattcccccaattggtcatcgcgcttggtttaaaaaccagtggggcgaagctaccgtgtgccggattatgactgaacgcctttaagtcagaatccaagctagcaaccggggcctttgcttgccgcccgccccgacccacgttagggggtttgcgccccaaggggccgtgccattgggtcagcccgcccggccgacgcgccccggcgggccccctcgaagctccctttccaacggggagtggtggtgaatcctttgcagacgacttaaaacgcgacggggcattgtaagtggcagagtggccttgctgccacgatccactgagatccagccccgcgtcgcacggattcgtctgcgaaggattcagcacgccgcccgtggggaggggagcttcagaccttgcccgggcgcccgctcgcgacggggcattgtaggtggcagagtggccttgctgccacgatccactgagatccagccccgcgtcgcacggattcgtagaacgccgccgccagtcctcactcctcaccatttcccaaaccctacccatacccccgccgccgccgccgccatgccgcccaagctcgacccgtcgcaggtggtggaggtcttcgtccgggtgacgggcggcgaggtcggcgcggcgtcgtccctggcgcccaagatcggcccgctcgggctctccccgaagaagatcggcgaggacatcgccaaggagacggccaaggactggaagggcctgcgcgtcaccgtcaagctcaccgtccagaaccgccaggccaaggtctccgtcgtcccctccgccgccgcgctcgtcatcaaggcgctcaaggagcccgagagggaccggaagaaggtcaagaacatcaagcacagcggcaacatcagcctcgacgacgtcgtcgagatcgccaggaccatgaggaacaggtccatggccaaggagttggccggcaccgtcaaggagatcctcggcacctgcgtcagcgtcgtgcaccgtcgacggcaaggaccccaaggacctgcagcaagagattgatgacggcg

SEQ ID NO: 5367 - DNA, 786 bp, Zea mays
  unsure (1)..(786): unsure at all n locations
  Clone ID: TF_LIB4767-072-A1-K1-F10
cattgggtacctcgaggccggccggggtagcaagatcgttgcacaccgctcggaagagaaatgattgccacgaccggcggcagctcggcgaaggcggcggcggtgggcggcaaggcggcgcgcgcctgtgacgggtgcctgcggcggcgggcgaggtggtactgcgcggcggacgacgcgttcctgtgccaagggtgcgacacgtcggtgcactcggcgaacccgctcgcgcggcggcacgagcggctgcgcctgtgcccggcgtctccgctgcagacgccgccagctcgctcggcggcggcagcgacggcgactaataagcgcgagcgccacgacgaggtggcggtgcccgcgtggttcgggcgcaaggcgcgaaccccgcgcggcgggcacgccaaaagcgtcggccaggtggcgttgtcgcggcgcctcgtcgtaccgcatgcggctggcggggactcagactcacccgatgagcgaaacggcggcgaggaggagcagctgctctaccgcgtgcccatccttgaccccgccctagccgagttctgctcgcccccgcctctcgaggaccccgcgaagccggatcctgcggcgccgctggcccagttctgccccgtcggcggccatttcaacttcggcccgaccgacgccgagctcagggagttcgccgcggacatggaagccctcctcgggcacggnctggacgacggaaacgaggaggaatcgtcgttttacatggagacgctgggcctcctcgaccaatggaagtgggcgacgatgccacgc

SEQ ID NO: 5368 - DNA, 909 bp, Zea mays
  Clone ID: TF_ZmC26880_1
aatgcccacgcgtccgcccacgcgtccgcccgggcgtcaattcggcacgagggtgacaccgacacccgtggcatctctctcgtgactcccggagcagaggcatggacaccgcggcggagctggagctggggctggagttggagcagaagccggcggcggggtactggagcgtggtgggcgcgcggccctgcgacgcgtgcgccgcggagccggcgcggctgcactgccgcgcggacggcgcgttcctgtgccccggctgcgacgcccgggcgcacggcgccgggtcgcgccacgcgcgcgtctggctgtgcgaggtctgcgagcacgcccccgccgccgtcacctgccgcgccgacgccgccgcgctctgcgccgcctgcgacgccgacatccactcggccaacccgctcgcgcgccgccacgagcgcctccccgtcgcccctctcttcggcgcgctcgcggacgcgccgcagcccttcccgtccccggccccggctcagggggaagcggtggcggaagactacgggagcagcgaggccgaggcggcgtcgtggctgctccccgagcccgacaacagccacgaggacagcgccgccgacacgttcttcgcggattcggacgcgtacctcggcgccgacctcgacttcgcccggtgcatggacggcgtcaaggccatcggcgtgccggtcgcgccgcccgagctggacatcggtgccggcagcttttgctaccccgaacactccatgaaccacattttgtcgtcatcctcggaggtggcggtggtaccggacgcgcaggcggccggcctgccggtggtggtggtggtgagcagaggggaggagcgggaggcgcggctgatgcggtaccgtgagaagcgcaagaaccgccggttcgacaagaccatccgct

SEQ ID NO: 5369 - DNA, 835 bp, Zea mays
  Clone ID: TF_ZmC3809_1
ggtctagctaggactagtaagtagcataccattaccatcctccccgcggctagctccggctggctttcacccataccatcccgcccatgcgccgcgcccggttcctgctcaagggcgtgcgcctttaccgcgagcgcgacgcggcgagcccggcgccggaggaggaggtgcaggagaacaggagcggcggcgtggccgccagcgccggcggctcagccgaagatgctgagcctcgtgcggcgtccgcgcccgcccccagccacgggcgccacagccgcagcctctccgagcacctcaccaagacgctgcccgggtggcacgtcgaggacttcctggtggacgaggcggccgccgccgccgcgactgacatcggcgtctccgcagcagaatagacgtctccggacggctaccctgcgtggtgttcggcccgggaggggcgccctgccggcctcgaatggggatgcatcgacgacaagcgggggctcctgcgctgcgaggcgcaccgcgccatcctgtgccgcgagtgccacgtgtcggtgcacaccgccagcgacctgaccatgcgccacgcccggttcctgctcacgggcgtccgcctctccgccgagcccgccgccgcgtgcccggcgccggaggatgaggaggaggaggacgacgagaacagcagcggcagcttctgctgcagcgccggcgacgcagccgcacatcctcctcctcttccgtcgtcggcgcccgccaccagccacgggagcgacagcagcagcatctccgagtacctcaccaagacgctgcccgggtggcacgtcgaggacttcctggtggacgaggcggccgc

SEQ ID NO: 5370 - DNA, 1429 bp, Zea mays
  Clone ID: TF_ZmC460_16
ggggcttagagttatcatgttcacagctgtgcaatactacagtcaaagatgcacgacacatgacactggttgtacacacagcaggagaagaaacaaaactcgtgccctttcttttattttagccgagatcagggacgatgaggtggtcctcgtcgtcggtgacctcggtccgggccttcttgctctggcgcaccccggtgccggcagtggcagtggctttggccggcctgtagtacgccgcgccgttcgcggcctcggttccgaaaagcgacggtagcgttactaacctcctgccggctttccgaagtactcccgccatggcagttatagctggcaaccaggccagcaacaggtcgatgtcctcgaaccactccagctccttgagcccaagagacgagtctttctggaacagcaaacacaaaacagatggaaaaggaaaactgagataagaataagaacctgaaaagcttgtggttgatctcatcatcatcaccgccgacaaaaaaaaagaggttttggatggttaggtccttgccttgtcgctggattcgtagtccgacagctcgaggaggtcctcgacggcccaaccggacggtggcaggaacggcgaggacggcacctcctgcggcagcgcgtccttgaccgtccttgttttggtggtcgtcccggcagctggcgcgctgacgacggccgcgggcttggagctgcccttgggcggcgccggcgggaggccctcggcgctggcgccgcagacggagctgaagccgacgcggatgccggtggcgaggtagcgctggtggttgccggagagcgtgccggggacgtggatgggctcgtcgcagtcgcggcagaggagcgccctgtcctcgacgcagaagatgaaggccggcctctcctggcacacgtcgcaacgcgggaggctggcacctcgaggccggccgggcgttaggtcgttcgcgccggagggcccgtgccattggctcagcccgcccggccgacgcgccgcggcgggccgcctcgaagctcccttcccacgggcggcgtgctgaatcctttgcagacgacttaaaacgcgacggggcattgtaagtggcagagtggccttgctgccacgatccactgagatccagccccgcgtcgcacggattcgttcgcaccaccgccgcgccgcccaaatcgcagccaccgccgccatggcagcctccagccgccctctcgtctccgtgaaagccctggagggcgacatggtcacggacgcccccggcatcgccttgccgcccgtcttcggtgcgccgatccgcccggacgtggtccgcttcacccacaagctgctgtcctgcaacaagcgccagccttacgcagtctcccgccgcgctggccaccagacgtcggccgagtcctgcggtacgggccgcgttgtgccccgtat

SEQ ID NO: 5371 - DNA, 1642 bp, Zea mays
  Clone ID: TF_ZmC9091_1
ccggccgggggactgttcccgttttttttgttaagctctcgcttaacctaaacgccgggagcacaagtgctcggcgaaatgacgagcgccggggcggcgacaggcgccgcgctaggcgcgcggacggcgcggtcctgcgacggctgcatgaggcggcgggcgcggtggcactgccccgccgacgacgccttcttgtgccagacctgcgacgtctccgtgcactcggcgaacccgctcgcgcgccgccaccaccgcgtccgcctcccctctgcgtcctgctcctccccaccgcgcgacccggacgcgccaacgtggctccacggcctcaagcgacggccacgcacgccgcggtccaagccaggggggagcaagagcaacaagcatgaggcgactcccagctttatcgccgcggctgcgtcgtcggcagcggtccccgacctcgaggcggaggagtccggctccggtatcctgggcggtaacgacgaccaccacgggttcctgcaggatgacgacgaagaccttctgtaccgcgtgccggtgttcgaccctatgctcgccgagttctacaaccccgtggccgacgagggggagcagaagccggcctgcagcctgctgatgccgtctctcgcggaaacatcgccggagttcgcctccggcggctcggcggaggcggacgggctctccgtgtcgttccacgtcccggacatggagctcgctagcttcgccgcggacatggagagcctcctcatgggagtcgacgacgacgggtttgactgtttgggtttcttggacgaagagaaacctcaggtgaacgcggacttggacgccatagtagcgccggcgcctgaaccagaggacaagaaacggaagcggccggagatgatactcaagctcaactacgaaggcgtcatcgcctcatgggtccgtgacggcggctcgccgtggttccacggcgagcgtcctcacctcgactgtcacgagctatggtcggacgacttcacgacgggtagccgggaactcctcggcggagccgtgacaccggtgaccggtggcgagcgtgaggcgcgggtgtcgcgatacagggagaagcggcggacgcgactgttcgccaagaagatccggtacgaggtgcgcaagctcaacgccgagaagcggccgcggatgaagggtcggttcgtgaagcgcgccacgcttccgccgctgccaaggccgccgccgccgcagcagcagcagcagcagaagcagctgccacgcgcaccgccacacgtgggcatggtgctcccaccacctccggtatcgaacgggcgcttgtggttttgagaccatatgcatgcatggaagcatgcatgaagcaacgtatgtgcgtgatgcatcgatgcatctatctcgctcgtagcatgcgcatgttctttctactctacttttaattcgtgcgtgcgaattagggcaccccacaagataatgctccctgcttacgactgaaatatatttgtttgtacatgtgcagaatagttaagaaagtatatttatagcctaggtttgttgtttatcttttctagttgttgtaaagaaggatgcactaaatacaaggggaagggtgtagattttgacaaaaaaaaaaaaaaaaaaggcccctagggcc

SEQ ID NO: 5372 - DNA, 692 bp, Zea mays
  unsure (1)..(692): unsure at all n locations
  Clone ID: TF_ZmC323340_1
ttccgacgcttaatcgcttcgcttccgccctccatcgatcacctccaaagatcgagagcggctcgctcgtcaagcgctccatcgagccgtcggtgcaggagccaaatcatatatatataggcggacaggaggaagacccgccgatgggtcaccaccgcggcggctgccgctgcgagctctgcggcgcgcccgcggccgtgcactgcgcggcggacgcggccttcctctgcgccgcctgcgacgccaaggtgcacggcgccaacttcctcgcgtcgcgccaccgccgcacgcgcctcctcctcgcggcgccggacgagtgcgggtacgagtccggggcgagctcctgcgtgtccacggcggtcgactcggcggcgcgggcgctccgggcccacgcccacggcctcgcctccgcgcgcgtcgccatggccgccgcgctgtggcgggaggtggcggtgcgcggcgggaccggcggcggcggccacggtcacggcgaggcgctgcggcggctggaggcgtgcgcgcacgtgccggcggggctcgtggtggcggtggccaagtccatggcgcgcgcgcgcgggcggngggacgaggccgacacggacgccgcggcggagggctgggacgagtgcgcctgggccggtcccaagtccagcccgccacgtccttgatcttttctcgtgctcgctgatgaa

SEQ ID NO: 5373 - DNA, 992 bp, Zea mays
  Clone ID: TF_ZmC460_15
ggcggagtttatgaacaatccaaggtggctgccatccatagttgaagacaggaggcgagctgggtgagctcgaccaccagagagcgagacgcgacgtcggatccacgcgcgcagatcgatgttggggctgacgtcggggctgcacagatcgatgacacagggttgcaaatcgagtcgacgcacgcggcgcggaagaatctgaggcttgctgcttcgtacacgacctcggcttgggttgagcagtgagccggccatgggaaaaacctcgggggggtcgcggccagcgagctggagatggccggagacgcgagcagggagccacgcgcaggagcttggggccgggcagaggagagagacgagcacgcgtgaggggctcggccagagcgctgaggcgagcacaacaaggactcccgagcgcgacgactggagagacaaagctccacgacgagcttggaacacaggagcgccgcgcagagaaggactgggagccgtggtagaggaggacgccgagctcagccagggcgcggtggagaagaaagctgcagaggcgagcgagctagtggccgagagggcgctcggccatggcacaagtacagaccggccatgggcaccggccggcgagcagagagagacgacacgcaagggaggaaaaaaatcaagtgcaggggtggtgctcttcgcagcgcgggagcttggcggagagcgcctcgagcgggaggcgctggtgcttgctcgcgagcttgttggcggcgtggatctcgacgtcgcagcgcgcgcacagcgcggcctcgtcggcgcagcacaccaccgtggcagccgcgccctcgcacgcgtcgcactggatcttcatggccgctccacttctcggtctctactcccagctcgccaacacccagccaacaacaaccagggaggcgagaacgaagaggataacgccactgatgactgtggtggaggaagaagtggacggcaaggtagggaggccgggaggg

SEQ ID NO: 5374 - DNA, 1694 bp, Zea mays
  Clone ID: TF_ZmC460_7
ctgttaaaaacatcagtgtctctcagactggtattagcatagcaacaaaagtggcttaatagatgttcagaattgagcgacactacagtcaaagatgcacaacacttgacactagcttgtacacagtaaaattcttctggtacacatcaggagaagaaacaaaactcctgcgctctcttatttaaccccactcgggcgttgtaagtggctcagtggccttgctgccacggatccgtgagatcttgccctggcgaacccggatgccgccaaagaaaaaaatgatggccgaactgtaatacgccgaaaaaattaaccgactgaaatccgaaaaaaatcggcacctccgccaacgtaaaaaagacctctggcgcaccccggcgccggcagtggcagtggctttggctggcctgtagtacgccgcgtcgttcgcggcctgggttccggaaagctccggttcctcagccaatctcctgccggctttcggcgtctgctcgtggaagaggtcgatgtcggtgaaccactccagctccttgaacccgagcggggactccttgtgcagctgcaaaacacacacacacacaagaccatgcatgagacggtgggtgcacgcaggcaggttgttggtcatggaccggagcttgcgctatcgtcttgccttgtcgctggactcgcagtcggagaactgcaggagctcgtcgacggcccagccctgtggcaggaactgcggcggcgagggcacctgctgcgccgcggaggagacggcggccttgggcggggcgtggtggtcggagtcgtcgtgggcgtcgcaggcgtcactgcacgctgacgaagcggaggcgaagccgacgcggatgtcggtggcgaggtagcgctggtggttcccggagagcgtgcccgggacgtggatgggctcgtcgcagtcccggcagaagagcgcccggtcctccacgcagaagatgaacgccgctttctcctgcgagcgcgcgcggggcggggtggtggcctcgttgttagctcgtgcctgcctgccttgtgccgcgtgtggcgcatgcgcaatgcgctggtgatgtacgtacctggcagacgtcgcagcgcgggaggctggcggagagagcctcgagcgggaggcgctggtgcttgctggcgagcttgttggcggcgtggatctcgacgtcgcagcgcgcgcacagcgcggcctcgtcggcgcagcacaccacggtggcagccgcgccctcgcacgcgtcgcactggatcttcatggccgctccacctctctgtctgcggtctatactcccaggcccagctcgctatcctgtcctgtcgtctcgcaagtcgcaacaacgagggaggcaaggacgaacaagataaggccaccgactgcgatggaggaggacgagcttgcgcgcgcgagcacgcaactggagcaatcagtgagctgccgctgccgggcgagcttgtggtggaggactcgccggggagacttgtggccaggggctcccggctcgtctccccgtgtactagctacacgccggaaccacgcttggacgcgccgattttgatctgatgtgatgtgctcactcggcggaacgggatgatggcctggccgtaagagctttagttggctgatctgatttttgtgaatgtatacatccatatccacgtgtcttaatatatgcacacttttaggctgttgt

SEQ ID NO: 5375 - DNA, 1949 bp, Zea mays
  Clone ID: TF_UC-ZMFLB73069A02_FLI
gtcggctggtccggccccagcgattcggtttggtgcgcctcgtggtccacgtgcgcgggctttgtgctctctcttccctctgtgtgtgtgtcagttcgtcgggtaggttggtggcggcgtgagagatgaagagctgcggcgggggaggagcggacgggcagcagtgcccgtgcgactactgcggggaggcggcggcggctctgcactgccgcgcggacgccgcgcgcctctgcgtcgcgtgcgaccgccacgtgcacgccgccaacgcgctttcgcggaagcacgtgcgggcgccgctctgcgcagggtgcgccgcgcgcccggccgccgcgcgcgtctccctcggcgccgacccggcgttcctctgcgcggactgctgcgagggctgcgccgccgcttccgcggcgcgcgtgtcggttgagggcttctcggggtgcccctcggcggccgagctcgccgcgtcatgggggctcgacctccgccgcgcggccgtggccgtgggcgacgacggcgacggcggcgacgacgacgaccccttcctctcggtgctcgactactccgtgctgggggtgggggtggccgacacggacctgcgcgacctctacgtgccgtgcgacccaccgcgggtgcccgtccccgacgccggcgcgcgcccgctcaggggcgaggcgctgtgcgaccagctcgcggagatggcgcggcgcgacgaggcggacacgtcccacgcgcacccgcactcggatctgagcccgcgcacgcctcgccgcacctccgcggcttccagcggacgcctgccgtcgggcaagatggcgccccccgcggcgctgccggtgccggctcatcctcctcccgccgcgccgcaggaggtgcctctgccgtacacgtccctgctcatgatggcgtccgccaactgcagcgacctcattggcggcggcgaccgggtgggtgataccgacgaacaactgctctgggactgcgctgcgccctcggtgccgcccacccagatatgggacttcaatttaggacggtcaaggcatcacgatgagaaatctgctcttgaagttggatacggttctaaccatggcggctttatgattaagagttacagtgacatgcttaaggacatttcttcggggacaacgaaagatctggaagatatttatgactcaagatactgctcaaccgccgaagatatcatgtcctctaatatctgtcagttgtcatcgaaaaatgtgagcaccgggagcaacaaacggaaggtgaggtcatgtgctgcgtcgacgatggatggaccaacgacctccgggaaccacaaccacgtacccgcttcagcttcaggtccaggagcagcgctcaccagggagatctccttcggggatcagacggtgtccgcccccgcggccgagaccgagaggcctgccgccgtgaggatcgacagcgagacgcttgcgcagaacagggacagcgccatgcagcggtacagggagaagaagaagaaccgcaggtacgagaagcacatccggtacgagtcgaggaagctgcgggcggacacgaggaagcgggtgaaagggcggttcgtcaagtcgaccgaagcactcaacgccgccagatacaacggatgaggcagccatatatatatatatatatgcatggcctgcgggcggatgagtttgctgcgcgcctgcgttattacgtgcggtagttacctcacggagaggtaggtactgctacctggaggtgctacgtatgtatggcgcggccggaatcgctacgcacgcggcccaagtttaattttgcgttgaagctatagcgatcgtggccattgttgggcagtcaactccagagattgcacggtactgcttgtttgtaacagacgaccctccctttccccttttttctctgttgttgccgtcatccccaccagaacagaaagtatgtagcttacctac

SEQ ID NO: 5376 - DNA, 2096 bp, Zea mays
  Clone ID: TF_ZmC13160_1
ctctcgcgtcgtccgctcgtcggctggtccggccccagcgattcggtttggtgcgcctcgtggtccacgtgcgcgggctttgtgctctctcttccctctgtgtgtgtgtgtgtcagttcatcgggtaggttggtggcggcgtgagagatgaagagctgcggcgggggaggagcggacgggcagcagtgcccgtgcgactactgcggggaggcggcggcggctctgcactgccgcgcggacgccgcgcgcctctgcgtcgcgtgcgaccgccacgtgcacgccgccaacgcgctgtcgcggaagcacgtgcgggcgccgctctgcgcggggtgcgccgcgcgcccggccgccgcgcgcgtctcccccaccccgtccccgggcggcgccgacccggcgttcctctgcgcggactgctgcgagggctgcgccgccgcttccgcggcgcgcgtgccggtcgagggcttctcggggtgcccctcggcggccgagctcgccgcgtcatgggggctcgacctccgccgcgcggccgtggccgtgggcgacgacggcgacggcggcgacgacgacgaccccttcctctcggtgctcgactactccgtgctgggggtggggaaggccgacacggacctgtgcgacctctacgtgccgtgcgacccgccgagggtgcccgccccctacgccggcgcgcgcccgctcaggggcgaggcgctgtgcgaccagctcgcggagatggcgcggcgcgacgaggcggacacgtcccacgcgcacccgcactcggatctgagcccgcgcacgcctcgccgcacctccgcggtttccagcggacgcctgccgtcgggcaagatggcgccccccgcggcgctgccggtgccggctcatcctcctcccgccgcgccgcaggaggtgcctctgccgtacacgtccctgctcatgatggcgtccgccaactgcagcgacctcattggcggcgccgaccgggtgggtgataccgacgaacaactgctctgggactgtgctgcgccctcggtgccgcccacccagatatgggacttcaatttaggacggtcaaggcatcacgatgagaaatctgctcttgaagttggatacggttctaaccatggaggctttatgattaagagttacagtgacatgcttaaggaaatttcttcggggacaacgaaagatctggaagatatttatgaatcaagatactgctcaaccgccgaagatatcatgtcctctaatatctgtcagctgtcatcgaaaaatgtgagcaccgggagcaacaaacggaaggtgaggtcatgtgctgcgtcgacgatggatggaccaacgacctccgggaaccacaaccacgtacccgcttcagcttcaggtccaggagcagcgctcaccagggagatctccttcggggatcagacggtgtccgcccccgcggccgagaccgagaggcctgccgccgtgaggatcgacagcgagacgcttgcgcagaacagggacagcgccatgcagcggtacagggagaagaagaagaaccgcaggtacgagaagcacatccggtacgagtcgaggaagctgcgggcggacacgaggaagcgggtgaaagggcggttcgtcaagtccaccgaagcactcaacgccgccaggtacaacggatgaggcagccatatatatatatgcatggcctgtgaagcccgcgagtttgctgcgcgcctgcgttattacgtgcggtagcaacggatgaacggggagctaggtactgctacctggaggtgctacgtatgtatggcgcggccggaatcgctacgcacgcggcccaagtttaattttgcgttgaagctatagcgatcgtggccattgttgggcagtcaactccagagattgcacggtactgcttgtttgtaacagacgaccctccctttccccttttttctctgttgttgccgtcatccccaccagaacagaaagtatgtagcttacctacagcaccgatttaccatgcatgcatgcatctggtcttaacgagctaaaaaaaactacggtcgtccgagcgcctaatgcgttagttcccagtgaagttgttctgttttgatttt

SEQ ID NO: 5377 - DNA, 1154 bp, Zea mays
  Clone ID: TF_ZmC460_17
ggggcagtggccttgcggagagaggcacgcacggtgaaggacctcctgctgaccactgcgcgagcgggcgcggccgtgaaggaaggggcggtgatggcggcagaggagaggaaaaacatggtcgtcagctagctagcgatcgatggatcgatctacgtacgtacgtacgtcctggagcaagctatcagagcaagagaccggcggatagcccagcattaagcaggcacaagaattttttttttttttattagcatagcaacaaaagtggcttaatagatgttcagaaattgagcgacactacagtcaaagatgcacaacacatgacactagcttgtacacagtaaaattcttctctggtacacatcaggagaagaaacaaaactcctgcgctctcttatttaaccaagatcagggactatgaggtaatcctcgtcgtcggtgacctcgatccgggccccggtcggccgcgaaaccccggcgccgccgccgccgggggctttggccggcctggagtcaggcgtcgctgcagccggaagctatggcgaaagcgacgcggatgccggtggccaggtagcgctgttggttcccggagagcgtgcccgggacgtggatgggctcgtcgcagtcccggcagaagagcgcccggtcctccacgcagaagatgaacgccgctttctcctggcagacgtcgcagcgcgggagcttggcggagagcgcctcgagcgggaggcgctggtgcttgctggcgagcttgttggcggcgtggatctcgacgtcgcagcgcgcgcacagcgcggcctcgtcggcgcagcacaccaccgtggcagccgcgccctcgcacgcgtcgcactggatcttcatggccgctccacctctcggtctgtactcccagctcgccaacacccagccaacaacaaccagggaggcgagaacgaagaggataacgccactgatgagatgactgtggtggaggaagaagtggacggcaagggaggggaggccgggaggcgagtggtgcatataagtcgcctgcgcgagcacgcaactcgagcaatcagtgagctgccgcgcgagcttgtggtggaggactcgccggggagacttgtggccaggggctcccggttcgtctccctctgtgtactcggacgcgtggg

SEQ ID NO: 5378 - DNA, 582 bp, Zea mays
  Clone ID: TF_LIB3591-076-Q6-K6-E12
gtcgtcgggaaagggcgctgctcgtgactccgcggcggcgggccagaaacacggcaccggcacgcggtgcgagctctgcgggggcgcggcggccgtgcactgcgccgcggactcggcgttcctctgcctgcgctgcgacgccaaggtgcacggcgccaacttcctggcgtccaggcacgtgaggcggcgcctggtgccgcgccgggccgccgaccccgaggcgtcgtcggccgcgtccagcggctcctcctgcgtgtccacggccgactccgcggagtcggccgccacggcaccggctccgtgcccttcgaggacggcggggaggagggctccggctcgtgcgcggcggccgcgcgcggaggcggtcctggaggggtgggccaagcggatggggttcgcggcggggccggcgcgccggcgcgcacgtgccggcgcggctggtgctgaccgccgcgtcgtggatggcgcgccggccggacgcccggcaggaggaccactaggagggatgggccgagtgctcctgagttcctgatccagacgggcccacgtccgttgctgccgtgccgccgctgcacctgcact

SEQ ID NO: 5379 - DNA, 1396 bp, Zea mays
  Clone ID: TF_ZmC101_1
cccacgcgtccgcccacgcgtccggaccagcccacggtcagtagccatcggccactaccagcctcgggcgctggctgtggcctgtgggctgggcggggcccctttaaatgccggccatacgcgcggcctaaagcctccagagccacgctgcttcccggccgaagcctccgtccgcgcccacggtttccattccatcccccaggcttgcgccgactcgccacttgcaccgccggccggtttcgccgaacgcctcgcgcccacccgcgcgcggagacctgcatataagccggccgcgtgtcgtccggcgctcccgggacaggcgatccgttcgtcatccgctgcaaaccaccaggcaccagctccgcgcgcagaggccggaggactacgaccgacgagggcgacgaacaccaaggctccgaagtccgaggaggcaggaagcgggagacgtcgggaatgggcgctgctcgtgactccacggcggcgggccagaagcgcggcaccggcacgcggtgcgagctctgcgggggcgcggcggccgtgcactgcgccgcggactcggcgttcctctgcctgcgctgcgacgccaaggtgcacggcgccaacttcctggcgtccaggcacgtgaggcggcgcctggtgccgcgccgggccgccgaccccgaggcgtcgtcggccgcgtccagcggctcctcctgcgtgtccacggccgactccgcggagtcggccgccacggcaccggctccgtgcccttcgaggacggcggggaggagggctccggctcgggcgcggcggccgcgcgcggaggcggtcctggaggggtgggccaagcggatggggttcgcggcggggccggcgcgccggcgcgccgcggcggcggccgccgcgctccgggcgctcggccggggcgtggccgctgcccgcgtgccgctccgcgtcgggatggccggcgcgctctggtcggaggtcgccgccgggtgccgaggcaatggaggggaggaggcctcgctgctccagcggctggaggccgccgcgcacgtgccggcgcggctggtgctgaccgccgcgtcgtggatggcgcgccggccggacgcccggcaggaggaccacgaggagggatgggccgagtgctcctgagttcctgatccagacgggcccacgtccgttgctgccgtgccgccgctgcacctgcactgtgtaccgagccggacctccgagatagactcgggagaaaaatgtaacaacgtgtggggctgtgggcgacgtttgtttgtttgttcattttcttcttaatcaaataaatatatcgtaggcgtacgagcgagggtccaagggattgatcgtgtggctggttggctgcctctcgtcaagccgatttgatttgacttgattacacaac

SEQ ID NO: 5380 - DNA, 1642 bp, Zea mays
  unsure (1)..(1642): unsure at all n locations
  Clone ID: TF_ZmC460_5
gtgctacaatagcagaaccgatattgcataggggtcgtgatggtgcaccaaacaaggctatgttttgtttaagcttcaagctacccatggagtgtcttaaggaggacagtgaaaatcgcatcgaatcagttgccaagtaggccatgccatgctgatattgtgctcctgaagnnnnnaatcatccacctgcagnnnnnnnnnggagctttaccaaataaatagcaaatgtgctgatgattctggggtgtcatataaccattgaagatgttggtggatgaatcaagacgctggtaacatctgattcaaagcgtggtgccatcggtttagtttacaggaagttgnnnnnnnnnnnnnncgcggccnnnnnnnnnggaagttccatgtcacctaaagtattgacnnnnnacatggttttgttcttgatttgaagaaaatttggtcagaactcaggaccgtttgtagtacttgtcactcgagctctctgtacccaagtgaaagtgtcaggtgttcgaggaaatgttatgttaaaaacatcaaagtgtctcttagactgctactagcgtagcaacaaagacacaaagtgtgcttagagttatcatgttcacagctgtgcaatactacagtcaaagatgcacgacacatgacactggttgtacacacagcaggagaagaaacaaaactcgtccccccccttttattttagccgagatcagggacgatgaggtggtcctcgtcgtcggtgacctcggtccgggccttcttgctcnnntggcgcaccccggtgccggcagtggcagtggctttggccggcctgtagtacgccgcgccgttcgcggcctgggttccggaaagctccggtacctcggccaacctcctgccggctttcggcgtctgcccgtggaagaggtcgatgtcggtgaaccactccagctccttgaacccgagcggggactccttgtgcagcttgtcgctggactcgcagtcggagaactgcaggagctcgtcgacggcccagccctgtggcaggaactgcggcggcgagggcacctgctgcgccgtgcggtggcgacggcggccttgggcggggcgtggtggtcggagtcgtcgtgggcgtcgcaggcgtcactgcacgctgacgaagcggaggcgaagccgacgcggatgccggtggcgaggtagcgctggtggttcccggagagcgtgcccgggacgtggatgggctcgtcgcagtcccggcagaagagcgcccggtcctccacgcagaagatgaacgccgctttctcctggcagacgtcgcagcgcgggaggctggcggagagcgcctcgagcgggaggcgctggtgcttgctggcgagcttgttggcggcgtggatctcgacgtcgcagcgcgcgcacagcgcggcctcgtcggcgcagcacaccacggtggcagccgcgccctcgcacgcgtcgcactggatcttcatggccgctccacctctctgtctgcggtctatactcccaggcccagctcgctatcctgtcccgccggctcgcaagtcgcacccccctgggggccgaggacgaacaagataaggccactgactgcgatggaggaggacgagcttgcgcgcgcgagcacgcaactggagcaatcagtgag

SEQ ID NO: 5381 - DNA, 2263 bp, Zea mays
  Clone ID: TF_ZmC1299_1
gccggggctaggtctagtctgtctctcctctttcttggtttgaccagccttcccctctcttctctgctctttgcatctctctcttgttcctcccttcctctctaaaaaaagggttctgatccctttctagaagctcctgggtttctgttgccgacccgagctccccaggggcgctcaggaggcgccgagccggcgaccgctccggcggatctgaggagccgccgcggtcgctttgcctccggttccttgtaaactattgattgggaaacactctgaagaagagtttgttggctgcataacatctcctgaagctggtttgaagtttgctgataggaaagatcatgggcgctctctgtgatttctgtggggagcataggtctatggtttactgccgatcagatgcagcatccttgtgtttatcatgtgaccgtaatgtgcattcagctaatgctctttctcggcgtcatacaaggacacttttatgtgaccggtgtgcttcacagcctgctatggtccgctgtctagcagaaaatgcctcgctttgccaaaattgtgattggaatggccacattgcaggatcctcatctgccggacacaaaaggcagactataaattgctattcaggatgtccatcgtctgcagaactttctagaatatggtccttcgtttcagatattcctaatgtagcacctgagccaaactgtgagcaaggaataagcatgatgagcatcagcgacagtggtgtcagtaatcaagataatgctgcaggggacagtattttgttagatatagctagtgcaacacttgtaagtgatattggtacttgtgacaagcttttggtaggttcctcttcaggagctggagtgaacctacttccactggctactggtcaaacagaaacagctggatctgtggattccacaccagataaggttccctatacgccagataaagatatgttcagtaaggacagcatatatgaagatttttgtgtggatgacgctgaccttgctttcgaaaattatgaagaactctttggtacctctcatattcaaacagaacaactctttgatgatgctggaatagacatttactttgaaatgaaggaagcacctgctgggaattccactgagtccaagctgaagcaacctgcaaatagcaatgcggtatctgccgactctgggatgtcgaaccctggagtgaaaggtgattccagtgtttgtacccctttgaggcaggctaggtctagtctgtctctttcctttgctggtttgactggtgagagtagtgcgggagaccaccaagattgtgtggtatcatcattgcttcttatgggtgagcctccttggcagcctcctggccccgagggctcaattgctggaggtagtagagacagtgcactcacacgatacaaggagaagaaaatgagaagaaagttcgacaagaaaatcaggtacgcttctcgtaaggctagagcagatgtgcgaaagagggtaaagggtcggtttgttaaggctggtgaagcatatgactatgatcctctctgccaaacgaggagttactgaagcatatgatctttatccagttttaaattagcaaactgcaaccaaggctcgttgcagctagaacaaaagcactggcaatccaagctattgggccaaactgtgccttcgaaaagaaaaaaaaaaggagaaagctgtcggcatgataaaatatagagaaatatttggatgttgcagaagtttttgggtgaggatcctcctttttcctcctgtacagtggttggaagcggtttgagtctctccatcttttgtgaattagcctgaatccagctaaacagacttgttgcattttgatctccattctgcattcctgctgactgccatcagtctacgtacacgggctggcggctgcggtgtttttggaggtgttcgtccagattagacaagatggctagatgtgatctgtgaaatatccttctattataataatgtaaaatttgctgggacctggatgtttctgctattatcaatgtgcaaataccaggtcgtagccaaactggtcgtcagtttgttctttttaagttggtgatggaacccatccaactggacagtggacaccaactttctgtgctcattctgtccaaaccaacctccaaactgactcgatgttagtactatttgtattatgtgactcctgagcaagtgagcttgtgctcaaacctcaaatacgtcctcttgtaccaaaccacgatatggagggt

SEQ ID NO: 5382 - DNA, 779 bp, Zea mays
  Clone ID: TF_ZmC3762_2
ctcgaggccggcccatcccaccatgtcctctcctctgttcctctccagcccccttttcaacctttgacgctgtagcttgagagcgagattagtgcctaccatattctcctcctgagcgactgagcgctggtctccgataggctcgccatgcaggtgctctgcgacgtctgcggcggcgcgccggccgccgtgctctgctgcactgacgaggccgcgctctgctccgcctgcgaccgccgcgtctaccgcgccgacaagcgccgccgcatcccgctcgtccagccctgcggcgacgactccgccgccgccgccgccgcgccgctctgcgacgtctgcaaggagcggaggggcctcgtgttctgcgtggaggaccgcgccatcctgtgccccgactgcgacgaccccatccacagcgccaacgacctcaccgccaagcacacccgcttcctcctcgtcggggccaagctctccgccgcgctcgtcgaccaggcgcccccctcccctgacgacgacgacgacgacgtcgccgagcccgacgctgtccccgccgcctgcgcggccaaggcctcgtctcttgagtccggcggcggcagcagcatctccgactacctcaccaacatctgcccgggctggcgcgtcgacgatcttctcttggacgactcgtcgttctcagcgccatctaagaccggctacagcgacggccacgatcaggtgccgtccgtggatgccgacctcttccacgtggtggccagcggccggccaggcaagcgcgtcggcgg

SEQ ID NO: 5383 - DNA, 1660 bp, Zea mays
  Clone ID: TF_ZmC3_3
ggccggggtaatcttcagatgaaagacagatcgctaccaatgcacacatagctcaggctcatgtgtgtgttgcatcccacagtctcatgcgcatgtttacttacagaagttcatgaaaagacacgtgcacttgaggcttctggatacttcttctgcctagaggaccgtgcactactttgtagagactgtgatgttgctatacacacagtgaattcctttgtttcagtacatcagagattcctgctaactggagttcaggtgggtcttgatcctgctgatccagttccacctattgctgaaaagcacgttaatgctgctggtggatcagtaaatcaaccagtgagacatcagccaaagagaagcccgacagttcaattttcagttgaagggagtgcttctgttcctactaaaaatgtaacaaatggagattgttcaaggcagaattttgtcccaacagccaggggagaagtggttgattggactatgaataatagtacaattcggtcagtagaatctccgcctaagtacatgtcagaggagagtccaacacttctgcaatctagccagaccacaacagtcttctctaaccaaattaacggcaatagtgatgggacctaccacttgtcattctcaagtggtaatgtgacagacagtctaccagattggcctgtggatgagttcttcagtaactcagaatatgttccaaacttaggcttctccgagcatggttcttctaagggtgataacgctaagctggagagtgctggtggatctctacaatgccgtttagctgaaggctccattgctgaggaactattaggacaggtgcctgggttgatcactgatgattatatgagccgggtacctgagaattcatggacagtacctgaggttccctcgccaccaactgcctcggggctcaattggcatgggaatttgtgtttccctgcatatgacagcacaatgtttgttcctgaaattacatccctccagaactcccaaaatcagttcaccgtaccttcgagtttcaagcgccggagaagagagtattgaggtgacgacaagatcactagacgtccactgtccagtttaggccatcttgagaaaggtttcttgctgtaccaaatgacggagaaaggatatccaggactgggttatcattcaaacttcaactgaactatccaagtagctaggtttgaagtgtgctgcaatgcttcaatgatgttcattttccaaagatctgagcttcgctagtgttggggtctttttctccgccgaaggtcctctaggcaaaaacaccttcggcaagacagtacaaaggcaggtgcaacatgaagatataagtcgaagctacgatcgaaagagcttcggcttggtgtcatgctaaagacgaaggacgataccgacttaaagaggaaaatactgtatagcccttggtagtctgtattatgatcataattagttattaatgacatggatataatttcgtctgggttacgttctgcgcctataaatagatgaacagtaccccgtactattcatgctgcatggtaatcgttcctgcgtctctcacattttcatcatttgtcgaactgaatgtatcaatgaagcataaatattatgagcatttatttatgtttataagaggaaatgggaatat

SEQ ID NO: 5384 - DNA, 1813 bp, Zea mays
  Clone ID: TF_ZmC22615_1
ccggccgggacgatggtcgcatttgtgcggccgtgaggcctcgacgcctcgtccaacaggagccggcgacgtcgcccccttcgtcccctccgctgcgcccacgccacgaatccattccattcccattcctccccacgccgcgcgcctccataataccacaccgccacccccatgccgctcgcccaccaccacaatccccagccctcacgcgccattggaattgacattcgattcccagcgcagctatcgagctccctttccccgccttgttggcgcgcgttagagcgcgagagagaaccggctaacccccggcggcgaagaagttcatgaaggtgctgtgcagtgcatgcgaggcggcggaggcgagcgtcctctgctgcgccgacgacgccgcactctgcgcgcgctgcgaccgagaggtccacgcggcgaaccgattggcaggcaaacaccagcgcctgcctctcctcgcccccggcggccaaggcgccgccgccgtgtcgccgcccaagtgcgacatatgccaggaatgcgacgcctacttcttctgcctggaggaccgcgcgctgctctgccggagctgcgacgtcgccgtgcacactgccaactccttcgtctcggcgcaccgccggttcttgttaaccggcgtccaggtcggccaggagctcgagcctgacgacctctccctggagcagcgagaggcgtcgtctcccccgccggcgaagagcgagccgaccccgccgctctacagcgagagcgacttcggctgggcggccggcgccggcgctaccgggagcctcacggactggtcggccgtgcaggaggagttcggctcccctgccccccgcctcgcggaggcggcgcccagggccacgccgaagcggactccgcgggcgccggctttcggtgccgggcagggccgcatcgccggcggggtcatggattggccgctgggcgagttcttccgcggcgttagcgacttcaacggcggcttcagcttcggcgagagcggcaactccaaggtcagcgcagacctctgtttttttggatcgtagatcgtgtttactgtctagtcgtctttctgacattctgccgtcgcgtttcctgtcatctcggcaggccgacagcgggaagctcggggacagcgcgggtggctccccgtactaccgctcgtcggaggaggagcgggacgccaacgagctgttcggccaggtgccggagatccagtggtcggtgccggcgctgccctccccgccgaccgcgtccggcctccactggcaacacggcggccccgacagcggcgccttcgtgccggacatctgcaccccggacggcgccggccgctgcttcccgaccgccagtggcgccgcgaagcgccagaggaaccgctagctccgcgaggacaaaggaggttcatactaccggtcgctatgttccagatcgttcttgcagctaagctaagcaacaggagatcacagtgaatgctcctactagtgaggagtacgtcgcaccgcgtcgtcgatcacatccctgatccaaggtgaaggccttgagctcgtgcgcctgtttaacggatgcatcagatctggacgatgctagaaacaacttgtgctagtgctacctagcctttgacttccaatgacgctttgaaagattgaaactgatgcgctaaccgatagcttagacattggacagtagtatgatgctgatgcttcgttttcttgtccgttcaatcaatgtaacaaagagaagttggggatgccaaaaaaattcaaaaaaaagctggtgatatgctatctaatcagtttgcctc

SEQ ID NO: 5385 - DNA, 954 bp, Zea mays
  Clone ID: TF_ZmC18754_1
tggagatcgtgcgaggctgtactacctgtacgcctccatcgtcgcctcgcaccatcaatcctgtgcggtgccagatcctccccgggtcttgtcttgtcgcaggtggaagccatgtccgccgcggacgcagccggcggcaaggaggcggcgccggcgtgcgactcctgcacgggcatgccggcggtggtgtactgccgggccgactccgcgaggctgtgcctgccgtgcgaccgccacgtgcacggcgccaacaccgtgtccactcgccacgcccgggcgccgctctgcgccgggtgccgcgcagccgctgccgctgcggcccgccacgcgcggcggcttcctctgcgccagctgccgcttgggggaggagaaggatgagcgggacggcggtggcgccgccgacagtagtagcgacgacggtggcgcggtggaagggtacgccgggtgcccctcggtcgccgatctcgcgaccatcctgggcgccggctccgcgtgggaggagccccagacgctccgcttggagagccggagctccggcggcgagctggctgacgaggtcatccgccagctggtggagctcgccaggtcggaggcggcggctcgcgctgagatggagcagcttactccatggccgtcgccggagcttgctgccattactggacagtacgccgacttcggggctctcgacgctgacaccgcctggcatgatgatgcagcagccatcgcggcagcagtagtgccttccactgaggaggagcagcaagcgtggatcgcggccggctgcgacgtcggcgcgtgccggacggaggagaaggcgcgcgagaacgacgctgctctggccgagccgtgtctgtcctcgttcgtggagatgtcagagatctgccccgccagcgtcgtcgtcaccctcagccacggcggggacgagggcgtcgacagcagcggcaagacagcccc

SEQ ID NO: 5386 - DNA, 1873 bp, Zea mays
  Clone ID: TF_ZmC300_43
aaacggaagtgaacagggcccgtctcttccaccactccgcagaggcgcagactaccgtctcatcctactactctagcccagtctcacgatccagcactcagtcactagcgcttgtcgtcgccagtacaacaacggcatgggtgagggtgacgacgaccggcgggacgagttgttgggcgcggggcgggaccatgaaccagagccggcggacgcggaggaggccaagaaacccgcacccggcgaggcggaggccggcaacggcgccggcgcggaggcggcgacctgcgactactgcgggaccgcggcggcggcggtctactgccgcgccgactccgccaggctctgcctgccgtgcgaccgcctcgtgcacggcgccaacggggtctgctcccgccacgcccgcgccccgctctgcgccggctgctgcgccgccggggccgtcttccgccgcgcctcgacctccgccttcctctgctccaactgcgacttcgggaggcaccgggatggcggtgacccgccgctccacgaccgctgcgccgtgcagccctattccgggtgccctccggcgagcgacctcgccgcgctcctcgcggtgcccctcttcgacaagccggccgccgaagatggtgcctggtggaacatctgggaggagccccaggtgctgagtttggaggatctcatcgtgcccaccaccccttgccatggattcgaacccctcctaacgccgccctcgcccaagaaccggagcatctcgccggaccggaaggtgaacgaggagattcttcggcagctgggggagctcgcagagtctgatggcggtatgcaggcatcagcaggtcgtgaggaggcagagcaagctggtggagaccagttcccttcctgggcgtcaccacagtatgccactggacatggcaattttggaacagaggacaaccatgagaatggcagatggaacaacagtgaatatcatgatctaaatgatgcatgtaagctcgaggtcacatatgatcaggctccagtcaactcggctgaaccgtgcttgtcttcatttgctccactgtcggaaatctgccccagcatgagcaatggtagcagtaaggaagataaccaccaggctaatcctggcattggcatgccaatgcaaggtctacccaaaaggagtggatttgatgttgtcccatgccctgaccgtgactcggtcatttcgcgctataaagcgaagaggaagacaagaagatttgacaggcaggtccggtatgagtcgcgcaaagttcgtgctgatggcaggctcaggatcaaggggcgttttgcaaaggcaaaccagacatgaacctaaatctgcagttctgcactatcctaagcatctttcctcaagaaatatgctaagtatcttccaacacgaagaagaaaactggtcaggggcgatgataatgcaaaaatgtgccagaattttgtttgccttcagttcaatagctgataaccatagctccatatacagttgaattgaatgacgtgtgtatatattgctgtcatgtgactagtagctacattgctttgagagatcaaaacctgtatatgcacctacacatgtgattttgccatgacggacataataatagaaccactgcgtttgattgatgtagttattaacttattttgcaatttgatttccaatgcaaaagcttctttcactgatgagcaataaacaccgttgtgatgcaagaactgagaaatgatgtttgctaagggcccgtttgtttgattggaattgggctgaattggaatttaattcttgggctgatttgtttggcaaactatagaattggaaactaactttccatccatttcttaggcctgaattagagtctctgaa

SEQ ID NO: 5387 - DNA, 604 bp, Zea mays
  Clone ID: TF_ZmC2446_2
acccacgcgtccggtggcggcgcactgccggacgtgcccgggcggcgcgtacctgtgcggggggtgcgacgcggggcacgcgcgggcggggcacgagcgggtgtgggtctgcgaggtgtgcgagtgcgcgccggccgccgtgacgtgccgcgccgacgccgccgcgctctgcgccgcgtgcgacgccgacatccacgacgccaacccgctggcgcgccgccacgagcgcgtccccgtgcagcccatcggcgccgccgctgatcccgccgcggagaaggcggcgctgctgttcggccttgccgcggaagggaaggacggcggcgacgcggccaaggtcgtcgtcgacgccagtaagctggacctcctgttcgcggacgacgtggtcgacccgttcctcgcccaagacttcgccaggttcccgcacgccgacagcgtcgtgccgaacgatggatccaactgcggcgccgctgtggacttcgactttggtggcggcgtcgccgtcgccgccaagcagccgtcctacagctcctacacggcggcgtcgctgggccacagcggctcgtcgtcggaggtcggcctggtcccagacgtgatgtgcggccgc

SEQ ID NO: 5388 - DNA, 914 bp, Zea mays
  Clone ID: TF_ZmC2446_1
ctcgaggccggccaggccgggagcttcgcaagctttcggctaaatccctgccattagtagcaagcaagaaagcagtggtagtaggtgccacccacacggttttcacggctgccggctgggagcgaccgaggagatcgtcgtcacgctcgatggaggccctggtggggaggtactggggtctggggggacggcggtgcggggcgtgcggcgggtcgccggcggcggcgcactgccggacgtgcccgggcggcgcgtacctgtgcgcggggtgcgacgcggggcacgcgcgggcggggcacgagcgggtgtgggtctgcgaggtgtgcgagtgcgcgccggccgccgtgacgtgccgcgccgacgccgccgcgctctgcgccgcgtgcgacgccgacatccacgacgccaacccgctggcgcgccgccacgagcgcgtccccgtgcagcccatcggcgccgccgctgatcccgccgcggagaaggcggcgctgctgttcggccttgccgcggaagggaaggacggcggcgacgacgacgcggccaaggtcgtcgtcgacgccagtaagctggacctcctgttcgctgacgacgtcgtcgacccgttcctcgcccaagacttcgccaggttcccgcacgccgatagcgtcgtgccgaacgatggatccagctgcggcgccgctgtggacttcgactttggtggcggcgtcgccgtcgccgccaagcagccgtcctacagctcctacacggcggcgtcgctgggccacagcgtaagcgtgcctttttagtgaagtggctctgtcaccgtgcccgtgattattgtttttctattcctaatcttcgtttcggctttggttttggtcgagcagggctcgtcgtcggaggtcggcctggtcccagacgtgatgtgcggccgc

SEQ ID NO: 5389 - DNA, 1260 bp, Zea mays
  unsure (1)..(1260): unsure at all n locations
  Clone ID: TF_ZmC1611_3
cattgggtacctcgaggccggccgggacttagggaaaaaacacaaagcacaattgcacaaacgcaagaagctcaacaagacaagaaactgaggcaagaccaagaagaagaggaggaagaagaaaaaggcctagaacaagatgggaggcgaaggcagcacaagcccagcgcctgggggagccgcctgcgcggtctgcggcggcgccgcggtggtgtactgcgtggcggacgctgcggcgctctgcagcccctgcgatgccgctgtccacgccgcaaacctgctggcgtcgcgccatgagcgcgtgcctctttccatggccgccgtgccgtccgcatcaggcgcgtacgacgacctgttcgcgcccgacgacgtcgacgcggcggcgcccgcgcaggcgcaggggctgggcagcccccggaacggcagctcgtcggcgagcttcaccaccagcggcgacagcggcgcggagggcagcagcctgtttgacttcgacctgctgtctggcgtggacctcgcggcctgtgtcacggacggcgtggcgcccctccaccacgacgacgctgcaccgctgtgggcgcagcctggcctggccgtcgcgtgggcgaccgcgtggtctccggcggactccgccgccgccgtagtcgccgcggcggcggagcgggaggcgagggtgcagaggtaccgcgagaagcgcaagaaccgcaggttccacaagaccatccgctacgcgtcccgcaaggcctacgccgaggcgcggccgaggatcaagggccgcttcgtcaagcgcgccgccggnacctcctcctccctctcctcggccgccggaacaccccgacgacggcaacgacgccacgggcgccgctgccaagttctggctctccttctctgacgacgccagggacggcttctacgtggacgccggggcctacggggtcgtgccaagcttctagagagttcgttccgaacaactcacaagaaatccttggaaatggtcaccgcaggctcacatcgcttctggcggtggcgttcgcgcagcttgaaacaagctaagaaatgggcgcgcgccaatggcgccatcgttcttgttttgtgtcgtgccgtcagcccgtcattcatgcgggtagcattcgtggtgaaattcggccatcgctatttttttaatgatggctcggaatttcgaccccattttaatgtctatatatgtagctgtgttcatccattgtttgagtttttaatttctactccaagatcaattccatg

SEQ ID NO: 5390 - DNA, 1899 bp, Zea mays
  Clone ID: TF_ZmC13160_3
cggcggcggctctgcactgccgcgcggacgccgcgcgcctctgcgtcgcgtgcgaccgccacgtgcacgccgccaacgcgctttcgcggaagcacgtgcgggcgccgctctgcgcagggtgcgccgcgcgcccggccgccgcgcgcgtctccctcggcgccgacccggcgttcctctgcgcggactgctgcgagggctgcgccgccgcttccgcggcgcgcgtgtcggttgagggcttctcggggtgcccctcggcggccgagctcgccgcgtcatgggggctcgacctccgccgcgcggccgtggccgtgggcgacgacggcgacggcggcgacgacgacgaccccttcctctcggtgctcgactactccgtgctgggggtgggggtggccgacacggacctgcgcgacctctacgtgccgtgcgacccaccgcgggtgcccgtccccgacgccggcgcgcgcccgctcaggggcgaggcgctgtgcgaccagctcgcggagatggcgcggcgcgacgaggcggacacgtcccacgcgcacccgcactcggatctgagcccgcgcacgcctcgccgcacctccgcggcttccagcggacgcctgccgtcgggcaagatggcgccccccgcggcgctgccggtgccggctcatcctcctcccgccgcgccgcaggaggtgcctctgccgtacacgtccctgctcatgatggcgtccgccaactgcagcgacctcattggcggcggcgaccgggtgggtgataccgacgaacaactgctctgggactgcgctgcgccctcggtgccgcccacccagagctcgggcttcaatttaggacggtcaaggcatcacgatgagaaatctgctcttgaagttggatacggttctaaccatggcggctttatgattaagagttacagtgacatgcttaaggacatttcttcggggacaacgaaagatctggaagatatttatgactcaagatactgctcaaccgccgaagatatcatgtcctctaatatctgtcagttgtcatcgaaaaatgtgagcaccgggagcaacaaacggaaggtgaggtcatgtgctgcgtcgacgatggatggaccaacgacctccgggaaccacaaccacgtacccgcttcagcttcaggtccaggagcagcgctcaccagggagatctccttcggggatcagacggtgtccgcccccgcggccgagaccgagaggcctgccgccgtgaggatcgacagcgagacgcttgcgcagaacagggacagcgccatgcagcggtacagggagaagaagaagaaccgcaggcacggatccatgagctgatcttgatgacccttacctacctagcttgcctgctgcgacttgtgcggtattaagaataggctgttacatgttgtgtcccatcatatcgttcgtgtccgcaggtacgagaagcacatccggtacgagtcgaggaagctgcgggcggacacgaggaagcgggtgaaagggcggttcgtcaagtcgaccgaagcactcaacgccgccagatacaacggatgaggcagccatatatatatatatatatgcatggcctgcgggcggatgagtttgctgcgcgcctgcgttattacgtgcggtagttacctcacggagaggtaggtactgctacctggaggtgctacgtatgtatggcgcggccggaatcgctacgcacgcggcccaagtttaattttgcgttgaagctatagcgatcgtggccattgttgggcagtcaactccagagattgcacggtactgcttgtttgtaacagacgaccctccctttcccctttttttctctgttgttgccgtcatccccaccagaacagaaagtatgtagcttacctacagcaccgatttaccatgc

SEQ ID NO: 5391 - DNA, 1978 bp, Zea mays
  Clone ID: TF_ZmC460_4
ctgttaaaaacatcagtgtctcagactggtattagcatagcaacaaaagtggcttaatagatgttcagaattgagcgacactacagtcaaagatgcacaacacttgacactagcttgtacacagtaaaattcttctctggtacaccgtacacatcaggagacgaaacaaaactcctgcgctctcttatttaaccaagatcagggactatgaggtaatcctcgtcgtcggtgacctcgatccgggccttcttgctctggcgaaccccagcgccgccgccggcggcggctttggccggcctgtagtacgccgcgtcgttcgccgcctggtatccgaaaagctccggcacctccgccaacgtcctgctggctttgggcgcctgctcgtggaagaggtcgatgtcggcgaaccactccagctccttgaacccgagcgtcggctccttgtgcagcttgtcgctggactcgtagtcggagaactgcaggagctcgtcgacggcccagccctgcggcaggaactgcggcggcgagggcacctgctgcaccgcggcggagacggcggcgtgcggtggctcgatggtggccttgggcggggcgtggtggtcggagtcgtgggcgtcgcaggcgtcgctgcaggcggaagccgaggcgaggccgacgcggatgccggtggccaggtagcgctggtggttcccggagagcgtgcccgggacgtggatgggctcgtcgcagtcctggcagaagagcgcccggtcctccacgcagaagatgaacgccgctttctcctggcagacgtcgcagcgcgggagcttggcggagagcgcctcgagcgggaggcgctggtgcttgctcgcgagcttgttggcggcgtggatctcgacgtcgcagcgcgcgcacagcgcggcctcgtcggcgcagcacaccaccgtggcagccgcgccctcgcacgcgtcgcactggatcttcatggccgctccacttctcggtctctactcccagctcgccaacacccagccaacaacaaccagggaggcgagaacgaagaggataacgccactgatgactgtggtggaggaagaagtggacggcaagggaggggaggccgggagcgcagacccagcgggggcgagtggtgcatataagtcgcctgcgcgagcacgcaactcgagcaatcagcgctctgccgggcgggagcccggccccggccacgtggatgggctcgtcgcagtcccggcagaagagcgcccggtcctccacgcagaagatgaacgccgctttctcctggcagacgtcgcagcgcgggaggctggcggagagagcctcgagcgggaggcgctggtgcttgctggcgagcttgttggcggcgtggatctcgacgtcgcagcgcgcgcacagcgcggcctcgtcggcgcagcacaccacggtggcagccgcgccctcgcacgcgtcgcactggatcttcatggccgctccacctctctgtctgcggtctatactcccaggcccagctcgctatcctgtcctgtcccctcgcaagtcgcaacaacgagggacgcaggtgcgaaccccacgcgtccgcccacgcgtccgcccacgcgtccgcggacaaacgacaggcggggcaccacggacgtaattggagaggggggaagccatgccgggtacaacaacaggggaaatgggggaagcaaaaggaacccggacccgggggcaaaggattcaacacgccccccggtgggaagggggcttcgagggggccccccggggcgcgttggccgggcgggctgaaccaaaggcacgggcccttggggggcgaaccccctaacgggggtcggggcgggcggcaaacaaaggcccccggtgctaacttggattctgacttaaagggggtcaagcataaaccggcacacgggagcttcgcgccactgggttttaaaccaagcgcgaagaccaattgggggaaacaacgggtcccctcgga

SEQ ID NO: 5392 - DNA, 543 bp, Zea mays
  unsure (1)..(543): unsure at all n locations
  Clone ID: TF_LIB4732-095-Q1-K1-B12
ccaaacccccgctgcttgcttcccggccgaaggttcctcgtatataaaggcggcggcgtgtcgtccggtctggtgctccgtgctcctgtgagacctgatcacctggagcctggagggtgcaagggagggaggcggtcgaatccgtcatccactgagcaccgccagccccgcacgcggaggtcggagggctacgctccggagtccgaggggaaggcagaggaggcaagcaggcaggatgggtgccgctggtgacgccgcggcagcgggcacgcggtgcgagctctgcgggggcgcggcggccgtgcactgcgccgcggactcggcgttcctctgcccgcgctgcgacgccaaggtgcacggcgccaacttcctggcgtccaggcacgtgaggcgccgcctgccgcgcnggggcgccgactccggggcgtccgcgtccagcggctcctgcctggtcacggncgactccgcgcagtcgaggggcggcgccgccgccagggatagggagaagggagggagggcgccgccgcgcgcggaggcggtgct

SEQ ID NO: 5393 - DNA, 893 bp, Zea mays
  Clone ID: TF_ZmC101_2
cggacgcgtgggcggacgcgtgggcggacgcgtgggcctggagggtgcaagggagggaggcggtcggactagttctagggcggtcgaatccgccagcgcatccgctgagcaccgccagccccgcacgcggaggtcggagggctacgctccggagtccgaggggaaggcagaggaggcaagcaggcaggatgggtgccgctggtgacgccgcggcagcgggcacgcggtgcgagctctgcgggggcgcggcggccgtgcactgcgccgcggactcggcgttcctctgcccgcgctgcgacgccaaggtgcacggcgccaacttcctggcgtccaggcacgtgaggcgccgcctgccgcgcgggggcgccgactccggggcgtccgcgtccagcggctcctgcctgtccacggccgactccgtgcagtcgagggcggcgccgccgccagggagaggcagagggaggagggcgccgccgcgcgcggaggcggtgctggaggggtgggccaggaggaagggggtcgcggcggggcccgcgtgccgtcgtcgcgtcccgctccgcgtcgcgatggccgccgcgcgctggtcggaggtcagcgccggcggtggagcggaggctgcggtgctcgcagttgcggcgtggtggatgacgcgcgcggcgagagcgagacccccggcggcgggcgctccggacctggaggagggatgggccgagtgctctcctgaattcgtggtccggcagggcccacatccgtctgcaacaacatgtgggcgacgttagtttgtccttttcctccctaattattttagtaattaacgagatcgatcgtgtggtggtggtgtcgttggcttcctctcgtcgtccgattaacaaaagccggttcgatttgattac

SEQ ID NO: 5394 - DNA, 810 bp, Zea mays
  unsure (1)..(810): unsure at all n locations
  Clone ID: TF_ZmC613005_1
ccggccgggaggcttcacttctaatggctggataaagatgaactcaacagctacgctacgccctcgggaaggagagaaaagacagggaaggaatgtccagctggaggcttccgcggccagtagtgggactgggagcgaagcgcatccgcagaggatcctcggttcggttggagttggaggcccaaaagacctcccgcacccaacaaaactccagcctcacatctctccctctccctctccctcttcctctctgcggtccaaacaatctctccctctctctctctctctctctcttcttcctctctgcgctccaaacaatctcgccctctccttctctactctccaaaacaaacgaaacgaagcaagaaaccgagaaatctccctcccctgtggctgtggcggtggcggtggcggcgaggatcatgtcggcggctgcggcagcggaagtggggaaggagaagggcgccgccacccccggccccggccccggccccggtggcgcgtgcgagctgtgcggcgccgcggccagggtgtactgcggcgccgacgaggccacgctctgctggggctgcgacgcgcaggtgcacggcgccaacttcctggtggcgcgccacgcgcgctcgctgctgtgccggggctgcgcgcgccccacgccgtggngcgccgcgggcccgcgcctcgggcccaccgtctccctctgcgtccgctgcgtccgccgcggccccgngcgggccgtggcccgccgcggccacgaggacatgcgcggagcggccgaccgagacgccgacgatgccccccactaggaccacc

SEQ ID NO: 5395 - DNA, 858 bp, Zea mays
  Clone ID: TF_ZmC519810_1
tcgagggccgcttctttttccgcaagcaagccatatatacacgcattatctcttcttcttcttgtaggtagcagcgcctaccaagctcttttccatcggtgaccattccagtcgtccatcacatggatcaggacgagcgccagcatccagagccgccggccatggagaaggagctctctgccgacgcgctagcctgcgactactgcagcggcccacaggcggtcgtgtactgccgggccgacagcgccaggctctgcctgccgtgcgaccgcctcgtgcacgccgccaacgcggtctgctcccgccacctgcgcgccctgctctgcgccgcatgccgcgcaaccggggccgtcttccgccacgctggtaccgaattcctctgctccaactgcgacttcgggaggagccgggacgccgagctgccgctgcacgaccgctgcacagtccaggggtacacgggacgaccctcggcgcacgacctcgccgctcttctcggggtccccgacttcgacaagccctcggccggcaaagccgacgacggttggtgggccatctgggaggagccccaggtgttccgcctggaggatctcatcgtgcccaccacttcttgccatggcttccagcccctcgtgacgccgtcctcgcccaagatccacaactcacccgatggaaagaccaacgatgaggtcatacggcagttacgtgagctcgccgaggtcgacatgggcagcggtcagataacacctcgtgaggaggcagagcaagctgctcatcagttgccttcctggacagagtcacagcacaccactgggaaatggcgattttcgcatagataacagccacggagttgcaaccatg

SEQ ID NO: 5396 - DNA, 651 bp, Zea mays
  Clone ID: TF_LIB4829-058-R1-N1-D7
ccggccgggagtcgcttcgctgccacatctctcctcgtccaaagactccaagctcctgtgcggcctgtgttctgctgccgcctctggtccacatctccccgccgccgccccgtcgtctgccgacacctttagcgctgggaaggatcacaggggatcggcgcgaggcgggggacctgcggtttttgtcgcccggatggcggcggagcgatgacactggcgtcgggagcggcgcggcgttgggatgcggacgatctgcgatgtgtgcgggagcgcaccggcggtgctcttctgtgcggccgacgaggcagcgctttgccggccctgcgacgagaaggttaattccgctccctactccctctgacccgcggaggtcgtcgtccctctcgcagatcggacgagggtgctgtttcgattggggtggcgggcgggcacggtggtctttattacctccgtcctagttggtgcggtcggtctctgtcgtgttcccattttctccatttcgacgaatcgacgttcgacgatcctgcgtctgtttcgatctagcatggggttcgtaaccgtactagttcaaattgataagatcccgacggaggaaaatggaacattctagcatttgacagtggcaaaaaaaaaaaaaaaaaacccgcggcc

SEQ ID NO: 5397 - DNA, 2208 bp, Zea mays
  unsure (1)..(2208): unsure at all n locations
  Clone ID: TF_ZmC3_2
gttgcatcccacagtctcatgcgcatgtttacttacagaagttcatgaaaagacacgtgcacttgtaagttgtaaccaccttgaagaagctaaagtaaaacaacatgtgttttctctaattacaacacattatgttctatcattttattgtaaccttcacattttctgattttgaaaacctggtaaatgcgtcaaccatcaaactgtaaatttactaatcccagtccatgtatagtgatgccattattttgtgtcaacctaagttatgagtactgtgaacagataaatttatttgcctggtgtgtttctgcaagttgcatttgttttacttctggttgctagatgaaaacccttgtttctgcactaagggctgctgtagtgctgttgggtaggtgtaccttctgttactctacattgttgtacttatgaaggtcgaatcactgtctggatgatgagtgaactacattttacattttttagtttgttgagttatattgtccgtggacaagctgtatctggatgtggccaaccggcttcaggggctcatgcggctggcacaaggagcaaacaagcaacaaccttatcctgagttgctatcattatttgttagttagctactagatccatttggtagtattttatcatcttgctgctagtatgtggttagagagggcatgtgatcattagttggaacttggcagactagaagaatatcaatcaatattgtcctagtcccattctcctacccttacccttgtggtgtggttgccggctatcagcgatgtcatgctgctgaggttcagggccatctagaccagagtttatcacaacgatatagttcgctactgtgacacagtttgttttgtagtgtatcgaatcctcctgcaagacccttctcatgtttatccttactgcaggaggcttctggatacttcttctgcctagaggaccgtgcactactttgtagagactgtgatgttgctatacacacagtgaattcctttgtttcagtacatcagagattcctgctaactggagttcaggtgggtcttgatcctgctgatccagttccacctattgctgaaaagcacgttaatgctgctggtggatcagtaaatcaaccagtgagacatcagccaaagagaagcccgacagttcaattttcagttgaagggagtgcctctgttcctactaaaaatgtaccaaatggagattgttcaaggcagaattttgtcccaacagccagggcagaagtggttgattggactatgaataatagtacaattcggtcagtagaatctccgcctaagtacatttcagaggaaagcccgacacttctgcaatctagccagaccacaacagtcttctccaaccaaattaatggcaatagtgatggggcctaccacttgtcattctcaggtggtaatgtgacagacagcctaccagattggcccgtggatgagttcttcagtaactcagaatatggtccaaactttggcttctccgagaatggttcttctaagggtgataacgctaagctggggggcgctggtggatctccacagtgccgtttggctgaaggctcagttgctgaggaactattagggcaggtgcctggattgatcaccgatgaatatatgagccgagtacctgagaattcatggacagtgcctgaggttccctctccaccaacagcctcggggctcaactggcacgggaatttgtgtttccctgcgtatgacagcaccatgttgttcctgaaattacctcccttcagaactccgaaagtcacttcaccgtaccttccagtttcaagcgccggagaagagagtactgagaggcgacaagaagatcactagacaccactgtccggtctaggctatcttgagaaaggcttcttggtgggctaaatgacgaaagaaaatatccaggactgggtggtcattcaaacatcaactgagctatccagtagccaggttttaagtgtgttgtaatgcttcaatgtgtttcattttccaaagacctgagcttcgcttgtgatttgttccgagctgtacggtgtcgattttgtgtatataatataatataacgaaataaagggtacccagtatttcgttatattatattatatacacaaaataaagggtacccagtatgagtcaagttaccatatatacattnnntttcttatctttttgcctctctttc

SEQ ID NO: 5398 - DNA, 1637 bp, Zea mays
  Clone ID: TF_ZmC460_6
ggccgcttatttgtttttttttttcgttatttttattttttttttttttttttgttaaaaacatcagtgtctctcagactggtattagcatagcaacaaaagtggcttaatagatgttcagaattgagcgacactacagtcaaagatgcacaacacatgacactagcttgtacacagtaaaattcttctctggtacacatcaggagaagaaacaaaactcctgcgctctcttatttaaccaagatcagggactatgaggtaatcctcgtcgtcggtgacctcgatccgggccttcttgctctggcgaaccccagcgccgccgccgccggcggctttggccggcctgtagtacgccgcgtcgttcgccgcctggtatccgaaaagctccggcacctccgccaacgtcctgctggctttgggcgcctgctcgtggaagaggtcgatgtcggcgaaccactccagctccttgaacccgagcgtcggctccttgtgcagctgcaaaacacattaaacagagcaagaacgtgagacgggatccggtgggtgcacgcggacatggaccggagcttgcgctatcgtcttgccttgtcgctggactcgtagtcggagaactgcaggagctcgtcgacggcccagccctgcggcaggaactgcggcggcgagggcacctgctgcaccgcggcggagacggcggcgtgcggtggctcgatggtggccttgggcggggcgtggtggtcggagtcgtgggcgtcgcaggcgtcgctgcaggcggaagccgaggcgaggccgacgcggatgccggtggccaggtagcgctggtggttcccggagagcgtgcccgggacgtggatgggctcgtcgcagtcctggcagaagagcgcccggtcctccacgcagaagatgaacgccgctttctcctgcgaccgcgaagcaaggttagcttgcttgcgccgtacgtcgtgcgtgtagcgcatctgcgcatgccgccgccgcatgcgctggttagctaaatactagctagtgcgtgacgacgtacgtacctggcagacgtcgcagcgcgggagcttggcggagagcgcctcgagcgggaggcgctggtgcttgctcgcgagcttgttggcggcgtggatctcgacgtcgcagcgcgcgcacagcgcggcctcgtcggcgcagcacaccaccgtggcagccgcgccctcgcacgcgtcgcactggatcttcatggccgctccacttctcggtctctactcccagctcgccaacacccagccaacaacaaccagggaggcgagaacgaagaggataacgccactgatgactgtggtggaggaagaagtggacggcaagggaggggaggccgggagctatggtcatcgcaagagcgctggcaggaattttgggagctcatgagtgtccgccctcatattatgttgctatccgattttttaatttttctgtagctagtattagttgtagtatttcttttttcggacgcgtgggcgcgacggggcattgtaagtggcagagtggccttgctgccacgatccactgagatccagccccgcgtcgcacggatccgtctgccaaggattcagcacgcccccacgcgtccgcggacgcgtgggcggacgcgtggg

SEQ ID NO: 5399 - DNA, 493 bp, Zea mays
  unsure (1)..(493): unsure at all n locations
  Clone ID: TF_LIB4756-104-R1-K1-D9
ttgggtacctcgaggccggccgggccgtttttccctcctgcaaacctcacatccctccctctcctctcctctccctcttccctctctacgccccaaacaaacaaagctaaggaagaaaccgagaaatctccctcctgttgtcttggcggtgaggcaaggtccaacggtgaggatcatgtctgcggcgtgggaaggcgggaaggagaaaggcgcggccacccccgcccccgggggcgcgtgcgagctgtgcggcgccatggccagggtgtactgcggtgccgacgaggccacgctctgctggggctgcgacgcgcaggtgcacggcgccaacttcctggtggcgcgccacgcgcgcgcgctgctgtgccggggctgcgcgcgccccacttcgtggcgcgccgcgggcccgcgcctcggcccctctgcctccctctgcgaccgctgcgtccgccgcggntcgggtgccgtcggcacgggcggtgacgtggagatg

SEQ ID NO: 5400 - DNA, 1144 bp, Zea mays
  Clone ID: TF_ZmC460_13
gtgtgttttttttttttttttttttttttttttttttttttttttttttttttttttttttttttttttttttggacgaaaccgggcgacgcggggctggatctcaggggatcgggggaaaaaggccactttgccacttacaatgccccggcgggttttaaggcgtctgcaaaggattcaacaccccccccgttgggaagggagctttgagggggccccccggggggcgttggccgggcgggctgagccaatggcacgggcccttggggggcgaaccccctaacgtgggtcggggcgggcggggaacaaaggcccccgttgctagcttggattctgacttaaaggggttcaatcataatccggcacacgggagcttcgcgccactggcttttcaaccaagcgcgaagaccaattgggggagagaacgggtcctctcggggccgggcgaagtactcggaggggtcgtgggcgtcgcagggaaaactgcacgctgacgaagcggaggcgccgccgacgcggatgccggtggcgaggtagcgctggtggttcccggagagcgtgcccgggacgtggatgggctcgtcgcagtcccggcagaagagcgcccggtcctccacgcagaagatgaacgccgctttctcctggcagacgtcgcagcgcgggaggctggcggagagcgcctcgagcgggaggcgctggtgcttgctggcgaagtggcgagcttgttggcggcgtggatctcgacgtcgcagcgcgcgcacagcgcggcctcgtcagcgcagcacaccacggtggcagccgcgccctcgcacgcgtcgcactggatcttcatggccgctccacctctctgtctgcggtctatactcccaggtccagctcgctatcctgtcctgtcgtctcgcaagtcgcaacaacgagggaggcaaagacgaacaagataaggccactgactgcgatggaggaggacgagcttgcgcgcgtgagcacgcaactggagcaatcagtgagctgccgctgccgggcgagcttgtggtggaggactcgccggggagacttgtggccaggggctcccggctcgtctccccgtgtactagctacacgccggaaccacgcttggacgcgccgattttgatgtgatgtgctc

SEQ ID NO: 5401 - DNA, 883 bp, Zea mays
  unsure (1)..(883): unsure at all n locations
  Clone ID: TF_ZmC3_4
gcacgcctgcgctttgaccaccgcttcgtctgtcgtctcattcttctcccccgatccctaccggaagcccggaagcaaccgccaaccgtaccgcacccccaccaagcgcgcacctactcaaaacgcaacagcgctcgcttcctcgcagccaggtatctcacccctcgccaagtgcgcacgtactcaaaaagctctagctcacagacacgagccgtgcgggagagggagggagagagagagaaaggggaccccgatccaatcccagtcctctaaaaccctagcggggagccggggatgaggatccagtgcaacgcgtgcggggccgcggaggcgcgggtgctgtgctgcgcggacgaggccgcgctatgcgtcgcctgcgacgaggaggtgcacgccgccaacaagctcgccgggaagcaccagcgggtgcatctcctgacggactccgccaccgccgccgcctcccccgcgccggccgtgcccaagtgcgacatctgtcaggaggcttctggatacttcttctgcctagaggaccgtgcactactttgtagagactgtgatgttgctatacacacagtgaattcctttgtttcagtacatcagagattcctgctaactggagttcaggtgggtcttgatcctgctgatccagttccacccattgctgaaaagcatgttaatgcttctggtggatcagtaaagcaatcagtgagacattctgcctaggagaagcctgggagttcaattntcagttgaaggcagtgcttcttgttccgagccaaaatgtatcaaatgggagattattcaaggcagaaattctgttccaacagccanggcagaaatgngttgattgggacttagaacaatactcaattcagtcagt

SEQ ID NO: 5402 - DNA, 1293 bp, Zea mays
  Clone ID: TF_ZM3541.C1.o2.fg
atggaaattgtaaagactgatttgaggaataagatggggagtgactggctcaatcataggatggtctgcggtctgattcgattgttgatgcagaaacaagaagctaagtggaacaaatacaataattcttcatcgattagttccgccactggccccaagggcaccctcttccccatgtgcggcatgaacctcgccttcgaccgcgacctcatcggccccgccatgtacttcggcctcatgggcgacggccagcccattggacgctacgacgacatgtgggctggatggtgtgtcaaggtcatctgcgatcacctgggtttgggcgttaagacagggttgccctacatctggcacagcaaggccagcaacccgttcgtaaacctcaagaaggagtacaagggcatcttctggcaggaggacaccatccccttcttccaggccgtcgtgctgcccaaggactgcgacatcgcgctctcgcaacaggtcaaggagaagctcggcaagcagaggcggatctctgttatgggcagctggggccatggctctactcacccacagaattcttttgcaaactttgatgaagataaatcaatagaacttgctcaaatttatgttgttgatttcacccaatatgattgcattgtccttcgcaaccaacttgagatgtttgttaatgatgcaacatgttgcaatgaccttggagatcttgctataaagatggtgcagactgatagacatacaacatttcctttggtctatcgtcttgttgagttggctttgattttgccggttgctactgccacagttgaaagagctttctcagcgatgaaaattgtaaagactgatttgaggaataagatggggagtgactggctcaatcataggatgatatgctatattgaacgagacattttttcaagtattccaaatgataagattttataccagtttcaagaaatgaagtctcgtatgaaaatgttgcctaaacaacatcaggctactagtgttaatgtctgtgctaaattttttttgaatggccctggtcctgtcgtgagcaaagttccgccactgtcggcaaggtcggcccctacttcaccaagctccactaccggaatttggctctttgccgagtgccatattctttgccgagtgttttattttgggcactcgcaacaggtcaaggagaagctcggcaaggtcgacccctacttcaccaagctcgccgacgccatggtcacctggatcaaggcctgggactcgcttaacgccgccaacggcaagcccaagaagtga

SEQ ID NO: 5403 - DNA, 524 bp, Zea mays
  Clone ID: TF_LIB4730-019-R1-K1-B3
cacggccgctgcggcggagccgtagacccgtagggtactggtgctgctacgtcatgtcagccgttgggggatgcgcacgccgagccgtttcccgttttcctcactgtggctgctgctgctcctcctgagcgtcgccgacggcggcaaggagccagcggtctaccggcacgcactgcaccttgtgcgcgcgcttccagtccagcgcctggcacgcgcgggagcagtagttggccgcgccgcacacggagcaccgccggaactcgtgccgccgcgtctcgcgccgcccgcaccgcacgtgggagcacagccggagctccgcgccgtcgccgtccacgcctctatcgccggttatcttcccgcccgcctgggcgccgcagcggtcggaggcccaccaccagtccaccatgaactggttcgccgcgtggggctccgcctcggggaggctccacccgaagtcggacaggagcgggcacccgccgccgccgccgcctccgacgacgacgccgcccgcggcgtggcgcgag

SEQ ID NO: 5404 - DNA, 1242 bp, Zea mays
  unsure (1)..(1242): unsure at all n locations
  Clone ID: TF_ZmC1511_5
tctgtgcacactcctcaccagnacccaagccagctccgtcgggcgccgtggggaactgctgggaggggcggtcgaccggcggtgcctctgcttcgggttctccgtaccggcgtcggaggggatcggatggcataagctcctgaatgccactggtgtggtacctggaaaggtgataaaatatgtagtagcagcaagaaagcaaggtactgttctgagaaacatcaggcactgcattggcgtactggtcataaaaatgattgcctccagataataagttctgctgcttcaaatttagttctgccagctgtaggaatagggtttgtccgctggtttgctaaggcaagcaacgtacatagactgctcgtcttggatccttcaggtttgtatagtgtgttgctttatgatcaattgaccattcattaccttcgcctgatggcccttattaacaacaataagaactaagaatgtgcgctaagatttttcttgctatctgaagtggtaaatttgttaatcctaattctttgttgaatgggtatgggggtttntgtgggtgctggatggtgttgtgggaatgagatcctttagattgtgttttgttggacattactgtttatgtgctttgttcctacaatctgtctattagttgttgttgttggtaattgagctttacttgtcccgtggctgtcaaagggttaatgttactaaattctttcaaatgcctaaatatttgttgccagcccatgtatgccactggtgtggtacctggaaaggtgataaaatatgtagtagctgtaagaaagcaagatactgttctgagaaacatcaggcactgcattggggtactggtcataaaaatgattgcctccagataataagttcttccgctgcttcaaattcagttttgccaactgttggaaaagttcctgctaacacttcttggccagaatttgagataaaaatagactatgaaggtatatttgattccgatagtggtgatgagaataactcgaagttgttggtgatgcaaagacatgggaaacctgatgctatgatgcagtcatggatggatcaatttgaggttttgggtccattttctttcagaataacctctgttggacttctgcttatgcatcaatcattatatttatttaatgntgnctgggtaggccgattctgacaacaaatgctggacatcttttcaagagcgggtctcaagagcaccaaatcaagtgttgaggtatt

SEQ ID NO: 5405 - DNA, 963 bp, Zea mays
  unsure (1)..(963): unsure at all n locations
  Clone ID: TF_ZmC312728_1
aattcggcacgaggggctcgcagtctggttgggctcggatggtcggtgccggacgccgggcgcggaaccctaaccctaggggccggctacattagatgctggggggcggcgccggaggcggtggcgcgggcgcgggcttgggactggacctttcggcggtgatccaagcggcggtcgtcgggctcgtgctcttctccgcggccgtcgttgccgtgcgccgcgccgcctcgcgctacttcgtcgtcgacgccgcggggtttgccgcctcctacgacgatcaccaccacagctcgcccgcctccccgatgtcgtccaaggggaaccggtcggagcagggggccgccgcagcggacctcacggggccctgcgccgcgtgcggtgtcgtcacctccaagaagtgctccgggtgcaagcgcgtgcggtactgttcccaagaatgccagacaaagcattggcaaattgatcacaaattcaagtgcaaacaaatgaaatcattggatcttgccgacaagttatcctgtggaggtgaggccaacagtaagaaaacatcaggtttcggtcgcatctcattggtgcctgcctgtaaaaagataagcaagggtcaggtcctctttccttatgatgagttcttaaagttgtacaactggaaagaccttgatgttgtaccttgtgggcttatgaactgtggcaacagttgctttgctaacgtggttttacaatgtctctcatgcacgagaccacttgtggcctatctgttaggaaaggaccatagcagggaatgttctgtgaggcatgaagattggtgtttttttgtgtgagctacaatgtcatattcagagagctagtggnaagtttgcacccatttgctcctacaaacattctttctcatctgccaaatattggtggcaatctttggcgttggtaggcaagaggatgctcatgaattcatgaggtttgcaattg

SEQ ID NO: 5406 - DNA, 1823 bp, Zea mays
  Clone ID: TF_ZmC2175_1
cattgggtacctcgaggccggccgggctggttttctctgcgcggggaagaatggcgtcgtggttggagcagctgcagcgcgagctcgccgcccgcggcctcacagtcgcctccatccccggcaagggaaggggtctcatcgctacttgcaccttcttcccaggggatgtcattctcaatcaggaaccttacgcttctacacctaacaagattttagttggatcgagctgtgaccactgtttcacctctggcaacctgaggaagtgctctatgtgtcgagttatgtggtactgcagcagcaactgtcagaaagaagaatggaaactacatcagcttgagtgtagagcaatggcagcacttacagaggatagaaagaagatgcttactcctacaattcggttgatggttcggctggcactcaaaaggaaattacaaaatgagaaggtcattccatcctcaagtatagataactacaatctggttgatggcttggagtctcatatatcgaaggttgatgaaaatcaacttgtgctctatgctcagatggccaatcttgtgagcctgattcttccttttattgagcttgaccttaaggaaattgcacaaactttttctaagtttgcctgcaatgcgcataccatatgtgaccctgaacttaggcctcttgggactggactgtaccctgtcatatccattattaaccacagttgtgtaccaaatgcagttttgatatttgatggtaggacagcatatgttcgtgcattgcaaccgataaataaagatgaagaggtatctataagctacattgagactgcggcagtcaccaagaagagaaacaatgatctgaaacagtacttcttcacctgcacatgtccacgctgtgtaaagggttttgatgaggatgcactacttgaggggttcaggtgcaagaaccaagcatgtgatggctttctgctgcccaactcaggtaaaaaggcttatacatgccaaaaatgtggtgcttctagagatgtggaagagataaaaaatatgagaagcgaaatactacagttatcggataaagcatcttcatttctttcatcaggaaataaggctgaagcaggttctatctacaagataatcgaacagttagagagaaatctgtaccatgctttctcaactactttgctgcacacgtgcgaaacactattgaagatatatctggaattacaagattggtggactgcgttgacatactgtagattgacaattcctgtttatgaaagagtttatccaccttttcatccgatgattggattacaattctatacttgtggaaagcttgaatggttgcttgagttcacagaggatgcactaaaatctttaaccagagcagcagatatacttaaagtaacacatggcgtaaaatcccagttcatgaaagagctctttggcaagttagaggaagcaagagctgaagtttcgtttagactatcctccagacatggacatgatgagtaattttcataactgcaggccagttatgatggaaaataatatattgaaattatgcttctactgttgggatcatatttcaaggtacaataaaaaatgtggagactttgtaggcaaagaattagcactgttgtaaaacgattatgtgccgacacaaaataggccctaatttgttgtataaaaaatacaatttggaatttaatggtatatcatgtggtaggttgaactccaaaaaaaggtattgaacacaattttgaatttaaaagaaaaaaaaaaaaaaaaaaaaaaaaaggcgccgctcgcgatctagaactaggttctagatcgcga

SEQ ID NO: 5407 - DNA, 719 bp, Zea mays
  Clone ID: TF_ZmC56_1
ggtggcgtacgcccacgtggtcggcaaccccgggtgcctcaccagcgagctcggctgcttcaccaccgtgccggccagcctgcgggggtgggcgcacccggccaaccggttcctgtgcgactggttctcggcgaacccgctgccgttcccgccgcggcgcctgctgctcatgtgctccatgcccacctgcggccgcccggagacgcggggcctcgagtaccgccgctgccccgtctgcggcatcgcgcgctactgctcccgctcctgccagtcgctgcactggaggatgggccacacgcgggagtgcgtccccacgcaccagtggctcatggaagccattgccaaccacgccgtcgtcaatgccgacgacggcgccaatgctgctgctatgcccgctgtcaacaataatagcgccactcaccacaacaatctcggtggtgctgctgctgatgctcctgctcctaagtagacatgcgtcgacgagccggcccgctagctattcaccagcgctagctactacacctctcctatcctatgttctcagttaactttctgtcagacagtagttttgttttccttcgtgtaatcgcctagatatatatatttccatttctaaaatatatacctgtgagttttctatatatgctactagttttagtttattatgcttggaaaaaaaaaaaaaaaaaaaaaaaaaaaaaaaaaaaaaaaaaaaaaaa

SEQ ID NO: 5408 - DNA, 603 bp, Zea mays
  Clone ID: TF_ZmC1168988_1
cgtttcggcgatggagtgcgcggcgaagggactggccgcggagccgtgcgccggcggcgtcgccgatcggcggtgcggcggctgcggagccgtcgcctactgctcccgcgtccaccagattatacattggagggttcacaaagaagaatgtgaaaggtttgcagaacaaatgaggcacatcgatgcgctgagccagtttccgttcacattcttggaacctcctgctctgaaccatgaattcccaagtgcaaggtgcttatttttgcaatcaatcaaacttcaccaaaaaggactctggaaatctgaatgtatatgtggccgagatgttgctcctttgaagggcttaagcgtagaagctgaatggaacttgcaaagctccctctgcccttgtgcagagcctaaaaatcctgtgtcttcagccctggcaagctgggaagcatattatcagtggagatcccttcccctgcattcacctgttgctgttttacttcattggccacttactctatatcattgtgttcaactctgtcggacccaaactccaagatatgatgggcaggacaccctatgcattcactatttaaggcctgagaaggagctact

SEQ ID NO: 5409 - DNA, 498 bp, Zea mays
  unsure (1)..(498): unsure at all n locations
  Clone ID: TF_LIB4756-044-Q1-K1-D6
cattgggtacctcgatgccggccggggcacgaggtcaataggaggtccgtgtgcggcgcggtttctactgctcccgcgcgtgccaggcgctggactggaagcgcgcgcacaaggcgcagtgcgtagcccatggaccgctggctcctcgccggcgttgccgttggcggcggcgtcgaggcgcagcagcaccagcagtgagcgaggaaacggctcggcggctgacatgacgtaccagcaccgagtcccctacaggcccacggctccgctgcgtggaccgggcgtagcggaaagcggcgcaaggaggggaaggcgtttcggctgttttctctttctttttgcctctttttcacctgctgatgaattgaatgaggtgtatctcgctggcgctgcctgccgttcagatgcgcattttctactaagtagcaccagggaagcaaagagccaaagagcagtggagatccangatgncgcgcgcctctccttttctcttatgttctt

SEQ ID NO: 5410 - DNA, 799 bp, Zea mays
  Clone ID: TF_ZmC1511_10
tgttagagcggttcttggccagtcgtacgatagcgcgagctcgatggccaggcgtaggacacacgtcacaccgggtggcaactggcagggcaatgcccgatcaggtctccgtcgtcgattcgtctgaacagctatcctcatcatattttaatgcctcgtgcataatacggagtacatatctatatttacgtcagcgttattgcaacgccctctctctgtggtctcttcttctacatactataatagtagtacattagtactaacaatgtggttggccatggcatgcttgcttcgagatcaacatgaacaatggaagcacaagtacgagaatccatgtagaagcgtgaagattttccggtgccaattgccacagaataatgccttctactcagctcaacctccaaagcatgatggctctgacaaaccactctgtccaggagctcctgtatgccactggtgtggtacctggaaaggtgataaaatatgtagtagctgcaagaaagcaaggtactgttatgagaaacatcatgcattgcattggcgtactggtcataaaaatgattgcctccagataataagttcttctgcttcaaattcagttctgccagctgtaggaatagggtttgtccgctggtttgctaaggcaagcaacgtacatagactgcacgtcttggatccttcatgtttatatagtgtgttgttttatgatcaattgaccattcattacctccgcctgatggcccttattaacaacaaaatggaattgagggtatccatggagatgcatgtagctgaactc

SEQ ID NO: 5411 - DNA, 919 bp, Zea mays
  Clone ID: TF_ZmC1511_9
aaacccccacgcgtccgctgttttgtcgccacaacactcccgccgaccccctcgccgccgccgggaatggagaccagcactaagaagcttagcagccttcgtatcacctccctggatgacgatgacgaagagaccgagatcccgcaccagccccctcaagcaggcctctcccccgctggagcggattatgaggacgacgacgatgaggaggaagaagccgaagtgactcttggtgtccttagcaaaccgaagcacccaggcttcctcctccgccacttgttccccagcaaggccggcggcatcccggcgtggctagacccggtgaacttgccgtcgggaaagtccagctactgtggtttctgtggcgagcctctgcagttcgtcctccagatttatgcaccaattgaagataatgtagcagccttccaccgaacgctgttcatgttcatgtgcccatccatggcatgcttgcttcgagatcaacatgaacaatggaagcacaagtacgggaatccatgtagaaggtgatgaaaatcttgtatctgtaatggtttttgttcagatatcttctgattttgatggtttgcagtggattgttttccagcgtgaagattttccggtgccaattgccacggaataatgccttctactcagctcaacctccaaagcatgatggctctgacaaaccactctgtccaggagctcctgtatgccactggtgtggtacctggaaaggtgataaaatatgtagtagctgcaagaaagcaaggtactgttatgagaaacatcaggcactgcattggcgtactggtcataaaaatgattgcctccagataataagttctgttgcttcaaattcagttctgccagctgtaggaatagggatttgtttggcttccaaatggttttgttatcctaa

SEQ ID NO: 5412 - DNA, 612 bp, Zea mays
  unsure (1)..(612): unsure at all n locations
  Clone ID: TF_LIB4073-003-Q1-K1-E9
cggacgcgtgggttttttttgaaacctcaactccaaagctccattacaaaatggcttggaaattggaattctactagtactccgcttctagcttttagaaataccagaagattacaaaaacaaaagaggatctctactgctttttcctagtagaatacgtacatctgacaaagacgacacccgggcccaaacggcagcgagaaacctcattcaattcatcagctggtgcggtggaaagagagaaaaaaacagccgtgaaacgccttcctcctcctgcgcgccttttcgctacgcccggtctacggtgggccgaccggcacggccgctgcggcggagccgtggtccggccccggtttaggggagtgctggtacgtcatgtcagccgttgggagaaacggcgtttcctcactgctgcggttgcgggacctcgccgccgccgccaacgccggcgaggagccaccggtccatgggcacgcactgcgccttgtgcgcgcgcttccagtccagtgcctggcacgcgcgggagcagtagttggccgcgccgcacacggagcaccgncggaactcgtggcgccgngtctcgcgccgnccgcaccgtacgtgggagcacag

SEQ ID NO: 5413 - DNA, 1142 bp, Zea mays
  Clone ID: TF_ZmC18797_1
gggtcacgtttacgcgcttcgcgagctgggccactgcctccaggacggctacggcgtgcggcggtgaccccgctgaaggccgccgcctcctggtcgccgcgaacgcccgcgagctcaccctcgcactctccgcggcgaccgcctcgcgccacgccgtcaccgcgctacccttcgccgcggctgctgctgctggcgtcgtcgtcggtggcggcggcggcggcgggtgccccctcctgtccgacttcgggtggagcctccccgaggcggagccccacgcggcgaaccagttcatggtggactggtgggcctcccgctgcgccgcccaggcgggcggtaagaagcgcggcgacggcagcggcgtggacggcgacggagatggcgcggagctccgtctttgctcccacgtgcggtgcgggcggcgcgagacgcggcggcacgagttccggcggtgctccgtgtgcggcgcggccaactactgctcccgcgcgtgccaggcgctggactggaagcgcgcgcacaaggcgcagtgcgtgcccatggaccggtggctcctcgccggcgttgccgttggcggcggcgtcgaggcgcagcaccatcagcagtgaggaaacggctcggcgggcgcatcccgcagcggctgacatgacgtaccagcaccgagtcccctacaggcccacggctccgctgcgtggaccgggcgtagcggaaagcggcgcaggaggggagaaggcgtttcggctgttttcttttctttttgcctctttttcacctgctgatgaattgaatgaggtgtatctcgctggcgctggctgccgttcagatgcgcattttctactaggtagtactccctccttttctttttatttgtcgttggacagtgtaattttgcactatccagtgacaaataaaaagaaacggagggagtaccagggaagcaaagagccaaaaagcagtggagatccaccagccgcgcgcctctccttttattttattttcttgtaatgttctggcatttccaagctaggaagcgtagaattccaatttccaagccgttttgtaatggagctttggagctgagggttttcaaaaaaaaaaaaaaaaaaaaaaaccctccagggcggccactcgcgatctagaacaag

SEQ ID NO: 5414 - DNA, 609 bp, Zea mays
  unsure (1)..(609): unsure at all n locations
  Clone ID: TF_LIB3596-053-Q6-K6-D7
cacaatttcttcgtcccgattcctccgccgacgcccacgctgcggacaaatcagccgccgtcgccctctcgggatcgctggctcccctgcctctgtgcacactcctcaccaggacccaagccagctccgtcgggcgccgtggggaactgctgggaggggcggtcgaccggcggtgcctctgcttcgggttctccgtaccggcgtcggaggggatcggatggcataagctcctgaatgccactggtgtggtacctggaaaggtgataaaatatgtagtagcagcaagaaagcaaggtactgttctgagaaacatcaggcactgcattggcgtactggtcataaaaatgattgcctccagataataagttctgctgcttcaaatttagttctgccagctgtaggaatagggtttgtccgctggtttgctaaggcaagcaacgtacatagactgctcgtcttggatccttcagaaatgaaattgagggtatccatggagatgcatgtagctgaactcagtcaagtttcttccattantgtgtgtgtgcacgcttatttggcatcgtgttcttccttttatggggaatataaaagctatggggaactatgtat

SEQ ID NO: 5415 - DNA, 1660 bp, Zea mays
  Clone ID: TF_ZmC1511_2
gtttgtgtaccgcaacacccccgccgactccctcgccgccgccaggaatgtagtccagcgctaagaagcttatcagcctccgtatcacctcacttgatgacgaaaccgaggaaaccgaggacccgcatcagccccctccagcaggaccctccgccgctgcagcagattctgatgacgacgatgaagaggaagaagtggaagtgactctcggtgtccttagcaaaccgaaacacccaggcctccttctccgccacttgttccccagcaaggccggcggcatcccggcgtggctagaccccgtgaacttgccgtcggagaagtccagctgctgcggtttttgtggcgagcctttgcagttcgttcttcagatttatgcagcagttgaagacaatgtagcagccttccatcgaactctgttcatgttcatgtgcccatccatggcgtgcttgcttcgagatcaacatgaacaatggaagcacaagcatgggaatccatgtagaagcgtgaaggttttccggtgtcaattgccacggactaatgccttctactcagttcaacctccaaagcatgaccggtctgacaaaccactgtgtccaggagcccatgtatgccactggtgtggtacctggaaaggtgataaaatatgtagtagctgtaagaaagcaagatactgttctgagaaacatcaggcactgcattggcgtactggtcataaaaatgattgcctccagataataagttcttccgctgcttcaaattcagttttgccaactgttggaaaagttcctgctaacacttcttggccagaatttgagataaaaatagactatgaaggtagatttgattgcgatagtggtgatgagaataactcgaagttgttggtgatgcaaagacatgggaaacctgatgctatgatgcagtcatggatggatcaatttgaggctgattctgacaacaaatgctgggcatcttttcaagagcgggtctcaagagcaccaaatcaagtgttgaggtattgtcgagaaccaaatgctaaacctctctgggcgttatcttctgggtgtccatcaaatgctgatatcccatcatgtagctactgtaaaggtccattatgctatgaatttcaggtaatgccacaattgctatatttctttggtgtgggaaatcaaccagactcccttgactgggcaacaattgctgtctacacgtgtcaaggggcatgtgaccaaagtgttagctacaaagaggagtttgcttgggttcaattgtaccctacaacaactacgaggcaataataatgtttgcctattccttgctgtccaatgctgcaggtgtcaaaaagtttgcagaaagtcagaaacaattcagtaaatacccccaccagaagaattggaggttgggatgctcgaggcagtgagtagtgagagcttcttgattcccattattgcacttatgccgagtatagatattttaagtttcacttgttctacattttaggtgcctgattttttttttgttcaggcaataggcaatgttgttattgtttgaatataaaaaaaacatgaattgtctcttgtgagttatctttttaattgtactagttggttgtataagattgttgcatgctcaaaacgcaggcacttgaaatatagtaactctc

SEQ ID NO: 5416 - DNA, 1857 bp, Zea mays
  Clone ID: TF_ZmC1511_3
gttctattttgtagctcaaagctcaaaggtgaggctagggtttctttgcgccaaaccagcgaggcagcgactgctttgtcgccacaacactcccgccgaccccctcgccgccgccgggaatggagaccagcactaagaagcttagcagccttcgtatcacctccctggatgacgatgacgaagagaccgagatcccgcaccagccccctcaagcaggcctctcccccgctggagcggattatgaggacgacgacgatgaggaggaagaagccgaagtgactcttggtgtccttagcaaaccgaagcacccaggcttcctcctccgccacttgttccccagcaaggccggcggcatcccggcgtggctagacccggtgaacttgccgtcgggaaagtccagctactgtggtttctgtggcgagcctctgcagttcgtcctccagatttatgcaccaattgaagataatgtagcagccttccaccgaacgctgttcatgttcatgtgcccatccatggcatgcttgcttcgagatcaacatgaacaatggaagcacaagtacgggaatccatgtagaagcgtgaagattttccggtgccaattgccacggaataatgccttctactcagctcaacctccaaagcatgatggctctgacaaaccactctgtccaggagctcctgtatgccactggtgtggtacctggaaaggtgataaaatatgtagtagctgcaagaaagcaaggtactgttctgagaaacatcaggcactgcattggcgtactggtcataaaaatgattgcctccagataataagttctgctgcttcaaattcagttctgccagctgtaggaatagttcctgctagcatttcttggccagaatttgagataaaaatagactacgaaggtacttttgattctgatagtggtgatgaaaataactcaaagtcattggtgatgcaaagacatgggaaacctgatgctatgatgcagtcgtggatggaccatttccaggctgatgctgacaacaaatgctgggcgtcttttcaagagcgggtctcaagagcaccaaatcaagtgttgaggtattgtcgagaaccaaatgctaaacctctctgggccttatctttcggatgcccgtcagatgctgatatcccatcatgtagctactgtagaggtccattatgctatgaatttcaggtaatgccacaattgctttatttctcttggtgttggaatcaaccagactcgcttgattgggcaacaattgttgtctacacatgtcaagggtcatgtgaccaaactgttagctacaaagaggaatttgcttgggttcagttgtaccctacaacaaccacgaggcagtaataatgtttacctattcctcggagtaactactgtccaattctgcaggaatcataggcaagtgcataccaccacctttgggcactagaattttgagatatgctgtggcttcaatgtttccactttccaagtctattgctcgtgcagggagttaagcatcttccgaccgtggcccaatgcttggtgctcgttacagtgcctttgatccatttaggcactacccttgggcccacgtagacgtgatggcaaatagttgcatacttccattttgtggtggccaccattttcggtttaattgtcatcatcacatcattaaaaagctttgttgttttttgttatctaaaaggatcattggtctcagaaggtgctcgcattcatgtaaacatttccttcatcggctaaagttttgatgttggttttgattttaaatggaacattattatgttaatattccagtggtgttttcaccccacgagcgcgctcctgggacttt

SEQ ID NO: 5417 - DNA, 1178 bp, Zea mays
  Clone ID: TF_ZmC25699_1
ctcctttgtggcaaccattattgtacaaaatcttgccatgtgttagaagtcccattgaatcatcctgaaggagatcgtacaacatctatcagtaaagtgaacgcacttgctatgccttgtgaacaatgcaatcttccttgtcaaagggttagggagcctccttgttcacatccttgccctttgccatgtcatctgaacgattgtccttcttgtaaagtccttgttaaaagaccatgccattgtggtgctatggtgcatgcttttgaatgtgtgttttataacatcttaaatgcaaaggatcagattaaaataagatcttgtggtggcccatgtcatagaaagctaccaaattgcccccatctgtgttcagaagtatgtcaccctggtgtatgcccatcggttgatcagtgcatgaaaaaggtcaacacccgttgtgcatgcagcactctgaaacaagagtggcgatgtcaagatgtcctcaaggaataccgtaagtctggccgggatccaaaagaagtacctaaaagtcagtttggagttggcttacttgcctgcggtgaagattgcaagaagaagctgaaggctccagattcagagttgcatctccggaaaagtcaggagaacaagatccctgctgtggaagtcgtaaatgcacccaaacgcaggaagcggcgtgaccgtggacaagaagttaaaatttcgaaattccaggaagtgaagacttttgtgctgagagcgctactgattattttgctgtcaataatcgttgctgctggtctgtacctgttgtggaaaggtattttctggctttctgactggatgaatgaaatggaagagcagagggcgagtcaaaggtatccgaggggtgcaatgttgtaaaaaaaaagagataaaacaattactttgagcctaataatcggtattgacatgtggattaattaatggttgttagggattcagttttgcaggatcataaacatgtcaccgttttctcactttttgtcactataaactagaaattgtatgcgtaatgtattgttgtattttcattttgctactctgcattgttaagtgaacaaacgatacaattactacatgattcatcgcttatatctgttgcgggcaacggggtaaaaaaaaaaaaaaaaaaaaaaaagaaaaaaaaaaaagggcgaccg

SEQ ID NO: 5418 - DNA, 870 bp, Zea mays
  unsure (1)..(870): unsure at all n locations
  Clone ID: TF_ZmC521910_1
tgggtgcctgcaggccgggcagtcctcacagatcgcgcgcgcaccagcaccaccactgccgtctccggcgacgaccacgccgccggccatgccgtcctcctacgctgccgctgcagccggatcctcttcccgcaagccgaatcgcacctccagcgctgccgcacccactcttcgcccaccagcaccctcaccgtcgccggcacccgctcccctggcggtgaaccctagcgtcatctctgattccgacccctcctcctactcatcttcctctgcggatgaggccgatttcgccgcctccgactccgcaactgcctctgttgtctctgcctacctctcggttgctggcgagggggccgacctctcgaaagttggcattttcctctcatccgccgcgcgccgccgatcgccgccgtgccttatctgcttcgatcctatacgcccctctgacccggtgtggtcatgctcttcatcctgctttgccatcctccacctcccctgcatccagtcatgggcgcaccagtcagcatccgggcccgccgtgccgtgcccaacctggggatgccccaagtgccgcttcgcctaccccaagtccgagatcccctcctcctacgtctgcttctgctccaagaccatagacccggctccggacccctggatcctcccccactcttgtggcgacgtctgtggccgccgtcttgatgcgaatctcgactccggctgtgagcatacctgcctgctgctgtgccacccagggccatgcccgccatgccccggncgttgtccctaaagcgacgtgcttctgtggagcgcaccggnagccccgacgatgcgcacatcagcggtactctttgtgnnggaaatgcacaaacg

SEQ ID NO: 5419 - DNA, 794 bp, Zea mays
  unsure (1)..(794): unsure at all n locations
  Clone ID: TF_LIB4757-062-Q1-K1-H6
ccggccgggtgtgctctgaaaggattttccagtgcaagagggagtgtggtgggatgctagattgcgggaagcataagtgtgagagggggtgccatgggggaaagtgtggggaatgcccactccgaggtcgacgcacttgcccgtgtgggaagaaaaattatccaaggttggagtgtgatgcagaggctgccacatgcggatcaacttgtgagaaggtgcttgggtgtggacgacacaggtgccctgagcgctgccatcgtggtccatgtgatgggacttgccgtcttgtggttactaaggcctgccgttgcggggggttgaagaaggaggtgccctgctaccaagaattgacgtgtgaaagaaaatgtcaacgtttgcgaaactgtggtcgccatgcttgtaaacgacgttgctgtgctggagattgcccaccctgctctgagacttgtgataagaaactcagatgtggcaaccataaatgtctctcaccatgccacagaggcgcttgttcaccttgtcctctgatgaagaccatttcttgcgcctgtggaaaaacatgttttgaggttccttgtgggactgagaagaatcagaaaccacccaaatgctcaaagaaatgcaatatacctcgcctttgccgacacaagcttgaatgccggccccacaaatgccactatggagcctgcccaccttgcaagctgatctgcggngaaagatttccatgtgngcacacgtgtaaagaaaggtgtcatggccctatttctcctccaactccgagntcacactgaaaccga

SEQ ID NO: 5420 - DNA, 2814 bp, Zea mays
  unsure (1)..(2814): unsure at all n locations
  Clone ID: TF_ZmC9977_1
accggtccaagaactcccggggcatttgctcncgatcgaccttgcccctgcgggnaagnagatcatcgggcggcggtgtgcggaccggagcacgcctgttacctgtggccgcccttgtgaacagctgctgccttgcaaaaggcatcgctgcgagaaggtttcccacgcgtccgctggttcttgcggggattgcgctgttctcatctctgtgtgttgcttctgccggaataagaatgagacattgctatgtggagacttgatggtaaagggggagctgtctgaggaggacggggtgttttcttgcaatgaggtatgtggccgcacgctcgcctgtggcaaccatgcttgcaaggatatgtgccacccagggccttgtggggagtgtgagctcatgccgaggaaggtcagtacatgtcattgcggcaagaccaggctgcaggagaggagggcgagctgcttggacgcaatccccacctgcgataagatatgcgataagaaactgccatgtggggtgcacaagtgcaaggtcaattgccatgagggagaatgcccaccttgtttggtgctcgttgagcagaagtgccgttgtggctcatcaggtcagatggtggagtgtcacaagttctcaatggaagagtttcgctgcaagaagccttgtggtctcaagaagaactgtgggagacatcggtgcagtgagatctgttgtccactgtctaggaaagttgcacaccttgaaggtggcaactgggatcctcatctctgccagatatcatgtggcaagaagctccgatgtgggcagcatgcatgccagctactctgccacagtggtcattgcccaccctgcttggagactatattcactgatctcacgtgtgcctgtggcagaacttctctcctgccacctctgccttgtggaacaccaacaccatcttgtccacatcagtgctcagttccccagccttgtggacatcttgcctcacattcatgccattttggggactgttcgccttgtatcgtgccagtaatgagagaatgcattgggggacatgtgatgctgaggaatatcccttgcggatcgaaggatatcaggtgcacccaaccatgtgggaagaatcgccaatgtggaatccatgcttgcaacaggccttgccatcctcccccttgtgatcagacacctgcaaatggcgatgctagctcaagctctggtggcaaggcttcttgtggacaggtatgtggcgccgtgaggagagaatgcaagcatacatgcactgcctcatgccacccatcgtccccatgcccagatttgagatgtgaattttctgtgcctattacctgttcttgtggccgaatcactgcaactgttccctgtggtgctggtggatcctccatgggtgataatatgtttgaagtctccatcatacagaagctgccaatgcctcttcagtcagtggaatcaaatgggagggtacctcttgggcagaggaagctttcttgtgatgaggagtgtgcaaagatggagaaaaagagggttcttgctgaagcatttgacatcactccacccaatttggatgcattgcattttggtgagaattcaagttcatcggatttggtttctgacttgttccggcgtgaaccaaagtgggtgctggccatagaagagaggtgtaagttccttgtacttggcaaggtgagaggcagttcttcaagcaatctgaaactgcatgtcttttgccccatgatgaaggacaagagagatgctatcagtctaattgcaggccggtggaagctttctgttcagtcggcttgtcgggagcctaggtgctttgttaccatccatgtcacatccaaatcaaaaccgcctgctcgcatcctgggatccaaggctggtgtacctgttacagctgcccatccttactttgatccacttgttgacatggatccgaggctggtcgtcgccatgcttgacctgccacgggatgctgatgtcaatgctctagtcctaaggtttggtggtgaatgtgagttggtctggctgaatgacaagaatgccatagctgtattcaatgatccagctagagcagcaacagcactgaggcggctggattatgggtctgcttaccagggcgctgcgatgtttatgccaagcagcgctcaggcatcttcttcaggcaatgtttggattggagagcagaaggatggggggttcgccgctaggaacaatccgtggaagaagcctgcttctgctgctgagcctgatccgccctctggagactggactggtgttgctggccatgctccagcaccaggacggagaggcgtcaacaccgcctctcaagtcatggggactacaaaccgatggaatgttctggaatcagacgctgctgcaagctctggtccaggcgacgagcggaagcctgctcagcgcatggatactgcatacagcgcaataccaaatgttgggaatgctgggccatcgatgaccaagctgcagcctgacgcagaggtggaccactgggaagaagcttgtgaatgaggtagcaagtagcatcgggaagttgggtccagattttttttttgggttcttaaatctggttataggtcgctctgcttagctggtataccgagcctctatgttctagcacattttaaattagtttggtgatttcctggtggactgttgggtcagtgtcagaagtgtttgattttgttacgcaggccaatgagccggcaaatgaatatctgtaaggctgctgattattttagcaggtcttcttttgagttcagaaggtattaccatatgtttttaggtttttc

SEQ ID NO: 5421 - DNA, 887 bp, Zea mays
  unsure (1)..(887): unsure at all n locations
  Clone ID: TF_LIB4746-096-R1-K1-A6
cattgggtacctcgaggccggccgggaagcttagtcacacctcttcctccccacacttgcttcgacacaagcatggataactcaaagctcaggctgcgcgaagaccgtcagcaccagacttctgcaagcgatcaagacagagtctcgaactggctgagggatgcaagtcttcaagagcacgacgacgtgagcgagatcggcgacagcgcgcctcgagagccagccacgccgccaccgggacgctcgcttttggtacagtattgcgaggaagtatcacccaccaacaccaactttacaagtgactgggcttcggtcttcgatgaaccagatactcagtgcgacgcgtggatcgaagaccccttcggcaacgatgttccagatgccagccctacgcatgaagagctccataattcacaaaccaaggtcatgcgaagcagcgcgaggtcagacttgacagttctcaataccggtcgttcggttgccgccagctatgactcgaccgaagtcgcagagaccctgggtgaagaaggtgcaaacatcttagcggaggcagctacggcacccatcgacccgaacaaaccgcgcatcacacaaatcaattcgtgcacacaatgcacagtggctgatttgaaatgctccagaagcgtgcccagctgttcgcgctgcaaccgcaaaggtcagggcagtctgtgtctccttcagcgtgcaaggtataggggggaacttgactcagacctgccctgctcatcaacggttctactanagctgaaagatgacgacgagtcgatctggcagcagaaggtgaatttgagcaaagagcttgaagacttgtggcgtgctcaagaggatagaaaagactgggtcttggcttcgcttgatgttccgcg

SEQ ID NO: 5422 - DNA, 818 bp, Zea mays
  unsure (1)..(818): unsure at all n locations
  Clone ID: TF_LIB4757-011-Q1-K1-G6
ccggccgggacactgcggcctaaaccgacccgtaaccgacgctatggaagacgacgacatggatgagtcgcccgatcggggcatgtctaagcgcgcatgcgatagctgtcgcacgcgtaagatacgctgtgaccgtgccgtaccttgctctaactgcaaggcaagcaaactagcttgcaaaacgactgctccccaacagaaagctcaacgccaaagagtccacatttctgagcaatatgaaaggaagattgaccgaatagaagatcgattagcaggaatcgagaatgttcttgctaacctttcgtcaaaactcggcaatatggatcttgccaaagacagccccgaaacaggcagtcagtcacgttcgagtcgagtaggaagaagtccaggtagtggcttacaggaagcccctacaccggcgccattcgagggcgaaagctcaatcagcattcaatccgtctatgctcgtgagatgctagctcaggtaattgacagcacaccgtcaattggccagaatgaagaagtcaagatggcacttactgctctttccgagatggtatcgcaaccaagccagactatggctccaagcaaccgattgatcaatcgctcccttgccgaagtggatcccactagacttgagcagcctccatgnggtggaggtctgcaatgcgttggacacagctatgaagtattcaacaatgacatttgcccgtgatcttttccgttcctcaagatgccaaacctgagggaaattttcgatgacgcgtaccacaaccctggcacctgtagcgctgcccgacgcgtgcttacctatggca

SEQ ID NO: 5423 - DNA, 614 bp, Zea mays
  Clone ID: TF_LIB4829-017-R1-N1-F9
ccggccgggagactcttaccttcgttatcctactttcgccatatcaaatcatcattcttcatttcaattgtttaatttctcgctatttcaatcattgaagcgagaaacggtgacggtcatgtctctcaccgcgcgtgaacgccgcaacccgccaactcggcggaaatcctgcgccgcctgtacaaaggccaagcggcgttgtgactttgccataccagcatgtcttcgatgttcacaaagacgtatccactgccagtacccgagccgagtgatgagagagcagttttcttcatcagaagcatcagtggccgtgtctcctgactatcttaccactgatgactcgtctcctcaactggcagagagtcttccaagcgatacaccaataattgaagatttcaatgcagtcatttcgggacttgatgcatgctctgaagatcttggggtattggaatttccattggaagacaataccttgaaatttgttgaacagccatggacattgactgcgccttcaacacaagacttttcgcatgttccacaacgcattttgaaccgtcttcaatgggcgacagatgaaataaagcgagctcccgaaaaaatggttctttgagaac

SEQ ID NO: 5424 - DNA, 3666 bp, Zea mays
  unsure (1)..(3666): unsure at all n locations
  Clone ID: TF_ZmC9324_1
gataaaaccatggtanttggagaatactatagtattttttccaagagatgtttggatatcttgtaaaaaaaactctgttttgaataccatagtttagtagttacaattataattttttggagtatttaaaactccactacaacctaaagtttttgtctatgagactgactagcttcttgcacatgtatactaaataccatagtttgagatattttgtctccaaacaagtattatttggtgtgatgtaaaaaatactatggttgtgccataatattttaaaaccatagtattctaaaaccatggtttgaaatactttgcttccaaacatgtcctaagccttgctagttgctacactagtaccgcgtgtattttttccctgattgaccagctcaccagcatgagagtaaatatttttgatgttctgtgttacgtattccctcaatcctgctaaaggtgtttgtgataaattgcattgccccttatccattttcagttgactctctttttctatatattggctatcttgcggacaacgaacagcagaggtaggagagtaaggagaggaggaagagcactgccagtgctaggggcagtcggcaggcgcggcgcgttcccctcagtccccttccccggctggtcttgccgggagtaaggggaacgaagccaccggagcggcatggagcccaagccgtcttcggcggcgcatgctgacgcgccagcggtcgaggccccccgccgccgtggcggcggcggcaagcgcaagtcggccgggtcctcgttcacgccgtcgaagcgtcaggccaaggagcggaacgcttccttccacgtgcccccgcatcttctgcacagcgggccgcccacccgcgccgcgcgccagtcgccgcacaagctctcgggcacgccgtcggagtcggtgccagcgtcgtcggcggccgcaactggggacggggtgagcggcgggcaggcggtggttgatgcgatccggcccgagacagaggaaacgccggccccggagctgccgctggtagacgagatgttcgaggccgtccgatcccgtggcgctggcgtccatgtggtccctacctttgctggatggttttcgtggaaagaaatccacccagttgagaagcagaccttgccttctttttttaatggaaaatctgagaagcggacacctgaggtatatttggcggttagaaattcgatcatgatgaaatttcatgccaatcctcaattgcatctggagtccaaagacctggctgagttgtcaatcggggagaccgatgctcggcaggaaatcttggaattcttggatcactggggcttgataaatttccaccctttcccaccagatggacatgaggagagtaagccagaggagacccaagacaattctaatgacgagaaagcttctttgatcgagcaactgtttaagtttgaatcagttcaatcatatatgacgcctttaccaatgaaagaagatgtgagagctccgcctcctctgcctagcttgattcctgaatctgtactcattcaagatgtggttgcagcagctgagccttctgttgagtaccactgcaattcctgttcagttgattgctcacggaagcgctatcattgtcggacccaggcagattttgacctctgttgtgattgctataatgaagggaaatttgatccaggcatggccaaaaccgatttcatcctcatggattctgcaggagtttcaggtgctagtggtactagttggacagatgaggaaacattacttaagagatcaatgagaaagaaggtaagtctttatctgtggaaaagaaaaacaattcatccatgtcacaacatgaccaccaagaatcaggcattaagagcgtctcaagtgatgattgctccttagtggagccaaaaaccaataatgctaaggagtcaggtgattcaactgctattggggacaagagtgcaaccgaaactacaaaagaaaatggaagttgaagataaagtggaaggaagaggtactgtggatgaaaaggcctgacagaaaacagagggaaactgtgaagaaacaaaaactgaaaatgccagtgttgttgtaaataaagatactcagaattcagatggcagagattcaggtgcatctccaagcactgaagagccaaagcaatcttctgatgagcaacctgtagtaaaggaaaattctgcagatgtagatacttctggtgaaaaactatcaaatgttgctattgatatcttaaaatgtgcatttgaggctgctggtcacagcccagaatatgaaggttcatttgcggatgcaggaaatccagttatggcactagcagcgtatttagctggtcttgtggaagatgataacaccaccacttcattccgtagttcactaaaatctgtatctgatgtgtctcctgcactccaattatcaagtaggcactgttttattcttgaggatccaccagatgaactcaaagacatttgtgctagtgtaagtaagaaaaatagagatgctgatcaaaaacaagatgaggatatgattcaaaattcaattgatactgagaaaaaagagatcaatgagaaagaaggtaagtctttatctgtggaaaagaaaaacaattcatccatgtcacaacatgaccaccaagaatcaggcattaagagcgtctcaagtgatgattgctccttagtggagccaaaaaccaataatgctaaggagtcaggtgattcaactgctattggggacaagagtgcaaccgaaactacaaaaggtaatactgaacaagtgaatgacttgccaagtgttgaggtggaggctcctgatgattcatcttcaaaaggtaaggatgagctcaataagactaaagatgcagtggcgacaccagctaccgtacaggaacagaaacacagccaaacattgggaaatggggatagggaagaacctaacaacattgaaagtgtagttgtcgatgaagagaagggctctgtagtgactgccaaccgacctgattccatagctaggctcaaaagagcagcagctactgctgtttcagcagctgctgtgaaagctaggtttctcggtgatcaggaggaatatcaaattcgaaggctgacagcacttgtaatcgaaaagctgttccaaaaaatagaagtgaagatgtcgttgttttcagagattgagcaggtggtctttcgaacgagagagtacaccgagaagaccagaaagaagctcctgaaggaacgaaatgcgattattgcagctcggatgggcgcattgccgtctaggccaaaccagccaggtgtagccggaaacaggttaccacctgggtatggcaaccctcctgtaaggcctccaaacgcaatgcctcggcccaccagctgaggaaattccggattccggacacccagtgatctataccccattcttttagaagcataccccaaagactcaaacctgccagcttgttgtagcattttttagaaagtacattgtacaattgtctgtataactgcttctatgaaaattcaccaaacctccacaactgttttaaacattccatcagataggaaaattacatttctctacaaaaaaaaaaaaaaaaaaaaaaaaaaaaaaaaaaaaaaaagaaaaaaaaaaaaaaaaaaaaaaaaaaaaaacacccgaag

SEQ ID NO: 5425 - DNA, 690 bp, Zea mays
  unsure (1)..(690): unsure at all n locations
  Clone ID: TF_ZmC50613_4
gcgtccgcccacgcgtccggctcgaaatgcatggggagtccgaccctaccatggnatggggacacggaattcttatagatgttcggtgatccggattggggatttgggatcctgagcactctggtgaagctcgaagagagtgaccacatacgccatggtagccacacatgctccatctgccggtaccctatcattgggtcacggtttaaggaaacaaaacactcattcagcctgtgcaaccggtgctacagtgaagggaaggttccttcggccttcaagttggaggagtacaggttcaaagaatacggtaacgagtcagaggccctcattgataagtgcatgtgcttcaatttacattctaagaagctggaaaccgatgcctgatcattcaaacttggatttcaagtgctcaaagcatgaatctgtgtatttcctaggtgcaaagatgtctagtcagctctcccactctcttgtaaacaaaggtgccatcattcggagtttctctaaatgtgtcccagttactaataaccctgatgtgctagctggtgttttaagtgtacggaaacgagtaaatgggaattccatacactctgttaccccagtccaatacaaccttgctgacccttgcatatttttgtttgagcaagaacaattttggggttctcttcaatgctttttgcctttcgtctc

SEQ ID NO: 5426 - DNA, 3175 bp, Zea mays
  unsure (1)..(3175): unsure at all n locations
  Clone ID: TF_ZmC50613_1
tcctcggcacgaggcacctggtattgtgctgtcgccgcagctgtaccgtactgcctcccctcgtgccggtcgtgcccaccagatgaccgtcatccctagcatcgtctcctctcgttagcagtcgcaagtagccagcagtccagcacacgactccgccgccgctatccactccgccctcccctcctctctgctattgggccccggcgggccgacccggcattcttgaacttccccttccccgcatcaaatcccctacccgtgccgtcgctgcgcccgcgctgcgtgtccgaattttcgccgtaatccggctggtttttcccgtgcgcagcgggccgtaatggcgctgtccgcgtccgcggcgtcggccggccgggggtcgcgggcggagaaggtgaggaggatcttcgagcgcttcgacaccaacggggacggcgggctagaccggaacgagatggccgccctcgtcgtcgccgtcaacccgcgggtcaagttcagcgaggaccagatctccgccatcctggacgaggtgttccacacctacggcgaattcatcctccccgacggcaggggcctctccctactagggctgcttcgcacctacgatgacggcgccggggacgtcgaccgcgactttctcgcgctctccctacccgccgtcgactccgacgcctcctccccggacatcgccgcaggggacgctgccgcccactcctccccgccctccggggctgccgccgccgcatcgctgctcgacgaccacgccaagccgctcggcgccggcggcgctgcgccgtcggtcagctcccgcgccgccgtcgccgcgccggcttgggcgacctcgcccaaccacggcatcgccttcgactcctcctggggactcctcgacgacctggagatactcgtcaagcgcctccgctcaaagcagctgcggaagggctccatcgacggcgccggcaacaacaacttcgactccttctccgaggccgggtggtccagggagatctccggcgcggcggattccgcatccaccgccgctccgtgggacgagacgagccgcgactacctcaccttcgtcaaggaactcgccgtgctccgcacgcgcgccgacgcctcccgctcgcgcgaggaggccttcgacaaccacatgatcatcggccgggcgctttccgagcaccgcctcttccgagacgccctagccagcttccgccgcgcctgtgagctgcagcccactgacgtccgtccccacttccgcgcggggaactgcctgtacggcctcggtcgctatgctgaagccaaggaggagtaccttcttgcccttgaagccgcggaggctggtggctcacagtccgcggacatcctcccgcagatccatgtcaaccttggtattgccatggaggccgaggggatggtacttggtgcctgtgagcattaccgagaagctgccatactgtgtccatctcatgccagggcactcaagctcctggggagcgctctctttggcgttggggagtaccgagctgctgagaaggcactggaggaggccatcttcctgaaggaagactatgctgatgcgcactgtgaccttgggtccgctctgcatgcagtaggggaggatgaccgtgccatccaggagtttcagacagcaattgatcttaaacctggccatgttgatgccttatataatcttggtggattgaacatggatgctggtcgttttgtacgggctgcggagatgtatactcgtgtgctgagcatccgaccaaaccattggcgtgcacagctaaacaaggcagtggctttgcttgggcagggtgagtctgaggaggccaagaaggcactcaaggatgcgtttaagatgacacaaagggtggaagtgtatgatgctatctcacatttgaagacattgcaaaagaagaagccaaagccttccaaaggaaaagatgacggtcaaggggagcaggcttatgttgttgtggaggcatccaagttcaagagggttgggaggaagactaccttgcggcaggatttggccaatgctctagatataagggcctttgagaggatgacaaaactaggtcactgcgatgtggagcttcttagaaaagagatgaatgagactgatgtccctgtatcttactcgggcaccggcatccctgagaagtcaatacgcaaagcagctcttgaggttattctccgcaggctcctctcttttctcaagccagacacctttcagggtgctattaaggcaatcaacgaaagaattctctctgtccttgatgcttctggctctggtcgtgttgatctgggcatgttcttcgccaccattgctccaatctgttctggccctgtggatatgcgcaagcgtatcgtctttgatgcactcctttggcgtcctgctagcgaaggcagcaatggccagataaggaggagtgatgcgttaacctacattaagcttcttcgagctgtttatatacccacgcatggggctagtgacatgctcgaaatgcatggggagtctgaccctaccatggtatcatacacggaattcttagagatgttcaatgacccagattggggatttgggatcctgagcactctggtgaagcttgaggagagtgatcacatacgtcacggtcgccacacatgctccatctgcctgtaccctatcattggttcacggtttaaggaaacaaaacactccttcagcctgtgcaaccggtgctacagtgaagggaaggttccgtcagcgttcaagttggaggagtacaggttcaaagaatacggtaacgaatccgaggccctcattgataagtgcatgtgcttcaatttgcattctaagaagctggaagctgatgcttgatcattcaaactttgatctcgagtgctcaagcatgaatctgtgtatttacctaggtgcaaagatgtctagttagctctcccactcccttgtaaacaaagttgctgccattcagggtttctctagatgtgtcccggttactaatatatgaccgtaatgtgttagctgttgttttaagtgtacgggaacgagtaaatgtgaattccatacactctgtcgccccagtccaattcagccttgttgaaccttgcatatttttgtgtgagcaaaaacaattttgggagtcaaatttccgngggggggacccggtacccatat

SEQ ID NO: 5427 - DNA, 3336 bp, Zea mays
  Clone ID: TF_ZmC1346_1
cctcgaggccggccgggattcacgaccttatcccaccagcagattcgaaattcacggacaggcccatggacccggcgaaagccagcggtggttcagcccctgacgtgcgggtcccactctccagccgcaccgcctagagaggcagaggcacctcgtggccgggagggaaacgaggcgtgataaagtggggctcctcggtcccggcgttggccgcatcgacactcgccgcgcaccaccaccaccgctgcggctcacggctacgcagcccgctctcccgacccccccgtgccctcctctttttgctactagcacatagagtttcgcccgaatcgatcgccgactgactccgctagggttcggcccgatcgccgcttcgtcctcccggctcccgcggggaccccgccgagatgtctgactggagctcgccggctgcgccgacgttcttcccttttggcccgcaggccgaggggtgggacgtcaccttcaaggtcaaatatggtgatacacttaaaaggttttatggttgtgccaatgggagtcattttgacatgaatttatctgctctacgggcgaggattgatactgcctttaagtttggtcctgacgttgactttgttctgacttacaccgatgaggatggtgatattgtcatgctagatgatgatgatgacttgcgtgatgcagctctccgtcagagattaaaccctctcaggattactgttcaactgaagaaaaatcaaccaactgaaaaaaaagatacttctgcaccagtgaaatccgctgctcaggatccactatcccagttaatgtcagctattgaaggtttgaagcctgttcaggaagatagtctggcccatataaaatcagctattggtgaagcaatcaagtctatcccagagccaatacctgatgcccttgcaaaactttctcatgaaatacttgatgcagcaccaccaccattagctgagctgatgaaaccttttgcacaattgatggcaccaaacaataatggcaatgggccatctgatgtgcatgctgaggggtcatctagctcttccagtgcacaggtgccagctgaagctaaaaatgagcccaaagttaggccaagtttgggtcttaagaccgtgttgaaagaggctgctggacctgttcctaatgctggagcttctcaggttcaacagccattaatgtatccatctgttgaggagatgctgttcccctgtaattcagtcgacaaatctgtttgcaaagggaagattgatgctcaaagtaagggaaaatctgttacgtcctcaggcatccaacctgctcctcattctcttcgtactcatgccccacctccaccacatccgtgcatttcagaatggtcccgagcacaaagaagccaacaccgtcaattgaaatttgaagacaatgcaaaaaccactaatgattctagatggcgcattccgatgtataaaatgccctatgcaccaccacctccagcagtgccacccccaggctatgtaccttctccacattttccttatccaggccgcctcttatcttctgggcatccatacggagatctcgctggtaacatggaaaactcagcaccacatagtctgcatagatggattcagtgtgatggctgtggagcgcaaccaattgttggtccacgttataaatctaatgtgaaggaagactatgatttatgtgattcctgtttccagcgcatgggaaatgaaatggagtacaccaaaatagacaagcctattttaccccacaggtttctaagagatccccatgtgtaccggaaggtgcaccatccacgggttctaatgaagtcaagacgggagaaacttgaaagtcgcttcattttggatgtgactgttcttgatggaacactgatgacaccttctaccccgttcactaagatttggcgcatgcataacaatgggtctgttgtgtggccacggggcacacagcttgtctgggttggtggagatcagtttgcattgcagacatctgttccattagagattcctgtggatggttttcctgtggacaaagagattgatgttcctgttgattttgtggcacctacaaggccagggaggtacatatcttactggaggttggcttccccttctggtcagaaatttggtcagcgagtttgggttcatatccaggtggaagacccttcttttgttaatgacaataacaggaatgctgctattaacctgaatctgcctccagagagctatagttcaaacacaaccaacttaattgatgtgaacattgagcctgctgactcagcccttagtgcacatgctaagcgcacaaaggagttccatttctgttcaactgattttcctgaacccagtaagtctgtgccttttacgttggccactacctctttgtctgcagcagctcctacaaaccaaactggtgatgttcccatgtccagtacacctgctgctgcttgtttgccctctgttaatgtgcctatgcatgaagtcgttactactcatacaccgtcacctattacgcctgtcttgcctacaactatacacttttcagccccagtatctgctcctgcaattgcccctgagcttgcatcaggggctgttggtgtgcctccacctgttagtgctgtggtacctgagctgtcagaactggatgttcacaatgaggagaagttgctgagggagctggaggaaatgggttttaggcaggtcgatctcaacaaggaaatcctcaggcagaacaattacaatctggagcagtctgtcgatgacctatgtggcgtcaatgaatgggatcctctccttgcagagctggaagagatgggatttgatgacacagagatgaacaaggagctgcttgcgaagaatgagggaagcatcaagcgagctgtgatggagctcattgccagggagaagaaggacaagtgaagatcgtgtgctatctaagtatatattcgtaaataatgagacggctgtgccactgcggtgcagccctggtgcgtctcagagcttgcttatggtgaactcttcgtgttaggtttcttccttatatctgtcgtgtctgcggtgtcgatgaactatctagtatgtggagcgtgtgcgtctcagcagttaccctgccatgccacgtggactggctgtcgtgcctactgtctgttaccatgtatatatataaaaaatgatgcgtggaccaatgtttgatgctggcgctcttgccctcgtgataatgtattagcggttggcttgttgcttgctaaaaaaaaaaaaaaaaaaaaaaaaaaaaaaaaaaaaagcaaaaaaaaaaaaaaaaacttaacttccccttcct

SEQ ID NO: 5428 - DNA, 818 bp, Zea mays
  unsure (1)..(818): unsure at all n locations
  Clone ID: TF_LIB5117-021-A1-PF1-B6
atctgctgggcgtctgatgggaatcttggtaataacagtgagaggtcaccacgaatttcacataggtggattcagtgtgatggttgtggagtacaaccaattgttgggccacgctacaagtctaatgtgaaagaagattatgatctgtgtgatacctgcttccgtcgtatgggcagtgaggttgagtacaccagaatagacaagcctatcctgccacacaagttatctcgcgaccctaatttgtgccggaaaatccattcacgtgcttcgatgaagtcaaagcgtgagaagcttgaaagccgcttcattttggatgtaacggtgctggatggcacacttatgtcaccttcaagcccgttcactaagatttggcgcatgcacaacaacgggtctatcatgtggcccttgggcacacagctaatttgggtcggtggtgatcaatttgcactgcagacctctgtcccactagagattccattgaatggatttccggtggatcaagagatggatgttgctgttgattttgtggcacctgcaaggcctgggaggtatatatcttactggagactggcatcaccttctggtcaaaanatttggtcagcgagtttgggttcatatcccaggtggaagatccatcttttgtcagtgacaacaggactgctgctgttaacttgaatcagcctcaggaaagcaacatcacaaacacaagtagtctgcctcaggaaagcaacatcacaaacacaagtagtctgcctcaggaaagcaacatgacaaacacaagtaattttgattgatgtcaacatggagcctgctaacca

SEQ ID NO: 5429 - DNA, 1476 bp, Zea mays
  Clone ID: TF_ZmC326_17
cacgcatttgccgagcttctgcgttttgagcatcacggtcagcagctgatggatggttcgttaacttgtgaggatgagtaaccactcctttttggaaacaagagttgcacacatcaaaatctggacaaatctcgcaccgccagccttgaccagtttcaatatcatgactgcagacattgcacgtagtgacaaatgctggcgcagttggattgtgtaggtggtatagcaccatcattgacgaatgctttgcgcgtcgaagtgtgtcatactgataatggtttccttggcaaaggctaaggaatgcctgcctggtgtcaaagaactcgctttctaagatgtcatctctatctttggtatctttgggcaccccaacaatatcaaccggatggagcatatgtgtgtctctactattacacgggtgcctctccctgtcttcaagttgctgttctgcgtcataacacttgtcacagatgtaaaaacttctgcattgatgacaaacccaacgtcttccagacaccataagggtacagcagtgactacatgaatactgcaaatggaccataatgaaatcttccttcataggatatatggtttcaccaagcttttgcatcaacatagcatccttggaagcattcccgctgagatcggtgtggccagcagctttaagagctctttttgtaataatcttctttgtcttactctttttctggagtttacggtcatcttcttcttgtcggagttgattgatcatatcttctgcagctcctggccaataatctccatcaaagtatggcaagcgagaagcagtcaccttagccttgcattcccccatagtaaggaagaaatggtcatatagatttgtgagctcaacaacaatttcctccttagaagctttccgaagcatagatagataccactcacgcagtttatcagatttcggagtcttttgaatctcaggatggcaatataagatgtaatcttcacccttcaaaggtggacaagcccatatgtaacaacttgtgaatccccgcagtttacagtattcaagatatcctatcagaatttcatgatacacaaatgtacgcaaggcttctccagatactgttttaatctcaggtctgaagtacttaacagaatccaagtatgacaaataaacacgacgctggttcgggaaagagcattcagcaccaaattcttgaacatacattccaaatagacatacttccacaccttctattttctggaacaagagaacagccttggacttgtaagggaactctgtagggtagttgtcttcttgaaaaatttctaaaaaacgtggtttaacctccagctttttatccactgatgaaacaactctgacaacaagtccttccgctccaggaatctcatcaatatttttgccagcaggcagctgcacggtcctgtttctcctgcttaagtcgtttaaatcccacgcgtccgcggacgcgtggg

SEQ ID NO: 5430 - protein, 62 aa, Zea mays
  Clone ID: TF_LIB3180-007-P2-M1-H1.pep
SRVGFGSQDPLRHRNRVTGRAAGDSDSATRARPGRRHVAVGADPGGERVHGQACGASGAVPG

SEQ ID NO: 5431 - protein, 237 aa, Zea mays
  unsure (1)..(237): unsure at all Xaa locations
  Clone ID: TF_ZmC261_27.pep
MSMTKLSIRYVLFHLIILGCLYFTSEFSCFNIFVSLMQLLLHPESDDSAQLSXIETEKLLAQLVETEMNRRLKEDTYKGKKFNAFCHFLGYQARGALPAKFDCDYAYVLGHVCYHIIAAGLNGXGYMTTVTNLKNPVNKWRCGATPISYYYFIRLMGRKASHVALECALQSHPNMVKFSPLIQPLLRQFPASAVCSLQSLRAASPAKSELAEIVPQEKSPKDSIQPMSPSPRYSTSR

SEQ ID NO: 5432 - protein, 66 aa, Zea mays
  Clone ID: TF_ZmC74_176.pep
GVFGLAFGFGFCPLKAKSQPKGWIQEAAFSKSRLSRSAKLKAPLDLLLVAFGWNCENVYRRTFNDF

SEQ ID NO: 5433 - protein, 89 aa, Zea mays
  unsure (1)..(89): unsure at all Xaa locations
  Clone ID: TF_LIB4725-004-R1-K1-B3.pep
NMIQAFILQNRLYKMETISSVLCILTTSSFHIHCGVSSTWSFTNETKFKSKGRGAVPPCRHRRYPWMLHLQLVLMSTMLSCPSEAAXPR

SEQ ID NO: 5434 - protein, 98 aa, Zea mays
  Clone ID: TF_LIB4763-041-A1-K1-A8.pep
SQVLLTRRSSRWRSETSCLCLQERHRTPPRLMAHHLLHRAEAEGRGMRTSNTHKINRARLNCLARSGLAIPNLLETHLCCRHPPPPGGQRSSTSPMEG

SEQ ID NO: 5435 - protein, 177 aa, Zea mays
  Clone ID: TF_LIB4740-096-A1-K1-E7.pep
PSHPRISSSRSQLYPFSQLHSLFQLRICTSLPSSSYRIPLTREQWKTTLDESHASLQYPPTSSQLNLIFSPIILAVSYSILIASHLLLMLNRLLFHVILTLLPPLSFFYASHIIFPSSSSVLLPLNHLICLLHYFNPFLVSLLLLRALRETAERKGIWGRRRRSGSGGGRRWRRRSR

SEQ ID NO: 5436 - protein, 102 aa, Zea mays
  Clone ID: TF_LIB3136-048-Q1-K1-H1.pep
LTKICDGILKLLETHLGPTSTDDQFNVFYVKMKGDCYRFLDVFKTGAVRQDAVLNTIVAYIAAHDIALAELATTHPIGLGLALNFSVFYYEILNAPDPHLHV

SEQ ID NO: 5437 - protein, 290 aa, Zea mays
  unsure (1)..(290): unsure at all Xaa locations
  Clone ID: TF_ZmC74_212.pep
RSPSPTGYHQHAPPPPLISSPRCFPARPRIGAAAPRSSPPKSTPPSSGSTQSRRGSTCCRHRLRAVVRIERHPPQAFRAGAVREVRRLRRGHKLGGVELRGERAGGGCLALVVWWEGEENLDSEKYEELIEFMEKVAKTVDSEEHYVLSIAYKIVXGTQCASWCIISSIEXGEEGRVNVDCVTLIEDYHNKIEVELSKICDGILKLLDSHRFXSLTAAESKVFYLKMKGDYYGYLAEFETGSRRKDAAXNTMDIALEELAPTHPIRLWLVLNFSTRLTMRPCLQSRQIGP

SEQ ID NO: 5438 - protein, 142 aa, Zea mays
  unsure (1)..(142): unsure at all Xaa locations
  Clone ID: TF_LIB4720-012-R1-K1-B9.pep
MLQMKGDYYXYLSLYKTGXQRKDAANYTISTXKDTNYINYCDLHATYCIRLQLKLYLPQVYYEKHSXLDYAWSFKQHALYYCMWVLHTLAEECYMDTTLMMNILIHHWMLWTIDISEAPAEDIRWAPNHHCCEGKEDLSYMP

SEQ ID NO: 5439 - protein, 109 aa, Zea mays
  unsure (1)..(109): unsure at all Xaa locations
  Clone ID: TF_LIB189-022-Q1-E1-E2.pep
QGQRKENPVRNKNNLNLTRENVPKFKAKLSNICNGILKLLDSHLVPSFTAAESKVFYLKMKGDYHRYLAEFKTGPERKESAESTMMAYKGAQXIARVNLEPTHPIRLGL

SEQ ID NO: 5440 - protein, 60 aa, Zea mays
  Clone ID: TF_LIB4742-038-R1-K1-B11.pep
RAHDSSCRYLEMQADYYTIPRLALTGTERLDASDNTMVRYQAVHDIALVELAPTHPSRVV

SEQ ID NO: 5441 - protein, 98 aa, Zea mays
  unsure (1)..(98): unsure at all Xaa locations
  Clone ID: TF_LIB3245-475-P1-N1-F12.pep
ALLLLXPLXSPXCPLCSXXVLXXXXXXXPFFXXXXXVXPXXXLLVFXXFVXPLRLLGXLGXXXXLLPLLLLLRRRSPPXPSPWAGVPLSSPSXXXXRA

SEQ ID NO: 5442 - protein, 107 aa, Zea mays
  Clone ID: TF_ZmC25776_1.pep
MGEVKHLCLAKFKEGVVVDDVLKGMTDLAAGMDTVKSFEWGQDVLNQEMLTQGFTHVFSLTFASAADLAAYMAHDSHTAFAATFMAAIDKVLVVDFPVVVAKPPPSA

SEQ ID NO: 5443 - protein, 65 aa, Zea mays
  unsure (1)..(65): unsure at all Xaa locations
  Clone ID: TF_jC-zmX700102161b1.pep
SDEILRWAFLSRCLFIHATGEDMLELDGAGAECPKDSTPIMQVFDHNVNXWTYDMQDDGGNQMPY

SEQ ID NO: 5444 - protein, 60 aa, Zea mays
  Clone ID: TF_LIB4338-018-R1-K1-H6.pep
RASSVGGGGSLILMLLTEICNWGPLVPHGAISPPSSIRSSPVRMRIMLSDHGVPPRPAAS

SEQ ID NO: 5445 - protein, 101 aa, Zea mays
  Clone ID: TF_LIB3067-047-Q1-K1-G7.pep
LSVHERNLSFVAYNNVIGTRRASWRIGSSIEQKEESRKNEEHVNLIKEYRAKIEALLCYILYVILNLLYSHLVPSSTAAESMVFYLMTMVYYQRYLAEFKT

SEQ ID NO: 5446 - protein, 126 aa, Zea mays
  Clone ID: TF_LIB4185-048-R1-K1-F7.pep
VPRPLSRVFFFFFFFFFFFFFFFFFFWIRNSPDSLCVDKKNSFPWGYKDAFEAQKKKKKAPTDLEAHQFKPLKHLVGGDGLQDQTRAKRGEQTDLKKKTRDGQKLQKNTQGSFEFRGKKNLGTQVR

SEQ ID NO: 5447 - protein, 74 aa, Zea mays
  Clone ID: TF_ZmC261_38.pep
EEAKGFWLKLYQVKFSPLIQPLLRQFPASAVCSLQSLRAASPAKSELAEIVPQEKSPKDSIQPMSPSPRYSTSR

SEQ ID NO: 5448 - protein, 51 aa, Zea mays
  unsure (1)..(51): unsure at all Xaa locations
  Clone ID: TF_LIB3594-021-Q6-K6-C1.pep
ILNHLLIPSACYSQLGHVNMSXPRQLLKEQITXGAGLXLGPARNECGXGNR

SEQ ID NO: 5449 - protein, 188 aa, Zea mays
  unsure (1)..(188): unsure at all Xaa locations
  Clone ID: TF_LIB4758-090-R1-K1-A10.pep
LLNVEDTYVLSAAYRNVLECERAACRMISSMEQTKLDAGNERXTTLIRDYRGEIXFDLPLSAMRVLQFALRPSSSPASTRPRSQGPLSPTEGDYYTYLAXEVKSGPDTQDAADNKCGYSCQLARXLSTPLLVGLHYFQVYYXRLTDPPAVLQSRLFDEAISELDTXLSEESYKDXTLIMQLLRDNCTY

SEQ ID NO: 5450 - protein, 132 aa, Zea mays
  unsure (1)..(132): unsure at all Xaa locations
  Clone ID: TF_LIB3150-041-Q1-N1-A4.pep
HSLNVYMAKLPERAYRHEEMVYFMENVTKTDDSHELTVEEHYLLSAAYKNVIAVRSALXHMISFIEQHDQGQGAEDTRHTLKGQYXGSTETELTKICDGEMKLVXCELVPSYIVPEIKALYLKMKGDYYRYT

SEQ ID NO: 5451 - protein, 110 aa, Zea mays
  unsure (1)..(110): unsure at all Xaa locations
  Clone ID: TF_LIB3150-041-Q1-N1-A4.F2.pep
MTVLGNEDTVTLINDYRGKTDTELTKICHGMLKLVESHLCAXSSTAPESTVLYLKMKGDYYRYLAEFKTGSDRKDADDNTMVXAYTAAHDIALAELAPTHPIRLALALNF

SEQ ID NO: 5452 - protein, 144 aa, Zea mays
  unsure (1)..(144): unsure at all Xaa locations
  Clone ID: TF_LIB4602-006-R1-K1-A7.pep
TLFRRTRVSRLTRNAVKTPPPNGISTTLTGRKWVHGLTSPTIHRGAKKWFSQWITYGKLVTSRGRGEKHSLLSVVYKNVFGTPRCWWRLIYSIVQEEEGLRIDDXATTVLDYPGGDEDDLTMICDWVLALVDSHLVTSFTGPEC

SEQ ID NO: 5453 - protein, 85 aa, Zea mays
  unsure (1)..(85): unsure at all Xaa locations
  Clone ID: TF_LIB4148-012-Q1-K1-E3.pep
MRELAPTHPIRLGLASNFSVCYYXILNSPDRACSLAKQAFADAIAQLDTVGGEPYKDRTVIMQLVRDSLTLWTSDMPVCSLSILI

SEQ ID NO: 5454 - protein, 95 aa, Zea mays
  Clone ID: TF_LIB4605-012-R1-K1-A3.pep
NVYTIIIATQVGTFKNMVNLLVRISRTVDWGELTTEELNLLTVQYQIVTADHLTSRSMFYSVQHQGEGSGIEVRDTMTLVFRDKTDTELTIMCPE

SEQ ID NO: 5455 - protein, 69 aa, Zea mays
  Clone ID: TF_LIB3118-029-P1-K1-H11.pep
IYKREENVYINKLAEQYQRHEENVAILRRRLTLNMWNMLLLRTETFRWSHTKMRVALAELDGATRLVLN

SEQ ID NO: 5456 - protein, 88 aa, Zea mays
  Clone ID: TF_ZmC772117_1.pep
EMPFEQKEEYPMNKEHCECYPYNIIVEDRRHDADSVYCDGILELHRLPPTCLFLLLVTHVAFHSQEEGQSITSIWRNLRLLLRGRNLL

SEQ ID NO: 5457 - protein, 90 aa, Zea mays
  unsure (1)..(90): unsure at all Xaa locations
  Clone ID: TF_700029541H1.pep
RNLLSVAYKNVIGARRXSWRIVTSIEQKEESKGNESQVTLIKEYRQKIETELAKICEDILEVLDKHLIPSAQTGESKVFYHKMKGDYHRY

SEQ ID NO: 5458 - protein, 111 aa, Zea mays
  Clone ID: TF_LIB3591-080-Q6-K6-E7.pep
KKKKQGKTKRKKVLNNKVKQHNVKKRDLSENYSLKQNKESEGIHENQKRKNHELENSEKQHKMGNKQLKNKMTKICDGSLKLLETHLEIEDLGLGGSGRRHKMGPGRPDRN

SEQ ID NO: 5459 - protein, 96 aa, Zea mays
  unsure (1)..(96): unsure at all Xaa locations
  Clone ID: TF_LIB3608-027-Q6-K2-D4.pep
TVRWHQLELFREENVYMANLVEQAERYXEMVEFMEKVPNTVDSEELTVDDRNLLSVAYKNVIGARRASWRIIYSIEQNEEGRRNEDRVTLINDYRG

SEQ ID NO: 5460 - protein, 143 aa, Zea mays
  unsure (1)..(143): unsure at all Xaa locations
  Clone ID: TF_LIB3592-001-P1-K6-H4.pep
YAGGRSLTSTSRILLDRGRSRLVSFCRHAFWYEEMVECMEKVSMTVDSEELTVEEGSLLFVAYKNVIGARRDLLGIIYFSELEEVGLGNEDLVILIKDYRGXIETELTQDCDGILKLVETYIVSVFTFXEFKXFYVKMKGDYY

SEQ ID NO: 5461 - protein, 87 aa, Zea mays
  Clone ID: TF_LIB3152-012-P1-K1-D11.pep
LAEQAERVEEMVEFMEKVFKTVDLEELTVEERNLLVVAYNNFIGARRSLWRIIFFIEHKEDGQGLDVLVSLIKDYFGKIDTELIIDL

SEQ ID NO: 5462 - protein, 104 aa, Zea mays
  unsure (1)..(104): unsure at all Xaa locations
  Clone ID: TF_LIB3150-049-Q1-N1-C9.pep
KLNCKTASTELYREENVYMAXKLAEQAKRYEEMDEFMXKVTNTVYWXELTVEERNLLYXAYKNVIGARRASWRIIYSIEQKEEGRSNEDRVTLIKDYRGKTETE

SEQ ID NO: 5463 - protein, 108 aa, Zea mays
  unsure (1)..(108): unsure at all Xaa locations
  Clone ID: TF_LIB3075-028-Q1-K1-D9.pep
VQSCTPEVGSFVNDSEWHPACLEHYVRRDLSPTHPIKLVLALNFSVFYYQILNFRDLSCNPAKQVFDXQSLSYTACDXEFYKDMTLIMQFLHDNSTLLTSYTYYDGCN

SEQ ID NO: 5464 - protein, 75 aa, Zea mays
  Clone ID: TF_LIB4171-050-R1-L1-G6.pep
ERCSRNSSCVIPQESEDLPYSSHAAPIPLAFDEAISQLDTLGEDSYKDSTLIMQLLRDNLTLWSADSTTLTNRST

SEQ ID NO: 5465 - protein, 178 aa, Zea mays
  unsure (1)..(178): unsure at all Xaa locations
  Clone ID: TF_LIB4758-089-R1-K1-A5.pep
MCLSSIIAEQVLSDQKMVDVLCKVICIADSLDLTEMEHLLLLGAYMNAIAARRAFRFLVSSIILRDDIRGIVPRKTLIKDYPLEIVTALNDISAAILKMLEMHLAAAPTALKLQAVYLYRLLDYFSYXAECNSGDAIKDLAENTMEKYKAAHDIALPVACSRLTLLRLHSNINFSVLY

SEQ ID NO: 5466 - protein, 93 aa, Zea mays
  unsure (1)..(93): unsure at all Xaa locations
  Clone ID: TF_LIB3245-170-P1-N1-A6.pep
DFYRYLAENKTGAERKEAXAENTMEAYKAGQDIALAELAPTHPIRLGLALNFSGGYYESPNSPDRACRLGKQAFDEAISELDTPSEGGRQGQD

SEQ ID NO: 5467 - protein, 162 aa, Zea mays
  unsure (1)..(162): unsure at all Xaa locations
  Clone ID: TF_LIB4827-032-A1-N1-B4.pep
PAGXKVTRALAPVRRPPRRGVRSAALPAHPPPNPPPVPVQPHAPSSSPGAFSVNQTRPAVPHPCDSRSAGPSVTSASSPSLRPYPSSPHPPSYALSAWPPHPGVLRFWGASLCPLRSAPPESGPAERTTTQIGSRPSLSSSPEPPPAHPATDLQHLMRLLLR

SEQ ID NO: 5468 - protein, 164 aa, Zea mays
  unsure (1)..(164): unsure at all Xaa locations
  Clone ID: TF_ZmC5000_20.pep
NLTQKFSLEIQVDFEKYEGMIKVMEKVVIQLILWSSLEEHYLLPVACKNVIGIRCASWRIVSSIEYREXGCVNMDRATLIEGYHNKIEVELNKICVGILKLFASHLPPSLIVPKSKVFYLKMKGDYYRILLWRSWPPYPIRLWLMLNLSTLLILLVVSPNRFGF

SEQ ID NO: 5469 - protein, 76 aa, Zea mays
  Clone ID: TF_LIB4742-139-Q1-K1-E4.pep
LSREENVHMAKLAEYAQRYQEMLEVMEKGPKTVDSEELTVEERNLLSVAYKNAIGARRASCRIISSVHNKEERPRT

SEQ ID NO: 5470 - protein, 221 aa, Zea mays
  unsure (1)..(221): unsure at all Xaa locations
  Clone ID: TF_LIB5116-030-A1-PF1-H7.pep
MSPAEPTRDESVYMAKLAEQAERYEEMVEFMERVAKATGGAXKEEGRGNDAHAATIRSYRSKIEAELAKICDGILALLDSHLVPSAGAAESKVFYLKMKGDYHRYLAEFKSGGERKEAAESTMNAYKAAQDIALADLAPTHPIRLGLALNFSVFYYEILNSPDRACNLAKQAFDEAISELDSLGEESYKDSTLIMQLLRDNLTLWTSDTNEDDVDEIKEAP

SEQ ID NO: 5471 - protein, 112 aa, Zea mays
  unsure (1)..(112): unsure at all Xaa locations
  Clone ID: TF_ZmC374965_1.pep
RPTELCRTPVLPLHKRTCAELLSYVNLIKEDGRSIGAELTNTCEGILNLLVSHLKPSSTAAESQXFYRKNTGDYHRNLAEFNTAADRKESAENTLADYNADQDIALAELAPT

SEQ ID NO: 5472 - protein, 68 aa, Zea mays
  unsure (1)..(68): unsure at all Xaa locations
  Clone ID: TF_LIB3150-097-P1-N1-B9.pep
MAREENVYMAKLAEQAERYEEMVEYIENVAKTVYVEELTCEERNXLLSGAYKYFIGASFVLCCIVISI

SEQ ID NO: 5473 - protein, 62 aa, Zea mays
  Clone ID: TF_ZM4633.C5.o3.fg.pep
MDCVTLIEDYHNKIEFELNKIYDGILKLFASHLPPSLTVPKSKVFYLKMKGDYYRYLAEFET

SEQ ID NO: 5474 - protein, 109 aa, Zea mays
  unsure (1)..(109): unsure at all Xaa locations
  Clone ID: TF_LIB4760-023-R1-K1-E2.pep
LLETHLVSVFPAPDPGLLCKMKGDYXYRYLAEFKTGAERGGAAENTMVAYKAAQDIALAELAPTHPIXLXLGLDKAXFYYXTLNSPNRGGSLXXXXWGPAPPRPAPPPP

SEQ ID NO: 5475 - protein, 88 aa, Zea mays
  unsure (1)..(88): unsure at all Xaa locations
  Clone ID: TF_LIB4725-021-R2-K1-H11.pep
MANSRQAQRTRKGRVMEKVAKTGDSDELTGEERNLLTVVFKNXIGARHASWRIIYSIEHKEEGRGNDDRDTLIKDYRGKIETEHTKDC

SEQ ID NO: 5476 - protein, 236 aa, Zea mays
  unsure (1)..(236): unsure at all Xaa locations
  Clone ID: TF_LIB5075-004-R1-XP1-A10.pep
MATERESKTFLARLCEQAERYDEMVTYMKEVAKIGGELTVDERNLLSVAYKNVVGTRRASWRIISSIEQKEEAKGTDKHVGIIREYRQKIELELEKVCEDVLSVLDESLIPKAETGESKVFYHKMKGDYHRYLAEFASGDKRKSAATAAHDAYKNATDVAQTELTPTHPIRLGLALNFSVFYYEILNSPDRACHLAKQAFDDAIAELDSLSEESYRDSTLIMQLLRDXLTLWTSSD

SEQ ID NO: 5477 - protein, 91 aa, Zea mays
  Clone ID: TF_700028918H1.pep
ARAARGSSPAPETQPRAKTKFALLSIWRGTRHVYMAKLAEQAVRYEEMVEYMEKVAKTVDVEELTVEERNLLSVAYKNVIGARRASWRIVS

SEQ ID NO: 5478 - protein, 195 aa, Zea mays
  unsure (1)..(195): unsure at all Xaa locations
  Clone ID: TF_LIB4743-076-R1-K1-E9.pep
MALPRAFPRGKCVHGEALPSRHRGNQEMVESMENAATTADSDELIVDERTLLTAGYINEIRARRASSIIMXSSSRTMRGRGRQDRVTLIKDYRYMIETALTKICDGILKLLESHLVPAYTAPECKGFYLKMKGDYYRYLAEFKTGAERKDAAENTMVAYKAAQDIALAELAPTHPIRLGLALNFSVFYYEILNLP

SEQ ID NO: 5479 - protein, 91 aa, Zea mays
  unsure (1)..(91): unsure at all Xaa locations
  Clone ID: TF_14202479.pep
GLPAVSISIQFSXXTXPXTXXXXPXXXXRRRRRRHPGGDGLHGQASXQXGRYEEMVEFMXXXXAAAELTVEEXNLLSVALQERHRRAPPCL

SEQ ID NO: 5480 - protein, 70 aa, Zea mays
  unsure (1)..(70): unsure at all Xaa locations
  Clone ID: TF_LIB3354-005-P1-K1-E2.pep
MWPAEPTREESVYMAKLAEQAERYEEMVEFMERVARYAWGRRWQEXLSVEGLNLMSSAHMNVMGLRCAWW

SEQ ID NO: 5481 - protein, 256 aa, Zea mays
  unsure (1)..(256): unsure at all Xaa locations
  Clone ID: TF_13150965.pep
MSREENXYMAKLAEXAERYXEMVEYXEKVAXTVXVEXLTVEERNPXSXAYKNXXWARRASXRIVSSIEQXEEXRKNEEHVNLIKEYRGKIXAXXSXXCXGILKXPXSHXVPXSXXAESKXFYLKXKGDYHRXLAEFKTCXERKESXXXTXVAXXAAQDXSLAEPAXTHXIRLGLAXNFSXFYYENXNXPDKACNLAKQXFXEXISXLDSLCEEXXKDSTXIMXLXRDNLTLWTTDLTEDGAEEGKNAXKXEAGEGQ

SEQ ID NO: 5482 - protein, 115 aa, Zea mays
  unsure (1)..(115): unsure at all Xaa locations
  Clone ID: TF_LIB3075-048-Q1-K1-C12.pep
MSREENVYMAKLADQAERYEEMVEYMEKVAKTVDVEELTVEERNLLSVAYKNVIGARLAXWRIDSFIEQKDECRKNEEHVNLIKEYRVMIDAELINFWDXFLKLLDFHLLPSYTA

SEQ ID NO: 5483 - protein, 132 aa, Zea mays
  unsure (1)..(132): unsure at all Xaa locations
  Clone ID: TF_LIB143-064-Q1-E1-A12.pep
YLRAQEQPRAKKKFGPLTISSRKEMFKMANLLNKAKRYKEMVNXMKKVVKTVNVEELNVXERKPSVCLHTKNVIGXARRASWRIVSSNEQKXESRKNEEHVNLIKEYRGKIEAELSNICDGILKLLDSHLVP

SEQ ID NO: 5484 - protein, 119 aa, Zea mays
  Clone ID: TF_LIB3227-018-P1-K1-F4.pep
HPCASPGPDEGQEENSIFNNVNGDVNDYIDQAARHAERYEDMDKDIETVDMTEHTEELTDLVRDLYTNAYKTVIAAWRTVCCIEHYVEHKEDYQHIDLLVDYIKEFHAKINAVLNSIWD

SEQ ID NO: 5485 - protein, 214 aa, Zea mays
  Clone ID: TF_ZmC744_7.pep
MSREDNVYMAKLAEQAERYEEMVEYMEKVAKTVDVEELTVEERNLLSVAYKNVIGARRASWRIISSIEHKEESQSKVFYLKMKGDYHRYLAEFKTGAERKEAAESTMIAYKAAQDIALAELASTHPIRLGLALNFSVFYYEILNSPDKACNLARQAFDEAISQLDTLGEDSYKDSTLIMQLLRDNLTLWTADSTTEDSIEEGNEASKGDAGEGQ

SEQ ID NO: 5486 - protein, 489 aa, Zea mays
  unsure (1)..(489): unsure at all Xaa locations
  Clone ID: TF_UC-ZMFLMO17248F03_FLI.pep
MEEREKLVCLAKLAEQAERYDDNDYEEQANLYSEETGNRYNEDPADSYQEEQENAFSGGINQQDNLQVNNVDDNKWPGWPGESVFRILVPAQKVGAIIGRKGEFIKKMCEETKARIKILDGPPGVPERAVMISAKDEPDAPLSPAMDGLLRVHKRITDSSDGESSQPQRSAGNIGPTRLLVPSSQAGSLIGKQGATIKSIQDSSKSIVRIVENVPPVALNDDRVVEIQGEPLGVQEAVELISSHLRKFLVDRSVLPLFEAHMKMHGMPREQPVPPPQHWGPPQTWIRPPNIPPGGPGFGGNPQFMHPRPQDSYYPXPDVPHMEKQPHYGISAYGREAPPSGASATGNQPPSHAGSQVAHDMHIPLAYADAVIGAAGASISYIRRHSGATVTIQESRGAPGEMTVEITGTAAQVQTAQQLIQNFMAEAAPPPPGPAPASNPPAPPVDPSYGSYPPPYGAAPSYGSSAAAGPPQYNGGNYGGPTYPPSYGY

SEQ ID NO: 5487 - protein, 90 aa, Zea mays
  unsure (1)..(90): unsure at all Xaa locations
  Clone ID: TF_700552665H1.pep
GKIDAELSNICXDGILXSCIDSHXVPXFVLLLESKVFYLXMKGDYHRYXLAEFKTGAERKESAESTMVAYTAAQDIALAELAPTHPIRLG

SEQ ID NO: 5488 - protein, 105 aa, Zea mays
  Clone ID: TF_LIB4758-050-R1-K1-E5.pep
ETAYMCQSGTGSKMPRGDGVVHAARRELPTQDLPKIGNVPEEARHDVHDLQERDTIPDGVMVDLLIHLGDIKGIHKLRLLRADPEIAVLDHNRGLTYLKLDFQPD

SEQ ID NO: 5489 - protein, 158 aa, Zea mays
  unsure (1)..(158): unsure at all Xaa locations
  Clone ID: TF_LIB4742-030-R1-K1-A3.pep
LSRNPSLLVLCITDRLPCTSAAPASIVPLISSIHPNEEGRGHEERVILXRDYRXAISETDLTKICDCILKLLKCHSFVSLPLHPRVRRPFYLKMTGDYYTYFADLRLHLIRKTLISTPMADIQRCPGIAXSELCSTHPITLSLTLYFCLIYYEILNSR

SEQ ID NO: 5490 - protein, 86 aa, Zea mays
  Clone ID: TF_LIB4979-021-A1-K1-G9.pep
WRMALMRESPNYTELGQDYYKDRTLIMLFLRDNWTLWTSNTNYDLQTSRSKNHLLPPQNPAPRDSKTHPISPADECLLMAARLPRL

SEQ ID NO: 5491 - protein, 112 aa, Zea mays
  unsure (1)..(112): unsure at all Xaa locations
  Clone ID: TF_LIB143-057-Q1-E1-F11.pep
REENVYMVKLADXAARYDEMVEFMDNVPKTVDSEELTVHERNLLSVAYRNVIGARRTSWHIISSIEQKEDGRSNXDRVTLIKDXRGKIETELTKICDGILRLLESHLVPSST

SEQ ID NO: 5492 - protein, 90 aa, Zea mays
  unsure (1)..(90): unsure at all Xaa locations
  Clone ID: TF_LIB3076-026-Q1-K1-B8.pep
FNLINEYHAKGESELSNISDGILNLLDSHLVPSSTAAXSKVFYLKINGDYHRYLAEFNTVPEIKESSYNSIIYYFASHDITLTYLLPTHP

SEQ ID NO: 5493 - protein, 76 aa, Zea mays
  Clone ID: TF_LIB3150-017-Q1-N1-B11.pep
SVTYVTMMCDVVVKLRDTHLVPGFTAGVSNVMYLKTNGNYSRYRDECKTGPGIKVLDDNMLVAYNDSNDIVLAKLG

SEQ ID NO: 5494 - protein, 247 aa, Zea mays
  unsure (1)..(247): unsure at all Xaa locations
  Clone ID: TF_ZmC261_29.pep
NCRYNNSSCDRCSLPIHRSEMQTDIIYEHWDILXPPKQIKDPETKKPEDWDDKEYIPDPEDKKPEGYDGIPKEITDPDAKKPEDRDNEEDGEWTTHLLXHSQPKYKGPWKQKKIKNSNYQGKXKAHMIDNLDFKDDPYIYAFDSLKYIGIEMWQVKXGTLFDNTIITDDLALAKTFAEETWGKHKEILCSYAWSEDGCHSALAVCSLQSLGAASPAKSELAEIVPQEKSPKASIQPMPPSPRYSTSR

SEQ ID NO: 5495 - protein, 220 aa, Zea mays
  Clone ID: TF_ZmC2299_3.pep
MAAAAAGTREEMVYMAKLAEQAERYEEMVEFMEKVAAAAELTVEERNLLSVAYKNVIGARRASWRIVSSIEHKEETRGAAAVDARVFYLKMKGDYHRYLAEFKTGAERKDAADSTLAAYQAAQDIAVKELPPTHPIRLGLALNFSVFYYEILSSPDRACSLAKQAFDEAISELDSLGEESYKDSTLIMQLLRDNLTLWTSDMQEDGGDEMRDANKPDEEQ

SEQ ID NO: 5496 - protein, 107 aa, Zea mays
  unsure (1)..(107): unsure at all Xaa locations
  Clone ID: TF_jC-zmXLIB3526P040cf06b1.pep
TKTVYEEELTVEERNLLSGAYKNVIGARRASWRIGNSIEQKEESLKNXYPVDLIKEYSGXIEAXLSNICDELLKLLDSHLEPYCNAAESNVFYLKMKGDYHTSLTEF

SEQ ID NO: 5497 - protein, 68 aa, Zea mays
  unsure (1)..(68): unsure at all Xaa locations
  Clone ID: TF_LIB3227-010-P1-K1-E12.pep
PVLSLEENVYLAKLAAQAKRFEEKLEFMVNATKPVDSKDLTVQERNLLYDAYTNVIGARPAXWRIISS

SEQ ID NO: 5498 - protein, 91 aa, Zea mays
  Clone ID: TF_LIB3227-010-P1-K1-E1.pep
HASGWYYGLKRRKCCKRAVKSRPNPRNYYRCSAVGCGTKKLIVRNSEYLCYVLTTYYGMHKHAKSCDCYLCPPPAARSADHYSSPTAERRW

SEQ ID NO: 5499 - protein, 187 aa, Zea mays
  Clone ID: TF_LIB4757-019-Q1-K1-A3.pep
MATERESKTFLARLCEQAERYDEMVTYMKEVAKVAGELTGDERNLLSVAYKNVVGTRRASWRIISSIEQKEESKGTEKHVGTIRDYRQKIETELEQVCQDVLNVLDDSLIPKAESGESKVFYHKMKGDYHRYLAEFASGEKRKVAATAAHEAYKTATDVAQTELTPTHPIRLGLALNFLVFYYEILN

SEQ ID NO: 5500 - protein, 79 aa, Zea mays
  unsure (1)..(79): unsure at all Xaa locations
  Clone ID: TF_LIB4739-044-Q1-K1-D9.pep
MASAELSREENVYMAKLAEQAERYEEMVEFMEKVAKTVEGGGLTVXEXNLLSVAYKSGIGARRASWXIIFFIGRXVDGR

SEQ ID NO: 5501 - protein, 91 aa, Zea mays
  Clone ID: TF_700575123H1.pep
VFYLKMKGDYHRYLAEFTSGAERTDAVEITMDAYKAAQDIALVDLAVRHPIRVVVALRFSVLYDVILDLPDIVFMLAIQVFYDAIPVVGSL

SEQ ID NO: 5502 - protein, 82 aa, Zea mays
  Clone ID: TF_uC-zmflteosinte083a02b1.pep
MSREENVYMAKWAAQAERYEVMAEYMEKVATTVDVVELTVEERNLMYVAYKNVIGARRASWSTVPCMEQIEEFRRIEKHVHL

SEQ ID NO: 5503 - protein, 69 aa, Zea mays
  unsure (1)..(69): unsure at all Xaa locations
  Clone ID: TF_LIB3136-055-Q1-K1-A9.pep
MSREENVYMANLAEQAERYEEMVEYMEKGAXTVDVEKLTGEEPDLLSGAYKNGNGACRASWGIGSFIEQ

SEQ ID NO: 5504 - protein, 71 aa, Zea mays
  unsure (1)..(71): unsure at all Xaa locations
  Clone ID: TF_LIB4665-002-R1-N1-G12.pep
GLGLLLTSPVFYYEILNSPAKXNLAKQGFYETISQLNPLGEGSYKKSPLIMQLLRGNLTLWTFSPPEDGVY

SEQ ID NO: 5505 - protein, 232 aa, Zea mays
  unsure (1)..(232): unsure at all Xaa locations
  Clone ID: TF_LIB4756-120-R1-K1-F6.pep
MGYEDSVYLAKLAEQAERYEEMVENMKAVASADQELSVEERNLLSVAYKNVIGARRASWRIVTSIEQKEESKGNEAQVGLIKEYRQKIEAELAKICEDILECLDGHLIPSAESGESKVFYHKMKGDYHRYLAEFAVGDKRKTSADKSLEAYKAATEVAASSLAPTHPIRLGLALNFSVFYYEILNSPDQACQXGQQAFDDAIAELDTLSEESYKDSTLIMQLLRDNLTLWTS

SEQ ID NO: 5506 - protein, 180 aa, Zea mays
  unsure (1)..(180): unsure at all Xaa locations
  Clone ID: TF_LIB4767-042-R1-K1-H10.pep
MPSDQLSRDENEHMXAKLADQAQTDYDRARFMDQXASTVDSEELTAYDRNLLSVAYNNVIGARRTSWRIISSIEQKEEGLSHDDRATLIKDYRGKIDTDLTNICDGILKLLETHLVPSSTAPESKGFYLXCMVHYYTYLAEFXTGPERKDAADNTMVVYYAAQDIALSAIAPTLPITVGL

SEQ ID NO: 5507 - protein, 88 aa, Zea mays
  Clone ID: TF_LIB3245-537-P1-K1-D7.pep
LVAATVAPGVALDALHVLNHLLVPLRVLSEVVHVHALLPRGLRRLHVFDRGWYGSADRDGRRHGRSHGYAGAQDPVERKRRVCAGRVG

SEQ ID NO: 5508 - protein, 74 aa, Zea mays
  Clone ID: TF_LIB4171-051-R1-L1-B6.pep
ALIHTTTKAASSSKITQRRKYLMYELCVSYVFSNLYAVAPHGHITIDKLCWQQKQFGIHYFCGHALMKSTQYRK

SEQ ID NO: 5509 - protein, 210 aa, Zea mays
  unsure (1)..(210): unsure at all Xaa locations
  Clone ID: TF_LIB4738-097-Q1-K1-A9.pep
SNEESRKNEEHENLIKEYRAKIEAELSNICDGILKLLDSHLEPSSTAAESKVFYLKMKGDYHRYLAEFKTGPERKESADTTMMAYKDAHDIALDELAPTHPIRLGLALNFSVFYYEILNSPHKDCNLAKQALDEXAISQLHTLAEESYQDSTLIMQLLRDNLTLWTSDLTEDGADEGQQAPKGEAGDVQKGTAILGEHILLEPIDLDALC

SEQ ID NO: 5510 - protein, 69 aa, Zea mays
  Clone ID: TF_LIB3069-008-Q1-K1-A8.pep
TTRPKTEHLVELTDEERNVLAVAYKNVIAARRASWRIEPSIEQKEDSHKNNKHVNLIKEYRAKIEALLN

SEQ ID NO: 5511 - protein, 211 aa, Zea mays
  unsure (1)..(211): unsure at all Xaa locations
  Clone ID: TF_LIB3069-008-Q1-K1-A8.R2.pep
TTREKTEHTEEESDHERDVYNNVYENVMXAWRTVCCIEYYVEHRENYQHNKHNVNFIKEYGAKMNAKLNNIWDRIDNQLESHLTASYTDAESQVMNVNINGDYDKYNTESKTDAYRKNTVESSMAAYNVAQDIVVPNHATTHAIRLKLALNYXEIYNETDNSPHKANHLSNEAIYESNCHLDSLCEDVYMDMPLLMHLLTDNXTLLTYDLT

SEQ ID NO: 5512 - protein, 138 aa, Zea mays
  unsure (1)..(138): unsure at all Xaa locations
  Clone ID: TF_LIB4742-110-Q1-K1-B10.pep
NIQQESRTNQQHVHLITEYPAQIEAELRNICAGILKLLDSHLEPSSTAAESXLFYLKMKGDYHRYLAEFKTGPERKESADSTMMAYNAAQDIALAELAPTHPIRLALALNFSGGHYETLNSPHKLATLQNSAXFDEAI

SEQ ID NO: 5513 - protein, 90 aa, Zea mays
  unsure (1)..(90): unsure at all Xaa locations
  Clone ID: TF_LIB3159-007-Q1-K1-E7.pep
TLTLFQSQRYEEMVDFMDIVAGAVDSEELTVKDRILLYDAYKNVIVTIRASXRIISFIDHMEEDHANVDHVTLINNYLPTIESDLNTYLL

SEQ ID NO: 5514 - protein, 91 aa, Zea mays
  unsure (1)..(91): unsure at all Xaa locations
  Clone ID: TF_LIB3075-042-Q1-K1-C4.pep
MQEKHRDTTVLNGVIDVLEYHLVQCTARGKYQVLYLKMNDDYHMDLAEFKTSAKRKDTFYSTMNAYTNGHDIGLGKMGXPHPIKLGLGFNL

SEQ ID NO: 5515 - protein, 142 aa, Zea mays
  unsure (1)..(142): unsure at all Xaa locations
  Clone ID: TF_ZmC5000_11.pep
MVVGKRQWSATYSEQKIFNCGTRGAVVGNAVMLSEIINYVQSLQXQVEFVFMKLATVNPQVDLNSLPNVLPKDVHQSCGPPHFSLETLGAPLSYLSQPHHGSPLGCMDNQSCMHPLDTTFCLAINPQYHFLNGVSDASSQLI

SEQ ID NO: 5516 - protein, 40 aa, Zea mays
  Clone ID: TF_LIB3597-059-Q1-N6-A7.pep
ACIVAKQAFDQAMSELESLGEDSNKDIPLINRPIRDNLTI

SEQ ID NO: 5517 - protein, 283 aa, Zea mays
  unsure (1)..(283): unsure at all Xaa locations
  Clone ID: TF_ZmC3397_8.pep
MALLPSRSYTRILQLKTNHFIESRKGQATSTAQHSTSTPSVLGRRGEGNPGPGRVVGRGSAAEEMEEREKLVCLAKLAEQAERYDDMVEFMKNLARMDVDMSAEERHLFSVGFKNTIGAKRASWRIICSHEQKVAADRQTGVMIDAYKKKVEEELRXKGDYYRYLAEFSTGTEKKAASDQSLMAYQHAMVVASSELSPAHQIRLGLALNLSVFFYEIMNSHERACQVAKQAFDEALTEINSGEGGYKDSTLMMQLLKDNLALWTSELTGGEASKGNDDVDMEG

SEQ ID NO: 5518 - protein, 132 aa, Zea mays
  unsure (1)..(132): unsure at all Xaa locations
  Clone ID: TF_LIB3076-006-Q1-K1-H5.pep
RVRVIVARRASCLIISSIEXKEGVLGSEEGFTLIKDYRGMIETELTKICDGILKLLXSHLVPSSTDPESKVFYLKMKGDYYRYLAEFKTGAXRKDAAENTMVGYKAAQYIDLAVLXPTHPTRLGLALNFLSV

SEQ ID NO: 5519 - protein, 85 aa, Zea mays
  unsure (1)..(85): unsure at all Xaa locations
  Clone ID: TF_LIB3066-035-Q1-K1-A7.F24.pep
KGDYFRYXLAELKTGPERKESVESTMMAYKAAQDIALTELAPTHPIRLGLALNLSVYYYEILNSPDKACNLAKHAXDETVYEVNT

SEQ ID NO: 5520 - protein, 153 aa, Zea mays
  unsure (1)..(153): unsure at all Xaa locations
  Clone ID: TF_LIB4758-032-R1-K1-H2.pep
QPTREDSGNMGKLANQARAXDEVGGSSSCERVARSAMGNGRGEELSXEERNLLTISYNNVIRGRLASWRILSSIXQKDEGRGNEAHAASIRTYRSEIKIEVDHICDGILGLLDSHVIASDDADKTKVFYLKMKGDYRRYLGEIKSGEEMKDAA

SEQ ID NO: 5521 - protein, 74 aa, Zea mays
  unsure (1)..(74): unsure at all Xaa locations
  Clone ID: TF_LIB4605-003-R1-N1-A4.pep
MALPQLFCKEDVYMRTSLLRXLQRYHEMVHVLEKVAKTVDSVELSDEERNLLHGAYQNVSGARLASLRMIFSIQ

SEQ ID NO: 5522 - protein, 124 aa, Zea mays
  unsure (1)..(124): unsure at all Xaa locations
  Clone ID: TF_LIB3632-045-Q6-K6-B10.pep
ARRWPQESSPAEEYVYMDNLGEQAERHEEMVLLMDKVATTVDSEELTEEERNLLSGAYRNVIGASRASWPIISFIEQKEEGRCNEDRVTLFEDVRGKIESXLTQICDGILKLLETHLEPSSTAP

SEQ ID NO: 5523 - protein, 60 aa, Zea mays
  unsure (1)..(60): unsure at all Xaa locations
  Clone ID: TF_LIB4665-011-Q1-K1-H11.pep
MSREENVYMAKLAEQAERYEEMVEYMEKVAKTXXXXEXIVVGGRLILVVYWTLDLVPCRV

SEQ ID NO: 5524 - protein, 73 aa, Zea mays
  Clone ID: TF_LIB4701-005-R1-K1-G1.pep
QQFKGLRISTSPGCSAPRLKRGGSARPCTEASHVGSTPNFSGDSHSKSRAQESRCQIALHSVIRQQQTLASSL

SEQ ID NO: 5525 - protein, 39 aa, Zea mays
  Clone ID: TF_LIB3632-025-Q1-N6-H2.pep
ALLELDPLNGESYKGSPFFIQLLCYNLALWAFSLSEDPS

SEQ ID NO: 5526 - protein, 447 aa, Zea mays
  Clone ID: TF_ZmC19578_1.pep
MAAVDATTKEMDALHVGQNDETKERLIKEDKAANSNHSVVAAQSLPPEDDDDDEAQADGPSQDGAAAVKKKKKKNKSKKKKGPLQQTDPPSIPVDELFPSGEFPEGEIQQYKDDNLWRTTSEEKRDLERLQKPIYNSVRQAAEVHRQVRKYMRSIIKPGMLMVDLCETLENMVRKLIKENGLQAGIAFPTGCSLNWVAAHWTPNAGDKTVLQYDDVMKLDFGTHIDGYIVDCAFTVAFNPMFDPLLQATRDATNTGIKEAGIDARLGDVGAAIQEVMESYEVEINGKVFQVKSVRNLNGHSIGPYQIHAGKSVPIVKGGEQTKMEEGEFYAIETFGSTGKGFVREDLECSHYMKNFDVGHVPLRLAKAKQLLGTINHNFGTLAFCRRYLDRLGETKYLMALKNLCDNGIVQPYPPLCDVRGSYVSQFEHTILLRPTCKEVISRGDDY

SEQ ID NO: 5527 - protein, 81 aa, Zea mays
  Clone ID: TF_700336508H1.pep
PEHDARRSAEISDTASIENCIVRWHQQSLSRDENVYMAELAEQAGMYEQMDEFMDNVQRTVESEEVTVDERNLLSDGYKNV

SEQ ID NO: 5528 - protein, 183 aa, Zea mays
  unsure (1)..(183): unsure at all Xaa locations
  Clone ID: TF_LIB4977-003-R1-K1-F12.pep
MAREENVYMAKLADYRRKXYEEMVDHMHNVPNTVDVEQLTVEERDLWSGAYXNVIGGRRASWXRIVLLLSETELTEXRNEPQSIDEPLSTEYRAQIEAELINIRDGLLXVLDSLLVASSTGAVPKVFYLKMNVDYHRDLAESTTVPDRKESADITMMVYYAAHDIASTEMRPTHPISLAIAPN

SEQ ID NO: 5529 - protein, 242 aa, Zea mays
  unsure (1)..(242): unsure at all Xaa locations
  Clone ID: TF_LIB4740-122-A1-K1-B7.pep
MAAAQLSRDENAHMGKLAEHAQRYEEMVDLLHNVPNTGDSDELAVQERNLLSAAYHNVIGARRASWSIISSIEQNEEGRGYEDRATLLTDYRGKIETELTNICDGILXVLETLLVPSSTGPELKVFYLEMNGDYYRYLAEFKTEAERNDAAENTMVAYKAAHDIALAELAPTHPIRLGLALNFSVFYYEILNSPDRACSLAKQAFDEAISELDTLSEESYKDSTLIMQLLRDNLTLWTSDIS

SEQ ID NO: 5530 - protein, 51 aa, Zea mays
  unsure (1)..(51): unsure at all Xaa locations
  Clone ID: TF_700171261H1.pep
MASAELSRYVNVYLSXLAEQAERYDVMVDFMEMVAKTVDSEELTVEERYLL

SEQ ID NO: 5531 - protein, 231 aa, Zea mays
  unsure (1)..(231): unsure at all Xaa locations
  Clone ID: TF_ZmC680455_1.pep
MGHEDAVYLAKLAEQAERYEEMVENMKIVAGEDRDLTVEERNLLSVAYKNVIGARRASWRIVTSIEQKEESKGNSSQVTLIKEYRQKIEAELAKICEDILEVLDQHLIPSAKSGESKVFYHKMKGDYHRYLAEFAIGDRRKDSADKSLEAYKAATELPXNPSFLPPTPIRLGLALNFSVFYYEILDAPXPACHLAKQAFDDAIAELDTLSEESYKDSTLIMQLLRDHLTLW

SEQ ID NO: 5532 - protein, 123 aa, Zea mays
  unsure (1)..(123): unsure at all Xaa locations
  Clone ID: TF_LIB3592-005-P1-K6-B2.pep
FQDVDSEELXVESEPLSVAYKNVIGALRASWRIICYIVHIEEGRGNVDPLTLIKDYRGXIETELTKICDGILMLFETTLEPXSMAANAKXFYIRMEGDGYIYLDEFKTGAERKDAXENTMVKF

SEQ ID NO: 5533 - protein, 105 aa, Zea mays
  unsure (1)..(105): unsure at all Xaa locations
  Clone ID: TF_700622808H1.pep
DGILKLLETHLVPSYPAPESKVFYLRLPGDYYGYLAEFTTGAENQDAAETTMVAYKAAQDIALXELARTHPIRLGLALDFSVFYYEILNSPDRACSLAXAAFDEA

SEQ ID NO: 5534 - protein, 93 aa, Zea mays
  unsure (1)..(93): unsure at all Xaa locations
  Clone ID: TF_LIB3075-002-Q1-K1-B12.pep
PHTNSSLTTTEYSPNFNTTSTPSHNCTRIKIFYLNIKGNYHQYLAXIKSYSYTKHSSYSTINPYKNAHDIALSYSTTTHPIKPSPSLNILNFY

SEQ ID NO: 5535 - protein, 92 aa, Zea mays
  Clone ID: TF_LIB4764-001-R1-M1-A2.pep
PPPLPLRLGLFFNFPMFFIEVLTSPDKAFTLSKRGFFKVFSPFTPLGGGFSKDCPLFMQLLGATFPLWAFAPPEVGFFRGKKAPKGWVGAGH

SEQ ID NO: 5536 - protein, 165 aa, Zea mays
  Clone ID: TF_LIB4729-013-R1-K1-D2.pep
MPPPPCDRPCRRRSISGDPCQAQSHHVTPGADAAGEREHGQPCRAGAAKRGDGRVHGAHEALHRRSRKKKGKNSVETYKIYIFKALKQVHPDIGISSKAMSIMNSFINDIFEKLAAEAAKLARYNKKPTITSREIQTSVRLVLPGELAKHAVSEGTKAVTKFTSA

SEQ ID NO: 5537 - protein, 43 aa, Zea mays
  unsure (1)..(43): unsure at all Xaa locations
  Clone ID: TF_LIB3137-033-Q1-K1-C6.pep
ENDDFMEKVTKTVHSDELTVXEPNLLSFAYKNLIGTLRSSCHI

SEQ ID NO: 5538 - protein, 47 aa, Zea mays
  Clone ID: TF_LIB3150-039-Q1-N1-D12.pep
LYHTQIPQPLGVTTREECAYFFIHIIYMAREENVYIANLAEHAERSE

SEQ ID NO: 5539 - protein, 99 aa, Zea mays
  Clone ID: TF_LIB3689-247-Q1-N6-F5.pep
RATTTGQAESLGTELLEMVPSREEEIKLKEYREDAVSTFVVDDYVRLEFKGSTFSGSWKSFSSPKISSTFLVVIAIVSNEIVVRVARVLTLLYIVKLSG

SEQ ID NO: 5540 - protein, 330 aa, Zea mays
  Clone ID: TF_ZmC3397_1.pep
MLGRISHYGLQHMVSPPGALTCSPNPANSARGETEPSGPKSRKGQATSTAQHSTSTPSVLGRRGEGNPGPGRVVGRGSAAEEMEEREKLVCLAKLAEQAERYDDMVEFMKNLARMDVDMSAEERHLFSVGFKNTIGAKRASWRIICSHEQKVAADRQTGVMIDAYKKKVEEELRKVCNEVLSVIAIHCLPLASTGENIVFFYKMKGDYYRYLAEFSTGTEKKAASDQSLMAYQHAMVVASSELSPAHQIRLGLALNLSVFFYEIMNSHERACQVAKQAFDEALTEINSGEGVYKDSTLMMQLLKDNLALWTSELTGGEASKGNDDVDMEG

SEQ ID NO: 5541 - protein, 113 aa, Zea mays
  unsure (1)..(113): unsure at all Xaa locations
  Clone ID: TF_LIB3117-032-P1-K1-E1.pep
NAFVLDSHLVPSDDTGVSKVXYLKMKGDYHRYLAGFKTGADRKEAADNSLLAYKSAQDIAMADLAPTHTIWLXLALNFFVFYYKILNSPDRACNLIKQAFDEAIFNLFSFMRG

SEQ ID NO: 5542 - protein, 140 aa, Zea mays
  unsure (1)..(140): unsure at all Xaa locations
  Clone ID: TF_LIB4668-011-R1-K1-A10.pep
VEVNQLQKTTTKIAQLSHDLRTEFLHKDSQLHRSHGTPPYVSIEETMHHEARRTPITFSHATIKRXRSPTMGSSQFTVITPLQHKLSHLLKPPGPGPLIPQVYILLPCHTHDIDKRTVLLQARGCVYGPGGTTDASGAAV

SEQ ID NO: 5543 - protein, 66 aa, Zea mays
  unsure (1)..(66): unsure at all Xaa locations
  Clone ID: TF_LIB3606-053-Q1-N6-E11.pep
WACSFGKQGFXEAILELDPLKEESFKGSPFVMQVLCXNLTLRTFDISEAPWEKIREGPKPDLKEGQ

SEQ ID NO: 5544 - protein, 169 aa, Zea mays
  Clone ID: TF_ZmC7516_38.pep
HPTPYENYQDSIPPQRSLLASLSDSSSVRMSPSRTGPLTFLMMRRFWSSNSIRKLPRHYSASTQPPSLPLRLEQCEDVSLANRSLDVPHDETVLVIQELHSDLGNLTPGAGPSHHLHHNSKLHLGVHTLASRAESRTEDDGLTKETGAAAAAMTALEEEGNPDAWADAW

SEQ ID NO: 5545 - protein, 71 aa, Zea mays
  unsure (1)..(71): unsure at all Xaa locations
  Clone ID: TF_LIB3597-043-Q6-N6-F3.pep
SLNSPDKACNVAEQAFDXALSELVSSGEESSKDSPMFMQLLKNNMWLGSRDRSENGAEEGKHAPKGDAGEV

SEQ ID NO: 5546 - protein, 95 aa, Zea mays
  unsure (1)..(95): unsure at all Xaa locations
  Clone ID: TF_LIB3355-009-P1-K1-D8.pep
GGGFSIPGGAPXVRDIVEYIQNVAITEXIQNGTGVEPNVVGVAYRNVIGARRASWRIGSSIEQKGEARKNEXDGNLIKGYRAEIEAXLSNICDGI

SEQ ID NO: 5547 - protein, 172 aa, Zea mays
  unsure (1)..(172): unsure at all Xaa locations
  Clone ID: TF_LIB4740-105-A1-K1-H11.pep
ETREIVYTSRTTADSPQLTVKERNLLSAAYNTPIVARPTSWPIISSFKNNEEAPCSFFLVTLINXDILAQIETDLTKICDVIXELLETHLAPSSTAPESKDFYLKMKGDYYRYLAEFKTGAERKDAAENTMVAYKAVQDIALAELAPTHPIRLGLALNFSVFYYEILNSPDR

SEQ ID NO: 5548 - protein, 93 aa, Zea mays
  unsure (1)..(93): unsure at all Xaa locations
  Clone ID: TF_LIB4975-043-A1-K1-E3.pep
MSPSEPTREESVYMAKLAEQAERYEEMVEFMERVARSXGGAGXXXXXXXXXXXXXXXXXKNXXGARRAAGRXXXTXEQKEEGRGNEAHAAASR

SEQ ID NO: 5549 - protein, 84 aa, Zea mays
  Clone ID: TF_LIB4703-004-R1-M1-F4.pep
LLDCCRKGDYYRYLAEFSTGTEKKAASDQSLMAYQHAMVVASSELSPAHQIRLGLALNLSVFFYEIMNSHERSLIFNALFLPFY

SEQ ID NO: 5550 - protein, 183 aa, Zea mays
  Clone ID: TF_ZmC2299_2.pep
SSPAGAGTGIPLWPLPCLPFPSPSSSPHPPTNPPTQSFPQPTAAVDARVFYLKMKGDYHRYLAEFKTGAERKDAADSTLAAYQAAQDIAVKELPPTHPIRLGLALNFSVFYYEILSSPDRACSLAKQAFDEAISELDSLGEESYKDSTLIMQLLRDNLTLWTSDMQEDGGDEMRDANKPDEEQ

SEQ ID NO: 5551 - protein, 134 aa, Zea mays
  unsure (1)..(134): unsure at all Xaa locations
  Clone ID: TF_LIB4740-080-R1-K1-A9.pep
PSSAHTRRIRSQDPLRHRNRVTARAAGDPDPPTRPSPARSHVAVGADAGERNLLSVAYKNVIGARRASWRIISSIEQKEEGRGNEAHAASIRAYRSKIEAELARICDGILALLDSHLVPSAXGAEXKXFYLTMK

SEQ ID NO: 5552 - protein, 160 aa, Zea mays
  unsure (1)..(160): unsure at all Xaa locations
  Clone ID: TF_LIB4666-010-Q1-K1-A7.pep
AGPLCWGAYPSRVWFTIDTNGFLNVHGEDNTAXQQNNITVSTDTGGLCREENEGVGHDAVQVGGRDAQHEGKSPRHXAGEHNSTTLRYTIKARXITSKLTAVDQTKNXDAPDSAISWAGRQPAPRGGTSSETRMKDLESLXCNPIIPNMYTGRGCPHGEG

SEQ ID NO: 5553 - protein, 52 aa, Zea mays
  unsure (1)..(52): unsure at all Xaa locations
  Clone ID: TF_LIB3279-037-P1-K1-D2.pep
EELIGEDQNLLFVEYKNVIGAGRAXWPIISSINQKEEGRGNEDRLPLIKDNR

SEQ ID NO: 5554 - protein, 71 aa, Zea mays
  unsure (1)..(71): unsure at all Xaa locations
  Clone ID: TF_LIB4667-011-R1-K1-E4.pep
RRPPLDPQFPAPERNPAPEKFVLYRYYRYGREENVYMXKLAEQAERYEEMVEYMEKVAKTVDVEELTGEER

SEQ ID NO: 5555 - protein, 75 aa, Zea mays
  unsure (1)..(75): unsure at all Xaa locations
  Clone ID: TF_LIB4740-011-R1-K1-C5.pep
MSPSEPTREESVYMAKLAEQAERYEEMVEFMERVARYAGGAGGGGGLSVXERXLLSVAFXXRLGARXASWRFLSS

SEQ ID NO: 5556 - protein, 82 aa, Zea mays
  Clone ID: TF_LIB3279-053-P1-K1-D2.pep
PRVRKESAESTMVAYKAAQDIALAELPPIHPIRLGLALNFSVFYYEIQNSPDKACNLAKEVGVHLSFYCCTGFLSYNYLRCC

SEQ ID NO: 5557 - protein, 83 aa, Zea mays
  unsure (1)..(83): unsure at all Xaa locations
  Clone ID: TF_LIB4729-017-R1-K1-B5.pep
MSESFVVGYRTRAGTTCASWCIIXCFPQRADSRGTDDRPTFIKDYRGKIETELTKICDGILXCLRPHLVPSSTATDXRAFYLK

SEQ ID NO: 5558 - protein, 48 aa, Zea mays
  unsure (1)..(48): unsure at all Xaa locations
  Clone ID: TF_LIB3236-088-P1-N1-C9.pep
EAIWEMETLKKESXKERPLIMKLLCDKLTLWTFEISEDPAEKIREGPK

SEQ ID NO: 5559 - protein, 199 aa, Zea mays
  unsure (1)..(199): unsure at all Xaa locations
  Clone ID: TF_LIB4979-021-A1-K1-B8.pep
TVPWQHQSFPDEDNVTWQKLAQKADRYHEMSESHXQKVPRTADSKELTGEERNLLSGAYKNAIGARRASWRIISSIQQKEEGRRYDDRPTLLXDYRAKTETEPXPICDGILKLLDTHLVPSSTAPETTVFYLWMTGDYYTYLAEFTTGGERSDSAENTMMRYPVAHDIALGELAPTHPIRIGLRLNFSMCYYETLNVPD

SEQ ID NO: 5560 - protein, 181 aa, Zea mays
  Clone ID: TF_ZmC290_20.pep
MSPSEPTREESVYMAKLAEQAERYEEMVEFMERVARYAESKVFYLKMKGDYHRYLAEFKSGAERKDAAESTMNAYKAAQDIALADLAPTHPIRLGLALNFSVFYYEILNSPDRACNLAKQAFDEAISELDSLGEESYKDSTLIMQLLRDNLTLWTSDTNEDGGDEIKEAAAAPKESAPEGQ

SEQ ID NO: 5561 - protein, 165 aa, Zea mays
  unsure (1)..(165): unsure at all Xaa locations
  Clone ID: TF_LIB3960-019-Q1-K6-F10.pep
GRSNVYMAQLAEHAXRCEEMGVVYXEKVANTVYGEELTVEERNLLWAAYKNVIGARRASWSIASSIEQKEESRLNEXMLTLCKEYRANIVAELINICDGILMLGDSHLLPSSTAGESNVFYLKMKGDYHRYLAEFKTGPDRNECAGSTMMDYMAAPDIALAELAP

SEQ ID NO: 5562 - protein, 179 aa, Zea mays
  Clone ID: TF_ZmC3397_4.pep
ATSSPSAPLSILFFLSSPSPWPRRLVFRKGTRALAPVRRSPRRGVRSAALPVHPPPKPPPVPVQQHAPSSSPGAFSVNQTRPAVPHPCDSRSAGPSVTSASSPSLRPYPSSPHPPSYALSAWPPHPGVLRFWGASLCPLRSAPPESGPAERTTTQIGSCPSLPALQSLRRRIRRLICSI

SEQ ID NO: 5563 - protein, 420 aa, Zea mays
  Clone ID: TF_ZmC290_29.pep
MAEAWGKLHLPSHPQIVTAQASPPHVPRPHLVHAANTISTQPELLTCSTVHPPPSHNADHTYSLPHRTPRRAPRSFGRHVIPLTCGPRTRCPGFASSSNAPTRPPIASPTSAQTRRFRSTGSSAPPTTVRPSVLPATPIRRPVPSHHTLPPLAAMSPSEPTREESVYMAKLAEQAERYEEMVEFMERVARSAGGAGGGEELSVEERNLLSVAYKNVIGARRASWRIISSIEQKEEGRGNEAHAASIRAYRSKIETELARICDGILALLDSHLVPSAGGAESKVFYLKMKGDYHRYLAEFKSGAERKDAAESTMNAYKAAQDIALADLAPTHPIRLGLALNFSVFYYEILNSPDRACNLAKQAFDEAISELDSLGEESYKDSTLIMQLLRDNLTLWTSDTNEDGGDEIKDAAAPKESAEGQ

SEQ ID NO: 5564 - protein, 41 aa, Zea mays
  Clone ID: TF_LIB3150-026-Q1-N1-F5.pep
MAREENVYMAKLAEHALRFEEVVEYMDEAASTCKFARRLQI

SEQ ID NO: 5565 - protein, 109 aa, Zea mays
  unsure (1)..(109): unsure at all Xaa locations
  Clone ID: TF_LIB3159-019-Q1-K1-C2.pep
KIYAYLSIFSRGILKLLEGGLMASSTATKSDAFYLMMKGDYHRXLMHLILAADRKESAESTVVAYTAAHDIALSDPSPTHPIRLGLALNFSVFYYEIMYSPDKACNLAK

SEQ ID NO: 5566 - protein, 126 aa, Zea mays
  Clone ID: TF_LIB3061-001-Q1-K2-D4.pep
RIICCIEQNEEGRGNDDRVTLIKDYRGEIETELTTICDGILKLLESHLEADFTAPESNVYYLKMNGDYYRYYDEFKTEAERKDATENTMVAYMAAHDIAQDDLAATHAITLGLTLNLSVIYYEILN

SEQ ID NO: 5567 - protein, 258 aa, Zea mays
  unsure (1)..(258): unsure at all Xaa locations
  Clone ID: TF_LIB4744-110-B1-K1-G10.pep
IGYLEAGREPPFHLLRSDRTTRQGTRVSRLLHFPENSQPPTSHPSRFPWLTNVSTASLAEQPHTYEEMEVXLDIVTDTVDSEEXTGDALNLSELLVYXNVPRYPRRASRLLISSIHQKEQVQHDEXQAALIRDYQDTIDXLHLTNISRWRSSSSLETHLEATSSAPESQDFYLMMKGDYYLYLAEIKTGAERQDAAENTMMAYKAAHDIALAELAPTQPIRLGLAXNFSAVYYEILNSPDRACSLAKQASDEDISELD

SEQ ID NO: 5568 - protein, 155 aa, Zea mays
  Clone ID: TF_LIB4172-011-Q1-L1-B7.pep
MEKTELIQKAKLAEQAERYDDMATCMKAVTEQGAELSNEERNLLSVAYKNVVGGRRSAWRVISSIEQKTDTSDKKLQLIKDYREKVESELRSICTTVLELVDKCLIANATNPESKVFYLKMKGDYLRYLAEGACGDDRKRTMENWRGAYQEAFGV

SEQ ID NO: 5569 - protein, 217 aa, Zea mays
  unsure (1)..(217): unsure at all Xaa locations
  Clone ID: TF_LIB4979-042-A1-K1-B4.pep
SLNICARDENVYMDKVAEQAEQDEEMAEYMXNAAKTAHVQHLTXQDRNLLSXAYKNVTAARRASWRIASXSIEPQEEPRTNQQHENLIKEYRGKIEAELSDICDGILKLLDSHLEPSSTAAESKVFYLKMNGDYHRYLAXFKTGAERKESAESTMEAYHAAHDIALAELAPTHPIRMRLALNISVFDYDSLNSPYKAGNLAKQALDEAISELYRLGD

SEQ ID NO: 5570 - protein, 69 aa, Zea mays
  unsure (1)..(69): unsure at all Xaa locations
  Clone ID: TF_LIB3354-052-P1-K1-C9.pep
MSPSEPTREESVYMAKLAEQAERYEEMVEFMERVARYAGGAXXGDKLYWEERNLLDDASCTSFAPTGPG

SEQ ID NO: 5571 - protein, 133 aa, Zea mays
  unsure (1)..(133): unsure at all Xaa locations
  Clone ID: TF_LIB3062-057-Q1-K1-B12.pep
HKEETRSAAVHADVARGYRARVEAELSGICAGMLRLLDERLVPAAAAVDARVFYLKMKGDYHRYLAEFKTGAERKDAADSTLAVYHAAQDISVKELPTTHPIRLGLALNFSVFYYEILSXPDRACSMAKHALD

SEQ ID NO: 5572 - protein, 68 aa, Zea mays
  unsure (1)..(68): unsure at all Xaa locations
  Clone ID: TF_LIB3066-020-Q1-K1-G3.pep
RRCFIGNIDLARDENEHMAKLDEQAXKVXELVETMVKVAKTVXLVDLSDEQRKLLTDVYQNAIGALTT

SEQ ID NO: 5573 - protein, 79 aa, Zea mays
  unsure (1)..(79): unsure at all Xaa locations
  Clone ID: TF_LIB3180-012-P2-M1-C12.pep
LLSRVREKVAKTVYVEERTCXERNLLSVAYKNVIGARRASWRIXSSIVQKEVSCXNVEHVYLIKEYLGMIVVCTCLYMI

SEQ ID NO: 5574 - protein, 53 aa, Zea mays
  Clone ID: TF_700618362H1.pep
ILNHLFRPFGLLSQLGHVDILLRRHIDNIDERAGLLLARGCVSGAGELRLEPN

SEQ ID NO: 5575 - protein, 79 aa, Zea mays
  unsure (1)..(79): unsure at all Xaa locations
  Clone ID: TF_LIB4742-006-R1-K1-G4.pep
MSPSEPTREESVYMAKLAEQAERYEEMVEFMERVARYAGGAGGXXVLSILERNLLSVDYYKRLXTRRSWWRIMSSSCFR

SEQ ID NO: 5576 - protein, 233 aa, Zea mays
  Clone ID: TF_LIB4729-103-Q1-K1-F4.pep
RAGRETPHKRVASAPQDPLRHRNRVTARAAGDPDPPTRPSPARSHVAVGADAGGERVHGQACGAGVAVRGDGRVHGARRALRRGRRRSRARVATLQSLAALAPGDAITAARILVLASDGEYLMEMGIGTPTRYYSVILDTGSDLIWTQCAPCLLCVDQPTPYFDPARSATYRSLGCASPACNALYYPLCYQKVCVYQYFYGDSASTAGVLANETFTFGTNEDPGRPAGHLVSG

SEQ ID NO: 5577 - protein, 195 aa, Zea mays
  Clone ID: TF_ZmC787_5.pep
MASAELSREENVYMAKLAEQAERYEEMVEFMEKVAKTVDSEKLLESHLVPSSTAPESKVFYLKMKGDYYRYLAEFKTGAERKDAAENTMVAYKAAQDIALAELAPTHPIRLGLALNFSVFYYEILNSPDRACSLAKQAFDEAISELDTLSEESYKDSTLIMQLLRDNLTLWTSDISEDPAEEIREAPKHDSSEGQ

SEQ ID NO: 5578 - protein, 61 aa, Zea mays
  unsure (1)..(61): unsure at all Xaa locations
  Clone ID: TF_LIB3180-017-P2-M1-F3.pep
ADLYREEKWYMPMLAEQAXMYHEMAAFMEKASKTVDMAELTEDDRNLQSDAYKNVIGAPSA

SEQ ID NO: 5579 - protein, 83 aa, Zea mays
  unsure (1)..(83): unsure at all Xaa locations
  Clone ID: TF_LIB3069-008-Q1-K1-A8-TGA.pep
DILSSPQKAFSRENRAFDGSILELNTLGGESYKKSSLIMHLMRYILAFGTXPLKEDGFDEVKDALKENAGEGQLSWEGGAKLF

SEQ ID NO: 5580 - protein, 70 aa, Zea mays
  unsure (1)..(70): unsure at all Xaa locations
  Clone ID: TF_LIB189-013-Q1-E1-G10.pep
VDRRVREMIEYMDKVTKTVATEEHTVEDPIDESVAXTIVIGTLRASWRITSSIEPTDEGQGDDDRITDIM

SEQ ID NO: 5581 - protein, 129 aa, Zea mays
  unsure (1)..(129): unsure at all Xaa locations
  Clone ID: TF_LIB4764-052-R1-K1-H2.pep
MSWEDNAYLHKLDAQVERHEXMVDHMENVAKTVYVEELTVDEHNLLSVDYHNVIGDRRASWSIISSIXHKEDSRNNEEPVIQIKEYRGKIGAEMSNICDGILKVIDSHLVTSSTGAEAKVVYLLMKGDY

SEQ ID NO: 5582 - protein, 40 aa, Zea mays
  unsure (1)..(40): unsure at all Xaa locations
  Clone ID: TF_LIB3059-008-Q1-K1-C8.pep
ENVYMAMLAYLSERYEXMVEYMENVSNTVYVEVLTVEERN

SEQ ID NO: 5583 - protein, 101 aa, Zea mays
  Clone ID: TF_LIB3206-083-P1-N1-C10.pep
MGLQQSKEELLYQQVNYGNVDGIRTLRGQGAGLEWIDKEGKTPLMLACMRPDLFDVAKVLIELGANVNAYRPGSHCGTALHHAAKKGLQQTVHLLLSHGGI

SEQ ID NO: 5584 - protein, 154 aa, Zea mays
  Clone ID: TF_LIB4740-081-R1-K1-E4.pep
MGHGVSCARTGDEHDYFRAAQVGDLEALDALLDADPSLARRATLYDRLSALHIAAANGRPEVLSMVLDHGVPPDVVNRHKQVRCGIPSPSTLFFFLSSFLSILCRSQGSLVGYPLQKSHLFFSYPLQSNQQGKKSHLSTGLLCLFFSVQTPLML

SEQ ID NO: 5585 - protein, 187 aa, Zea mays
  Clone ID: TF_ZmC1188865_1.pep
LEIHAECGCQLPDIAYCILFVLHFIQRLHNPGQIGAQLLGRLELFSKCTEITSRISGCVGLGRSAGCLLLPLFDGGGKPHDVAAHSEGPSGFIPFGLDSDVHALVLQERLGHLSPAACCRVHQGRPAILILLVDIYLRTGEEERQQLGKLLLGPPFIRTKVPLHRITEAMERGQAHRFINLARVGSE

SEQ ID NO: 5586 - protein, 67 aa, Zea mays
  Clone ID: TF_uC-zmroteosinte086c03a1.pep
SEPITETNDDITPLLFAVIVGSSFPCLKILIQAGANPNMRAGGATPLHVAVGSASIEVIRLLVEVLK

SEQ ID NO: 5587 - protein, 315 aa, Zea mays
  Clone ID: TF_ZmC1339_1.pep
RLEAGKRQSGKDATGKVAHSAGSSLRRYNEAALKKVLNLMLVDFYVCSKSKCLSLFFRCLSFLFALLQEVQELIVSWKSYFETCVCAFIYAPSRNRQMLFDGEKTQSVIQSCDVRPVPLTVHRPTMKEAKRVYCNLTQLYYEMECSTTDETLPDAGSVKNVEQGQGKKNEVTADPGESISDLSARLELLNKNEAATIPSSKNETTPLHEAAKCGNAQLTLELLEQGLDPCVKDARGKTSYSLASDKEVRNTFRRFMALNLDKWDWHAADVPSALTKEMEESQAAKQADKDAKRKARAKELKKLKKKKKKGGRLAI

SEQ ID NO: 5588 - protein, 112 aa, Zea mays
  unsure (1)..(112): unsure at all Xaa locations
  Clone ID: TF_LIB3115-030-P1-K1-C7.pep
HTRPEGAPEDLGKFLAPGGEVNMGDPEGGTPLNWVVDRGHLSVVGVLAKLNAALIAKATEGQTELHSAVVGERENIXKLLVKHHASFKIRDEVGTTEQDLCLPSCVLLNRPN

SEQ ID NO: 5589 - protein, 225 aa, Zea mays
  Clone ID: TF_ZmC503_2.pep
MTLSIWMNGELNDLESNLVGKKTGRSLPATMLAAELIVPPAQEIKEFFAITEASRTNVSLPQMFRFQVRLYCPDCDELLDTRGRNFLHTAIEHKKWKVVWRFSGTADLGRMANVMDSEGNTPLHLAIKNADQMIVSLLMATNSVLPNIVNNQGLTALDLAVLATDKGISYTMVIILRCLAWTGAVLSPRRLDHFIDDFGIGKTSGNELKKFTNIAQKKHGIVFIF

SEQ ID NO: 5590 - protein, 161 aa, Zea mays
  unsure (1)..(161): unsure at all Xaa locations
  Clone ID: TF_LIB4829-021-R1-N1-F4.pep
MIEPSIRVRRAIHANDATLLRRILKTHPSYLLNPDSSPSGLSNSNMHLAASLGHHEVCAVLLKLGHEDPCPALNESHQTALMLAAAGGHTEVVQILCEHDKTCILRRDVRGRDAVMEASLGGHDTILQLLLTXVPGGLYDAVRRADVEGDTALHFASGTET

SEQ ID NO: 5591 - protein, 682 aa, Zea mays
  Clone ID: TF_ZmC912_1.pep
RRRLFSFDSLVFLEGDEGRFRRARTDAAMAGVDAARYAHSPAHHAVAARDHAALRRVLDALPRARRPEEIRTEADSVAEEARAEAVSAVIDRRDVPGRETPLHLAVRLCDPTAAEMLMAAGADWSLQNEQGWSALQEAICTREEALARVIVRHYQPLAWAKWCRRLPRVVAAMRRMRDFYMEITFHFESSVIPFISRIAPSDTYRVWKRGSNLRADMTLAGFDGFKIQRSDQTILFLGEGSEDGKVPPGSLCMINHKDKEIMNALEGAGTPASDAEVQQEVAAMSQTNIFRPGIDVTQALLLPQLTWRRQERTEAVGPWKAKVYEMNHVVVSVKSRRVPGAMTDEEFFSSCNDNDIESEGFDDVLTEEEKKQLEAALKMDSPDAGGEDQSDSFAGPRHSCFEPREREVPIEDMSVSGNGEGKHDKKGWFSNWGKRSQVSKSEGVKKMASPRNSLCVDDKVSDLVIESPSNVQTRPGRHSVDVVRPDDNRRIRERDSRRHVASAENGHRRKEGSKESEYKKGLRPVLWLSPNFPLRTEELLPLLDILANKVKAIRRLRDLLTTKLPPGTFPVKVAIPVVPTIRVLVTFTKFEELQPLDEFTTPPSSPDNSKSPAVQPSSSSWIQWIKAPYLQNLSTAPGPSSRVEDIQDPFAIPSNYVWTTPEEKKKKTQENKNKSKKGRSGA

SEQ ID NO: 5592 - protein, 820 aa, Zea mays
  Clone ID: TF_ZmC489_1.pep
MLTILRDLLPLYPHLRMVLMSATIDAERFSQYFNGCSVIQVPGFTYPVKSFYLEDVLSILQSAEQNTEVYNYQHSETGITPLMVFAMKGQLGDVCMLLSFGVDCSAQDHDGKSALDWAQQENQQEVCEVIKKHMECSSEKSTEDNELLNKYLASINPEHIDTLLIERLLRKICVDSNEGAILVFLPGWEDISQTRERLFASPFFQDSSRFLVLSLHSMIPSSEQKKVFKRPPVGVRKIILSTNIAETAVTIDDVVFVIDSGRMKEKSYDPYNNVSTLHASWVSKASARQREGRAGRCQPGTCYHLYSRFRASSLPDYQIPEIKRMPIEELCLQVKLLDSNCRIADFLKKTLDPPIPETVRNAIAVLQDLGALTQDEQLTELGEKLGSLPVHPSTTKMLLFAILMNCLDPALTLACAADYRDPFVLPVAPDERKRAAAAKVELASLYGGFSDQLAVVAAFDCWRHAKDRGQDSQFCAKYFVSSNIMNMLSSMRKQLQNELSQRGFVPADASACSLNSKDPGIMRAVLMAGAYPMVGKMLPPRKNARKSVLETASGAKVRLHPHSCNFNLSFSKSSGNPLLIYDEITRGDGGMYIKNSSVVGSYPLLLIAAEMVVAPPDDDSDEDEEDSSEDEAEESTLVQHKEEIMSSPDSIVSVVVDRWLRFDATALDVAQIYCLRERLASAILFKVKHPQDVLPPALGASMYAITCILSFDGLPSMVPPNDLSANRGSGQDLAEASKFSQGRRAGYIPPSGFLMSLLADRTHNAPSFQNSSNHPGGGSAHTRPSRAPVGRFDRSRRPFRNSGPGSSAPRSFKRQRDAPR

SEQ ID NO: 5593 - protein, 632 aa, Zea mays
  Clone ID: TF_ZmC16049_1.pep
MDDVSKYAHSPAHLAVLRRDHAALRRLVAALPRLPRAGEVATEEESVAGEAVADAVSAVIDRRDVPRRETPLHLAVRLRDPVAADILMSAGADWSLQNADGWSALQEAVCTREEAIATIIARHYQPLAWAKWCRRLPRILASISRIRDFYMEISFHFESSVIPFIGRIAPSDTYRIWKRGAALRADMTLAGFDGFRIQRSDQTFLFLGDGARPEDAGGKELHPGSLIVLAHKDKEITDALEGAGVQPTESEVAHEVALMSKTNMYRPGIDVTQAELVPHLNWRRQERTEAVGQWKAKVYDMLNVLVTVKSRRVPGAMTDEELFAMDGEEKNGRGAELDAELDEVLTAEERKQLDSALRMGNNEEESEERGDEGDAGADHTDASGVTKDKKGWFGWGAKKGAKGDDKPSKVGSKDETSDPGKQKEKGSGKKKKGGSSAESVKHESEYKKGLRPVLWLTPDFPLKTDELIPLLDVLANKVKAIRRLRELLTTKLPTGTFPVKIAIPIVPTIRVIITFTKFEELQPLDEFATPPSSPTQFQDAKAKEPEGSGSWYSWVKGGRGTQSGDSGDGRNWKDEVDPFHIPSDYTWVDATEKKRRMKAKKAKSRRTTARKQSSKNTSSEGGHRPMMDGFEE

SEQ ID NO: 5594 - protein, 633 aa, Zea mays
  unsure (1)..(633): unsure at all Xaa locations
  Clone ID: TF_ZmC16049_2.pep
MDDVSRYAHSPAHLAVLRRDHAALRRLVAALPRLPRAGEVATEEESIAGEAVADAVSAVVDRRDVPRRETPLHLAVRLRDPVAADVLMSAGADWSLQNADGWSALQEAVCTREEAIATIIARHYQPLAWAKWCRRLPRILASISRIRDFYMEITFHFESSVIPFISRIAPSDTYRIWKRGAALRADMTLAGFDGFRIQRSDQTFLFLGDGARPEDAGGKELHPGSLIVLAHKDKEITDALEGAGVQPTESEVAHEVALMSKTNMYRPGIDVTQAELVPHLNWRRQERAEAVGQWKAKVYDMLNVLVTVKSRRVPGAMTDEELFAMDGEEKNGRGAELDAELDEVLTAEERKQLDSALRMGNNEEESEQRCDEGDTGAGHMDEHAAAKDKKGWFGWGGKKGAKGDDKPSKMGSKDETSDPGKQKEKGSGKKKKGGSPAESLKHESEYKKGLRPVLXHELTPDFPLKTDELIPLLDVLANKVKAVRRLRELLTTKLPTGTFPVKIAIPIVPTIRVIVTFTKFEELQPLDEFATPPSSPTQFQDAKTKESEGSGSWYSWVKGGRGTQSSDSGDSRSWKDEVDPFHIPSDYTWVDATEKKRRMKAKKAKSRRGPARKQSSKNTAEGAHRPMMDGFEE

SEQ ID NO: 5595 - protein, 323 aa, Zea mays
  Clone ID: TF_ZmC119_1824.pep
LTLVAKLALNVRDKKGNTALHIATRKWRPQMVQLLLSYESLEINAINIQNETAMDLADKVPYGESKTEIIEWLTEAGAKNARNVGKIDEASELRRTVSDIKHNVQAQLSENAKTNKRVTGIRKELQKLHREAIQNTINSVTMVATLIASIAFVAIFNLPGQYFQDVNSGGDIGEAQIAKLTGFRVFCLLNATALFISLAVVVVQITLVAWETGAQKQVIKIVNKLMWTACLSTGAAFISLAYVVVGPQHAWMAFTVSAIGGPIMIGTLLFLAYLLLRPRFKFGEDRQRRIKRASGSKSFSWSLHDGFSDLEAFSDHEKKIYAL

SEQ ID NO: 5596 - protein, 130 aa, Zea mays
  Clone ID: TF_ZmC145468_1.pep
HAYACLHIACIYGHERFCRDVLALTTNSQQSPAAAPLLVTINADGETPLLAAVASGHVSVALFILGRCREERLSEAILTQDKRGFNALHHAIRNGHRGLALQLVDAEPGLSKAVNKHDESPLFIAVMRNY

SEQ ID NO: 5597 - protein, 105 aa, Zea mays
  Clone ID: TF_ZM4878.C14.o1.fg.pep
MQGRPDYVQVPRQHIIASGRSQWGPRLHPENARLGCGSSLEGLNRPLTDSQASDAELCCICFEQACTIEVQDYGHQMCAACTLALCCHSKSYPATLTPPSLDCPF

SEQ ID NO: 5598 - protein, 762 aa, Zea mays
  Clone ID: TF_ZmC912_2.pep
SGSNTTEPNRGRRERAREHKEARQGSRDRLQDWGRLVGKKGSSSFSSITGRLISAAILSAQFLAAADKSEEQRRCFLSPIPSASCGVVGCVATKGGSPGRGRTPAMAGVDVARHAHSPAHHAVAARDHVALRRVLEALPPARRPEEIRTEADSVAEEARAEAVSAVIDRRDVPGRETPLHLAVRLCDATATEMLMAAGADWSLQNEQGWSALQEAICAREEALARVIVRHYQPLAWAKWCRRLPRVVAAMRRMRDFYMEITFHFESSVIPFISRVAPSDTYRVWKRGANLRADMTLAGFDGFKIQRSDQTILFLGEGSEDGKVPPGSLCMINHKDKEIMNALEGAGAPASEAEVQQEVAAMSQTNIFRPGIDVTQAVLLPQLTWRRQERTEAVGPWKAKVYDMNHVLVSVKSRRVPGAMTDEEFFSSSNDNDTESEGFDDVLTEEEKKQLEAALKMDSPDAGGEDQSDSFAGPRHSCFEPREREIPIEGMSVSGNVESKHDKKGWFSNWGKRAQVSKPERVKKMAPPRSSLCVDEKVSDLLFESPSNAQTRPGRHSVDVVRADDNRRIRERDSRRYVPSAENGHRRKEGSKESEYKKGLRPVLWLSPNFPLRTEELLPLLDILANKVKAIRRLRDLLTTKLPPDTFPVKVAIPVVPTIRVLVTFTKFEELQPLEEFGTPPSSPDKSKSPAVQPPSSSWIQWIKAPYYRQMNLFTAPGPSSRVEDIHHQDPFAIPSDYVWTPPEEKKKKTQENKNRSKKGRNG

SEQ ID NO: 5599 - protein, 225 aa, Zea mays
  Clone ID: TF_ZmC605702_1.pep
MAPLFAESLRARNNRGERGLHEAVRRGNTEAVESLIWMDENVDGGRTSRTPSLVQRVDYQGVSPLYLATTLRRGDIVGILTHPSQNHYSPSFSGPGGKTAMHAAVLAKGDAKVLTKKLLEWTTSKNYPGGARDLICMGDKSGSTPLHLLASEGGASVAELLLSPDARELSWARRLLSKICPCTSPAGNAASADDDDDDTREGGSCTAAALKKTPMAGFPYMSLRR

SEQ ID NO: 5600 - protein, 85 aa, Zea mays
  Clone ID: TF_700102367H1.pep
LKKMLHQQLVPRVVLVEQMKAQRDTAALHGDEQRRLAVVVGGGEQRRRAGTMETRLLRQDLAAEVLVAAESGDVEAGVPFFSCLV

SEQ ID NO: 5601 - protein, 225 aa, Zea mays
  unsure (1)..(225): unsure at all Xaa locations
  Clone ID: TF_ZmC176290_1.pep
YRSSPPSPLNENANAPCDHYPTACAQDLASRPHPLCRRRRPRTPRRWRCCWSWRRRTTSWGSGAPWRATKPQPWTTRVTGTARPPRPPAASACASRRALRPWWPRSTAARRCWRTCCPPRRRRPRAPRPRTAPRRSTSPRPAARRAPSRPRTCSWPLARPPTRSLSRASAPATSSRAPTPXPTGTARSACSSSPPRRRRRPRPRSPPRXHRRRRELRRRSRRRST

SEQ ID NO: 5602 - protein, 68 aa, Zea mays
  Clone ID: TF_701171021H1.pep
QQKSHLFFSYPLQSNQQGKKSHLSTGLLCLFFSVQTPLMLAAMHGKTDCVLKLLQAGANVSGNLLLLF

SEQ ID NO: 5603 - protein, 249 aa, Zea mays
  Clone ID: TF_LIB4829-068-R1-N1-B10.pep
MSLQDEELGQQLYLQMRQRQQIALRAQQMAASQRQQAVNQMGGQMGNTMNQMNATTIHQMGSPFDDIPVQAPEDNNILYQRNVSPEVASFFSACKAGDMSTIQSIVTSQPRSPVFLHRGLINALESGNVDVARYLLQSGAPISRQTPGIVLKAPADRQIALFEALAEHGWTVNTPSYYGEVLLTRLIRSNNEHLIDWFLAQGANPNLGRQHDQRDRLGGPDTNSCQALELAASHGSVNLVQKLLAGAEI

SEQ ID NO: 5604 - protein, 254 aa, Zea mays
  Clone ID: TF_ZmC885_2.pep
EGKVPLWEALCEKHNAVIELLVESGAELSSGDTALYACIAVEENDAELLLEHGADVDKQDSNGWSPRDLADQQGHDDIQALFKSRKAHRKHASNGRVAPMLIGRFNSEPSMPDMSHENARVRSEVVPQKLLRKRVSFQNSLFGVISSSHAHQDTGRLLSKGLAGTEGPNCRHDSLIRVTISCPEKGGNAAGKLVRLPRSMAELLELGAKKFGIKPGKVLTVGGAEIDEVELIRDGDHILLVSDEWVPDVEQIRP

SEQ ID NO: 5605 - protein, 274 aa, Zea mays
  Clone ID: TF_ZmC353_2.pep
TSETDTSLAPFNMWRFRNLGVFAMEREWCAVIKMLLDFLFIGLVDVGSRSAEEMVLSENLLHAAVRRKSVNMVRFLLRYKPNKNSKGTAQAYLFRPDALGPSKITPLHIAAATSDAEDVLDALTHDPGLIGISAWSNARDETGFTPEDYARQRGNGAYLNLVQKKIDKHLGEGHVVLGVPSSICPVITDGVKPGDVSLEICRAMSASVPGCLLCSRQARMHPSSTARTFLYRPAMLTVMGVAVVCVCVGILLHTFPRVYAAPTFRWELLERGPM

SEQ ID NO: 5606 - protein, 110 aa, Zea mays
  unsure (1)..(110): unsure at all Xaa locations
  Clone ID: TF_jC-zmX700157144b1.pep
TPARAPARNPGGDTTRAFSLHMGKQEAELTLRGNSAASYGELTSCKXLIRAVADGKDTGYNDRSALHFAGCXRYEGVAQVLINQGVDMDHTDQLWNTPLLEAAKQGHQRG

SEQ ID NO: 5607 - protein, 99 aa, Zea mays
  Clone ID: TF_700614359H1.pep
GNTPLHLACEQGCLASVGVLTQSCTTPHLHSILKATNYNGHTCLHLASIHGYLGIVELLVSLGADVNAQEPCNGRTALHLAVDLQNPDLVSLLLKCGAD

SEQ ID NO: 5608 - protein, 123 aa, Zea mays
  Clone ID: TF_LIB4171-014-R1-L1-H4.pep
LAPSLVFPAQCKCNRPTGDGGYLFRFKVSKADSLSGRTALHVAAAGGHVRCARLLLAGAGSGRSKLVNRAASGGGGGVTALHLAALHGHADCVHLLVDERADVAARTLPCAAPSMACGGAGSA

SEQ ID NO: 5609 - protein, 324 aa, Zea mays
  unsure (1)..(324): unsure at all Xaa locations
  Clone ID: TF_ZmC17166_2.pep
MAGDWQDLGQAAAIGLLFAFLLAKLISTVIAFKEDNLRITRSPPSSPTAAAPAPATSPLPSQHDAAIGSGSDSDWEGVESTELDEEFSAASAFVAASAASGTSVPEEAQLRLYGLYKIATEGPCTGPQPSALKLKARAKWNAWHKLGAMPTEEAMQEYITIVQELFPNWDAGTSAKRKDEESITSASASKGPMGPVFSSLMYEEDEGNDSELADIHVLAREGATEDIVKFLAAGVXVNMRDTEGRSPLHWAVDRGHLSAVEVLANANADLNAKDNEGQTALHYAAVCEREDIAELLVKHHADLRITDEDGNTAHDLCPSRAGLL

SEQ ID NO: 5610 - protein, 153 aa, Zea mays
  Clone ID: TF_ZmC2253_1.pep
LVELLVEQGAAVNMQNFVGETALFIASSLGLNLICLFLLENGGDTRISTLEGSSPLHAASACGHLSVIKSLVSHGAFVNSTDEEGDTPLHYAVREGKKEAVGLLVQLGAQLIKNEDLESPLDLAEEFDETWMVDLLSNHFPSLRSDSEHGFCF

SEQ ID NO: 5611 - protein, 468 aa, Zea mays
  unsure (1)..(468): unsure at all Xaa locations
  Clone ID: TF_ZmC54251_2.pep
GLYVAAEKGHAEVVREILRSVXVQTAGIKASNSFDAFHIAAKQGHLEVLKEMLQALPALAMTTNSVNATALDTAAIQGHVDIVNLLLETDASLARITRNNGKTVLHSAARMGHVEVVRSLLNKDPRIGLRTDKKGQTALHMASKAQNAEIVVELLKPDVSVIHIEDNKGNRPLHVATRKGNIIIVQTLLSVEGIDVNAVNRSGETAFAIAEKMDSVELVNILKEAGGEAAKQHKXHPPNSAKQLKETVSDIRHDVQSQFKQTRQTKMQVNQIKKRLEKLHIGGLNNAINSNTVVAVLIATVAFAAIFTVPGNFVEELSQAPPGMSLGQAYVASNPAFIVFLVFDALALFISLAVVVVQTSLIVVERGAKKRMVFVMNKLMWLACLFISVAFIALTYVVVGRDDWWLAWCTMGIGAAIMLTTLGSMCYCIVAHRQCFVSPEAAPWHAAPHQSSSTKGTGGPPGRPRGTQ

SEQ ID NO: 5612 - protein, 244 aa, Zea mays
  Clone ID: TF_ZmC36749_1.pep
MAAAMDVDEAGGEERRPSEKELFRAAESGDAAAFASLAPADLSLRNEDGRSLLHVAAAAGHPQVVLALAQCGGDAAASVLNAQDEEGWAPIHSAASSGNSQIVDILLERGADVNLVTDGGRTALHYAASKGRLNIAEKLIAHGANVNKKDKFGCTPLHRAASTGNAELCEFLIEEGAEVDAVDKTGQTPLTHAVICENKGVALLLIRHGADVDVEDKEGYTALGRASNSFRPALIDAAKAMLEG

SEQ ID NO: 5613 - protein, 222 aa, Zea mays
  Clone ID: TF_LIB4756-028-Q1-K1-G7.pep
MALPPPTIDLLLNLIDTRPQSILTSLAQHPQVSSARDAHGYSLVHAAASYNQLAVLRDLIQKFNADVNILDEDGETPLFAAEKIEVAKCLVEELGADTSIRNGDGQTAEDKIGEEEGEAHGVYQYLRSRRTGSEPIPAGLVETESVHPPPPLPGGVKVNMGTMEEDAAEAPDPEIRRRIEELAARDDYNSEEVQSQLRELVQDVVSGIGGEDGGRSVKRRVD

SEQ ID NO: 5614 - protein, 153 aa, Zea mays
  Clone ID: TF_LIB5117-063-A1-PF1-D9.pep
MEEELSQMEPGAKVTLQRQASSGSLTQGPSGELRRQTSLESSPRSGRGGNRHLFGRQSSMDPNRRRGRSQSPVGSQADQDLAVPDNLDSTMQLLFLACQGDAPGVEALLRGGVDVNSINLDGRTALHVAACEGHREVVSVLLDWEANIDARDR

SEQ ID NO: 5615 - protein, 198 aa, Zea mays
  Clone ID: TF_LIB3689-243-D10_FLI.pep
TSTLPSINSLARWFGEPVRAAILQTEAFLTNAKGYPCLSKRHQSLLTGFFKHSVQVIIYGRSNHNVFPSYAEDSRVRHALTPYLEYIAYLYQKMDPLPEQERIEINYRDFLQSPLQPLMDNLEAQTYETFEKDVVKYTQPENFQSKMFGEQDAEKVKSCNDKAKKMFPKVPSKISFNIVLSQLLKTMMISRNCCLPSL

SEQ ID NO: 5616 - protein, 179 aa, Zea mays
  Clone ID: TF_ZmC14231_3.pep
TSTLPSINSLARWFGEPVRAAILQTEAFLTNAKGYPCLSKRHQSLLTGFFKHSVQVIIYGRSNHNVFPSYAEDSRVRHALTPYLEYIAYLYQKMDPLPEQERIEINYRDFLQSPLQPLMDNLEAQTYETFEKDVVKYTQDSRRIFKVKCSVNRMQKKLKAATIRQKKCSQRCPQRSAST

SEQ ID NO: 5617 - protein, 707 aa, Zea mays
  Clone ID: TF_ZmC6144_2.pep
MERSCYFPLRWESTGDQWWYASPIDWAAADGHYDIVRQLLHLDPNLLIKLTSLRRIRRLEALWDDDARFADAARNRASVARSLLLECECRNHRPAAPGAGENTLLRAGYGGWVLYAAASAGDAAFVRELLERDPLLVFGEGEYGVTDMFYAAARGGSADVFRLLLDHAMSPRCSTSCRNGEASARRSSVFRLEMMSRAVHAAARGGSVEMLRELLEESSVSTYLDIRGSTVLHAAAGRGQLQVVKYLVASFDIINSTDNHGNTALHVAAYRGHQPVVEALVAASPSTLSVVNNAGDTFLHSAVTGFRTPGFRRLDRQLELMRYLIRERTADIQKIINLRNDAGLTALHLAVVGCAHPDLVELLMATPSIDLNAEDANGMTALALLKQQLRSATSDRLIKQIVSAGGVLNSSILRTRSAIASQIKMQGGIASSPGTTFKVSDAEIFLFSGMGAAESLRPSSCSSNGKDDDPTHADADCAENRGSSEKRLSSASRAKDRLKMMLRWPRHKDKTPKKSEDSSPLGSISRLNEHGAETPAPLRQKFTKTTALNGKRTLAVKSSTPSSSSTKKKLNTKLIHGIMEAMPQLAPSTARSASPTDTFLRSSVSSTPQPLAKLKDICLDDEISMVTPPAGRLKDSDDAMEDPSCSNNSSMDDGCGAGTAESAARKHGCGNGRLINICFGAQGLTVEDSASGQQTSKMFKQQCLRVS

SEQ ID NO: 5618 - protein, 211 aa, Zea mays
  unsure (1)..(211): unsure at all Xaa locations
  Clone ID: TF_ZmC621414_1.pep
MGHVLSCSRDGADLFRAVQHGDLDALLAVDPELARRATTIYDRLSLLHIAAANGQLQVLSMLLFDDGGAGGNVDVLNRKKQTPLMLAAMHGRTDCVLSLLDAGANILMFDSVHARTCLHHAAYYGHAHCLQAILSAAKTTPVADSWGFARFVNVRDEHGATPLHLAARQGRXQCVRHLLHAGAIVSAPTASYGFPGSTALHLAARRGKLDC

SEQ ID NO: 5619 - protein, 299 aa, Zea mays
  Clone ID: TF_ZmC35644_1.pep
MLVWAATASPPSTPSAVPFAPPHRAAAPRPPPPLCRSLPGLLCAGLIPPPRAAASDGDVFWEEPDDGSGSDYEDDGPEQRRALRFPSSSPSSRLEASAQQEQDLRREIELLLTPEEKATLDQHETPDVTRISSPKWHPLHSYALALQIPLMDKLLDSGVDINLVDRDGFTSLHKAVIGKKEAVISHLLRKGANPHVRDRDGATPLHYAVQAGALQTVKLLIKYKVDVNVADNDGWTPLHLAIQSRNRDIAKVLLVNGADKTRRTKDGRTALDLSLCFGRDFKSYDLAKLVKLIPANRGA

SEQ ID NO: 5620 - protein, 58 aa, Zea mays
  unsure (1)..(58): unsure at all Xaa locations
  Clone ID: TF_ZmC5306_3.pep
TPLHHCILKGRHRHAXLLLSRGADSQAMDRDGRTALQYAINGGTSDEDILALLQDHSR

SEQ ID NO: 5621 - protein, 241 aa, Zea mays
  unsure (1)..(241): unsure at all Xaa locations
  Clone ID: TF_ZmC154413_1.pep
IRHEGRGSAELVEAPVAYQENVDILDKDEDPPIVFALAAGSPRCVRALVGRSASINSRLREGLGPTLAHVCAHHGQPECMQELLMAGADPNAVDGEGESVLHIAVARRYTDCAIAILENGGCRSMGISNSQHKTPLHLCVETWNTAVVRRWVEVASLEDIAEAIDVPSPVGTALCMAAALKKEHEKEGREVVRILLAAGADPTAQDDPHCRTALHTAXMINDVELXKIILESRVDVNIRNA

SEQ ID NO: 5622 - protein, 519 aa, Zea mays
  unsure (1)..(519): unsure at all Xaa locations
  Clone ID: TF_ZmC11952_1.pep
MGLQQSKEELLYQQVNYGNVDGIRTLRGQGAGLEWIDKEGKTPLMLACMRPDLFDVAKVLIELGANVNAYRPGSHCGTALHHAAKKGLQQTVHLLLSHGANPFIPNDDCNTALELAREKGHVNVVRAIEGRLCLFCGWMRENYAPAFLDAIAPQFMTRKXFGLVVLPREVRTPTRPLKLEIAIYPELQASKPRSVLKLWKCQIEQPKLNQADPSIIIFDKGTKTRYKILPAYEGDKQQLQWFYNACCGMAQVLNTAPVAPANLPMPNPAPAISSVAPSEQSAPSKEDVELAMAINASIQSAIAEGVSVPNVQPNASTPNNNGWAAPPSNSHNGWGPPATPAPSKTSGQSQVRVDAPSSSTYNGWDVPGTSSSQSSSKPHQTQTNPPPVLIPQEALQALPTPTAPPFAEETFYNGPVHYPSIDSTPVDVTMPATTGGGSTTVIATAAPTEQLENEADASDSGKTPSGTCVICLDAPVEGACIPCGHMAGCMSCLKDIESKKWGCPICRATINQVVRLYAV

SEQ ID NO: 5623 - protein, 175 aa, Zea mays
  Clone ID: TF_ZmC16578_2.pep
MGHGASCSRPSEEVDFFGAAQCGDTARLAAALRSRPTLLARTTLFDRLSALHIAAAHGHLQVVSLALDLCVHPDVVNRHKQTALMLAAMHGKTDCVRRLLDAGANIVMFDSSHRRTCLHYAAYYGHADCLRTILSAAKSAPVSESWLAFPSPRRHRRLAAAALWPLANAFSAVEV

SEQ ID NO: 5624 - protein, 153 aa, Zea mays
  Clone ID: TF_ZmC1087_1.pep
MGVELAQPTAAAAAVTTAEQAQDLIDAARYDDLEDVVALFSAGVSLDSTDSQGRTALHMASANGHLAVVEYLIQNGANVNATNMEKNTPLHWACLNGRIEVIRALISAGASVSALNSHEKTPMDEAVTTGKMDVIDAIGAAVAQAELDAVTVS

SEQ ID NO: 5625 - protein, 267 aa, Zea mays
  Clone ID: TF_ZmC586314_1.pep
MGTRALPLPCQLELLLGEDRGRWPPEARFIEAAHLGDVRRIKEIAKELDVRGHGIPVTVASTSYMGMNALHAAGGRGRLPAYQYLVEEVKMDINKPDTSQDYSPVEHAVTYGNLPAVRYLLDHGADLHQQRSGNITLLHSAAARGHSEIVKYLLSRGVDIDAQSIIGTPLAFAAQKGHATVVKILLQHNADPNKGTLILGPLDMALHKSNVSCAKLLIQGGANVSGAGPCYNPLVTAAEKGLTEAIKCLLEAGANPNVLLTGLVDCQ

SEQ ID NO: 5626 - protein, 191 aa, Zea mays
  Clone ID: TF_LIB4756-001-QB-K6-H8.pep
MADHHDGASPRELVLEACRRNNTELLEETLADLNAAAKKSDKKPADYVADILNNARDGLGNGCLHIAATYGSFEVIDMLLDQEGLEIDEIDRMEQDTPLHKAVRYVNSLEKDVWPHGQSIVAMLLDAGCDPRIRNKAKLKPVELVDPRNTELKSMLQKGEFAIQAGGDIVEDDDDGHAGSGSESRCSNNIT

SEQ ID NO: 5627 - protein, 112 aa, Zea mays
  unsure (1)..(112): unsure at all Xaa locations
  Clone ID: TF_uC-zmrob73012e01b1.pep
WGRVGSATGRWLRRCCCSDAHVYKVDSLSGRTVLHVAAAGGHVRCARLLLAGAGSGRSKLGNRAASGGGGGVTALHLAALHGHSCXVHLLVDXRAFVVSRTLSCAVPTMAFV

SEQ ID NO: 5628 - protein, 1080 aa, Zea mays
  unsure (1)..(1080): unsure at all Xaa locations
  Clone ID: TF_ZmC6921_1.pep
METSISPPGTSKQSAVRKPSPGGSLKDLCLVSKQGSIAEVESALALLKKSGGNIDGRNAFGLSALHLATWRNHLPIVRRLLDAGADPDARDGESGWSSLHRALHFGHLCIAGVLLQFGASLALEDTKGRTPVDLISCPVSQANGDFPDAVATEVFSWGSGTNYQLGTGNAHIQKLPCKVEALHGSYIKTVAASKFHSVAVSSNGELYTWGFGRGGRLGHPDIHSGQTTAVITPRQVTVGLGRKRVNAVAAAKHHTVIATELGELFTWGSNREGQLGYPSVDTQPTPRRVGSLKQRIISVAAANKHSAAVADTGEVFTWGCNKEGQLGYGTSNSASNCIPRMVEYLKGKVLRGVSAAKYHTIVLGADGEVFTWGHRLVTPRRVVVARCLKKGGNTNLKFHRMERLQVISVAAGTTHNTALTADGALFYWVSSDPDLKCQQIFSMCGRNIVNISAGKYWTAVATSTGDVFMWDAKKRKDETPIFTRVHGVKRATFVCVGETHMLVLSSIYHPEYPPKPKSQGLKSMLEWNGGTPPLGEDILFDEVXSNSGLSGSSGEMSKGRPSSTSGGEKRPWRIVTDGTHTPPLXHADSLEAKELKKHCEDLAIRNLDYIFTVGASSIMNASSEILVNLEKLLDEKSSEPWSQHRLPTMTATYPAVIDSDVEEDEAREFPKTRKCGKSASRPSAMSSDDSFLQKDCTAEQAVSKQIRALRKKLQQIEILEAKQLAGHQLDSQQVAKLESRAALEGELAELGIPSEIYSTSSACPAEGRTNRKPEVSKKQKRKNKQSTQTPSVKNEPGQQIPITELQVLQVNVSAEKXEAYAADPIKPMEAAAFSNTKDTASPPEKKPSQPTPSKKKNRKGGLSLFLSGALDDTPKPSLPAPAVPATPKPEGPAWGGVKITKGPASLRDIQTEQSRTNEPASAKAKDRHENSPDSAGRATRLSSFIPDARSSPVAVVAPARAAAAPPSSEGDRSTPPWSSSATSPNVSQPSLRDIQQMQQKRHHGGVSHSPKTQTSGFSIPPHSGAPEAAGGGGVKDNVPNRWFRPETDAPSSIRSIQIEEQAMKDFRRFYSSVRIVKPQV

SEQ ID NO: 5629 - protein, 187 aa, Zea mays
  Clone ID: TF_LIB5116-047-A1-PF1-F2.pep
MDGVSTEPRHPLLQAVLDGDLRLLKEMAGVVAADVGVWARALTVAVMEGRLDICRCLVEDHGVDVNQRTFTGDTPLAISATYGTPAITRYLLDRGADPTLAGALWPPLHAAASFGQCEIVELLLSTGIDVDHFDSEYGTALHVAATNAQDGSMNILLQHRADPNKVYRLDSTPLRLAMISESLECVK

SEQ ID NO: 5630 - protein, 471 aa, Zea mays
  Clone ID: TF_ZmC127800_1.pep
MESKPHAPASGLATPRFRLGKQSSLAPERGGEGGGAGSADGSAEANGVMSFQLMYLAHEGSAEGIRELLDGGVDPNFRDSDGRTALHIAACEGHAEVVELLLQSGAEAAVEDQWGSTPLADAMHYQNHDVIKIFEKHGSKHKIAPMHVNNVREVPEYEIDPAELDFSNGNDLSKGTFRKATWRGIPVAVKKLDDDLIADGSKVQAFRDELDVLQLIRHPNVVQFLGAVTQSNPMMIVMEFMRKGDLRTHLSKKGALPPSYAVKLALDIARGMNYLHEHKPQAIIHRDLEPSNILRDDTGHLKVADFDLCKMLKWRRKVREDKAVTSPGNACKYVAPEVLRNEEYDTKVDVFSFALILQEMIEGCLPYYDKKNDEIEKAHNSKERPPFRAPPKHYAHGLRELIEQCWSENSADRPDFRVIINRLSAIQNEIAHRNRWKARPLKCFLSIEGMWKKDRNEGSTTRSSRSSRSYF

SEQ ID NO: 5631 - protein, 255 aa, Zea mays
  Clone ID: TF_ZmC9440_1.pep
MGRRHSGGGGGRGRGRGRGRGRDEEEDLPLHKAARSGDAAAVESVCESNPLAVNSRDRLSRTPLHLAAWAGHVDVVRCLCKHKADVGAAAMDDTAALHFASQKGHVEVARELLASGASVKAKNRKGFTALHFAAQNSHLDLVKYLVKKGVDVTAKTKGGQTALHVAEDDEVRAFLKECEQSLKKGAELPSEKDDSAEKEGDSKSSGEVMKDEEDAEQGEKRKSELVGASSLSGVKKAKVSLGHLVCENDMDEEEE

SEQ ID NO: 5632 - protein, 562 aa, Zea mays
  Clone ID: TF_ZmC19180_1.pep
MEKQPSVRHGALEKLKSFRGMEKQRSFKFLSMEKQQSFKRNKDSPGKRGDTALHLAARAGSVAHVQKILAECDPELVVELAGRTNQDGETALYVSAEKGHVEVVCEILKASDVQSAGIKASNSFDAFHIAAKQGHLDVLKELLHAFPSLAMTTNSVNATALDTAATQGHIDIVNLLLETDASLARIAKNNGKTVLHSAARMGHVEVVTALLNKDPGLGFRTDKKGQTALHMASKGQNAEILLELLKPDVSVIHVEDSKGNRPLHVATRKGNTIMVQTLISVEGIEINAVNRAGETAFAIADKQGNEELVNILREVGGGTAKEQVNPPNPAKQLKQTVSDIRHDVQSQMKQTRQTKMQFQKIKKRIQKLHIGGLNNAINSNTVVAVLIATVAFAAIFQLPGNFLEDMTQAPDPDMTLGQALIASDPAFIIFLVFDALALFISLAVVVVQTSLIVVEQKAKKKMVFVINKLMWLACLCISAAFIALTYVVVGRDDEWLAWCTMAIGTVTMVATVGSMCYCVVAHRMEEKSMRKIRRTSMSQSWSISIDSEAELMNSEYKKMYAL

SEQ ID NO: 5633 - protein, 456 aa, Zea mays
  unsure (1)..(456): unsure at all Xaa locations
  Clone ID: TF_ZmC2241_1.pep
MADATAALSARSKVQAFLEAARAGDLQSLKNLVAALDEDGTGAASVAAAVRDANKRTALHFAAIGCRTDVCEFLIGELGLPVDPKDDDGETPLIHATRQGHLDTVKYLLDHGADPSLATSLGATALHHAAGIGNTELMKLLLSKGVDVESESDAGTPLVWAAGHGNQDAVKLLLQHNAKLESXSRWLPTSLLSAVAAGSLPCLEVLIEAGANPNVKAGGATPLHIAADSGNIEVIKCLLKAGADPNTCDDDELKPVQVAAWRNNREAVELLLPLTSPIPGVSNWNVDGIIEHMLPKEYEEKSQLKEAASLKSGLTQTIEVSSEAKKRSLEAKSRGDDAFRRKDYLVAVDAYTQATELDPTDATVLSNRSLCWLRAGQAERALEDAKACRALRPDWAKACYREGAAHRLLQRFEEAANAFYEGVQLEPENTELVNAFREAIEAGRKFHGVNTPNSTQ

SEQ ID NO: 5634 - protein, 415 aa, Zea mays
  unsure (1)..(415): unsure at all Xaa locations
  Clone ID: TF_ZmC32119_4.pep
EKQVKEKLYYWLIHKIHDDGKGPNVLGKEGQGAIHLVAALGYDWAIKPIVAAGVNINFRDIRGWTALHWAACCGRERTVGALIASGAASGALTDPTQQYPSGRTPADLASENGHKGIAGFLAESALTSHLSALTLKESPSGNVEEICGLTAAEGFAASSSSQLACVNSQEESLKDSLGAVRKSTQAAARIFQAFRVESFHIRLEIEYGDDDCGLSDERTLSLVSLRNPKSGHGDSHSAAVRIQNKFRGWKGRKEFMLIRQKIVKIQAHVRGHQVRKNYRKVVWSVGIVEKVILRWRRKGRGLRGFQPEKQLEGPSWQIQPAKAEAEDEYDFLXDGRKQATGRLDRALARVRSMNQYPEARDQFRRLQACVNSLRESQAMQDRMMADSPGPDGGDFMTELEELCRDDGDAPMSTIS

SEQ ID NO: 5635 - protein, 175 aa, Zea mays
  Clone ID: TF_LIB4171-023-R1-L1-H6.pep
MDGEGERRMVDSEGQIHMDPALYMAATQGKVSILKQLADPEEPSVLSATTPQLNTALHLAAVHGHAEFAGEVLGMNEELLVTRNGDGDTPLHLAAKAGKLEVARLLVNRAIAWPEDKKSPLIMTNKAGNTALHEAVQYRKGALGGGPARRRPQPAARPQRADGVPAAHGPPRGPR

SEQ ID NO: 5636 - protein, 161 aa, Zea mays
  unsure (1)..(161): unsure at all Xaa locations
  Clone ID: TF_LIB4704-004-R1-K1-A6.pep
MNGMPISASSAASVDSGAVAAGTPMKNATAADALAEMARHLTVDTEDTFAGLLELAADDDAEGLRLALERAPPAAADEAGLWYGRRKVLEHRTPLMVAATYGSLAALRLLVSISYVDVNRRSGTDGTTALHCAXSGGSRTAVESVKLLLGAGADANTMDDA

SEQ ID NO: 5637 - protein, 232 aa, Zea mays
  Clone ID: TF_ZmC19180_3.pep
MEKQSSTRHGALEKLKSFRGIEKQRSFKFLSMEKQQSFKRNKDSPGKRGDTALHLAARAGSVAHVQRILAECDPELLVELAARQNQDGETALYVSAEKGHVEVVCEILKASDVQSAGIKASNSFDAFHIAAKQGHLALDTAATQGHVDIVNLLLETDASLARIARNNGKTVLHSAARMGHVEVVTALLNKDPGIGFRTDKKGQTALHMASKGQNAEILLGVVKPDISVIHVE

SEQ ID NO: 5638 - protein, 149 aa, Zea mays
  Clone ID: TF_LIB5116-069-A1-PF1-E4.pep
MVRPRHVFAYADGTPQLELLCAATTGDLAHLERMVRKLDGGRGRLAEAVEAVKDHGAGALHLAASGQNLEVCEYLVEDVGVNVDAVDEAGRTPLVWAIIVKGGQVDIVKYLLDHGANPDNADRTGITPLHEAVERGHCEVVELLLSRGP

SEQ ID NO: 5639 - protein, 546 aa, Zea mays
  Clone ID: TF_ZmC13193_1.pep
ILEHGADINAVDHTGQTALHWSAVRGHIQVAELLLKEGAKVDATDLYGYQATHVAAQYGQTAFIYHIVAKWNADPDIPDNDGRSPLHWAAYKGFADSIRLLLFLDAYRGRQDKEGCTPLHWAAIRGNLEACTVLVQVGKKDDLMVKDKTGLTPAQLAADKNHRQVAFFLDNARRVHGKGCGANTRFGKLSKLGLAPLLWCTIIGMVITYTHSVISGQYAMTTKAPFGKFAWSGVFLATAGLVMFYKCSRKDPGYININARGSQNQRDDEPLLKMELENPALLSGNWSQLCITCKIVRPVRSKHCSTCDRCVEQFDHHCPWVSNCIGKKNKWEFFMFLTLEVFAMIITGSAAIIRIVRDPNSPSSFGAWIHYSAFQHPGVVSFLALDCFLFFGVAVLTVVQASQIARNITTNEMANSMRYAYLRGPGGRFRNPYDHGIRKNCSDFLLNGYNEDTERLEQTLPTDEEMGMIQMTSAVSQQNGDNHLHHGNGTDHSCAVSQANSKPHSQVGSSQCCDHSKRTDRTPLGLGLGLGRNSASRQYVRSLIPL

SEQ ID NO: 5640 - protein, 167 aa, Zea mays
  Clone ID: TF_ZmC10492_3.pep
PPGKTPLHVAAEMVCPDMVAVLLDHHADPNVRTVEGVTPLDILRTLTSDFLFKGAVPGLAHVEPNKLRLCLELVQSAAMVMSREDAHTAVNPAAAPMYGEPSGGGAVYSASGTSSSMVNLSLDNRMVYLNLGMDAQFGKMDDGGDGDDGGGRGQGGPPSLFSPHGYH

SEQ ID NO: 5641 - protein, 227 aa, Zea mays
  unsure (1)..(227): unsure at all Xaa locations
  Clone ID: TF_LIB4171-052-R1-L1-H12.pep
NSARGSTPPGTSPPPTPARTRHTMASLEAAETSPPSTPTTSASPCPTPRPLATAPPTMGAALLRAARSGDERQLVKALLADPAAPDLETAATAGGNTLLHVAAAGGHVDLALLLLRRAPRLLTARNAALDTPLHLAARAGAHKVVALLAASSSSSSSSPACSLRALTRATNRRGETALHDAVRXGHEAAARALATADPGLGGMCGGAGRRRFTCVGGWVLXDAAHAL

SEQ ID NO: 5642 - protein, 326 aa, Zea mays
  Clone ID: TF_ZmC10492_1.pep
LPKQLAGMVEKASIEDVMKVLMASRKQDLHQLWTTCSHLVAKSGLPPEVLAKHLPMDVVSKIDELRLKSSLSRRSPFLAHHHHPAPGGGMEASSAADIDDHHKIRRMRRALDSSDVELVKLMVMGEGLNLDEALALHYAVENCSREVVKALLELGAADVNHTAGPAGKTPLHVAAEMVCPDMVAVLLDHHADPNVRTVEGVTPLDILRTLTSDLLFKGAVPGLAHIEPNKLRLCLELVQSAAMVMSREDAHTAVNAAPMYGEPSGGGGCGVYSASGTSSTSLVNLNLDNRMVYLNLGMDAQFGKMGDGDDGGGRGPSSLFSPHGYH

SEQ ID NO: 5643 - protein, 431 aa, Zea mays
  Clone ID: TF_ZmC12227_1.pep
MTPPSIFHHHRCLVSLPSASPTWTSSRRLIHQLAKPTVLSLHLRPVLSSSFAVAAVGDDEDVVVGDCLVFDDDAFEEPDLDLPSSPWPSASASRHGRRSEAGESDSLVPERWRHAEEEINLTKKDKRRIAHGLRFGSRLERRAPPAVAAPDEFRAYRKGMLSAEREHVSHVYRGPLERTPPPEVKEHPPPEPEPGTRVAPRNPRMGMGVGTLDDIDEFFRSREYVQDEMEDSKSPKGRQKLFSNEEKILLNKRVPDLETATSSKWLPLHTLAASGDFYLLNSLLKHNVDINALDKDGLPAIHKAILSKKAAIINYLLRNSANPFIQDKDGATLMHYAVQTACSQTIKTLLLYNVDINRPDDYGWTPLHLAVQTQRTDIVKLLLIKGADRTIRTQDGLTPLELCLRLGHDVRTYELIKLLKSFRGQKQHDLV

SEQ ID NO: 5644 - protein, 169 aa, Zea mays
  Clone ID: TF_LIB3958-013-Q1-N6-A12.pep
EAIKGGDVKGVKKLLTQGVDSNYCDKQGFTLLHLAALFNQTEIALILMDHGANVESKNGQGVTSSAVTLPWHPPTLSGARQVVRMAGLHGYVGRGGASLPRVPRFVSLGSSCGATGGLLHHRANHLRRKLGLVAVLVVFTTVTGVVIIGPATGCNRGSIYTVENLYYPI

SEQ ID NO: 5645 - protein, 83 aa, Zea mays
  unsure (1)..(83): unsure at all Xaa locations
  Clone ID: TF_700344979H1.pep
RCTGLPPEDTCLPSSCWSPRGPRWIRGTPWASHPCITPLGKATWRLPAACWTGVPRWMLPAGSARPPYTWLQSEGXGVPWGFC

SEQ ID NO: 5646 - protein, 145 aa, Zea mays
  Clone ID: TF_LIB5116-012-A1-PF1-A2.pep
MGMQQSKEELLYQQVNYGNIEGIRNLRAQGAGVEWIDKEGKTPLMVASMRPDLLNVAKALIELGANVNAYRPGSHAGTALHHAAKKGLDPTVHLLLSHGANPFITDDDCNTALDLAREKGHVNVVRAIEGRISLFSGWMREKYGP

SEQ ID NO: 5647 - protein, 141 aa, Zea mays
  Clone ID: TF_ZmC119_1900.pep
HLSKESCTLLSWGCDLYIVKDHLDVVNAILDTDDSCIRIVRKNGKTSLHTAARIGYHRIVKALIERDPGIVPIKDRKGQTALHMAVKGKNTDVVEELLMADVSILNVRDKKGNTALHIATWKWENFGIMKHRRRGFDETEA

SEQ ID NO: 5648 - protein, 801 aa, Zea mays
  Clone ID: TF_ZmC9687_1.pep
MNVIKMLLMGNVDVNEADSEGNTALHWCLSGASCTKEPRIVWLLLKNGARVFQGNKLGLTPVHSAAAKGNYKALQSLLLHAQDCVDIPTKTKETPLFFAVKNGSVDCAKLLLRFGADTKARNLRKQRPIDVATSQDMRFILSSANVLLFSGNHNSPQKNRVMRKEIYKELGDEFDDFDKDSCDESYTGLKTSVGQRDFCSSNLSAQGPKSKSQYVPKQAQGSKFVPRNNHWPKHDYTRKIFVGGLPPSVDSEYLIEFFNAEFGPVEEAVVIGIPIGNRVQSRGFGFVKFEREEDMISAKEAHHVYMLGKRVEVKDAVARAYLPLEDQRYTSLRQFIKERPKIHRVLDGELTEEHNIQKRRPLPEKCLPSWFAGFRKWLPGFLEDETARLRGERYPLSSLKGDFRATCRMELDHTALGYPKLSDFIRSLPGICRMCVVPVGSGPATHMVLLPPLSRPKYVPLLEPCSFDHDELAESVSDQHSPRSPLNTNIADDSPRNTDSQQGDDACSETNVQIQQVDDACSETCVQSQHDYGKSQQDGSSSDNGSLLDDIPASTTKLDLIESVTSVKPALIEPVLPRKPDLIDSVPPSKPDLVECVPPRPKLIESGFLPQKNESGPVQKPNLLGFGPSRNLELIESRPSACFIDSPFERTAVTPSSCEGEMRFSFFQSQWDKYLAPYPRSDSCIICRSCEAGMQLVPCFHKICVACMMRCNVRACMVCGTSVSGVKSSPAVDATYRYMGLTERVLDLRCQLMVVCRGAEAIVRCSPCMHTIACRGCFLASVTLLKSCTTCGCMVEHFKIV

SEQ ID NO: 5649 - protein, 243 aa, Zea mays
  Clone ID: TF_ZmC16077_1.pep
MGFLSLVGNSFGCSASGERLVSAARDGDLQEARALLQYNPRLARYSTFGGRNSPLHYAAAQGHHEIVSLLLESGVEINLRNYRGQTALMQACQYGHWEVVQTLILFNANVHRTDYLNGGTALHFAALHGHARCLRLVLADYVPSVPNFCTLVNHKSSEEDSAADFDHDALVKMVNQKADGGLTPLHMAALNGHVECVQLLLDLGASVSEVTIEDGTTIDLIGITFAFLVAYSCCKCLTLVRTL

SEQ ID NO: 5650 - protein, 412 aa, Zea mays
  unsure (1)..(412): unsure at all Xaa locations
  Clone ID: TF_ZmC30397_1.pep
RPGADRQGQFAENLIKGNAYXWLLNKVGMGGKGPSVLDDEGQGVLHLAAALGYDWAIRPTLAAGVNINFRDIHGWTALHWAAFCGRESTVVALIALGAAPGALTDPTPDFPGSTPADLASSNGQKGISGFLAECSLTSHLQVLNLKEANMAQISGLPGIGDVTERDSLQPPSGDSLGPVRNATQAAARIYQVFRVQSFQRKQAAQYEDKGGMSDERALSLLSVKPPKSGQLDPLHSAATRIQNKFRGWKGRKEFLLIRQRIVKIQAHVRGHQVRKHYRKIVWSVGIVEKVILRWRRRGAGLRGFRSQEGSVESSSGGTSSSSIQNKSSGDDYDFLQEGRKQTEERLQKALARVKSMAQYPEARDQYQRIFTVVSKMQESQAMQEKMPEESAEMDMSEFKELWDDDAPIPGYF

SEQ ID NO: 5651 - protein, 154 aa, Zea mays
  unsure (1)..(154): unsure at all Xaa locations
  Clone ID: TF_LIB4073-023-Q1-K1-E8.pep
XIVKFLVELGCDVNAQDSDGWTPLHCAASCNNLAMVRFLVDNGACIFATTLSDHETAAEKCEEDEEGFDGCSEYLYSVQEKLGIMNSGLVYAVFSYTAARSDELTFETGGRLHVLRKGDDSEREWWWCRDDAGNEGYVPRNLLGLYPRVTTQQD

SEQ ID NO: 5652 - protein, 850 aa, Zea mays
  Clone ID: TF_ZmC13638_1.pep
MKKNNSSIESTGGGVGGSGGTVSGSGSGSFNLRNLSKVILPPLGGPSGGQSQSHGGSDKWVVSPLDSRYRWWDTFMVVLVAYSAWVYPFEVAFMNASPKGGLEVADIVVDLFFAVDIVLTFFVAYIDGRTQLLVRDRKKITLRYLSTFFIMDVASTIPFQGLAYLITGEVRENAVYSMLGVLRLWRLRRVKQFFTRLEKDIRFSYFWIRSARLVAVTLFLVHCAGCLYYLIADRYPDRQKTWIGAVIPNFRQASLRIRYISSIYWSITTMTTVGYGDLHAQNNVEMIFNIFYMLFNLGLTAYLIGNMTNLVVEGTRRTMEFRNSIRAASSFVGRNHLPPRLKQQILAYMCLKFRAESLNQQQLMDQLPKSICKSICEHLFVPVVKDVYLFRGVSREMLLSLVTKMKPEYIPPKEDVIVQNEAPDDVYVVVSGEVEVILFDGIYEQVQATLGARDIFGEVSALSDRAQAFTFRTRTLSQLLRLKQATLKEAMQSRPEDSVVVIKNFLKHQVEMHGMKVEDLLGDNTGEHDDDANVLTVAAMGNSGLLEDLLRAGKAADVGDAKGRTALHIAASKGYEDCVLVLLKHACNVNIRDAQGNTAMWNAIAAGHHKIFNLLYQFGRASNPRAGGDVMCLAARRGHLGALQELLKLGLDVDSEDHDGATALRVAMAEGHADAARFLILNGASVDKASLDDDDGSGSGSGSGAARLAMSPTELRELLQKRELGHSITIHDSPAVVPNGGSSGHSRPGRLQSTSSDSQRWPRVSVYKGHPFLRNRTSEAGKLINLPGTMEEFKVIVGEKLKVDAEKALIVSDEGAEIDSIDVIRDNDKLFMVTEEDLRRLASMDWLSCE

SEQ ID NO: 5653 - protein, 163 aa, Zea mays
  Clone ID: TF_ZmC35644_2.pep
HASGYALALQIPLMDKLLNSGVDVNLVDRVNGFTSLHKAVIGKKEAVISHLLRKGANPHVRDRDGATPLHYAVQAGALQTVKLLIKYKVDVNVADNDGWTPLHLAIQSRNRDIAKVLLVNGADKTRRTKDGRTALDLSLCFGRDFKSYDLAKLVKLIPANRGA

SEQ ID NO: 5654 - protein, 446 aa, Zea mays
  Clone ID: TF_ZmC16578_1.pep
MGHGASCGRPSEEVDFFGAAQSGDMARLAAALRSRPTLLSRTTLFDRLSALHIAAAHGHLQVVSLALDLCVHPDVVNRHKQTALMLSAMHGKTDCVRRLLDAGANIVMFDSSHGRTCLHYAAYYGHADCLRTILSAAAKSAPVSESWGFARFVNVRDDTGATPLHLAARQGWRRCVHVLLENGAIVSASSGAFGFPGSTPLHLAARGGNLDCVRQLLSWGADRLQRDSVGRIPYEVAAKRGHVACAALLNPSSAEPLVWPSALKFISELEPDAKSLLEAALMEANRERERRILKGAKNALPSPSHPDDGAHDTAIAEASDAEVCSICFEQACSIEVRECGHQMCSACTLALCCHAKPNPATQSQPLPTCPFCRGGIARLVVATRTRAGDDEERCKLESPRHCRSRRSMNLSGDAGSTSTLMGSIASSIGKMGRRRTESSEQVDDKP

SEQ ID NO: 5655 - protein, 165 aa, Zea mays
  Clone ID: TF_ZmC3009_1.pep
DVVKALLELGAADVNCRAGPTGKTALHLAVEMVSPDMVSVLLDHHADPSARTLDGVTPLDVLRGLTSEFLFRGAVPGLTHIEPNKLRLCLELVQSAVMVTTRDDDAGAGGGGSDAADDSLVSLTMNSTLMYQGQEIAGAMAGEARKGSGGGRGSPSNLYFPTAFP

SEQ ID NO: 5656 - protein, 447 aa, Zea mays
  Clone ID: TF_ZmC26105_1.pep
VAALPKAACLCVDEDACAHVGCRPAVAFMAQVLFAASTFDVAELTNLFQRRLLDVLDKVEVDNLPLVLSVANLCSKSCVKLLERCLDVVVRSNLDMISLEKKLPPDVEKEIVDARVSLGLVSPEDKGFPNIHVRRIHRALDSDDVELVRMLLKEGKTNLDDAYALHYAVEHCDSKITTELLDLALADVNHRNPRGYTVLHIAAMRREPKIIVSLLTKGARPSDLTFDDRKAVQISKRLTKHGDYFGPTEDGKPSPKDRLCIEVLEQAERRDPQLGEASVSLAIEGDSARGRLLYLENRVALARILFPMEARVAMDIAQVDGTLEFTLVSSVNLPAEIQRTVDLNDTPFTMKEEHLARMRALSKTVEVGKRFFPRCSKVLDTIMDDEAEMASLGRDTSAEKKRRFHDLQDLVQKAFSEDKEENDRSAARSPSSSSTTTTSIGAVRPRR

SEQ ID NO: 5657 - protein, 135 aa, Zea mays
  unsure (1)..(135): unsure at all Xaa locations
  Clone ID: TF_LIB4980-056-A1-K1-B8.pep
MGLQQSKEELLYQQVNYGNVDGIRTLRGQGAGLEWIDKEGKTPLMLACMRPDLFDVAKVLIELGANVNAYRPGSHCGTALHHAAKXGLQQTVHLLLSHGANPSIXNDDCNTALELAREKGHVNGVRAIEGRLCLF

SEQ ID NO: 5658 - protein, 131 aa, Zea mays
  Clone ID: TF_LIB4729-023-R1-K1-C10.pep
MGVELAQPTAAAAAVTTAEQAQDLIDAARYDDLEDVVALFSAGVSLDSTDSQGRTALHMASANGHLAMVEYLIQNGANVNATNMEKNTPLHWACLNGRIEVIRALISAGASVSALNSHEKTPMDEAVTTGK

SEQ ID NO: 5659 - protein, 153 aa, Zea mays
  Clone ID: TF_LIB4764-089-A1-K1-G1.pep
MGVELAQPTAAAAAVTTAEQAQDLIDAARYDDLEDVVALFSAGVSLDSTDSQGRTALHMASANGHLAMVEYLIQNGANVNATNMEKNTPLHWACLNGRIEVIRALISAGASVSALNSHEKTPMDEAVTTGKMHVIDAIGAAVAQAELDGVTVS

SEQ ID NO: 5660 - protein, 704 aa, Zea mays
  Clone ID: TF_ZmC6144_1.pep
MERSCYFPLRWESTGDQWWYASPIDWAAADGHYDIVRQLLHLDPNLLIKLTSLRRIRRLEALWDDDARFADAARNRASVARSLLLECECRNHRPGAGENTLLRAGYGGWVLYAAASAGDAAFVRELLERDPLLVFGEGEYGVTDMFYAAARGGSADVFRLLLDHAMSPRCSTSCRNGEASARRSSVFRLEMMSRAVHAAARGGSVEMLRELLDESSVSTYLDIRGSTVLHAAAGRGQLQVVKYLVASFDIINSTDNHGNTALHVAAYRGHQPVVEALVAASPSTLSVVNNAGDTFLHSAVTGFRTPGFRRLDRQLELMRYLIRERTADIQKIINLRNDAGLTALHLAVVGCAHPDLVELLMATPSIDLNAEDANGMTALALLKQQLRSATSDRLIKQIVSAGGVLNSSILRTRSAIASQIKMQGGIASSPGTTFKVSDAEIFLFSGMGAAESLRPSSCSSNGKDDDPTHADADCAENRGSSEKRLSSASRAKDRLKMMLRWPRHKDKTPKKSEDSSPLGSISRLNEHGAETPAPLRQKFTKTTALNGKRTLAVKSSTPSSSSTKKKLNTKLIHGIMEAMPQLAPSTARSASPTDTFLRSSVSSTPQPLAKLKDICLDDEISMVTPPAGRLKDSDDAMEDPSCSNNSSMDDGCGAGTAESAARKHGCGNGRLINICFGAQGLTVEDSASGQQTSKMFKQQCLRVS

SEQ ID NO: 5661 - protein, 458 aa, Zea mays
  Clone ID: TF_ZmC1084_1.pep
MELPMQSVSSLLLAGPSPSSPEAAETTPPPMQPLQCQHERLVGNMCPSLYLAVYRGRIADVTALLLEQPAVAIDCQATTTPGIKGTAIMHGQCDILELTAERNTALHVAAEQGHHELIRELYFRFSDQGLLNRLNSALDTPLHSAARAGHVRAVAVLFELARDRGVNILGCKNEAGDTALHLAARHGHGAAVEVLISAAAEPAAELNNAGVSPLYLAVISGSVQAVRAITTCKDASSLGPGAQNALHAAVFQSSEMVHLLLEWRPALADQVDSGGSSPLHFASSDGDRTIVKAILRASPPSTVYKKDSDGLSALHVAARMGHRRVVKDMLRSYPDAAELRDGNGGTFVHAAARERRSSVVSLAISNSMLRGVLDAQDRDGNTPLHLAVAVGSTGDVEALLREGKVRADVLNNDGHTALDLAARSNAGFFATINLVVALVAFGARLRPQRQDRLEQWGG

SEQ ID NO: 5662 - protein, 186 aa, Zea mays
  Clone ID: TF_LIB5116-067-A1-PF1-D8.pep
VPSYCFFYEGDCEMIELLLAKGAYVDPIAEEIGTPLHLATKEQQVGAMKTLLEHNADCNKTYMSYGLYPMTPLFQAVNVSSLQCVKLLVEAGAVINPDCIETVSLDSAMGNDSSTECLNFLLKAGAKRNASNDAAVHASARGRVAGTARRSGRGRGRDQGPRQQQEQHVACGEEVEVKVNPKVLIG

SEQ ID NO: 5663 - protein, 440 aa, Zea mays
  Clone ID: TF_ZmC13193_2.pep
AYRGRQDKEGCTPLHWAAIRGNLEACTVLVQVGKKDDLMVKDKTGLTPAQLAADKNHRQIAFFLDNARRVHDRGCGANTRFGKLSKLGLAPFLWCTIIGMLITYVHSVILGQYVMTMTAPFGMFAWSGVFLATAGLVMFYKCSRKDPGYISINTRGSQNQRDDEPLLKMELENPALLFGNWSQLCITCKIVRPVRSKHCSTCDRCVEQFDHHCPWVSNCIGKKNKWEFFMFLTLEVFAMIITGSAAIIRLVRDPDSPSSFGAWIHYSAFQHPGVVSFLALDCFLFFGVAVLTVSQASQIARNITTNEMANSMRYAYLRGPGGRFRNPYDHGIRKNCSDFLLNGYNEDTERLDQTLHTDEEMGMIQMTRAVSQNGDNHLHHGNGTEHSCADSQASPKPHSQVGSPQCCDHSKRTDRTLLGLGLGLGRNSASRQYVRSLIPL

SEQ ID NO: 5664 - protein, 400 aa, Zea mays
  Clone ID: TF_ZmC12604_6.pep
MGHGVSCARTGDEHDYFRAAQVGDLEALEALLDADPSLARRATLYDRLSALHIAAANGRLEVLSMVLDHGVPPDVVNRHKQTPLMLAAMHGKTDCVLKLLQAGANILMFDSQHGRTCLHHASYFGHVGCLQAILTAARTTPVANSWFPGSTSLHLAARSGSLDCTRKLLAWGADRLRRDVARRIPYAVALKRNHEACAALLNPSAAEPMVWPSPFKFISELEPEAKALLEAALTEANREREEKILRGTKHSPHPPTWDHASDAADADAIDDAASDAELCCICFEQASTIKVQDCGHQMCAACTLALCCHSKPNPATLTPPSPACPFCRGSISRLLVARASPDADDDDKAAAAWSPQLVRRRSPNLKWAAATAWTSPSPTCDRHLMLGVAEQTAEPAHFKS

SEQ ID NO: 5665 - protein, 345 aa, Zea mays
  unsure (1)..(345): unsure at all Xaa locations
  Clone ID: TF_ZmC4298_1.pep
EKNSGSGYFEHSPRLAQHHRTSMMKPDKPIDLLRKVAGNNCCADCGASEPDWASLNLGILLCIECSGVHRNMGVHISKVRSLTLDVRVWEQSVINLFQSIGNTFANSVWEEMLPSSSCVDHGDISRAVGLENMLFGFASALFWEKFIHAKYAEKDFVRKHGMDGIQLAEQMWDNVSSNNKKGVYSLIVGSNADVDFSYGHTSFNSALTLAKSSPPTRAISLSHLTEALDVLTAIHSTQGXGDSICPARLAGRTLAPYCKSSSTMPRSAARHARWSKDNPSTDSRGRTPLHHSIMKGRHVYAKLLLSRGADSQAADRDGRTALQYAIDSGTIEDEEILVLLEDPSR

SEQ ID NO: 5666 - protein, 409 aa, Zea mays
  Clone ID: TF_ZmC2014_1.pep
HGLLLQRRLLNFVDKTLVEDVIPILEVASHSGLTQVIDKCIQRIARSDLDDISLDKELPPEAVDEIKNLRKKSQTADGDTFISDPVHEKRVRRIHRALDSDDVELVKLLLNESDITLDDANALHYAASYCDPKVVSELLDLAMANLNLKNSRGYTALHLAAMRREPAIIMCLLNKGANVSQLTADGRSAIGICRRLTRAKDYNTKMEQGQESNKDRLCIDILEREMMRNPMAVEDAVTSPLLADDLHMKLLYLENRVAFARLFFPAEAKVAMQIAQADTTEEFGGIVAVAASTSGKLREVDLNETPVTQNKRLRSRVDALMKTVELGRRYFPNCSQVLDKFLEDDLPEGLDQFYLQRGTADEQKVKRMRFCELKEDVLKAFSKDKAEGSVFSGLSSSSSCSPPQKYAQR

SEQ ID NO: 5667 - protein, 418 aa, Zea mays
  unsure (1)..(418): unsure at all Xaa locations
  Clone ID: TF_ZmC2014_3.pep
RAGGSFRPRAPSLFQRRLLNFVDKTLVEDVIPILEVASHSGLTEVIDKCIQRIARSDLDDISLDKELPPEAVDEIKNLRKNSQTADGDTFISDPVHEKRVRRIHRALDSDDVELVKLLLNESDITLDDANALHYAASYCDPKVVSELLDLAMANLNLKNSRGYTALHLAAMRREPAIIMCLLNKGANVSQLTADGRSAIGICRRLTRAKDYNTKMEQGQESNKDRLCIDILEREMMRNPMAVEDAVTSPLLADDLHMKLLYLGNRVXFARLFFPAEAKVAMQIAQADTTEEFGGIVAVAASTSGKLREVDLNETPVTQNKRLRSRVDALMKTVELGRRYFPNCSQVLDKFLEDDLPEGLDQFYLQRGTADEQKVKRMRFCELKEDVLKAFSKDKAEGSVFSGLSSSSSCSPPQKYAQR

SEQ ID NO: 5668 - protein, 588 aa, Zea mays
  Clone ID: TF_ZmC1587_1.pep
MAENSDAAAAVTARLLELAADNDSTALGDLLAVHPSLADEPAPWYSPARGAEPMTPLMVAAAYGSVACIDVLLSPPHLTDPNRASPSSLSTALHLAAAGGASAAPAAVSRLLAAGADPTLLDHLHRRPSDLVALPPNSLPLKNHLLSLLGGRKEWPPDPSLPDIKNGAYASDDFRMYSFKVRACSRAYSHDWTECPFVHPGENARRRDPRKYHYSCVPCPEFKKGAGCRRGDMCEYAHGVFESWLHPAQYRTRLCKDGLACARRVCFFAHTPEELRPLYVSSAGSRSAMGMGLPSPGASFTPPLSPSGGGSGVAGAWPQPNVPALCLPGSAGNLQLSRLRTLMSARSMAVDELLASADYDGLVGSPASLRSARGKTLVPSNLDDLFSAEMAGAAASHSPRYADQGGSAFSPTRKAAMLNQFQQQQSLLSPRATVVPEPVSPMSSRLLSALAQREKMQQQTLRSMSSRDLGSGASVLVGSPVTSSWSKWGIPPSTPDWGADAEELGRLKRSSSFELRSGANGDEPDLSWVNTLVKEPTPEKPSINGTAAKESIASLSQAASHEGIGGEDDTAGVIGGWLEQLQLDEMVV

SEQ ID NO: 5669 - protein, 618 aa, Zea mays
  Clone ID: TF_ZmC11259_1.pep
RILLPCKTSSQGSQITELAIHGHFEPFSREDTTISLGQTNKFTIREVSPEWAFSYEITKVIITGDFLSDPSNLCWAVMFGDNEVPVEIVQPGVLRCHTPLHSNGNLRICITSGNREVCSEFKDFEFRSKPTSSSFTDIAPSSRHLKSSEELLLLAKFARMLLSGNGNREVPDGDPQSGQCPKLKTNEELWDRLINELKVGCENPLSSVDWIVEQLLKSNLQQWLSVKLRGFNGTDFLSKQEQGIIHLISALGYEWALSPVLSAGVGLNFRDSNGWTALHWAAYFGREKMVAALLAAGASATAVTDPTAQDPVGKTAAFLASERGHTGLAGYLSEVSLTSYLASLTIEESDVSKGSAEVEAERAVEGISQRNAQRHGGTEDELSMKDSLAAVRNAAQAAARIQNAFRAFSFRKRQQKTARLRDVYGMTQEDIDELAAASRLYHQAHASSGQFYDRAAVSIQKKYKGWKGRKHFLNMRRNAVKIQAHVRGHQVRKKYRTIVSTVSVLEKVILRWRRKGHGLRGFRAEQQPMVEAIEEDDEEDDDFDDDEAVKVFRRQKVDQAVKEAVSRVLSMVDSTEARMQYRRMLEEFRQATAELEGSNEVTSIFDSDLELLGINNFM

SEQ ID NO: 5670 - protein, 229 aa, Zea mays
  unsure (1)..(229): unsure at all Xaa locations
  Clone ID: TF_LIB4765-073-R1-K2-C9.pep
YVFIDIVKVLLDHDPSLGKTFGQSNVTPLITAAIRGHIEVVNLLLERVSGLVELSKANGKNALHFAARQGHVEIVEALLHADTQLARRTDKKGQTALHMAVKGTSPEVVQALVNADPAIVMLPDRNGNLALHVATRKKRSEIVNVLLLLPDMNVNALTXDRKTAFDIAEGLPLSEESQEIKECLSRAGAVRANDLNQPRDELRKTVTEIKKDVHTQLEQARXTNKNVYG

SEQ ID NO: 5671 - protein, 275 aa, Zea mays
  Clone ID: TF_ZmC49809_1.pep
DAWVTVDSSNTTALNTAATQGHMDVVRLLLEVDGSLALIARSNGKTALHSAARNGHVEVVRALLEAEPSIALRTDKKGQTALHMAAKGTRLDLVDALLAAEPALLNQTDSKGNTALHIAARKARHEIIRRLVTMPDTDVRAINRSRETPLDTAEKMGNTDAAELLAEHGVQSARAISPGGGGGGGNKQARELKQQVSDIKHEVHSQLEQTRQTRVRMQGIAKRINKLHEEGLNNAINSTTVVAVLIATVAFAAIFTVPGEYVQDPGSLAPGHDLG

SEQ ID NO: 5672 - protein, 598 aa, Zea mays
  unsure (1)..(598): unsure at all Xaa locations
  Clone ID: TF_ZmC2160_1.pep
MGVGGVLLKCFPWDAVYRGCGSKEEVRYLLWIRLTRVTKGTEFFWGVEKDIRMRXGFTXIVXLIVVELYCAHTGACVFYYLGTTLPESMEGYTWIGSLQLGDYKWAHFRGIDLAKRYITXVYFAIVTMGTGGYGDIHAVNIRGMIFIMIYGSFDMILGAYLIGNMTAGIGKFGSSLDKMKEVIRYMNRNKLGKEIREQIKGHLRLQYESSYTEASVLQDIPISIRAKISQTLYKPYIESIPLFKGCSAEFIQQIVIRLQEEFFLPGEVILEQGSAVDQLYFVCHGALEGVGIGEDGQEETLLMLEPESSFGEISILCNIPQPYTVRVCELCRLLRLDKQSFTNILEIYFVDGRRILSNLSESEYGGRVKQLESDITFHIGKQEAELTLRVNSAAFYGDLHQLKSLIRAGADPKNTDYDDRSPLHLAASRGYEDVVQFLINEGVDIDLTDQFGNTPLLEAVKQGHERVAALLFAKGAKLSLKNAGSHLCTAVAKGDSDFIRRALAYGADPNCRDYDHRTPLHIAAAEGLYLIAKMLVEAGASVFTTDRWGTTPLDEARKCGGRSRGALLEEARASELSMFPERGEEVRDKVHPRRCSVF

SEQ ID NO: 5673 - protein, 157 aa, Zea mays
  unsure (1)..(157): unsure at all Xaa locations
  Clone ID: TF_LIB3069-022-Q1-K1-C8-3Aa.pep
AATKGHNEIVGLLLENGADVNSLNYCGQTALMQACRYGHWEVVQTLLLFRCNVTRADYLSGRTALHFAAVNGHARCIRLVLADFLPRDKLNSLSETGVVTAKNKSEQSALSKFVNKAADGGIXTAIHKAGLDGLFDCVQLLLDLEANVFDGTFYFGT

SEQ ID NO: 5674 - protein, 153 aa, Zea mays
  Clone ID: TF_ZmC1087_2.pep
MGVELAQPTAAAAAVTTAEQAQDLIDAARYDDLEDVVALFSAGVSLDSTDSQGRTALHMASANGHLAVVEYLIQNGANVNATNMEKNTPLHWACLNGRIEVIRALISAGASVSALNSHEKTPMDEAVTTGKMHVIDAIGAAVAQAELDGVTVS

SEQ ID NO: 5675 - protein, 107 aa, Zea mays
  unsure (1)..(107): unsure at all Xaa locations
  Clone ID: TF_ZmC518296_1.pep
MVQLRSSLSMTRARTRSDSDDADDRGWSQLHVAARKGNLKEVRRLLNEGMNVNAPTWGPKSPGATPLHLAAQGGHVKIMDELXXRGANIDARNKGACGWTPLHICCK

SEQ ID NO: 5676 - protein, 465 aa, Zea mays
  Clone ID: TF_ZmC9395_1.pep
IGRDALVPVLGYLYTGRLKPPAQDATVCMDDACGHGTCRPAIDFVVESMYAASGFQISELASLFQRRLSDFVCEALDEDVVPIIHVASTCDLQDLLNLCIQRVAVSALDSRYLDKELPADIYNKIKEIRRQPENAIILDPEHDKRVRNILKALDSDDVDLVGLLLKESTVTLDDAFAIHYAAAYCEPKVFAELLKLDSANVNLKNSGGYTPLHIACMRREPDIILSLVERGACVLERTLDGRDALTICKRLTREKDCNRKLDKYEEKSKAYLCIDILEQELKRKSFVLDPISISIEESIATPLLVDNFHMRLINLENRVAFARIFFPSEAKLVMRIAQADSTQEFAGITNFSRLKEVDLNETPTMQNRRLRERLDALTKTVELGRRYFPHCSDVLDKFLNEESTDPIFLETGTPEDQQVKRMRFSELREDVRKAFTKDKAAVAAIASSASSSSSPRCRRPNRKSR

SEQ ID NO: 5677 - protein, 230 aa, Zea mays
  Clone ID: TF_ZmC119_798.pep
PRAGRESRPRKARDNWPPAAGLLVAAYYGDIRRLKEIAKIIDIEGKGLQDTLANTHFLGMYALHATCDSGCMPALQYLVEDLKIDVNKADTMRGFTPVMHAVLYGNLPALRFLVDHGADLHHQHKGMSLLHSAAESGRPEIAKFLLSKGVRVDVESSVLTPLIIATFRGYPSIVKILLEHGADPNERLNDKVTPLSMALKHSSVPCLKLLVQAGANGDWVLDLIIPWQEL

SEQ ID NO: 5678 - protein, 78 aa, Zea mays
  Clone ID: TF_ZmC1239_2.pep
LENGRGGSSLLRAGAVELLLDMGADANARTRRGATPLQMAEAMGYEAIAQLLCARGAEVAAASALCAASSSSSSISCA

SEQ ID NO: 5679 - protein, 223 aa, Zea mays
  Clone ID: TF_ZmC36749_2.pep
MAAAMDVDEAGGEERRPSEKELFRAAESGDAAAFASLAPADLSLRNEDGRSLLHVAAAAGHPQVVLALAQCGGDAAASVLNAQDEEGWAPIHSAASSGNSQIVDILLERGRLNIAEKLIAHGANVNKKDKFGCTPLHRAASTGNAELCEFLIEEGAEVDAVDKTGQTPLTHAVICENKGAALLLIRHGADVDVEDKEGYTALGRASNSFRPALIDAAKAMLEG

SEQ ID NO: 5680 - protein, 652 aa, Zea mays
  Clone ID: TF_ZmC853_1.pep
ETVKVPDGSNVLTNEQLDAYVVNPSLSQDQLFSILDVSPSCAYIGTNTKVSVTGTFLVNKEHVESHRWSCMFGDVEVPAEVLTDGTLRCYAPAHQSGRVPFYVTCSNRVACSEVREFEYRDSEAHYMETSRSQANGVNEMHLHIRLEKLLTLGPDDHQMLVISSGNEKYEIMNAINSLMLDGKWSNQESSVKEVVSTARVQSLKKLVKEKLHQWLICKVNDDGKGPNVLCKEGQGVIHLVAALGYDWAIRPIMIAGVNVNFRDAHGWTALHWAASLGRERTVSVLIANGAAAGALTDPTSEFPSGRSPADLASVNGHKGIAGFLAESALTSHLSALTIRESNDSTVEACGLPFAEDLTGIDSVHLAGEGPDAESLEGSLSAVRKSTQAAARIFQAFRVESFHRKKVVEYGDDTCGLSDECTLSLVSLKNVKPGQHDTHLHSAAVRIQNKFRGWKGRKEFMIIRQRIVKLQAHVRGHQVRKNYRKVVWSVGIVEKVILRWRRKRPGLRGFRPQKQLEGPSQIQPAKAEDEYDFLHDGRRQAEARLQRALARVHSMSQYPEAREQYHRLTTCVAEMKQSRVCFRSLLQDVFYFPSGFDHDLMLATLEQMMQDEMLSQAAGGADDFMAGLEDLICIDDAPPRCLPFGEAEPFYIR

SEQ ID NO: 5681 - protein, 221 aa, Zea mays
  Clone ID: TF_ZmC2138_1.pep
TAAHFAAGLGSEECLRALGAAGADVGRRERAGGGLTPLHMAVGYGRAGAVRALLELGADPEAPDGQGRTPLELVQEVLARAPKGNPATFQLRQGLEAAQKELEKAVYEWAEVEKVIDGRGEGKWREYLVEWRDGGEREWVKAAWVAEDLVSDFEAGLEYAVAEAVLDKRQAATATAEGEDSWEYLVKWVDIEEATWEPAENVDTELVQKFEQQQSGSAGGD

SEQ ID NO: 5682 - protein, 409 aa, Zea mays
  Clone ID: TF_ZmC16856_1.pep
MGNALGCAGLGERLAASARNGDAAEVRRLLEENPGLARCAAVGSSLNSPLHLAAAKGHHERIAALLLENGAEVNARNLSGETALMQACRFGHWEVVQTLLVFGCNVSKVDSLSGQTALHLAAAGGHATCVRLLLAGAGAGRNKLVNRAASGGVTALHLAALHGHADCVHLLVDERADVAAPTLPCTAAPMAAIGAGSAPLHYAAAGGEVRCCQILVARGADRAAANCNGWIPVDVARTWGCQWLEHVLSPESHLRIPRFPPSAYLSSPLASALALARDCRLLLNTAQLDSGGADACAVCLERPCDVAAEVCGHELCAKCALDLCSVVKSYDVPGIAGTIPCPLCRSAIASFRMRAAADESEPDVNDAGGGRRGAGDRQAAASSPEKKRSTDSEQDVVLPFYCAPLAVPS

SEQ ID NO: 5683 - protein, 165 aa, Zea mays
  unsure (1)..(165): unsure at all Xaa locations
  Clone ID: TF_ZmC1087_4.pep
RTAIPGLSYSPGDGGRLAQPSAGAAAVTTAEQAQDLIDAARYDDLEDVVALFSAGVSLDSTDSQGRTALXVGSANGHLAVVEYLIQNGANVNATNMEKNTPLQWACLNGRIEVIRALISAGASVSALNSHEKTPMDEAVTTGKMDVIDAIGAAVAQAELNAVTVS

SEQ ID NO: 5684 - protein, 293 aa, Zea mays
  Clone ID: TF_ZmC4298_2.pep
NMGVHISKVRSLTLDVRVWEQSVINLFQSIGNTFANSVWEEMLPSSSCVDHGDISRADGLENMSHGFAPKKPKQSDSIAVKEKFIHAKYAEKDFVRKHNMDGIQLAEQMWDNVSSNNKKGVYSLIVGSNADVNFSYGHTSFNSALTLGKALLLQEQSASPSNGSSRCFDRNPLEKGCTGDSVSPASTSARTDGPDDYVEGLSLLHLACRAADLGMVELLLQYGANVNSTDSRGRTPLHHSIMKGRHVYAQATAFQGRRSQAADRDGRTALQYAIDSGTIEDEEILVLLEDPSR

SEQ ID NO: 5685 - protein, 568 aa, Zea mays
  Clone ID: TF_ZmC37480_1.pep
RGKYLDDDISLDDIPSSGILPTEQVTGEIPFQITEISSEWAYCTEDTKVLVVGCFHENYRHLAGTNLFCVIGDQCVDANIVQTGVYRFIARPHAPGRVNLYLTLDGKTPISEVLSFHYRMVPDSQNLAEDEPQKSKLQMQMRLARLLFTTNKKKIAPKLLVEGSKVSNLLSASTEKEWMDLSKFVTDSKGTYVPATEGLLELVLRNRLQEWLVEKLIEGHKSTGRDDLGQGPIHLCSCLGYTWAIHLFSLSGFSLDFRDSSGWTALHWAAYCGREKMVAALLSAGANPSLVTDPTHDVPGGQTAGDLAAGQGYHGLAAYLSEKGLTAHFEAMSLSKGKRSTSRTESLKRNTKEFENLSEQELCLRESLAAYRNAADAASNIQAALRERTLKLQTKAIQLANPENDASAIVAAMRIQHAYRNYNRKKMMRAAARIQSHFRTWQIRRNFMNMRRQAIKIQAAYRGHQVRRQYRKVLWSVGVVEKAILRWRKKRKGLRGIATGMPVAMATDAEAASTAEEDYYQVGRQQAEDRFNRSVVRVQALFRSHRAQQEYRRMKVAHEEAKVEFGRK

SEQ ID NO: 5686 - protein, 417 aa, Zea mays
  Clone ID: TF_ZmC805_1.pep
MPALSDVALQAAIAGNLRLLKLVASKMNLREAKDAAGRNALHLAAEMGRLEVCRFLVEESGFEVNFACAEGGSPVHCAAAGGSESVLGYLLDHGGDPVMPDSMGSTPLHDAAEEGHCAAVRMLLSKGVDVDPHGCRGTPLHLACSNDRDQVVRILLEHGADPNKVVGHVLPPLMMAYCGGSLRCMKLLIEAGADVNLIAPSGVILAQAVCDGSTEIVKFLLEVGADPNIPDEDGKIPIMYPAFNGHRELVEILFPKTRPVSSLPDWSVDGIIRSMKDLFFKPQDAAVVEKKIADAKSQGKEAFARGEYPAAVYFYTMVLENDLDATAFANRSLCWLRLREGAKALLDAQQCKMIRPRWSKAWYREGAALSLLKDYQGAVNAFTEALKLDPASLEIKKALREATDSLANVGRSGEQNP

SEQ ID NO: 5687 - protein, 259 aa, Zea mays
  Clone ID: TF_ZmC5707_4.pep
MASDPNKDSKSEGLSEAKKGASPTAGAGLPSPFDFSNMSSLLNDPSIREMAEQIASDPVFNQMAEQLQKSAQGAGEQGVPNLDPQAYMETMTQVMQNPQFMSMAERLGNTLMQDPAMSSMLENLTSPAHKEQLEERMARIKDDPSLKPILDEIERGGPSAMVKYWNDPEILQKIGQAMSLNFPVDAATSTVLSGPQETDEEGEDDDESIVHNTASVGDAQGLKKALDGGANKDEEDAEGRRALHFACGYGEVSESVKLC

SEQ ID NO: 5688 - protein, 221 aa, Zea mays
  Clone ID: TF_ZmC1239_1.pep
RGDCGELRRLGPEALAARDREGRTVLHAVAAAGEAEAVAVLVDMGADTSAVDARGRTPLDVARDKGYQEVVDVLERWELVMTAARRGDLGSLESLLSKRAGVRGRDQYGLTALHLAAIKGHGDAIALLAGPGCMDVECEDVEGHRPLHLAVEGGHAEAVELLLDMGADANARTRRGATPLQMAEAMGYEAIAQLLCARGAEVAAASALCAASSSSSSISCA

SEQ ID NO: 5689 - protein, 248 aa, Zea mays
  unsure (1)..(248): unsure at all Xaa locations
  Clone ID: TF_ZmC791614_1.pep
SRSKPPTLASPLPTFLRPGLMAEIEVVSEGGRRDEDEERRRQQQQGAGEPDPVVDVYSAAAYGDLERLRGFVEQGGAATALREPDGNGYHALQWAALNDYPHVALYIVEHGGDVNATDHARQTALHWAAVRGSTSVADVLMEHGARVEAADVNGFRAVHVASQYGQTAFLHHIISKYGADFDALDIDGRSALHWAAYKGNADTIRLLLFMDANQVRQDKNGCTPLHWAAIRGNLEVCTVLVHTGTXEE

SEQ ID NO: 5690 - protein, 140 aa, Zea mays
  Clone ID: TF_LIB4740-025-R1-K1-G6.pep
WYPSPAGFCLLRDWRLTPLIIATFRGYPSIVKILLEHGADAGANVNGFGSYNPLARAAEKGLTEAIKCLLEAGANPNVPDTFGRLPIELAAEYGTWEDVELLFPVTSKIPTVADWSVNGVISHVHMEVTQLETSVRSRVI

SEQ ID NO: 5691 - protein, 259 aa, Zea mays
  unsure (1)..(259): unsure at all Xaa locations
  Clone ID: TF_LIB4748-002-R1-M1-F5.pep
MLEPESSFGEISILCNXPQPYTVRVCELCRLLRLDKQSFTNILEIYFVDGRRILSNLSESEYGGRVKQLESDITLHIGKQEAELTLRVNSAAFYGDLHQLKSLIRAGADPKNTDYDGRSPLHLAASRGYEDVVQFLVNEGVDMDLTDQFGNTPLLEAVKQGQERVAALLFAKGAKLSLKNAGSHLCTAVAKGDSDFIRRTLAYGADPNCRDYDHRTPLHIAAAEGLYLIAKMLVEAGASVFTTDRWGTTPLDEARKCDG

SEQ ID NO: 5692 - protein, 357 aa, Zea mays
  Clone ID: TF_ZmC21063_1.pep
MAAQEEKTAVAAAADVAAEEPAPAPEQQPQPAGAARRAGPSAPGGAPPNPFDFSTMMNLLNDPSIKEMAEQIAKDPAFTEMAEQLQKTVVSPRQQQQQQARQQQQQLDPQKYVATMQQLMQNPQFVAMAERLGSALMQDPAMSAMLGGLTNPAHKEQLEARVARMKEDPTLKPILDEIESGGPAAMMKYWNDPEALQKFGRAMGVGVGPSGEAGGAEHAEAEDDAGEEGEYEDESIVHHTASVGDVEGLKKALENGADKDEEDSEGRRGLHFACGYGELQCAQALLEAGAAVDAVDKNKNTALHYAAGYGRKDCVALLLESGAAVTLQNLDGKTPIDVAKLNNQDDVLKLLEKHAFV

SEQ ID NO: 5693 - protein, 485 aa, Zea mays
  Clone ID: TF_ZmC13122_1.pep
MPGSQNGGPRPRPVKAETIHDLARAGDLAGVQRKLLENPSLLNDKNPVMCQTPLHVAAGYNNTEIVKFLLNQQGTETVDLEAKNMYGETPLHMAVKNSSCGSTNLLLEHGAHIEAKANNGMTPLHLAVWHAIQAGDFSTVSVLLSYNPDCFVKDDEGKMPLNHIPGGAGSEKLLKLLTHHMEEQRKRKALMSCLEGKAMSEFEEAMSQIVGLQELKMQLRRWARGMFFDEKRRAMGLGIAKRRAPHMAFLGNPGTGKTMVARILGKLLHMVGILPTDKVTEVQRTDLVGEFVGHTGPKTRRKIHDAEGGILFVDEAYRLIPMQKSDDKDYGLEALEEIMSVMDSGKIVVVFAGYCEPMKRVIASNDGFCRRVTKFFYFDDFSTTELAEILHMKMKIPSDCSLLYGFKLHPSCSIEAIGELIAREITEEQRKQMNGGLVDTLLINARENLDSRLDFSCNDADTMITITLEDLEAGLRQISRQRQLQ

SEQ ID NO: 5694 - protein, 484 aa, Zea mays
  unsure (1)..(484): unsure at all Xaa locations
  Clone ID: TF_ZmC13122_2.pep
MPGSQNGGPRPRPVKAETIHDLARAGDLAGVQRKLLENPSLLNDKNPXCQTPLHVAAGYNNTEIVKFLLNQQGTETVDLEAKNMYGETPLHMAVKNSSCGSTNLLLEHGAHIEAKANNGMTPLHLAVWHAIQAGDFSTVSVLLSYNPDCFVKDDEGKMPLNHIPGGAGSEKLLKLLTHHMEEQRKRKALMSCLEGKAMSEFEEAMSQIVGLQELKMQLRRWARGMFFDEKRRAMGLGIAKRRAPHMAFLGNPGTGKTMVARILGKLLHMVGILPTDKVTEVQRTDLVGEFVGHTGPKTRRKIHDAEGGILFVDEAYRLIPMQKSDDKDYGLEALEEIMSVMDSGKIVVVFAGYCEPMKRVIASNDGFCRRVTKFFYFDDFSTTELAEILHMKMKSPSDCSLLYGFKLHPSCSIEAIGELIAREITEEQRKQMNGGLVDTLLINARENLDSRLDFSCNDADTMITITLEDLEAGLRQISRQRHLQ

SEQ ID NO: 5695 - protein, 208 aa, Zea mays
  Clone ID: TF_ZmC23227_1.pep
MAVPGGRNGLRDEDDDMAQHAEAFGGVSDDEDVPPHLRALANAAQSGDVTALVAALDNHDGSIDVPVEDGDTLLHLACLYGHLPCVQLLLERGASLECQDEEGAIPLHDACAGGFTELVQYILNFAANKDGCVVRMLNTIDSEGDTPLHHAARGEHLDVVKLLLQAGASPKKENTYGQTPADMADQDTEVRTLLTAKQIEASTHMSDD

SEQ ID NO: 5696 - protein, 506 aa, Zea mays
  Clone ID: TF_ZmC13153_1.pep
RGDPRAVRQIIAEIDAQMTGTGEEFDSDVAEIRAAIVNEANEMEATALLIAAEKGFLDIVVELLKHSDKDSLTRKNKSGFDALHVAAKEGHRDIVKVLLDHDPSLGKTFGQSNVTPLITAAIRGHIEVVNLLLERVSGLVELSKANGKNALHFAARQGHVEIVEALLHADTQLARRTDKKGQTALHMAVKGTNPEVVQALVNADPAIVMLPDRNGNLALHVATRKKRSEIVNVLLLLPDMNVNALTRDRKTAFDIAEGLPLSEESQEIKECLSRAGAVRANELNQPRDELRKTVTEIKKDVHTQLEQARKTNKNVYGIAKELRKLHREGINNATNSVTVVAVLFATVAFAAIFTVPGGNANDGVAVAVHATAFKVFFIFNAVALFTSLAVVVVQITLVRGETKAERRVVEIINKLMWLASVCTTVAFISSSYIVVGRHFRWAALLVTLIGGVIMAGVLGTMTYYVVKSKRTRKIRKKVKSTRRSGSSSWQHNSEFSDSEIDRIYAI

SEQ ID NO: 5697 - protein, 69 aa, Zea mays
  Clone ID: TF_LIB4721-017-R1-K1-F5.pep
FGQHGANVNAIDHTGQTALHWSAVRGHVQVAELLLKEGAKVDATDLYGYQVTRGTSCYHCIFYSSSIFS

SEQ ID NO: 5698 - protein, 108 aa, Zea mays
  Clone ID: TF_ZmC518296_2.pep
MVQLRSSLSMTRARARGGDSDDADDRGWNQLHVAARKGNLKEVRRLLNEGMDVNAPAWGPKSPGATPLHLAAQGGHVKIMDELLERGANIDAPTKGACGWTPLHIAAR

SEQ ID NO: 5699 - protein, 446 aa, Zea mays
  Clone ID: TF_ZmC12604_2.pep
MGHGVSCARTGDEHNYFRAAQVGDLDALDALLAADPSLARRATLYDRLSALHITAANGHLEVMSMILDHGVPPDAVNRHKQTPLMLAAMHGKIDCARKLLEAGANILMFDSLHGRTCLHHASYFGHVDCLRAILAAARTTPVADSWGFARFVNVRDDRGATPLHLAARQGRSACVQVLLENGAIVSALTGSYGFPGSTSLHLAARSGNLDCIRKLLAWGADRLQRDSAGRIPYAVALKRNHAACAALLNPSAAEPMVWPSPLKFISELDPEAKALLEAALMDANREREEKILKGITKYSQPSPTSPCEHDAIDEASSEASDAELCCICFEQACSIEVQDCGHQMCAACTLALCCHSKPNPATLTPPSPACPFCRGSISRLLVARASPDADDDDKAAAASSPQLVRRRSHNLRWAAATAWTSPSTTCDRHLMLCVAEQTAEHDHFKS

SEQ ID NO: 5700 - protein, 168 aa, Zea mays
  Clone ID: TF_ZmC36749_3.pep
MAAAMDVDEAGGEERRPSEKELFRAAESGDAAAFASLAPADLSLRNEDGRSLLHVAAAAGHPQVVLALAQCGGDAAASVLNAQDEEGWAPIHSAASSGNSQIVDILLERGADVNLVTDGGRTALHYAASKGRLNIAEKLIAHGANVNKKDKFGCTPLHRAASTGNAEL

SEQ ID NO: 5701 - protein, 248 aa, Zea mays
  unsure (1)..(248): unsure at all Xaa locations
  Clone ID: TF_ZmC515903_1.pep
MAPNPAAIALLAALDGNLRLLKKMSKKMDLRETKDPKGLNALHFAANKGSLEICKFLLEDVGVDVNSVSSVGATPMFYAALKGNLQVARYLLDHGSDPAKPSERGLTPLHNAAEHGHCEIVRLLLSKGVDVDVINYRGTPLHMTAAKGQHQAMKILLEHGADPNRVVXHIFSPLMMACCGNSLECMKLLIEAGADVNGNSSSGPTPLTGAVDDGSTEFVKFLLEAGADPNIPNSTGIFHQESSSPWSA

SEQ ID NO: 5702 - protein, 190 aa, Zea mays
  Clone ID: TF_LIB4757-035-Q1-K1-C3.pep
MSAAAEDAAAADGGSGGGSSGAGSSEGGARRRFDDKGLVARTSLILWHTHQNDVGAVRKLLEEDAALVNARDYDSRTPLHVAALHGWHDVAECLVANGADVNAQDRWQNTPLADAEGAKRQPMIELLKEHGGLTYGKTGSHFEPKTIPPPLTNKADWEINPLELDFTKATVIGKGSFGEISEANWRGTPI

SEQ ID NO: 5703 - protein, 218 aa, Zea mays
  unsure (1)..(218): unsure at all Xaa locations
  Clone ID: TF_ZmC34704_1.pep
MSAAAEDAAAADGGSGGGSSGAGSSEGGARRRFDDKGLVARTSLILWHTHQNDVGAVRKLLEEDAALVNARDYDSRTPLHVAALHGWHDVAECLVANGADVNAQDRWQNTPLADAEGAKRQPMIELLKEHGGLTYGKTGSHFEPKTIPPPLTNKADWXPLELDFTKATVIGKGSFGEILKANWRGTPIAVKRILPSLSDDRLVIQDFKHEVNLLIKLR

SEQ ID NO: 5704 - protein, 557 aa, Zea mays
  Clone ID: TF_ZmC139143_1.pep
MSLEIHEEDGGASGARPATKVMSVSGSGKRGRYVRQVTGRHNDTDLHVAARGGDAAALRRALLDAAAAVAATGEAPEDLEAARRAVAAEPNEAGETPLVAAAERGHLGVVVELLRHLDAEGLAAKNRSGYDALHVAAREGRHAVVQEMLHHDRMLAKTFGPANTTPLISAAMRGHIEVVELLLEQDDFGLVEMARDNGKNALHFAARQGHTGIVKALLEKDPQLARRNDKKGQTALHMAVKGTSCDVLRALVDADPAIVMLPDKNGNTALHVATRKKRAEIVSVLLRLPDTHVNALTRDHKTAFDIAEGLPVCEESCEIKDILSQHGALRSRELNQPRDELRKTVTEIKKDVHTQLEQTRKTNKNVHGIAKELRKLHREGINNATNSVTVVAVLFATVAFAAIFTVPGGNDNNGLAVVVQTTSFKIFFIFNAVALFTSLAVVVVQITVVRGETKSERRVVEVINKLMWIASVCTTISFIASCYIVLGRHFQWAAILVSLIGGVTMAGVLGTMTYYVVKSKRQRKIRKKEKMSRRSGSSSWYDNTELSDTELNPVYAL

SEQ ID NO: 5705 - protein, 176 aa, Zea mays
  unsure (1)..(176): unsure at all Xaa locations
  Clone ID: TF_LIB4828-028-A1-N1-C10.pep
MGLQQSKEELLYQQVNYGNVDGIRTLRGQGAGLEWIDKEGKTPLMLACMRPDLFDVAKVLIELGANVNAYRPGSHCGTALHHAAKKGLQQTVHLLLSHGEGRLCLFCGWMRENYAPAFLDAIAPQFMTRKIXAVVLPREVRTPTQASKVEIAIYPXIQASKPRSVLKLWKCPIEQP

SEQ ID NO: 5706 - protein, 492 aa, Zea mays
  Clone ID: TF_ZmC20337_1.pep
MHGPYPTAAAAAASSSDDMAANGMKVALHRQVSGGSMKQNAELRRQASLESPRTGRATSRFLFGRQSSMDPNRRRGRSQSPVRAPEDLGVPDNLDATMQLLFFACQGDALGIEGLLRSGVDVNSINLDGRTALHIAACEGHRDVVRVLISWKANIDARDRWGSTAVADAKFYGHSRVYDLLKFHGAKVPRTKRTPMMVSAPAEIPEYELNPGEVQFRRGCDVTPGVYHIAKWNGTKVSVKILDRDGCSDQEAANSFRHELTVLEKVRHPNVVQFVGAVTQSIPMMIVSELHEEKDLSVCIQKKGKLKPQKVLRYGLDIARGMTYLHQCKPDPIIHCDLKPKHIFLDSGGQLKIAGFGVTRMSKVGTDKVRLIYHGALVDSFSYHTAPELYRNDAFDSSVDSYSFGFILYEMVEGSVRAPEDSGHSIRFEGLRPSLKGRLKGYPPDFKALVEECWHPQAMARPTFSEIIIRLDKIYAHFDKHGSWKDSLKLWK

SEQ ID NO: 5707 - protein, 580 aa, Zea mays
  Clone ID: TF_ZmC14450_1.pep
MDSEPDVELRGLDIDVELDPEDLQPSVPLKKVPGGDLFEAARAGDCDRLALLLDAGANVNARDRWDSVALYYACLAGHAEAARMLLEAGAVCAERTFDGDRCHYAALNLRLRWLLKSFEARPPPLAPLPTALRATFLACPANRTAFLEMLQGSAGAESAALAAAAGFGPKDDPSSACLFPPDITFYVDRKPVEAHRVILCARSPFFEKKFKTDWKDRKEVRFSNQKLYFGALYSLIHFFYSDRLEVAVDDMENLARACKVCKCEELQKVLDKEVVHQKYAEYKSARELDMDSSQKRFILQAQSLPEEDRLPSALQRILQTCLANSREGYCSEESNEMIRNSEDDDLADLYIKVGDKVFHCHQVILASRSEYFRARLSRTVDFLEGNCGFEAAQNVPLLEEHDISAEAFEKMLEYMYTDKLEHLDPGQAEELFDVASRYLLFPLKRVVADMLLPYLEHVSPAELCHWLMMSDIYGVMKIREYILDIIACNFEMFAATREFRALLLTLPPPSGDDSLRTTRPSAPGTGGNTDQGNILDDLREKWLEAEGAELDERDESAALFDKRLEMLMLVAEKEADDEDA

SEQ ID NO: 5708 - protein, 189 aa, Zea mays
  Clone ID: TF_ZmC12604_4.pep
MGHGVSCARTGDEHNYFRAAQVGDLDALDALLAADPSLARRATLYDRLSALHITAANGHLEVMSMILDHGVPPDAVNRHKQTPLMLAAMHGKIDCARKLLQAGANILMFDSLHGRTCLHHASYFGHVDCLRAILAAARTTPVADSWGFARFVNVRDDRGATPLHLAARKGRPACVQVLLENGAIVSALP

SEQ ID NO: 5709 - protein, 141 aa, Zea mays
  unsure (1)..(141): unsure at all Xaa locations
  Clone ID: TF_ZmC36749_4.pep
PQVVLALAQCGGDAAASVLNAQDEEGWAPIHSAASSGNSQIVDILLXEFGCTPLHRAASTGNAELCEFLIEEGAEVDAVDRTGQTPLTHAVICENKGAALLLIRHGADVDVEDKEGYPALGRASNSFRPALIDAAKAMLEG

SEQ ID NO: 5710 - protein, 308 aa, Zea mays
  unsure (1)..(308): unsure at all Xaa locations
  Clone ID: TF_ZmC2241_2.pep
MADATAALSARSKVQAFLEAARAGDLQSLKNLVAALDEDGTGAASVAAAVRDANKRTALHFAAIGCRTDVCEFLIGELGLPVDPKDDDGETPLIHATRQGHLDTVKYLLDHGADPSLATSLGATALHHAAGIGNTELMKLLLSKGVDVESESDAGTPLVWAAGHGNQDAVKLLLQHNAKPNTENDDGVTALLSAVAAGSLPCLEVLIEAGANPNVKAGGATPLHIAADSGNIEVIKCLLKAGADPNTCDDDELKPVQVAAWRNNHEAVELLLPLTSXIPGVSNWNVDGIIEHMLPKEFEEKSQLKEAT

SEQ ID NO: 5711 - protein, 127 aa, Zea mays
  unsure (1)..(127): unsure at all Xaa locations
  Clone ID: TF_ZmC12604_7.pep
MGHGVSCARTGDEHNYFRAAQVGDLDALDALLAADPSLARRATLYDRLSALHINAANGHLEVMSMILDHGVPPXTPLMLAAMHGKIDCARKLLEAGANILMFDSLHGRTCLHHASYFGHVDCLRXIL

SEQ ID NO: 5712 - protein, 128 aa, Zea mays
  unsure (1)..(128): unsure at all Xaa locations
  Clone ID: TF_LIB4766-003-R1-M1-C3.pep
CLSKDVHHVQPVTDKMLLDPISCEIIQDSENQKXCLQGCSLLHFACEYGYPIMVELLLLFGADINMQDFHGRTPLHHCVQKKNDELTKHLLKRGARTTIRDGGGLTALERRMELGAITDEDLFILFVR

SEQ ID NO: 5713 - protein, 200 aa, Zea mays
  Clone ID: TF_LIB4738-092-Q1-K1-A8.pep
MGDLADLAGAGEAARSHLAAGGQRDRLAALLELAAADDVAGFREALAGGGGEGDTAELADGVGMWYGRSKAYEPRTPLMVAATYGSVEVVSLLLALGCVDVNRRPGVDGATPLHCAASGGSRNAVAVVKLLLGAGADPVTPDSAGRLPADVILSPPASPDALGDLEMLLGRRRGLAVATSVPSLSSSPPLSSSPDESTGR

SEQ ID NO: 5714 - protein, 323 aa, Zea mays
  Clone ID: TF_ZmC5707_1.pep
MASDESKNSKPEKPSSAAGAGLPNPFDFSSMSNLLNDPSIREMAEQIASDPVFNQMAEQLQKSAQGAGEQGIPALDPQQYMETMQQVMQNPQFVSMAERLGNALMQDPAMSSMLENLTSPAHKEQLEERMARIKEDPSLKPILDEIENGGPSAMVKYWNDPEVLQKIGQAMGVNLPGDSSVSTVLSGPEETEEEGGDDDESIVHHTASVGDEEGLKKALEGGADKDEEDAEGRRALHFACGYGELKCAEILLEAGAAVDALDKNKNTPLHYAAGYGRKECVDLLLKYGAAVTLQNLDGKTPIEVAKLNSQDEVLKLLEKDAFL

SEQ ID NO: 5715 - protein, 335 aa, Zea mays
  Clone ID: TF_ZmC33803_1.pep
MASSGDPPGSADEKKTPISEGSSDERQGLPPAGFSNPFDFGSMQSLLNDPSIKEMADQIARDPAFNRMAEQLQKSAQSTGEQGTPPLNPQQYMETMQKVMENPQFMTMAERLGNALMQDPAMSSMLETFSSPSHKEQLEERMSRIKEDPAMKSILDELENGGPSAMMKYWNDPDTLQKIGEAMGASFPFGAGSSAEPSGTEETEEEGGDDDESIVHHTASVGDEEGLKKALDGGADKDEEDSEGRRALHFACGYGELKCAQILLEAGAAVDALDKNKNTPLHYAAGYGRKECVDLLLKHGAAVTLQNLDGKTPIDVAKLNNQDEVLKLLEKDAFL

SEQ ID NO: 5716 - protein, 142 aa, Zea mays
  Clone ID: TF_ZmC1115_1.pep
RVFEGPMGPVFSSSLYGEDEGNDSELADIHVLAREGATEDIVKFLAAGVEVNMRDTEGRTPLHWAVDRGHLSAVEVLAKANADLNAKDNEGQTALHYAAVCEREDIAELLVKHHADLQIKDEDGNTAQDLCPPSWSFMNRAN

SEQ ID NO: 5717 - protein, 254 aa, Zea mays
  Clone ID: TF_ZmC9440_2.pep
MGRRHSGGGGGGRGRGRGRGRDEEEDLPLHKAARSGDAAAVESVCESNPLAVNSRDRLSRTPLHLAAWAGHVDVVRCLCKHKADVGAAAMDDTAALHFASQKGHVEVARELLASGASVKAKNRKGFTALHFAAQNSHLDLVKCLVKKGVDVTAKTKGGQTALHVAEDDEVRAFLKECEQSLKKGAELPSEKDDSAEKEGDSKSSGEVMKDEEDAEQGEKRKSELVGASSLSGVKKAKVSLGHLVCENDMDEEEE

SEQ ID NO: 5718 - protein, 758 aa, Zea mays
  unsure (1)..(758): unsure at all Xaa locations
  Clone ID: TF_ZmC9798_1.pep
MAVLLRPAAIAGGRQVWPVAEDEEGAREAEASSQRLVEAVARGDAREAGELLAAGRADVNYAGVVWLRARRVAEAEPREDAAAEARAVHEEIRADVSPLFLAAGNGDVALVRALLAKGADVNGKVFRGYPTTAAVREGCAEVAERVEGGRCSSCANEVEEAAELWVRGIRVXYQGGVWQERQGVSNAWLRSLRLESVGCSERVLVKSCSGRRAVGVLCGSVWGAAALVFSSRALACHDGFWFRGMVLCCVVRLXACCWVASTGEELRVGAGLAEPYDAVWCAVEYYESTGSILRMLLRSGFTSTAAHLGRTLLHHAILCGSAGAVQTLLASGADSEAPVKTTRSNRSRPVHLAARLGQPEILRMLADRGCDLNARAEAGDTAAIICSRHKREDCLRVLVSAGADVALLNSAGDSSASVASSGGWKTGFERAVIGAIRCGAVPRSSERSVFSPLMFGALCGDATAMEVLLSQPDVDVDEQDSDGCSPIMAAAKMGNVEAFRALVFAGANVKLSNKRGETAIGLAQQSKKRDLFEQVMLELALEKGMPGGFYALHCASRRGDTAAVRHLASTGCDVNIPDGDGYTPLMLAAREGHAGVCELLISYGARCDLRTPRGETALSLARAALATAAFNKAEDVIMDEMGRQAVLQGARVRKHTKGGRARPHGKSLRMVAAAGVLRWGGSSRRNVICREAEVGGSSAFQRHRQRKGDAYEPGLFRVVTATGREVHFVCQGGKEAAELWVRGIRAVTRAAFGKRGKE

SEQ ID NO: 5719 - protein, 244 aa, Zea mays
  unsure (1)..(244): unsure at all Xaa locations
  Clone ID: TF_LIB5117-070-A1-PF1-H3.pep
MLPWAATASSSSAAAAAAAALLHASPLPASHRAALPRYRPSPSLPPPLSVAFRSPARALPRGGDAFWEEPDDGSGGDYEDDGKQATGQRSSPFPPPFPLSRLVATRQQERQEQDLRREIELLLTPEEEAILDQNETADVTKISSPKWHPLHTYALALQIPLMDKLLDNGVDIDLVDKDGFTPLHKVIIGKKEAVISHLLRKGANPHVTDRDGATPLHYAGQVGALQTXKLLIKYRVDVNVVDVD

SEQ ID NO: 5720 - protein, 226 aa, Zea mays
  Clone ID: TF_ZmC178914_1.pep
MEAVLRHPSLSRTRPPNLNPPTTPSPSLHAPSLLRLRARRLIAAAVFQDQKPKEPASKGGDDEEEAYGEVDRIVSSRTVSSPVFAEDGSATAAVATEFLVEWKDGHEPSWVPAEAIAADVVAEYETPWWTAAKKADSEALAALLADETLRRDPDAEDAQGRTAAHFAAGLGSEECLRALGAAGADVGRRERAGGGLTPLHMAVGYGRACAVRALLELGADPEAPDG

SEQ ID NO: 5721 - protein, 320 aa, Zea mays
  Clone ID: TF_701167176_FLI.pep
LKVLDPLISSDSQTQCGADPNATARVLLRSLKPSLHANVDCTALFAAIVSRQVAVVRHLLQAGVKRDTKVRLGAWSWDASTGEELRVGAGLAEPYDAVWCAVEYYESTGSILRMLLRSGFTSTAAHLGRTLLHHAILCGSAGAVQTLLASGADSEAPVKTTRSNRSRPVHLAARLGQPEILRMLADRGCDLNARAEAGDTAAIICSRHKREDCLRVLVSAGADVALLNSAGDSSASVASSGGWKTGFERAVIGAIRCGAVPRSSERSVFSPLMFGALCGDATAMEVLLSQPDVDVDEQDSDGCSPIMAAAKMGNVEAFRA

SEQ ID NO: 5722 - protein, 62 aa, Zea mays
  Clone ID: TF_LIB3245-435-P1-N1-A8.pep
SSSTIRRSAARDARWSKNNPLTNSRGRTPLHHSVLKGRHVFAQLLVSRGADPQAADRDGWTA

SEQ ID NO: 5723 - protein, 256 aa, Zea mays
  unsure (1)..(256): unsure at all Xaa locations
  Clone ID: TF_ZmC5707_8.pep
FFLSAEPHSDSFGIVNFTIVLYARHVQDPSIREMAEQIASDPVFNQMAEQLQKSAQGAGEQGIPALDPQQYMETMQQVMQNPQFVSMAERLGNALMQDPAMSSMLENLTSPAHKEQLEERMARIKEDPSLKPILDEIENGGPSAMVKYWNDPEVLQKIGQAMGVNLSGDSSVSTVLSGPEETXLLEAGAAVDALDKNKNTPLHYAAGYGRKECVDLLLKYGAAVTLQNLDGKTPIEVAKLNSQDEVLKLLEKDAFL

SEQ ID NO: 5724 - protein, 883 aa, Zea mays
  unsure (1)..(883): unsure at all Xaa locations
  Clone ID: TF_ZmC885_1.pep
MAGWGPSRLPTCGPWGRGVALERELSRDGSHYSISSGILPSLGARSNRRAKLRPFIVSPYDRRYRCWETFLIILVIYSAWVSPFEFGFIRKPTGALAAVDNVVNAFFAVDIILTFFVAYLDRMTYLLEDDPKRIAWRYTTSWFVLDVASTIPSEFARKILPPNLRSYGFFNMLRLCRLRSNQLLLARGEQHRHFHYFWVVDVQPICVTLFEVHCSACFYYLLADRYPNSTDTWIGNSMPDFRQRGMCIRYVVSVYLSITTLTTVGYVHLHVENTRDAPVTLCASVHVPHLNXSVAYDGFEAVGCIQLGNEFVVSWSVCSFVISFHGKGFTKCNYMISFFSCLXIKLSLEVRNIRESXILSPKAIRSSISQYLFFNLVQKVYLFEGVSNDLIFXLVSEMKAEYFPPREDVILQNEAPTDFYILVTGSAELIELRNGGEQMAGVAKAGDVVGEIGVLCYRPQLFTVRTKSLCQLLRMNRTAFLSLVQSNVADGTIIMNNLMQLLKQQKDNSVMVGVLKEIENMLARGRLDLPVTLCFAVNKGDDFMLHQLLKRGLDPNESDNNGHTALHIAASKGDEQCVKLLLEHGADPNARDSEGKVPLWEALCEKQNPVVELLVQSGAGLSSGDVALYSCVAVEENDPELLENIIRYGGNVNSSMKDGTTPLHRAVCDGNVQMVELLLEHGADVDKQDNNGWSARDLADQQGHDDIQALFKSRKAHRKHASNGRVAPMLIGRFNSEPSMPDMSHENARVRSEVVPQKLLRKRVSFQNSLFGVISSSHAHQDTGRLLSKGLAGTEGPNCRHDSLIRVTISCPEKGGNAAGKLVRLPRSMAELLELGAKKFGIKPGKVLTVGGAEIDEVELIRDGDHILLVSDEWVPDVEQIRP

SEQ ID NO: 5725 - protein, 191 aa, Zea mays
  unsure (1)..(191): unsure at all Xaa locations
  Clone ID: TF_ZmC29_2.pep
MNGMPISASSAASVDSGAVAAGTPMKNATAADALAEMARHLTVDTEDTFAGLLELAADDDAEGLRLALERAPPAAADEAGLWYGRRKVLEHRTPLMVAATYGSLAALRLLVSISYVDVNRRSGTDGTTALHCAASGGSRTAVESVKLLLGAXADANTXDDAXRRRADVISVAPEMFDAKFXPSDLLGFPQS

SEQ ID NO: 5726 - protein, 208 aa, Zea mays
  Clone ID: TF_LIB5116-066-A1-PF1-E11.pep
MELKFDALWKRDLLALSKYNVNGKVKAITVRNDYPDYPVPYFQVTEGFDLKKVKKLMLERDVEIAKSIANDIIIPDPAPQWVADNFLDKYAELEPILVKDSAWCFLRLFQNCRGRGMSSDLTITAQTLTFMVSFNALRCAKVVLEGMAPELYGMHANPNCINKFGYFALHEAAERFSVDMIKLLLRHGASPNVRTVRNDVIFDVIENL

SEQ ID NO: 5727 - protein, 226 aa, Zea mays
  Clone ID: TF_LIB4738-112-A1-K1-G12.pep
MDLPPLSHQALFAAVRSADAPAVRALLVDAEASGTSLAALAAAQTDAGETALYVAAEAGSEEVVRLLLPLYDFEAATVRSRLDLDAFHVAAKQGHTGVVKEFLGRWPGLCSVCDSSNTSPLYSAAVKDHLDVVNAILDTDDSCIKIVRKNGKTSLHTAARIGYHRIVKALIERDPGIVPINDRKGQTVLHMAVKGKNTDVMEELLMDDAFIRHVRDKKRNTAFAIA

SEQ ID NO: 5728 - protein, 178 aa, Zea mays
  unsure (1)..(178): unsure at all Xaa locations
  Clone ID: TF_LIB3279-176-Q1-K6-B3.pep
MGGGNYARQMAMCLSMIASGIGMETGGISSEMVDQMKRNVASSDCDGSNVMELLDRMTEDSDKEEHLGPLHDAARAGKMDVCKHLVENLGFDVDVRANDXSGKTPLTCAVSCGKVIAVRYLIAMGADLEKQDAICFTPLHYAAKRGYSXLSMXLLSRGANVXVDSSGGTPLHGFCCLW

SEQ ID NO: 5729 - protein, 466 aa, Zea mays
  Clone ID: TF_ZM5008.C1.o2.fg.pep
MGNSLGCSASGERLVSAARDGDAIEARMLLELSPALARYSTFGGLNTPLHFAAAKGHLDIVTMLLEKGADVNARNYCGQVTRADYLSGRTALHFAAHDGFVRCIRLLVADFVPSVALEDIASSVVDGGDCQTNSGSSPNSSSGQKFNESARVRYINKPADGGVTALHMAALNGAGSTPLHYAAGGGKQECCELLISKGASRLTLNCNGWLPVDVARIFGRRSLEPLLSPNSHSNVPVFQLSSYLALPLMSILNIAREFGLQHTTPSIDDNDLCSVCLERSCSVTAEGCSHEFCIKCALYLCSTSNIRVEFTGPPGSIPCPLCRNGIMSFTKLPSTPTEGLKSGSALTFCNPCILNARSMDSPATFSRAEIRRNRVAAVSSELVCPITCSPFPSSALPTCRCSDDDPCGDTDVQDGPEFQSPRPSHSASMELDKRGEGDLDRASCSGMFWSRRSCHREQQCDAEINA

SEQ ID NO: 5730 - protein, 215 aa, Zea mays
  unsure (1)..(215): unsure at all Xaa locations
  Clone ID: TF_ZmC5306_1.pep
VVFSAKEKFIHAEYVNKEFLRNRSMDENQLAQQMWNSVAANDKKTAYSLIVRSRANVNLVYGEIPSSPFLTLGKALQQEQPVSPPVGSPRFFDCNSHDKISPREPLSPASTSSRTDDMEDGCEGLSLLHLACRVADVGMVELLLQYGASVNMNDSRGRTPXHCILKGRHRHAKLLLSRGADSQAMDRDGRTALQYAIDGGTSDEDILALLEDHSR

SEQ ID NO: 5731 - protein, 55 aa, Zea mays
  Clone ID: TF_700165611H1.pep
EGHRPLHLAVEGGHAEAVELLLDMGAEANARTRRSATQLQIAKAIEYEAIDQLLC

SEQ ID NO: 5732 - protein, 184 aa, Zea mays
  unsure (1)..(184): unsure at all Xaa locations
  Clone ID: TF_LIB3608-040-Q1-K6-A3.pep
VIRLQEEFFLPGEVILEQGSAVDQLYFVCHGALEGVGIGEDGQEETLLMLEPESSFGEIFSESEYGXSILCNIPQPYTVRVCELCRLLRLDKQSFTNILEIYFVDGRRILXIRVKQLESDITFHIGKQEAELTLRVNSAAFYGDLHQLKSLIRAGADPKNTDYDGRSPLHLAASRGYEDVVQFL

SEQ ID NO: 5733 - protein, 520 aa, Zea mays
  Clone ID: TF_ZmC15603_1.pep
MGNSLGCSASGERLVSAARDGDAIEARMLLELSPALARYSTFGGLNTPLHFAAAKGHLDIVTMLLEKGADVNARNYCGQTALMHACRHGHWEVVQMLLLFRCNVTRADYLSGRTALHFAAHDGFVRCIRLLVADFVPSVALEDIASSVVDGGDCQTNSGSSPNSSSGQKFNESARVRYINKPADGGVTALHMAALNGHLDCMQLLIDLGANVSAVSFPYGTTANLIGAGSTPLHYAAGGGKQECCELLISKGASRLTLNCNGWLPVDVARIFGRRSLEPLLSPNSHSNVPVFQPSSYLALPLMSILNIAREFGLQHTTPSIDDNDLCSVCLERSCSVAAEGCSHEFCIKCALYLCSTSNIRVEFTGPPGSIPCPLCRNGIMSFTKLPSTPTEGLKSGSALTFCNPCILNTRSMDSPATFSKAEIRRNRVAAVSSELVCPITCSPFPSSALPTCRCSDDDPCGDTDVQDGPEFQSPRPSHSASMELDKRGEGDLDRASCSGMFWSRRSCHREQQCDAEINA

SEQ ID NO: 5734 - protein, 180 aa, Zea mays
  Clone ID: TF_LIB5116-047-A1-PF1-C5.pep
MAAPPDSKSDKSPEELLCAAAEAGNDDAIAEIISSGADPTYFDASGMTPLMRAASGGHAAAARLLLDAGAPWNALSPEGLSAGDLTSDPATYDLLLDHALRSELILGTVARRQAASANSSDGVPAETYLDSRISFSEDRVMDAESKAVMMEWERPLMEAHARAVCAAGGGKVLNVGFGMG

SEQ ID NO: 5735 - protein, 166 aa, Zea mays
  Clone ID: TF_ZmC11431_1.pep
MVQVRRSLSMSRLRSCHDADDRGWNPLHVAARKGDLKEVRRLLDEGGMDVNAPAWGPKCPGATPLHLAAQGGHVKIMDELLERGANIDARTKGACGWTPLHIAAKERNKKAVRFLIENGAFLPPEMNDHRFNPPLHYCSGLEWAYEMKRMQDESDSPGETSLSSDN

SEQ ID NO: 5736 - protein, 520 aa, Zea mays
  Clone ID: TF_ZmC15603_2.pep
MGNSLGCSASGERLVSAARDGDAIEARMLLELSPALARYSTFGGLNTPLHFAAAKGHLDIVTMLLEKGADVNARNYCGQTALMHACRHGHWEVVQMLLLFRCNVTRADYLSGRTALHFAAHDGFVRCIRLLVADFVPSVALEDIASSVVDGGDCQTNNGSSPNSSSGQKFNESARVRYINKPADGGVTALHMAALNGHLDCMQLLIDLGANVSAVSFPYGTTANLIGAGSTPLHYAAGGGKQECCELLISKGSSRLTLNCNGWLPVDVARIFGRRSLEPLLSPNSHSNVPVFQPSSYLALPLMSILNIAREFGLQHTTPSIDDNDLCSVCLERSCSVAAEGCSHEFCIKCALYLCSTSNIRVEFTGPPGSIPCPLCRNGIMSFTKLPSTPTEGLKSGSALTFCNPCILNTRSMDSPATFSKAEIRRNRVAAVSSELVCPITCSPFPSSALPTCRCSDDDPCGDTDVQDGPEFQSPRPSHSASMELDKRGEGDLDRASCSGMFWSRRSCHREQQCDAEINA

SEQ ID NO: 5737 - protein, 368 aa, Zea mays
  unsure (1)..(368): unsure at all Xaa locations
  Clone ID: TF_ZmC11797_1.pep
MGIKENRKECHHNKQLKIDADENDLRFCFRIISPVKAYTLQAESGADQKDWIQKITGVIASLLNSPFPQQLSYGNVAAESNRSTSSVDSLSIEDNKSSEGHDDIFNLLRNIPGNDSCAECRSPDPDWASLNLGILICIECSGAHRNLGVHISKVRSLRLDVKVWEPVIMDLFHALGNDYANSIWEALLPKEDQGMNDSNGAILFIEKPKPSDAFSIKERYIQTKYVDKLLFARDPDQNTINILEAIRKNDVRAAYRILAIAEVSANMTYDALSKDVHHVQPVTDKMLLDPISCEIIQDSGKPEGCLQGXHGRTPLHHCVQKKNDELTKHLLKRGARTTIKDGGGLTALERRMELGAITDEDLFILFVR

SEQ ID NO: 5738 - protein, 128 aa, Zea mays
  Clone ID: TF_LIB3150-064-P1-N1-E1.pep
MAAWSRRDGMGGGNYARQMAMCLSMIASGIGMETGGIKLLDRMTEDSDKEEHLGPLHDAARAGKMDVCKHLVENLGFDVDVRANDGSGKTPLTCAVSCGKVIAVRYLIAMGADLEKQDAIGFTPLHYA

SEQ ID NO: 5739 - protein, 327 aa, Zea mays
  unsure (1)..(327): unsure at all Xaa locations
  Clone ID: TF_ZmC17166_1.pep
MAGDWQELGQAAAIGLLFAFLVAKLISTVIAFKEDNLRITRSPPTSPTAAAASRASRXSHYGSTDGGSGSDSDWEGVESTELDEEFSAASAFIAASAASGTSVPEEAQLRLYGLYKIATEGPCTAPQPSALKLKARAKWNAWHKLGAMPTEEAMQGYITIVQDLFPNWDAGASAKRKDEDSIASASASKGPMGPVFSSLMYEEDEGNESELGDIHVSAREGATDDIVKLLAAGVEVNVRDTEGRSPLHWAVDRGHLSAVEVLANANADLNAKDNEGQTALHYAAVCEREDIAELLVKHHADLRIKDEDGNTAHDLCPSSWSFMNQAN

SEQ ID NO: 5740 - protein, 334 aa, Zea mays
  Clone ID: TF_ZmC59910_2.pep
DGEFRREMMNRAVHAAARGGSLAVLRDLLRGCSDAAAYRDAQGSTILHAAAAKGQVEVVKDLIASFEAGNCVDDQGDTALHIAAFRGHVQVVEALITASPSLISATNEAGDTFLHMALTGFGTPEFQRLDRQTELIRQLASGAIVDISSSSTIINAQNDDGKTALHLAVVCNLHSDVVKLLMSLPCIDLNICDKDGMTPLDLLRKQPRTTASEVLIKQLILAGGFTSSRDHETRSAIASQLKMHSIVGSPGTSFKIPDGEIFFLHAAGVDVSGGIGIGEGGAGAVPFSSVIARADAADVLLGPKLKRLNSFQDAAKHIKVLFRWPRRGWKNQAA

SEQ ID NO: 5741 - protein, 204 aa, Zea mays
  Clone ID: TF_ZmC263942_1.pep
MNLKFKAPWKKELVALGKANVNGEDKTITIRNDYPDYPVPYFQVTEGFNLRKVKELMLERNVKIAKSIANDIIIPDPAPQWVADNFLDKYAELEPILVKDSARCFLQLFQNCRGRGMSSDLTITAQTLTFIVSFNALRCAKVVLEGMAPELYGMHANPNCINKYGYFPLHEAAERFSLDMIKLLLRHGASPNVRTVGNDVIKNL

SEQ ID NO: 5742 - protein, 235 aa, Zea mays
  Clone ID: TF_ZmC26160_2.pep
RPGRLHKSSSQGHADNPVSAGSISGAADSFSGLSLGKEDDSSPMKNSTVQSTAALIECKCGIRLCICEAPKPEPSPTPVKNINTVPPTTQSNPRPKKPANTQQKASATSSSNSSPFLNIGLMNNDSNDKGIVDYEVSGEGLREAIKGGDVKGVKKLLTQGVDSNYCDKQGFTLLHLAALFNQTEIALILMDHGANVESKNGQGETPLDCAPAMLQYKMRQRVEELAASASKGPLG

SEQ ID NO: 5743 - protein, 551 aa, Zea mays
  Clone ID: TF_ZmC1327136_1.pep
MDRLVIPEPSNEVVVRVEPGRQARGELTLRNAMHTMPVAFRLQPAVRGRFAVRPHTGILAPLAAVTVDVLYLASAPPEGPSGSGSRGEDAFLLHSVVAPGAAVKEPVTALDSVNPEWFSARSKQVFVDSGIRASFVGASVAARLVEAGAVEALREVLDRSEPEWRAADATDESGRTLLDLAVGLARADIVQVLLEYGADADKPSRGRTPLETAAAAGECLIAELLLANGATPAGSDAIHVAAAAGHNDVLKLLLARPASASPASSSSFSSSLTSIDAAGRDGKTPLRLAAEAGRRDAVKALLAAGARADARCGADGATALHAAARRGDEAVARLLLSHGVSGTASVRDVAGKTAFEIAAEEGHGGRILDFLGLGEAILAAARKGEVRSVRRAADGGASVEGRDAHGWTPLIRAAFKGRADTVRDLIDRGADIDAADADGYTALHCAAEAGRADVVDLLLKNGANVKAMTVKGRTAADAATASGKSKVVRLLDKATIMGRKQDVSEKVAPAVAKGGSMDRKRRARKGSSGAIRFGGGKEGFEAAAVTVGWSH

SEQ ID NO: 5744 - protein, 472 aa, Zea mays
  Clone ID: TF_ZmC12604_1.pep
MGHGVSCARTGDEHDYFRAAQVGDLEALDALLDADPSLARRATLYDRLSALHIAAANGRLEVLSMVLDHGVPPDVVNRHKQTPLMLAAMHGKTDCVLKLLQAGANILMFDSQHGRTCLHHASYFGHVGCLQAILTAARTTPVANSWGFARFVNVRDDHGATPLHLAARQGRPGCVQALLENGAIVSALTGSYGFPGSTSLHLAARSGSLDCTRKLLAWGADRLRRDSAGRIPYAVALKRNHEACAALLNPSAAEPMVWPSPFKFISELEPEAKALLEAALTEANREREEKILRGTKHSPHPPTWDHASDAADADAIDDASSDASASDAELCCICFDQACTMEVQDCGHQMCAPCTLALCCHSKPDPVTLALPSPACPFCRGSISRLLLVARASSDDADTEKSAAAAAAAAASSPQLVRRRSRRSHNLSDGGSSSFKGLSSAVAGSFSKIGRGSSRTMADSDGCGVDKPEHDP

SEQ ID NO: 5745 - protein, 79 aa, Zea mays
  Clone ID: TF_LIB3067-045-B5-F3A.pep
ELPSPEPTRFGFATAVKAAVDGVMTTTPKDVQGDRAVKKRGRKNQYRGIRQRPLGKWAAEIKDPNKGVRVWVGTYNTGE

SEQ ID NO: 5746 - protein, 306 aa, Zea mays
  Clone ID: TF_ZmC660_4.pep
STAGCITSIVYLGAYDSEEAAARAYDLAALKYWGPETLLNFPVEDYSSEMPEMEAVSREEYLASLRRRSSGFSRGVSKYRGVARHHHNGRWEARIGRVFGNKYLYLGTFDTQEEAAKAYDLAAIEYRGVNAVTNFDISCYLDHPLFLAQLQQEPQVVPALNQEPQPDQSETGTTEQEPESSEAKTPDGSAEPDENAVPDDTAEPLTTVDDSIEEGLWSPCMDYELDTMSRPNFGSSINLSEWFADADFDCNIGCLFDGCSAADEGSKDGVGLADFSLFEAGDVQLKDVLSDMEEGIQPPAMISVCN

SEQ ID NO: 5747 - protein, 112 aa, Zea mays
  unsure (1)..(112): unsure at all Xaa locations
  Clone ID: TF_jC-zmX700221106a1.pep
RQSLVRKSPNFRDGLSTXTTAGSDAHAAWVAKGKRXNEYRGILQRAWGKWALMIRDSHQGARVRLGTFNRPNVDERSYDAEMRXIGRKNVKVHYTDAPSSGQTRPSRSTAPQ

SEQ ID NO: 5748 - protein, 144 aa, Zea mays
  unsure (1)..(144): unsure at all Xaa locations
  Clone ID: TF_LIB3732-034-Q1-N6-A3.pep
YDVAARALRGADAVLNFPGAIASRAAPASASPEDIRAAAAAAQLEYSHQGRTANPPPPPASPPSPAAAAAQDWHQQHDAASYTPQQEAGTDEFMDEEAIFXMPQLLRNMAAGMMMSPPRLSPDTSDESPDPSEAGESLWSYRDP

SEQ ID NO: 5749 - protein, 121 aa, Zea mays
  Clone ID: TF_ZmC1903_6.pep
MDSASSLVDDTSGSGGGACTDKLRALAAAAASASGPPPERMGSGASAVVDAAEPGAEADSGSAPASVAAVAAGVGGKLPSSRYKGVVPQPNGRWGAQIYERHLRVWLGTFAGEADAARAYD

SEQ ID NO: 5750 - protein, 177 aa, Zea mays
  unsure (1)..(177): unsure at all Xaa locations
  Clone ID: TF_LIB4767-002-R1-N1-D7.pep
MSIELLASAFNLCAVLCPANCLRSLSRSLSRFSRLPSSLCLLQEPMAATTIDWHARNNAALPAAMYGVAVPDSKELVRALAPPTQQAPTISFAYPRSGVEQQSAAGSFLGAGGSGLTPAQILQVQSRLQFLRRPAGAAVATQPMKRQGVPLPXAPAVSKLYXGVRQRHWGKGVXEIR

SEQ ID NO: 5751 - protein, 116 aa, Zea mays
  Clone ID: TF_LIB3136-018-G10.R6A.pep
MYKSWLAQTQYSSDGKPSNEANGCNFQSLSLTMSPSVQNGVGAISSVQVNEDSRKRVMAKSHAREPVPRKSIDTFGQRASQYRGVTRHRWTGRYENNLWDNSCRKEGQTRKEGKFP

SEQ ID NO: 5752 - protein, 77 aa, Zea mays
  unsure (1)..(77): unsure at all Xaa locations
  Clone ID: TF_LIB4730-052-R1-K1-B8.pep
MRRAEPVGKQADPERGITGYKGVRGPRGGKGVSKIRVPGSGERLGLGSYPTPEAAAVAHKTAVYFFRXXGGGPGNFR

SEQ ID NO: 5753 - protein, 96 aa, Zea mays
  Clone ID: TF_ZmC421638_1.pep
MCGGAIISEFIPQRGAKRGLCAEDIWPHAAADFDDLLHAHAHAHGHDDDDFAAAASFHPDQEPPARKRERKTMYRGIRRRPWGKWAVEIRDPAKGS

SEQ ID NO: 5754 - protein, 168 aa, Zea mays
  Clone ID: TF_ZmC2171_1.pep
LTKVIKILQEMNKRRSSREKKKEEEIDVETKGPRNGYAWTKNRRCHLPRPYCMRACIFHSSAQLLLDLIPSHCKLHACISISSIGRPAGRSRVLFIPVVLPTVRPCTARFTAAARGCRWWSGMPRVTTKPRSVRPCTRSGKLSLALVPLNRSAASWSWTTAWTAPPTC

SEQ ID NO: 5755 - protein, 52 aa, Zea mays
  Clone ID: TF_LIB3062-027-Q1-K1-B1.pep
RHAGSGLTSGTRRSARASGSAPSTRRPYLGPLLQREHSDRAPAYHQDQLSRA

SEQ ID NO: 5756 - protein, 222 aa, Zea mays
  Clone ID: TF_ZmC4345_1.pep
MVSLRRRRLLGLCSGKDSLPVDLPKPIENEKTVEVAHSNVKPFSVHPLPLAKTSDVLIKSSNGSDDSKEEKTQYYPGKEIKCRKRHRRKQYVDQEPCIMRGVYFKNMKWQAAIKVDKKQIHLGTVGTQDEAARLYDRAAFMCGREPNFVLSEEEKQELRRYTWEDFLAVTRNTITSKKQRKVGSLRRSKADLFMGQSDGDTEMANGGGSSNSDNGDAGTSAS

SEQ ID NO: 5757 - protein, 91 aa, Zea mays
  Clone ID: TF_LIB3076-043-Q1-K1-H9.pep
MMNTRACGSGSGGRNDQTMMGFSEHPKPAASGQAQPSPPSSPSERPPAGRGRRRAQEPGRFLGVRRRPWGRYAAEIRDPTTKERHWLGTFD

SEQ ID NO: 5758 - protein, 112 aa, Zea mays
  unsure (1)..(112): unsure at all Xaa locations
  Clone ID: TF_LIB3245-182-P1-N1-H5.pep
NKDLYWGAFSTREEAXDAYHIAAIKFRGLNAVTNFYMSRFPVESILLNDLPVWGGDTLRAGKFPLDLVQTASAGEMILDRAAAALQATMPPCEKDYWGLVTLHYQQQQEHGP

SEQ ID NO: 5759 - protein, 61 aa, Zea mays
  unsure (1)..(61): unsure at all Xaa locations
  Clone ID: TF_cC-zmle189002g10d1.pep
WPAKCDSVPLYRGVQKHVWGRFAENIRYLTKRALVXLGTFDSNDVAELAYDVDQRDLFGPF

SEQ ID NO: 5760 - protein, 107 aa, Zea mays
  Clone ID: TF_LIB3355-042-Q1-K1-C6.pep
ALGGYDREEKAARAYDLAALEYWGPSTHINFPEQQRLLEGSIHVQRSDKVPCCKSARPFLHPTCCLFQHPKTSSHLTSESGHSSVPLSVGSSEFSELTRTHTHAACV

SEQ ID NO: 5761 - protein, 75 aa, Zea mays
  unsure (1)..(75): unsure at all Xaa locations
  Clone ID: TF_LIB4705-003-R1-K1-A4.pep
EIQPPACARVCAAGQRPSNCLPNRPAQRTXEQCAAFYARPPVNCAAFHCTPLVPAMPRRPLFSLAQVVVGGPVAQ

SEQ ID NO: 5762 - protein, 58 aa, Zea mays
  Clone ID: TF_LIB3150-014-Q1-N1-B11-F2B.pep
MAAAAEAAAAQHQRRRRKRFVGVQKQPSGRWVAEIKDTIHKIRAWISTFDTVEEAGRA

SEQ ID NO: 5763 - protein, 82 aa, Zea mays
  Clone ID: TF_ZmC5367_25.pep
MWAWGCVRDRGSTPDVPSPEISPRRSCSRISAALIVFALGLVLCFVRDPSILQGLRFGPAPLRLVGITWDDFKIGFCVSRWT

SEQ ID NO: 5764 - protein, 124 aa, Zea mays
  unsure (1)..(124): unsure at all Xaa locations
  Clone ID: TF_LIB3608-011-Q1-N6-A11.pep
VQRRGRQRQGARRRRRRRRRRLVHHGAPAPARLWSLRQRLLGGGGGFLFGGGTXPTELERGGXXRPLRLLRCVEGAQANSRLSYRVADLRRVPGHRGVSHCVQSWLXRXWCWLKWFIGGYGGIE

SEQ ID NO: 5765 - protein, 84 aa, Zea mays
  Clone ID: TF_LIB3245-310-P1-N1-B6.pep
IALISVTCYQISDYEKEIEVMKTMSQDEFVAYIRRQSSCFSRGTSSYRGVTRRKDGKWQARIGRIGESRDTKDIYLGTFETEEE

SEQ ID NO: 5766 - protein, 94 aa, Zea mays
  unsure (1)..(94): unsure at all Xaa locations
  Clone ID: TF_LIB3633-001-P1-K6-G1.pep
MAGQMGLNQLGPAQIQQIQAQFMFQQQQQQQRGLHAAFLGPRAQPMKQSGSPSPPPPLAPAQSKLYRGVRQRHWGKWVAEIRLPKNXTRXGLVT

SEQ ID NO: 5767 - protein, 201 aa, Zea mays
  unsure (1)..(201): unsure at all Xaa locations
  Clone ID: TF_LIB4730-104-Q1-K1-E6.pep
MWPMEEEEVFVTVRRTEHVDVTSRAVVVAAGRAAVAGPRTVRVFCDDYDATDSSGDEAEEEEKKAARRRVKRYVQEIRLERAAKEEXXEEEATAAASLGAVLPGRKRKRKPDGEASEPRFRGVRQRPWGKXYAAEIRDPWRRXWRVWXLGTFDXTAEEAAKVYDSAAXRLRGRDATTNFQAAGGPRALSQGRAGSKSAATS

SEQ ID NO: 5768 - protein, 179 aa, Zea mays
  Clone ID: TF_LIB3912-059-Q6-K6-H4.pep
MIKTWLRNNQVAQPQPPAPHQPQPEEMSTDASGSSFGCSDSMGRNSMVAAGGSSQSLALSMSTGSHLPMVVPSGAASGAASESTSSENKRASGAMDSPGSAVEAVPRKSIDTFGQRTSIYRGVTRHRWTGRYEAHLWDNSCRREGQSRKGRQGNETYIHNNHCLYRHRKNIYGLYNLSY

SEQ ID NO: 5769 - protein, 126 aa, Zea mays
  Clone ID: TF_ZmC167604_1.pep
MAEKQPPAPHSPSPAVQVQPAGPAAGGHSHHQAASASASGPASPHSPSPVVQQGDGTSSARAAAITAPPMGTTTATSSGEPSPRSSGKHAFYPGIRCRSGKWVSEIPQPRKARRIWLGTYPMAKMA

SEQ ID NO: 5770 - protein, 67 aa, Zea mays
  Clone ID: TF_ZmC485_4.pep
LAHRWERHAWLGCRYIYLGLFDSEVEAARLAYDKAAIKCNGREAVTNFEPSTYDGELLLTEASAEGN

SEQ ID NO: 5771 - protein, 97 aa, Zea mays
  Clone ID: TF_ZM4997.C1.o1.fg.pep
MWRLENASEVPPIEFPQELLQKEVDRPPTQQFFPPTTTAAQQATSTAYRGVTFYRRTGRWESHIWDCGKQVGFISFETCKDFSGEIGNVLVFFRSSV

SEQ ID NO: 5772 - protein, 190 aa, Zea mays
  Clone ID: TF_ZmC141723_1.pep
RKTRKWIGSYDSEEAAAGAYQAYAKQIREELLAIKNQRSVSERAALSSSSSVSCVSSSPPCEQTGHEPQTRVLVEKDPEPVDEVFLNFSLTPKGISMDDLLGRIDEIPVCDDPVSPTDELPLDNFTSLEDAFPISDFIGSRDEHLYEHYIGLADISHLPLPMDDPAFNLDAELDWSGFDFAAIEGELDVL

SEQ ID NO: 5773 - protein, 193 aa, Zea mays
  unsure (1)..(193): unsure at all Xaa locations
  Clone ID: TF_LIB4073-004-Q1-K1-D9.pep
MAAAIDMYKYYNAHQIASSSPSDEELAKALEPFITSASSSSPYHRYSSSPSMSQDSYMPTPSYTSFATSPLPTPAATTSSSTPFSQLPPLYSSPYAAPSMVGQMGLNQLGPAQIQQIQAQFMFQQQQQQQQRGLHAAFLGPRAQPMKQSGSPPLAPAQSKLYRGVRQRHWGKWVAEIRXPKNRTRLWLGTFDT

SEQ ID NO: 5774 - protein, 150 aa, Zea mays
  Clone ID: TF_9952793.pep
MDPTPRAVLISISSGGAKGGGGGSHAHYRGVRKRPWGRYAAEIRDPWKKTRVWLGTFDTPLEAALAYDRAARTLRGAKARTNFPDDHAGQQLQQHLRRRQHPPPQHVSFGGVGVGVDVDCAPPWHFVCFQTPTTAPATETPSTALELGTG

SEQ ID NO: 5775 - protein, 425 aa, Zea mays
  Clone ID: TF_ZmC6700_2.pep
PRLPHSFPPSLAHPVGQPKPSRNRKDLARPPFPSSSLCRSCHPPSVHPTNNPSATTPRCGDVRRRHPLGFHPAVRGAGGGSGGQEETAAARLAFAAAVGAPRTAVDGVMTPKDGEGDMPTTANNSAANKRRRKNQYRGIRRRPWGKWAAEIRDPSKGVRVWLGTYSTAEEAARAYDAEARRIRGKKAKVNFRDEAAAAGAQKPPAATTPTACASAARLAPPPPPPKFRADEVFGNMDGGSNDLFAMLAFSDSSSKVVRVEPGEGAAGFLPADLLPGSKRSAANMLLLSDQSSDSYGSCDLGWEWDWDDDTMTSDYASVFAPAAPSNVVPAWYTQGGPVSKRTRSSYGYGAAMPGGFDPETNYQYQPLPYVVESSPSDGASTDDMDCLQMMRAGDVPQDGASSGGGGGDGGDIWSLDELLMAAGAY

SEQ ID NO: 5776 - protein, 174 aa, Zea mays
  Clone ID: TF_ZmC11704_1.pep
MARPQQRYRGVRQRHWGSWVSEIRHPLLKTRIWLGTFETAEDAARAYDEAARIMCGSRVRTNFPEDAGGGGGGDGQQQQQAAPSLLSPALVAKLHRSNLASAQAAQGKADASAAAAAALPRVAAAVPAGMGVSASPSASASAAGDWSGGLLEEQYVDQMIEELLDSNFSMEISY

SEQ ID NO: 5777 - protein, 146 aa, Zea mays
  Clone ID: TF_ZmC8439_2.pep
MAPRTSEKTMAPAAAAATGLARGAGPHYRGVRKRPWGRYAAEIRDPAKKSRVWLGTFDTPEDAARAYDAAAREYRGAKAKTNFSFPSCLPLAAADVGGACRSGNSSSTTTTVDSFGGDVQATLIFRVKLRTCGLNGSKLTLYGLYS

SEQ ID NO: 5778 - protein, 188 aa, Zea mays
  Clone ID: TF_LIB4742-037-R1-K1-F10.pep
PSNQEAGRLRHHRCSSSKSSAAAACKSYRGVRRRPWGKFAAEIRDTRRRGARVWLGTFATADDAALAYDKAALRMRGPRACLNFPLDVVQRALADGGGRAETTPRVLRRKRRRANHDDAAGGDDTRSDGSVAAATARDPTTTMVSFACAKKDDQVMTPLMAQERSVSDPGAVIEFEDIGGDPAGSRSQ

SEQ ID NO: 5779 - protein, 130 aa, Zea mays
  Clone ID: TF_LIB3354-089-Q6-K6-E1.pep
FACRKARIWLGTFETAEDAARAYDEAARIMCGPRARTNFPADANGPPPSFLSAALVDKLHRFNLASVQAAQRQREAAAAAAAAAATSAPATPPTPPATQWGGGGRSLEEQHVEQMIEELLDSDFSMEICC

SEQ ID NO: 5780 - protein, 443 aa, Zea mays
  unsure (1)..(443): unsure at all Xaa locations
  Clone ID: TF_ZmC485_1.pep
FILRDSPGQQVARSAPPQVASADRCAGSICVGFAVPRPTMPDRRPAAVTQQFFPPTTTAAQQATMEEQCHVPAGSAAEQWVRSSASRKSRRGPRSRSSQYRGVTFYRRTGRWESHIWDCGKQVYLGGFDTARAAARAYGRSALXSRGLTAYANFSLDYDYDGMEKVKDLTMVEFVMPADECSSGSPQGSSRCRGVTGNAGGSSRASSCRPAGDRCVIIGIFHTGHDAAHAYHIAAIPSVGPAAATDVVDPSHDQHVRIKKRALXQELGLGLGSFPPGPLPLSGRCYFFGFAPRGGMLVTCSRSIGFLEEELTRVAYHQPAAGMFGRPADKNVHVAPPPHRQWQQQQQGNRSCLDTLPQQLAATLSXHLRVGQXARRPIPNDSGINWACAPPYATAGAGTDDEDASSAAAAASLGFPLWALRAAPSSPSWPSRCAFPVVPRHQQ

SEQ ID NO: 5781 - protein, 245 aa, Zea mays
  unsure (1)..(245): unsure at all Xaa locations
  Clone ID: TF_ZmC278_2.pep
MEELGDAGQGPQGDASGALVRKKRMRRKSTGPDSIAETIRWWKEQNQRLQDESGSRKAPAKGSKKGCMMGKGGPENVNCVYRGVRQRTWGKWVAEIREPNRGRRLWLGSFPTAVEAAHAYDEAAKAMHGPLPRVNFSAGSADAGCRVATVLLESGXTEVESVETEEVVHXVKTEAKNGALGSVKVTWVIQSAEETVLPKEGDVSYDYFNVENPVEMIIVELNADKKFEAPEESLDGDDGFSLFAY

SEQ ID NO: 5782 - protein, 207 aa, Zea mays
  Clone ID: TF_ZmC218929_1.pep
MNTYMSLSLERSSSVVRDVATPAPPATSGASAPYPRAGAGASLSLPGAAAAHGHSQYLPLNEDDSLDMVLFDVLREASGPGSASAAAPDTYQPPSSLPTLKALASGAARRGSRTAYAPKAATAGHHYRGVRRRPWGKYAAEIRDPARHGARLWLGTFATAEEAAAAYDRAAVRMRGAKALLNFPPGVAGCGSAATATAKQAGLTEAK

SEQ ID NO: 5783 - protein, 157 aa, Zea mays
  Clone ID: TF_LIB4979-098-A1-K1-H5.pep
DLIFFVSASAVADDVDLNLSISQPASSQSPKRDKNCLGPQLHHHHGRPFDGSAVLKKTKIDAPSELSSAGRPHRSFLPHLVAAEHLPPRSHPFFITHHESDASRRDPSWAAAAAWKVTAAAPPPPTTTLLPLPLPSTSSAAASSGFSNTATTAAAAP

SEQ ID NO: 5784 - protein, 135 aa, Zea mays
  Clone ID: TF_ZmC109013_1.pep
THNNKRKIRRWTAEVAGSRHGPEAAVIHRHDLVQAVPDVLVLGRRRPCSLQRGRRPRHRHVQRRRGVGPTVLAEALTGQRAARLHIPRRSGGGGVREVELGAAAPVTDRGGVVGAGGVLGGVERAEPLRAARRGS

SEQ ID NO: 5785 - protein, 62 aa, Zea mays
  Clone ID: TF_LIB3137-013-Q1-K1-H10.pep
GGGRRRGWLESKPAFVVRASSAATHPRARHEQRSRRRAPDQQYMGVRRRPWGKWAGEIRDPV

SEQ ID NO: 5786 - protein, 190 aa, Zea mays
  unsure (1)..(190): unsure at all Xaa locations
  Clone ID: TF_LIB4730-087-Q1-K1-C5.pep
PWERSQPQHQQSPPSPSSSSSCVSADTVLVPPGKRRRRAATAKANKRARKDPSDPPPAAGKRSSVYRGVTRHRWTGRFEAHLWDKHCLAALHNKKKGRQVYLGKXAYDGEEAAARAYDLAALKYWGPEALLNFPVEDYSSEMPEMEAAFREEYLASLRRRSSGFSRGVSKYRGVARWLLINLLIILKPLI

SEQ ID NO: 5787 - protein, 181 aa, Zea mays
  unsure (1)..(181): unsure at all Xaa locations
  Clone ID: TF_LIB4727-004-R1-K1-H3.pep
QRPSGRYAAEIRDPAKKSRVWLGTYDTAEDAARAYDAAAREYRGAKAKTNFPYPSCVPLSAAGCRSSNSSTVESFSSDAQAPMQAMPLPPSLELDLFXVRFPFGSIPVTHPYYFFGQAAAAAAEAGCRVLKLAPAVTVAQSDSDCSSVVDLSPSPPAAVSARKPAAFDLDLNCSPPTEAEA

SEQ ID NO: 5788 - protein, 346 aa, Zea mays
  Clone ID: TF_ZmC455_1.pep
EPSGHLWSGHDAGSEPCHADAAPGPAARKSIWSRGQCCGAWFHQNSRKKRPRRSRDGPTSVAAVIQRWAERNKHLEYEESEEAKRPRKAPAKGSKKGCMKGKGGPDNTQCGYRGVRQRTWGKWVAEIREPNRVDRLWLGTFPTAEDAARAYDEAARAMYGDLARTNFPGQDATTSAQAALASTSAQAAPTAVEALQTGTSCESTTTSNHSDIASTSHKLEASDISSYLKEKCPAGSCGIQDGTPIVADKEVFGPLEPITNLPDGGDGFDIGEMLRMMESDPHNAGGADAGMGQPWYLDELDSSVLESMLQPEPEPEPEPFLMSEEPDMFLAGFESAGFVEGLERLN

SEQ ID NO: 5789 - protein, 330 aa, Zea mays
  Clone ID: TF_ZmC455_3.pep
AGGPTLALNECQILVQQKPQGDSRLLASNLCRKKRPRRSRDGPTSVAAVIQRWAERNKHLEYEESEEAKRPRKAPAKGSKKGCMKGKGGPDNTQCGYRGVRQRTWGKWVAEIREPNRVDRLWLGTFPTAEDAARAYDEAARAMYGDLARTNFPGQDATTSAQAALSSTSAQAAPTAVEALQTGTSCESTTTSNHSDIASTSHKLEADISSYLKEKCPAGSCGIQDGTPIVADKEVFGPLEPITNLPDGGDGFDIGEMLRMMESDPHNAGGADAGMGQPWYLDELDSSVLESMLQPEPEPEPEPFLMSEEPDMFLAGFESAGFVEGLERLN

SEQ ID NO: 5790 - protein, 154 aa, Zea mays
  Clone ID: TF_ZmC7732_2.pep
MARPQQRYRGVRQRHWGSWVSEIRHPLLKARIWLGTFETAEDAARAYDEAARIMCGPRARTNFPADANGPPPSFLSAALVDKLHRFNLASVQAAQRQREAAAAAAAAAATSAPATPPTPPATQWGGGGRSLEEQHVEQMIEELLDSDFSMEICC

SEQ ID NO: 5791 - protein, 363 aa, Zea mays
  Clone ID: TF_ZmC118_2.pep
MCGGAILANLREPAPRRLTERDIWQQKKKLKRGGGGGRRSFAAEDDEDFEADFEVFEADSSDSDLELREGTDDDVVEIKPFTAKRTFSSDGLSTMTSAVARSAKRKRKNLYRGIRQRPWGKWAAEIRDPQKGVRVWLGTFNSPEEAARAYDAEARRIRGKKAKVNFPDAPAVGQKRRSGSASAKASKSSFGQKPIVKVAMNNLANTNASFFQSASYPSNSFVQHGNIPFVPAMNSTASVDDPIMNLHSDQGSNSFGCSDLGWENDTKTPDITSIAPISTIAEGDESAFVDSNSNNSFVLPALENSAVDLTDGLTDLESYMRFVLDGGPSDSVDSLLNLDGSQDVGSDMDLWSFDDMPIVGDFF

SEQ ID NO: 5792 - protein, 257 aa, Zea mays
  Clone ID: TF_ZmC118_4.pep
MCGGAILAELREPAPRRLTERDIWQQKKKPKSTFSSPRVRTMTSAVARSAKRKRKNLYRGIRQRPWGKWAAEIRDPQKGVRVWLGTFNSPEEAARAYDAEARRIRGKKAKVNFPDAPAVGQKHRSGSASAKASKSSFGQKPIVKGSNSFGCSDLGWENDTKTPDITSIAPISTIAEGDESAFVDSNSNSSFVLPALENSAVDLTDGLTDLESYMRFLLDGGPSDSVDSLLNLDGSQDVGSDMDLWSFDDMPIVGDFF

SEQ ID NO: 5793 - protein, 263 aa, Zea mays
  Clone ID: TF_ZmC11610_1.pep
MTKKLISISTMAGKQGCKEQSNDRRIQASIQGDAKSVVVGFGGRLVTREQEQEDAIIVAALRHVVSGYSTPPPEVVVTVAGGEACGTCGIDGCLGCDFFGAPELAQEAVSCGTGQVATTASVGGGAAAAALRPRRRRNRNMYRGVRQRPWGKWAAEIRDPRRAARVWLGTFDTAEEAARAYDCAAVEFRGPRAKLNFPGHEALFQGHGDTAAAADTETLTPSPGEWQLGGGAGDELWEGLQDLMKQDEVDRWLAPVFGAASSF

SEQ ID NO: 5794 - protein, 155 aa, Zea mays
  Clone ID: TF_LIB4865-004-R1-K1-D8.pep
RRAADCSHAAPRAKAKPGRRKNQYRGIRQRPWGKWAAEIRDPVKGVRVWLGTYPTAEAAARAYDRAARRIRGAKAKVNFPSDTSSSVTVPTAVSRSAAAAAQAPAVLPPPKVEAQTQVSDEVKELSEELMAYENYMNFLGIPYMEGGTTAASATT

SEQ ID NO: 5795 - protein, 224 aa, Zea mays
  unsure (1)..(224): unsure at all Xaa locations
  Clone ID: TF_ZmC28357_1.pep
MCGGAIILDYIPARRRVSAADFWPDSEADAEDSDSHAPDPERAPRPRGKAKRGRKNQYRGIRQRPWGKWAAEIRDPVKGVRVWLGTYPTAEAAARAYDRAARRIRGAKAKVNFPNDASSSSVTAPTAASGVAAQAPAVFLPAPKVEARAQVSDEVKXELSEDLMAYKNYVNLHGVPXMAAGNAACECHHRCPSRREAQVPAPAPAGLWSFEDYYYPPSLSLFTE

SEQ ID NO: 5796 - protein, 215 aa, Zea mays
  Clone ID: TF_ZmC28357_2.pep
MCGGAIIFDYIPARRRVSTADFWPGSEADAEDIHASHSTDPQRAPPPRAKAKPGRRKNQYRGIRQRPWGKWAAEIRDPVKGVRVWLGTYPTAEAAARAYDRAARRIRGAKAKVNFPSDTSSSVTVPTAVSRSAAAAAAQAPAVLPLPKVEAQTQVSDEVKELSEELMAYENYMNFLGIPYMEGGTTAAKSQVPAPAGLWSFEDYYYPPSLSLFTE

SEQ ID NO: 5797 - protein, 470 aa, Zea mays
  Clone ID: TF_ZmC485_3.pep
MQLDLNVAEAPPPVEMEASDSGSSVLNASEAASAGGAPAPAEEGSSSTPAVLEFSILIRSDSDAAGADEDEDATPSPPPRHRHQHQQQLVTRELFPAGAGPPAPTPRHWAELGFFRADLQQQQAPGPRIVPHPHAAPPPAKKSRRGPRSRSSQYRGVTFYRRTGRWESHIWDCGKQVYLGGFDTAHAAARAYDRAAIKFRGVDADINFNLSDYEDDMKQMGSLSKEEFVHVLRRQSTGFSRGSSRYRGVTLHKCGRWEARMGQFLGKKYIYLGLFDSEVEAARAYDKAAIKCNGREAVTNFEPSTYHGELPTEVADVDLNLSISQPSPQRDKNSCLGLQLHHGPFEGSELKKTKIDDAPSELPGRPRQLSPLVAEHPPAWPAQPPHPFFVFTNHEMSASGDLHRRPAGAVPSWAWQVAAAAPPPAALPSSAAASSGFSNTATTAATTAPSASSLRYCPPPPPPSSHHHPR

SEQ ID NO: 5798 - protein, 260 aa, Zea mays
  Clone ID: TF_700281859_FLI.pep
CHCRYVYLGLFDTEEEAARAYDRAAIKCNGKDAVTNFDPSIYAEELEPAASTGGGGDDHNHNLDLSLGSSAGNKRGSLDDGGGGGGGGDDETSDQRVPMAFDVDWQTAAPRSTKAKLDASSKQPQTQMLPPPPPAVLRVAHQLPLPFGPRHPQSQFLSNGGDPGTSGGLSLAIGGAGGGHWPPQLQHLQQQRLHGAWANGGGTSWPPPPHPHPHPHPPPPSTAATAAAASSRFPPYVVTTTQGPAGWAQKNGFHSLARPT

SEQ ID NO: 5799 - protein, 249 aa, Zea mays
  Clone ID: TF_ZmC485_12.pep
NSARGRRRDCGKQVYLGGFDTAHAAARHALDWTPRILRHSLAPGTRRAYDRAAIKFRGVDADINFNLSDYEDDMKQMGSLSKEEFVHVLRRQSTGFSRGSSRYRGVTLHKCGRWEARMGQFLGKKAYDKAAIKCNGREAVTNFEPSTYHGELPTEVADVDLNLSISQPSPQRDKNSCLGLQLHHGPFEGSELKKTKIDDAPSELPGRPRQLSPLVAEHPPAWPAQPPHPFFVFTNHEMSASGDLHRRPA

SEQ ID NO: 5800 - protein, 93 aa, Zea mays
  Clone ID: TF_LIB3357-055-P1-K1-F1.pep
LVLCTVYSSHLYLSAHARREQAAHDVHGAEAMEGHYSPTDSADEAGGERRFRGVRQRPWGKWAVEIRDPHKAARVWLGTFDTAEAAARAYDEA

SEQ ID NO: 5801 - protein, 172 aa, Zea mays
  unsure (1)..(172): unsure at all Xaa locations
  Clone ID: TF_LIB3591-110-Q1-K6-H5.pep
GAAAMGGHYSPTGSAAEAGGERGVRGVRERPWGKWAGEIRDPHKGGVVGVXTFNTAEAAGRAYYEAALRFRGSRAKLNFPEDARLTTGPSAAGAPAGGGSTRTMAVAGSGGGSYQQEASAXVXFADYLQYQMMLLQGGTSGQGSSSHGGDPXYYYYGGHRGAGAGAGGGAMS

SEQ ID NO: 5802 - protein, 277 aa, Zea mays
  unsure (1)..(277): unsure at all Xaa locations
  Clone ID: TF_ZmC4595_1.pep
MLLNPASETSVLDTIRQHLLEEPAAAEARPADESFGSLVADQWSGSLPFRTDDADDMVVFGGLQDAFAYGWLPDGSFGHVKPEPVRSPDSSSWHPCSYDGSTCFGLRDPEQPLTPGTTTPGRGPEGAPAAKARGKHYRGGRQRPWGKFAAXIRDPARNGARVWLGTYDTAEDAALAYDRAAYRMRGSRALLNFPLRIGSGDKRPSPAPPEPATSSDSSSSSASGSHKRRKRGEAAAANMAMALVPPPSQLNRPAQPWFPAAPVEQAAMAPRVEQIVV

SEQ ID NO: 5803 - protein, 241 aa, Zea mays
  Clone ID: TF_ZmC8128_1.pep
APPAEAAAGSGPAGGEGRKGKAPKGGPENGKFRYRGVRQRSWGKWVAEIREPRKRSRKWLGTFATAEDAARAYDRAALLLYGPRAHLNLTSPPPPTLAAPRSHPHSSSATSSAPPALRPLLPRPPLHQLSSDGAPAPDFHYHNQFQRRLLPQPTPTLYYANTATASTVTTSVPTRVAVPQEPAIAPAVGSLTSPGEPQVGRKEEARGEAGWDYNGGEEEDYAAALLWDEPEPFFWFDVFLK

SEQ ID NO: 5804 - protein, 200 aa, Zea mays
  Clone ID: TF_ZmC25962_1.pep
MEAEQAAMAAPQLGAAHQQTQPRRQYRGVRMRKWGKWVAEIREPHKRTRIWLGSYATAVAAARAYDTAVFYLRGRSARLNFPEEIPSFGLADGVDVGEHARDPAAAAAGGGGGCTLSAASIRKKAIEVGSRVDALQTGMVVPPPHHRERHRHHNHLPQLRVHAEEQQEEEEQKPQRPAWSGRVKNPDLNRAPSPESSDAE

SEQ ID NO: 5805 - protein, 494 aa, Zea mays
  Clone ID: TF_ZmC485_2.pep
MELDLNVAEVAPEKPAAALEASDSGSSGSSVLNAEAASAGGGGPAPGEEGSSSTPAVLEFSILRSDSDAAGADADDGDATPSPPRHHHQQLVTRELFPAPQHWAELGFFRAGPQQQPDIRVLPHPHPHPPPPPPAQPQPAKKSRRGPRSRSSQYRGVTFYRRTGRWESHIWDCGKQVYLGGFDTAHAAARAYDRAAIKFRGVDADINFNLSDYDDDMKQMKSLSKEEFVHALRRQSTGFSRGSSKYRGVTLHKCGRWEARMGQFLGKKYIYLGLFDSEVEAARAYDKAAIKCNGREAVTNFEPSTYDGELLLTAEASAEVADDVDLNLSISQPASSQSPKRDKNCLGPQLHHHHGRPFDGSAVLKKTKIDAPSELSSAGRPHRSFLPHLVAAEHLPPRSHPFFITHHESDASRRDPSWAAAAAWKVTAAAPPPPTTTLLPLPLPSTSSAAASSGFSNTATTAAAAPSAASSRRFDPPPPSSSSSSSHHHHHHRR

SEQ ID NO: 5806 - protein, 265 aa, Zea mays
  unsure (1)..(265): unsure at all Xaa locations
  Clone ID: TF_700262211_FLI.pep
STAGCITSIVYLGAYDSEEAAARAYDLAALKYWGPETLLNFPXHHHNGRWEARIGRVFGNKYLYLGTFDTQEEAAKAYDLAAIEYRGVNAVTNFDISCYLDHPLFLAQLQQEPQVVPALNQEPQPDQSETGTTEQEPESSEAKTPDGSAEPDENAVPDDTAEPLTTVDDSIEEGLWSPCMDYELDTMSRPNFGSSINLSEWFADADFDCNIGCLFDGCSAADEGSKDGVGLADFSLFEAGDVQLKDVLSDMEEGIQPPAMISVCN

SEQ ID NO: 5807 - protein, 132 aa, Zea mays
  Clone ID: TF_LIB3066-048-Q1-K1-F2-120a.pep
GGQAYLGAYDSEEAAAHTYDLAALKYWGPDTILNFPAETYTKELEEMHFVSVEESLASLRRQSSGFSRGVSKYRGVARHHHNGRWEARIGRVFGNKYLYLGTYNTQEEAAAAYVISAIEYRGANAVTNFDIR

SEQ ID NO: 5808 - protein, 132 aa, Zea mays
  Clone ID: TF_LIB4729-131-A1-K1-D11.pep
MCGGAIIADFVPAGARRPATDDTMSASILSGSEDHPELPLPLPAPAPGRKTAYRGIRRRPWGRWAAEIRDPRKGARVWLGTYATPEDAARAYDVAAREIRGPKAKLEAFLGLQDTDEGGGVEAWDAVDLMLA

SEQ ID NO: 5809 - protein, 209 aa, Zea mays
  Clone ID: TF_ZmC145170_1.pep
MMVKNPSSNGVLTATAFSDSKTRPERGVGGEAAGRPYRGVRMRSWGSWVSEIRAPNQKRRIWLGSYATPEAAARAYDAALLCLKGSNAVLNFPAASSSSSSSSSTSASSSHQRADSRGHPDDDPAAAGGDMSPRSIQRAAAAAAAAIDDDAGMGASAADDRCSSSAGATTPTSASLSTQGSTADHVGQEQHATTTAAASTGSPPEGKEE

SEQ ID NO: 5810 - protein, 340 aa, Zea mays
  Clone ID: TF_ZmC3465_2.pep
MAAAIDMYKYYNTSAHQIASSSSPSDQELAKALEPFITSASSSSSSSPYHGYSSSPSMSQDSYMPTPSYTSYATSPLPTPAAASSQLPPLYSSPYAAPCMTGQMGLNQLGPAQIQQIQAQFMFQQQQQQRGLHAAFLGPRAQPMKQSGSPPPLAPAPAQSKLYRGVRQRHWGKWVAEIRLPKNRTRLWLGTFDTAEDAALAYDKAAFRLRGDTARLNFPALRRGGAHLAGPLHASVDAKLTAICQSLSESKSKSGSSGDESAASPPDSPKCSASTTEGEGEEESGSAGSPPPPPPPTLAPPVPVPEMAKLDFTEAPWDETEAFHLRKYPSWEIDWDSILS

SEQ ID NO: 5811 - protein, 168 aa, Zea mays
  Clone ID: TF_ZmC966436_1.pep
MLSGYERSREAFMMVDALATVVAGGATAGARQHQVSPEGQWWSDYYAGDVTPPPPPPSLSAPAAHEHGAARIPATTASPSSSSQAPSPSSTGSGTPRRRYRGVRQRPWGKWAAEIRDPHKAARVWLGTFDTAEAAARAYDVAALRFRGSRANLNFPESATLAKPPPTA

SEQ ID NO: 5812 - protein, 28 aa, Zea mays
  Clone ID: TF_700610879H1.pep
AAEIKESRKCVRVWLGTFNSPEEPVRAY

SEQ ID NO: 5813 - protein, 159 aa, Zea mays
  unsure (1)..(159): unsure at all Xaa locations
  Clone ID: TF_jC-zmshLIB3587P021g01a1.pep
LPTLCDGAILLEFIPSVLVRRGVTPGHGRGVKVRLTAANDDDDFEAAFRDLCEDSEKQPVWXFYRRRSGSPVLAAEGPSARIKXVRCRPWGKWAAEVPVPVRGVRVWLGTFATAEDLARAXDHSARDLRGATTRLNFPSNSKRRSAVAKAAPRVNEPEH

SEQ ID NO: 5814 - protein, 111 aa, Zea mays
  Clone ID: TF_ZmC8692_2.pep
MPDSDVPSPASSPLGSVQKIARGRKSRRGGGRSPAYRGVRMRAWGKWVSEIREPRKKSRIWLGTFPTAEMAARAHDAAALVVKGRGAVLNFPEMAASLPRPASAAPRDVQA

SEQ ID NO: 5815 - protein, 353 aa, Zea mays
  Clone ID: TF_ZmC1979_1.pep
LLVLVQCRDCGKQVYLGGFDTAHAAARAYDRAAIKFRGVEADINFSLEDYQDDMKQQMGHLSKEEFVHVLRRQSTGFPRGSSKYRGVTLHKCGRWEARMGQFLGKKYVYLGLFDTEEEAARAYDRAAIKCNGKDAVTNFDPSIYAEELEPAASTGGGGDDHNHNLDLSLGSSAGNKRGSLDDGGGGGGGGDDETSDQRVPMAFDVDWQTAAPRSTKAKLDASSKQPQTQMLPPTRPVAHQLPLPFGPRHPQSQFLSNGDPGTSGGLSLAIGGAGGGHWPPQLQHLQQQRLHGAWANGGGTSWPPPPHPHPHPPPPSTAAAAASSRFPPYVVTTTQGPAGWAQKNGFHSLARPT

SEQ ID NO: 5816 - protein, 196 aa, Zea mays
  unsure (1)..(196): unsure at all Xaa locations
  Clone ID: TF_LIB5116-043-A1-PF1-B9.pep
MTVDRKDAEAAAAAAAPFEIPALQPGRTCGAEESTRSHVLVKPIXKKRPRRSRDGPNSVSETIRRWKEVNQQLEHDPQGAKRARKPPAKGSKKGCMQGKGGPENTQCGFRGVRQRTWGKWVAEIREPNRVSRLWLGTFPTAEDAARAYDEAARAMYGALARTNFPVHPAQAPAVAVAAAIEGVVRGASASCESTTT

SEQ ID NO: 5817 - protein, 209 aa, Zea mays
  Clone ID: TF_ZmC8271_1.pep
MTNLSAMAASQSYVIRFDGHFDEPSPSSAGAEPPGPQPPFAGRMISLEREHQVIVAALLHVVSGYATPPPQVFTPPPAAARCQVCGMERCLGCEFFAAGEGALGGGAEKAAATGGAAALAAGQRRRRKKKNKYRGVRQRPWGKWAAEIRDPRRAVRKWLGTFDTAEEAARAYDQAAIEFRGPRAKLNFPFPEQPPTGHDEPISSNGDAS

SEQ ID NO: 5818 - protein, 487 aa, Zea mays
  unsure (1)..(487): unsure at all Xaa locations
  Clone ID: TF_ZmC5960_1.pep
MDMDMSSAYPHHWLSFSLSNNYHHGLLEAFSNSSGTPLGDEQGAVEESPRTVEDFLGGVGCVGAPXRSRRLQIRITSLCAASXGSITARFLRHYPAAPAGTTVENPGAVTVAAMSSTDVAGAESDQARRPAETFGQRTSIYRGVTRHRWTGRYEAHLWDNSCRREGQSRKGRQVYLGGYDKEEKAARAYDLAALKYWGPTTTTNFQVSNYEKELEEMKSMTRQEFIASLRRKSSGFSRGASIYRGVTRHHQHGRWQARIGRVAGNKDLYLGTFSTQEEAAEAYDIAAIKFRGLNAVTNFDMSRYDVESILSSDLPVGGGASGRAPAKFPLDSLQPGSAAAMMLAGAAAASQATMPPSEKDYWSLLALHYQQQQEQERQFPASAYEAYGSGGVNVDFTMGTSSGNNNNNTGSGVMWGATTGAVVVGQQDSSSKQGNGYASNIPYAAAMVSGSAGYEGSTGDNGTWVTTTTSSNTGTAPHYYNYLFGME

SEQ ID NO: 5819 - protein, 488 aa, Zea mays
  Clone ID: TF_ZmC484_102.pep
MNKSLSCYYWRRLQRIRRPRRLPSAPPFRPLSLASSISPPTMGKEKSHINIVVIGHVDSGKSTTTGHLIYKLGGIDKRVIERFEKEAAEMNKRSFKYAWVLDKLKAERERGITIDIALWKFETTKYYCTVIDAPGHRDFIKNMITGTSQADCAVLIIDSTTGGFEAGISKDGQTREHALLAFTLGVKQMICCCNKMDATTPKYSKARYDEIVKEVSSYLKKVGYNPDKIAFVPISGFEGDNMIERSTNLDWYKGPTLLEALDQITEPKRPSDKPLRLPLQDVYKIGGIGTVPVGRVETGVIKPGMVVTFGPTGLTTEVKSVEMHHEALQEALPGDNVGFNVKNVAVKDLKRGFVASNSKDDPAKEAASFTSQVIIMNHPGQIGNGYAPVLDCHTSHIAVKFAELITKIDRRSGKELEKEPKFLKNGDAGMVKMIPTKPMVVETFSAYPPLGRFAVRDMRQTVAVGVIKSVEKKDPTGAKVTKAAAKKK

SEQ ID NO: 5820 - protein, 437 aa, Zea mays
  Clone ID: TF_ZmC2282_1.pep
MCGGAILSGFIPPSGVAAAAAAAKKKKQQQRCRVTADLLWPGPGSKGAPQDQEEDFEADFREFERGLGEDDVDSAGEGGDPEVQELPPPEPTRFAFATAAKAAVDGVMTTTPKDVKGDRAVKKRGRKNQYRGIRQRPWGKWAAEIRDPNKGVRVWLGTYNTAEEAARAYDAEARKIRGKKAKVNFPDDDAPGTRHRPTNAANAARLVAPPPPPKACADEIFNNLKNDDGDNNNNDDLFAMFAFGDNKKEAVPAAKPAAAEGGSGSGSGSFLVPAPAMAAAVPGNKRRSSATNIMVSVSDDQSSNSYGSGSSDLVGSWSWDDAAAAAAMTSDYTSSVFAPASYSYMQGGAPKRMRSSYGGAPPSLAHDAAMPGFGLDKVSYHHYQALPPYYVGSSNASVGNLGLLQQADDAPAPQDGASAGDIWSLDELLMLAAAGAY

SEQ ID NO: 5821 - protein, 436 aa, Zea mays
  unsure (1)..(436): unsure at all Xaa locations
  Clone ID: TF_ZmC2282_3.pep
MCGGAILSGFIPPSGVAAAAAAAKKKQQQRCRVTADLLWPGPGSKEAPQDQEEDFEADFREFERGLGEDDVDSAGEGGDPEVQELPPPEPTRFAFATAAKAAVDGVMTTTPKDVKGDRPVKRGRKNQYRGIRQRPWGKWAAEIRDPNKGVRVWLGTYNTAEEAARAYDAEARKIRGKKAKVNFPDDDAPGTGHRPANAAPRLVAPPPPPKACADEIFNNLKNDDDDNNNNNDDLFAMFAFGDNKKKVPAAKPAAAEGGSGSGSFLVPAPAVAVVPGNKRRSSATNTMLSVSDDQRSNSYGSGSSDLVGSWSWDDDAAAAAMTSDYTSSVFAPDNAVLPAASYTQGGAPKRMRSSYGGAPPSLAHDAAMPGFGLDKVSYHHYQALPPYYVGSSNASVGNLGLLQQADDAPAPQDGASGRGXIWSLDELLMLAAAGAY

SEQ ID NO: 5822 - protein, 422 aa, Zea mays
  Clone ID: TF_ZmC2282_5.pep
MCGGAILSGFIPPSGVAAAAAAAKKKQQQRCRVTADLLWPGPGSKEAPQDQEEDFEADFREFERGLGEDDVDSAGEGGDPEVQELPPPEPTRFAFATAAKAAVDGVMTTPPKDVQGDRAVKKRGRKNQYRGIRQRPWGKWAAEIRDPNKGVRVWLGTYNTAEEAARAYDAEARKIRGKKAKVNFPDDDAPPGTRHRPAPKACADEMFNNLKNDDDNNDDLFAMFAFGDNKKKVPAAKPAAAEGDSGSGSFLVPAPAVAAVPGNKRRSSATNIMLSVSDDQSSNSYGSGSSDLVGSWSWDDDAAAAAMTSDYTSSVFAPDNAVLPAASYSYMQGGAPKRMRSSYGGAPPSLAHDAAMPGFGLDKVSYHYQALPPYYVGSSNASVGNLGLLQQADDAPAPQDGASAGDIWSLDELLMLAAAGAY

SEQ ID NO: 5823 - protein, 534 aa, Zea mays
  Clone ID: TF_ZmC1995_1.pep
MASLAISRPPGTSHRAAPFVLGCPPPWPPPPPPAARPRPPPPRPDAAAAARLLEEEAGAGSSRARSPGGPELESMVLDLNAESPTPGSASAASSSSVVVGGGFFRFDLLGGTPDEEGCSPSPPIVTRQLFPLPYPDAAGSTAASTASNGSPPPEVAVAWARRPADLGAPALAQGKVVSAPSSPAVVSPAAGKKSRRGPRSRSSQYRGVTFYRRTGRWESHIWDCGKQVYLGGFDTAHAAARAYDRAAIKFRGLDADINFQLKDYEDDLKQMRNWTKEEFVHILRRQSTGFARGSSKYRGVTLHKCGRWEARMGQLLGKKYIYLGLFDSEIEAARAYGRAAIRFNGPDAVTNFDSVSYDGDVPLPPAIEKDVVDGDILDLNLRISQPNVHDLRSDGTLTGFGLSCNSPEASSSIVSQPMGPQWPVHPHSRSMRPQHPHLYASPCPGFFVNLREAPMQEEENRSEPACPQPFPSWAWQTQGSRAPVLPATTAASSGFSTAAATGVDAATAGHSVPPPSGSLRQFSGYHQLRFPPTA

SEQ ID NO: 5824 - protein, 121 aa, Zea mays
  Clone ID: TF_LIB3156-001-Q1-K1-H9.pep
PRVRPRVRPRVRPRVRGKASAEIRDPHKGVRVWLGTYNTAEEAARAYDEAAKRIRGEKAKLNFPQTPHLTQPPAKKRCMMAPELTPPSSETKSPPTPQLFMGFGYENGVYRPSEAMESEME

SEQ ID NO: 5825 - protein, 193 aa, Zea mays
  unsure (1)..(193): unsure at all Xaa locations
  Clone ID: TF_ZmC234991_1.pep
MFPWGGFGSEQRSAGEQRRCVLRSWARPLVAQPQADANTTRYLGVRRRSWDRYAAEIRDPATKXHDRVARSLRGSHARTNFAYPDLPPGSSVTPYLSPDLTSGDNATQLLQPFYAVDPAAASLPPALPAANGAAGYGYGVEDMSALMDDLTIPDDLTADYGAEDTGGLEAGSGAATDRGRGRRARETRGRDSG

SEQ ID NO: 5826 - protein, 222 aa, Zea mays
  Clone ID: TF_LIB3607-014-Q6-K6-G12.pep
MVPLPLLPSCDRPGWRAVRRVPAVYLGAYDDEDAEERAHDLAELKYWGPAGTVLNFPLSGYDEERREMEGQPREEYVASLRRRISGFARGVSKYRGVARHHHNGRWEARIGRVLGNKYLYLGTYATQEEAAVAYDMAAIEHRGFNAVTNFDISHYINHWHRHCHGPCDGSLGAMDVAPNVSLELDLLECPVTVRLSLEETTGDDEFHNREDYLGHLFGVQQL

SEQ ID NO: 5827 - protein, 281 aa, Zea mays
  Clone ID: TF_ZmC21315_4.pep
SRTYYIVHQESKRRRRLGTTKPKLESYTIPVIQPASQPSHHIMVKTAASSSSDDAAAAKRRTYKGVRMRSWGSWVSEVRAPGQKTRIWLGSHATAEAAARAHDAALLCLRGSAADLNFPLRLPFDLPPAATMSPKAIQRVAAAAASASSSSSCGGGGGLRAPPPFAPRAENNGTSACSDGDGDATPASSTTSSPTSHADDVSSPDSTVSSAGDVDYYTSLADIDAFFQSPKCVVDYALMDPCSAFFAPDSTAADDDGGCCWAWEEDGGGIALWSFSATLDC

SEQ ID NO: 5828 - protein, 280 aa, Zea mays
  Clone ID: TF_ZmC7961_3.pep
MAAAINLPGPSEDLMRAMESFMQDDTTHPLQQTHRTPRQPENTAHGAQYPATHLSPAQMQFIQAQLHLQRNPGLGPRAQPMKPAVPVPPAPAPQRPVKLYRGVRQRHWGKWVAEIRLPRNRTRLWLGTFDTAEQAALAYDQAAYRLRGDAARLNFPDNAESRAPLDPAVDAKLQAICATIAAASSSSKNSKAKSKAMPINASVLEAAAASPSNSSSDEGSGSGFGSDDEMSSSSPTPVVAPPVADMGQLDFSEVPWDEDESFVLRKYPSYEIDWDALLSN

SEQ ID NO: 5829 - protein, 193 aa, Zea mays
  Clone ID: TF_ZmC983_2.pep
MAQELQETSSSSATTTTSSCTTSCCSSTVTDSSSSPPSPAAANAAPAPRKAEAETGGDEDGCAGKAAPAKKRERSSEGKHPTYRGVRMRAWGKWVSEIREPRKKSRIWLGTFPTAEMAARAHDAAALAIKGRATRSARHKSGSCSTCRTCSSTSGTGSGASRRCGPRSMTCWRSMRRRSRCFGNSSLAITKRV

SEQ ID NO: 5830 - protein, 225 aa, Zea mays
  Clone ID: TF_ZmC484_48.pep
VAACTSGGAPERYRGVRLRKWGKWAAEIRNPFTGKRQWLGTFDTAGAASAAYLSASRSFADEKRRRRGLPVAASSADTPASGSTPTASSSSSASTAPFAHPSPSSVLEPSKEARNTQSPEATPARPSTDSAQLPEDPEFYQDLLRGLQLPDIDPLDFRAGLDALDLSDADFGLDDEHDLLLGDFGDEEMEIDLDLDDINDVFPEMPGCDLGRGMDDFLQTVDFCV

SEQ ID NO: 5831 - protein, 225 aa, Zea mays
  Clone ID: TF_ZmC484_74.pep
VAACTIGGAPERYRGVRLRKWGKWAAEIRNPFTGKRQWLGTFDTAGAASAAYLSASRSFADEKRRRRGLPVAASTPDTPASGSTPTASSSSSASTAPFAHPSPSSVLEPSKEARNTQSPEATPAPPSAESAQLPEDPEFYQDLLRGLQLPDIDPLDFRAGLDALDLSDADFGLDDEHDLLLGDFGDEEMEIDLDLDDINDVFPEMPGCDLGRGMDDFLQTVDFCV

SEQ ID NO: 5832 - protein, 225 aa, Zea mays; identical to SEQ ID NO: 5830
  Clone ID: TF_ZmC484_77.pep

SEQ ID NO: 5833 - protein, 100 aa, Zea mays
  Clone ID: TF_ZmC214275_2.pep
MAMSEPSSDTSCTSSCSSGPSTSTSPRAAPSAAAAAASGGGKKRPRSDDGGSSSSSAPAYRGVRMRAWGKWVSEIREPRKKSRIWLGTFPCPEMAARAHD

SEQ ID NO: 5834 - protein, 125 aa, Zea mays
  Clone ID: TF_LIB3117-035-P1-K1-G4.pep
TSHARSVARADMHAYCTAEPPARKRERKTMYRGIRRRPWGKWAAEIRDPAKGARVWLGTFATAEAAERAYDRAARRIHGDKAKVNFPNEDPTAEYDYDYDGHSHAHAHAGGEQGMLAMYNSGGRD

SEQ ID NO: 5835 - protein, 189 aa, Zea mays
  Clone ID: TF_ZmC15341_1.pep
MCGGAIIADFVPAGARRPATDDTMSASILSGEDHPELPLPLPAPAPGRKTAYRGIRRRPWGRWAAEIRDPRKGARVWLGTYATPEDAARAYDVAAREIRGPKAKLNFPPAVGGGGGARAPAPAAAKRRRKSAAAEESSASSPPAAVVVAGGGEEALRDCMSGLEAFLGLQDADEGGGVEAWDAVRLMLA

SEQ ID NO: 5836 - protein, 228 aa, Zea mays
  unsure (1)..(228): unsure at all Xaa locations
  Clone ID: TF_ZmC15341_2.pep
MCGGAIIADFVPAGARRPATDDTXPPPSSPVLRCEDHPELPLPAPGRKTAYRGIRRRPWGRWAAEIRDPRKGARVWLGTYATPEDAARAYDVAAREIRGPKAKLNFPPAVGGGGGGARAPAPAAAKRRRKSAAAEARGRARPRLLRRRRRRPSWRAAGRRRCATACPGSRRSWGCRTPTRVAASRRGTPWTSCWRRPYAVAGGLWAPAPAPARACRRCERPPQLFWIE

SEQ ID NO: 5837 - protein, 229 aa, Zea mays
  unsure (1)..(229): unsure at all Xaa locations
  Clone ID: TF_LIB4767-027-Q2-K1-E2.pep
DPRGRPGPPRRQSDSPPAPLTTASALHHHRSSRRRGDGDHGHGEISTAAAAVSSATVAVLLLVLRLRGHRPRPARRGGGRRRPRPAPSLIRGSARTPPPPRGREAPSTGESPVYLGAYDSEEAAARAYDLAALKYWGPETLLNFPVEDYSSEMPEMEAVSREEYLASLRRRSSGFSRGVSKYRGVARHXHNGRWEARIGRVFGNKYLYLGTFDTQEEAAKANDLAAIEY

SEQ ID NO: 5838 - protein, 357 aa, Zea mays
  Clone ID: TF_ZmC21952_1.pep
MAKNYRERRLKRAMKIDEGEDDFEADYQAFSKKYDEKDECHYKFMALLPFKNGLPNVSPPTKEKVGLHFAMKDVVISQKPTTTNEGIIVRPKCKRKTPYRGIRRRPWGKWAAEIRDPTKGVRVWLGTYKTPEDAARAYDAEARKIRGNKAKVNFPNEPPNMVSNAPKLIVTAMTTMAIPADKLNANELMCHKNYSNEDFFSMVNFSGNNGNFISTAAFGLQCIKKPRVPYDIPRMGECSNQNRMTYGLSNGLGNEASRNLNGCSFLPQAGMPIFIQPTFDGPSRMIGRNDGVIVPTLTNATPMAGVDAAKKMNQQPIFQEMESEDIPSILQGDVSEDVAAEISMWEFYDNLLDNKEN

SEQ ID NO: 5839 - protein, 307 aa, Zea mays
  Clone ID: TF_ZmC172_1.pep
MCGGAILAELIPTTPARRGGAAWPAGKCKRRKANDFEAAFREFDEDSEEEEEDDEGVVESKPAFVVRASSAATQPRARQEQRSRRRAPDQQYRGVRRRPWGKWAAEIRDPVKGVRVWLGTFPSAEAAARAYDHAARHIRGPRAKLNFPSSSSASAAGAPASRKRARTADADAVIDLEEQEQRPAAAALKHEAAECSGSDALPDFSWQGVSAAYDEASAPRPAFDFEARPESAADEASPRASDSESDAMFDSLLFGDQFAFFDAGAYESLDSLFSADAVQSNAAAAADQDMPLWSFDDGCLVEDNLSF

SEQ ID NO: 5840 - protein, 191 aa, Zea mays
  Clone ID: TF_ZmC8601_1.pep
MGYLEAGQKLYRGVRQRHWGKWVAEIRLPRNRTRLWLGTFDTAEEAALAYDQAAYRLRGDAARLNFPDNAASRGPLHASVDAKLQSLCQSIAASKKGAKKPASAAAAASSSAPTSNCCSSPSSDDATSSCLESATESSCPSRSPSPSASPGPTVPEMQQLDFSEAPWDEAAGFALTKYPSYEIDWDSLLAN

SEQ ID NO: 5841 - protein, 163 aa, Zea mays
  Clone ID: TF_ZmC3662_1.pep
MRRARLPPVPVPTAPGDAGPEVKYRGVRRRPSGRYAAEIRDPARKTPIWLGTFDSAEAAARAYDAAARTIRGAAARTNFPSAPTSAAVAPPLPLPASTAAAAGAATSSLSSAVAVRSERAGPGGRRHGLALRHAAPPLAAAGPQPLLPRLVPPGYSLASCGRR

SEQ ID NO: 5842 - protein, 131 aa, Zea mays
  Clone ID: TF_ZmC3662_2.pep
MRRARLPPVPVPTAPGDAGPEVKYRGVRRRPSGRYAAEIRDPARKTPIWLGTFDSAEAAARAYDAAARTIRGAAARTNFPSAPTSAAVAPPPPLPLPASTAAAAGAATSSLSSTVESWSGGGGGGAPAGIR

SEQ ID NO: 5843 - protein, 441 aa, Zea mays
  Clone ID: TF_21208780.pep
MCGGAILSGFIPPSGVAAAAAAAKKQQQQQQRCRVTADLLWPGPGSKGAPQDKEEDFEADFREFERGLGEDDVDSAGEGGDPEVQELPPPEPTRFAFATAAKAAVDGVMTTTPKDVQGDRAVKKRGRKNQYRGIRQRPWGKWAAEIRDPNKGVRVWLGTYNTAEEAARAYDAEARKIRGKKAKVNFPDDDATGTRHRPTNAANAARLVAPPPPPKACADEMFNNLKNDDGDNNNNDDLFAMFAFGDNKKKVPAAKPAADEVGSGSGSFLVPAPAVAAVPGNKRRSSATNIMLSVSDDQSSNSYGSGSSADLVGSWSWDDDDAAAAAAAAAMTSVFAPDNAVLPAASYSYMQGGAPKRMRRSYGGAPPSLAHDAAMPGFGLDKVSYHYQALPPYYVGSSNASVGNLGLLQQADDAPAPQDGASAGDIWSLDELLMLAAAGAY

SEQ ID NO: 5844 - protein, 173 aa, Zea mays
  unsure (1)..(173): unsure at all Xaa locations
  Clone ID: TF_LIB5023-004-R1-XP1-G5.pep
MAATTIDWHARNNAALPAAMYGVAVPDSKELVRALIAPPMQQAPTISFAYPCSGVEQQSAAGSFLGAGGGGLTPAQILQVQSRLQFLRRPAGAAVATQPMKRQGVPLPQAPAVSKLYRGVRQRHWGKWXVAXIRLPRNRTRLWLGTFDTAEEAALAYDSAAFRLRGGLARLNF

SEQ ID NO: 5845 - protein, 145 aa, Zea mays
  Clone ID: TF_ZmC27868_1.pep
MCPTKKEMSAESSGSASSWTSASTSTSPEHQTVWTSPPKRPAGRTKFRETRHPVFRGVRRRGSAGRWVCEVRVPGRRGCRLWLGTFDAAEAAARAHDAAMLAIAGASACLNFADSAWLLAVPASYASLAEVRRAVAEAVEDFQRR

SEQ ID NO: 5846 - protein, 119 aa, Zea mays
  Clone ID: TF_ZmC28357_4.pep
MCGGAIILDYIPARRRVSAADFWPDSEADAEDSDSHAPDPERAPRPRGKAKRGRKNQYRGIRQRPWGKWAAEIRDPVKGVRVWLGTYPTAVAAARAYDRAVRRIWGAYAEVFFPVGTSS

SEQ ID NO: 5847 - protein, 172 aa, Zea mays
  unsure (1)..(172): unsure at all Xaa locations
  Clone ID: TF_LIB4763-018-R1-K2-F11.pep
MCGGAILSGFIPPSGVAAAAAAAAKKKQQQRCRVTADLLWPGPGSKGAPQDKEEDFEADFREFERGLGEDDVDSAGEGGDPEVQELPPPEPTRFAFATAAKAAVDGVMTTTPKDVQGDRXSKKARPEGDPNKGXRVWLGTYNTAEEAARAYDAEARKIRGKKAKGNFPDDDA

SEQ ID NO: 5848 - protein, 114 aa, Zea mays
  Clone ID: TF_LIB3356-035-Q5-K1-A6.pep
KFRGVRRRPWGKFAAEIRDPWRGVRVWLGTFDTAEEAARVYDTAAIQLRGANATTNFSAAANSGSRAGQRDPATPGYESGTESSPAASSPTSVLRKVPSLSSLAEDDSCAAPCE

SEQ ID NO: 5849 - protein, 99 aa, Zea mays
  Clone ID: TF_ZmC103_1.pep
MRRAKPPPQQPSPSPEIRYRGVRRRPSGRYAAEIRDPAKKTPIWLGTYDCAEAAAHAYDAAARSLRGPTARTNFPSAAVRAPRHRAPSASAAAPTAPAA

SEQ ID NO: 5850 - protein, 219 aa, Zea mays
  Clone ID: TF_LIB4978-024-A1-K1-G5.pep
MMPVAPLPRCHGALASAPEHCPVPSPGPRPRSSPSAHPSFPYPRPRSRIYARCGRGAASEIADLRPMCPRPRSPLAGPAAASRRRSSCSRSGWCSASCVTHRFCRAFASGRRLYSSSGSPGTISRSGSVYLGGHDKEEKAARAYDLAALKYWGTTTTTNFPISNYEKDLEEMNNMSRQEYVVSLRRHARGFSRGASIYQGVTRLAASLPYGGMNSGSLS

SEQ ID NO: 5851 - protein, 166 aa, Zea mays
  Clone ID: TF_LIB3060-069-Q1-N6-H3.pep
RHWAELGFFRADLQQQQAPGPRIVPHPHAAPPPAKKSRRGPRSRSSQYRGVTFYRRTGRWESHIWDCGKQVYLGGFDTAHAAARHALDWTPRILRHSLAPGTRRAYDRAAIKFRGVDADINFNLSDYEDDMKQMGSLSKEEFVHVLRRQSTGFSRGSSRYRGVTLH

SEQ ID NO: 5852 - protein, 168 aa, Zea mays
  Clone ID: TF_18649690.pep
RCCRVKNPSSNGVLTAAAAFSDSKAMRESGKAAAARPYKGVRMRSWGSWVSEIRAPNQKRRIWLGSYATPEAAARAYDAALLCLKGSDAVLNFPSSSASSTHRRADDSSGGRPDDDDPGASGGMSPRSIQRAAAAAAAAFGDAAGIGASATTTPTPASLSTQGSTDHA

SEQ ID NO: 5853 - protein, 308 aa, Zea mays
  Clone ID: TF_ZmC653806_1.pep
MELHFQAQPPVFQLENYSSSSSYYYYQQQEAAAQAKPSKPRGRKKGSNNHSKFVGVRQRPSGRWVAEIKDTTQKIRMWLGTFETAEAAAKAYDEAARLLRGTDARTNFAPRISPDCPLAVRIRGLLHHKKIKKAKAAAAAAKQQASSSSPASTTSNSNSNSHSTNSARGGGSSITTTTTSSSSSSSSSSAVSCDDDMATQGGGTGALDAGEVYRPGFATAGTEEEFDSWMFDSAFPALDSFAAVDSAVPAAGTTEEPGAEMAEFERIKVERRISASLYAMNGLQEYFDRVLDASACDSLWDLSPLCHH

SEQ ID NO: 5854 - protein, 125 aa, Zea mays
  Clone ID: TF_ZmC25962_2.pep
MEAEQAAMASAAAPQLGSAHQHQHQHQQMQPRRQYRGVRMRKWGKWVAEIREPHKRTRIWLGSYATAVAAARAYDTAVFYLRGRSARLNFPDEIPSLAPSEGEGDGDGGEPARDPVDSGGCGTLA

SEQ ID NO: 5855 - protein, 241 aa, Zea mays
  Clone ID: TF_ZmC3836_1.pep
MAMLREHLDLIRAHLLDDNHDAVSSDDSAPSPSPSPPGRRPLPALSVSLPPRPAVVLQQQHLRAAAPPLQIPQQEQHCCPEPEEDDFRRYRGVRQRPWGKYAAEIRDPARKGARVWLGTYDTAVEAARAYDRAAFRLRGSKAILNFPNEVALSTAAWWATPAPPPQPSATVAGNKRARSPQEQDARCMVREVKKERIQEPASGGADYFWEDESLKGAICSLPPLSPLSPHPHLAVPQLYVS

SEQ ID NO: 5856 - protein, 291 aa, Zea mays
  Clone ID: TF_ZmC5658_1.pep
MDPSLKEEVMKAVEEARSAAAPRCRVVRIIVHDEDATDSSSSDDEGEEAGERAAAHPAAAPAGSVKRSRVLLQSAGCGAEEDGEGARFTGVRRRPWGRWAAEIRDPLLRRRVWLGTFDTAEEAAAAYVAARLRIRGPSNSLPPPEHRPALPPRPPPPPQQREKKLPLPPPPPPLLPLPPKKQQYPPPPLLPPKKQLYPPPLPLLPPKKQQQHHHHPSPPLPTLPPKKRLPSPPLLRESKKQCVASSPAEPRFMPLPVWALMSGSGKRKKRSGCGGRVPALHTPAAEETGRA

SEQ ID NO: 5857 - protein, 220 aa, Zea mays
  Clone ID: TF_ZmC8439_3.pep
MAPRTSERAMTSAAAGLARGAGPHYRGVRKRPWGRYAAEIRDPAKKSRVWLGTFDTPEDAARAYDAAAREYRGAKAKTNFSFPACLPLAAADVAGACRSGNSSSTTTTTTVDSFGGDVQAPPMQAMPLPPSFCASGAVRFPFSSYPVTHPYYFFGQAAAGCHMLKLPPTTVTVAQSDSHSSSVASLSASPSPSPPAGVSATRSAAFDLDLNCPPPAEAEA

SEQ ID NO: 5858 - protein, 236 aa, Zea mays
  unsure (1)..(236): unsure at all Xaa locations
  Clone ID: TF_ZmC3465_6.pep
MAGQMGLNQLGPAQIQQIQAQFMFQQQQQQQRGLHAAFLGPRAQPMKQSGSPSPPPPLAPAQSKLYRGVRQRHWGKWVAEIRLPKNRTRLWLGTFDTVEDAALAYDKAVFRLRGDTVRLNFPVLRRGGAHLAGPLHASVDAKLTGICQSLAESKXGGSSGDESAGSPPDSPKCSASASTEGEEESGSAGSPPSPTLAPPVPEMAKLDFTEAPWDETETFHLRKYPSWEIDWDSILS

SEQ ID NO: 5859 - protein, 393 aa, Zea mays
  Clone ID: TF_ZmC660_2.pep
MTMERSQPQHQQSPPSPSSSSSCVSADTVLVPPGKRRRRAATAKANKRARKDPSDPPPAAGERSSVYRGVTRHRWTGRFEAHLWDKHYLAALHNKKKGRQVYLGAYDGEEAAARAYDLAALKYWGPEALLNFPVEDYSSEMPEMEAASREEYLASLRRRSSGFSRGVSKYRGVARHHHDGRWEARIGRVLGNKYLYLGTFDTQEEAAKAYDLAAIEYRGANAVTNFDISCYLDHPLFLAQLQQEQPQVVPALDQEPQADQREPETTAQEPVSSQAKTPADDNAEPDDIAEPLITVDNSVEESLWSPCMDYELDTMSRSNFGSSINLSEWFTDADFDSDLGCLFDGRSAVDGGSKGGVGVADFSLFEAGDGQLKDVLSDMEEGIQPPTIISVCN

SEQ ID NO: 5860 - protein, 316 aa, Zea mays
  Clone ID: TF_ZmC3465_1.pep
MAAAIDMYKYCNTSAHLIASSSPSDQELAKALEPFITSASSPYHRYSLAPDSYMPTPSSYTTSPLPTPTSSPFSQLPPLYSSPYAASTASGVAGPMGLNQLGPAQIQQIQAQLMFQHQQQRGLHAAFLGPRAQPMKQSGSPPAQSKLYRGVRQRHWGKWVAEIRLPKNRTRLWLGTFDTAEGAALAYDEAAFRLRGDTARLNFPSLRRGGGARLAGPLHASVDAKLTAICQSLAGSKNSSSSDESAASLPDSPKCSASTEGDEDSASAGSPPSPTQAPPVPEMAKLDFTEAPWDETEAFHLRKYPSWEIDWDSILS

SEQ ID NO: 5861 - protein, 208 aa, Zea mays
  Clone ID: TF_ZmC74396_1.pep
MRKYAAPRSSRFHGVTRLKWSGKYEAHLWDNTSQVEGRKRMWSHVYLGSYVDEEQAAKAHDLAALKYWGTGPNTKLNFNISDYEKEIEVMKTMSQDEFVAYIRRQSSCFSRGTSSYRGVTRRKDGKWQARIGRIGESRDTKDIYLGTFETEEEAAEAYDIAAIELRGVHAVTNFDISNYCEDGLRKLEGPSEVAKLGSPSEVVKLAGQ

SEQ ID NO: 5862 - protein, 231 aa, Zea mays
  Clone ID: TF_ZmC2532_1.pep
MCPTKKGMTGEPSSPCSSASASTLPEHHQTVWTSPPKRPAGRTKFRETRHPVFRGVRRRGSAGRWVCEVRVPGRRGCRLWLGTFDTAEAAARAHDAAMLALAGAGACCLNFADSAWLLAVPASCASLAEVRHAVADAVDDFLRHQLVPEDDALAATPSSPSSEDGNTSDGGESSSDSSPPTGASPFEFDVFNDMSWDLHYASLAQGLLVEPPSAVTAFMDEGFADVPLWSY

SEQ ID NO: 5863 - protein, 364 aa, Zea mays
  unsure (1)..(364): unsure at all Xaa locations
  Clone ID: TF_ZmC6700_6.pep
MCGGAILSGLIPPSGVPAAAAAAKKKQQRRATADLLWPGPGKKGAPREEDFEADFREFERGLGEDDVDGAGDEVQELALPEPARLAFAAAVGAPRTAVDGVMTPKDGEGDMPTTANNSAANKRRRKNQYRGIRRRPWGKWAAEIRDPSKGVRVWLGTYSTAEEAARAYDAEARRIRGIHVKVNFAVXTGCSRRHKATAGTGSSSQGQSRPAWPHRSRSCSSFSSTPVHLACTXAGSCDLGWEWDWDDDTMTSDYASVFAPAAPSNVVPAWYTQGGPVSKRTRSSYGYGAAMPGGFDPETNYQYQPLPYVVESSPSDGASTDDMDCLQMMRAGDVPQDGASSGGGGGDGGDIWSLDELLMAAGAY

SEQ ID NO: 5864 - protein, 177 aa, Zea mays
  unsure (1)..(177): unsure at all Xaa locations
  Clone ID: TF_ZmC28197_2.pep
MCDAAPRYRGVRKRPWGRFAAEIRDPAKRARVWLGTFDSAEAAARAYDVAARALRGPLARTNFPALATTSRRPAPTCSSGSTVESSSGPRAGDPXQAAHRGRAAAKPRRPPRQAPPPSTDADCHSDCASSASVVDDGDDASTVRSRARPSLDLNLPAPLDLDGGHDLGFCTDLRLCL

SEQ ID NO: 5865 - protein, 306 aa, Zea mays; identical to SEQ ID NO: 5746
  Clone ID: TF_ZmC660_3.pep

SEQ ID NO: 5866 - protein, 416 aa, Zea mays
  Clone ID: TF_ZmC8413_1.pep
MARKRKASDSAAGIDGVHSLPPPLALASTDACAWASSGGTSMAAVAEAAAAQQQRRGRKRFVGVRQRPSGRWVAEIKDTIQKIRVWLGTFDTAEEAARAYDEAACLLRGANTRTNFWPRPSPASSVAVAAAAHPAPPPPTPPPLPGLMGSPTQPPALPSKVTNLLLLRLRARNNQQQLLLNATPARQQEAAAAALLQGPLCAEPYGGGEECAFQVDDFLSYDCGSDENSSQEIEDEEEEEEEEEEEEEELDFQFMDQQTASPGAGCEGGLCSPFEVVAAELGGAVEAGGGEPATAVQELMMSRMDYERKISASLYALSGVSECIKMRLGAAAGGHAVRDQLSGLREACRKKQREIVQQQHEQEPSMDTAEDVKPPREERSPGDGAPEATSSSSEASHGDSDGDMLLWSSLDLAPIC

SEQ ID NO: 5867 - protein, 271 aa, Zea mays
  Clone ID: TF_ZmC313467_1.pep
MEQGDPTPAASACNCDPAAAPPAWIPLHDHDDTLLQQLDAILLGMDDDDVATADDRCCSGWLSSSPSPSPSSSSEATTTASPPPSTREQHRRHPAKDDTALAGGGDEKRAVTTAAFIGVRKRPWGKFAAEIRDSTRKGARVWLGTFDTPEAAALAYDQAALAARGAAAVLNFPVERVVESLGALALAGAGSPVLALKRRHSKRTRRRKPSAVATTDGDGKDTMMKQPRRRQPAAAPRQCSGLPGAVPSYTTVAAVPPPPQQHATARGQSHT

SEQ ID NO: 5868 - protein, 223 aa, Zea mays
  Clone ID: TF_ZmC2464_1.pep
MAPRNALPAASAVANGMVMEPRFRGVRKRPWGRFAAEIRDPARKARVWLGTFDTAEAAARAYDAAALHFRGPKAKTNFPVAFAALPPPPPPKKPAAVTVSPSSSSTVESSSSSSSRDSPATPPRAASPSQQAPSLDLSLGGTPAMVAAQPFLFLDPRLAVTVAVPAPVPYRPTAVAAGANKHAAASCREEEQSDTGSSSSVVDASPAVGVGFDLNMPPPAEVA

SEQ ID NO: 5869 - protein, 182 aa, Zea mays
  unsure (1)..(182): unsure at all Xaa locations
  Clone ID: TF_ZmC28197_1.pep
MCDAAAVAAPRYRGVRKRPWGRFAAEIRDPAKRARVWLGTFDSAEAAARAYDVAARALRGPLARTNFPALTXPPSRRPAPTCSSGSTVESSSGPRAGDPRARAAHRGRAAAKPRPPRQAPPPPTDADCHSDCASSASVVDDGDDASTVRSRARPSLDLNLPAPLDLDGGHDLGFCSDLRLCL

SEQ ID NO: 5870 - protein, 99 aa, Zea mays
  Clone ID: TF_ZmC7732_3.pep
PLPHLDVARSTQQANRDCRKARIWLGTFETAEDAARAYDEAARIMCGPRARTNFPADANGPPPSFLSAALVDKLHRFNLASVQAAQRQKEAAAAAAAAA

SEQ ID NO: 5871 - protein, 237 aa, Zea mays
  Clone ID: TF_LIB5116-007-A1-PF1-B3.pep
MCGGAILAGFIPPSAAAAAAKAAAAKKQQQQQQQQQRSVTADSLWPGLRKKPAEEEDFEADFRDFERDSNDDDDAVEEVPPPPATAGFAFAAAAEVALPAPTRLDAIQHDGPAAKSVKRVRKNQYRGIRQRPWGKWAAEIRDPSKGVRVWLGTYDTAEEAARAYDAEARKIRGKKAKVNFPEEAPTVQKSTLKPTAVKSAKLAPPPKTCEDEPFNHLSRGDNDLFAMFALHDKKGSA

SEQ ID NO: 5872 - protein, 166 aa, Zea mays
  unsure (1)..(166): unsure at all Xaa locations
  Clone ID: TF_LIB4767-056-R1-K1-D10.pep
SIDPSTTTTPLRRCAAAAAKKKQQQRCRVTADLLWPGPGSKGAPQDKEEDFEADFREFERGLGEDDVDSAGEGGDPEVQELPPPEPTRFAFATAAKAAVDGVMTTTPKDVQGDRAVKKRGRKNQYRGIRQRPWGKWAAEIRDPNKGVRVWLGTYNTAXEEAARAYD

SEQ ID NO: 5873 - protein, 201 aa, Zea mays
  unsure (1)..(201): unsure at all Xaa locations
  Clone ID: TF_LIB4977-007-R1-K1-C8.pep
MEADALLHAPMTSSSSSSSSSSDSVGGSCVVNGAQELPSNTGKPHKNVKRKRTASPSAAPGGGVAPAPPEAAIADDDCGGRRRKRGSAGTRHPTFRGVRMRVWGKWVSEIREPRKKSRIWLGTFPTAEMAARAHDVAALAIKGRGAHLNFPHLAHDLPRPXSTSPXDIQXRAAKAAAAAADADVXVEQCESSHAVETPSSS

SEQ ID NO: 5874 - protein, 448 aa, Zea mays
  Clone ID: TF_ZmC203909_1.pep
MSPPTNGAISLAYAPSMMLGAGALTNPPLLPFDGFTDEDFLASADAALLGGADTDQTLLLLPSCPGANCCGGSSSDQGLGALACEVTTAGSFSLLGQPAPGQVSWEVTTAVAADRNTFSRTRDPAPSPPPSPALPLVQTTSQSQRTSIYRGVTRHRWTGRYEAHLWDNTCRKEGQKRKGRQVFLHIPSFALYSILVYASFFDAKGGYDKEDKAARAYDIAALKYWGDNATTNFPRENYIREIQDMQNMNRRDVVASLRRKSSGFSRGASIYRGVTKHHQHGRWQARIGRVAGNKDLYLGTFATEQEAAEAYDIAALKFRGENAVTNFEPSRYNLLAIAQRDIPILGRKLIQKPAPEAEDQAALSARSFSQSQQSSNSLPPYFLTNLLQPLPSQHSLAQALPSYNNLGFGEPSLYWPCPCGDPGEQKVQLGSKLEIVDGLVQLANSAAN

SEQ ID NO: 5875 - protein, 232 aa, Zea mays
  Clone ID: TF_ZmC441_1.pep
MEYAAVGYGYGYGYDERQEPAESADGGGGGDDEYATVLSAPPKRPAGRTKFRETRHPVYRGVRRRGPAGRWVCEVREPNKKSRIWLGTFATPEAAARAHDVAALALRGRAACLNFADSARLLQVDPATLATPDDIRRAAIQLADAASQQDETAAVAADVVAPSQADDVAAAAAAAAAMYGGGMEFDHSYCYDDGMVSGSSDCWQSGAGAGGWHSIVDGDDDDGASDMTLWSY

SEQ ID NO: 5876 - protein, 121 aa, Zea mays
  Clone ID: TF_ZmC8692_1.pep
MPADSDDVASPASTLGSVHKRGGGGGGGGKSGGHGGGRRRPGPAYRGVRMRAWGKWVSEIREPRKKSRIWLGTFPTAEMAARAHDAAALVVKGRGAVLNFPEMAARLPRPASAAPRDVQAA

SEQ ID NO: 5877 - protein, 266 aa, Zea mays
  Clone ID: TF_ZmC9628_2.pep
LVLCTVYSSHLYLSAHAGGEQAAHDVQGAAAMEGHYSPTASAAEAAGERRFRGVRQRPWGKWAAEIRDPHKAARVWLGTFDTAEAAARAYDEAALRFRGSRAKLNFPEDARLTTAPSTAGAGGGGIHDDDGRGGLGGRTSTQQEASAAVVSADYLQYQMMLLQGAATSGQGSSSSHGGYPLYYDYGGHGGAGAGAGGGAMSSFSGSYSFPASTVTVAFVPSSAPRYDEAAQWTSWPESSASAWSYPASTGSWSASSQYPPSTRPPQ

SEQ ID NO: 5878 - protein, 108 aa, Zea mays
  unsure (1)..(108): unsure at all Xaa locations
  Clone ID: TF_LIB3279-008-P1-K1-H11.pep
RRLKNQYRAISXRPWGKWAAGIRDPCKGVHFWLATYRTVHFGRRRPEAHGRGTREMKANLSARHDAAAQSAQNPPFESTTSDITIAYRLAPPPSPPNFRADEVVGNMD

SEQ ID NO: 5879 - protein, 433 aa, Zea mays
  Clone ID: TF_ZmC2239_1.pep
MVLDLNVASPADSGTSSSSVLNSADGGFRFGLLGSPVDDDDCSGEMAPGASTGFMTRQLFPSPTPPAEPEPEPVAAPVPVWQPQRAEDLGMAQRPVAPAKKTRRGPRSRSSQYRGVTFYRRTGRWESHIWDCGKQVYLGGFDTAHAAARAYDRAAIKFRGLDADINFSLSDYEDDLKQMRNWTKEEFVHILRRQSTGFARGSSKYRGVTLHKCGRWEARMGQLLGKKYIYLGLFDSEVEAARAYDRAALRFNGREAVTNFEPSSYNAGDNNLRDTETEAIDDGDAIDLDLRISQPNVQDPKRDNTLAGLQPTCDSPESSNTMASQPMSSSSPWPGYHQNPAVSFHHQRLYSSACHGFFPNHQVQERPVERRPELGAQPFPSWAWQAQGSPHVPLHHSAASSGFSTAAGANGGMPLPSHPPAQFPTTTNPFFFP

SEQ ID NO: 5880 - protein, 192 aa, Zea mays
  Clone ID: TF_LIB4605-003-R1-N1-G8.pep
MCGGAILAELREPAPRRLTERDIWQQKKKPKSTFSRDGLSTMTTAGYDAPAARLAKRKRKNQYRGIRQRPWGKWAAEIRDPQKGVRVWLGTFNSPEEAARAYDAEARRIRGKKAKVNFPDAPAVGQKCRSSSASAKALKSCVEQKPIVKTDMNTLANTNAPFYQSVNYASNNPFVPAMNSTVSFEDPIMNLH

SEQ ID NO: 5881 - protein, 267 aa, Zea mays
  unsure (1)..(267): unsure at all Xaa locations
  Clone ID: TF_LIB5117-065-A1-PF1-F12.pep
LRRVLLLNYSVTISLDRSPSSLAQLPSCGRRSADIDPSARCADAYVCACAGEMEEEERGAAAELAAIAGAGPPPKLEDFLGGGANGNHNGRNNSDAGSGDQVVSAATAEMYDSELKFLAAGFLSGATGTTAPTISPAAAPQEQADPKMPVPAPEQKKAVDSFGQRTSIYRGVTRYRWTGRYEAHLWDNSCRREGQSRKGRQVYLGGYDKEEKAARAYDLAALKYWGSSTTTNFPVADYEKEVEEMKHMTRQEVVASLXRKSSGFSRG

SEQ ID NO: 5882 - protein, 141 aa, Zea mays
  Clone ID: TF_LIB4738-100-Q1-K1-H9.pep
MAPRVADKTPLPLATGLKLGVGGGMGLGPHYRGVRKRPWGRYAAEIRDPAKKSRVWLGTYDTAEEAAKAYDVAAREFRGAKAKTNFPFPLAVAVAGGAGSPSSDSTTVESSCGGSGCGVEAPAVQAAMPLTPALDLDLFHR

SEQ ID NO: 5883 - protein, 109 aa, Zea mays
  unsure (1)..(109): unsure at all Xaa locations
  Clone ID: TF_LIB3732-049-Q1-K6-F2.pep
MVKTATATATAAARHGGANKRTYKGVRMRSWGSWVXEGVRXPGQKTRIWLGSHSTAEAAARAYDAALLCLRGWAAAPDLNLPPRRPLAHGXHPLPPADMSTKAIQRVAV

SEQ ID NO: 5884 - protein, 185 aa, Zea mays
  Clone ID: TF_LIB4740-070-R1-K1-H6.pep
MVKTAASSSSDDAAAAKRRTYKGVRMRSWGSWVSEVRAPGQKTRIWLGSHATAEAAVRAHDAALLCLRGSAADLNFPLRLPFDLPPAATMSPKAIQRVAAAAAAAASGSASSCGGLRAPPFAPPDENSGTSACSDGDATPASSTTSSPTSDFTPAWSTTSLPTSHADDVCSPECTVSSAGDEDYY

SEQ ID NO: 5885 - protein, 365 aa, Zea mays
  Clone ID: TF_ZmC3711_1.pep
MEESDLGGNLGKQTEEDKAAGESGDEGKIERSQSINLNRVPAVAVEAMSTQGNCETHGAAVPGTKDAGTGKAGQSSGDRQEEKLPKCEQVDYGSEVEGCADDENPGKRAALVTLVGNEYCGDEDERVQVLTIVKKDEHADDIVDRINPGTVAGYSEVKGAVGASAATSAVRPAGSRSSSFHGVTRHRWSGKYEAHLWDSSCRVEGRRRKGKQVYLGSYDTEEKAARAYDVAAIKYWGENTRLNFPISQYGKELEDIRDLSREECVTYLRRRSSCFSRGASIYRGVTRRQKDGRWQARIGLVAGTRDIYLGTFKTEEEAAEAYDIAAIEIRGKNAVTNFDRSNYVDKGMHCIEGEGLRLLASKPEE

SEQ ID NO: 5886 - protein, 258 aa, Zea mays
  Clone ID: TF_ZmC184128_1.pep
MEHYDSYLCSGSMHSYGGVGGATDAALDAGGDDMQRLLNALMDDMAAESDSFSDDMEAASSESSSSACSANSQQEATRRPQQQPDGGHSNGSNKSSKKQHQQQPPAPYIGVRKRPWGKFAAEIRDSTRKGARVWLGTFDSPEAAAMAYDQAAFSVRGAAAVLNFPVERVQESLRALALSSASSAAGSPVLALKCRHSIRKRSPNKNKNKKKQERQQQVAVAAAAPQQPPCPTSVVELEDLGADYLDELLRVSSEFHWQ

SEQ ID NO: 5887 - protein, 163 aa, Zea mays
  Clone ID: TF_LIB3597-065-Q1-K6-E10.pep
MDQMLGKHLQMPSVTTSAACQQPQSPPPSPQQQYRGVRKRKWGKWVSEIRQPGTKTRIWLGSFESAEMAAVAHDVAALRLRGRDAQLNFPGCVAWLPRPATSHARDVRAAAAEAADRVRCDPALLLLQQAAAARCHDYDHDHEFGAGPAPVVELGSDEEFELD

SEQ ID NO: 5888 - protein, 205 aa, Zea mays
  Clone ID: TF_ZmC220222_1.pep
MKRQGVPQQAPVPARAGVSKLYRGVRQRHWGKWVAEIRLPRNRTRLWLGTFDTAEEIALAYDGAAFRLRGDSAKLNFPELRRGGQHLGPPLHAAVDAKLHAICSGADVGAPLPQGQSQSHAPAAATTATPSPFSSVSPHVKSEPGCSVSESSFSADGDVSSTGSSDVVPEMQLLDFSEAPWDESDSFHLRKYPSLEIDWDSILIS

SEQ ID NO: 5889 - protein, 133 aa, Zea mays
  unsure (1)..(133): unsure at all Xaa locations
  Clone ID: TF_LIB3062-015-Q1-K1-F11.pep
SSHAWGPAAVPLEAPGAAVLDANDFRKYRGVRQRPWGKFAAEIRDPKKRGSRVWLGTYDTAIEAARAYDRAAFRMRGAKAILNFPNEVGTRGADFLAPPPPPPHAAATSQNKRKLMHDAEATXTAGAGAGAEP

SEQ ID NO: 5890 - protein, 255 aa, Zea mays
  Clone ID: TF_LIB4740-108-A1-K1-A6.pep
SHDQQQSASRTPLHRPQPQAQIPSHPTPPSRSLQPSPRPHSPATASTGCIQPPRRVTAGHLWPESKKPRRAAAGRRRAPVEQEQEEDFEADFEEFEVESGESELESEDEPKPKSFAAPSSALARGGLNTGAAGVDGPAANSVKRKRKNQFRGIRRRPWGKWAAEIRDPRKGVRVWLGTFNSPEEAARAYDAEARRIRGKKAKVNFPDEVPTAVSQKRRAAELASLKAPKMDVEEEKPIIKPAVNNMTNSNAYLYP

SEQ ID NO: 5891 - protein, 685 aa, Zea mays
  Clone ID: TF_ZmC1960_1.pep
METVGPSRRAGRDTRARRALRRECLCFRAESLRLREIEVMMALQAQGTRVPLVLALFLLLAGCGSEAQPLVPALFTFGDSSVDVGNNDYLHTIIKANFPPYGRDFANHVATGRFCNGKLATDITADTLGFTTYPAAYLSPQASGQNLLIGANFASAGSGYYDHTALMYHAIPLSQQLEYFREYQTKLAGGGRRRAGALHPQRRAVHRQCRRQRLRAELLHKPAAVQDADGRPVLRPPRGHLRPHRAGALRHGGRPRGRAGSPTHSAIPHHAEAERPTQNPTPPPATASSDSLPTPPHPTVPLTPAQPASPQPSDSGHRRHPAMCGGAILSDIIPPPPPRRVTAGHLWPESKKPRRAASGRRGAPVEQHEQEEDFEADFEEFEVESGESELESEDEPKPFAAPRSALARGGLNTGAAGVDGPAANSVKRKRKNQFRGIRRRPWGKWAAEIRDPRKGVRVWLGTFNSPEEAARAYDAEARRIRGKKAKVNFPDEVPTAVSQKRRAAGPASLKAPKMDVEEEKPIIKLAVNNMTNSNAYHYPAVVGHNIIPEPFMQTQNMPFAPLVNYAALVNLSSDQGSNSFGCSDFSLENDSRTPDITSVPAPVATLAAVGESVFVQNTAGHAVAPPATGNTGVDLAELEPYMNFLMDGGSDDSISTLLSCDGSQDVVSNMDLWSFEDMPMSAGFY

SEQ ID NO: 5892 - protein, 363 aa, Zea mays
  Clone ID: TF_ZmC1960_2.pep
MCGGAILSDIIPPPPPRRVTAGHLWPESKKPRRAASGRRGAPVEQHEQEEDFEADFEEFEVESGESELESEAEPKPFAAPRSALARGGLNTGAAGVDGPAANSVKRKRKNQFRGIRRRPWGKWAAEIRDPRKGVRVWLGTFNSPEEAARAYDAEARRIRGKKAKVNFPDEVPTAVSQKRRAAGPASLKAPKMDVEEEKPIIKLAVNNMTNSNAYHYPAVVGHNIIPEPFMQTQNMPFAPLVNYAALVNLSSDQGSNSFGCSDFSLENDSRTPDITSVPAPVATLAAVGESVFVQNTAGHAVASPATGNTGVDLAELEPYMNFLMDGGSDDSISTLLSCDGSQDVVSNMDLWSFEDMPMSAGFY

SEQ ID NO: 5893 - protein, 364 aa, Zea mays
  Clone ID: TF_ZmC1960_3.pep
MCGGAILSDIIPPPPPRRVTAGHLWPESKKPRRAAAGRRRAPVEQEQEEDFEADFEEFEVESGESELESEDEPKPKPFAAPSSALARGGLNTGAAGVDGPAANSVKRKRKNQFRGIRRRPWGKWAAEIRDPRKGVRVWLGTFNSPEEAARAYDAEARRIRGKKAKVNFPDEVPTAVSQKRRAAGLASLKAPKMDVEEEKPIIKPAVNNMTNSNAYHYPAVVGHNIIPEPFMQTQNMPFAPLVNYAALVNLSSDQGSNSFGCSDFSLENDSRTPDITSVPAPVATLAAVGESAFVQNTAGHAVAPPATGNAGVDLAELEPYMNFLMDGGSDGSISTLLSCDGSQDVVSNMDLWSFDDMPMSAGFY

SEQ ID NO: 5894 - protein, 365 aa, Zea mays
  Clone ID: TF_ZmC1960_6.pep
MCGGAILSDIIPPPPPRRVTAGHLWPESKKPRRAAAGRRRAPVEQEQEEDFEADFEEFEVESGESELESEDEPKPKPFAAPSSALARGGLNTGAAGVDGPAANSVKRKRKNQFRGIRRRPWGKWAAEIRDPRKGVRVWLGTFNSPEEAARAYDAEARRIRGKKAKVNFPDEVPTAVSQKRRAAGLASLKAPKMDVEEEKPIIKLAVNNMTNSNAYHYPAVVGHHNIIPEPFMQTQNMPFAPLVNYAALVNLSSDQGSNSFGCSDFSLENDSRTPDITSVPAPVATLAAVGESAFVQNTAGHAVAPPATGNTGVDLAELEPYMDFLMDGGSDDSISTLLSCDGSQDVVSNMDLWSFDDMPMSAGFY

SEQ ID NO: 5895 - protein, 395 aa, Zea mays
  Clone ID: TF_ZmC660_1.pep
MERSQRQSPPPPSPSSSSSSVSADTVLVPPGKRRRAATAKAGAEPNKRIRKDPAAAAAGKRSSVYRGVTRHRWTGRFEAHLWDKHCLAALHNKKKGRQVYLGAYDSEEAAARAYDLAALKYWGPETLLNFPVEDYSSEMPEMEAVSREEYLASLRRRSSGFSRGVSKYRGVARHHHNGRWEARIGRVFGNKYLYLGTFDTQEEAAKAYDLAAIEYRGVNAVTNFDISCYLDHPLFLAQLQQEPQVVPALNQEPQPDQSETGTTEQEPESSEAKTPDGSAEPDENAVPDDTAEPLTTVDDSIEEGLWSPCMDYELDTMSRPNFGSSINLSEWFADADFDCNIGCLFDGCSAADEGSKDGVGLADFSLFEAGDVQLKDVLSDMEEGIQPPAMISVCN

SEQ ID NO: 5896 - protein, 276 aa, Zea mays
  Clone ID: TF_ZmC118_3.pep
MCGGAILANLREPAPRRLTERDIWQQKKKLKRGGGGGRRSFAAEDDEDFEADFEVFEADSSDSDLELRERTDDDVVEIKPFTAKRTFSSDGLSTMTSAVARSAKRKRKNLYRGIRQRPWGKWAAEIRDPQKGVRVWLGTFNSPEEAARAYDAEARRIRGKKAKGSNSFGCSDLGWENDTKTPDITSIAPISTIAEGDESAFVDSNSNSSFVLPALENSAVDLTDGLTDLESYMRFLLDGGPSDSVDSLLNLDGSQDVGSNMDLWSFDDMPIAGDFF

SEQ ID NO: 5897 - protein, 152 aa, Zea mays
  unsure (1)..(152): unsure at all Xaa locations
  Clone ID: TF_ZmC840720_1.pep
HSPRPAPLQPQSQQQLHHRRSVGSQKLPWTRTTRRSRPPQPPSPSSSSSSSSSSSXPKKRARRDGGRHPTYRGVRMRSWGKWVSEIREPRKKSRIWLGTFATAEMAARAHDVAALAIKGARDAHLNFPGLARLLPRPATAAPRDVQAAAALA

SEQ ID NO: 5898 - protein, 340 aa, Zea mays
  Clone ID: TF_ZmC19431_1.pep
MCGGAILAELIPPTRRVASKPVTEGHLWSASSKKAGSGRDKRHQHEYADDDFEAAFEDFDDDFDVHEDDEDGHFVFSSKSALSPALHDGRAASQKKQRGRQFRGIRQRPWGKWAAEIRDPHKGTRVWLGTFSTAEDAARAYDVEARRLRGSKAKVNFPAASGRARGRARPRRGDDGNPRTAPETQHPAQPALLPRGERETQRKEGIAAVKPEATESFDVGGGLFFDMAFPTFPASPPPQAVDTSFAGSTATSETGSPAKRPRCDEDSSEGGSGSALELADELAFDPFVLLQMPYSGGYDDDSLDGLFAADEAVQQDVGNGMDGVRLWSFDEFPAVDGSVF

SEQ ID NO: 5899 - protein, 182 aa, Zea mays
  Clone ID: TF_ZmC19431_2.pep
MCGGAILAELIPPTRRVASKPVTEGHLWSASSKKAGSGRDKRHQHEYADDDFEAAFEDFDDDFDVHEDDEDGHFVFSSKSALSPALHDGRAASQKKQRGRQFRGIRQRPWGKWAAEIRDPHKGTRVWLGTFSTAEDAARAYDVEARRLRGSKAKVNFPAASGRARARPRRGDDGNPRTAPEP

SEQ ID NO: 5900 - protein, 457 aa, Zea mays
  Clone ID: TF_ZmC7298_1.pep
MDMNNGWLGFSLSPSAASRGGYGYGDGGGGASASACGDGEGSCPSPAAAASPLPLVAMPLDDSLHYSSAPDWRHGAAEAKGPKLEDFMSITCSNKSSGRSLYDSCGHHDDEQASKYHEVHGIHPLSCGSYYHGCISSGGGGGGGIGLGINMNAPPCTGGFPDHQHHQFVPSSHHGQYFLGAPAASAGPPAGAAMPMYNAGGGSVVGGSMSISGIKSWLREAMYVPPERPAAAALSLAVTDDVPPAEPPQLLPAPLPVHRKPAQTFGQRTSQFRGVTRHRWTGRYEAHLWDNTCRKEGQTRKGRQVYLGGYDREEKAARAYDLAALKYWGPSTHINFPLSHYEKELEEMKHMSRQEFIAHLRRNSSGFSRGASMYRGVTRHHQHGRWQARIGRVAGNKDLYLGTFSTQEEAAEAYDIAAIKFRGLNAVTNFDISKYDVKRICASTHLIGGGDACRRSP

SEQ ID NO: 5901 - protein, 85 aa, Zea mays
  Clone ID: TF_LIB3066-002-Q1-K1-D7.pep
DAWARGWWRASPPSSSSPRPRRRSPGRARKHRTRRRRPDQNQSRGVRGRPWGRWAARIRDPVKGVRVWLGTFPSAEAARRAYNHA

SEQ ID NO: 5902 - protein, 173 aa, Zea mays
  Clone ID: TF_ZmC74396_2.pep
HASAHASAHASAHASAHASADAWVRKYAAPRSSRFHGVTRLKWSGKYEAHLWDNTSQVEGRKRKGKHVYLGSYVDEEQAAKAHDLAALKYWGTGPNTKLNFNISDYEKEIEVMKTMSQDEFVAYIRRQSSCFSRGTSSYRGVTRGKDGKWQARIGRIGESRDTKDIYLGTFGE

SEQ ID NO: 5903 - protein, 117 aa, Zea mays
  Clone ID: TF_ZmC390422_1.pep
FGSSDDIRKKHYRGVRQRPWGKWAAEIRDPKKAARVWLGTFDTAEAAAMAYDAAALRFKGNKAKLNFPERVVMPIQPQTNNNNSTSSSAPTTHALLLFHHHNKYIIIVLFQQKGFQI

SEQ ID NO: 5904 - protein, 266 aa, Zea mays
  Clone ID: TF_ZmC5960_3.pep
IDTFGQRTSIYRGVTRHRWTGRYEAHLWDNSCRREGQSRKGRQVYLGGYDKEDKAARAYDLAALKYWGTTTTTNFPISNYEKELEEMKHMTRQEYIAYLRRNSSGFSRGASKYRGVTRHHQHGRWQARIGRVAGNKDLYLGTFSTEEEAAEAYDIAAIKFRGLNAVTNFDMSRYDVKSILESSTLPVGGAARRLKDAVDHVEAGATIWRADMDGAVISQLAEAGMGGYASYGHHGWPTIAFQQPSPLSVHYPYGQPSRGWCKPEQD

SEQ ID NO: 5905 - protein, 131 aa, Zea mays
  Clone ID: TF_LIB3279-060-P1-K1-B7.pep
ALVCIHQWRSVLLTIVSLHGLHAGAYDDEDAAARAYDLAALKYWGPDTILNFPASAYEAELKEMEGQSREEYIGSLRRKSSGFSRGVSKYRGVARHHHNGRWEARIGRVFGNKYLYLGTYGTQEEAAMAYD

SEQ ID NO: 5906 - protein, 111 aa, Zea mays
  Clone ID: TF_ZmC214275_1.pep
MDMAMSQHSSDTSSTSSYSSDPSSTSSTTSGKKRPRPHAAAAPAYRGVRMRAWGKWVSEIREPRKKSRIWLGTFPRPEMAARAHDAAALSVKGARALLNFSALACRLLRPV

SEQ ID NO: 5907 - protein, 872 aa, Zea mays
  Clone ID: TF_ZmC6822_1.pep
SYLFLWLDTYPLMIGTCGGFRGPTRPAAVTVAVLPHPRPSRPRRPQQPAAAAARAPRSPRRRGSRLVSVTATPRRLPPLPAGCIVLRSSEGELQSPTTIHKMTTKLEQSSAEHRPAKFAAPSSLTPKISMFGAKAGFIIPKNKLAGSLVIRSTSDKNETPTASNEDSSRHVHRKTKWGPDLALDPVVCKGRALAYQTRVEQISKQLKSGALDTSEIDGSVSAGNELNSIGPDILKENELGNVELLELERRELIGEILRLNPGYKTPENYKPVLRETKIPVPAEAHPGNNIIGVLLGSESNTQKRLHEETGAVIRVYGTKKINGEKSEIRHQDINETQDAYEDLYINVSADSYDKVDAAVVLIELLLAPVSVKSTATSTAATVSSADTSKDAVSANVQLEQNTTSQPDLLHYQSHNAPWLPTPQTNAPSIPSTGPVLSTLPNNPSQPQPPAGSFSMPPYTGQPPHMNSMPANPFPVPGPQQPVPSNQQHPPQFRANSSIGPFFGQPPGIVSQQMPPSSSMPPPVRPLQIPHASGGWPPFSPVTSQSHRPLQAPPTFMAVRPPISVSPLGATPPQGPIALTPPNMPTMYRGQHPPVPNFTGSAPLVSRPPGGGAQSFPTAAPQGPSSVAFPGGPSLRPPYPPAPDQARGPPPAFSPVGSTPGMVPPPIASSGLPAPRPANTSCIQTQVVAPLRPPLPAAGDFTFRPAIPPAHAPEFAAPGSQMGAIHGRTHHPGPFSSHPGDQKNPSQGFQGPFDGSRPMYTTNQARMHAPPPPHFHGAFPRNASPLEFPAGFRGAWPSVQAPPMPAPSHPSSFPPFQLRPPPPPQQDMSGAGGTRWPGGNQIYNPFAPTAAAAAQRAEADPEYEDLMASVGMK

SEQ ID NO: 5908 - protein, 247 aa, Zea mays
  Clone ID: TF_ZmC6822_4.pep
MCGGAILAELIPARVHRPLTAATLWAAALSGTTTVGKWKADAAAATDDDDDEEFEAEFQLFDDDDECEAEFQLLDDHQPSPAASPEASGCKRKPALAPPAGAPASTDPATPCSRKYRGVRYRRSGRWAAEIRDPRQGRRAWLGTYRTAEEAALAYDREARRIRGKSARLNFPLLIPHEGPGRHARTPVAIDLNLPPVSDGSRRPGSRLASGDDGTANARRRMQIWPVLRLRSTLVRVKELIAQGPHD

SEQ ID NO: 5909 - protein, 221 aa, Zea mays
  Clone ID: TF_ZmC2464_2.pep
MAPKNALPAASGMTLEPRYRGVRKRPWGRYAAEIRDPARKARVWLGTFDTAEAAARAYDAAALHFRGPKAKTNFPVAFATATATDTRALPLPLRLPLPPPPPKKLSVSPSGSTVESSSRDSPAAPAPAPSLDLSLGMPPMVAAQPFLFLDPRLAVTVAVAAPVPRRPTAAAAGAGASKQAAYSCCREDEQSDTGSSSSVVDASPAVGVGFDLNMPPPGEVA

SEQ ID NO: 5910 - protein, 141 aa, Zea mays
  Clone ID: TF_LIB4827-035-A1-N1-F3.pep
MCGGAIIADFVPAGSRRPATDDTMSASILSGEDHPELPLPLPAPAPGRKTADRGIRRRPWGRWAADIRDPRKGAREWLGTYATPEDAERAYYEAEREIRVPKVKLNFTSAGWGRYARAGGGAAKTRRKSAADDESSVSSPP

SEQ ID NO: 5911 - protein, 170 aa, Zea mays
  unsure (1)..(170): unsure at all Xaa locations
  Clone ID: TF_LIB4746-091-R1-K1-F6.pep
PIHAGGFDPAHAAARAYDRPTGRXIKFHGVDADINFNLSDYEDDMKQMGSLSKEEFVHVLRRQSTGFSRDSSRYIYIGLFDSEVEAARAYDKAVIKCNGREAVTNFEPSTYHGELPTEVADVDLNLSISQPSPQRDKNSYLGLQLHHGPFEGSELKKTKASANDRYTLTS

SEQ ID NO: 5912 - protein, 112 aa, Zea mays
  Clone ID: TF_ZmC3711_3.pep
EDIRDLSREECVTYLRRRSSCFSRGASIYRGVTRRQKDGRWQARIGLVAGTRDIYLGTFKTEEEAAEAYDIAAIEIRGKNAVTNFDRSNYVDKGMHCIEGEGLRLLASKPEE

SEQ ID NO: 5913 - protein, 33 aa, Zea mays
  Clone ID: TF_LIB3592-083-Q1-K6-H12.pep
LSPGVRQWHWGKWVLEIRLPSTRTRMWLGTWHA

SEQ ID NO: 5914 - protein, 197 aa, Zea mays
  Clone ID: TF_ZmC25015_1.pep
MRRAKPQQPSPSPEIRYRGVRRRPSGRYAAEIRDPAKKTPIWLGTFDSAEAAARAYDAAARSLRGPTARTNFPGAAASAPRHRARSASASAAAAAPAAVPATSSHSSTVESWSGGAPRVAAPPRSAAAPMEEDDDEDCHSYCGSSSSVLCEDARGDDDDDAAASHAPLPFDLNLPPPIDAAAEADQMGARYDTLLHL

SEQ ID NO: 5915 - protein, 281 aa, Zea mays
  Clone ID: TF_ZmC983_1.pep
MAQELHETSSCSATTTSSCTTSCCSSTVTDSSSSPPSPAAANAAPATRKRQALEAEAEAEAGGEEEEEEEEGCAGNKAAPAKKRPRGSEGKHPTFRGVRMRAWGKWVSEIREPRKKSRIWLGTFPTAEMAARAHDVAALAIKGRAAHLNFPDLAGALPRAASAAPKDVQAAAALAAAFTSPSSEPGAGAHEEPAAKDGAAPEEAAADAQAPVPVALPPPAASRPGTPSSGVEDERQLFDLPDLLLDIRDGFGRFPPMWAPLTDVEEVVNAELRLEEPLLWE

SEQ ID NO: 5916 - protein, 237 aa, Zea mays
  Clone ID: TF_ZmC3831_1.pep
MAPRVADKSPLPPATGLGLGVGGGVGGVGMGPHYRGVRKRPWGRYAAEIRDPAKKSRVWLGTYDTAEEAAKAYDSAAREFRGAKAKTNFPFPSQCSVASGAAGSASSNSTVDSSGGGSGCGIQAPMQAMPLPPALDLDLFHRAAAVNAVSTGMRFPFKGYPVACPTPQQYFFYEQAAAAASGYRMLKVAPPAVTVAAVAQSDSDSSSVVDHSPSPPAVTANKVGFELDLNWPPPAEN

SEQ ID NO: 5917 - protein, 412 aa, Zea mays
  Clone ID: TF_ZmC21463_1.pep
MASPNPEAAGLQAVAVAGAGEGGSSSSLSAVAGAAALSGELVPRRALALRKERVCTAKERISRMPPCAAGKRSSIYRGVTRHRWTGRYEAHLWDKSTWNQNQNKKGKQVYLGAYDDEEAAARAYDLAALKYWGAGTQINFPVSDYARDLEEMQMISKEDYLVSLRRKSSAFYRGLPKYRGLLRQLHNSRWDTSLGLGNDYMSLSCGKDIMLDGKFAGSFGLERKIDLTNYIRWWLPKKTRQSDTSKTEEIADEIRAIESSMQQTEPYKLPSLGFSSPSKPSSMGLSACSILSQSDAFKSFLEKSTKLSEECSLSKEIVEGKTVASVPATGYDTGAININMNELLVQRSTYSMAPVMPTPMKSTWSPADPSVDPLFWSNFVLPSSQPVTMATITTTTFAKNEVSSSDPFQSQE

SEQ ID NO: 5918 - protein, 130 aa, Zea mays
  Clone ID: TF_ZmC8688_1.pep
MRRRGVAAADADGDVELRFRGVRKRPWGRYAAEIRDPAKKARVWLGTFDSAEDAARAYDAAARMLRGPKARTNFPLPAAAALHHPHMPAAAAAAAPPYTTYPTATGVVSTPPVARPACSSLSSTVESFSG

SEQ ID NO: 5919 - protein, 233 aa, Zea mays
  Clone ID: TF_ZmC8439_1.pep
MAPRTSEKTMAPAAAAATGLALSVGGGGGAGGPHYRGVRKRPWGRYAAEIRDPAKKSRVWLGTYDTAEDAARAYDAAAREYRGAKAKTNFPYPSCVPLSAAGCRSSNSSTVESFSSDAQAPMQAMPLPPSLELDLFHRAAAAATGTGAAAVRFPFGSIPVTHPYYFFGQAAAAAAEAGCRVLKLAPAVTVAQSDSDCSSVVDLSPSPPAAVSARKPAAFDLDLNCSPPTEAEA

SEQ ID NO: 5920 - protein, 55 aa, Zea mays
  unsure (1)..(55): unsure at all Xaa locations
  Clone ID: TF_LIB3607-059-Q6-K6-A10.pep
GVRXPPWGRTGGXTKXXARKARVWLGTFDTAEAAARAYXAAALHFRGPKAEDQLP

SEQ ID NO: 5921 - protein, 255 aa, Zea mays
  Clone ID: TF_ZmC278_1.pep
MTLYISYDDGLPCWVRKKRMRRKSTGPDSIAETIKWWKEQNQKLQDESGSRKAPAKGSKKGCMMGKGGPENVNCVYRGVRQRTWGKWVAEIREPNRGRRLWLGSFPTAVEAAHAYDEAAKAMYGPKARVNFSESSADANSGCTSALSLLASSVPAAALQRSDEKVETEVESVETEEVVHEVKTEAKNGDLGSVKVTCVIQSAEETVLHKEGDVSYDYFNVEDVVEMIIVELNADKKFEAHEEYLDGDDGFSLFAY

SEQ ID NO: 5922 - protein, 100 aa, Zea mays
  unsure (1)..(100): unsure at all Xaa locations
  Clone ID: TF_LIB5116-044-A1-PF1-F11.pep
KWAAEIRDPVKGVRVWLGTFPSAEAAALAYDEAARAIRGPRAKLNFSSSSAVAAAAPGARKRXRAAPPAAKPAPVITLVDDEEEHATSLRQARGRGERGL

SEQ ID NO: 5923 - protein, 180 aa, Zea mays
  unsure (1)..(180): unsure at all Xaa locations
  Clone ID: TF_LIB3606-042-Q1-N6-C4.pep
AXAMASWVAAARAESGVLSAAAGHHHALALSMSSGSLSSCVTAHPAAPEYGAAAAALDGGRKRGGAAGQKQPVHHRKSIDTFGQRTSQYRGVTRHRWTGRYEAHLWDNSCKKEGQTRKGRQVYLGGYDVEEKAARAYDLAALKYWGPSTHINFPLEDYQEELEEMKNMTRQEYVAHLRRK

SEQ ID NO: 5924 - protein, 238 aa, Zea mays
  Clone ID: TF_ZmC16163_2.pep
MGTNPHLQELAASAVAASEPPPRARVVRILVHDADATDSSSSEDEAPPLLPRRRSRGGSSSLSVRRRVMEPAGASSAVRFRGVRRRPWGRWAAEIRDPHNRRRLWLGTFDTAEEAANAYDAANIRSRGRSGTTNFPAARYSPPPKPAKPIISLTPEPGKVITLPPVPVKPTFPVQVKEVGGSWGGLVKGARSEVKAFAPKPVWKMIPRVHQKFPGCADGSGLRAVHAASIYVEEVGGG

SEQ ID NO: 5925 - protein, 168 aa, Zea mays
  Clone ID: TF_ZmC7298_2.pep
MHSIRTLTHLLVLAMPMQCQQRRAVYLGGYDREEKAARAYDLAALKYWGPSTHINFPLSHYEKELEEMKHMSRQEFIAHLRRHHQHGRWQARIGRVAGNKDLYLGTFSTQEEAAEAYDIAAIKFRGLNAVTNFDISKYDVKRICASTHLIGGGDACRRSPTRQPTSEL

SEQ ID NO: 5926 - protein, 494 aa, Zea mays
  Clone ID: TF_ZmC67_1.pep
MDTSHHYHPWLNFSLAHHCDLEEEERGAAAELAAIAGAAPPPKLEDFLGGGVATGGPEAVAPAEMYDSDLKFIAAAGFLGGSAAAAATSPLSSLDQAGSKLALPAAAAAPAPEQRKAVDSFGQRTSIYRGVTRHRWTGRYEAHLWDNSCRREGQSRKGRQVYLGGYDKEEKAARAYDLAALKYWGSSTTTNFPVAEYEKEVEEMKNMTRQEFVASLRRKSSGFSRGASIYRGVTRHHQHGRWQARIGRVAGNKDLYLGTFSTEEEAAEAYDIAAIKFRGLNAVTNFEISRYNVETIMSSNLPVASMSSSAAAAAGGRSSKALESPPSGSLDGGGGMPVVEASTAPPLFIPVKYDQQQQEYLSMLALQQHHQQQQAGNLLQGPLVGFGGLYSSGVNLDFANSHGTAAPSSMAHHCYANGTASASHEHQHQHQMQQGGENETQPQPQQSSSSCSSLPFATPVAFNGSYESSITAAGPFGYSYPNVAAFQTPIYGME

SEQ ID NO: 5927 - protein, 238 aa, Zea mays
  Clone ID: TF_ZmC16163_1.pep
MGTNPHLQELAASAVAASEPPPRARVVRILVHDADATDSSSSEDEAPPLLPRRRSRGGSSSLSVRRRVMEPAGASSAVRFRGVRRRPWGRWAAEIRDPHNRRRLWLGTFDTAEEAANAYDAANIRFRGVSATTNFPAARYSPPPKPAKPIISLTPEPGKVITLPPVPVKPTFPVQVKEVGGSWGGLVKGARSEVKAFAPKPVWKMIPRVHQKFPGCADGSGLRAVHAASIYVEEVGGG

SEQ ID NO: 5928 - protein, 200 aa, Zea mays
  Clone ID: TF_ZmC587761_1.pep
LDLDPRRDERERSGGRSTGRSTKVDPRRHGKRPLPADEEEEQPPPPPSAPKHEQVEEQPYHPLIARALQQQGAASAGGSPGADVADPSPSPEAYAQYYYSARADHDATAMVSALSHVIRATPDQQQAYYPAGSAAVSGEQQHQHDAAAAAAIAEEQGRKRHYRGVRQRPWGKWAAEIRDPKKAARVWLGTFDTAEDAAIA

SEQ ID NO: 5929 - protein, 246 aa, Zea mays
  Clone ID: TF_ZmC4601_1.pep
MDMGRHQLQLQHAASSSSTSASSSSEQDKPLCCSGPKKRPAGRTKFRETRHPVFRGVRRRGAAGRWVCEVRVPGRRGARLWLGTYLGAEAAARAHDAAMLALGRGAACLNFPDSAWLLAVPPPPALSGGLDGARRAALEAVAEFQRRRFGAAAADEATSGTSPPSSSSSATKPAPAIERVPVEASETVALDGAVFEPDWFGDMDLDLYYASLAEGLLVEPPPPPPPAAWDHGDCCDSGADVALWSY

SEQ ID NO: 5930 - protein, 256 aa, Zea mays
  Clone ID: TF_ZmC4601_2.pep
MDMGRLQLQLQHAASSSSTSASSSSSSEQNKLAWSPSSPQPPKKRPAGRTKFRETRHPVFRGVRRRGAAGRWVCEVRVPGRRGARLWLGTYLGAEAAARAHDAAMLALGRGAACLNFPDSAWLLAVPPPPALSGGLDGARRAALEAVAEFQRRRFGAVAADEATSGTSPPSSSSSPSGTYVSQAPAPAIERVPVEASETAALDGAVFEPDWFGDMDLDLYYASLAEGLLVEPPPPPAAWDHGDCCDSGADVALWSY

SEQ ID NO: 5931 - protein, 195 aa, Zea mays
  Clone ID: TF_ZmC21315_1.pep
MVKGAHFQDAAVDGGAGGNAEAAMQGGAKRQYKGVRMRSWGSWVSEVRAPSQKTRIWLGSYSTAEAAARAYDAALLCLKGSAAADLNFPVHLPFHVPAAAAMSPKSIQRVAAAAAAASGGATCSPPAPLLRAATATRRRRLALAPRRPAGTLACATARRTTTTWTWTWRATPTRTSPRSRTSRPSSSRLSAWSTP

SEQ ID NO: 5932 - protein, 250 aa, Zea mays
  Clone ID: TF_ZmC21315_2.pep
MVKGAHFQDAAVDGGAGGNAEAAMQGGAKRQYKGVRMRSWGSWVSEVRAPSQKTRIWLGSYSTAEAAARAYDAALLCLKGSAAADLNFPVHLPFHVPAAAAMSPKSIQRVAAAAAAASGGATCSPPQLQAGAAASAPYSAGGGAGATPPCSYGDASSSSGVSSPETGRNAGLCYGTAHYDDMDMDLAGDADADLAALADIEAFFQSPKCMEYAMMDPCSTFFAPAPVATDAASEWAEEGEIDLWSFSSLN

SEQ ID NO: 5933 - protein, 112 aa, Zea mays
  Clone ID: TF_ZmC21315_7.pep
MVKGARLQDAAVAGGNAETAMQGAGGGAKRQYKGVRMRSWGSWVSEVRAPSQKTRIWLGSYSTAEAAARAYDAALLCLKGSAAADLNFPVHLPFHVPAAAAMSPKSIQRVAA

SEQ ID NO: 5934 - protein, 190 aa, Zea mays
  Clone ID: TF_ZmC444_1.pep
MAPKRPVSAAAAAEQPRLRGVRKRPWGRYAAEIRDPVRKARVWLGTFDTPEQAARAYDAAARKLRGPGAATNYPAPEPTAEALAEAPAASGSGSAVVYESSSASASASSCSLPLAAPSLDLSLALPAAAAAAEPYQLFADPAAAAAVTPALLHFLPPSEEQQSYSGSSLSSSSASVFDAAPPVGLRLDLN

SEQ ID NO: 5935 - protein, 271 aa, Zea mays
  unsure (1)..(271): unsure at all Xaa locations
  Clone ID: TF_ZmC2282_9.pep
MCGGAILSGFIPPSGVAAAAAAAKKKQQQQRCRVTADLLWPGPGSKGAPQDQEEDFEADFREFERGLGEDDVDSAGEGGDPEVQELPPPEPTRXVMTTTPKDVKGDRPVKRGRKNQYRGIRQRPWGKWAAEIRDPNKGVRVWLGTYNTAEEAARAYDAEPGKIRGKKAKVNFPDDDAPGTGHRPANAAPRLVAPPPPPKACADEIFNNLKNDDDDNNNNNDDLFAMFAFGDNKRRSSATNTMLSVSDDQRSNSYGSGSSDLVGSWSWDDDA

SEQ ID NO: 5936 - protein, 196 aa, Zea mays
  Clone ID: TF_LIB4742-133-A1-K1-G3.pep
MCGGAILSGFIPPSGVAAAAAAAKKKQQQQRCRVTADLLWPGPGSKGAPQDQEEDFEADFREFERGLGEDDVDSAGEGGDPEVQELPPPEPTRFAFATAAKAAVDGVMTTTPKDVKGDRPVKRGRKNQYRGIRQRPWGKWAAEIRDPNKGVRVWLGTYNTAEEAARAYDAEARKIRGKKAKVNFPDDATGTRHRPT

SEQ ID NO: 5937 - protein, 416 aa, Zea mays
  Clone ID: TF_ZmC2282_2.pep
MCGGAILSGFIPPSGVAAAAAAAKKQQQQQQRCRVTADLLWPGPGSKGAPQDKEEDFEADFREFERGLGEDDVDSAGEGGDPEVQELPPPEPTRFAFATAAKAAVDGVMTPPPKDVQGDRAVKKRGRKNQYRGIRQRPWGKWAAEIRDPNKGVRVWLGTYNTAEEAARAYDAEARKIRGKKAKVNFPDDATGTRHRPTTDEIFNNLKNDDNNNNDDLFAMFAFGDNKKKVPAAKPAAAEGGSGSGSFLVPAPAVAVVPGNKRRSSATNTMLSVSDDQRSNSYGSGSSDLVGSWSWDDDAAAAAMTSDYTSSVFAPDNAVLPAASYSYMQGGAPKRMRSSYGGAPPSLAHDAAMPGFGLDKVSYHYQALPPYYVGSSNASVGSLGLLQADDAPQDGASAGDIWSLDELLMLAAAGAY

SEQ ID NO: 5938 - protein, 220 aa, Zea mays
  Clone ID: TF_ZmC2282_8.pep
MCGGAILSGFIPPSGRCRVTADLLWPGPGSKGAPPKDVQGDRAVKKRGRKNQYRGIRQRPWGKWAAEIRDPNKGVRVWLGTYNTAEEAARAYDAEARKIRGKKAKVNFPDDATGTRHRPTTDEIFNNLKNDDNNNNDDLFAMFAFGDNKKKVPAAKPAAAEGGSGSGSFLVPAPAVAVVPGNKRRSSATNTMLSVSDDQRSNSYGSGSSDLVGSWSWDDD

SEQ ID NO: 5939 - protein, 98 aa, Zea mays
  Clone ID: TF_LIB3356-023-P1-K1-B12.pep
FACRKARIWLGTFETAEDAARAYDEAARIMCGPRARTNFPADANGPPPSFLFAALVDKLHRFNLAFVQAAQRQKEAAAVAAAATRTSVPATPSTPAGT

SEQ ID NO: 5940 - protein, 162 aa, Zea mays
  unsure (1)..(162): unsure at all Xaa locations
  Clone ID: TF_ZmC7732_1.pep
MARPQQRYRGVRQRHWGSWVSEIRHPLLXDRARLGLKARIWLGTFETAEDAARAYDEAARIMCGPRARTNFPADANGPPPSFLSAALVDKLHRFNLASVQAAQRQREAAAAAAAAAATSAPATPPTPPATQWGGGGRSLEEQHVEQMIEELLDSDFSMEICC

SEQ ID NO: 5941 - protein, 141 aa, Zea mays
  Clone ID: TF_21393791.pep
VEHQPCCNATVPKGSVVDGGKRKVTTAGVPTEPRYRDAQRRRPRGRYSAEIRDQHKGVWLWLGTFDTAEEAARRYDSEACRLRGPSENTNFLATLDYRVPLPALSLHALLPCVRTLVWIGVERYSQHSKGIVVLHDESTAS

SEQ ID NO: 5942 - protein, 474 aa, Zea mays
  Clone ID: TF_ZmC5960_2.pep
MDMDMSSATHPAHHWLSFSLSNNYHHGLLEALSSSSSAHQIAGDEAPVDEAPKMEDFLGCVGSAGTGSTAVVDHGELGSIAAGFLHRYPAHDGMTDQNSGAVTVAAATMEVAESDQARRPAETFGQRTSIYRGVTRHRWTGRYEAHLWDNSCRREGQSRKGRQVYLGGYDKEEKAARAYDLAALKYWGPTTTTNFPVSNYEKELEEMKSMTRQEFIASLRRKSSGFSRGASIYRGVTRHHQHGRWQARIGRVAGNKDLYLGTFSTQEEAAEAYDIAAIKFRGLNAVTNFDMSRYDVESILSSDLPVGGGATGRAAKFPLDSLQPGSAAAMMLAGAAAASQATMPPSEKDYWSLLALHYQQQQEQERQFPASAYEAYGSGGVNVDFTMGTSSGSNNNTGSGVMWGATSGAVVGQQDSSSKQGNGYASNIPYAAAMVSGSAGYEGSTGDNGTWVTTTTSSNTGTAPHYYNYLFGME

SEQ ID NO: 5943 - protein, 301 aa, Zea mays
  Clone ID: TF_ZmC3047_1.pep
MSRSRTVRIFWDDPDLTDSSGDDEGCGARRVGRMVRELAPAPAPAPAALPVPDQCNAGDGDRGRKAGVAGPGVCSGARRRVAKGAGGPASTKFRGVRRRPWGKFAAEIRDPWRGVRVWLGTFDTAEEAARVYDTAAVQLRGANATTNFAASAATNSGSGAGAGQDPATTPAAGYESGAESSPTSVLRKVPSLSSLAEDDSDAPAAERRSLAVLEEEELGEFVPFEDAPVYATSGFWDFEPDAGFLYAEPSSPEASWNAAAAVAEPASSDDAPSWAASPVQENDYFQDLRDLFPLNRLPAIF

SEQ ID NO: 5944 - protein, 212 aa, Zea mays
  unsure (1)..(212): unsure at all Xaa locations
  Clone ID: TF_ZmC6700_3.pep
MCGGAILSGFIPPSGVPAAAAAAKKKQQRRATADLLWPGPGKKGAPREEDFEADFREFERGLGEDDDVDGAGDEVQELPLPEPARLAFAAAVGAPRTAVDGVMTPKDGEGDMPTTATNSAANKRRRKNQYRGIRRRPWGKWAAEIRDPSKGVRVWLGTYSTAEEAARAYDAEARRIRGKKAXVNFRDEAAAAACSEATSRNYSNCLSPAQRG

SEQ ID NO: 5945 - protein, 174 aa, Zea mays
  Clone ID: TF_LIB4073-022-Q6-K1-D12.pep
MAPRTSEKTMTPAAAAAATGLALSVSGGAGASGPHFRGVRKRPWGRYAAEIRDPAKKSRVWLGTFDTAEEAARAYDAAARDYRGPKAKTNFPFPSSCMPLAAGAGAGSLPAAKAVTGGGGSRSSNSSTVESFSSGSDVQAAPMQAMPLPPSLELDLFHRAAAAGTGTGGAAVRF

SEQ ID NO: 5946 - protein, 43 aa, Zea mays
  Clone ID: TF_uC-zmflteosinte001a02b2.pep
IISSAELASLPSEIDEGMVCINTFGTSRNTPATLQKMPSWLAS

SEQ ID NO: 5947 - protein, 198 aa, Zea mays
  Clone ID: TF_ZmC258_3.pep
KSTAHSFCKTLTAWDTSTHGGFSVLRRHAEEEVLPEVTAPGVGYEQTAASVELNSDKLSQPSDVNNSDALAASSERSPLESQSRQVRSCTKVIMQGMAVGRAVDLTKLSGYSDLCQKLEEMFDIQGELGSTLKKWRVIFTDDEDDMMLVGDDPWDEFCRMVKRIYIYTYEEAKKLTSKSKLPVSSDSSKLSAANSLSE

SEQ ID NO: 5948 - protein, 56 aa, Zea mays
  unsure (1)..(56): unsure at all Xaa locations
  Clone ID: TF_LIB3180-047-P2-G3.pep
LKTLTASDTRAHGGLCVVMRHSLECLSQLDMSYNSPXIDLVFXDLYGNDWHLCHIF

SEQ ID NO: 5949 - protein, 194 aa, Zea mays
  unsure (1)..(194): unsure at all Xaa locations
  Clone ID: TF_LIB4757-020-Q1-K1-H5.pep
APSPQIARVPARCAAQGGRDGFRASACEIRWWRLSSVPLLGEKVYYFPQGHIEQVEASTNHLAEHQGTPLYNLPWKIPCKLMNMELKAEPDTDEVYAQLTLLPDKKQDENTSARRRRVVPHVPPATSEEGLRIHSFCKTLTASDTSTHXGGFSVLRRHADECLPPLDMGQHPPNQEXLVAKDLHGXRWRFRHIF

SEQ ID NO: 5950 - protein, 152 aa, Zea mays
  unsure (1)..(152): unsure at all Xaa locations
  Clone ID: TF_LIB3689-215-Q6-K6-B9.pep
MSSSSAASIGQPPPPAPPPEEEKKCLNSELWHACAGPLVCLPTVGTRVVYFPQGHSEQVAASTNKEVDGHIPNYPNLPPQLICQLHDVTMHXGXVRPDEVYAQMTLQPLNPQEQTDAYLPAEMGIMSKQPTNYFCKTLTASDTSTHGGFSVP

SEQ ID NO: 5951 - protein, 424 aa, Zea mays
  unsure (1)..(424): unsure at all Xaa locations
  Clone ID: TF_ZmC37547_1.pep
PASAQRPXCISGWNAPVYGALSAFLKDEAGKITKGPGGYMSGRGKVEITDVVEAASLAASGQPFEVVYYPRASTPEFVVKAASVQNAMRNQWCPGMRFKMAFETEDSSRISWFMGTIASAQVADPIRWPNSPWRLLQVSWDEPDLLQNVKCVNPWLVEIVSSIPPIHLGTFSPPRKKLRVAQHPDFPFEGQLLNPIFHGNPLGPSNSPLRCFSDIAPAGIQGARHAQFGLPLTDYQLNQLHLGFNRLGAMTPTPRISKGFVISSAPASESVSCLLTIGTPQATEKSDDIKRPHIMLFGKPILTEQQMDSGGSREGLSQDRKASELGLEDGHCKVFMESEDVGRTIDLSVFGSYEELYGQLADMFGIEKAEIMRHLCYRDAAGAVRHTGEEPFNDFMKVARRLTIIEGTEGRLQKPLVEYMVERA

SEQ ID NO: 5952 - protein, 66 aa, Zea mays
  unsure (1)..(66): unsure at all Xaa locations
  Clone ID: TF_LIB3245-352-P1-K1-E12.pep
PRVRPLVRPRLSDSCRIIWVGGTVSCARXXDPIRWSNSPWRLVQVSWDDPDLLHIVKRASPWLVEL

SEQ ID NO: 5953 - protein, 184 aa, Zea mays
  Clone ID: TF_5555419.pep
MRGNVSPCAAAKARGKVRPEDVAEAARLAAAGQSFEVVYYPRASTPEFCVRAAAVRAAMRVQWSPGMRFKMAFETEDSSRISWFMGTVAGVQVTDPIRWPQSPWRLLQVTWDEPDLLQNVKRVSPWLVELVSSMPAIHLASFSPPRKKPRIPAYPEFPFEGQLLNPAFPPSPLPHGQQHHHNFL

SEQ ID NO: 5954 - protein, 178 aa, Zea mays
  Clone ID: TF_ZmC15491_1.pep
MLSVGLTPNIVTYNSLIYGLCKSGELSRAVSLFKKLWTKGISPNAITYNTLIDKHCKDGYITEAFKLKQRMIEEGIHPTVFTYSILINGLCTQGYMEEAIKLLDQMIENNVDPNYVTYWTLIQGYVRCGNMIEISKIYDKMHIHGLLPTNVSGDVKQSCPAIHNPNRETCQMKMHSQC

SEQ ID NO: 5955 - protein, 139 aa, Zea mays
  Clone ID: TF_uC-zmflb73175c11b1.pep
LRVGQKALYSDQISLGMRFRMMFETEELGMRRYMGTITGITDLDPVRWKNSQWRNLQVGWDESAAGERRNRVSMWEIEPIAAPFFICPQPFFGVKRPRQIDDESSEMENLFKRAMPWLGEEICIKDAQTHNTTMPGLSL

SEQ ID NO: 5956 - protein, 219 aa, Zea mays
  unsure (1)..(219): unsure at all Xaa locations
  Clone ID: TF_LIB3245-093-P1-K1-H4.pep
TRGKAARVWVRPEEVVEAXANLAVSGQPFEVVYYPRASTPEFCVKAGGVRAAMRTQWCPGMRFKMAFETEDSSRISWFMGTVSAVHVADPIRWPNSPWRLLQVAWDEPDLLQNVKRVSPWLVELVSNMPVIHHLTATPFSPPRKKLCVPLYPELPLEGQFPAPMFHGSPLLGRGGAGGPMCYFPDGTSAGIQGARHAQFGISLSDLHLNKLQPGLSPYG

SEQ ID NO: 5957 - protein, 137 aa, Zea mays
  Clone ID: TF_ZmC84987_1.pep
MAGIDLNTVEEEDEEEAEALPLPGPGGRGAVCLELWHACAGPVPPLPRKGSAVVYLPQGHLEHIGGDAARGAAAAAVPPHVLCRVVDVTLHADGATDEVYARVSLLPEDEDAEKRAQAQARVPEDEDRRDGEDGAMR

SEQ ID NO: 5958 - protein, 124 aa, Zea mays
  Clone ID: TF_LIB4730-133-A1-K1-C7.pep
LASVRSDDTFADLTEPAAAGAERCVDRQLWLACAGGMCTVPPVGASVYYFPQGHSEHALGLAGAADLSAARVPALVPCRVTAVRYMADPDTDEVFARIRLVPLRGGDADADAFFFFTPPPLHLH

SEQ ID NO: 5959 - protein, 312 aa, Zea mays
  Clone ID: TF_ZmC952_2.pep
GRVIPHHKFLKSLNLPFCIGARINLQCHNEDVSERRSGMVVHVSEIDPMKWPGSKWRSLLVRWEDGVECNGQDRVSPWEIEIAGGSVSVAHSLSASSSKRTKLCPQGNLDVPTMYVTGNGNGCTDSVETGKFPRVLQGQDLMSFRTRHVPSAPQTVEAAKLQSSGAQVPSVYPDNIFNRTVVRQLGLASKFDGGATNAQQSGPFDRPREIWSKPQHEISDQTKMDHFETRRASAPGDDAAKHGSGGEVVRKTSCRLFGFSLTEKILPADDDGIKEVTYEPECQNPRMLDLFGYNCSAPSAALPALCAAPFGM

SEQ ID NO: 5960 - protein, 575 aa, Zea mays
  Clone ID: TF_ZmC500_1.pep
AAHGFCKTLTASDTSTHGGFSVPRRAAEDCFPPLDYSQQRPSQELVAKDLHGTEWRFRHIYRGQPRRHLLTTGWSAFVNKKKLVSGDAVLFLRGDNGELRLGVRRAAQLKNGSAFPALYNQCLNLGSLPNVAHAVATKSVFHIYYNPRLSQSEFIIPFSKFIKSFSQPFSAGSRFKVKYESDDASERRCTGIIAGIGDADPMWRGSKWKCLMVRWDDDVDFRQPNRISPWEIELTSSVSGSHMSAPNAKRLKPCLPHVNPDYLVPNGSGRPDFAESAQFHKVLQGQELLGYRTHDNAAVATSQPCEATNMQYIDERSCSNDASNIIPGVPRIGVRTPLGSPRFSYRCSGFGESPRFQKVLQGQEVFHPYRGTLVDASLSNSGFHQQDGSHVPTQASKWHAQLHGCAFRGQQAPAVPSQSSSPPSVLMFQRGDPKMSPFEFGHFHVNKKEDRRAMFVHAGGIGGTEQTTMLQAHHVSGGTGNRDVTVEKSHPAVAAASDNREVSKNSCKIFGISLTEKVPAMKEKGCGDINTNYPSPFLSLKQQVPKSLGNSCATVHEQRPVVARVIDVSTVDMMI

SEQ ID NO: 5961 - protein, 524 aa, Zea mays
  unsure (1)..(524): unsure at all Xaa locations
  Clone ID: TF_ZmC1173_1.pep
HASAHAQEINAKDLHVTIXKRQHICRGQRKRYILISGWSVFVRAKRLVAGDSVLFIWNDNNQLIVVIRLANRPHTVMPSSVLSSDSMHIGLLDAVAHAASTNSRFTIFYNPRASPCEFVIPMAKYVKAVYHTRLYMSIKFQSKLLKCPCSYMGTITGISDLDPVRWPNSHWRSVKVGWDESTAGEKQPRVSLWEIEPLTTFPMYPSPFALGLKRPWPAGLPSLYGGTSDGLTSSLMWLRDRANPGFQSLNFSGLGMSPWMQPRLDNSLLGLQSDMYQTIAAAAAFQSTTKQVPPSAMQFQQPQNIADRSALLSSQILQQVQPRFQQIYPQNLNENKIQGHTQPEYLQVQQQLQRCQSFNEQKPPMHPQQQQQEPQKQQCVQTPQDQQMQEQKHLHNFHSLPDALSAFSQLSPATHSPPSALQTVPAFSHQQNFPDTNISSLSPSTGPSMHGMLGRLPSEAASSLPCVAMNAPVSVSDPWSSKRVAVESVNPCRPRCFHSINDGDSVSEDGAICFGLEGRAGRPF

SEQ ID NO: 5962 - protein, 227 aa, Zea mays
  Clone ID: TF_ZmC1113_2.pep
AAAAAAAQVAGGGGGGEGDAAAAARGGGGTEDGMYTELWNLCAGPLVTVPRVGDKVYYFPQGHIEQVEASTNQVAEQHMQFYDLPWKILCEVMNVELKAEPDNDEVYAQLTLLPESKPEENGSSEEMPASPPAALARPRVHSFCKTLTASDTSTHGGFSVLRRHADECLPPLDMTRQPPTQELVAKDLHGVEWRFRHIFRGQPRRHLLQSGWSVFVSAKRLVAGDAF

SEQ ID NO: 5963 - protein, 71 aa, Zea mays
  Clone ID: TF_LIB3279-211-Q6-N6-B2.pep
MAQEQADKFQREPTSDPRTHLSPHSTPHRPLQSSSSHSLAGQPREHLLLTDWSIFVSSKRLVSGDTFIFLS

SEQ ID NO: 5964 - protein, 123 aa, Zea mays
  unsure (1)..(123): unsure at all Xaa locations
  Clone ID: TF_LIB4171-034-R1-L1-C6.pep
GGAFFGWGLPHRGGGRSLSLERPPALQNFRRRVVLRLKMRFXGDDAPERRSSVTVIGIVRLPAMSNSLWADSEWRSLIGXWDEPSSILLPDRISPWEVEPLHASNPQSSQPALRAEASSDPQL

SEQ ID NO: 5965 - protein, 234 aa, Zea mays
  Clone ID: TF_ZmC952_3.pep
CQLIPSQELVAKELHGAKWKFRHIYRGQPRRHLLTTGWSSFVNKKKLVSGDAVLFLRGDDGELRLGVRRAIQLKNEALFDDFSCDSTKRHTLLAVADSLKHKSVFHISYNPRATASEYIIPYHKFLKSLNLPVCIGARINFQCHNEDVSERRSGVVVRISEIDPMKWPGSKWRSLLVRWEDGAECNGQDRVSPWEIEIAGGSVSVSHSLSASSSKRTKLCPQGNLDVPAMCKLS

SEQ ID NO: 5966 - protein, 145 aa, Zea mays
  Clone ID: TF_ZmC425960_1.pep
MAGIDLNDTVEEDEEEAEPGNACSQQSRTSSAATFPPPPPNQPRPSAAVCLELWHACAGPVAPLPRKGSVVVYLPQGHIEHLGDAAAAGGGAPPPVALPPHVFCRVVDVTLHADASTDEVYAQLALVAENEDVARRLRGRSEDGS

SEQ ID NO: 5967 - protein, 477 aa, Zea mays
  Clone ID: TF_ZmC12351_3.pep
VPSACRAAFGCTQPTLHFFSFLLLFCSSHLNKILVHKTNALRLRNIPLLVICTLFIHGHIFTFKHLCLHSITKILRNGPRAHFPFNPFLPPGAYRRETQLRAFYSTTEEISSLFAKQQEQLKAMQRTLEDEENYESTLMGVDLNKVPLATDNAGMKPVDCSKNTVGASSASPENTQVSEHDSSDEDANMTEQQDDDGTAIGGSTQGLECTSPERSEGRRSGFHGNPVSTAPEREVTDTEQVPETDSQAGNAGCDDQRCDNTGGETMPLEDDMLLPDNEEPTALLKDAGQPQANVVPIPIPGDGVGHCSEEKHEGACSESKREDTHAGAIRTADLLASEVAGSWAVETAPSVNGENESPRSLGDATEHDEAGGSVAGDALVTLVNSEGQAAGSQNNVERGSSKITHHHHHHRHHHRVLSAMIGIVDPEFRKQMSGRSGVGNEEPMSDAETGEGIEEGDSDSGSDGSDSEEAMVEDSVV

SEQ ID NO: 5968 - protein, 167 aa, Zea mays
  Clone ID: TF_ZmC13783_3.pep
MSCSSAASIGQPPPEEEKKCLNSELWHACAGPLVCLPTVATRVVYFPQGHSEQVAASTNKEVDGHIPNYPNLPPQLICQLHDVTMHADVETDEVYAQMTLQPLNPQEQNDPYLPAEMGIMSKQPTNYFCKTLTASDTSTHGGFSVPRRAGERVFPPLDFTQQPSAQE

SEQ ID NO: 5969 - protein, 813 aa, Zea mays
  Clone ID: TF_ZmC965_1.pep
MVAAAAAAGGGADAGCGGGGGGGGKDALFVELWKACAGPLSSVPLLGEKVYYFPQGHIEQVEASTNHLAEHQGTPLYNLPWKIPCKLMNMELKAEPDTDEVYAQLTLLPDKKQDENTSARVENEEAEEEVVPHVPPATSEGLRIHSFCKTLTASDTSTHGGFSVLRRHADECLPPLDMSQHPPNQELVAKDLHGVEWRFRHIFRGQPRRHLLQSGWSVFVSAKRLVAGDAFIFLRGENGELRVGVRRALRHQTTIPSSVISSHSMHLGVLATAWHAVNTGSMFTVYYKPRTSPAEFVVSRARYCESLKRNYSIGMRFRMRFEGEEAAEQRFTGTIVGICVSDPSGWADSKWRSLKVRWDEASSVPRPERVSPWQIEPAVSPSPVNPLPVRFKRSRSSVNASPSDVSTVNREVASKVMVDSQQNNLPRALHNQGRTQLTGRYRDSTDVKTAQDLTMWSSGTEQQRNNIAAQTKRCLEGWTQSRTPEGYNQLFSAFQPLKDAHNPLRPFPNKISGTRSSTWVTADARYPAQQANHNMLHGTLSFMPHSSGFRMIQQNNLVMPEAANFTGKSAFTSLQGHVTDQCSTGWFGPIESNSHTDHASSSLIRSQPLVIGNDVQKTKGTSFKLFGIPLGSPEKSEPLVSPPSVAYDGKLQTSPTDNNEPCSEATQNIQNKVPSSSTRSCKKVHKQGSALGRSIDLTKFACYDELIAELDQMFDFDGELKSPCRNWLVVYTDNEGDMMLVGDDPWNEFCDMVHKIFIYTREEVERMNPGALNSRLEDCLSDSLGRGLASKEPRSGPSTSAVDSENRANLSSQ

SEQ ID NO: 5970 - protein, 319 aa, Zea mays
  unsure (1)..(319): unsure at all Xaa locations
  Clone ID: TF_ZmC488_2.pep
FRLTNFSVLSLNRVGASEFIVPYCKFLKSLNYPFSVGTRFKVGCENEDANERSFGLIIGISEVDPIHWPGSKWKSLLIKWDGATKYSHQNRVSPWDIEGVGSSVLVTHRLSSSVSKRTKLCFPPSDLDTPILDGNGRPDSVETERFHRVLQGQELVHPSIHGAACSHSSDSPRXYALQQFNLPATEVHSPSSVLMFNQTMAPHAELDGATNREEVHGSRYLSSNAIGREAEPWPSMQQQRATSAPARNAESGSVGRGAGRSNCKLFGFSLTEKILGTDGGGVKEGNYEVDRQTPRVLDLFGHGSTPGALHALCAAPLGI

SEQ ID NO: 5971 - protein, 222 aa, Zea mays
  unsure (1)..(222): unsure at all Xaa locations
  Clone ID: TF_ZmC499146_1.pep
MITFADLTEPAAAGAERCVDRQLWLACAGSMCTVPLVGASVCYFPQGHAEHALGLDGAADLSAARVPALVPCRVTAVRYMADPDTDEVFARIRLVPLRGGEAHAGGLDDDVAAADEQEKPASFAKTLTQSDANNGGGFSVPRYCAETIFPRLDYAADPPVQNVVAKDVHGXAWKFRHIYRGTPRRHLLTTGWXSTFVNQKKLIAGDSIGFLRGDSGELHVGI

SEQ ID NO: 5972 - protein, 1086 aa, Zea mays
  Clone ID: TF_ZmC2665_1.pep
MEAPGTSSGGAGGEGAGGTKVNEELWYACAGPLVALPPAGSLVVYFPQGHSEQVAASMRKDADAKIPSYPNLSSKLICILRSVTMLADPDTDEVYARMTLQPVSNVTHCDKETLLATELALKQTRPQTEFFCKTLTASDTSTHGGFSVPRRAAERIFPHLDFSVQPPAQELQARDLHDAIWTFRHIYRGQPKRHLLTTGWSLFVSGKRLLAGDSVLFIRDGRQQLLLGIRRANRQPVNLSSSVLSSDSMHIGILAAAAHAAANNSQFTVFYNPRASPSEFVIPFAKYQKAVYSNQLSLGMRFRMMFETEESATRRYMGTITGISDMDPLRWKNSQWRNIQVAWDEAAPSERRTRVSLWEVEPVIAPFFIYPSPLFTAKRPRQPGVTDDDSSEMDNLFKRTMPWFGEEVGKRDLSTQNGLVPGLSLVQWMNMQHNPSLANTVMQPELLNSLAGKPVQTLAAADLSRQISFQPQFLQQNNIQFNTSLLPPQNQQTEQLANVIATPNQLGSVIVPQKAVQNCSSEQKQNLVTQPLQVSQPMVSVAQPQLVHTQLQQPQVVLQAQPQQPQVIVQAQLQQQQPLVQNHTTIQGGLQQIQLLQQQQVQQSVQEQQQIKIQPFQVPNDANMVTQLSDQMKIQLLKALQPQQPLVMEQQKMIFDLQQQAVNSQSTAQQCSQVATQVVGLHSSSTNQYPTQQKTQPLKTFQDFPGNAVSIVKPEIVTSVGARSLHVPGGVQSMKMDEVPSSSTSPSTNNNPVILRSTPSSSKNQCLPTAAKAPQSSVVLGSTLEQGMKPCDSTQHPMVIPKLAEERPATGQDYMNNNQLDYLDTSSSATSVCLSQADGSLQQSFPPSSFNQHQPLREAVPDSEFEVTDAGNNFLFGANIDGHMEPLNEDDLLGTAFEADKYMEQMPGNGISNYISSKDSQQELSSSMISHPFGVADIAFNSIDSSINDIQFLNRNSRAPGPVQQRMRTYTKVHKRGAVGRSIDINRYSGYDELKHDVARMFGIEGQLSDQNRVGWKLVYEDHEKDVLLVGDDPWEDFVNCVRCIRILSPQEERQMRLASDYGDSFLGNQACSSSDGGRPWRVTGD

SEQ ID NO: 5973 - protein, 835 aa, Zea mays
  Clone ID: TF_ZmC1173_2.pep
LPPQLICQLHNVTMHADAETDEVYAQMTLQPLSPQELKDPFLLAELGTASNQPTNYFCKTLTASDTSTHGGFSVPRRAAEKVFPPLDFNQQPPAQELIAKDLHGNDWKFRHIFRGQPKRHLLTTGWSVFVSAKRLVAGDSVLFIWNDNNQLLLGIRRANRPQTVMPSSVLSSDSMHIGLLAAAAHAASTNSRFTIFYNPRASPCEFVIPMAKYVKAVYHTRISVGMRFRMLFETEESSVRRYMGTITGISDLDPVRWPNSHWRSVKVGWDESTAGEKQPRVSLWEIEPLTTFPMYPSPFALGLKRPWPAGLPSLYGGRGDGLTSSLMWLRDRANPGFQSLNFSGLGMSPWMQPRLDNSLLGLQSDMYQTIAAAAALQSTTKQVPPSAMQFQQPQNIADRSALLSSQILQQVQPRFQQIYPQNLNENKIQGHTQPEYLQQQLQRCQSFNEQKPPMHPQQQQQEPQQQQCVQTPQDQQMQEQKHLHNFHSLPDALSAFSQLSPATHSPPSALQTVPAFSHQQNFPDTNISSLSPSTGPSMHGMLGRLPSEAASSLPCVAINAHVSVSDPWSSKRVAVESVNPCRPHVSPQIEHLDMATCNMPQSSALAPLPGRECLVDEDGCSDPQNHLLFGVHIDSHSLLMQGGIPALQNDNSSGTIPYSTSNFLSPSDNDFPLNQPLRSAGCLDESDYLPCAENAEQANQQFATFVKVYKSGTVGRLLDITRFSSYDELRSEVGRLFGLEGQLEDPLRSGWQLVFVDREDDVLLVGDDPWQEFVNSVSCIKILSPEEVQRMGKPGIQLLSSAPSRRLGNGCDSYASMQEPRGLDAGMAPVGSVEF

SEQ ID NO: 5974 - protein, 850 aa, Zea mays
  Clone ID: TF_ZmC1113_1.pep
MTSSAAAAAAAAQVAGGGGGGEGDAAAAARGGGGTEDGMYTELWNLCAGPLVTVPRVGDKVYYFPQGHIEQVEASTNQVAEQHMQFYDLPWKILCEVMNVELKAEPDNDEVYAQLTLLPESKQPEENGSSEEMPASPPAALARPRVHSFCKTLTASDTSTHGGFSVLRRHADECLPPLDMTRQPPTQELVAKDLHGVEWRFRHIFRGQPRRHLLQSGWSVFVSAKRLVAGDAFIFLRGDSGELRVGVRRAMRQQANVPSSVISSHSMHLGVLATAWHAVNTGTMFTVYYKPRTSPAEFVVPCDRYMESLKRNYPIGMRFKMRFEGEEAPEQRFTGTIVGNVDPDQAGWAESKWRYLKVRWDEASSIPRPERVSPWQIEPAVSPPPINPLPVHRPKRPRSNAVASLPESSAPTKEAAPKVTLETQQHALQRPLQTQDNVAPKSVFGDNSELDSAHKSSLRPSGFDLDKSTIGMQRKLGSDIWMRMNRPDGYSEMLSGYQPPNEGARNSQGFCSLPDQIAAGRPNFWHTVNAHYQDQQGNHNLFPGSWSMMPSSTGFGMNRQSYPMIQEVGGMSQSCTNTKFGNGVYAALPGRGIDRYPSGWFGHTTPGGRVDDAQPRVIKPQPLVLAHGEALKMKGNSCKLFGIHLDSPAKSEPLKSPPSVATPAAEKWMADGIDADKSPEPHKTPKQLGATQVDPVPERCPQASRGTQCKSQGGSTRSCKKVHKQGMALGRSVDLTKFNGYTELVAELDEMFDFNGELKGCSKEWMVVYTDYEGDMMLVGDDPWNEFCSMVHKIFVYTREEVQRMNPGALNSRPEDSGLANSTERGSASTAAAREAPGYQSASSLNSDNC

SEQ ID NO: 5975 - protein, 203 aa, Zea mays
  unsure (1)..(203): unsure at all Xaa locations
  Clone ID: TF_LIB5046-008-R1-K1-E10.pep
MGPQPPLHLPAANGDSIVDRDVWLACAVPLSRLPAVGAEVYYFPHGHAEQCPAHLPAPLPAPHLFPCTVAGVSLGADDETNEVFAKISLSPGPHRGPAAACRTDPTSDCPPQELSYFTKELTQSDANNGGGFSVPRYCADHIFPTLDFDANPPVQKLFMRDTRGNPWQFRHIYRXTPRRHLLTXGWSRFVNAKLLVAGDIVVF

SEQ ID NO: 5976 - protein, 186 aa, Zea mays
  Clone ID: TF_ZmC2665_4.pep
MRKDADAKIPSYPNLSSSVLSSDSMHIGILAAAAHAAANNSQFTVFYNPRASPSEFVIPFAKYQKAVYSNQLSLGMRFRMMFETEESATRRYMGTITGISDMDPLRWKNSQWRNIQVAWDEAAPSERRTRVSLWEVEPVIAPFFIYPSPLFTAKRPRQPGVTDDDSSEMDNLFKRTMPWFGEEVGK

SEQ ID NO: 5977 - protein, 175 aa, Zea mays
  unsure (1)..(175): unsure at all Xaa locations
  Clone ID: TF_ZmC371412_1.pep
MKEVAEERCLDPQLWHACAGGMVQMPPVRSRVYYFPQGHAEHAHGGGAADLAGARALPSLVLCSVTGVRFLADPETDEVFAKIRLVPVAPGEVEFREPREFSVDPEDAREKLSSFAKTLTQSDANNGGGFSVPRYCAETIFPKLDYRADPPVQTVLAXDVHGKVWKFAHLPGHAA

SEQ ID NO: 5978 - protein, 203 aa, Zea mays
  Clone ID: TF_ZmC13783_2.pep
MSSSSAASIGQPPPPAPPPEEEKKCLNSELWHACAGPLVCLPTVGTRVVYFPQGHSEQVAASTNKEVDGHIPNYPNLPPQLICQLHDVTMHADVETDEVYAQMTLQPLNPQEQNDAYLPAEMGIMSKQPTNYFCKTLTASDTSTHGGFSVPRRAAERVFPPLDFTQQPPAQELIARDIHDVEWKFRHIFRGQPKRHLLTTGWS

SEQ ID NO: 5979 - protein, 675 aa, Zea mays
  unsure (1)..(675): unsure at all Xaa locations
  Clone ID: TF_ZmC1206_1.pep
AAVWATPAVTTYSGPHHDALFRQLRMACTGCMVMQRRLGELFFVFPQGCFHQRYTATXNGXNEDLRLIELPPMILCKVVNVELRAETDSDEVYAQIMLQPEADQSEPTSPDSEPPEPERCNVYSFCKTLTASDTSTHGGFSVLRRHAEECLPQLDMTQNPPWQELVAKDLHGNEWHFRHIFRGQPRRHLLTTGWSVFVSSKRLVAGDAFIFLRGENGELRVGVRRLMRQLNNMPSSVISSHNMHLGVLATASHAISTGTLFSVFYKPRTSRSEFVVSVNKYLEAKNHKVSVGMRFKMRFEGDESPERRLSGTIIGMGSMPANSTSPWANSDWRSLRVQWDEPSAILRPDRVSPWELEPLDPTNPQPPQPPLRNKRARPPASPSIAPELAPVFGFWKSPAEPAQAFSFSRPQRTQELYHSNPSSIFSSSLNVGFSSKNDRSTPINSHLYWTMRQTRTESYSASINKAPTEKKQESATSGCRLFGIEIGSAVSPVATVASVGQDQPPALSVDVESDQLSQPSHANKTDAPVASSERSPNESESRQVRSCTKVIMQGMAVGRAVDLTRLDGYDDLRRKLEEMFDIPGELSASLKKWKVIYTDDEDDMMLVGDDPWSEFRRMVKRIYIYSYEEAKSLTRKAKPPVVGDTIKPDPNKLPPESDVPHDSNNNAPVAADYQD

SEQ ID NO: 5980 - protein, 661 aa, Zea mays
  unsure (1)..(661): unsure at all Xaa locations
  Clone ID: TF_ZmC258_1.pep
MAAAMDAPNPGAAAGPGMPSDALYQELWHACAGPLVTVPRRGERVYYFPQGHMEQLEASAHHQQLDQYLPMFDLPPKILCRVVNVELRAEADSDEVYAQIMLQPEADQNELTSLDAEPQEREKCTAHSFCKTLTASDTSTHGGFSVLRRHAEECLPQLDMSQNPLCQELVAKELHGTEWHFRHIFRGQPKRHLLTTGWSVFVSSKRLVSGDAFIFMRGENGELRVGVRSLILYESNMXEIVTFSSTCTEGVXVARWENVSTGTLFSVFYKPRTSRSDFIVSVNKYLEAKKQKISVGMRFKMRFEGDDAPERRFSGTIIGIGSLPAMSKSLWADSDWRSLKVQWDEPSSILRPDRISPWEVEPLDAANPQSPQPPLRAKRPRPPASPCMVSELPSGFGLWKSPIESSCTLSFSEPQRARELFPSIPTSTLSSSSNVSFNSKNEPSMLTSQFYWSARHTRADSCAASTNTVVIEKKQEPSSGGCRLFGINICSAEEEVLPEVTAPGVGYEQTAASVELNSDKLSQPSDVNNSDALAASSERSPLESQSRQVRSCTKVIMQGMAVGRAVDLTKLSGYSDLCQKLEEMFDIQGELGSTLKKWRVIFTDDEDDMMLVGDDPWDEFCRMVKRIYIYTYEEAKKLTSKSKLPVSSDSSKLSAANSLSE

SEQ ID NO: 5981 - protein, 716 aa, Zea mays
  Clone ID: TF_ZmC965_2.pep
MAAAACAGAEAGRGCGGKDALFVELWKACAGPLSCVPPLGEKVYYLPQGHIEQVEASTNQLAEQQGTPLYNLPWKIPCKLMNIELKVEPDTDEVYAQLTLLPDKKQDENTSTTVEEEEVVVPPALPATNEGPHIHSFCKTLTASDTSTHGGFSVLRRHADECLPPLDMSQHPPNQELVAKDLHGAEWRFRHIFRGQPRRHLLQSGWSVFVSAKRLVAGDAFIFLRGENGELRVGVRRALRHQTTIPSSVISSHNMHLGVLATAWHAVNTDSMFTVYYKPRTSPAEFVVSRDRYYESLKRNYSIGMRFKMRFEGEEAAEQRFTGTIVGIGASDPSGWADSKWRSLKVRWDEPSSISRPERVSPWQIEPSVSPCHVNPLPVRFKRSRSSVNALPSDVSTVTREVTSKVMADSQQNSLTRALHNQGRTQLTVRYHDNSDVKTTQDLTVWSSGTEQQRNNIAAQTKLCLEGWTPTRSPEGYNQIFSAFKPLKDIHNPLGPFPSQISGTHSNSWDTADARYPVQQANYSMLPGTWSLRPHNSGFRMNQQNYLVMPEGANFTGKSAFTSLQDHGTDKCSTGCFGHIESSSHTDHASSSLIRPQPLVLGNGVQKSKGTSFKLFGIPLGSPEKSEPLVSPPSVAYDGKLQTSPSEKGNQLDVVEVDNCSHPSKTVKPLDGPQSDSITENNQPSPEATLNIQNKVQSSSTRSCKKVHHMLHLFPC

SEQ ID NO: 5982 - protein, 127 aa, Zea mays
  unsure (1)..(127): unsure at all Xaa locations
  Clone ID: TF_ZmC371412_2.pep
MKEAGEERCLDPQLWHACAGGMVQMPPVRSRVYYFPQGHAEHAHGGGGATDLAGARARPLPPLVLCTVAEVRFLADPETDEVFAKIRLVPAAPGEVEFGEPREFGIDPEDAREKLSSFXXTLTQSDA

SEQ ID NO: 5983 - protein, 59 aa, Zea mays
  Clone ID: TF_LIB3068-003-Q1-K1-F5.pep
LLTYLLLLLWQPMRHLLMTDWSIFVSSKRLVSGDTFIFLSVTSLHVKVVLYVTFISWLY

SEQ ID NO: 5984 - protein, 247 aa, Zea mays
  unsure (1)..(247): unsure at all Xaa locations
  Clone ID: TF_ZmC929401_1.pep
SSKRRCTGTIVGISDYEPMRWPNSKXRNLQVEWDEHGYGERPERVSLWDIETPENMVFSSPLNSKRQCLPSYGVSGLHVSSISKPQGSPFGNLQHMPGISSDIALLLLNQSAQNLGSSIACQQSSFSSIIQNAKQSYFPPTTLGASTGWNESQQQLNALGIQKGDQVSCDVQPGIDSITAPEMNVKPRVPRSTDSYSSQSISDPNSKSDPKTKTRRSKKSSSHKTISDRSEXSSVPSQICDKAEHGS

SEQ ID NO: 5985 - protein, 95 aa, Zea mays
  unsure (1)..(95): unsure at all Xaa locations
  Clone ID: TF_cC-zmle189096f07d1.pep
GGRNSGGHIXXILLTDXDTSTHGXGCVSNRAADHPPPPMDYNQLRPKKKPACQGLXHGAKWKIRHIYRGQPRKHLLTTGWSSFVKKKKLLTRDAV

SEQ ID NO: 5986 - protein, 510 aa, Zea mays
  Clone ID: TF_ZmC488_1.pep
IAKDLHGMKWRFRHIYRGQPRRHLLTTGWSSFINKKKLVSGDAVLFLRGNDGELRLGVRRAVQLKNEALLEAVNCTDSKLLMLSAVANSLDNRSIFHICFNPRVGASEFIVPYCKFLKSLNYPFSVGTRFKVGCENEDAKEAHASVIIGISEVDPIHWPGSKWKSLLIKWDGATKYSHQNRVSPWDIEGVGSSVLVTHRLSSSVSKRTKLCFPPSDLDTPILDGNGRPDSVETERFHRVLQGQELVHPSIHGAACSHSSDSPRCQGSYGRRFSADVWNCKMNDVMSGPRHLNATGFAYQPLGFSESVKFSEVLQGQEMSQAVPSFMRSAFNSGTQNGRVRPFDYVQRSDATQGYALQQFNLPATEVHSPSSVLMFNQTMVPHAELDGATNREEVHGSRYLSSNAIGREAEPWPSMQQQRASVNGSEPLDTTEASAPARNAESGSVGRGAGRSNCKLFGFSLTEKILGTDGGGVKEGNYEVDRQTPRVLDLFGHGSTPGALHALCAAPLGI

SEQ ID NO: 5987 - protein, 779 aa, Zea mays
  unsure (1)..(779): unsure at all Xaa locations
  Clone ID: TF_ZmC2734_1.pep
PLVSLPAVGSRVVYFPQGHSEQVAASTNKEIESQIPNYPNLPPQLICQLHNVTMHADAETDEVYAQMTLQPLNPQELKDPYLPAELGSANKQPTNYFCKTLTASDTSTHGGFSVPRRAAEKVFPPLDFTQQPPCQELMAKDLHGNEWKFRHIFRGQPKRHLLTTGWSVFVSAKRLVAGDSVLFIWNDNNQLLLGIRRANRPQTVMPSSVLSSDSMHIGLLAAAAHAASTNSRFTIFYNPRASPSEFVIPLVKYVKAVYHTRISVGMRFRMLFETEESSVRRYMGTITGICDLDSVRWPNSHWRSVKVGWDESTAGERQPRVSLWEIEPLTTFPMYPSPFPLRLKRPWPTGLPSLHGGKDDDLANSLMWLRDTANPGFQSLNFGGLGMSPWMQPRLDATLLGLQPDMYQAMATAAFQDATKQASPTMLQFQQPQNIAGRASPLLSSQILQQAHHQFQQQPYLQNISESTIQAQGQSEFLKQQIQRSQSFNEQKPQMQHQQESQQQQQPXVCQFPQTSANATNRIMTNYQSISNALSPFSSYHELRRELGRLFGLEGQLEDPLRSGWQLVFVDREEDVLLVGDDPWQEFVSTVSCIKILSPQEVQQMGKQGLELLSSAPARRLGSSCDDYVSRQESRSLSTGIASVGGIPGLQNGNDSAAIPYSTYNFLSPSQNDFPLDHTLNSSGCLDDSGYVPPCSDNSDKVNRPPATFVKVYKSGTYGRSLDITRFSSYHELRRELGRLFGLEGQLEDPLRSGWQLVFVDREEDVLLVGDDPWQEFVS

SEQ ID NO: 5988 - protein, 60 aa, Zea mays
  Clone ID: TF_LIB3245-008-P2-N1-H10.pep
PDRAAARCFPAEFCPQLVSEAADMAEAGVARGSGSAGDDLFTELWHACAGPVVTVPRQGE

SEQ ID NO: 5989 - protein, 195 aa, Zea mays
  unsure (1)..(195): unsure at all Xaa locations
  Clone ID: TF_LIB3959-021-Q1-K6-B1.pep
XGDDGELRLGVRRAIQLXNEALFDDFSCDSTKRHTLLAVADSLKHKSVFHISYNPRATASEYIIPHHKFLKSLNLPFCIGARINLQCHNEDVSERRSGMVVHVSEIDPMKWPGSKWRSLLVRWEDGVECNGQDRVSPWEIEIAGGSVSVAHSLSASSSKRTKLCPQGNLDVPTMYVTGNGNGCTDSVETGKFPRS

SEQ ID NO: 5990 - protein, 677 aa, Zea mays
  Clone ID: TF_ZmC1206_6.pep
MAEAGVARGSGSAGDALFRELWHACAGPLVTVPRQGELVYYFPQGHMEQLEASTDQQLDQHLPLFNLPHKILCKVVNVELRAETDSDEVYAQIMLQPQTEQSEPTSPDPEPPEPERCNIHSFCKTLTASDTSTHGGFSVLRRHAEECLPQLDMTQNPPWQELVAKDLHGNEWHFRHIFRGQPRRHLLTTGWSVFVSSKRLVAGDAFIFLRGENGELRVGVRRLMRQLNNMPSSVISSHSMHLGVLATASHAISTGTLFSVFYKPRTSRSEFVVSVNKYLEAKNHKMSVGMRFKMRFEGDESPERRFSGTIIGMGCMPANSTSPWANSEWRSLKVQWDEPSAILRPDRVSPWEVEPLDRTNPQPPQPPLRNKRARPPASPSIAPELAPVFGFWKSPAEPAQAFSFSGLQRTQELYHSSPSSMFSSSLNVGFNPKYEGPTPNTNHLYWTMRETRTESYSASINKAPTEKKQESTTSGCRLFGIEIGSSAVSPVVTVASVGHDPPPPALSVDAESDQLSQPSHANKAMDAPAASSDRSPNETESRQARSCTKVIMQGVAVGRAVDLTRLDGYDDLRRKLEEMFDIPGELCASIKKWKVIYTDDEDDMMLVGDDPWSEFCRMVKRIYIYSYEEAKSLTPKAKLPAIGGDTGVKPDPSKLPPESDVPQSDSDNSAPVAADKD

SEQ ID NO: 5991 - protein, 213 aa, Zea mays
  unsure (1)..(213): unsure at all Xaa locations
  Clone ID: TF_ZmC1249_3.pep
MPPAAMALPSQAPSNSGDPLYPELWRACAGPLVTVPRVGDLVFYFPQGHIEQVEASMNQVAGNPMRLYDLPSKLLCRVLNVELKAETDTDEVYAQIMLMPEPEQNDVAAEKTSSGSAAPPRPAVRSFCKTLTASDTSTHGGFSVLRRHADECLPALDMSQSPPTQELVAKDLHGMEWRFRHIFRGQPRRHLLQSGWSVFVSSXRLXAGDAFIF

SEQ ID NO: 5992 - protein, 345 aa, Zea mays
  Clone ID: TF_ZmC9734_2.pep
WPNSPWRLLQVAWDEPDLLQNVKRVSPWLVELVSSTPAIHHLTPFSPPSRKKLCIPLYPEGHQLPAPMFHGSPLVGRGVGPMRYFPDGGTPPAGIQGARHAQFGICLPDLHHLTRLQSSLSPHAHGLRHQLDHGARPRIAGGLIVGHPAARDDISCLLTIGTAPHKKPSDVKSAAAAPAPQLMLFGKPILTEQQISLGFRPLPAPKKSPSGDVAETEITMSNNSDASSPAGTGSGSTPSISGGAPSSCQDNKAAATATDDDDLLGHCKVFMQSEDVGRTLDLSAVASYEELYQRLADMFGVDRAELTSHVFYRDGASGALKHAGDEPFSEFTKTARRLTILTDAR

SEQ ID NO: 5993 - protein, 213 aa, Zea mays
  unsure (1)..(213): unsure at all Xaa locations
  Clone ID: TF_LIB5117-056-Q2-PF1-A3.pep
MPPAAMAPPQAPSAGDPLYDELWHACAGPLVTVPRVGDLVFYFPQGHIEQVEASMNQVAGNQMRLYDLPSKLLCRVINVELKAEADTDEVYAQVMLMPEPEQNEMAVDKSTSTTGATPPRPAVRSFCKTLTASDTSTHGGFSVLRRHADECLPPLDMTQSPPTQELVAKDLHGMDWRFRHIFRGQPRRHLLQSXWSVFVSSKRLVTGDAFIFL

SEQ ID NO: 5994 - protein, 669 aa, Zea mays
  Clone ID: TF_ZmC1206_4.pep
MASAGVAGCSGSAGDALFRELWHACAGPLVTVPRQGELVYYFPQGHMEQLEASTDQQLDQHLPLFDLPPKILCKVVNVELRAETDSDEVYAQIMLQPEADQSEPTSPDSEPPEPERCNVYSFCKTLTASDTSTHGGFSVLRRHAEECLPQLDMTQNPPWQELLAKDLHGNDWHFRHIFRGQPRRHLLTTGWSVFVSSKRLVAGDAFIFFRGENGELRVGVRRLMRQLNNMPSSVISSHNMHLGVLATASHAISTGTLFSVFYKPRTSRSEFVVSVNKYLEAKNHKMSVGMRFKMRFEGDESPERRFSGTIIGLGSMPANSTSPWANSDWRSLKVQWDEPSAILRPDRVSPWELEPLDATNPQPPQPHLRNKRARPPALLSIAPELPQVFGFWKSPAEPAQAFSFSRPQQTQELYHSNPSSIFSSSLNVGFSSKNDRSTPINSHLYWTMRQTRTESYSASINKAPTEKKQESATSGCRLFGIEIGSAVSPVATVASVGQDQPPALSVDVESDQLSQPSNANKTDAPVASSERSLNESESRQVRSCTKVIMQGMAVGRAVDLTRLDGYADLHRKLEEMFDIQGELSANLKKWKVIYTDDEDDTMLVGDDPWNEFLRMVKRIYIYSYEEAKSLTRKAKPPVVGDTIKPDPNKLPPESDVIKQQCSVAADYQD

SEQ ID NO: 5995 - protein, 113 aa, Zea mays
  Clone ID: TF_LIB4172-034-R1-L1-A5.pep
IRHEVRFRMLFETEESSVRRYMGTITEVSDADPVRWPSSYWRSVKVGWDESTAGERPPRVSLWEIEPLTTFPMYPSLFPLRVKHPWYSGVAALHDDSNALMLLRGSCCEGGFQ

SEQ ID NO: 5996 - protein, 686 aa, Zea mays
  Clone ID: TF_ZmC1284_1.pep
MAQGAGRDPEELFEELWRACAGPLVELPQTNERVFYFLQGHLEQLQEPTDPALLAEQIKMFQVPNKILCKVVNVELKAETETDEMYAQITLQPEPDQVDLPQLPEPPLQETSRPVVHSFCKILTPSDTSTHGGFSVLRRHANECLPALDMSMPTPTQELITKDLHGSEWRFKHIYRGQPRRHLLTTGWSTFVTSKKLIAGDAFVYLRSETGQQRVGVRRLVQKQSTMPASVISSQSMHLGVLASASHAIRTHSIFLVYYRPRLSQSQYIVRLNKYLESSKIGFDVGMRFKMSFEGDDVPIKKFSGTVVDKGDLSPQWQGSEWKTLKVKWDEATNLNGPERVSSWEIEPFDASAPAITMPVQPSMKNKRPRETAEGLDIHALEPAQEFWLSGRPEQHEKTSVSSSEPKHQVAWTSERAGYSAMSSSICQNSAVTGSWFKGFNSSGSHPSLPEISQKLFQVTSNDARVPPWPGLSAYHADEPSSKLSCNTALCSYQTEEVAPRFSNAVEEEKKEPGMFRLFGVNLINHARSSATADKASVGAGEASARAAGSFEDSAQLSRVTKDHTHMVNGSPREIQSHQSCSGRSRIKVQMHGNDVCRAVDLGNLDGYEQLMGEVGVMFEIKDLGSKEKEEWKVTFTNDENETMEVGAVPWQEFCQMVRKIVIHSIGDRGHMEACPCLGQDGKRDY

SEQ ID NO: 5997 - protein, 153 aa, Zea mays
  Clone ID: TF_ZmC1206_11.pep
MAEAGVARGSGSAGDALFRELWHACAGPLVTVPRQGELVYYFPQGHMEQLEASTDQQLDQHLPLFNLPHKILCKVVNVELRAETDSDEVYAQIMLQPQTECNSRERTTTTAAAASATGATSTSCPRFTTQAAPLHNRRHWNRLRYRNFPREQL

SEQ ID NO: 5998 - protein, 806 aa, Zea mays
  Clone ID: TF_ZmC1249_2.pep
MPPAAMALPSQAPSNSGDPLYPELWRACAGPLVTVPRVGDLVFYFPQGHIEQVEASMNQVAGNPMRLYDLPSKLLCRVLNVELKAETDTDEVYAQIMLMPEPEQNDVAAEKTSSGSAAPPRPAVRSFCKTLTASDTSTHGGFSVLRRHADECLPALDMSQSPPTQELVAKDLHGMEWRFRHIFRGQPRRHLLQSGWSVFVSSKRLVAGDAFIFLRGENGELRVGVRRAMRQLSNVPSSVISSQSMHLGVLATAWHAINTKSMFTVYYKPRTSPSEFIIPYDQYMESVKNNYSIGMRFRMRFEGEEAPEQRFTGTIVGCENLDPLWPDSSWRYLKVRWDEPSTIPRPDKVSPWKIEPASSPPVNPLPLSRGKRPRQNAPPPSPESSVLTKEGATKIDTDSAQTPHQNSVLQSQEQMSFRNNLTESTDSDSTVQKQMMWSPSPNGKVHTNFQPRPAMDNWMPLGRRETDFKDTRSAFKDARTASQSFGDTQGFFMQAYDDSRHRLSFNNQFQDQGSAHRFADPYFYMPQQPSLTVESGTRTQTANNDLRFWSERNSMYGNPSDQQQGFSFGQNTSSWLNQPLPQVEQSRVVRPHATVAPFDLEKTREGSGFKIFGFQVDTTNPSPVQLSSPLSAIREHVVQTRPSAPVNELQPVQIECLPEVSVSTAGTAAENIQQVQQSSKDIQSKSQGASTRSCTKVHKQGVALGRSVDLSKFTDYGELKAELDKMFEFEGELVSANRNWQIVYTDNEGDMMLVGDDPWEEFCNIVRKIYIYTKEEVQKMNSKSSVPRKEEPPAAGEGCAAAAANE

SEQ ID NO: 5999 - protein, 76 aa, Zea mays
  unsure (1)..(76): unsure at all Xaa locations
  Clone ID: TF_ZmC172363_1.pep
MGIDLNMADGESQERRPPPAVCRELWHACAXPVVALPRRGSLVVYLPQGHLSAAGGGHVAVDLPXHVACRVADVEL

SEQ ID NO: 6000 - protein, 727 aa, Zea mays
  unsure (1)..(727): unsure at all Xaa locations
  Clone ID: TF_ZmC13783_1.pep
YCGGFHVGISSSKSILVCGRLERRSLLCRTKIFGLKSVAETDLCKTLTASDTSIHRGFSVPRRAAERVFPPLDFTQQPPAQELIARDIHDXQSQCRHVFMTQCXRALHRTGWSVFVSAKRLVAGDSVLFIWNEKNQLLLGIRHATRPQTVMPSSVLSSDSMHIGLLAAAAHAAATNSRFTIFYNPRASPTEFVIPLSKYIKAVFHTRISVGMRFRMLFETEESSVRRYMGTITEVSDADPVRWPSSYWRSVKVGWDESTAGERPPRVSLWEIEPLTTFPMYPSLFPLRVKHPWYSGLAALHDDSNALMWLRGVTGEGGFHSLNFQSPGIGSWGQQRLHPSLLSNDHDQYQAVVAAAAASQSGGYLKQQFLHLQQPMQSPQEQCNLNPLLQQQILQQASQQQMVSSDAQNIQSVLNPGAIQQQLHQLQQMQHTHNDQKQKIQPDQQYQVASSAVLPSPTSLPSHLREKFGFSDPNVNSSSFISSSSNENMLESNFLQVSSKSVDLSRFNQPVVSEQQQPQQQQAWKQKFMGSQSMSFGGSVSLNSPTSKDGSVDNKVGRDVQNQSLFSPQVDSSSLLYNMVPNLTSNVADNNISAFPSGSTYLQSPMYGCLDDSSGLLQNTGENDPTTRTFVKVYKSGSVGRSLDITRFSNYAELREELGQMFGIKGQLDDPDRSGWQLVFVDRENDVLLLGDDPWESFVNSVWYIKILSPEDVHKMGKPGNDPRYLS

SEQ ID NO: 6001 - protein, 69 aa, Zea mays
  Clone ID: TF_ZmC12351_2.pep
EAEEHKCLNSELWHACAGSLVSLPAVDSRVMYFLQGHSEQVTLLPWTSYCQKLDMNIAEFIWMLIMSRT

SEQ ID NO: 6002 - protein, 274 aa, Zea mays
  unsure (1)..(274): unsure at all Xaa locations
  Clone ID: TF_ZmC1126_1.pep
IRHEAFVDSAAMERERESDRCLDPQLWHACAGGMVQMPAVHSKVYYFPQAASEHAQGPVXLPAGRVPALVLCRVAAVRFMADPDTDEVFAKIRLAPVRPNEPGYADDAIGAAAASGAQEDKPASFAKTLTQSDANNGGGFSVPRYCAETIFPRLDYSADPPVQTVLAKDVHGVVWKFRHIYRGTPRRHLLTTGWSTFVNQKKLVAGDSIVFMRTENGDLCVGIRRAKKGGIGGPEFMHHHHQQPPPPQGGGYAGFSMFLRGEEDGGKMMAAAAP

SEQ ID NO: 6003 - protein, 92 aa, Zea mays
  Clone ID: TF_LIB3594-048-Q1-N7-A7.pep
LCLIYQGPTRRDAAALDPELLQLVELAPGALRENSIADVLYSQWLVLPETTKLLGSTAIGLKTKDGVVLAIEKRVTSPLLVLSHFLSGHSVK

SEQ ID NO: 6004 - protein, 931 aa, Zea mays
  Clone ID: TF_ZmC7095_1.pep
MATCKAPAAIAAQSFSSPHLGVLAPRSYWLVGGNMNLSPPKMSEPSPESDGEQRCLNSELWHACAGPLVSLPVVGSRVVYFPQGHSEQVAASTNKEVDAQIPNYPNLPPQLICQLHNVTMHADAETEEVYAQMTLQPLSPEEQKDPFLPIELGAGSKQPTNYFCKTLTASDTSTHGGFSVPRRAAEKVFPPLDFSQQPPVQELVARDLHDNEWKFRHIFRGQPKRHLLTTGWSVFVSAKRLVAGDSIIFIWNDNNQLLLGIRRASRPQTVMPSSVLSSDSMHIGLLAAAAHAAATNSRFTIFYNPRASPSEFVIPLAKYVKAVYHTRVSVGMRFRMLFETEESSVRRYMGTITGISDLDSERWPNSHWRSVKVGWDESTAGDKQPRVSLWEIEPLTTFPMYPTAFPLRLKRPWASGLPMFNGGRSDEFARYSSLMWLRDGNRGAQSLNFQGLGASPWLQPRIDYPLLSLKPDTYQQMAAAALEEIRAGDHLKQASSLLPVQQTQTLNGGLDHLYGNPVLQQMQFQSQQSTLQAVQQGYGQNANDSGYVQNQLQQLQLQKQQEPPPPQQQQQTQVLQRQAHQEMQQHLSASCHDIANVASGVSMSGSACQSQSSLLSGSSFYQQNIFDGNGGPDLHLHNSFHNFSSQESSNLLNLPRSGQLMASEGWPSKRLAVESLAGHEIQPLQHKLEKVSHQSTVSHCSGTLPPLSARDGSSAQACGTNVQSHLLPSSFAIHDGLSTIRSGGVGSGTDAITIASLRYSDANLLPENSIATSSCLGESGTFNSLDDVCGVNPSQGGTFVKVYKSGSLGRSLDITRFGSYYELRVELERLFGLEGQLEDPARSGWQLVFVDRENDVLLLGDDPWQEFVNSVGCIKILSPQDLQQMARGGGGDLLSAPGARMLQGSVCDDYSAGHDVQNLTGSIAPVVPLDY

SEQ ID NO: 6005 - protein, 806 aa, Zea mays
  unsure (1)..(806): unsure at all Xaa locations
  Clone ID: TF_ZmC1249_1.pep
MPPATAMAPPSQPPSNSGDPLYPELWRACAGPLVTVPRVGDLVFYFPQGHIEQVEASMNQVAGNQMRLYDLPPKLLCRVLNVELKAETDTDEVYAQIMLMPEPEQTDVPAEKPSSAPAASPRPAVRSFCKTLTASDTSTHGGFSVLRRHADECLPPLDMTQSPPTQELVAKDLHGMEWRFRHIFRGQPRRYHDQIVWRKPTMMHXDEPVPCAGGGASPGPREVKTPXDLLLVRCSPIPSPFASQRMHLRVLATAWSAKNTXKSMCTVYYKPRTSPSEFIIPYDQYMESVKKNYSIGMRFRMRFEGEEAPEQRFTGTIVGCENLDPLWPDSSWRYLKVRWDEPSTIPRPDRVSPWKIEPASSPPVNPLVHSSRAKRPRQNVPPPSLESSVLTKEGATKVEIDSAQTQHQNSVLQGQEQMTLRNNLTESADSDSTVQKPMMWSPSLNGKAHTHFQQRPAMDNWMPLGRRENDFKDTRSAFKDARTASQSFGDTQGFFVQAYDDNHHRLSFKNQGSTHRFADPYFYMPQQSSVTVESSTRTQTANNDLCFWGDQNAMYGNPSDQQQGFNFGQNPSSWLNQPFPQVEQPRVVRPHATVAPFDLEKTREGSGFKIFGFQVDTTSPSPVQLSSPLPAIQEHVLQTRPSAPVNELQPVQIECLPEGSVSTAGTATENIQQAPQSSKDIQSKSQGASTRSCTKVHKQGVALGRSVDLSKFTDYGELQAELDKMFDFEGELVSGSQNWQIVYTDDEGDMMLVGDDPWEEFCSIVRKIYIYTKEEVQKMNSKSAAPRKEESPAAGGGGGCAAATNE

SEQ ID NO: 6006 - protein, 466 aa, Zea mays
  unsure (1)..(466): unsure at all Xaa locations
  Clone ID: TF_ZmC490_1.pep
MSQQQGVEEPPPAPLPAAEGEAQPAADIPMSEAAAVEDEEEEPVVGEGEDGADGAADAVDSVNASAKPEAEGAEEGGSDREERNGGPTADLVGEVVKLENGDGPVTVGGSVDEGRGGDGGDDKGLAGQNQPAVNQLLLAPAEEDLALSKISDNSFMFDYTTGGDDSGTEEEQAAFMKELERFHREKMLEFKPPKFYGEGLNCLKLWRQVTGLGGYDQVTSCKLWRQVGESFKPPKPCTTVSWNFRNFYQKALLEYGVHKIDTRKYLVAPFHLPRLLGGWGLFGGSMRSESGSPTIANXRALLIASLLDASVLMLDCIKLNSLVDVVLCVCGIELLKAVVLPRKKGHHALKXDIGIPYKSYKLQKDSMDIDMGPLADWVKINVRKTKDCYEVYALVPGLLREEVHVQSDPAGRLIVTGEPEQLDNPWGVTPFKKVIRLPSRIDPHQTSAVVTLHGQLFVRAPFEQSK

SEQ ID NO: 6007 - protein, 598 aa, Zea mays
  Clone ID: TF_ZmC5175_1.pep
WFLKYSICSTTFQLAHASFRLYCVRNSHVQSVKLGPRLLGDAPKINISPPETEMVDEEGSSEVTPALKLYDEEINMKLLLCGVPCTLIRGSKLQNRISASPPPLEAASLPRGMVTMRCDISTCSSSHVSLLVSGSAQTCFDDQLLESHIKNEIIEKSQLVRALSNSEDKLPSSEPLTSMSTACGASTFEVWMSLPKWAAQVLKHLAPDISYRSLVALGIGCINGTPVASFERRDADRLLFFCTSQCKDLANENGPYFHLPRWSASLTKDRTKLGSESKQNLLGANGVLEDKKHMMEGPSSWSAVKAKLKPATMRPIPHSRKQQMHPFMGFPETSLHETSIVKPSLPAAPTVKHNSVSSATTTHRKSTSGPSHTPSVIQLNPLPMKKHGCDRLPIQVCSEEDFLKDVMQFLIQRGHNRLVPHGGLAEFPDAILNAKRLDLYNLYKEVVSRGGFYVGNGINWKGQVFSKMRNHTATNRMTGVGNTLKRHYETYLLEYELAHDDVDGECCLLCHSSAPGDWVNCGLCGEWAHFGCDRRQGLGTFKDYAKTDGLEYICPHCSLANYKKKPPPPKAANVSLVWINQTFDATARKCEVLKLLAQ

SEQ ID NO: 6008 - protein, 530 aa, Zea mays
  unsure (1)..(530): unsure at all Xaa locations
  Clone ID: TF_ZmC5175_2.pep
MKLLLCGVSCTLDPCLLGSLEDGLNALLNIEIRGSKLQNRISASPPPLEAASLPRGMVTMRCDITTCSSSHVSLLVSGSAQTCFDDQLLESHIKNEIIEKSQLVRALSNSEDKLPSSEPLTSMSTACGASTFEVWMSLPKWAAQVLKHLAPDISYRXFXLHLXIGCINGTPVASFERRDADRLLFFCTSQCKDLANENGPYFHLPRWXPPLPRTEQSLGSESKQNLLGANGVLEDKKHMMEGPSSFSAVKAKLKPATMRPIPHSQKQQMHPFMCLPETSFHETSIVKPSLTVAPTVKHNSVSYAPTTHRKSTSGPSHTPSVIQLNPLPMKKHGCDRLSIQVCSEEDFLKDVMQFLIQRGHNRLVPHGGLAEFPDAVLNAKRLDLYNLYKEVVSRGGFYVGNGINWKGQVFSKMRNHTATNRMTGVGNTLKRHYETYLLEYELAHDDVDGECCLLCHSSAPGDWVNCGLCGEWAHFGCDRRQGLGTFKDYAKTDGLEYICPHCSLANYKKPPLPPKVANGFSNTAYVPRSV

SEQ ID NO: 6009 - protein, 246 aa, Zea mays
  Clone ID: TF_LIB4978-057-A1-K1-D3.pep
MDKYKLNDNSKTFINELFNFWGQRGVTNLKIPQIGGRELDLMHLYKAVCKRGGFHRVCSNKLWKEIVLEFGLPRTCTSASFTLRNHYQKYLLAYEQKFFFGRNEEVEYPEVQGARPRKVVRPVEEEPKFIALEIAPRNQSIENVLNGMYQNIPDNSEILYLRKYKTVPVVSEMSRILLAFESHMQEETTFALNSLLLYSCNAHFHLEYHPTLLDTLFVYVENIIKDVPYYKKSISRQTKKKTRRCS

SEQ ID NO: 6010 - protein, 478 aa, Zea mays
  Clone ID: TF_ZmC8963_1.pep
MSDPRGHAAGPDRDGDDPLAEDANSEEAWQTPEKEPVAVSKEAAARGGDTTPDAEPESDDGEGGVGSPDQMEPNADGERAPPVAAAEDPEGIVGSAKVETNGEDAISLDADGEEEDDDDDGDEEEEEEDDDDDDSTPDASPRAEVKVEGESSTGMTQSGAGHRVEVEPDPFLDGDDSGTEEEQGAFMAELERFHREHSLEFKPPKFYGKGLNCLKLWRQVAHLGGHEQVTVCKLWRQVGETFRPPKTCTTVSWSFRIFYEKALLEYEKHKVRTGQLQIPPPGLPQPSGADREVVVNQSSSARVRRDAAARAMQGWHAHRLLTNGTYGDNILKDKDTMPLPNRDKNLSFGVLKRKKASSPEYALKSSRSKTNKSQEDSMVVDVGEPADWVKINVRQTKDCFEVYALVPGLLREEVHVQSDPAGRLVITGDPEQPDNPWGITPFKKVVNLPSRIDPHQTSAVVTLHGQLFVRAPFGHPDM

SEQ ID NO: 6011 - protein, 448 aa, Zea mays
  Clone ID: TF_ZmC50242_2.pep
MTEPAPAAAAEEKRAVADTAAAVVAKGKEKEEAAPTLAAGARGRFVAYPARVTEHTDVVADAARFRAALEGLHAHMNTRLKVPPTRPKDLDLHQLYKEVTSRGGIDKLKAENRWREVTASFIFPATATNASFMLKKYYMSLLYHFEQLYFFRVQGWYQQEIDSRTNSSIEVKTEAQAYHKRKRGINASLSGPASSSDNVDVDVIVDGKFEHGYIITVIMGSKSTKAILYNCTEEPALPTSELAVASNNNDLKGGRRRRRRKKKLSTTDPRHPKPNRSGYNFFFQDQHRMLKPQCPGQDRLISKMIGERWNNLSPEDKAVYQERGVQDKERYRTQLAAYRKLTGQPISNAVPIEQRLPLTDVTIDEVDSKVSEGDMLLSNQAYSSSDESDHSGEKTVEDELNTETSPEVSMETTGSLRHPDPCADEDHFELRRRENPKADEKYNAPPDS

SEQ ID NO: 6012 - protein, 270 aa, Zea mays
  Clone ID: TF_ZmC27538_1.pep
MDPVTASIHGHYLPPPFNTRDFHHHLQQQQQHHHHQQHLQLKTEDDHGGGAPGLFGDRGTQGDHENNDENSGNSNGSGGGELALVPPSGGGGPEGGDATPRRPRGRPAGSKNKPKPPIIITRDSANTLRTHVMEVAGGCDISESVTAFARRRQRGVCVLSGAGTVTNVTLRQPASQGAVVALHGRFEILSLSGSFLPPPAPPEATGLTVYLAGGQGQVVGGSVVGALTAAGPVVVMAASFANAVYERLPLEDDDLLAAHQAPQAQADGVL

SEQ ID NO: 6013 - protein, 160 aa, Zea mays
  Clone ID: TF_LIB3069-002-Q1-K1-B12.F2.pep
QGGVFSHTGPGFSDFFWSPPGPPAAYLFFHVPLRRVGAPLNEFWVLAPHFWYMAPAGWGPPPLGGVLPRETTVVALPPLGACVLPWGGGALSLSPVARGGFFWGGGALFGSYLSPVVAGAPSPLFWGGVAPLFFSFFFWCPVFFSSAGPFRAGAGPFPLF

SEQ ID NO: 6014 - protein, 596 aa, Zea mays
  Clone ID: TF_ZmC139_1.pep
MVAAVASPSSAAPSAGRPHPTYKEMIMQALTELRDPSGSSRSAIASYIADHFSGLHSRHDALLSVHLRSLKSHGQLRLVSGNYFVSTAAQRQGRGSNIPPNPKPAPGQKRGRGRPRKHADSAPSASTPAFQGAKRGRGRPRKRKSAQDPVASSPSPSPLQGASVPPPPSGVKRGRGRPRKDALVPPPSSSSPLLGGIDPPPPSGIKTGRARPRKALVPVRSSFSELLGAVVLPPPSGVKRGRGRPRKSAYPAVAPLVGAEKGPAGGQPQRNTTPLSPTPATMSHSGKSETVRLPKVAVDISALRGSSMNISASSNSLVGAKRGRGRPPKVVVAGKEKMQQPESVQSVDASLTKRGRGRPRKEKALESGRMKASQMTEGQREALTADQAGAVQNEVEDRDLQSLGTPLTEKRGRGRPRKRPLEIETAKAGAAKRGRPRKEKTSETGDLKVAQMTEGRHEALPAQAVDQTGPVQNEVEAMILQSLATTPLMEKRSRGRPRKRPLETETAETQVAASVEKRGRGRPRKKNPSAGWSAGTRDTALKGIKRGPGRPRKARPFETESVKTALEVSRDLTEDGPQKDGDLVSGKKADTHGVVW

SEQ ID NO: 6015 - protein, 141 aa, Zea mays
  Clone ID: TF_LIB3637-199-Q1-N6-F3.pep
PGSYRPPFTRSCYPSGYGWGFSGSSPGSVKGVPGVGSFCCFSRGFPLFSPVLGSMVVAFSWASAVLFLPAGPFGVFAPGGFPLFLPRFFFASPPPPFFCGAPPPLPPFCPRCLRVAGLWSFPCFSPLFSSPGWKANFPPNG

SEQ ID NO: 6016 - protein, 107 aa, Zea mays
  Clone ID: TF_LIB4172-013-Q1-L1-E6.pep
MSESGSKSSQPLASKQEKDGTEKRGRGRPRKQPPVSPGTALVGSQKEPSEVPTPKRPRGRPKGSKNKGAAKTRKVTTAPGRKPRGRPKKLEKEEEEGISQESSEEEQ

SEQ ID NO: 6017 - protein, 161 aa, Zea mays
  unsure (1)..(161): unsure at all Xaa locations
  Clone ID: TF_jC-zmXLIB3526P032bf12a1.pep
LRFLASRSKAEVVDMLRKHTYFDELAQNKRAFAAASAATASSLANNPSSYASLSPATATAAAAAAREHLFDKTVTPSDVGKLNRLVIPKQHAEKHFPLQLPSAGGESKGVLLNLEDAAGKXVWRFRYSYWNSSQSYVLTKGWSRFVKEKGLQAGDVVGFYR

SEQ ID NO: 6018 - protein, 81 aa, Zea mays
  Clone ID: TF_ZmC4844_3.pep
VVIDFCNVSPSHWDKSKRRITSLRPRVNGGKEERKTLEVRLSSEQVVHVLRPPPPPQPVVFGWLSPAAHCILKNIRSLFVL

SEQ ID NO: 6019 - protein, 67 aa, Zea mays
  unsure (1)..(67): unsure at all Xaa locations
  Clone ID: TF_uC-zmroteosinte109f10b3.pep
DFVGKVWWLRYWYCNSCQSYFLTKGWSRFIKEKGLQAGXVFRYYRSSVGAYSMLFIDLQACDSAEHS

SEQ ID NO: 6020 - protein, 119 aa, Zea mays
  Clone ID: TF_LIB3245-012-P2-N1-F3.pep
MHAYVSSEFGSRAPQTKPAPAGARQDDIHHRLAAASDKRQGAKADKNLRFLLQKVLKQSDVGSLGRIVLPKKEAEVHLPELKTRDGISIPMEDIGTSRVWNMRYRFWPNNKSRMYLLEN

SEQ ID NO: 6021 - protein, 162 aa, Zea mays
  unsure (1)..(162): unsure at all Xaa locations
  Clone ID: TF_jC-zmXLIB3526P032be12a1.pep
CFCFLCVPLQGSRFVDMLRMHTYLCELTHNKMRLRRRDAVTRWSLAYNPYLLRVRYTRGPRWEEPSPARETPVXTQKVTIGDKRKQNRLVIPKHHAEKHLQLQIPSVGDESNGALLNLEDEQGKVWRLHYSHWNSRQSYLLTNGWSQWVKENGLQPGDVVGL

SEQ ID NO: 6022 - protein, 264 aa, Zea mays
  Clone ID: TF_ZmC1903_2.pep
MATNHLSQGQHPQAWPWGVAMYTNLHYHHQQHHHYEKEHLFEKPLTPSDVGKLNRLVIPKQHAERYFPLSSSGAGDKGLILCFEDDDDEEAAAANKPWRFRYSYWTSSQSYVLTKGWSRYVKEKQLDAGDVVRFQRMRGFGMPDRLFISHSRRGETTATAATTVPPAAAAVRVVVAPAQSAGSDHAAAAAVALEPNVLQHIGLVLVPPPAAQPIPSMPTTATQLTMTTATTCNMQENLSPTETTGAAVQLRHRRHRRGGSGCSA

SEQ ID NO: 6023 - protein, 369 aa, Zea mays
  Clone ID: TF_ZmC4844_1.pep
MGQMGGPDGDGDGGAGPHHQYHYQALLAAVQNPSQGLHPFPLPFHVPLHAGAGAPAAGPGPGADADASTHNANAAHHSQPPRGFTDWSASNSAFAAVASQPAPATTNTPFHYNLSQSYALWTHYMLNKNVSYSTYPTPHEEHPHPLRHTHIQENPHPLRHTHIPDKDSGCASSLGFDSFTTMSLGPNICSHMTPMEGSISAKEPENSEDLPAIVRSSDEMDTRNSGKVHRDTVGTLPESKQSHESCASVNNKFNSGEYQVILRKELTKSDVANSGRIVLPKKDAEAGLPPLVQGDPLILQMDDMVLPIIWKFKYRFWPNNKSRMYILEAAGEFVKTHGLQAGDALIIYKNSVPGKFIIRGEKSIQQTNP

SEQ ID NO: 6024 - protein, 304 aa, Zea mays
  Clone ID: TF_ZmC1903_1.pep
MATHHLAQGHPQAWPWGMAMYTNLHYHHHHHHQQYYEREHLFEKPLTPSDVGKLNRLVIPKQHAERHFPLGGGDGDGNEKGLLLEFDDEAGRPWRFRYSYWVSSQSYVLTKGWSRYVKEKRLDAGDVVRFDRVRGVGPPVRLFLCSPAARRSGPRRVIPTPPGARRASSSSSSRGAPPCATARRGRRTRPAPLAPLTPTTSTRHTQAQARRTPRAAAARLLQEQRRRGSSGCSASTSTAARSRSRRRRRRQCTATDTCTRVPTQQCPQFPATGNEQARSEGTTPRSFSRITRTVLLLAEADRAN

SEQ ID NO: 6025 - protein, 478 aa, Zea mays
  Clone ID: TF_ZmC7307_1.pep
VATVPISQPERLPLKVQDASGKEWIFQFRFWPNNNSRMYVLEGVTPCIQSMQLQAGDTVTFSRIDPEGKLIMGFRKATNNSFEQEQATKPANGALATSEANGKVSAPDSSPNAAVSRQNKLNTETKSSSPVEQATALKMDKDGLTQKEGPGTGSSSPGSVKRKTTILGQKNKRLRMDNEESMELKITWEEAQELLRPPPKAPSIVIVDGHEFEEYEEPPVLGRKTYFVADKSGSNHQWAQCEDCSKWRKLPIDALLPSKWTCSDNKWDPERCSCESAQEISIEELAEFIPIKPAKKPKLKIESDAIDASDGLDTLANLAILGEGEALPSQPTTKHPRHRPGCSCIVCIQPPSGKGPKHKQTCTCNVCMTVRRRFRTLMLRREKKATRDSSRKKETGQSSEKATQQAVSGPPGANATATRSAQKADGNADGPEDMAVDHKVTTSSPVKNHIDLNIQPERDDEQSPKSGAAGLLSRDNAT

SEQ ID NO: 6026 - protein, 86 aa, Zea mays
  Clone ID: TF_jC-zmX700468806a1.pep
FGSRPHTKPFLGGARLDDFDLRLSTVSDKRLGAKAVKNLLLLSEKVVIHCDTRSLGRIVLPIKVAEVHLPVLKTRDGISIPIGGHW

SEQ ID NO: 6027 - protein, 580 aa, Zea mays
  Clone ID: TF_ZmC7307_2.pep
HIRIAPTQQQAQMASSPLQKQFYSHTVTGYNEFQAQMRNGRPRMDSKARSQLLPRYWPRITDQELQHLSSDSNSVITPLFEKMLSASDAGRIGRLVLPKKCAEAYFPPISQPEGLPLKVQDAGGKEWIFQFRFWPNNNSRMYVLEGVTPCIQSMQLQAGDTVTFSRIDPEGKLIMGFRKATNNSFEQEQATKPVNGAPATSEVNGKVSAPDSSPNAAVSRQNMVKTETKSSSPVEQATVSKMDKDRLTQKEGPGIASSSPGSLKRKTTNLGQKNKRLRMDNEESMELKITWEEAQELLRPPPKVPSIVIVDGHEFEEYEEPPILGRKTYFVADKSGLNHQWVQCEDCSKWRKLPIDALLPSKWTCFDNKWDPERSSCEPAQEISLEELAELIPIKPGKKPRLKIESDAIDASDGLDTLANLAILGEGEALPSQPTTKHPRHRPGCSCIVCIQPPSGKGPKHKQTCTCNVCMTVRRRFRTLMLRREKKVTRDSSRKKETGQSSEKVTQQAVSGPPGANGSTTSSPQKADGNADAPENMAVDHKVASSPVKNHIDLNIQPERDDEQSPKSGAAGLLTRDNPT

SEQ ID NO: 6028 - protein, 642 aa, Zea mays
  Clone ID: TF_ZmC10032_1.pep
MFPHLRVARQPADGRGRNQLLPRYWPRITDQELQQISGDSNSTIVPLFEKVLSASDAGRIGRLVLPKACAEAYFPPISQPEGRPLTIQDARGKEWHFQFRFWPNNNSRMYVLEGVTPCIQSLQLQAGDTVTFSRIDPGGKLVMGFRKATNTVSLPDSQISAIANGSLLSETLFSTANESIGVVSGYPGFLHSIKGAADFHPSSLYDHHMNSADGDVSWNKADKFGSRPDEGSLQFLQKRSRNIGSKSRRFLIDAEDAMELKLTWEEAQELLRPAPTAKPTVVMIEDYEFEEYDEPPVFAKRSIFTIRATGEQDQWIQCDECSKWRRLPLNVIVASKWTCTDNSWDPKCCSCSAPEELTPKELQSVMQQYEEMRRRKGSYGLKLNVAEMDASSFDALATGAVFGEVGNQGTASVATTTRHPRHRPGCTCIVCIQPPSGKGPKHNPACTCNVCMTVRRRFKTLMMRKKQRQSEREEAEASKKIAWVNRDEPEGSSLSRSPQTLDSTRDNSDVTMFDKVSDVNKQGHIDVDLNLHPAAPAVQAAQQQPRPVSMMGLLEVAGRPLDNYMKQNGLTSLVGEQGGGSSSTATVPPAPVESEERTSNEGLVPSASAEREPNAMAVDEAGENQQDKAADDDDDAVAAAAT

SEQ ID NO: 6029 - protein, 710 aa, Zea mays
  unsure (1)..(710): unsure at all Xaa locations
  Clone ID: TF_ZmC10032_2.pep
MNLGIANNGNRMEATSTAERPMLSPTTAIAEGRELTTALSPFQHAQRARHFLTRPPRVGEGAAFDPTRDMFLHLRVARPPAEGRGRNQLLPRYWPRITDQELQQISGDSNSTIVPLFEKVLSASDAGRIGRLVLPKACAEAYFPPISQPEGRPLTIQDARGKEWHFQFRFWPNNNSRMYVLEGVTPCIQSLQLQAGDTVTFSRIDPGGKLVMGFRKATNTVSLPDSQISAIANGSLLSETLFSTANESIGVVSGYPGFLHSIKGAADFHPSSLYDHHINSADGDVSWNKADKFGSRPDEGSLQFLQKRSRNIGSKSRRFLIDAEDAMELKLTWEEAQELXRPAPTAXPTVVMIEDYEFEEYDEPPVFAKRSIFTIRATGEQDQWIQCDECSKWRRLPLNVIVASKWTCTDNSWDPKCCSCSAPEELTPKELQSVMQQYEEMKRRKGSYGLKTNVAEMDASSFDALATGAVFGEVGNQGTASVATTTRHPRHRPGCTCIVCIQPPSGKGPKHNPACTCNVCMTVRRRFKTLMMRKKQRQSEREEAEASKKIAWVNRDEPEGSSLSRSPQTLDTTRDSSDVTMFDKVAADVNKGHIDLNFHPAAPAVRGAGDQGQNGAQQPRAVSMMGLLEVASRPLDNYMKQNGLTSLAGEQGGGSSSTATVPPAPVESEDRTSDEGRVASAEREADAMAIDEAGENQQDKPADSAAAAAT

SEQ ID NO: 6030 - protein, 175 aa, Zea mays
  Clone ID: TF_ZmC403009_1.pep
MEFASSSSRFSREEDEEEEQEEEEEEEEASPREIPFMTAAATADTGAAASSSSPSAAASSGPAAAPRSSDGAGASGSGGGGSDDVQVIEKEHMFDKVVTPSDVGKLNRLVIPKQHAEKYFPLDAAANEKGQLLSFEDRAGKLWRFRYSYWNSSQSYVMTKGWSRFVKEKRLDAGD

SEQ ID NO: 6031 - protein, 247 aa, Zea mays
  Clone ID: TF_ZmC2719_1.pep
MNMLQTPPFHSNSHEKESGAVFSNSFNMAPSVTPTSPFQLMSPSSTNYTSTQIFEETNNLEDTSRVFGGGDNESNNSEEPDPKPAVEMEDLNQGNDHTSNKTANCQDYRMVLRKDLTNSDVGNIGRIVLPKKDAEPNLPILEDKDGLILEMDDFELPVVWNFKYRYWPNNKSRMYILESTGEFVKRHGLQAKDILIIYRNKKSGRYVARAVKAEDIAPPECECVEAGNPREECGFSVSPSINKKIIT

SEQ ID NO: 6032 - protein, 187 aa, Zea mays
  unsure (1)..(187): unsure at all Xaa locations
  Clone ID: TF_ZmC1903_4.pep
MATNHLSQGQHPQAWPWGVAMYTNLHYHHQQHHHYEKEHLFEKPLTPSDVGKLNRLVIPKQHAERYFPLGXAAPATGLILRFEDDDDDEAAAANKPWRFRYSYWTSSQSYVLTKGWSRYVKEKQLDAGDVVRFQRMRGFGMPDRLFISHSRRGETTATAATTVPPAAAAVRVVVAPAQSAGADHQQQ

SEQ ID NO: 6033 - protein, 201 aa, Zea mays
  Clone ID: TF_ZmC10115_12.pep
MAMHPLAQGHPQAWPWGVAMYTNIHYHHQYEREHLFEKSLTPSDVGKLNRLVIPKQHAERYFPLNGGDSPGDKDLLLSFEDEAGKPWRFRYSYWTSSQSYVLTKGWSRYVKEKQLDAGDIVHFERVRGLGTGDRLFIHCRRRGESAPPPPVRVPPPALNAGEQQPWSPMCYSTSGSYPTSPANSHAYRRSVEQDHSEMLHA

SEQ ID NO: 6034 - protein, 147 aa, Zea mays
  Clone ID: TF_LIB3239-009-P1-N1-E9.pep
SRAQPTPAWARVLLFDKAVTPSDVGKLNRLVVPKQHAEKHFPLKRAPPSVEAQAPTTAKGVLLNFEDGEGKVWRFRYSYWNSSQSYVLTKGWSRFVREKGLRAGDTIVFSHSTYGSEKQLFIDCKKTKTTTPATDGVPVPLPAPAEK

SEQ ID NO: 6035 - protein, 191 aa, Zea mays
  Clone ID: TF_16927321.pep
HMFDKVLTPSDVGKLNRLVVPKQHAERFFPAAGAGSTQLCFQDRGGALWQFRYSYWGSSQSYVMTKGWSRFVRAARLAAGDTVTFSRSGGGRYFIEYRHCQRRRRDVDISFGDAATVPAWPRPIVIGTAAMNNGGATVASATIAGHDIEVAVAPSGARSFRLFGFNVECSGDDAPAPAPAPAEVEYVDGDT

SEQ ID NO: 6036 - protein, 227 aa, Zea mays
  Clone ID: TF_LIB4828-034-A1-N1-A10.pep
MAASLPLSAAIVGAEESVDKEVLEMEYLFEKFLMPSDLCSNTEWLGIPEEHVRKFGMMLEDRDGYSVIFFQDGVVPGKLWCFRYWKSNGVHGLTKGWRCFVREKGLKAGDTISFFRGSACGRLFICCRLGTHATFASSSTLHHGFSMPPPPARPLVGLQSGMLARDVPSLGQARLHDGNQDGGGAPSRHVPSSGRRVEAQLSRVSSRRQRRTMKHSIPEPTIETPPI

SEQ ID NO: 6037 - protein, 449 aa, Zea mays
  Clone ID: TF_2437851.pep
DQLLDFASLSMPWDSEPFPGVSMMLENAMSAPPQPVGDGMSEEKAVPEGTTGGEEACMDASEGEELPRFFMEWLTSNRENISAEDLRGIRLRRSTIEAAAARLGGGRQGTMQLLKLILTWVQNHHLQRKRPRDVMEEEAGLHVQLPSPVANPPGYEFPAGGQDMAAGGGTSWMPHQQAFTPPAAYGGDAVYPSAAGQQYSFHQGPSTSSVVVNSQPFSPPPVGDMHGANMAWPQQYVPFPPPGASTGSYPMPQPFSPGFGGQYAGAGAGHLSVAPQRMAGVEASATKEARKKRMARQRRLSCLQQQRSQQLSLGQIQTSVHLQEPSPRSTHSGPVTPSAGGWGFWSPSSQQQVQNPLSKSNSSRAPPSSLEAAAAAPQTKPAPAGARQDDIHHRLAAASDKRQGAKADKNLRFLLQKVLKQSDVGSLGRIVLPKVRHVRIDKSLEQISL

SEQ ID NO: 6038 - protein, 292 aa, Zea mays
  Clone ID: TF_ZmC9208_1.pep
MAGITKRRTSPASTSSSSGDVLPQRVTRKRRSARRGPRSTARRPSAPPPMNELDLNTAALDPDHYATGLRVLLQKELRNSDVSQLGRIVLPKKEAESYLPILMAKDGKSLCMHDLLNSQLWTFKYRYWFNNKSRMYVLENTGDYVKAHDLQQGDFIVIYKDDENNRFVIGAKKAGDEQTATVPQVHEHMHISAALPAPQAFHDYAGPVAAEAGMLAIVPQGDEIFDGILNSLPEIPVANVRYSDFFDPFGDSMDMANPLSSSNNPSVNLATHFHDERIGSCSFPYPKSGPQM

SEQ ID NO: 6039 - protein, 243 aa, Zea mays
  Clone ID: TF_ZmC9208_2.pep
MNELDLNTAALDPDHYATGLRVLLQKELRNSDVSQLGRIVLPKKEAESYLPILMAKDGKSLCMHDLLNSQLWTFKYRYWFNNKSRMYVLENTGDYVKAHDLQQGDFIVIYKDDENNRFVIGAKKAGDEQTATVPQVHEHMHISAALPAPQAFHDYAGPVAAEAGMLAIVPQGDEIFDGILNSLPEIPVANVRYSDFFDPFGDSMDMANPLSSSNNPSVNLATHFHDERIGSCSFPYPKSGPQM

SEQ ID NO: 6040 - protein, 251 aa, Zea mays
  Clone ID: TF_LIB4742-120-A1-K1-H3.pep
MAFSARTISREMEVQMGKAPPCLNPFLMVNPLLPPQHVSPWSSKFVPVFQFGMTNGHGALDLCEESKRARKVVHLEYLFSKVLTPSDVGKLNRLLIPRQCAEGFFPMISEVKSGGDDIFLNFEDTSTGLVWRFRFCLWNNSKTYVLTKGWSVFIKEKNLKKGDILSFYRDASKSIRTNHIFIHIKPHTGTMPLPHHVPSPVFSPSGMVIDDQVHNSLDIGKSHGIAPFWKPLSFGSELSPQLIRRHNKQIS

SEQ ID NO: 6041 - protein, 691 aa, Zea mays
  Clone ID: TF_ZmC2776_1.pep
MEASAGSSPPHSQENPPEHGGDMGGAPAEEIEGEAADDFMFAEDTFPSLPDFPCLSSPSSSTFSSNSSSNSSSAYTNTAGRAGGEPSEPASAGEGFDALDDIDQLLDFASLSMPWDSEPFPGVSMMLENAMSAPPQPVGDGMSEEKAVPEGTTGGEEACMDASEGEELPRFFMEWLTSNRENISAEDLRGIRLRRSTIEAAAARLGGGRQGTMQLLKLILTWVQNHHLQRKRPRDVMEEEAGLHVQLPSPVANPPGYEFPAGGQDMAAGGGTSWMPHQQAFTPPAAYGGDAVYPSAAGQQYSFHQGPSTSSVVVNSQPFSPPPVGDMHGANMAWPQQYVPFPPPGASTGSYPMPQPFSPGFGGQYAGAGAGHLSVAPQRMAGVEASATKEARKKRMARQRRLSCLQQQRSQQLSLGQIQTSVHLQEPSPRSTHSGPVTPSAGGWGFWSPSSQQQVQNPLSKSNSSRAPPSSLEAAAAAPQTKPAPAGARQDDIHHRLAAASDKRQGAKADKNLRFLLQKVLKQSDVGSLGRIVLPKKEAEVHLPELKTRDGISIPMEDIGTSRVWNMRYRFWPNNKSRMYLLENTGEFVRSNELQEGDFIVIYSDVKSGKYLIRGVKVRPPPAQEQGSGSSGGGKHRPLCPAGPGRAAAAGAPEDAVVDGVSGACKGRSPEGVRRVRQQGAGAMSQMAVSI

SEQ ID NO: 6042 - protein, 123 aa, Zea mays
  Clone ID: TF_LIB3069-031-Q1-K1-A4.pep
PTRTSQVTVSKDVSSREASKDVTWMGASWKCQRSLKHYKSFCRTGITISVHSFVYIMGEEMNRLIAYVEDLYEDTNSCNMVKVQWFGKADEVGVLLPMDFDDREIFFSLGRQDLNVICIDGLA

SEQ ID NO: 6043 - protein, 531 aa, Zea mays
  Clone ID: TF_ZmC5665_1.pep
MDGNAETIQFSWGKRRGKGGAKMDTQFFGSFTLDNVKYSLFDCVYLFKHGDPEPYIGKIVKIWEKDNDKKVKILWFFHPDEVQKYLSGPVMGKEIFLACGEGAGLADINPLEAVAGKCTVICTSKDKRNRQPSPQELQIADYIFYRVFDVKSLTLSDQLPDKIAAFTVDLLLNPKDELVIPANVLVNPNVDEGMVATVPTPPSAVKLEDRSQAAALPLTQTGQVDENLPATVPLPQSEVKEEQKPVIAIPISQTVVKKEDKKSLSDIPLSHSAVKEDETPVASIGPPQSAVMENIPKHTQLQDAHAGERPPKKLKLSQETTEQDIDPTNTEQRPLELQPKNIDRSKWFNIEWNDRLKMADDKGTLVYIQNLDIRFGPADIEELVRKALQLNCTAKPINHPTYDDPNNGKAYAIFRTKDAADAAISKINSGLVVGGRPLYCSKGLLEVPKPSANLVGHLSSYVKIGQKQRDEQKKAVATSHCSQPNTIEYDLALDWMLLREKQDQSFRVLHKKHREARKGFASLVGKGSKAE

SEQ ID NO: 6044 - protein, 638 aa, Zea mays
  Clone ID: TF_ZmC2907_1.pep
MGRRRRFAQLDDDDDDDEDVPINFKPSGGASSSDAKPRKPQPPPQQRRGVSDDDDEDVEEVELEEEEDDEKDLEAMRRAEEEERREQEAETKTRRRRGRPKRRRDPGSEDEEPEELELQTEDPREEEITEAVPVAVGDPVKITGKGKKQKKHYASFEYEGNSFELEDPVLLTPEDSNQKPYVAILKDITETDGSLYVTGQWFYRPEEADKKEGGFWVARDTRELFYSFHTDDVPAESVMHKCVVHFIPQQKQIPSRKQHPGFIVQKVYDAVEKKLWNLTDKDYEDNKQQEIDLLVKKTIDRIGQLPDLEPEETPLENNYLSNKRGLRKKPVNPIDVTREPPVGKSEQFAKAETPGSDKIRNYDTLVKYKVLTGHSHRDRWLDKLIESIPLASKENAGTSADANSTAKSSISGSPAKDVGSAENEKSYGLDVVVEIMTALERSAYEALGTDFGKYNQKLRQLQFNIKNISKLRRRLMDKELDPPVLLTMSPDELKAGLTSAEKTSEPEESRKLQMTDTRCQRCSEKKVGISDIIHAGHGDRYQLECTSCGYTWFSSRDAITTLTEDAPSTAGNVGTAPLATAKFEVVEKKLTSPRDQSGKPASDALQKSTAAYMPTMERQKSFAKTKLLDEPSPAPKQG

SEQ ID NO: 6045 - protein, 130 aa, Zea mays
  unsure (1)..(130): unsure at all Xaa locations
  Clone ID: TF_ZmC35813_2.pep
MGGKSRPPKGILESYTIKGSERVIKPGDWGLMRASDASKPPYVERVEEIEEEGSRGTNVKVRVGGYYRPKESIGGRGPFHGSKEVFLSDHYDVQRVDTIEGKXNVHSFRSYTKLDFANGEDFLCRFENKS

SEQ ID NO: 6046 - protein, 133 aa, Zea mays
  unsure (1)..(133): unsure at all Xaa locations
  Clone ID: TF_ZmC3042_6.pep
QFHGAKELFLSDHFDLQSAHTIEGKCVVHSFKNYTRLDNVGPEDFFCRFEYKAATGSFTPDRVAVYEAPQPFHCWLSLLLCMHFXLACDDFGAWFLSRYCKCEMPYNPDDLMVQCDACKHWYICYNDLQFTFH

SEQ ID NO: 6047 - protein, 217 aa, Zea mays
  unsure (1)..(217): unsure at all Xaa locations
  Clone ID: TF_ZmC977_1.pep
MAKTKQGKRDVDAYTIKGTNKVVRVGDCVLMRPADTDNPPYVARVEXDLESDGRGSVRVRVRWYYRPEEAKGGRRPFHGAKELFLSDHFDTQSAHTIEGKCIVHSFKSYTKLDNVGPEDFYCRFDYKAATGAFTPDRVAVYCKCEMPYNPDDLMVQCEGCKDWFHPSCMGMTIEQAKKIDHYMCSDCAKENGAKRPSNSYSVSPNSDSKIESKRRKR

SEQ ID NO: 6048 - protein, 364 aa, Zea mays
  unsure (1)..(364): unsure at all Xaa locations
  Clone ID: TF_ZmC29757_2.pep
ECDACLGGFHLRCVRPPLRRVREGDWACPYCXAERAGKVVERPMPPEGKRVVRTAKEKLLSSDLWAARIESLWREPDGTFWAKVRWYIIPEETAAGRQLHNLRRELYRTNDLADIEMETILRHCSIMCPKDFRDANNGGDDVFYCEYEYDIHWHNFKRLADIDDEPETKEDLSDEPYNAGDDYNSDTDEDSDYDEEEESTSSFSVRRNQSHESAANSRKGRIYGLQKIGIQKIPEHARCHQKTELEKAKATLLLATLPKSLPCRDKEMDEISIFVKDAICNNQCLGRCLYIHGVPGTGKTMSVLAVMRRLRSEFDSGTLRPYCSIEINGLKLASPENIYKVVYEQLSGHKGGWKKALHYLTEHF

SEQ ID NO: 6049 - protein, 209 aa, Zea mays
  Clone ID: TF_ZmC3042_4.pep
MVRMKQVKISVKKDVDSYTIRGTNKVVHVGDCVLMRASDSDKQPYVARVEKMEADGRGSVRVQVRWYYRPEESKGGRRQFHGAKELFLSDHFDLQSAHTIEGKCVVHSFKNYTKLDNVGPEDYFSRFEYKAATGSFTPDRVAVYCKCEMPYNPDDLMVQCEACKDWFHPSCMAMTIEQAKKLDHFVCSDCLKENGSKRLSNVYATSSNS

SEQ ID NO: 6050 - protein, 209 aa, Zea mays; identical to SEQ ID NO: 6049
  Clone ID: TF_ZmC3042_1.pep

SEQ ID NO: 6051 - protein, 916 aa, Zea mays
  Clone ID: TF_ZmC29605_1.pep
MAPSSPSSARPTRASGRERSAMAEEIHQNQEEEEEVVAASTAKRRRKAASSGKKPKPTPKQAKPAVAGMKKKGETEKTEPVVDDVCAEEPDEEELAMGEEEAEAEEQAMQEVVAAVAAGSPGKKRVGRRSAAASGDHVPEFIGSPVAAAEAHSNWPKRYERSTAANKPEEDDELKARCHYRSAKVDNIVYCLGDDVYVKAGENEADYIGRITEFFEGTDRCHYFTCRWFFRAEDTVINSLVSINVDGHKHDPRRVFLSEEKNDNVLDCIISKVKIVHVDPNMDPKAKAQLIEHCDLYYDMSYSVAYSTFANISSENGQSGSETASGISSDDAGLETSSNMPERTATLLDLYSGCGGMSTGLCLGAALSGLKLETRWAVDLNSFACQSLKYNHPQTEVRNEKADEFLALLKEWAVLCEKYVHQDVDSNLAGSEDQEDADTLDKDEFVVQKLIGIRYDGTGRKKGVYFKVQWEEYGPEEDTWEPIDNLSDCPLKIREFVQEGRKRKILPLPGDVDVICGGPPCQGISGFNRFRNRDEPLKDEKNKQMVTFMDIVAYLKPKYVLMENVVDILKFADGYLGKYALSCLVAMKYQARLGMMVAGCYGLPQFRMRVFLWGALSSMVLPKYPLPTYDVVVRGGAPNAFSQCMVAYDETQRPSLKKALLLGDAFSDLPKVQNHQPNDVMEYGGSPKTEFQRYIRLGRKDMLDWSFGEGAGPDEGKLLDHQPLRLNNDDYERVKQIPVKKGANFRDLKGVRVGANNIVEWDPEIERVKLSSGKPLVPDYAMSFIKGKSLKPFGRLWWDETVPTVVTRAEPHNQVIIHPTQARVLTIRENARLQGFPDYYRLFGPIKEKYIQVGNAVAVPVARALGYCLGQAYLGESEGSDPLYQLPPSFTSVGGRTAGQARASPVGTPAGEVVEQ

SEQ ID NO: 6052 - protein, 219 aa, Zea mays
  Clone ID: TF_ZmC35813_1.pep
MAGKSRPPKRILESYTIKGSDRVIKPGDCVLMRASDASKPPYVARVEAIEAAGSRGTNVRVRVRWYYRPEESIGGRRPFHGSKEVFLSDHYDVQSADTIEGKCNVHSFRSYTKLDSVNAEDFFCRFEYKSATGSFVPDRIAVFCKCEMPYNPDDLMIQCEECSDWFHPACIGMTIKEAKKLEHFFCQTCTAENGKMVENSHEATAQSEEKPVESKRRRR

SEQ ID NO: 6053 - protein, 776 aa, Zea mays
  Clone ID: TF_ZmC29605_2.pep
VEGSKHPSIHRPRLFVEGYGRATAAKLPGYEEEFKDRCHHRSAKVDNVVYCLGDDVYVKAGENEADYIGRITEFFEGTDQCHYFTCRWFFRAEDTVINSLVSISVDGHKHDPRRVFLSEEKNDNVLDCIISKVKIVHVDPNMDPKAKAQLIESCDLYYDMSYSVAYSTFANISSENGQSGSDTASGISSDDVDLETSSSMPTRTATLLDLYSGCGGMSTGLCLGAALSGLKLETRWAVDFNSFACQSLKYNHPQTEVRNEKADEFLALLKEWAVLCKKYVQDVDSNLASSEDQADEDSPLDKDEFVVEKLVGICYGGSDTGKGVYFKVQWEGYGPEEDTWEPIDNLSDCPQKIREFVQEKHKRKKNPLPGDVDVICGGPPCQGISGFNRYRNRDEPLKDEKNKQMVTFMDIVAYLKPKYVLMENVVDILKFADGYLGKYALSCLVAMKYQARLGMMVAGCYGLPQFRMRVFLWGALSSMVLPKYPLPTYDVVVRGGAPNAFSQCMVAYDETQKPSLKKALLLGDAISDLPKVQNHHPSDVMEYGGSPKTEFQRYIRLGRKDMLDWSFGEGAGPDEGKLLDHQPLRLNNDDYERVQQIPVKKGANFRDLKGVRVGANNVVEWDPEVERVYLSSGKPLVPDYAMSFIKGKSLKPFGRLWWDETVPTVVTRAEPHNQVILHPTQARVLTIRENARLQGFPDYYRLFGPIKEKYIQVGNAVAVPVARALGYCLGQAYLGESDGSHPLYQLPPSFTSVGRRTAGQARAAPVGTPAGEVVEQ

SEQ ID NO: 6054 - protein, 196 aa, Zea mays
  Clone ID: TF_LIB3150-078-B9_FLI.pep
DVDSYTIRGTNKVVHVGDCVLMRASDSDKQPYVARVEKMEADGRGSVRVQVRWYYRPEESKGGRRQFHGAKELFLSDHFDLQSAHTIEGKFVVHSFKNYTKLDNVGPEDFFSRFEYKAATGSFTPDRVAVYCKCEMPYNPDDLMVQCEACKDWFHPSCMAMTIEQAKKLDHFVCSDCLKENGSKRLSNVYATSSNS

SEQ ID NO: 6055 - protein, 1525 aa, Zea mays
  unsure (1)..(1525): unsure at all Xaa locations
  Clone ID: TF_ZmC2046_1.pep
MQSKATKEGRGIHRKQQAGEWTSGCNRRGASWSRKXDGHVTRKRPRRAAACSDFKEKSIRLSEKKSVVMVKKNRMEEEEVDAVNLTKLGPEDPPPCRKLIDFILHDAEGNPQPFEMSEIDDFFITALIMPMDDDLEKERERGVRCEGFGRIEDWNISGYDEGTPVIWVSTDVADYECVKPSTNYKSYFDHFYEKAQVCVEVFKKLAKSVGGNPNQGLDELLASVVRSTNAMKGYSGTMSKDLVISIGEFVYNQLVGLDETSNNDDEKFATLPVLLSLRDQCRSRVELTKLPSNFSNTSLKIKDSECDETAEDDDDAKLARLLQQEEEWKMMKKQRGRRGTPSQKNVYIKISEAEIANDYPLPAYYKPFSQEMDEYIFDSDDSIFSDDVPVRILNNWTLYNADSRLISLELIPMKSGAENDVVVFGSGFMRDDDGSCCSTAESVKSSSSSSKADQLDAGIPIYLSPIKEWIIEFGGSMICITIRTDVAWYKLRQPTKQYAPWCEPVLKTARLAVSIITLLKEQSRASKLSFADVIRKVAEFDKGNPAFISSNITLVERYIVVHGQIILQQFADFPDETIRRSAFVSGLLLKMEQRRHTKLVMKKKTQVMRGENLNPSAAMGPASRKKAMRATTTRLINRIWSDYYAHHFPEDSKEGDGNEIKEIDDEQEENEDEDAEDEGQIEENISKTPPSTRSRKLLSQTCKEIRWEGETSGKTLSGETLYKCAYVRELRIPVGGTVALEDDSGDTVICFVEYMFQKVDGSKMVHGRILQKGSQTILGNAANEREVFLTNDCLEFKLDDIKELVMVDIQSRPWGHKYRKENSEADKVEQVKAEERKKKGQPMVYFCKSLYWPEKGAFFALSRDKMGLGSGLCSSCDNIEPDSDELKIFSKTSFVYRKVTYNVNEFLYIRPDFFAEDEDRATFKAGRNVGLKPYAVCQILSIPEGAGSKKLNPASANISARRFYRPDDISSAKAYASDIREVYYSEDVIDVPVDMIEGKCEVRKKNDLASSDLPVMFEHVFFCELIYDRASGALKQLPPNVRFMSMVQRTSALKKNKGKQICEPDQIDSGKWLDVPKENRLATLDIFAGCGGLSEGLQQAGVSFTKWAIEYEEPAGEAFNKNHPEAVVFVDNCNVILKAIMDKCGDTDDCVSTSEAAEQAAKLPEVNINNLPVPGEVEFINGGPPCQGFSGMNRFNQSPWSKVQCEMILAFLSFAEYFRPRFFLLENVRNFVSFNKGQTFRLAVASLLEMGYQVRFGILEAGAFGVAQSRKRAFIWAAAPGEMLPDWPEPMHVFASPELKITLPDGQYYAAARSTAGGAPFRAITVRDTIGDLPKVGNGASKLTLEYGGEPVSWFQKKIRGNMMVLNDHISKEMNELNLIRCQHIPKRPGCDWHDLPDEKVKLSNGQMADLIPWCLPNTAKRHNQWKGLYGRLDWEGNFPTSVTDPQPMGKVGMCFHPDQDRIITVRECARSQGFPDSYEFAGNIQNKHRQIGNAVPPPLAYALGRKLKEAVDKRQEASAGVPAP

SEQ ID NO: 6056 - protein, 127 aa, Zea mays
  unsure (1)..(127): unsure at all Xaa locations
  Clone ID: TF_ZmC3042_3.pep
RPGAHTIEGKCVVHSFKNYTRLDNVGPEDFFCRFEYKAATGSFTPDRVAVNCKCEMPYNPXDLMVQCDACKHWFHPSCVAMTIEQAKKLDHFVCSDCFKENGSKRLSNAYATSPNFEPKAEPKRQRR

SEQ ID NO: 6057 - protein, 586 aa, Zea mays
  unsure (1)..(586): unsure at all Xaa locations
  Clone ID: TF_ZmC29757_1.pep
ETLRYQICTLPAPLWREPDGTFWAKVRWYIIPEETAAGRQLHNLRRELYRTNDLADIEMETILRHCSIMCPKDFRDANDGGDDVFYCEYEYDIHWHNFKRLADIGDEPETKEDPSDEPYNASDDYNIXTEHFSGGTKIGRPANQPLVLRIAVIYLXANSRKGRIYGLQNGLPRKIPEHVRCHQKTELEKAKATLLLATLPKSLPCRDKEMEEISIFVKDAICNDQCLGRCLYIHGVPGTGKTMSVLAVMRRLRSEFDSGTLRPYCFIEINGLKLASPENIYKVVYEQLSGHRVGWKKALHYLTEHFSGGTKIGKQANQPIVLLIDELDLLMTRNQSVLYNILDWPTKPNSNLVVIGIANTMDLPEKLLPRISSRMGIQRLCFGPYNYRQLQEIITSRLKGIDAFEEQAIEFASRKVAAMSGDARRALEICRRAAEFADYRVKQSRQSAQNTVSANKGDGVVSMGDIEAAIQEVFQAPHIQVMKNCPKFGKVILVAIVHELYKSGLGEIMFDKLATTVFSWCHAHRELLPGYDTLLKICCKLGESKIILCEEGTKHKLQKVQLNYPSDDVTFALKESPDLPWLSKYL

SEQ ID NO: 6058 - protein, 680 aa, Zea mays
  unsure (1)..(680): unsure at all Xaa locations
  Clone ID: TF_21213068.pep
MVFQKXXXXXEMESCGGGQVPEMPRVPKSARGKRSVRKKEAQSPAQMSAFDLLATVAGKLFXXXXXXXXXTSAGAPALAACAKDALVKQEQCDEQMKLFKHEATDQDSCNESAIXXXIVLQRVVNNARNEDPKAKSEVQDKESSMISYTKAXXXXXXXXXADRWSPESVESGACTGDAVARLMMTAPAGFHKNAPEMYSLLDSMDVDVKPPPLVSSDSTGEMPLHGDKIHRSTSLPRGXXXXXXXXXDRXXXXXXSSGCTHPSTATNKDFTSNCKAEYNRVRKLLTSKHRKVAPARIHKSDLSYSDVERKPSFRYXXXHTRQRTQRSTFKRRKLFDRHLALASEFGTANGKGNTKVAGRNSNAVSLEANKGTNSMPFQKSCGSNDCYVKLRIKSFNVPELLVEIPDSATVGSLKKTVLEAVTAILGGGLRVGVLHHGKKVRDDSKTLIQAGIGQDDMLDNLGFSLEPNCTQNPQVQAPEDVNFLENIDTTEPLARITPADSSSKLGEVDVSQELALTPLAMNYQGSDHDSVHSPGAVSSRDKDSRALFLVPAADPNAGAVVPANKTKRSPEQGHRRIRRPFSVAEVEALVLAVEKLGTGRWRDVKLRAFDNAKHRTYVDLKDKWKTLVHTASISPQQRRGEPVPQELLDRVLAAQAYWSQQQAKLQPKTPSLAEARLLTQ

SEQ ID NO: 6059 - protein, 550 aa, Zea mays
  Clone ID: TF_ZmC9036_2.pep
DPKAKSEVQDKESSMISYTKAELGCNFGVIADRWSPESVESGAFTGDAVARLMMTAPAGFHKNAPEMYSLLDSMDVDVKPPPLVSSDSTGEMPLHGDKIHRSTSLPRGPKGVGFFAVDRDDDDDKSSGCTHPSTATNKDFTSNCKAEYNRVRKLLTSKHRKVAPARIHKSDLSYSDVERKPSFRYKKMHTRQRTQRSTFKRRKLFDRHLALASEFGTANGKGNTKVAGRNSNAVSLEANKGTNSMPFQKSCGSNDCYVKLRIKSFNVPELLVEIPDSATVGSLKKTVLEAVTAILGGGLRVGVLHHGKKVRDDSKTLIQAGIGQDDMLDNLGFSLEPNCTQNPQVQAPEDVNFLENIDTTEPLARITPADSSSKLGEVDVSQELALTPLAMNYQGSDHDSVHSPGAVSSRDKDSRALFLVPAADPNAGAVVPANKTKRSPEQGHRRIRRPFSVAEVEALVLAVEKLGTGRWRDVKLRAFDNAKHRTYVDLKDKWKTLVHTASISPQQRRGEPVPQELLDRVLAAQAYWSQQQAKLQPKTPSLAEARLLTQ

SEQ ID NO: 6060 - protein, 680 aa, Zea mays
  Clone ID: TF_ZmC9036_4.pep
MVFQKRSSSSEMESCGGGQVPEMPRVPKSARGKRSVRKKEAQSPAQMSAFDLLATVAGKLFDEGAGSLGNTSAGAPALAACAKDALVKQEQCDEQMKLFKHEATDQDSCNESAILPHIVLQRVVNNARNEDPKAKSEVQDKESSMISYTKAELGCNFGVIADRWSPESVESGACTGDAVARLMMTAPAGFHKNAPEMYSLLDSMDVDVKPPPLVSSDSTGEMPLHGDKIHRSTSLPRGPKGVGFFAVDRDDDDDKSSGCTHPSTATNKDFTSNCKAEYNRVRKLLTSKHRKVAPARIHKSDLSYSDVERKPSFRYKKMHTRQRTQRSTFKRRKLFDRHLALASEFGTANGKGNTKVAGRNSNAVSLEANKGTNSMPFQKSCGSNDCYVKLRIKSFNVPELLVEIPDSATVGSLKKTVLEAVTAILGGGLRVGVLHHGKKVRDDSKTLIQAGIGQDDMLDNLGFSLEPNCTQNPQVQAPEDVNFLENIDTTEPLARITPADSSSKLGEVDVSQELALTPLAMNYQGSDHDSVHSPGAVSSRDKDSRALFLVPAADPNAGAVVPANKTKRSPEQGHRRIRRPFSVAEVEALVLAVEKLGTGRWRDVKLRAFDNAKHRTYVDLKDKWKTLVHTASISPQQRRGEPVPQELLDRVLAAQAYWSQQQAKLQPKTPSLAEARLLTQ

SEQ ID NO: 6061 - protein, 74 aa, Zea mays
  Clone ID: TF_LIB4171-017-R1-K1-A8.pep
TLALAQINPRASVGPKDKWKTLVFPASIFPPPPKGHPVPQKILNRVLLGQAFWFPHQHQGRVLGKPPPPALPFS

SEQ ID NO: 6062 - protein, 97 aa, Zea mays
  Clone ID: TF_ZmC426700_1.pep
VVTSSDQDFMVRKRLGYSSRGHRIPTMPRVPNSARGKRSTRRKKDENDDMCAMDLLATVAGKLLADQDNSSSVPNTSAAKAKKRKSVKEEHFDEIPL

SEQ ID NO: 6063 - protein, 501 aa, Zea mays
  Clone ID: TF_ZmC1435_1.pep
MLAKIPECGSYGIHHAGSSSSAEPEQVHQAEPKVSRRQADGHPVAYGIFNSVDVDGKPPALVSSDSSSCVPLSSHDKEHQTSSLYRGVVQYTADREDDENSSGCTHPSTIENKGCKPQYLGNHRIRKLLASKVRKAARNKICGGIPSKKICGGLSKKGSKLNLCGKKMSTTHQKVQRMIFKKKKLAHRTSFAKEMLTEASGTSFAMEGQNKSCEAENYHVKLRIKSFNIPELFIKVPENATIGSLKRAVMDVVNSIMEGDLRVGVLLQGKDIQDDNKTLCQAGICHDKKLNNIDFTLECEREREPPSGVIIQEQMDFLTTDMVEPLARMKCEEPFPEADVGDDSQQPRAPYRSRSLSDLYSVHCPVQMASQDTSVSSQAIVPVSPAPSDVGALAIVPLCKSKGSEVGQRRMRRPFTVGEVEALVGAVEQLGTGRWRAVKTLAFDSIDHRTYVDLKDKWKTLVHTASISPQQRRGQPVPQELLDRVLLAQAYWSQQQQQARL

SEQ ID NO: 6064 - protein, 81 aa, Zea mays
  Clone ID: TF_LIB3600-034-Q6-K6-C8.pep
QFVVRLCLQRAVMDVVNSIMEGGLRVGVLLQGKDIQDDNKTLCQAGICHDKKLNNIDFTLECEREREPPSGVIVQEQMDFL

SEQ ID NO: 6065 - protein, 98 aa, Zea mays
  Clone ID: TF_UC-ZMFLB73193B04_FLI.pep
DRISWLLYSPVWLWISCRWRDVKLRAFDNAKHRTYVDLKDKWKTLVHTASISPQQRRGEPVPQELLDRVLAAQAYWSQQQAKLQPKTPPLLAEARLLT

SEQ ID NO: 6066 - protein, 685 aa, Zea mays
  unsure (1)..(685): unsure at all Xaa locations
  Clone ID: TF_ZmC9036_1.pep
MVFQKRSSSELEASGGGQVAEMPRVPKSARGKRSVRKKEAQNPPQMSAFDLLATVAGKLLDEGVGSLGNMSAGAPALTACAKDVRVKKEQCDEEMKQFKHEVTDQDSCNESAILPHIVFQRAVNNARNEDPKAKSEAQDKESSMISCTKAELGCNFGVIADRWSPESVESGAFTGDAVASLMPPAPAGFHKNAPEMYNLLDSMDVDVKPPPLVSSDSTGEMPLYGDKVHRSTSLPRVSKGVGFFXAVDRDDDDDKSSGCTHPSTTTNKDFRSNCTAEYSRVRKLLTSKYRKVAPARVYKSDLSYSDVDRKPSFRNKKMHYTRQRTQRSTFKRRKLFDRHSVLASEFGTAHGKGNTKKVTGRDSHAVSLEANKGTSSTPFQKSRGSNDCHVKLKIKSFKVPELLVEIPESATVGSLKKTVLEAVTAILGGGLRVGVLHHGKKVRDDNKTLIQAGIGQEDMLDNLGFSLEPNCTQNPQVQAPEDISFLETIDTAEPLARIAPADSSSKHGEVDLSQEFALTPLAMNYQGSDHDSVHSPGGVSSPDKVSTNSRALVPVPAADPNAGAIVPANKSKRSPEQGQRRIRRPFSVAEVEALVLAVEKLGTGRWRDVKLRAFDNAKHRTYVDLKDKWKTLVHTASISPQQRRGEPVPQELLDRVLAAQAYWSQQQAKLQPKTPPLLAEARLLT

SEQ ID NO: 6067 - protein, 34 aa, Zea mays
  Clone ID: TF_LIB3245-450-P1-N1-F8.pep
FSQKRGGERVPQELLDRVLGGQAFWFQQQTKVQA

SEQ ID NO: 6068 - protein, 131 aa, Zea mays
  unsure (1)..(131): unsure at all Xaa locations
  Clone ID: TF_jC-zmX3061005Q1K1D06b2.pep
PRGTSSTPGLLTRGGDDCHGKLKIESSTVPGLIXEIPERASVGSLKKTVVREVTSDLGGRLRVGVLXHGKKVRDDNKSXIHAGIGQEDMLDNLGSSLEPSWTRNPQVPATGDINYPEAIGTAEPPSRIGPA

SEQ ID NO: 6069 - protein, 145 aa, Zea mays
  unsure (1)..(145): unsure at all Xaa locations
  Clone ID: TF_ZmC73462_1.pep
CTIRRHVDLETGEVQAGXGSGSYASATEFYRDLLLLCANALVFYPRGSPERSAAARTRALVAKHMSKDQPGPSGKAVAGPAASKKAKAEADVGSLLEKTAPIIVCRKRSSIAKAAAAATAKEERSEKAESDKEGEKQQEAVGKRK

SEQ ID NO: 6070 - protein, 95 aa, Zea mays
  unsure (1)..(95): unsure at all Xaa locations
  Clone ID: TF_LIB3279-203-Q1-K6-H9.pep
MRIRSTHHLWSRLMKHKFGXWVFNKPXVDAATLGLRDDYTIIKHPMDLGTIRRLVTRWLTMNPHELAEDVRITSHNGRTYNPTGPVVHFMVKQKL

SEQ ID NO: 6071 - protein, 374 aa, Zea mays
  unsure (1)..(374): unsure at all Xaa locations
  Clone ID: TF_ZmC1240_1.pep
FAAGLERPKHHKKKHRSLESRGADFDAERRLYSHAFKKSSSLLSRLMKHKFGWVFNKPVDPVTLGLHDIKHLDLGTXRLSRGQYRNPKEFAEDVRLTFHNAMTYNPKGQDVHFMAEQLSGIFEAQWPEIEAEVNYLASCPPLPKKFPPPPIDLHFLERSDSMRHHMALDTNSRPISHTPTYTRTPSMKKPRAKDPNKRDMTIDEKRKLSENLQNLPPVKLDAVVQVIKNKNLSVKQHDDEIEVEIDSMDAETLWELDRFVSNYKKNLSKQKRKAERAMLARQDAELRAQHPIQQPQPTPVPQEPFGEKSPKQVVKDSLEGEQLPASAPEQNGENRQNASSSSNSSSSSSGSGSSSSGSDSDSSSSDGSDAGNSS

SEQ ID NO: 6072 - protein, 67 aa, Zea mays
  Clone ID: TF_ZmC209461_1.pep
GGYSYLKRFEKTLGHHTCCCKCQIVQGQFCGDSLYMRYGENVVEVKKNPNRICQGWRGIYNCRICRT

SEQ ID NO: 6073 - protein, 53 aa, Zea mays
  unsure (1)..(53): unsure at all Xaa locations
  Clone ID: TF_700223701H1.pep
MILEKLQKKDTYGVFAXPVDPEELPDYHDVIEHPMDFSTVRKKLARNAYRSFE

SEQ ID NO: 6074 - protein, 134 aa, Zea mays
  Clone ID: TF_LIB5116-027-A1-PF1-E10.pep
DYNDIIKHPMDLGTIKKKLDSGSYASPSDFAADVRLTFNNAITYNPRGHVVHDLAIQLNKMFESRWRTVEKKLATAATKPHVEVDKADSKRRKTPPVERSNLSIDRVRPTEIVKPKMTKEERETLGDCLTSLAE

SEQ ID NO: 6075 - protein, 175 aa, Zea mays
  Clone ID: TF_ZmC2164_1.pep
RQKKKNKKKKKHEFKDDDLLDHRPYRNDRRVPERHRALKRSSPAPVVGYASSAKRRRGGEVELSNILEKVVDHLRGLSGSLLFLKPVTKKEASDYLDIIRYPMDLGTIRDKVRKMVYRNRDEFRHDVAQIQLNAHIYNDTRYPHIPPLADELMEVCDHLLYENADLLTEAEDAIE

SEQ ID NO: 6076 - protein, 706 aa, Zea mays
  unsure (1)..(706): unsure at all Xaa locations
  Clone ID: TF_ZmC906_1.pep
MTPTVLMEFGQQRPMKRGYEEMVFRAASSRGYAETVGESGVAAGSPLRVDSEDSSVPKRKCISLNSVGFDVKREILVPSKMSSSERRYLRKRFRAELDSVRDLLKKPEFAAPVPLNRAPALSSSAAPRAKKPQKSQRGGTNVIRGAKGRFLPTKPRPETSTVLSEAAAFKQCEAILKKLMTQKYSHIFNVPVDIVKLQIPDYFDIVKTPMDLGTVKKKLESGSYTSPSDFAADVRLTFNNAMAYNPRGHAVHDMAIQLNKMFESRWRPIEKKLASAATEKHVEVDRADSKRRKTPPVDRSDVSMECARQTEPETPKMTAEEREAFGNCLASISDELPPHIFELLQQCIDSNADLSGDGEIEIDIHAVSDDLLFELKKHVDKYLQEKEQSQQVKSEPSENEAVNVSGLSHSSTNPCKGGEPIEEDVDICGNASPIMLDKDAQIRNSKCGSPSSSSSDSESSSSDSDSGSDSESESEKVGSPGKLAKGTKKPDQLVEQEKSDVISPADANRPAAIVGLHGEDSESKPAPGGENSEPDTQVSPDRLLRAALLRSRYADVIVKARGILSQGGDKQEELEKLQKEEKERLLAEGTAAMEACRAEAEAEKKRKRNFEREKARQALQEMERTVEINDNLHLKDLELLGTATTEHIVSSVDETSPERSHDGMAGYHPGAVNPLEQLGLFIKVDDEEDDEQCXPALKKEEKGEIS

SEQ ID NO: 6077 - protein, 121 aa, Zea mays
  unsure (1)..(121): unsure at all Xaa locations
  Clone ID: TF_LIB189-003-Q1-E1-D10.pep
KRARYKKMIRRHMDFRMLHSKIKSGAISCTKELLRDVLIFINNVITFYPKATLEHMAAVELRESACKTVKQSASLFLKSHGETGTAGAPVVKNTRVLQPRCXGPGDARPSKVFFKDATAKE

SEQ ID NO: 6078 - protein, 576 aa, Zea mays
  unsure (1)..(576): unsure at all Xaa locations
  Clone ID: TF_ZmC20581_1.pep
VPVDIVKLNIPDYFQIVKQPMDLGTIQKRMKAGMYSTPPEFAADVRLTFSNAMNYNPANNDVHLMAKTLSKNFESRWKLIEKKLPKPDEKPPQPDEKPPQPVEKPPVRKPTKKNSTKRVSIEKEDLTKKKPSKKSVPKQYIFRGEDSADSPVLQPKKRKTSPLVQDAPLVGDIVPTRKRIMTSEQKYDLSARLQSYGAFIPDHVVELIRSHADYCDANEEELELDMDALGDDTLFELLRLLDDYDRVNPSRNLTEQDPHEVKSRSQYELINASVCNEEVNELFDEDVDIGENDPPVLTFTPLVLEDETADRSRKHSASSSSSSDGESSSSGSSSSSGSDADAKAAQQNSGSKEKILPVDGVGHEKDSLDTLNLPEQSTDPVSVSAYGEGGYVSEKVSPEKQIRAALLRSRFADTILKAREKALDQTTKKDPEKLRREREELERLQRQEXRARLQAEAKAAEDACKRAEEAAAAEAAAEAKRQRDIEREAARKALQEMERTVDINGGSHFLKDLEMLRGVTGEEMPNLVGEGSPGFQLGSSNALAKLGLYMKDDEDDEEGDLADAPVVVDIEEGEID

SEQ ID NO: 6079 - protein, 95 aa, Zea mays
  Clone ID: TF_700332659H1.pep
KHAAYAWPLYKPVDVEALGLHDYCDIIKHPMDMSTIKSNLEAREYRDAQEFGADVRLMFSNCYKYNPPDHEVVAMARKLQDVFEMRFAKMPDEPE

SEQ ID NO: 6080 - protein, 515 aa, Zea mays
  Clone ID: TF_ZmC1935_1.pep
MDGLVAPSPSHSGATSGGGASHRKRKLPPSSLSDATGDEDDDTTAPSSPSTAPSSPSRPSSPSSSHSDDDDDDSLHTFNAARLDGAPSGGSASGRPPKPDSSSVSAAAAAAAAAVGGGPKPEPGSANAGDGKEDTKGLFTDNLQTSGAYSAREEGLKREEDSGRLKFLCYSNDGVDEHMIWLVGLKNIFARQLPNMPKEYIVRLVMDRTHKSMMVIRNNIVVGGITYRPYASQRFGEIAFCAITADEQVKGYGTRLMNHLKQHARDADGLTHFLTYADNNAVGYFVKQGFTKEITLDKERWQGYIKDYDGGILMECKIDPKLPYVDVATMIRRQRQAIDEKIRELSNCHIVYSGIDFQKKEAGIPRRLIKPEDIPGLREAGWTPDQLGHSKSRSSFSPDYNTYRQQLTTLMQTALKNLNEHPDAWPFKEPVDSRDVPDYYDIIKDPIDLRTMLRRVDSEQYYVTLEMFVADMKRMFSNARTYNSPDTIYYKCATRLENFFSGRITVLLAQLSTKS

SEQ ID NO: 6081 - protein, 279 aa, Zea mays
  Clone ID: TF_ZmC1935_2.pep
EIAFCAITADEQVKGYGTRLMNHLKQHARDADGLTHFLTYADNNAVGYFVKQGFTKEITLDKERWQGYIKDYDGGILMECKIDPKLPYVDVATMIRRQRQAIDEKIRELSNCHIVYSGIDFQKKEAGIPRRLIKPEDIPGLREAGWTPDQLGHSKSRSSFSPDYNTYRQQLTTLMQTALKNLNEHPDAWPFKEPVDSRDVPDYYDIIKDPIDLRTMLRRVDSEQYYVTLEMFVADMKRMFSNARTYNSPDTIYYKCATRLENFFSGRITVLLAQLSTKS

SEQ ID NO: 6082 - protein, 88 aa, Zea mays
  Clone ID: TF_700447086H1.pep
FSVCSEDQEAIQAQKIWKKAIMLVWRAAANHRYANVFLQPVTDDIAPGYHSIVQRPMDLSTIKKNIENGLIRSTAEFQRDIMLMFQNA

SEQ ID NO: 6083 - protein, 484 aa, Zea mays
  Clone ID: TF_ZmC8951_1.pep
MTSAVLAGRNEVHQAHQHHRQWAGARVPLMPKPSSNPNPRRHRAGPNPIPSGSPPEPRAAPAVAAEPSPSPSGHLNFRPSEMTPAEARHLRARLTSELCRVRAFLSRIDSWQDGQRRRRGPEPPARGPSPPPALVEAMRKRCADILMRLRRSKKSVWFNSPVDVEGLKLHDYRAIIRSPMDLGTVKQNLTAGRYPSHEAFAGDVRLTFNNALRYNPPDHHVHRYAGNLLASFEGMYKEAVSWFEQQRQQLEPPMQPDLPPPPQLPVVSVPVQAPPRMGGGGRRPKPKAREPNKREMDEEEKQKLRVEIENLPEEKMLNVLQIVQKRNSDPAFTGEVVELDFDELDMETLWELDRFVVNWRKALKKSQRNSMVNGDAAAAVNGDAIDVTVVPDDDDMVEVAVNPSVAVEIGESADVPEKEMEAEMVDDYVDIGDEMPTVNYQSVEIERDSPAAASSSSGSGSGSSSSSDSDSDSDSDGDDASAPH

SEQ ID NO: 6084 - protein, 360 aa, Zea mays
  Clone ID: TF_ZmC296488_1.pep
MASGPPSPSGKPYSRKSHASSKAPSVPSFDAHNGQLLPTVTFSLPSTTTARRELRRRLSSELSQVRAAVKRLNSLPAPAPSSALSATDPSTPHPPYPPASKHKSKKGGGVPQPHLSAEARRKLYAPVFKTCAALLSRLMKHKHSWVFNKPVDASALGLHDYHTIITKPMDLGTVKSKLGAGQYKSPREFAGDVRLTFQNAMTYNPKGQDVHFMAEQLLNMFEEKWPEIEAEIAQLSPQPPTPSSAAPKKPKPKEIDNSRPLERSDSTVHAAGIEATPKTHTGRPQVLKKPKAREPNKRDMTFWEKQRLSNNLQDLPPEKLDNVVQIIKKRNLLLIPHDDEIEGDIDSFDVETLLGLDRFV

SEQ ID NO: 6085 - protein, 190 aa, Zea mays
  Clone ID: TF_LIB3595-033-Q2-K6-E12.pep
RYQVDQPSFDDRLRYFSILFESLLSFQMEESRNKSKKQKSAIDLPKAPKEVEGPKVSELKARAEAEQHAVRRMRMCLRDICNRILYNKRFNVFHFPVLEDEVPDYRSIIHKPMDMATVLQRVDSGQYLTRAAFIKDIDLIVSNAKTYNGDDYNGSRIVSRACELRDVVQGMLSQMDPSLVSFCDKIASQG

SEQ ID NO: 6086 - protein, 508 aa, Zea mays
  Clone ID: TF_ZmC828_1.pep
RPGRPRLLICGGESVGLDHVGPAVLHELEKFSVHSLGLPSLLSDPSAKTPEEALVHIFGEAKRTTPSILYIPQFHLWWDTAHEQLRAVLLTLLNDLPSNLPVLLLGTSSVVFTDLEEECASIFSSRNVYQVDQPSFDDRLRYFSILFESLLSFQMEESRNKSKKQKSAIDLPKAPKEVEGPKVSELKARAEAEQHAVRRMRMCLRDICNRILYNKRFNVFHFPVLEDEVPDYRSIIHKPMDMATVLQRVDSGQYLTRAAFIKDIDLIVSNAKTYNGDDYNGSRIVSRACELRDVVQGMLSQMDPSLVSFCDKIASQGGPLQAVDDEDRAILQAAPVAQLVSGTRISARLRNVQPEVNLSQSYEVLRRQKKSAENEQSMTRDEKSPEDVDLSKPTDAEEAAKEPESNGTTKEANDSPAKEPEVSTSPEPMESDNGKIAAATGDDLLEQLEALKQRFMELTASYGVPQLERLYSKIMKGAIELTSKESNEDHRRLVVRYLWTFVENSNNF

SEQ ID NO: 6087 - protein, 127 aa, Zea mays
  unsure (1)..(127): unsure at all Xaa locations
  Clone ID: TF_LIB4969-022-Q1-XP1-A11.pep
MGLHDGSPKQVEKARKATDGHEELSDSGPTTPLPNKKLLLFILDRLQKKDXYGVFSXPVDPEELPDYHDIVKHPMDFSTIRKKLDKGAYSNLEQXEDDVFLIXTNAMCYNSPDXIYYRQARGIFRDR

SEQ ID NO: 6088 - protein, 183 aa, Zea mays
  unsure (1)..(183): unsure at all Xaa locations
  Clone ID: TF_LIB3632-059-Q6-K6-E4.pep
MASSLLAGRGGGHHHNWGETRAPLEPIPPNPSPSQPHPRADGSKSKPRAAAGYVKFRPASLGHREARALRDRLAVELGQVRALLSRIDTWQQQGPPPRAVLRGAMRKRCGQILSRLRKDKRSVWFNAPVEVERLGLHDYHAVIKRPMDLGTVKEGLAAGRYASHDDFAXDXRLTFTNALRYNP

SEQ ID NO: 6089 - protein, 91 aa, Zea mays
  Clone ID: TF_uC-zmflteosinte056e06a1.pep
LVCIVKIQWILVTVHKKLQSGSCTSPSDFAADARLTFNNAMAYNPWGHAVHDMTIQVNKMFESRWRPNEKKLAFAATEKFEEEDNTSYGLQ

SEQ ID NO: 6090 - protein, 349 aa, Zea mays
  Clone ID: TF_ZmC19394_1.pep
MASALLAGQGGARHHGWGETRAPLAPIPPNPNPSQPHPRADGSKSKPRAAASSPAAGYVTFRPASLGPREARALRDRLAGELTQVRALLSRIDTWQQQGPPPAGLRGEVRKRCGQILTRLRKDKRSVWFNAPVEVERLGLHDYHAVIKRPMDLGTVKEGLAAGRYASHDDFAADVRLTFTNALRYNPVGHEVHTFAGALLAYFERMYKEALACFEEDCKRPEPPRPVAPELTPPPAAEPVEAKVKPRAGNVRMRKPKAREPNKREMSLEEKNMLRVGLESLPEEKMHNVLQIVRKRNNNPEMLGDEIELDIDEMDVETQWELDRFVANFNKALKKSQRAVLKQYSTMCM

SEQ ID NO: 6091 - protein, 103 aa, Zea mays
  Clone ID: TF_ZmC1935_3.pep
STLQNLNEHPDAWPFKEPVDSRDVPDYYDIIKDPIDLRTMLRRVDSEQYYVTLEMFVADMKRMFSNARTYNSPDTIYYKCATRLENFFSGRITVLLAQLSTKS

SEQ ID NO: 6092 - protein, 264 aa, Zea mays
  unsure (1)..(264): unsure at all Xaa locations
  Clone ID: TF_ZmC531483_1.pep
MAKTRKPPAPPSPPPPPAETPSPQRRRKKKGRPSLLDLQRRSLRLQAQNPSPAASPTRRDPNPSDDDEDGTGSGRRRQKRLKSVLSGVVKEEQGEGKKDAAKATGKEDAASDGGPTGTPLPDKKLLLFILDRLQKKDTYGVFSEPVDAEELPDYFDIIDHPMDFSTIREKLLNDSYSKLEQFEDDVFLLTSNAMSYNSADTIYFRQARSIEALAKKDFENLRQPSDEEEPXTPARRGRPPKNPKTEGDVSPDLSNVKANKPEDN

SEQ ID NO: 6093 - protein, 346 aa, Zea mays
  Clone ID: TF_ZmC21171_1.pep
MTPANGAPARAAEAGPHEVESEADAFRRQVDDLVSKTDVLERRVKEVADFYDGKKHGSGGRKGGGGGRYGASSRGMPDLMRQFGVLLKEITSHKDAWPFLEPVDVVTLQLPDYHNIITQPMDFSTIQKKMERKDGTCYTNVREICSDVRLIFANAMKYNDDQNVIHLMAKSLLEKFEEKWLHFLPKVESEEKRQKEEESKGVAATNTSREVAIVKLAKDTDDELNQINRKLEELRKMVVHRCRKMTTDEKRKLGAGICHLSPDDLSKALEIVAQDNPSFQTKAEEVDLDMDAQSETTLWRLKFFVREALERQANVASGKMDENAKRKREICNALAKTTSRRIKKQP

SEQ ID NO: 6094 - protein, 247 aa, Zea mays
  Clone ID: TF_ZmC8951_2.pep
MTSAVLASRDEVHHGHPHHRRWGGARAPLMPKPSSNHNPRRYRPGPNPIVSGSPPAPRAGSAVAAEPLPSPLRHVKFRPSELTPAEARHLRERLTGELGRVRAFVSRIDSWQDGRRSSPPPALVEAMWRRCADILTRLRRSKKSVWFNSPVDVEGLKLHDYRAIIRSPMDLGTVKQNLTAGRYPSHEAFAGDVRLTFNNALRYNPPDHHVHRYAGDLLATFEGMYKEEVSWFEQQRQQLELPMQLDL

SEQ ID NO: 6095 - protein, 496 aa, Zea mays
  Clone ID: TF_ZmC16_1.pep
MVVVAVGGGGGGGGWGTWEELVLGGAVLRHGGAAWATVADELRTRSPCTFSPEECEAKFAEIQLRYSACNAWYEELRKQRVAELKRELEKSENSIGSLQSVIQSLSNSKHVDGSSECRTSHTESCPHSENTADTNSSGKETSRDRSSAASFTEEARNSQKSQKVQQCDTDSIQAINPSPDESYPQAQVEKVGPKDGLLWGSRKQRVGRARRTLLKGGDSSGDGEPTSTACIQREGLSKGCMKNFITQNLESVVPVIESVKLKLAEILNTISTQDDCKMLQHQLDTQRKRARYKKMIRRHMDFRMLHSKIKSGAISGTKELLRDILIFINNVITFYPKTTLEHMAAVELRDFACKTVKQSASLFLKSHRETRTAGAPVIKKNARALHFSRTSLHSGDARASKVSSRDAAAKEGDGKRPCSDELANQKTTKRNEPAKKRGVGRPPKSGQRIAGAQENSPIKGRKSSAGAQVDSPSKGRKRSVEAHDDSSSKGGKRSRR

SEQ ID NO: 6096 - protein, 497 aa, Zea mays
  Clone ID: TF_ZmC4386_6.pep
MGKQQQAPPARRSPAMSAPPPPKRRKKKGRPSLLDLQKRSLRLEQQQLPQGRRSNRRSAGSADEDDDGPASGSGRREKKLRLVMGLHDGSAKGEKMRKATDGREEPSDSGPTTPLPNKKLLLFILDRLQKKDTYGVFSEPVDPEELPDYHDIIKHPMDFSTIRKKLDKEAYFNLEQFEDDVFLITSNAMCYNSPDTIYYRQARGIQEIAKKDFENLRQDSDASEPEPEPEREPKPEPEPEEPKPQPRRGRPPNKNNAKQKVGKPPAERATADFSGATLATAANIGRHAQADVDLSRRVMDKAMIADVLRASFANLRNEHNWSGERKFERLEAYSGYGGTWSAKTGKRPILMEDSRRSTYYETQPSSSIYELPVSSSYNGTEKLLVPVGVQLPQSYSHSLARFAAQLGPVGWEIASRRLERSLAPGTKFGRGWVGDGETPPNPFQTPVLAAFSETMAPPSSIAASGEQPSMKSPTHKQACTGSISHRLGSPELNVPLR

SEQ ID NO: 6097 - protein, 299 aa, Zea mays
  Clone ID: TF_ZmC1240_2.pep
RGRLSRGQYRNPKEFAEDVRLTFHNAMTYNPKGQDVHFMAEQLSGIFEAQWPEIEAEVNYLASCPPLPKKFPPPPIDLHFLERSDSMRHHMALDTNSRPISHTPTYTRTPSMKKPRAKDPNKRDMTIDEKRKLSENLQNLPPEKLDAVVQVIKNKNLSVMQHDDEIEVEIDSMDAETLWELDRFVANYKKNLSKQKRKAERAMLARQDAELRAQRLIQQPQPTPVPQEPVGEKSLKQVAKDSLAGEQLPTSASEKNDENRQNASGSSNSSSSSSDSGSSSSDSDSDSSSSDGSDAANSS

SEQ ID NO: 6098 - protein, 467 aa, Zea mays
  Clone ID: TF_ZmC119_1762.pep
MECVELLDSPDLFFLDGGDAHATDFSLENHLESSSSAGAKAKAAPGHSHSHSRRAQLHGSNAPVPPPLPGTSYYGARRKAKACRRARVPEGGVLDSWDRLFLEGYQSDLRVSTDGGAEIPSHSCVLGVKSPVLRAMLEEARLRDDGFRCIRVSGAPSEAVRVFIRFLYSSRFEQEQMKEHALHLLVLSHVFSVPSLKTVCVDQLERGFLAPDNVVDMLQLARLCDAPRLALACVRMVIGDFKTISLTDGWKVMRRANPSMEQELLESLVEADTRRQERAKRMEEKKVYLQLYEAMEALVHICRDGCRTIGPRDQALKGSLAAACKFRACKGIELLVRHFSACGVRVPGGCANCRRMWQLLELHSRMCFLPDTCKVPLCRHFKEKMRNLGRKEETKWNLWCARCWSGEELWVLFPEGEKISSILRPAGSCHVAPLVFETPKPRRGFMLEKGTRRSRNKKKKNVRTAVA

SEQ ID NO: 6099 - protein, 334 aa, Zea mays
  Clone ID: TF_UC-ZMROB73012D02_FLI.pep
DITFYVDRKPVEAHRVILCARSPFFEKKFKTDWKDRKEVRFSNQKLYFGALYSLIHFFYSDRLEVAVDDMENLARACKVCKCEELQKVLDKEVVHQKYAEYKSARELDMDSSQKRFILQAQSLPEEDRLPSALQRILQTCLANSREGYCSEESNEMIRNSEDDDLADLYIKVGDKVFHCHQAEELFDVASRYLLFPLKRVVADMLLPYLEHVSPAELCHWLMMSDIYGVMKIREYILDIIACNFEMFAATREFRALLLTLPPPSGDDSLRTTRPSAPGTGGNTDQGNILDDLREKWLEAEGAELDERDESAALFDKRLEMLMLVAEKEADDEDA

SEQ ID NO: 6100 - protein, 238 aa, Zea mays
  unsure (1)..(238): unsure at all Xaa locations
  Clone ID: TF_LIB5117-027-A1-PF1-D12.pep
MSTGAGAEPEMDDGYGFDTVFNVEAFSDRTLQVEVVGRDDHAPGSGRKRRREEDKEYDGEHIDSFCTVMSTPVLRVETIYVSSAILAAKSSFFRKLFSNGMKESGQREATVRLADSEEKAFMELLRFMYMGKVDXTTEPTHLVDILMAADKFEAISCMKLCVPAVLTEAVMKFLAERYKEFLSTESQDELMRIPXAXIEAILRRNSFGFASGVAVYDFVLRWTCYQCPNSEEIRKFSS

SEQ ID NO: 6101 - protein, 301 aa, Zea mays
  unsure (1)..(301): unsure at all Xaa locations
  Clone ID: TF_ZmC13701_3.pep
MEDEDAGLGDGGEASPPHHAAASGDRARDLAASPTSSRSVTQTVNGSHRFVIQGYSLAKGMGVGKHIASDTFTVGGYQWAIYFYPDGKNPEDNSGYVSVFIALASDGTDVRALFELTLLDQSGKGKHKVHSHFDRSLESGPYTLKYRGSMWGYKRFFRRNALEQSDFLKDDCLKINCTVGVVVSTMDYSRPHSIEVPESDIGYHFGTLLDTLEGVDVIFSVAGEKFHAHKLVLAARSSFFRSEFFDHESDEEKNETGTGDEIKEIVIDDMDPVVFXAVLHFMYRDNLXNDDELMASSSDCS

SEQ ID NO: 6102 - protein, 210 aa, Zea mays
  unsure (1)..(210): unsure at all Xaa locations
  Clone ID: TF_LIB4765-040-R1-K1-C1.pep
MQYLTDVARSKDLLKVVGHSVIKAMCDGEFLMSRKWAVGGHDWEVHLRPKDHSEGHERPVTLRLVLISEARGGDVKAKLSCRLVDPTGRLKPSKENSKSHKFYKSGDYSGAIQVTGREDLEKSGYLVDDSYTVECSITVLKKAPARNTAAAAAATAMDRDAAMLPSLELHRHLXELLQKGTGADVTFHVSGEKFAAHKGILCSRVAGVHG

SEQ ID NO: 6103 - protein, 159 aa, Zea mays
  Clone ID: TF_ZmC868_4.pep
MDGEVMRMGGGLSACSPVFKSMFVHDLREKESTTVDIGDMCVKSCSALLGFVYGTIEQGQFWKRRLPLLAAADKYGIGDIKDCCEESLLEDIGSGNVLERLHVAWLYRLERLKKGCLTYLFVFGKIYDVRDEMHGFFHHADRELMHDMFQEVLSVWKPM

SEQ ID NO: 6104 - protein, 344 aa, Zea mays
  Clone ID: TF_ZmC21312_1.pep
MCEAPRLGNRAGAGDPAAADVDVVTTGGRRRIPAHSSVLASASPVLGSILERRLRKDRESGKPGRSVVRIRGVTDDAAAAFVRLLYAGRCGEDEDDDMEEHAVQVLVLAHAYQVPWLKRACEGAIGARLTADSVVDVLQLAGLCDAPRLHLRCARLLAKEFAAVERTEAWRFLQENDPWQELHVLQRLHEADMRRRKWRRKRAEQRVYMELSEAMDCLDHICTEGCTEVGPAGRAPAPAPCARYATCRGLQLLIRHFSQCHRKSCARCQRMWQLLRLHSALCDRTDRCNTPLCMRFKQQEQDKAAAKGGDDGDKWGLLVKKVKTARVFSSLANRKQMSTTTTQC

SEQ ID NO: 6105 - protein, 108 aa, Zea mays
  unsure (1)..(108): unsure at all Xaa locations
  Clone ID: TF_LIB4725-011-R1-K1-C12.pep
FKGHFLNQEKDARDIEIPNIRWEVFELMMRFIYTGSVQINSEISQDLLRAADQYLLEGLKRLCEYTIAKDVNLDNVSDMYDLSEAFHAVSLRHTCILYILEHXNKICT

SEQ ID NO: 6106 - protein, 184 aa, Zea mays
  Clone ID: TF_ZmC2364_3.pep
PAGLPGPFSHFALPPPARVTATAFHPSPTARGWRRLVGVQGTSAAEMEPDFSTVGGPSFEFAFNEANFSDRELRIEVVAGDYDAPGSTGGGSGGGGLADWARHRKRRREELFKEKGDDEQGIDPSWAAVVTPVLRVKTIYISSAILAAKSPFFFKLFSNGMKESDQRHATLRITDSGNVTILGN

SEQ ID NO: 6107 - protein, 201 aa, Zea mays
  unsure (1)..(201): unsure at all Xaa locations
  Clone ID: TF_LIB5072-031-Q1-XP1-G12.pep
MSNVQDKPLNELLSRSMVDIYVGPENTHWILHEKLLCHHSPFFRKIFYSKSSTSSRTQSFGLPDEEDLPFKTFVGWLYSSSLPVPREEADLGTAFDLYLMAEKFEIPALVADVLQVVREWYKYSDSYPGLRRVQYIYANTEESSPMRHMLVHAVARMMVVANTGIPPHXDKALRKNGQLVVDVIRAIQDWRLDEETVPDAR

SEQ ID NO: 6108 - protein, 365 aa, Zea mays
  unsure (1)..(365): unsure at all Xaa locations
  Clone ID: TF_ZmC1033_1.pep
MSPGPKSYIAHILSMFGLCGFPSKLGGNMRNVLCDSELVDLELLLADGESLSAHAGILSARCPKLLPCEKTFVRDGSVTLEWGRRSCYVVRMSDRVDSHALKKILEYAYTGLVTVDDATVKPVKTLAKYCHLRSLHLMLQKEQPRWHSCPIYDLTTALEPAKHSFSDIILEAQSNDKMECHHGSCQLSTPHIHSHKVILSVSCEYLRALFQSGMHERXFAETIRVPVGWEALRKLVQWFYSGELPRVPPDCRWKAMSTEEKLSILKSYAELSSLADFWFVDGMKEESLQVLTSCLNSSSTDASLAFIGFAANLGQWELVEAAISSVAHLYPRLRDSGRLEQLDEDVLNMLRTEHVRYLQHRSASN

SEQ ID NO: 6109 - protein, 135 aa, Zea mays
  Clone ID: TF_ZmC184317_2.pep
MVLYADLDALRASAADVRIVTSDGQTIAAHSYVLASASPVLERMIHRARRGWGAADCTVAVFGVPSDAVLAFLHLLYSSRVAPGTEEELVAAHGPQLLALAHAYRVGWLKRATEAAVSARLTADRAVDMLKLARL

SEQ ID NO: 6110 - protein, 199 aa, Zea mays
  Clone ID: TF_LIB4743-082-A1-K1-C4.pep
MDPDFSPASGGPSFEFAFNSVNFSDRVLQIEIVAGDDALGAKGATGEGCSSLADWACHRKRRREELRRDKDPANCKVEAEECDAYEEGNEPVAMIEESPPDIEADGEDGKSSDSYCSMECTQVLRVKSMYISSAILAAKSPFFYKLFSNGMKESDQRHATLRITASEENALMELLSFMYSGKLTTNQPTVLLDIVMIAD

SEQ ID NO: 6111 - protein, 246 aa, Zea mays
  unsure (1)..(246): unsure at all Xaa locations
  Clone ID: TF_ZmC5281_2.pep
MDPDFSPASGGPSFEFAFNSVNFSDRVLRIEIVAGDDALGAKGATGEGCSSLADWACHRKRRREELRRDKESRKYMPDPANCKVEAEECDAYEEGNEPVAMIEESPPDIEADGEDGKSSDSYCSMECTQVLRVKSMYISSAILAAKSPFFYKLFSNGMKESDQRHATLRITASEENALMELLSFMYSGKLTTNQPTVLLDILMIADKFEFGPXRRHCSQLLRNLPMTTESALLYLDLPSSISMAAA

SEQ ID NO: 6112 - protein, 289 aa, Zea mays
  Clone ID: TF_ZmC13121_1.pep
LKLILVSEPLRDKLRVSLSCRLVCHPPSQRHLDASKEKSVSHIFASNFKCSPVVLLFEKRKVRSSGYLVNDSLTVECTVTMLRDLDATDKEQHLPVLPPSDLHQHLGELLQTSDGADVTFRVSGESFAAHKIFLAARSPVFKAECFGGVELGSPASVYNKDMEAAVFRAMLHFMFTDMAPELDGDQEPEAAAAMAQHLLVAADRYGLNRLKLMCECKLSGGIDIGTAAATLAFAEKHDCPLLKAKCLEFVTKSPETLDAVLATDGYEHLVASCPLVLAELLRAARGRKI

SEQ ID NO: 6113 - protein, 364 aa, Zea mays
  Clone ID: TF_ZmC11136_1.pep
MGSSLSNLTDAACIVHQFKINGYSATKSMARTDSLPSKRLAVGGYEWEVHYTPSLLVDGSYMIAFRLVLLGAPRRNDVKAAFRCRLLYPSTNYGHQRGACVSDSMGNVEGQMSHAFKRAKESSGWIPLRKRNVVEAARVIENDSLTAECTITVVTELPEPDTAKTNAVLPRIRRLTGVHSLHHDLGELLGKGTGSDVVLVVCGESFAAHKAILASRSPVFMAQFFGPMKETHSQSQRVEIMDMEAAVFGAMLRFMYTDVVPELERQENGDVIAQHLLAAADRYGLDKLKSMCEDKLCGGTTVETAATTLALAEQHGCPKLKAWCVEFIAANLDAVMVTEGYKHLMTSSPLVLNDLLRAVRGTKN

SEQ ID NO: 6114 - protein, 418 aa, Zea mays
  unsure (1)..(418): unsure at all Xaa locations
  Clone ID: TF_ZmC684_2.pep
MGAGRVCRGGPFSASPAAGAAAGRPFPPLTASSSSSPSSAPSETASTSVTKTVNGSHHFKIAGYSLSKGIGVGKFIASESFNVGGFDWAIYFYPDGKSGEDGAAYVSLFIALASEGTDVRALFELTLVDQSGKGQDKVHTHFGRSLESGPYTLKYRGSMWGYKRFFKRVALETSDYLKDDCLLVNCTXVGEVQSHTXSNMALHIGQLLTSGKRTDIAFEVDGEMXMFPAHKVILSARSPVFRAQLFGPMKDKDMKCIKIEDMEAPVFKALLHFMYWDELPDIEELTGVNTTWVSTLMAQHLLAAADRYALERLKLLCELKLCEDVAINTVANTLALAEQHHCYQLKTVCLKFVALPENLKAVMQTDGFDYLQQSCPSLLTELLEYVAKIGEHSVSPCLYSTEVLDGGDANGRRVKPRI

SEQ ID NO: 6115 - protein, 332 aa, Zea mays
  Clone ID: TF_ZmC1451_1.pep
MTDGARVETAPRLAQWRVDPLPCYTYRKSLPFLIGLWNWCISVERNNKQTCVKLFAENTSSLKNGSSAPIASFIAKLIVSLPPNQQTIVHPGIFDKQLKYDGFVWTIDSTVTGRFVIEIEFLDLKVADPSGGEPASIWASRQVKQCSDSTALSSLARMLHEDVLTDITINAADGSVGAHRAVLATRSPVFRSMFSHDLREKELSTVDITDMSLDACRAFLSYIYGDVRGGEEFLANRLALLRAADKYDIGDLREACHESLLEDIDARNVLERLQTAHLYRLPRLKGGCLRFLVDFRKVYEMHDDDLNAFLQTADRELVAEVFHGVLAAWSGR

SEQ ID NO: 6116 - protein, 371 aa, Zea mays
  Clone ID: TF_ZmC2246_2.pep
MSSRAGGGKPLWSASTIVAKVASGYHILRIDGYSRTMETPTGESIASLPFSVGGRCWRIRYYPNGDKLENKEYISLYLNLHDRSVEAEKAQLMFRFVGDVAEQPLILGGLHTFEKQGWGYGKFIKRKDLEESKHLVDDSFSIRCDVAVRFNDVRVEKAPEAAAAAAMISVQPSDLHQHLGSLLLTQKGADVVFDVAGETFAAHRCVLAARSPVFTAELFGAMKEGHTGGVVRIEDMEPRAFKALLYFLYTDLLFPKTMATTMNQSEDGDVGGDDEDVLCQHLLVAADRYNLERLKSLCEKKLSECIHVGTVAIILTLAEQHRCPGLKKVCLHFLRSPANLRAVASSDAFKHLSSSCPSVMVELVAMLGNSA

SEQ ID NO: 6117 - protein, 469 aa, Zea mays
  Clone ID: TF_ZmC5281_1.pep
MDPESRKYMPDPANCKVEAEECDAYEEGNEPVAMIEESPPDIEADGEDGKSSDSYCSMECTQVLRVKSIYISSAILAAKSPFFYKLFSNGMKESDQRHATLRITASEENALMELLSFMYSGKLTTNQPTVLLDILMIADKFEVGSCMRHCSQLLRNLPMTTESALLYLDLPSSISMAAAVQPLTDTAKEFLANKYKDLTKFQDEAMNIPLAGIEAILWSNDLQVASEDAIYDFMIKWARAQYPKLEERREILGTRLLPLVRFCHMTCRKLRKVIACSDLDHEQATKCVTEALLYKADAPHRQRALAADVMTCRKYAERAYKYRPLKVVEFDRPYRQCIAYLDLKREECSRLFPSGRIYSQAFHLAGQGFFLSAHCNVDQQSAFYCFGLFLGMQEKGSTSVTVDYEFAARTRPSGEFVSKYKGYYTFTGGKAVGYRNLFAIPWPLFMADDSLFFIDGVLHLRAELTIKQP

SEQ ID NO: 6118 - protein, 347 aa, Zea mays
  Clone ID: TF_ZmC1327826_1.pep
MAGLLPQHPATVDMSDSVLISSCFTHKFKINYVETEKVAVEHSVRSEQILAGGHLWRIICFPRRIGGMKESNVEYLSIYLCHESESKDVKAVFEAFVMYKEGTPSLAHKKKLVHVFSPKAGGRHIHGWPCFVERSVLQSFYVTNSGSFVIVGAVKVLQEDPLDVPPSNLGIHLGGLLLGSTDGSDVSFVVGGERFAAHRAVLAARSPVFKAQFFGSMAEATMSSITLHGITAATFKAMLRFVYTDACPEEAPSEAFQDLLAAADRFQLDRLKILCASKLWNNVSVDTVSATLICAEIYNCPQLKRKCIGFFGEGKGFKTKAVLTDGFAQLSQQFPSILDELRKKVGA

SEQ ID NO: 6119 - protein, 369 aa, Zea mays
  Clone ID: TF_ZmC2246_1.pep
MEPKMQGGIVMAGGGKPSWSASPIVATVASGYHILRIDGYSHTMGTPTGEYIASLPFTVGGHRWHIRYYPNGRSSETKEYVSLSLYLHDWVAETVKARFKFRFVGDVAEQPLILGGLHSFDNIDNNWGRPEFIKRKDLEESKHLLDDSFSIRCDVVVPTNEVRVVATAAAAMVSVPPSDLHQHLGILLLTEKGADVVFDVAGETFAAHRCVLAARSPVFSADLFGAMEEGGHTGGVVRIEDMEPLVFKALLYFLYTDLLETETMKQGEDGDDEDVLCQHLLVAADKYNLERLKLLCEKKLCECIHVGTIATILALAEQHRCHALKKVCFHFLSSPANLRAVAATDGFEHLSRSCPSVMEELVVMLSNLV

SEQ ID NO: 6120 - protein, 218 aa, Zea mays
  unsure (1)..(218): unsure at all Xaa locations
  Clone ID: TF_LIB4741-124-A1-K1-C6.pep
MEDTLKSLSMDYLNLLINGQAFSDVTFNVEGRLVHAHRCILAARSLFFRKFFCGADQAAAGPGALLLDHLSPRSPSGTSSPRGASAAAPGAVIPVNSVSYEVFLLLLQFLYSGQVSLVPQKGEPRPGCGERACWHTHCAAAVDLALDTLAAARSFGVEELALLTQKQLAGMVEKASIEDVMKVLMASRKQDLHQLWTTCSHLVAKSGLXPPEVLAKPP

SEQ ID NO: 6121 - protein, 618 aa, Zea mays
  unsure (1)..(618): unsure at all Xaa locations
  Clone ID: TF_ZmC2364_2.pep
MYGRNNPDQWRRLWRHRIREYKNLRAGRALLLSLPATSLVSPSPSSTPPARVTATAFHASPTSRRRRLVGVHATAAAEMDPDFSPGGGGPSFEFAFNEVNFSDRELRIEVVAGDDYAPGSSGAGAGGGGLADWARHRKRRREELLKEKESTTHMSDQTNCNEVEAEECDAYEENQEEPVAMVEESPPDVGQDGDDGQGIDSSWTVVGTPVLRVKTIYISSAILAAKSPFFFKLFSNGMKESDQRHATLRITDSEETALMELLSFMYSGKLATTEPTLLLDILMAADKFEVVSCMRYCSQLLTSLPMTTESALLYLDLPCSISMAAAVQPLTDAAKDFLAVKYKDLTKFQDEVMNIPLAGIEAILSSNDLQVASEDTIYDFLLRWARAQYPKSEERREILSSRLLPLVRFSHMTCRKLRKVLTCTDIDHEQATKCVTEALLYKADAPHRQRALAADTTTCRKFAERAYKYRPLKVVEFDRPYPQCIAYLDLKREEXCSRLFPAGRIYSQAFHLAGQGFFLSAHCNMEQQSTFYCFGLFLGMQEKGSTSVTVDYEFAARTRPSGEFVSKYKGNYTFTGGKAVGYRNLFGIPWQAFMADDSLFFIDGMLHLRAELTIKQPT

SEQ ID NO: 6122 - protein, 298 aa, Zea mays
  Clone ID: TF_ZmC29433_1.pep
MSSEDSLKSLSLDYLNLLINGQAFSDVAFSVEGRLVHAHRCVLAARSLFFRKLFCGLDPSHQPPPPTAGGRAPDLVIPVSSIRYEVLVLVLQFLYSGQASVAAPKSGPLPGCGARGCWHTRCGAAVDLALDTLAAARSFGVEQLALLVQKQLEAMVKEASVDDVMKVLMASRKFEMQELWAACSHLVARSGLSADLLAKHLPIDVVAKIEEIRAKSPGGAAAAGGAGPRSPFLLTHHYLPVNGASASEAERDHRVRRMRRALDAADIELVKLMVMGEGLDLDGALAVHYAVAALRPLI

SEQ ID NO: 6123 - protein, 269 aa, Zea mays
  unsure (1)..(269): unsure at all Xaa locations
  Clone ID: TF_ZmC13701_4.pep
MDDDAGDASPPPGPAPLAATGAPSLRDMAASPTSSRSVTETVNGSHRFVIQGYSLAKGMGVGKHIASETFTVGGYQWAIYFYPDGKNPEDNSAYVSVFIALASEGTDVRALFELTLQDQSGKGKHKVHSHFDRSLESGPYTLKYRGSMWGYKRFFRRTALETSDFLKDDCLRINCTVGVVVSTIDYSGPHSIQVPDSDIGYHFGSLLDSXKGVDVILNVSGERFHAHKLVLAARSTVFRSKLFDDESEGDKTRVXESEDLKEIVLDDLE

SEQ ID NO: 6124 - protein, 196 aa, Zea mays
  unsure (1)..(196): unsure at all Xaa locations
  Clone ID: TF_LIB4757-047-Q1-K1-E12.pep
MFGKRSLASSKDKDRSGKITKQPKRSFRDASKQKAMAEKLDARKDSPMMDGGSPQLTSAIVTVIVGSDQRLFAAHEDVLCHSPYFAELLRSQFFESTNRRIDLPTEEPEIFSCILEYLYKGDYYPRLVHDKRRQTWMLEGAIASPDPNKTGDRAAAVEPTFFHXXVGDVLLRDTAVYCAADRYXLEELKKLSLAQQ

SEQ ID NO: 6125 - protein, 358 aa, Zea mays
  unsure (1)..(358): unsure at all Xaa locations
  Clone ID: TF_ZmC13701_5.pep
MEDEDAGLGDGGEASPPHHAAASGDRARDLAASPTSSRSVTQTVNGSHRFVIQGYSLAKGMGVGKHIASDTFTVGGYQWAIYFYPDGKNPEDNSGYVSVFIALASDGTDVRALFELTLLDQSGKGKHKXGYKRFFRRNALEQSDFLKDDCLKINCTVGVVVSTMDYSRPHSIEVPESDIGYHFGTLLDTLEGVDVIFSVAGEKFHAHKLVLAARSSFFRSEFFDHESDEEKNETGTGDEIKEIVIDDMDPVVFKAVLHFMYRDNLVNDDELMASSSDCSIFDSLAGKLMAAADKYELPRLRLLCESYLCKHVSVNSVATTLALADRYHAIELKSVCLKFAAENLSGYKTYNMKICLTF

SEQ ID NO: 6126 - protein, 290 aa, Zea mays
  Clone ID: TF_ZmC184_1.pep
MDCCICSPVASVYRLPRNAICAPCHQGAKAIIGFLDRDGEREEDDGGGRSVQLQPRGSAKGLRDAWEQVKEMRAREEETRQRAAFLQHGFASAWKEGIHTDIVVKPGTGPAIPAHKAILAARSEVFRHMLSGDDRCKAPAGGSISLPELSHDDLSLLLAFLYTGALEAPGEGGGEASQDQERQLHALLVAADKYDVPFLRRACEARLAAGVAPRNALRTLEVAELSSSAALMERAMGAVVEHAEEVVFSAEYERFAARNAGLCVEITRALLARMPTPARSDGPCLELGSS

SEQ ID NO: 6127 - protein, 232 aa, Zea mays
  Clone ID: TF_ZmC34319_1.pep
CFRVRCDIAIKPFAAATAGDGDAFVAAPPSDDLHRHLGDLLARKDGADVTFQLVDAGGETFSAHRCVLAARSPVFRAQLFGEMMESSKGTGVVIPVEDMEAQVFSALLAFIYTDSLPPETGSGDDDDDDDDEAMVQYQLLLAAADRYGVDRMKLVCQEKLCKHIRADSVATMLVLADRHHCPALKEACFRFLSSSGNLGSFTQTTDGFEVLNASCPAVLKELLAKLATVLIF

SEQ ID NO: 6128 - protein, 245 aa, Zea mays
  unsure (1)..(245): unsure at all Xaa locations
  Clone ID: TF_LIB4756-081-R1-K1-E6.pep
LFYPCPVAVHEHLLRTSDDFVWQVDAMSHGRFTIDVEFLDLRIATNNATESSSVWPNEGMVQKIASKSALGCLSRMLADSIHADVTINTTDGVLKAHKAVLAACSPVFKSMFVHDLREKESSTVDIGDMCVESCSALLGFVYGTIEQGQFWKHRLPLLAAADKYGIGDIKDCCEESLLEDIGSGNVLERLHVAWLYRLERLKKGCLTYLFVFGKIYDVRDEMHGFFHHADRELMXRLFQEVLSVW

SEQ ID NO: 6129 - protein, 422 aa, Zea mays
  Clone ID: TF_ZmC684_5.pep
MGAGRVCRGGPSSASPAAGRPFSTLAASSSASPSSAPSETASTSVTKTVNGSHHFKIAGYSLSKGIGVGKFIASESFNVGGFDWAIYFYPDGKSAEDGAAYVSLFIALASEGTDVRALFELTLVDQSGKGQDKVHTHFGRSLESGPYTLKYRGSMWGYKRFFKRTALETSDYLKDDCLLVNCTVGVVQSHTEGPKIYTIPVPRSNMALHIGQLLTSGKRTDIAFEVDGEMFPAHKVILSARSPVFRAQLFGPMKDKDMKCIKIEDMEAPVFKALLHFMYWDELPDIEELTGVNTTWVSTLMAQHLLAAADRYALERLKLLCELKLCEDVAINTVANTLALAEQHHCYQLKTVCLKFVALPENLKAVMQTDGFDYLQQSCPSLLTELLEYVAKAGEHSVSPCLYSTEVLDGGDANGRRVKPRI

SEQ ID NO: 6130 - protein, 169 aa, Zea mays
  Clone ID: TF_ZmC3486_1.pep
EAGGETFPAHRCVLAARSPVFAAEFFGAMEESKSGSAVHIHDMEARVFKALLHFIYTDLCWKTNEVEEEEEDDVMAQHLLVAADRYNLPRLKLICEDKLCKYIDVGTVATILALAEQHHCHGLKKACFRFLSSPENLKVAVASESFDHLSKNCPSVMKELVAMLGTLLE

SEQ ID NO: 6131 - protein, 428 aa, Zea mays
  Clone ID: TF_ZmC13701_1.pep
MEDEDTGPGDGGEASPPHHVAASSDRARDMVASPTSSRSVTQTVNGSHHFVIQGYSLAKGMGVGKHIASETFTVGGYQWAIYFYPDGKNPEDNSTYVSVFIALASDGTDVRALFELTLLDQSGKGKHKVHSHFDRSLESGPYTLKYRGSMWGYKRFFRRTALEQSDFLKDDCLKINCTVGVVVSTMDYSRPHSIEVPESDIGFHFGTLLDTQEGVDVIFSVAGEKFHAHKLVLAARSPFFRSEFFDHELGEEKNGTDTGDEIKEIVIDDMDPVVFKAVLHFIYRDNLVNDDELSASSSDCSIFDRLSGKLMAAADKYELPRLRLLCESYLCKHISVNSVATTLALADRHHAMELKSVCLKFAAENLSAVIRTEGFDYLKDNCPSLQSEILRTVAGCEEPCSSGLKSQSVWAQLSDGGDTSGRRVRPRV

SEQ ID NO: 6132 - protein, 336 aa, Zea mays
  Clone ID: TF_ZmC868_1.pep
MSGGGPGGACGPDSRVETISRLAQWRIDTFGPCSYRRSDPFKLGIWNWYLSVEKSRSIVVRLFPEPGRVAKEQPPLARFLLRVSWAGPPRRSCVSPVHEHLLRTSDDFIWQVDAMPHGRFTIDVEFLDLRIATNNATESSSVWPNEGMVQKIASKSALGCLSHMLADSIHADVTINTTDGVLKAHKAVLAACSPVFKSMFVHDLREKESSTVDIGDMCVESCSALLGFVYGTIEQGQFWKHRLPLLAAADKYGIGDIKDCCEESLLEDIGSGNVLERLHVAWLYRLERLKKGCLTYLFVFGKIYDVRDEMHGFFHHADRELMHDMFQEVLSVWKPM

SEQ ID NO: 6133 - protein, 297 aa, Zea mays
  unsure (1)..(297): unsure at all Xaa locations
  Clone ID: TF_ZmC868_3.pep
MSGGGPGGACGPDSRVETISRLAQWRIDTFGPCSYRRSDPFKLGIWNWYLSVEKSRSIFVRLFPEPGRVAKEQPPLARFLLRVSWAGPPRRSCVSPGXESSSVWPNEGMVQKIASKSALGCLSHMLADSIHADVTINTTDGVLKAHKAVLAACSPVFKSMFVHDLREKESSTVDIGDMCVESCSALLGFVYGTIEQGQFWKHRLPLLAAADKYGIGDIKDCCEESLLEDIGSGNVLERLHVAWLYRLERLKKGCLTYLFVFGKIYDVRDEMHGFFHHADRELMHDMFQEVLSVWKPM

SEQ ID NO: 6134 - protein, 432 aa, Zea mays
  Clone ID: TF_ZmC13701_2.pep
MDEDAGGASPPPVPLAHVPPLQQPTTAAPSHRDMAASPTSSRSVTETVNGSHRFVIQGYSLAKGMGVGKHIASETFSVGGYQWAVYFYPDGKNPEDNSVYVSVFIALASDGTDVRALFELTLLDQSGKGKHKVHSHFDRSMESGPYTLKYRGSMWGYKRFFRRTALELSDYLKDDCLKINCTVGVVVSTIDYSIPHSIHVPDSDIGYDFGSLLDSQEGADVILNVGGERFHAHKLVLAARSHVFGSQFFDDESDGEKSEVNETDELKEFSIDDMEPNVFKAMLHFIYRDTLVDDDELGASSSDGSIFDTPAAKLLAAADKYHLARLKSLCESYLCKGISVASVASTLALADRHHAMELKAVCLKFAAENLSAVMRSEGFIYLKDNCPSLQSEILKTVAGCEDQCSSVGKSQSVCGQLSDGGDSSCRRVRQRT

SEQ ID NO: 6135 - protein, 256 aa, Zea mays
  unsure (1)..(256): unsure at all Xaa locations
  Clone ID: TF_LIB4729-113-A1-K1-H2.pep
MESKMQGGIVMAGGGKPTWSASAIVATVASGYHILRIDGYSHTMGTPTGEXHRWHIRYYPNGRSSETKEYVSLSLYLHDWVAETVKARFKFRFVGDVAEQPLILGGLHSFDNIDNNWGRPEFIKRKDLEESKHLLDDSFSIRCDVVVPTNEVRVVATAAAAMVSVPPSDLHQHLGILLLTEKGADVVFDVAGETFAAHRCVLAARSPVFSADLFGAMXEGGHTGRRGAHRGHGTSWVFKALLYFLYTDLLTETMKQ

SEQ ID NO: 6136 - protein, 164 aa, Zea mays
  Clone ID: TF_ZmC142074_1.pep
DALFLVTEGKNPINMNSMSSSLARTGQWVFSQDIPTDVVVEVGEANFSLHKFMLVAKSNYIRKLIMESKDSDVTRINLSDIPGGPEIFEKAAKFCYGVNFEITVQNVAALHCAAEFFQMTDKYCDNNLAGRTQDFLSQVALSSLSGANRVLKSCEILLPISRDL

SEQ ID NO: 6137 - protein, 796 aa, Zea mays
  unsure (1)..(796): unsure at all Xaa locations
  Clone ID: TF_ZmC22965_1.pep
MAAPPQPHPQAAEERAAPAVPLPTAPAGPRPYDVAVAAAELRPVDCNLAALCDHVQAEGFGLGAFSDLVVEAAGATYRLHRLILSRSAYFRNMLHGPWREAGAPTVVLHIDDANVDSEAIAIALAYLYGQAPKLNDNNAFRVLAAASFLDLQDLCTICTDFIISELWTSNFLQYQLFAESQDYGSHGERVRNACWGYLCQSATLELREVLPKLSSQTLHALLTSDELWVPNEEKRFELALFTLLAKVTTCEIQVSGNETSLPSADRSMRKGKAPMNESGEELLMDSELKNLKLHDNLGNEIPHNIIAISDMNGEAPKRMEFDCSTGGPSGESTSYQFNENNWISSEQTANNYFSRTFSSGVVPTEWGRPNAPLWGGRVVGRRQIRYIRGSSCLSTDEYNAFMNIFERGSLLYCNMSFDALLSVRKQLEEFGFPCKAVNDSLWLQMLLCHRVQAIVADTCRNCCLMNSSCACKQAYVSSHTHYRQEHDRSSASDNIGNVYLADGQGDGNGVLGPVRVNVRGAVDGLAGIGRGNSNVPGAAWAPTRXVFSRVPYGLGSRNGQQFAIDESEPRIDRNGDISADGLTALVNLSQENNAAHLQDQSLFETGMQTRYRSVPSVSTPGGSSVQMQESKEHEWETTKDATISLDMKTPLSHFPPFRFGVEFDDVHRLADGHVKHSTEVFYAGSLWKVSVQAFNDEDPHGRRTLGLFLHRRKAELLDPLRKAHLYVDPREKVTARYQLICPSKREVMVFGCLKQAGTLLPKAPKGWGWRTAILFDELADLLQGGALRIAAVVQLV

SEQ ID NO: 6138 - protein, 399 aa, Zea mays
  Clone ID: TF_ZmC13598_1.pep
MAIPPRTPSPPPSWSRSVTETVRGSHQFTVRGYSLAKGMGPGRYLASDVFAVGGYHWAVYLYPDGKNAEDNSNYVSVFVALASDGIDVRALFELTLLDQSGRGCHKVHSHFDRSLKFGPYTLKYRGSMWGYKRFYKRTLLEESDFLKNDCLVMNCTVGVVKNRIETPKDIQIHVPRSDMGRCFKELLSRCIGCDITFEVRDEKVRAHKWILAARSPVFKAQFFGPIGKPDLHTVVVEDVEPVVFKAMVNFIYADELPSIPELAGSASTWTSTVVVQHLLAAADRYGLVRLRILCESKLCDELTPETVATTLALAEQHHCAELKSACLKFIALRGNLGAVMETEGFDYLEDTCPSLLSDLLATVAVVDDDLASLNRKRGVSGNQVMALVGSVERRTRRKL

SEQ ID NO: 6139 - protein, 266 aa, Zea mays
  unsure (1)..(266): unsure at all Xaa locations
  Clone ID: TF_LIB4741-097-Q1-K1-A11.pep
CTLVFRHQLGSRHYHYKTDTSRHYTVILGSHRNKRLKIEVDGNTAVDVAAVGLCCSSSFQSYWISIYDGYISIGQGKHPSNNLLFQWLDPDPNPHVQYVGLSSWDKHVGYRNISLLPSAPPNSIFWTQIEYANVHPDADARDYVRKDNCGQRVLADFLENWDFSDAVFVGGTERKVVPAHKLVLCASGDFPFEIGDGATIVLPSASYPVLHSLLEYIYTGSTQIAEWLLSSLLELSSQXXVDPLMKWCKDIIDCLEVDKKPSRSGK

SEQ ID NO: 6140 - protein, 216 aa, Zea mays
  Clone ID: TF_ZmC560263_1.pep
MPGSSGSPAAGYSRSGDGSHSASAIVAGAVTGSHVLKIVFYSRTKEVPNRQVICSRHFRLGGHTWFVKYYPNGNAADKADFISLYLAIHGAVVGKPVKAQVTISLLDQDGKPVPSYTKVTPFVDFAAKGDWGYTEFIERKALEESEHLRDDSFTVRFDVTIMSDIQTVEMPSVVVPPSDMHRHYADLLLSKEGADVKFRIGGQTFTAHRLVLSTRS

SEQ ID NO: 6141 - protein, 179 aa, Zea mays
  Clone ID: TF_ZmC1125_1.pep
FFSIVYQIILIPSTGKRFYAHRIALLASSDAFRAMFDGGYREKDARDIEIPNIRWDVFELMMRFIYTGSVQVTSEIAQDLLRAGDQYLLEGLKRLCEYTIAKDVNLDNVSDMYDLSEAFHAVSLRHTCILYILEHFNKICTRAGSAQLIQRVIPEIRNFLTKALSSSRSPSPSDRNSQT

SEQ ID NO: 6142 - protein, 610 aa, Zea mays
  Clone ID: TF_ZmC2364_1.pep
MTTLRGPAAPVPVDGGGSPFPNLAATARSLSPGHFSHFALPPPARVTATAFHPSPTARGWRRLVGVQGTSAAEMEPDFSTVGGPSFEFAFNEANFSDRELRIEVVAGDYDAPGSTGGGSGGGGLADWARHRKRRREELFKEKESTTYMPDQTNFNEVEAEECDAYEENQEEPVAMMEGSPPDVGQDGDDEQGIDPSWAAVVTPVLRVKTIYISSAILAAKSPFFFKLFSNGMKESDQRHATLRITDSEEIALMELLSFMYSGKLTTTEPTLLLDILMAADKFEVVSCMRYCSQLLTSLQMTTESALLYLDLPCSVSMAAAVQPLTDAAKDFLAVKYKDLIKFQDEVMNIPRAGIEAILSSNDLQVASEDTIYDFLLRWARAQYPKSEERREVLSSRLLPLVRFSHMTCRKLRKVLACTDIDHEQATKCVTEALLFKADAPHRQRALAADAITCRKFAERAYKYRPLKVVEFDRPYPQCIAYLDLKRDECSRLFPAGRIYSQAFHLAGQGFFLSAHCNMEQQSAFYCFGLFLGMQEKGSTSVTVDYEFAARTRPSGEFVSKYKGNYTFTGGKAVGYRNLFAIPWQKFLADDSLFFVDGMLHLRAELTIKQP

SEQ ID NO: 6143 - protein, 290 aa, Zea mays
  Clone ID: TF_ZmC1239096_1.pep
RLLVALVLVYLGAPCDGGVAVALSCHLVDQSCDLRVPLLTTTQGLNTTFRRPLDRSPPIYFGKGKVRDDVQAAAAAGRPLIFKGGSFTVECQIDVHSSRDSDSVSLPSSDLPQHLGELLRNQSGADVTFIVSGESIAAHKSILAARSPIFMAQFFGNMLERGSQCVEIQDMHPAVFKAMLHYIYTDTVPDLGTDTTTVEETAVMAQHLLVAADMYALHRLKEICEERLTRGIGIGTVASTLALADQHNLAQLKAKCIDFITGGSSENLLAVLRRKSTGIWRPATATEFEL

SEQ ID NO: 6144 - protein, 138 aa, Zea mays
  unsure (1)..(138): unsure at all Xaa locations
  Clone ID: TF_LIB189-031-Q1-E1-F6.pep
SPRVRPRVRPRVRPRVRPRVRGCLSHMLADSIHADVTINTTDGVLKAHKAVLAACSPVFKSMFVHDLREKESSTVDIGDMCVESCSALLGFVYGTIEQGQFWKHRLPLLAAADKYGIXDIKDCCXXSLLEDIGSGNVL

SEQ ID NO: 6145 - protein, 252 aa, Zea mays
  Clone ID: TF_ZmC3490_1.pep
MWCQSCKEGYDEEDAGTCKECYEEASETEEELKREIDDLRSRLLFLRLPSPTLDAASAPNCDLLLHAIPSTGAGGERDAGRTPDTPAVPAHRVILASRSPVFRAMLENEMEESRSGVIKIYDVSYDILRAFVHYMYTAEALLDEQMASDLLVLAEKYEVKHLKAYCEKFITSKVNDDNAITHYAFAHRHSAKQLLEASLSVLMANMSTLSDREEYKELVEKDPRLVVEIYEAYLNRQVNTAAGKDTNCSNRK

SEQ ID NO: 6146 - protein, 498 aa, Zea mays
  Clone ID: TF_ZmC1125_2.pep
AAAGALRTLSFKNDENKTQIVQCNALPTLILMLRSEDAAIHYEAVAIIGRLVHSSPKIKKEVLNAGALQPVIGLLSSCCTESQREAALLLGQFASADSDCKVHIVQRGAVRPLIEMLQSADVQLREMSAFALGRLAQDTHNQAGIAYNGGLVPLLKLLDSKNGSLQHNAAFALYGVADNEDYVSDFIKVGGVQKLQDGEFIVQATKDCVAKTLKRLEEKINGRVLKHLLYLMRVGEKSVQRRVALALAHLCAPEDQRAIFIDNNGLDLLLDLLISMSPKHQQDGSAALYKLANKAAALSPMDAAPPSPTPQVYLGEQYVNSSTLSDVTFLVEGKRFYAHRIALLASSDAFRAMFDGGYREKDARDIEIPNIRWDVFELMMRFIYTGSVQVTSEIAQDLLRAGDQYLLEGLKRLCEYTIAKDVNLDNVSDMYDLSEAFHAVSLRHTCILYILEHFNKICTRAGSAQLIQRVIPELRNFLTKALSSSRSPSTTDDRNLQT

SEQ ID NO: 6147 - protein, 417 aa, Zea mays
  Clone ID: TF_ZmC2315_13.pep
SCVVETQPILLVSFADQPRLCQSVCLVWLAGAIIHHSSVAEHMRGADGHGGGRVAGQLPGAEQRVVRRRHLLLDVHGDAAELLDDAEHLVDGAEAGAEFGGASAEHGVLLLDARVLRRDVGRRGPPRARSRPAGAPPPGPARPGAAASAAATAAPTRGSTAAASRAGACPPPSRRPTRTSSPPATATTTTSRHALFSPGRSGYFTSNKIPLSLALVLVLLFFGGCSGRQERREKQEGTERERERERERERERERERERARGMADPEEGKLRDHIKPVEEDDREGVEEAGAAQVSGDLHKAQRFRINMLLLLLSQTMAGENETSLQRKEPRRTPTQRFVWISGPGRAAVPGLANRAELRSWEAGLLDLWRRNELKSRQARAGCGEEGEPLQSEAERREGGGDQAERGGVFNAGTRASL

SEQ ID NO: 6148 - protein, 158 aa, Zea mays
  unsure (1)..(158): unsure at all Xaa locations
  Clone ID: TF_ZmC69637_1.pep
MTLSGGASSGSSHGTRSLGSEGDMVHRMELMRKRRMESNRESAKRSRQRKQQHLDDLNSQVDKLRTTKQQLMXALNMTSMHYAQQAAQNSVLRTQMMELQSRLCALREIICHMYATTTNVHPATVMGGAATYHTFGETAWNSGSCSMQMVDHLLHQCF

SEQ ID NO: 6149 - protein, 101 aa, Zea mays
  unsure (1)..(101): unsure at all Xaa locations
  Clone ID: TF_LIB3245-236-P1-N1-H1.pep
RRRRMIKNRESAARSRARKQAYSMEFEAQVQKLKKANXEPEKEPAKIIGIANNQGLKIVEGSIRPKKPVCSRRTFTGPCGQMPITQHKFHFLHTCRGAWDL

SEQ ID NO: 6150 - protein, 327 aa, Zea mays
  unsure (1)..(327): unsure at all Xaa locations
  Clone ID: TF_ZmC5838_3.pep
MADASPRTETSTDDTDDNNGLEPGRGGLVASDSSDRSKDKHGDQKTLRRLAQNREAARKSRLRKKAYVQQLENSRLKLTQLEQELQRARQQIFSLXGIFISSSVDQSHSMSGNGALAFDMEYARWLEEHNRQISELRAGVSAHASDTDLRSVVDKIMSHYDEIFRLKGNAAKADVFHVLSGMWKTPAERCFLWLGGFRPSEVLKLLSTQLEPLTEQQLSGISNLQQSSQQAEDALSQGMEALQQSLAETLAGSLSSSGSTGNVANYMGQMAMAMGKLGTLENFLRQTLQQMQRILTTRQSARALLVISDYSSRLRALSSLWLARPKE

SEQ ID NO: 6151 - protein, 227 aa, Zea mays
  Clone ID: TF_ZmC179456_1.pep
HWVPRGRPGCSMIDAMQAVSLISCNIANAVPHLTRPSPHACAHTHTHTHTIYLSTYTLPACLQLQLQPITIYTQLASFTYRKHPDRQDQRQRQRCRQEAGRALHSPTPAETKVMAQLPPRAPGGAAPQDHWSAAGEFLGFAAARRGAHRRSASDSAAFLEALPMEDVIGGDGFDRLDDDQLMSMFSDVDAPAVSAGDAAQLMDVADADADDDGSAVLVARRRGRRLR

SEQ ID NO: 6152 - protein, 123 aa, Zea mays
  unsure (1)..(123): unsure at all Xaa locations
  Clone ID: TF_ZmC342438_1.pep
RQAGSGRWKETTCRICRHHRCRTFFCAGLRGRKPPAVEKVVERRQRRMIKNRELAARSRGRKQAYMMELEAEVAKLKELNDELQKXQVEMLEKQKNEVLERMRRQVGPTIKRICLRRTLAGLW

SEQ ID NO: 6153 - protein, 258 aa, Zea mays
  unsure (1)..(258): unsure at all Xaa locations
  Clone ID: TF_ZmC1889_3.pep
MELYSGYLDDHFNPHKLSIAGSAVSPPEYMASASPAQFAAAPLRMGYGRPAPAPPPPVMGMWSSEPFRVDSGSAHATSASTVNTKLEETRLEDDVVALEPARSTEQETSRPPERAQRRLAQNREAARKSRLRKKAYIQQLETSRMKLSQLELELQRARQQQGAYANXGSMGDSALGYTCPIDPGVAXFEIDYWHWVDEQKRHTTELMSALQGQQTSSTSELELRLLVETGLSNYEHLFRIKAVASNADVFHVMSGVWK

SEQ ID NO: 6154 - protein, 267 aa, Zea mays
  Clone ID: TF_ZmC5008_2.pep
MDDGDLDFSNPDTYLCPALGTDPPSSCSMDSYFDEILKDTEHLACTHTHTCNPPVHDLSHTHTCVHVHTKIVAASPGDAESPSENNSNGNAASKKRPSGNRAAVRKYREKKKAHTASLEEEVVHLRALNQQLMKKLQSHAALEAEAARLRCLLVDIRGRIEGEIGAFPYQRPPAVKNVDLLSSVDQESLLGSAAAQVANSCDFRCNHQMYCNPGMQGAISGQVLGQGACDVASMQCIGSTKSGSTKLPVCGGLDTLPAVCLPNVEKK

SEQ ID NO: 6155 - protein, 213 aa, Zea mays
  unsure (1)..(213): unsure at all Xaa locations
  Clone ID: TF_ZmC5008_5.pep
MDDGDLDFSNPDTYLCPALGTDPPSSCSMDSYFDEILKDTEHLACTHTHTCNPPVHDLSHTHTCVHVHTKIVAASPGDAESPSENNSNGNAASKKRPSGNRAAVRKYREKKKAHTASLEEEVVHLRALNQQLMKKLQSHAALEAEAARLRCLLVDIRGRIEGEIGAFPYQRPPAVKNVDLLSSVDQESLLGSAAXPVANSCDFRXNHQMYCTP

SEQ ID NO: 6156 - protein, 171 aa, Zea mays
  unsure (1)..(171): unsure at all Xaa locations
  Clone ID: TF_ZmC30857_4.pep
ALTQSRRMPRSPQLSLSGCSSLFSLSSTSTSRDSAALKAPVPPRRTPLLSLSVGEEEEDEGEDEEEYLLGAGALDLQLTGPGGGSNSSGGYDDERKNIRMMRNRESALRSRARKRVRTRIXAAQPMSLSDTQTLQAYVQELEKEVRRLVNENLKLKRQCKQVTNSSTLCLL

SEQ ID NO: 6157 - protein, 109 aa, Zea mays
  unsure (1)..(109): unsure at all Xaa locations
  Clone ID: TF_LIB4666-020-R1-K1-A2.pep
MADASPRTETSTDDTDDNNGLEPGRGGLVASDSSDRSKDKHGDQKTLRRLAQNREAARKSRLRKEAYXQQLENSXAKLTQLEQELQRARQQGIFISRSVDQSHSMSGNG

SEQ ID NO: 6158 - protein, 154 aa, Zea mays
  Clone ID: TF_LIB4765-018-Q1-K1-C1.pep
RALAHLLLALLCWQWTCAEWRSIRTWFDFFISLENGQSGAMVPASNSSDRSDRSDKPMDQKVLRRLAQNREAARKSRLRKKAYVQQLESSKLKLASLEQELQKARQQGIFISSSGDQTHTMSGNGAMTFDLEYSRWQEEQNKQINELRTAVNAH

SEQ ID NO: 6159 - protein, 335 aa, Zea mays
  Clone ID: TF_ZmC1124_1.pep
MADASSRTDTSTVLDMDDKNQRLENGQSGAMALASNSSDRSDRSDKPMDQKVLRRLAQNREAARKSRLRKKAYVQQLESSKLKLASLEQELQKARQQGIFISSSGDQTHAMSGNGAMTFDLEYSRWQEEENKQINELRTAVNAHASESDLRLIVDGIMAHYDEIFRLKGIAAKADVFHILSGMWKTPAERCFLWLGGFRSSELLKLLVNQLEPLTEQQLMGLSNLQQSSQQAEDALSQGMEALQQSLAETLAGSLGPSGSSGNVANYMGQMAMAMGKLGTLENFLRQADNLRQQTLHQMQRILTIRQAARALLAIHDYFSRLRALSSLWLARPRE

SEQ ID NO: 6160 - protein, 360 aa, Zea mays
  unsure (1)..(360): unsure at all Xaa locations
  Clone ID: TF_ZmC1124_2.pep
MADASSRTDTSTVVDMDDKNQRIILRNFNFSLWDIXWYRSWRDACKVLENGQSGAMVPASNSSDRSDRSDKPMDQKVLRRLAQNREAARKSRLRKKAYVQQLESSKLKLASLEQELQKARQQGIFISSSGDQTHTMSGNGAMTFDLEYSRWQEEQNKQINELRTAVNAHASDSDLRLIVDGIMAHYDEIFRLKGIAAKADVFHILSGMWKTSAERCFLWLGGFRSSELLKLLVNQLEPLTEQQLMGLSNLQQSSQQAEDALSQGMEALQQSLAETLAGSLGPSGSSGNVANYMGQMAMAMGKLGTLENFLRQADNLRQQTLHQMQRILTIRQAARALLAIHDYFSRLRALSSLWLARPRE

SEQ ID NO: 6161 - protein, 151 aa, Zea mays
  Clone ID: TF_ZmC1124_8.pep
MADASSRTDTSTVVDMDDKNQRLENGQSGAMVPASNSSDRSDRSDKPMDQKVLRRLAQNREAARKSRLRKKAYVQQLESSKLKLASLEQELQKARQQGIFISSSGDQTHTMSGNGAMTFDLEYSRWQEEQNKQINELRTAVNAHASDSDLR

SEQ ID NO: 6162 - protein, 252 aa, Zea mays
  unsure (1)..(252): unsure at all Xaa locations
  Clone ID: TF_ZmC592431_1.pep
RPLCKRRGGRRPLNLNQWQQRVHPPPPAASPRPCPGSLLAAPASLPSNDLGIDPGLLLFENYSPYLEFLPADYNGFDGATWDFGNIANNNNTTAATNDNDVQNFSGDGLFDNIMIPELNVLDTQSSLDVAGDGFLSQEQPLLTVNSTTPIEYPATASSSSSTPHPPPTIRTKSPTSTSAIPGTSTFSLHPSPSSSSSSSSSRKRKSSPEEEDSAVTLKRQRNTLAARKYXQKRIDRITELEEALAAKAKECD

SEQ ID NO: 6163 - protein, 395 aa, Zea mays
  unsure (1)..(395): unsure at all Xaa locations
  Clone ID: TF_ZmC104_72.pep
EALIHGGGAASAGGGVDPGVIIKNDVAQAKXGNSQSVGSTGTDSSSAQNTMSQMELVSPASSAPRQEVMMVTTDDYSYKPGLAAAPAAAAPPSFQQHHPLPLQLHGGEGGGDHDKTERRLAQNREAARKSRLRKKAYVQQLETSRIRLQQVEHELQRARSQGLFVGGCSAAGDMSSGAAMFDMEYARWLDDDTKRLAELRGGLQAHLLDGNLGLIVEECMQHYDELFQLKAALARSDVFHLLTGSWATPAERCFFWMGGFRPSELLKILIPQLDPLTEQQLLGICNLQQSSEQAEEALAQGLHQLHQSLADTVAAGTLNDGAAAPNYMNIMAVALEKLASLENFYQQADNLRHQTLHQMRRILTTRQAARCFLSIGEYYSRLRALSNLWASRPRE

SEQ ID NO: 6164 - protein, 375 aa, Zea mays
  Clone ID: TF_ZmC14082_3.pep
MESRRGGSVAEDASGAMTSFGPPQHGINTDVNSMQPSRVTDFGALAQSAGFRIEDLVNLNANALFNLKSNTHTINNIPLQFGSYGKFEQGLVAVPTASDSSDKSRDKLDQKTLRRLAQNREAARKSRLRKKAYIQNLESSRLKLTQLEQELHQTRQQGIFISTSGDQPQSTSGNGALAFDMEYARWLEEHNKHVNELRLAVNAHAGDNDLRGIVGSVMAHYDEFFRLKGVAARSDVFHVLSGMWKTPAERCFMWLGGFRSSEVLKQSSQQAEDALSQGMEALQQSLAETLASGSLGPAGPSGNVANYMGQMAMAMGKLGTLENFLRQADNLRLQTLQQMQRILTTRQSARALLAISDYFSRLRALSSLWLARPRE

SEQ ID NO: 6165 - protein, 449 aa, Zea mays
  unsure (1)..(449): unsure at all Xaa locations
  Clone ID: TF_ZmC14082_4.pep
MESRRGGSVAEDASGAMTSFGPPQHGINTDVNSMQPSRVTDFGALAQSAGFRIEDLVNLNXNNTDVNSMQPSRVTDFGALAQSAGFRIEDXLTLMQGLKYPSLLIICLSALENWGESAMAGSPMTDTSTDPDTDERNQMFEQGLVAVPTASDSSDKSRDKLDQKTLRRLAQNREAARKSRLRKKAYIQNLESSRLKLTQLEQELHQTRQQGIFISTSGDQPQSTSGNGALAFDMEYARWLEEHNKHVNELRLAVNAHAGDNDLRGIVGSVMAHYDEFFRLKGVAARSDVFHVLSGMWKTPAERCFMWLGGFRSSEVLKLLAGHLEPLTDQQLVGISNLQQSSQQAEDALSQGMEALQQSLAETLASGSLGPAGPSGNVANYMGQMAMAMGKLGTLENFLRQADNLRLQTLQQMQRILTTRQSARALLAISDYFSRLRALSSLWLARPRE

SEQ ID NO: 6166 - protein, 181 aa, Zea mays
  unsure (1)..(181): unsure at all Xaa locations
  Clone ID: TF_LIB4729-141-A1-K1-C7.pep
MENGSGAVVPSNSSDRSDRSDKPLDQKTMRRLAQNREAARKSRLRKKAYVQQLESSKLKLAQLEQELQKARQQGIFISSSGDQTHAMSGNGALTFDIEYARWLEDQNKQINELRTAVNAHASDSDLRLIVDGIMAHYDEIFKVKGVAAKADVFHILSGMWKTPGXKCFLWXLXGFRPSELL

SEQ ID NO: 6167 - protein, 172 aa, Zea mays
  Clone ID: TF_LIB4766-040-R1-K1-D1.pep
MPTRLAPHRRSHTMENGSGAVVPSNSSDRSDRSDKPLDQKTMRRLAQNREAARKSRLRKKAYVQQLESSKLKLAQLEQELQKARQQGIFISSSGDQTHAMSGNGALTFDIEYARWLEDQNKQINELRTAVNAHASDSDLRLIVDGIMAHYDEIFKVKGVAAKADVFHILSGM

SEQ ID NO: 6168 - protein, 118 aa, Zea mays
  unsure (1)..(118): unsure at all Xaa locations
  Clone ID: TF_ZmC1124_10.pep
MADASSRTDTSIVLDDNDKNHRMENGSGAVVPSNSSDRSDRSDKPLDQKTMRRLAQNREAARKSRLRKKAYVQQLESSKLKLAQLEQELQKARQQGIFFSSSGDQTHAMXSGNGAFDF

SEQ ID NO: 6169 - protein, 185 aa, Zea mays
  Clone ID: TF_ZmC1124_3.pep
MADASSRTDTSIVLDDNDKNHRMENGSGAVVPSNSSDRSDRSDKPLDQKTMRRLAQNREAARKSRLRKKAYVQQLESSKLKLAQLEQELQKARQQGIFISSSGDQTHAMSGNGALTFDIEYARWLEDQNKQINELRTAVNAHASDSDLRLIVDGIMAHYDEIFKVKGVAAKADVFHILSGMWKTP

SEQ ID NO: 6170 - protein, 283 aa, Zea mays
  unsure (1)..(283): unsure at all Xaa locations
  Clone ID: TF_ZmC1124_4.pep
MAGGSVPSVQVGLTSSGPKFRPGPSARPPDSPLGGVGFVSPTTHPPLSSPLLQGLACLVSCVPPPPAMPTRLAPHRRSHTMENGSGAVVPSNSSDRSDRSDKPLDQKTMRRLAQNREAARKSRLRKKAYVQQLESSKLKLAQLEQELQKARQQGIFISSSGDQTHAMSGNGALTFDIEXARWLEDQNKQINELRTAVNAHASDSDLRLIVDGIMAHYDEIFKVKGVAAKADVFHILSGMWKTPAERCFLWLGGFRPSELXKLLANHLEPLTEQQMLGLTNLQQ

SEQ ID NO: 6171 - protein, 207 aa, Zea mays
  unsure (1)..(207): unsure at all Xaa locations
  Clone ID: TF_ZmC1124_6.pep
MIAMNPDMVLLSWKQMENGSGAVVPSNSSDRSDRSDKPLDQKTMRRLAQNREAARKSRLRKKAYVQQLESSKLKLAQLEQELQKARQQGIFISSSGDQTHAMSGNGALTFDIEYARWLEDQNKQINELRTAVNAHASDSDLRLIVDGIMAHYDEIFKVKGVAAKADVFHILSGMWETPAXRCFLWLXGFRPSELXKLLANHLEPLTE

SEQ ID NO: 6172 - protein, 127 aa, Zea mays
  unsure (1)..(127): unsure at all Xaa locations
  Clone ID: TF_ZmC1124_7.pep
GSHYALAPLKVFVGYDQTISTNFEQAFLQLVLPLAYQMENGSGAVVPSNSSDRSDRSDKPLDQKTMRRLAQNREAARKSRLRKKAYVQQLESSKLKLAQLEQELQKARQQGIFISSSGDXTHAMSGN

SEQ ID NO: 6173 - protein, 329 aa, Zea mays
  Clone ID: TF_ZmC5838_1.pep
MADASPRTETSTDDTDDNNGLEPARGGLVASDSSDRSKDKHGDQKTLRRLAQNREAARKSRLRKKAYVQQLENSRLKLTQLEQELQRARQQGIFISSSVDQSHSMSGNGALAFDMEYARWLEEHNRQISELRAGVSAHASDTDLRSVVDKIMSHYDEIFRLKGNAAKADVFHVLSGMWKTPAERCFLWLGGFRPSEVLKLLSTQLEPLTEQQLSGISNLQQSSQQAEDALSQGMEALQQSLAETLAGSLSSSGSTGNVANYMGQMAMAMGKLGTLENFLRQADNLRLQTLQQMQRILTTRQSARALLVISDYSSRLRALSSLWLARPKE

SEQ ID NO: 6174 - protein, 146 aa, Zea mays
  Clone ID: TF_ZmC30857_3.pep
RSPQLSLSGCSSLFSLSSTSTSRDSAALKAPVPAPPAGAVPPRRTPLLSLSVGEEEEDEGEDEEEYLLGAGALDLQLTGPGGGSNSSGGYDDERKNIRMMRNRESALRSRARKRELEKEVRRLVNENLKLKRQCKQVTNSSTLCLL

SEQ ID NO: 6175 - protein, 375 aa, Zea mays
  unsure (1)..(375): unsure at all Xaa locations
  Clone ID: TF_ZmC1889_1.pep
MTPAASPAQFAPAPLRMGYGRPAPVMGMWSSEPFKVDSGGHATCSASTVMEADTKLETSRLEDVPQVALEPERSTDQETSRPPERVMRRLAQNREAARKSRLRKKAYIQQLETSRMKLSQLELELQRARRQQGAYANSXMGDPALGYTCPIDPGVAGFEIEPKAHQRTRRRRIVAVRCILSQAVKSSGGRKKRPHRKKKKKKMFKIKAAAANADVFYVMSGLWKTPAERFFLWIGGFRPSEVLKILSPQLEPLAEAQRMLVGGLQHTSAQAEDALSQGMEKLQQNLAETLTAEADPFGPPDPYMLQMATAVGILKELVNFVTQADHLRLTTLQQMHKILTPRQAARGLLALGDYFQRLRTLSSMWAARPREAAVS

SEQ ID NO: 6176 - protein, 131 aa, Zea mays
  Clone ID: TF_LIB4759-003-R1-N1-G7.pep
RSFQPPQAKVMRRLAQNREAARKSRLRKKAYIQQLETSRMKLAQLELELQRARRQQGAYANGSMGDSALGYTGSIDPGVAAFEIEYRHWVDEQKRHTAELMSALQGQQTSSTSELELRLLVETGLSNYEHL

SEQ ID NO: 6177 - protein, 146 aa, Zea mays
  Clone ID: TF_LIB3900-010-Q1-K6-E6.pep
IASVRYLSPAAGAASLRPHYRDDFLFQFQYSDLLLAPAHPSLYQDVADHLVLGASFPAAGDNRSSSEESDAYLQRSLAEERRKRRMVSNRESARRSRVRKQKQLSELWAQVVHLRGTNRQLLDQLKCSTVSRRIRSQPTRPLVLDR

SEQ ID NO: 6178 - protein, 498 aa, Zea mays
  Clone ID: TF_ZmC2115_2.pep
EGALIVCVRHRRMGDTSSSSHSRQDPSLLGYGFHGAIANSTPPANFFDQGGGGTYFGELEEAFMHQVASLRRTQQAATVSAPHHGDTKPFPTAAGATAATATATARPPPTLDIFPAWPMRSRLHTPKECSNVTADSTDDSESSSKNHSNHSSDQLGAAAAANMASQFEQASQQQLQHKNMATSSTPRTGKALDPKVIRRLAQNREAARKSRLRKKAYIQQLESCKLKLSQMEQDMQRARTQGLFLGGDPGASTSSGAAMFDVEYARWLDNHSRRLAELNGALHAHLADGDLRAIVDDALTHHDELFQLKAMAAKSDVFHLITGVWTTPAERCFLWMGGFRPSDLLKTLLPQLDPLTEQQVVGICSLQQSSQQAEEALSQGLEQLHQSLADTMAGGSLTDDANMSFMSQMALALGKLANLEGFVIQADNLRQQTLHQMHRILTVRQAARCLLAIGEYHNRLRALSSLWASRPREILVTDEGNCEISIAAQPSQNQFSTF

SEQ ID NO: 6179 - protein, 129 aa, Zea mays
  unsure (1)..(129): unsure at all Xaa locations
  Clone ID: TF_ZmC2202_6.pep
SQLISQASFDGDIDGASLVTNSNVIEDDDFQGKPTNSGTSKELSDDDGDLEENTDPANAKKMRRMVSNRESARRSRKRKQAHLTDLESQVNXENASLLKRLADMTQKYKDASVDNKNLTVDVETMRRKV

SEQ ID NO: 6180 - protein, 314 aa, Zea mays
  unsure (1)..(314): unsure at all Xaa locations
  Clone ID: TF_ZmC2640_1.pep
RDRMENGSGAVVPSNSSDRSDRSDKPLDQXTMRRLAQNREAARKSRLRKKAYVQQLESSKLKLAQLEQELQKARQQGIFISSSGDQTHAMSGNGALTFDIEYARWLEDQNKQINELRTAVNAHASDSDLRLIVDGIMAHYDEIFKVKGVAAKADVFHILSGMWKTPAERCFLWLGGFRPSELLKLLANHLEPLTEQQMLGLTNLQQSSQQAEDALSQGMEALQQSLAETLAGSLGPAGSSGNVANYMGQMAMAMGKLGTLENFLRQADNLRQQTLHQMQRILTIRQASRALLAIHDYFSRLRALSSLWLARPRE

SEQ ID NO: 6181 - protein, 468 aa, Zea mays
  Clone ID: TF_ZmC14082_2.pep
MESRRGGSSAAAAEDAGGAMPSFGPTQHAIRADVNSMQPSRVTDFGALAQSAGFRIEDLANLNANALFNLKPNSHTIDNSPLQFGNYGKSISSHINTTEATTAATRIDPQLSAQQTGAQPILVALPTGNMENWGESAMADSPMTDTSTDPDTDERNQMFEQGLVAVPTASDSSDKSRDKLDQKTLRRLAQNREAARKSRLRKKAYIQNLESSRLKLTQLEQELQRARQQGIFISTSGDQPQSTSGNGALAFDMEYARWLEEHNKHVNELRAAVNAHAGDNDLRCIVDSIMVHYDEIFKLKGVAAKADVFHVLSGMWKTPAERCFMWLGGFRSSELLKLLAGHLEPLTDQQLVGISNLQQSSQQAEDALSQGMEALQQSLAETLASGSLGPAGPSGNVANYMGQMAMAMGKLGTLENFLRQADNLRLQTLQQMQRILTTRQSARALLAISDYFSRLRALSSLWLARPRE

SEQ ID NO: 6182 - protein, 121 aa, Zea mays
  unsure (1)..(121): unsure at all Xaa locations
  Clone ID: TF_LIB3159-013-Q1-K1-D3.pep
SDSFSHDDDDSRPRDKVQRRVAQNREAARKSRLRKKAYIRNLETSRVKLAQLEQELIMARRQQVRXGAYGVGGGVAPPAAPVDPRVAAFELEYAHWVEEQSRQATELRAALQSHAPDVQLR

SEQ ID NO: 6183 - protein, 152 aa, Zea mays
  unsure (1)..(152): unsure at all Xaa locations
  Clone ID: TF_LIB4741-023-Q1-K1-G4.pep
MASASPAQFAAAPLRMGYGRPAPAPPPPVMGMWSSEPFRVDSGSAHATSASTVNTKLEETRLEDDVVALEPARSTEQETSRPPERAQRRLAQNREAARKSRLRKKAYIQQLETSRMKLSQLELELXRARQQQGAYANSGSMGDSALGYTCPI

SEQ ID NO: 6184 - protein, 213 aa, Zea mays
  unsure (1)..(213): unsure at all Xaa locations
  Clone ID: TF_LIB4765-063-R1-K2-F8.pep
MTPAASPAQYMTPAPLRMGYGRPAPVMGMWSSEPFKVDSGGHATCSASTVMEADTKLETSRLQDDVPQVALEPERSTDQETSRPPERVMRRLAQNREAARKSRLRKKAYIQQLETSRMKLAQLELELQRARRQQGAYANGSMGDPALGYTGSIDPGVAAFEIEYRHWVDEQKRHTAELMSALQGQQTSSTSELELRLLVETXLSNYEHLFRIK

SEQ ID NO: 6185 - protein, 164 aa, Zea mays
  Clone ID: TF_ZmC30857_2.pep
GSHSPGDEPPSPAPAHRPSSLPWSAALPVPHHPDLLPLVVVAAAAVAAATGPRQLQIQGAGPQQVLLLVLTLVLFLLADAERQERGAPWGHRRLQGGAVAARTGAGQGEERAAAAQAQLRAPRHPPWIGLELRAAGSTIAASGQRRTHTDGLDHAKCDSSSLPG

SEQ ID NO: 6186 - protein, 349 aa, Zea mays
  unsure (1)..(349): unsure at all Xaa locations
  Clone ID: TF_ZmC34730_1.pep
MMMANAKLHKQALLPPRSPFPTAAPYADRGPIARPQVGSTHHRHGHHQRTSSESFIEEQPPSWLDDLLNEPETPAARQSGRAGHRRSSSDSFALFDGGAAXLVLTPMVSRGWGEEVGNLRRGAVCRSTMPSWPRLGGHMAGRGSKACRIRRASGMVVACQCPQKIRLVGIMGHRKCRGSMTMAXDKRTDDAGHDQKVGAKEGVPPKHAQSEADNKRAKQQYAQRSRVRKLQYIAELESRVQALQSEGVEVSAEMEFLSQQNIMLDLENKALKQRVESLAQEQLIKRFQQEMFEREIGRLRTIYQQQQQQQAPALVRSNSRDLDVQFANLSLKHKDPNTGRDALSGPLRT

SEQ ID NO: 6187 - protein, 150 aa, Zea mays
  unsure (1)..(150): unsure at all Xaa locations
  Clone ID: TF_LIB5117-060-A1-PF1-H9.pep
MADASSRTDNSTVLDNDGKIYRLEQGQSGGAIMASNSSDRSDRSDKPLDQKTLRRLAQNREAARKSRLRKKSYVQQLESSKLKLAQLEQELQKARQQGIFISSSGDQTHAMSGNGAMTFDLEYTRWLEDXXXQIHELRTAVNAQCSDSDL

SEQ ID NO: 6188 - protein, 363 aa, Zea mays
  Clone ID: TF_ZmC1399_1.pep
LREAQEKSGSLSSDSNSEMAYASPGTDDTSTDLDTDEKNHMLELGQLVSLTASDSGNKAKDKLLGQKALRRLAQNREAARKSRLRKKAYVEQLENSRLKLSQLEQELQRARQQGIFIPTPGDDQQPNSTSEKGALAFDKDYAGWEDEHRKQISELRAALSAHAGDDELRRIVDGVMAHHHEAFRLKCVAARADAFHVLSGMWKTPVERCFMWLGGFRPSEILKFLASHLDPLTERQLASVHGLQQSSQQAEEGISQRVQALQQSVAETLASSGSPCLPVPAGRAPPPGDDAAPDCSGTMAAAVAKLVALESLVHEADGLRRQTLEQMQRVLTTRQSARALLVISDYLSRLRALSSLWIARPRE

SEQ ID NO: 6189 - protein, 363 aa, Zea mays; identical to SEQ ID NO: 6188
  Clone ID: TF_ZmC1399_2.pep

SEQ ID NO: 6190 - protein, 179 aa, Zea mays
  unsure (1)..(179): unsure at all Xaa locations
  Clone ID: TF_ZmC1399_3.pep
LREAQEKSGSLSSDSNSEMAYASPGTDDTSTDLDTDEKNHMLELGQLVSLTASDSGNKAKDKLLGQKALRRLAQNREAARKSRLRKKAYVEQLENSRLKLSQLEQELQRARQQGIFIPTPGDDQQPNSTSEKGAXLAFDRDYAGWEDEHRKQISELRAALSAHAGDDELRRIVDGVMAH

SEQ ID NO: 6191 - protein, 452 aa, Zea mays
  Clone ID: TF_ZmC3233_1.pep
LEAWPRELQPAAAAPYYFGELEEALIHGTRTSVDHGMIGSDVDTERKTAGYLAARPPTLEIFPSWPMSHLQQPYSGNSHSVGSTTESSSGQNSMPQTELVSPGSMRADSGQRQELLMVTVDDYNYEQGLGAAATTAPIFQQHAAGQDKGKHGSTRKDGRLLDAKTERRLAQNREAARKSRLRKKAYVQQLETSRIRLQQIEQELHGARSQGLFPGGGGAAGDLSSGAVIFDMEYARWLEDDASRMTELQAVLQPQIIDANLGAIVEDCMRHYDELFHLRAMLARSDVFHLMTGLWATTAERCFLWMGGFRPSEILKMLIPQLDPLAEPQLLGMYNLQRSSEQTEEALVQGLQQLHQSLADAVGASPLSDGANVANYTALMALALDRLDTLESFYRQADSLRQQTLHQMRRILTTRQTARCFVSISEYHRRLRALSSVWASSRPPTPPSEGVV

SEQ ID NO: 6192 - protein, 105 aa, Zea mays
  Clone ID: TF_LIB3279-234-Q6-N6-E9.pep
VDRRQKRMIKYHESAARSRARKQAYTIELENKVARLEEENKRLIELKVLKPLEPLEPPPAEQNKKQPPPQPKRKQPQPPPPPPPPIQQLPPKHRHDLRRTNSATF

SEQ ID NO: 6193 - protein, 108 aa, Zea mays
  unsure (1)..(108): unsure at all Xaa locations
  Clone ID: TF_LIB3060-074-Q1-K6-A2.pep
XGERLSSKNGGWRRRRRRRGGGELRRQRRRRPRRIRRGAQEEARPVLRRRRQIHGDIDGASLVTNSNVIEDDDFQGKPTNSGTSKELSDDDGDLEENTDPANAXKMRS

SEQ ID NO: 6194 - protein, 218 aa, Zea mays
  Clone ID: TF_ZmC3114_3.pep
KGKGKGGGASPEKGSSGAPSGEDDSRSSDSGSDESSETRDDDTDHKGSSAPKKRKSGNTSAEGEPSQAAVVRYATVESPYPAKGRSASKLPVSAPGRAALPSATPNLNIGMDIWNTSPALAVPAVQGEANPGLALARRDSVTQLDERELKRERRKQSNRESARRSRLRKQVVLESVHPHFLQNGMVKNIQTHAHTRTCSLVPVNLVKICLQDNSRQVG

SEQ ID NO: 6195 - protein, 382 aa, Zea mays
  unsure (1)..(382): unsure at all Xaa locations
  Clone ID: TF_ZmC3100_2.pep
MAQLPPRIPTEVHHWPEGGQHGAAAAAWADDFAEFAAARRGAHRRSLSDSVAFVEVAPADGGAGEFDRLDDDQLLSMFPPDEAGGSGGGGGSSAAGSENGGSSDSDGDKRGARGGPAGGAPSTGSGGGEQNGVVDAQAPATGGQAAVVASTELIRDPKRVKRILANRQSAQRSRVRKLQYISELERSVTTLQLTCCXVHAEPCSRRLHSAAHVVLHVYWNLKPECKGGKKKNPDQSKNMHGDSFSFMVSSTVPRVKNFVGVACLLACYCSARCCVVVTLXPTVCLPCACLQNEVSVLSPRVAFLDQQRTILSVGNSHLKQRIAALAQDKIFKDAHQEELKKEIERLRRVYDQQNLRMSAGGAAASDHGPPPPVVRAEKELMS

SEQ ID NO: 6196 - protein, 153 aa, Zea mays
  unsure (1)..(153): unsure at all Xaa locations
  Clone ID: TF_LIB4699-001-R1-K1-D1.pep
VVWLVXPXXRCGACAGRRWXWRPPGWAPPWXAXAGRPPXSPPXCPWXRRXXPRXVGAPRCRCGGGRXARRRGPXARCSLAXRGCSGSXCRRRGPXRARCRPAGAXPPXXARXGAAASXAGXAAPXRGSXAGASRACACPPPCRRPXRXSSPPS

SEQ ID NO: 6197 - protein, 320 aa, Zea mays
  Clone ID: TF_ZmC15860_2.pep
MSRSPHLPPRCPPLGPQITRRDDGMFTQSCRFPSGDTFIGEPPCWLDDLLEDSGKAPKLPPLRRACSDSDAILDALSTFQSPIYPIEECDLNSGGEAEDLLGGVEGDESGSVVEASCFYGPNSPRQKSRLTTSESSMVNAVLENVPGNPLQYLTIDACSDVNGNVANVTADACDAFGHPDQDKSFKRRSGQRSRVRKLQYIAELERTVESLQNIGADLAVRVSSLFQLHNALSMENKQLRVQISSLQRAKLIKDGQTQALKNEAERLKRMSARRSRSATASCYDPGSFSFGADASSVSWQMPDMARLSLNGGSPRGSYGL

SEQ ID NO: 6198 - protein, 240 aa, Zea mays
  Clone ID: TF_ZmC13996_1.pep
MRGGGQVASLAGAPEFFPEPASFGRPWESRQMYRQGGGMPMPGREKNGGRHGPSSSFGEHELGHVPNGVNRKAHGDAAYDQRIVIERKEGLRHSQSETDTKRAKQQYAQRSRVRKLQYIAELERRVQSLQTEGIEVTAEMDFLGQQNIMLDLENKALKQRLESLSQEHLIKRYQQEMFEREIGRLRTLFQQQQQQQHVPQQQAPTHSRSNSRDLDSQFANLSLKHSDPSSGRDAISGLRI

SEQ ID NO: 6199 - protein, 144 aa, Zea mays
  unsure (1)..(144): unsure at all Xaa locations
  Clone ID: TF_LIB4762-034-R1-K1-F3.pep
MPQTAVSTTAGRTSGSDGDSWADTHRREKGRLSNRETPREAGLRKQHNLDELEQEVARLXADNARVGARATDIAYYDTRVKQDNTVLRTRADELIDRVQFVHEVLNLGEELSDEDVDRYERDXPDDDPVVHTWYEEYPDVMMPM

SEQ ID NO: 6200 - protein, 115 aa, Zea mays
  Clone ID: TF_LIB4698-005-R1-K1-E1.pep
SCWTRVAGCKPVACSKREVKQYKSTLSLDGGDKNLNHVKLLKKTKKTMLILCHYIFLSFFCSNLDVGHQYRDSLTFFLSLLFLAASLFWASLLSVCRRVHYSMVHKQGTKLVQQK

SEQ ID NO: 6201 - protein, 105 aa, Zea mays
  unsure (1)..(105): unsure at all Xaa locations
  Clone ID: TF_jC-zmX700344307a1.pep
IRLEVINTDWHKQSNRDFARRYTLREQHECEELARKVTNLTTDNSAFRVYLDNLKKACQDMEAANPRMXGMGLADTQLPSVTTTLRMSIEPPNLQLQLXQHYDEE

SEQ ID NO: 6202 - protein, 156 aa, Zea mays
  unsure (1)..(156): unsure at all Xaa locations
  Clone ID: TF_700217015_FLI.pep
RNRDSAMKSRERKKSYIKDLETKSKHLEAECRRLSYALQCYAAENMALRQSLLKDRPLGAPTATQESAVLTGKTXTLPLVSLLWLVSIVCLFLMPVLPNRSPAAPSSGGRDLVMAAGKTSSETPEILELILHGRRCKSTRAKIKLCILPFHAGAAC

SEQ ID NO: 6203 - protein, 183 aa, Zea mays
  Clone ID: TF_ZmC3114_4.pep
HDHKDSSAPKKRKSGNTSAEDEPSQATVVRYAAVESPYPAKGRSASKLPVSAPGRAALPSATPNLNIGMDIWNASPALAVPAVQGEVSPGLALVRRDGVTQLDEREIKRERRKQSNRESARRSRLRKQQECEELARWGHVESPPLQPCIIYGSSRCALCFFVCCVKTIDVTKPREPRGFFYVC

SEQ ID NO: 6204 - protein, 105 aa, Zea mays
  unsure (1)..(105): unsure at all Xaa locations
  Clone ID: TF_LIB3245-262-P1-N1-F7.pep
GQVAVGAQSALGAKKRGRTAGDKEQNRLKRLLRNRVSDQQAQXRENAFITELDVKVNGLELRNAXLEQIVCTLQNENNTLRQILKNTTAHASMTYRGLRGCHGKV

SEQ ID NO: 6205 - protein, 141 aa, Zea mays
  unsure (1)..(141): unsure at all Xaa locations
  Clone ID: TF_LIB4762-036-R1-K1-F3.pep
GRSAWDRRRRGVDTHRXEKRRLSNRESARGAGLRKQKNLDELEQEVARLXADNARVGARAVDIAYYDTRVEQENTVLRARADELGDRLRFCNEVLRLGEELSGDDMDIXKEMPEDDPVLHTWYLAYPDAVMPIGAQDMLHY

SEQ ID NO: 6206 - protein, 117 aa, Zea mays
  Clone ID: TF_ZmC19483_3.pep
MDDGADLPCQLLFSHPEMPHSFDEFFSGATTTTTCTHTHSCDPPGPSAAMHTHTCLHTHTQVLGSGGEDDGSAKPRRPLGNREAVRKYREKKKARASFLEGGVKKLRAANQQLVRRL

SEQ ID NO: 6207 - protein, 307 aa, Zea mays
  Clone ID: TF_ZmC2115_1.pep
MCQQVIRRLAQNREAARKSRLRKKAYIQQLESCKLKLSQMEQDMQRARTQGLFLGGDPGASTSSGAAMFDVEYARWLDNHGRRLAELQGALQAHLPDGDLQAIVDDALTHHDELFQLKAMAAKSDVFHLITGVWTTPAERCFLWMGGFRPSDLLKTLLPQLDPLTEQQVVGICSLQQSSQQAEEALSQGLEQLHQSLADTMAGGSLIDDANMSFMSQMALALGKLANLEGFVIQADNLRQQTLHQMHRILTVRQAARCLLAIGEYHNRLRALSSLWASRPREILVTDEGNCEISIAAQPSQNQFSTF

SEQ ID NO: 6208 - protein, 197 aa, Zea mays
  Clone ID: TF_ZmC11397_2.pep
PRVRDRAADCLFARSKERKSRYITELERKVQTLQTEATTLSAQLTLFQRDTTGLSAENAELKIRLQAMEQQAQLRDALNDALKQEVERLKIATGEMPKSNEQFNMGMQHVSYSGPSFFHLPEQHVDIQLPHHFQQPPRNVQMLSHPNSLSDMAQQDSLGRLRGLDIGKGSMAMKPEAEVVVKSEGSSVSAGESNTTF

SEQ ID NO: 6209 - protein, 141 aa, Zea mays
  Clone ID: TF_ZmC42267_1.pep
KKKKTARRGARGSPASPLDYSGASTSGGEDGAFCSRPEPALPPAAACQQLAAPTPPSKVGGLAGRRTTPPVPVPVPLPPPRPAGQRARKKMRLPEIQQMVRSLSVENDALRKEMRALRRDCTALSQENGKLETRLHQSVTL

SEQ ID NO: 6210 - protein, 191 aa, Zea mays
  Clone ID: TF_ZmC11397_1.pep
SKERKARYITELERKVQTLQTEATTLSAQLTLFQRDTTGLSAENAELKIRLQAMEQQAQLRDALNDALRQEVERLKIATGEMSKSNNEHFNMGMQHVSYSPSFFQLSEQHTMQQHGNIQLPHHFQQPPLTVPSHQMLSHPNSLSNMVQQDSLGRLQGLDIGKGSMAVKSEAEVVVKSEGSSISAGESNTTF

SEQ ID NO: 6211 - protein, 229 aa, Zea mays
  Clone ID: TF_ZmC19483_1.pep
MDDGADLPCQLLFSHPEMPDSFDEFFNSATTTCTHTHSCNPPGPSVAMHTHTCLHAHTLVLGSGGEDDDDAREDSAKPRRPLGNREAVRKYREKKKAHAAFLEEEVKKLRAANQQLQRRLQGHAALEAEVARLRGLLLDIRGKIDAEVGGVLPFQKPCSVGSVACADPALCFNGNSEVGGGWEESSRPAAADCRIDEVRGMSREIDVPEGLRHSMDVVASFVSSDPLAE

SEQ ID NO: 6212 - protein, 151 aa, Zea mays
  unsure (1)..(151): unsure at all Xaa locations
  Clone ID: TF_ZmC2315_12.pep
MSSSSLSPTAGRTSGSDGDSAADTHRREKRRLSNRESARRSRLRKQQHLDELVQEVARLQADNARVGARAADIASQYTRVEQENTVLRARAAELGXRLRSVNEVLRLVEEFSGVAMDIQEEMPADDPLLRPWQLPYPAAAMPIGAPHMLHY

SEQ ID NO: 6213 - protein, 371 aa, Zea mays
  unsure (1)..(371): unsure at all Xaa locations
  Clone ID: TF_ZmC491_1.pep
MGSSGADTPSKEQQPPATSGAAIPPVYPDWSSFQAYPPIPPHGFFPSPVASSPQGHPFMWGAQAMIPPYGTPPPYVMYPPGVYAHPSMPPGAHPFTPYAITSPNGNADAXSGNTDGKPSEGKDKSPTKRSKGSLGSLNMLTGKNPSEHGKSSGASGNGVTSQSGESGSDSSSEGSEGNSHNDSHHKESGQEHDGDVRSSRNGVSRLQSEGKLNQAMAILPIPSSGPATDPTTNLNIGMDYWANTASSAPAIHGKATSTTVPGAVVPAEQWTQDEHELKKQRRKQSNRESARRSRLRKQAECEELAQRADVLKQENASLRDEVNRIRKEYEELLSKNNSLKEKLEGKQHKTDEAGLNNKLQHSGNDIQKKGN

SEQ ID NO: 6214 - protein, 382 aa, Zea mays
  Clone ID: TF_ZmC491_2.pep
MGSSGADTSSKPNKASAPQEQQQPATSGAATPAVYPDWSSFQAYPPIPPHGFFPSPVASSPQGHPYMWGAQPMIPPYGAPPYVMYPPGVYAHPSMASGAHPFTPYAITSPNGNADATGTTAVACDTDGKPSEGKDKSPTKRPKGTLGSLNMLTGKNPSEHGKTSGASANGATSQSGESGSDSSSEGSEGNSHNDSYKHSGQEQDGDVRSSQNGASRSPSEGKFNQAMAIMPMPSSGPVTGPTTNLNIGMDYWANTASSAPVIHGKVTPTTVPGAVVPAEQWIQDERELKRQKRKQSNRESARRSRLRKQAECEELAQRADVLKQENASLRDEVNRIRKEYEELLSKNNSLKEKLEGKQHKTDEAGLNNKLQHSGNDIQKKGN

SEQ ID NO: 6215 - protein, 382 aa, Zea mays; identical to SEQ ID NO: 6214
  Clone ID: TF_ZmC491_3.pep

SEQ ID NO: 6216 - protein, 175 aa, Zea mays
  unsure (1)..(175): unsure at all Xaa locations
  Clone ID: TF_LIB3594-052-Q1-K7-B11.pep
GKPEEEARGREDATAAAAAAAGAEQKAHDAAPGAGXXPXSXXXAXSXXDXNTRKGTGNXXXHXXXXNHNXRXPAXXTTXEXQXXNXAXAAAXPTXXTNXXXKESQXXGGTRXXDXDSXXXXDNEGGPXEQSTNPQDXKRXRRXGXNREXXRRARKRKQAHPXDXETQXDQXRSEN

SEQ ID NO: 6217 - protein, 202 aa, Zea mays
  Clone ID: TF_ZmC458523_1.pep
LGTSRPAGTLQRLATSQSFQRVSSGMQQSCAAANLARLPLPVVPGLEDLASLFLARNGPVPAHDYSSSFDLDVAVGLDPAYYYYCPHSCDGGVAIATPVSSVSAERKRRRLASNRASARRSRARRQRRLHELSLRAAELLGANQRLLVELNRVVARHGAVARENARLREEAAGLRRRLGEVEEVGEAAAAAAAGQGPLRAPS

SEQ ID NO: 6218 - protein, 202 aa, Zea mays
  Clone ID: TF_ZmC19483_2.pep
MDDGADLPCQLLFSHPEMPDSFDEFFNSATTTCTHTHSCNPPGPSVAMHTHTCLHAHTLVLGSGGEDDDDAREDSAKPRRPLGNREAVRKYREKKKAHAAFLEEEVKKLRAANQQLQRRLQGHAALEAEVARLRSLLLDIRGKIDAEVGGVLPFQKPCSVGSVACADPALCLTARVGGARRLQRKLMSQKACVIPWMLLRAS

SEQ ID NO: 6219 - protein, 342 aa, Zea mays
  Clone ID: TF_ZmC25151_1.pep
LVPRAGTRRSQSDIPFGFAQLSPPLPPPAPVKREVTAAADGCRSDGGGGDDAALYDLVNAYMDLDGLDPLNSSEDRHDDRDSRASGTRAGSAAESSENEAESQSTSADRKDGGKSRHCRSLSIDSFMGKLSFAAGEESPKLPLPSPGGSLTRSGSGSLEGGAVALFNMEFTNGEFTDSEKKKIMANERLAEIALTDPKRVKRILANRQSAARSKERKMRYIQELEHKVQVLQTEATTLSAQLTMLQRDSAGLATQNNELKIRLQAMEQQAQLRDALNEALTAEVQRLKLATGEVTDGRMPKGLQQQMNSQMLQIQQLQVQQQAPQAQQQGQRQQQQQPQKSA

SEQ ID NO: 6220 - protein, 213 aa, Zea mays
  Clone ID: TF_ZmC25151_2.pep
QLRRRDESPKLPLPSPRASGSLTRSGSGSLEGGAVALFDMEFSNGEFTESEKKKIMANERLAEIALTDPKRVKRILANRQSAARSKERKMRYIQELEHKVQVLQTEATTLSAQLTMLQRDSAGLATQNNELKIRLQAMEQQAQLRDALNEALTGEVQRLKLATGEMTDGPMPKGLQQQMNSQMLQLQQLQIQQQAPPQQTQQQGQRQQPQKSA

SEQ ID NO: 6221 - protein, 168 aa, Zea mays
  Clone ID: TF_ZmC9417_4.pep
MQEQPASSRPSSSERSSSSAHHMDMEVKEGMESDEEIRRVPELGLELPGASTSGREVGPGAAGADRALAQSSTAQASARRRVRSPADKEHKRLKRLLRNRVSAQQARERKKAYLTDLEVKVKDLEKKNSEMEERLSTLQNENQMLRQILKNTTVSRRGSGSTASGEGQ

SEQ ID NO: 6222 - protein, 153 aa, Zea mays
  Clone ID: TF_LIB4744-124-Q1-K1-A3.pep
GSTTPPSHMRQERGQSQQGRRRRGRGSDAGPRLQGGEREAAQREEPARLAGAARERGGLGAEPRVLAAHGEVVPRQGLQPGLQLLLLGAEPRRRLAELLQPLLLPRARPLRREPVRHLAALTPEPLLVLRVRVPRRLGLGLGQRRRDDAAGLE

SEQ ID NO: 6223 - protein, 278 aa, Zea mays
  Clone ID: TF_ZmC3100_1.pep
MAQLPPRVPTAVHRWPEGGHHGAAAWADDFAEFAASRRGAHRRSLSDSVAFVEVAPAAGEFDRLDDDQLMSMFPDEAAAGGGGGGSSAAGSENNGGSSDSYGDRRGGGGPAAGGTSTTTSCNGFDGGEHNEAADAQATGQAAAAAAASTELIRDPKRVKRILANRQSAQRSRVRKLQYISELERSVTTLQNEVSALSPRVAFLDQQRTILTVGNSHLKQRIAALAQDKIFKDAHQEALKKEIERLRQVYEQQNLKMSAGAAASDHGPPPVRAEKELMS

SEQ ID NO: 6224 - protein, 412 aa, Zea mays
  Clone ID: TF_ZM3393.C1.o2.fg.pep
MASEMSKNVKALDEQEVTSQHSRAQTSDAAEEQQQQQQAVDPLARQSSIMSLTLEELQNSLCEPGRNFGSMNMDEFMANIWNAEEFQAATAGCNKEGAEREPVPVATTTGTGENGGGGGSGRGLVRQGSFALPPPLSRKTVEEVWAEISQGPADFQASAAPQPVAQPQAASGGGVAASGRQATLGEMTLEDFLVKAGVVRGAFAGHGHGVGMVPAGPMGMQHNAAPPMMYQVAAAAAPPPGAVYPVMGDGMGYHGGGYPGGVAVVPPPPPSQCVAAAASPGSSDGMSAMTQAEMMNCIGNGGVVRNGGGGARKRDFPEDGCTEKTVERRQRRMIKNRESAARSRARKQAYTVELEAELNHLKEENERLRAEERTILLSKKKMLVEKMMEQARENVSAKKVGPGLRRWGSAMW

SEQ ID NO: 6225 - protein, 563 aa, Zea mays
  Clone ID: TF_ZmC2896_1.pep
MAEPALLAPDPFADLPFPEFQAPIDGDSFALEDFDLEDLDLDVDFDLDLFASDGQPSQPPPLATSSSSAGSPVGGSSSSGAVGDGGGLRNEESSESSSRSASGTDGSGKGKGEEDEAKRRARQVRNRESAHLSRQRKKQYVEELEGKVKAMQATIADLSARISCVTAENAALKQQLGGAAGAAPPPMPMYPTMYSLPMPWMHPSYPMRGSQVPLVPIPRLKPPQPASAVAEPPAKKARKTKKVASVSLLGLICVAMLCGCLIPAVNRMYDSVDAGEGAAYGPSHRGRVLAVEGPHDNVSDGVDPKPPQRASETLPALLYLPKNGKHVKINGNLVIKSIVASEKASLQMSGNDGKRPQNQEEETRLAIPGYVTPLKAGEVMESTEGMMNNELLALAPADGSMYREEDGLLPQWFSEAMSGPLLSSGMCTEVFQFDVSPSSAHPNGIIPVYSNAMSNSSQNFTQDLPPARVRTVKNRRISYSEAIPLRGSTSNDTEHLKSFGSTKPVSSVVVSVLADPREAGDGDGEGRISSKSLSRILVVVLIDSVKYVTYSCVLPFKSHSPHL

SEQ ID NO: 6226 - protein, 356 aa, Zea mays
  Clone ID: TF_ZmC13853_5.pep
MEFKNCGSSSQPRPAVVVGEAALARQGSVYSLTFDEFQSALGGAAAGGGGGGSIPKGFGSVNMDELLRSIWTAEETQAMASASAGAGAGMPPTPLQRQGSSLTLPRTLSTKTVDEVWRNLVRDEPPQGADGGGHQQPHRQSTLGEMTLEEFLVRAGAVKENPASAPPAPPPMVPPRPVPVAPKSSAFFGDLPGADDDAATAAVGFAPVGMVDLALIPPRAAGMGGSAMAVQTAVSQLDSVGKGYSDLSSLTEPQTFSFERMIRGRRHGGGVEKVVERRRRRMIKNRESAARSRARKQAYTMELEAEVQKLREQNQELERKQAEIMEMQNNEVSEMLKDPFGRKKRLCLRRTLTAPW

SEQ ID NO: 6227 - protein, 276 aa, Zea mays
  Clone ID: TF_ZmC5008_1.pep
MDDGDLDFSNPDTYLCPALGTDPPSSCSMDSYFDEILKDTEHHACTHTHTCNPPVHDLSHTHTCVHVHTKIVAASPGDDTADSPSENNTNGSGGNGSNAASKKRPSGNRAAVRKYREKKKAHTASLEEEVVHLRALNQQLVKKLQSHAALEAEVARLRCLLVDIRGRIEGEIGAFPYQRPPPAAKNVDLVSGVDQGGFLAGAAAQVTSSCDFRCNDQMYCSPGMQGAVGGQVLGQGACDVSSIQCVGSTRSASTKLPVCGGMDAVPAACLPNVQNK

SEQ ID NO: 6228 - protein, 276 aa, Zea mays
  Clone ID: TF_ZmC5008_3.pep
MDDGDLDFSNPDTYLCPALGTDPPSSCSMDSYFDEILKDTEHHACTHTHTCNPPVHDLSHTHTCVHVHTKIVAASPGDDTADSPSENNTNGSGGNGSNAASKKRPSGNRAAVRKYREKKKAHTASLEEEVVHLRALNQQLVKKLQSHAALEAEVARLRCLLVDIRGRIEGEIGAFPYQRPPPAAKNVDLVSGVDQGGFLAGAAAQVTSSCDFRCNDQMYCSPGMQGAVSGQVLGQGACDVSSIQCVGSTRSASTKLPVCGGMDAVPAACLPNVQNK

SEQ ID NO: 6229 - protein, 274 aa, Zea mays
  Clone ID: TF_ZmC5008_4.pep
MDDGDLDFSNPDTYLCPALGTDPPSSCSMDSYFDEILKDTEHLACTHTHTCNPPVHDLSHTHTCVHVHTKIVAASPGDAESPSENNSNGSGGNGSNAASKKRPSGNRAAVRKYREKKKAHTASLEEEVVHLRALNQQLVKKLQSHAALEAEVARLRCLLVDIRGRIEGEIGAFPYQRPPPAAKNVDLVSGVDQGGFLAGAAAQVTSSCDFRCNDQMYCSPGMQGAVSGQVLGQGACDVSSIQCVGSTRSASTKLPVCGGMDAVPAACLPNVQNK

SEQ ID NO: 6230 - protein, 159 aa, Zea mays
  Clone ID: TF_ZmC7838_2.pep
MASSSGSGSSGFLSAALDAAATAGTEEELRALMAQRRAKRMLSNRESARRSRMRKQRHLDELTAQAAHLRRENAHVATALGLTAQGLLAVDAENAVLRTQAAELAARLGSLNDILACMNTTNAAAASSDPYLAFDGAATALDDLLKSCPDSMMFEYQLC

SEQ ID NO: 6231 - protein, 310 aa, Zea mays
  Clone ID: TF_ZmC2202_1.pep
MAGGGAGDDDVVVVSCGGRGGGDPGAYAAVLKRKLDLYCAAVAKSMEAKSQEHSLGYPNSQASDASQLISQASFDGDIDGASLVTNSNVIEDDDFQGKPTNSGTSKELSDDDGDLEENTDPANAKKMRRMVSNRESARRSRKRKQAHLTDLESQVSRLTSENASLLKRLADMTQKYKDASVDNKNLTVDVETMRRKVNIAEEAVRRLTGITLMLPTAFEKPASSAPLSSCPSDAASASASAAIEDSVKHFLQAPLENSGIIPNAAVFQTKPASLHRVASLENLQKRIVGDAMYSETASTTFSDPEALADR

SEQ ID NO: 6232 - protein, 312 aa, Zea mays
  Clone ID: TF_ZmC2202_2.pep
MLVWPGLRLLPTPILPLPEYEVLERERLSSKNGGWRRRRRRRGGGELRRQRRRRPRRIRRGAQEEARPVLRRRRQIHGDIDGASLVTNSNVIEDDDFQGKPTNSGTSKELSDDDGDLEENTDPANAKKMRRMVSNRESARRSRKRKQAHLTDLESQVSRLTSENASLLKRLADMTQKYKDASVDNKNLTVDVETMRRKVNIAEEAVRRLTGITLMLPTAFEKPTSSAPLSSCPSDAASASASAAIEDSVKHFLQAPLENSGIIPNAAVFQTKPASLHRVASLENLQKRIVGDAMYSETASTTFSDPEALADR

SEQ ID NO: 6233 - protein, 200 aa, Zea mays
  Clone ID: TF_ZmC2202_5.pep
MAGGGAGDDDVVVVSCGGRGGGDPGAYAAVLKRKLDLYCAGGAKSMEAKSQEHSLGYPNSQASDASQLISQASFDGDIDGASLVTNSNVIEDDDFQGKPTNSGTSKELSDDDGDLEENTDPANAKKMRRMVSNRESARRSRKRKQAHLTDLESQVSRLTSENASLLKRLADMTQKYKDASVDNKNLTVDVETMRRKVRSS

SEQ ID NO: 6234 - protein, 106 aa, Zea mays
  Clone ID: TF_jC-zmX148064Q1E1B1b1.pep
ADTHRPPKRRMANRETARRTRLRKQQHQDELEQEVARLQADNAREAARAADRATQNTRVEQENTGLRARAAELGDRRRSDNEVLPPREEFSGVAMDKQEEMPADDP

SEQ ID NO: 6235 - protein, 185 aa, Zea mays
  Clone ID: TF_ZmC773_10.pep
MAAQEHEHEHEHEKQQAKTSTTSSLPSSSERSSSSAPNNLREGAAGAGVESDEEIRRVPELGGASASASASSGAGKEDGARAVAAGAQGHPPAAGKKRGRAPGDKEQNRLKRLLRNRVSAQQARERKKAYLTELEVRAKDLELRNAELEQRVSTLQNENNTLRQILKNTTAHASKRSGGGGGKGG

SEQ ID NO: 6236 - protein, 173 aa, Zea mays
  Clone ID: TF_ZmC3503_8.pep
MDGATSPFEGESALSSGLPDYAKKAMPAERIAELALIDPKRAKRILANRQSAARSKERKIKYTSELERKVQTLQTEATTLSAQLTLLQRDTSGLTTENRELKLRLQAMEEQAKLRDEHYEANALNDALREEVQRLKIAAGQVPNMNGNPFNGGLSQQQQVPSYFLHTQQMQYF

SEQ ID NO: 6237 - protein, 428 aa, Zea mays
  Clone ID: TF_ZmC947_1.pep
MASEMTKNVKALDEQEVTSQHSRAQTSDAAEEQQQQQQAVDPLARQSSIMSLTLEELQNSLCEPGRNFGSMNMDEFMANIWNAEEFQAATAGCNKEGAEREPVPVATTTGTGENGGGGGSGRGLVRQGSFALPPPLSRKTVEEVWAEISQGPADFQASAAPQPVAQPQAASGGGGVAASGRQATLGEMTLEDFLVKAGVVRGAFAGHGHGVGMVPAGPMGMQHNAAPPMMYQVAAAAAPPPGAVYPVMGDGMGYHGGGYPGGVAVVPPPPPSQCVAAAASPGSSDGMSAMTQAEMMNCIGNGGVVRNGGGGARKRDFPEDGCTEKTVERRQRRMIKNRESAARSRARKQTRSRSAPGMMPMLVQAYTVELEAELNHLKEENERLRAEERTILLSKKKMLVEKMMEQARENVSAKKVGPGLRRWGSAMW

SEQ ID NO: 6238 - protein, 405 aa, Zea mays
  Clone ID: TF_ZmC191_2.pep
MERVFSVEEIPNPYWVPPHPQSAAAGAVAAPAGEAAGLMNRCPSEWYFQKFLEEAVLDSPVPVAGASRGSVGAGVEAAESKTPGAAAPAAASSSVVDPVEYNAILKQKLEKDLAAVALWRASGAAPPDHSPAGSSLPSVDVPHAGPLKPIGGTGSLVQNKLPGAPGGGSSPHVLQNADIPVKQTTSSSSREQSDDDDMEGDAETTGNGNPVQHRLQRRKQSNRESARRSRSRKAAHLNELEAQVAQLRVENSSLLRRLADVNQKFNEAAVDNRVLKADVETLRAKVKMAEDSVKRVTGMNTLFPAVSDMSSLSMPFNGSPSDSASDAAVPIQDDLNSYFANPSEIGGSNGYMPDIASSVQEDDDFVNGAQVAGKMGSTDSLQRVASLEHLQKRMCGGPASSGSTS

SEQ ID NO: 6239 - protein, 270 aa, Zea mays
  Clone ID: TF_UC-ZMROTEOSINTE106E02_FLI.pep
LKPIGVWSGLDIGHVSGTGSLVQNKLVGAPGGGSSPHVVQNADIPVKQTTSSSSREQSDDDDMEGDAETTGNGNPVQHRLQRRKQSNRESARRSRSRKAAHLNELEAQVSQLRVENSSLLRRLADVNQKFNEAAVDNRVLKADVETLRAKVKMAEDSVKRVTGMNTLFPAVSDMSSLSMPFNGSPSDSASDAAVPIQDDLNSYFANPSEIGGSNGYMPDIASSAQEDDDFVNGAQVAGKMGSTDSLQRVASLEHLQKRMCGGPASSGSTS

SEQ ID NO: 6240 - protein, 258 aa, Zea mays
  Clone ID: TF_ZmC2730_1.pep
MAQLPPRAPSAAPQDHWPPAAGEFLGFAAARRGAHRRSASDSAAFLEAVPIDDDVVIGGGGGGGDDFDRLDHDQLLSMFSDVDVSVSVSVSGSAGERAQLMDAGGAGADDGVADSSPAAADGVAEPKRVKRILANRQSAQRSRVRKLQYISELERSVTSLQMEVSALSPRVAFLDHHRSLLTVGNSHLKQRIAALAQDKIFKDAHQEALEKEIQRLRQVYQQQQVKVATTGGADIATAASPSMQARQELLACEGAAIR

SEQ ID NO: 6241 - protein, 150 aa, Zea mays
  Clone ID: TF_ZmC233616_1.pep
AELEIGMDLWTGSPVKAETSGQGEINAATHSHHGSTLSMMDEREQKRERRKQSNRESARRSRLRKQQECEELAQKVTDLTVVNGTLRSELDELKKACEDMEAENSQLIGELEQSEAPSVVTTLSIQIDTTKAHHRSSDQHGNKNNTGSNG

SEQ ID NO: 6242 - protein, 418 aa, Zea mays
  Clone ID: TF_ZmC3114_1.pep
MFTLTMSHGPPVLAPPRTSGGASRSRRAAQASMASSSDEQSKPPESPAAAAVVTAAAPPQTHAEWVASLQAYYAAAGHPYAWPAQHLMAAAAAGAHFGTPVPFPVYHPGAAAAYYAHASMAAGVPYPTCEAVPAVALPTGRKFTSIGERGSASPEKGGNEHPAAKDASRSDDSGSDESSETRDDDTDHKDSSAPKKRKSGNTSAEGEPSQAAVVRYAAVESPYPAKGRSASKLPVSAPGRAALPSATPNLNIGMDIWNASPALAVPAVQGEVSPGLALARRDGVTQLDEREIKRERRKQSNRESARRSRLRKQQECEELARKVADLTTENSALRAELDNLKKACQDMEAENSRLLGGVADAQVPSVTTTLGMSIEPPKLQLQLQQHHDEEGQLHKKSSNNSNGNCAGGSHKPEANTTR

SEQ ID NO: 6243 - protein, 168 aa, Zea mays
  unsure (1)..(168): unsure at all Xaa locations
  Clone ID: TF_ZmC3114_5.pep
FCCNCTCLAVPAVQGEVSPGLALARRYGVTQLFLVSXDEREIKRERRKQSNRESARRSRLRKQQECEELARKVADLTTENSALRAELDNLKKACQDMEAENSRLLGGVADAQVPSVTTTLGMSIEPPKLQLQLQQHHDEEGQLHKKSSNNSNGNCAGGSHKPEANTTR

SEQ ID NO: 6244 - protein, 338 aa, Zea mays
  Clone ID: TF_ZmC3503_1.pep
MDPRFPPPAPSSCFGGGGELPARGHHRRAHSETFIRLPDADLLLDPDADFGFSDIDFPSLSDDSPAASDPTPQPQAPPLQPPLQQAASPASAAPPRPPSGAHMRSLSLDAAFFDGLSLQGGGGGGGVRGGVAGHKRSGSMDGDTSPFEGESAPPSVLPDYAKKAVPDDKLAELALLDPKRAKRILANRQSAARSKERKIKYTSELERKVQTLQTEATTLSAQLTLLQRDTSGLTTENRELKLRLQAMEEQAKLRDALNDALREEVQRLKIAAGQVPNMNGNPFNGGLSQQQQMPSYFSQPQQMQYFSGHQGQHHHPKHDPQNSSNGGGQPLSDSMDFM

SEQ ID NO: 6245 - protein, 201 aa, Zea mays
  Clone ID: TF_ZmC3503_5.pep
MDGATSPFEGESAPTSVLPDYAKKAVPDDRLAELALLDPKRAKRILANRQSAARSKERKIKYTSELERKVQTLQTEATTLSAQLTLLQRDTSGLTTENRELKLRLQAMEEQAKLRDALNDALREEVQRLKIATGQVPNINGNPFNGGLPQQQQQQVPSYFSQPQGMQYFSSHQGQHQHPNHHPQSSSNGGGQSLSDSMDFM

SEQ ID NO: 6246 - protein, 351 aa, Zea mays
  Clone ID: TF_ZmC562_1.pep
MEMPAGSGAPALARQGSVYSLTFDEFQTTLGGASKDFGSMNMDELLRNIWTAEESNAMAAAAPATATATAAASVDAHAQQQQQQQHGAPIQRQGSFTLPRTLSQKTVDEVWREIVSLTSGEDAQQVAAPAPAPAPEPEPAPAPAPLPAQAQAQQTLGSMTLEEFLVRAGVVREDMGGHQTLLLQPHAQGLFSQGNAVAPQTLQLGNGMVAGVVGQGLGGGVTVAAPTTPVVFNGLGKVEAGDLSSLSPVPYPFDTALRMRKGPTVEKVVERRQRRMIKNRESAARSRARKQAYIMELEAEVAKLKDQNEELQKKQVEMLKKQKDEVLERINSQHGPKAKKLCLRRTLTGPW

SEQ ID NO: 6247 - protein, 228 aa, Zea mays
  Clone ID: TF_ZmC737128_1.pep
RQNHQKPATHRSRRVDLSSTTTSPLEGPQQQARMLHQHQHHYHGGVASLHSYLSNPDQAFHAHYYHHSNIIATPLPPTPSFHHLWPSTAQTFEQPVVHEAPAAVAAGNSPAGSGSADDGGGGGTAEAERRRRRMASNRESARRSRMRKQRQLTELWAQVVHLRGANRRLLDELNRAVRGCSDMRREKARLQKEKTDLGTKLQRLTQPQNAALPSSSSEPQPQHDAATE

SEQ ID NO: 6248 - protein, 125 aa, Zea mays
  unsure (1)..(125): unsure at all Xaa locations
  Clone ID: TF_LIB3245-007-P1-N1-G2.pep
ARNSARVKPCVSTGSDLKVSGATXTEWPAKDDKESKRERRKQSNRESARRSRLRKQAETEELARRVELLTAENTSLRSEISRLTESSQKLRMENSALMEKLADGTSDQAQEASAGHQTTPTAPSS

SEQ ID NO: 6249 - protein, 121 aa, Zea mays
  Clone ID: TF_ZmC241156_1.pep
RARRAAAITEEERRRNRMASNRLSARKSRMKQQQHVDDLTAVAERLRRENEAMRAGVGGVVRQSIELEQENRVLAAHARQLCATLLLRNSQLRLLGDVAGLPLDVPLVPDHLVQLYGMLEF

SEQ ID NO: 6250 - protein, 210 aa, Zea mays
  Clone ID: TF_ZmC32804_1.pep
GDAKLAELALVDPKRAKRILANRQSAARSKERKMRYIAELERKVQTLQLEATTLSAQLAMLQRDTTGMTSENSDLKIRVQTMEQQVQLQDALNDRLRDEIQQLKVATGQVNASIGKTGNSGMSSFGGNPQSYQRSHIQSLLAAQHLQRLRIHSQHQQQQTHFQQQQQPQPQLLLQEAHPFPVDLKMRGFSLSSHAQNAGASDSHAAKSEP

SEQ ID NO: 6251 - protein, 166 aa, Zea mays
  Clone ID: TF_LIB4764-072-R1-K1-C5.pep
MAQLPPRVPTAVHRWPEGGHHGAAAWADDFAEFAALRRGAHRRSLSDSVAFVEVAPAAGEFDRLDDDQLMSMFPDEAAAGGGGGGSSAAGSENNGGSSDSYAAASTELIRDPKRVKRILANRQSAQRSRVRKLQYLSELERSVTTLQNEGSALSPRVAFLDQQRTI

SEQ ID NO: 6252 - protein, 179 aa, Zea mays
  Clone ID: TF_LIB3354-121-Q1-K6-H1.pep
HHLQASYQQPAAASPATCYGPRPRNALTEAEKEAKRLRRVLANRESARQTILRRQAIRDELARKVADLSSQNENMKKEKDVVMQEYLSLKEANKQLKEQVARTTAKKAPAGSLAAAASPPATPPRPGLSAAPPPVPVWGSWPPAAAVAGFELLGRPPPPPLCLLPCAWSFPVVAAAPRG

SEQ ID NO: 6253 - protein, 176 aa, Zea mays
  Clone ID: TF_ZmC30857_1.pep
PNPRRMPRSPQLSLSGCSSLFSLSSTSTSRDSAALKAPVPAPPAGAVPPRRTPLLSLSVGEEEEDEGEDEEEYLLGAGALDLQLTGPGGGSNSSGGYDDERKNIRMMRNRESALRSRARKRAYVQELEKEVRRLVNENLKLKRQCKQLKLDMAALVQQSSSKSSSHIRRTSSSTQL

SEQ ID NO: 6254 - protein, 381 aa, Zea mays
  Clone ID: TF_ZmC874_46.pep
MGKGDVATRSKSQKSPAIQNEQSTPANPPTAYPDWSQFQAYYNAAGTAPVTPPFFHPSVAPSHQGHPYMWGPQMMSPYGTPPPYAAMYAQGTPYQQAPMPPGSHPYSPYPMQLPNGTVQTPTSGAGGTATDKSNKNKRKASLKRSKGSLGSLDVVAVKNNKSPAKPSTSSSNEGSSQSESGSGSSSEGSSTNSKSGSRVKDNSEQGQGNDARSKCTQSSVVEPTQPSSGSVVLNPMMPFWPVPPPMAGPATTLNMGVDYWGTPASVPMHGKVIAAPTSAPSSNSRDIVLSDPTIQDGRELKRQKRKQSNRESARRSRLRKQAEWEEVANRAVLLKQENSSLKEELKQLQEKCDGLTSENTSLHEKLKALEDEKSNGNWYKD

SEQ ID NO: 6255 - protein, 103 aa, Zea mays
  Clone ID: TF_LIB3236-081-P1-N1-F12.pep
RAGHALPSTPVSLAGFVGNEVDMEVQQASGDDRRSIRMMRNRESALRSRARKRAYVENLEKEVRRLVDDNLKLKKQCKELKREVAALVLPTKSSLRRTSSTQF

SEQ ID NO: 6256 - protein, 114 aa, Zea mays
  unsure (1)..(114): unsure at all Xaa locations
  Clone ID: TF_ZmC9417_8.pep
GPGAAGADRALAQSSTAQASARRRVRSHADKEHKRLKRLLRNRVSAQQARERKKAYLTDLEVKVRDLEKKNSEMEERLXSTLQNENQMLRQILKNTAVNRRGSGSTASGEGHGQ

SEQ ID NO: 6257 - protein, 147 aa, Zea mays
  Clone ID: TF_ZmC2730_2.pep
TERHQSPDGGVGAVPKRVKRILANRQSAQRSRVRKLQYISELERSVTSLQMEVSALSPRVAFLDHHRSLLTVGNSHLKQRIAALAQDKIFKDAHQEALEKEIQRLRQVYQQQQVKVATTGGADIATAASPSMQARQELLACEGAAIR

SEQ ID NO: 6258 - protein, 118 aa, Zea mays
  Clone ID: TF_ZmC773_20.pep
METSKSPQSSKNSHIVVPSDSNGPRFDNDGFSSEAASNQMVVLNSEAGDKEQDELGENRLQKSIITRGISPSIGAFTVQCAKCFKWRLIATKEKYEEIRERIIEEPFVCKRAREWRPD

SEQ ID NO: 6259 - protein, 79 aa, Zea mays
  Clone ID: TF_ZmC2202_4.pep
LNFGVVIRMVSNRESARRSRKRKQAHLTDLESQVSRLTSENASLLKRLADMTQKYKDASVDNKNLTVDVETMRRKVRSS

SEQ ID NO: 6260 - protein, 189 aa, Zea mays
  Clone ID: TF_ZmC745477_1.pep
MYPAAEIASVPYLSPAASFKPHYHVATDDGGGFLYQQYSNLLLPHPPSYYQEVAYDQLVLEASFPVGGNNRSNSESDEYQRSVAEERRKRRMVSNRESARRSRMRKQKQLSELWAQVVHLRSTNRQLLDQLNHAIRDCDRVLRENSQLRDEQTKLQQQLEMLPVETTREWCHESWLLKYLLFQVVDEII

SEQ ID NO: 6261 - protein, 86 aa, Zea mays
  unsure (1)..(86): unsure at all Xaa locations
  Clone ID: TF_LIB3960-021-Q1-K6-G3.pep
SKESARRSRLRKQAECEELAQRADVLKQENASLRDEVNRIRKEYEELLSKNNSLKEKLEGKQHKTDEAGLNNKLQHSGXDIQKKGD

SEQ ID NO: 6262 - protein, 104 aa, Zea mays
  Clone ID: TF_jC-zmX700222555b1.pep
MRGRGGPVPPAVSPRPVTASAFGKMEGDDLSSLSPSPVPYIFGGGLRGRKPPAMEKVVERRQRRMIKNRESAARSRQRKQVNTFVGGFCLYLVVSIRHVSCLYY

SEQ ID NO: 6263 - protein, 376 aa, Zea mays
  Clone ID: TF_ZmC491_4.pep
MGSSGADTPSKEQQPPATSGAAIPPVYPDWSSFQAYPPIPPHGFFPSPVASSPQGHPFMWGAQAMIPPYGTPPPYVMYPPGVYAHPSMPPGAHPFTPYAITSPNGNADATGTTAAAGNTDGKPSEGKDKSPTKRSKGSLGSLNMLTGKNPSEHGKSSGASGNGVTSQSGESGSDSSSEGSEGNSHNDSHHRESGQEHDGDVRSSRNGVSRLQSEGKLNQAMAILPIPSSGPATDPTTNLNIGMDYWANTASSAPAIHGKATSTTVPGAVVPAEQWTQDEHELKKQRRKQSNRESARRSRLRKQAECEELAQRADVLKQENASLRDEVNRIRKEYEELLSRNNSLKEKLEGKQHKTDEAGLNNKLQHSGDDSQKKGN

SEQ ID NO: 6264 - protein, 376 aa, Zea mays
  unsure (1)..(376): unsure at all Xaa locations
  Clone ID: TF_ZmC491_5.pep
MGSSGADTPSKEQQPPATSGAAIPPVYPDWSSFQAYPPIPPHGFFPSPVASSPQGHPFMXGAQAMIPPYGTPPPYVMYPPGVYAHPSMPPGAHPFTPYAITSPNGNADATGTTVAAGNTDGKPSEGKDKSPTKRSKGSLGSLNMLTGKNPSEHGKSSGASGNGVTSQSGESGSDSSSEGSEGNSHNDSHHKESGQEHDGDVRSSRNGVSRLQSEGKLNQAMAILPIPSSGPATDPTTNLNIGMDYWANTASSAPAIHGKATSTTVPGAVVPAEQWTQDEHELKKQRRKQSNRESARRSRLRKQAECEELAQRADVLKQENASLRDEVNRIRKEYEELLSRNNSLKEKLEGKQHKTDEAGLNNKLQHSGDDSQKKGN

SEQ ID NO: 6265 - protein, 360 aa, Zea mays
  unsure (1)..(360): unsure at all Xaa locations
  Clone ID: TF_ZmC13853_2.pep
MEFKNCGSSSQPRPAVVVGEEAALARQGSVYSLTFDEFQSTLGGAATGGGGGGSIPKGFGSVNMDELLRSIWTAEETQAMASASXAGAGAGMPPTPLQRQGSSLTLPRMLSTKTVDEAWRNLVRDEPLQGADGGGHQPHHRQSTLGEMTLEEFLVRAGAVRENPAPAPPAPPPMIPPRPVPVAPKSSAFFGNLPGADADTAAAAAALGFAPVGMGDLAQIPPRAAGMGGGAMAVQAAVNQLDSGGKGYSDLSSPTEPLPFSFEGMIRGRRHGGGVEKVVERRQRRMIKNRESAARSRARKQAYTMELEAEVQKLKEQNQELERKQAEIMEMQKNELPEMLKDPFGRKKRLCLRRTLTGPW

SEQ ID NO: 6266 - protein, 359 aa, Zea mays
  Clone ID: TF_ZmC1437_1.pep
MGSNDPSTPSKASKASEQVLETVDQPPATTSSGTVSVYPEWPSFQAYQAIPPHGFFPPTVAANPQAHSYMWGAQPMVPPYGTPPPPYVMYPPGAVYAHPSTPPTMHPFSHYPMPTNGHAETPGTAPSAPEMNGKSEPGRTSAPSANGITSHSESGSESESEGSDANYENDSHSKDNDGKEDGNSQNSISYSASQGVLNQTMAMLPIQPGAMVGGVSSSTANLNIGVHYWEAPGSAAVSATHGKAPAGSARGDQWDERELKKQKRKQSNRESARRSRLRKQAECEELGQRAETLRSENSSLRAELERIRKEYEQLLSQNASLKEKLGGSSDPIPDMNEQNDGNGSDKKQSDSDAQPGSES

SEQ ID NO: 6267 - protein, 176 aa, Zea mays
  Clone ID: TF_LIB4739-086-R1-K1-F4.pep
MASASPAQFAAAPLRMGYGRPAPAPPPPVMGMWSSEPFRVDSGSAHATSASTVNTKLEETRLEDDAQVALEPARSTEQETSRPPERAQRRLAQNREAARKSRLRKKAYIQQLETSRMKLSQLELELQRARQQGAYANSGSMGDSALGYRCPIDPGVSVFEIDYSHWVDEQKNTRRS

SEQ ID NO: 6268 - protein, 70 aa, Zea mays
  Clone ID: TF_ZmC874_33.pep
SARRSRLRKQAEWEEVANRADLLKQENSSLKEELKQLQEKCDGLTSENTSLHEKLKALEDEKSNGNWYKD

SEQ ID NO: 6269 - protein, 148 aa, Zea mays
  Clone ID: TF_ZmC9417_1.pep
MEDDSPLTKTMKGAVTGLAAGTIWGTVVATWYDVPRVERHVALPGLIRTLKMCGTYGATFATIGGLYIGVEQLVQSQRKKRDFVNGAVGAFVAGASVCGYRGKSIQSALIGGSCLAFTSAVLDIGGNTTRVDNGKEYYAYTTEKKPAN

SEQ ID NO: 6270 - protein, 119 aa, Zea mays
  unsure (1)..(119): unsure at all Xaa locations
  Clone ID: TF_ZmC59181_4.pep
SXDVGPSAILESYSDGHISSPMMGALSDSPMPGRKRGSPGDVADKLVERRQKRMIKNRESAARSRARKQAYTNELENKVSRLEEENKKLTTLKELENILFSEPLPEPKYQLRRTGSATF

SEQ ID NO: 6271 - protein, 102 aa, Zea mays
  Clone ID: TF_ZmC585007_1.pep
MSSPSRRSSSPESNIDGGSGSGSAGDERKRKRMLSNRESARRSRARKQQRMEELIAEASRLQAENERVEAQIGAYTTELSKVDGENAVLRARHGELAGRLQA

SEQ ID NO: 6272 - protein, 459 aa, Zea mays
  unsure (1)..(459): unsure at all Xaa locations
  Clone ID: TF_ZmC1757_1.pep
MEHVISMEEILGPFWELLPPPAPEPEPEREQPPVTGIVVGSVIDVAAAGHGHGGGDMMDQQHATEWTFERLLEEEALTTSTPPPVVVVPNSCCSGALNVDRPPVMEEAVMMAPAAVSSAVVGDPMEYNAILRRKLEEDLEAFKMWRAASSVVTSDQRSQGSNNHTGGSSIRNNPVQNKLMNGEDPINNNHAQTAGLGVRLATSSSSRDPSPSDEDMDGEVEILGFKMPTEERVRKRKESNRESARRSRYRKAAHLKELEDQVAQLKAENSCLLRRIAALNQKYNDANVDNRVLRADMETLRAKVKMGEDSLKRVIEMSSSVPSSMPISAPTPSSDAPVPPPPIRDSIVGYFSATAADDDASVGNGFLRLQAHQEPASMVVGGTLSATEMNRVAAATHCAGAMELIQTAMGSMPPTSASGSTPPPQXIMSCWVQMGPYTWTCIRHCGFRDRWEHFICRRR

SEQ ID NO: 6273 - protein, 474 aa, Zea mays
  unsure (1)..(474): unsure at all Xaa locations
  Clone ID: TF_ZmC1757_2.pep
MPPTTHHIYGYLLLGMEHVISMEEILGPFWELLPPPAPEPEPEREQPPVTGIVVGSVIDVAAAGHGHGGGDMMDQQHATEWTFERLLEEEALTTSTPPPVVVVPNSCCSGALNVDRPPVMEEAVMMAPAAVSSAVVGDPMEYNAILRRKLEEDLEAFKMWRAASSVVTSDQRSQGSNNHTGGSSIRNNPVQNKLMNGEDPINNNHAQTAGLGVRLATSSSSRDPSPSDEDMDGEVEILGFKMPTEERVRKRKESNRESARRSRYRKAAHLKELEDQVAQLKAENSCLLRRIAALNQKYNDANVDNRVLRADMETLRAKVKMGEDSLKRVIEMSSSVPSSMPISAPTPSSDAPVPPPPIRDSIVGYFSATAADDDASVGNGFLRLQAHQEPASMVVGGTLSATEMNRVAAATHCAGAMELIQTAMGSMPPTSASGSTPPPQXIMSCWVQMGPYTWTCIRHCGFRDRWEHFICRRR

SEQ ID NO: 6274 - protein, 271 aa, Zea mays
  unsure (1)..(271): unsure at all Xaa locations
  Clone ID: TF_ZmC3114_2.pep
HASAHASGKGKGKGGGASPEKGSSGAPSGEDDSRSSDSGSDESSETRDDDTDHKGSSAPKKRKSGNTSAEGEPSQAAVVRYATVESPYPAKGRSAXKLPVSAPGRAALPSATPNLNIGMDIWNASPALAVPAVQGEANPGLALARRDGVTQLDERELKRERRKQSNRESARRSRLRKQQECEELARKVADLTTENSALRAELDNLRKACQDMEAENSRLLVSTVPSVTTTLGMSIEPPKAQQHHDDEGQLHKKSSNNSNGKGSHKPEANTR

SEQ ID NO: 6275 - protein, 147 aa, Zea mays
  Clone ID: TF_LIB4740-086-A1-K1-E10.pep
MAANYHHYQMAVHAAAAAAAWRREPDSPQLSFVSGCSSLFSISTLQDDDDDRAAAVVIAAGHALPSTPVSLAGFVADEVDMEVQQASGDDRRSIRMMRNRESALRSRARKRVSIVNSLHKNMYVGLYYKVYIYKTDRTFVFGYSTFS

SEQ ID NO: 6276 - protein, 156 aa, Zea mays
  Clone ID: TF_ZmC3533_1.pep
MSSGTSSGSSRWVQSSRSEDDLDLQAQMERRRKRRKESNRESARRSRQRKQEHLDDLTSQVNQLKDQNKQLSMALSITSQNLVAVQAQNSVLQTQKMELDSRLGALTEILWYMNSSTSTSTAPTNPAIANDFTAWSRASDILGGTSYSAIDLYQCF

SEQ ID NO: 6277 - protein, 128 aa, Zea mays
  Clone ID: TF_ZmC245141_1.pep
MASEWRAQPLSIATGATLDSIYSDDQITSPSFGALSDPQTPGRKRGALGEVVDKVVERRQKRMIKNRESAARSRARKQAYTNELENKVFRLEEENKRLKKQQELDEILSSAPPPEPKYQLRRTGSAAF

SEQ ID NO: 6278 - protein, 192 aa, Zea mays
  unsure (1)..(192): unsure at all Xaa locations
  Clone ID: TF_ZmC773_12.pep
MAAQEQEQEKQQAKTSTTSSLPSSSERSSSSARNNLTEGGAESDEEIRRVPEMGGASASASSGAGADERPKGEDGKQXAGGGGGAAXAGGKKRGRTAGDKEQNRLKRLLRNRVSAQQARERKKAYLTELEAKAKGLELRNAELEQRVSTLQNENNTLRQILKNTTAHASKRSGGGAGGKGGDGGKKHHLAKS

SEQ ID NO: 6279 - protein, 196 aa, Zea mays
  unsure (1)..(196): unsure at all Xaa locations
  Clone ID: TF_ZmC773_19.pep
MAAQEQEQEQEKQQAKTSTTSSLPSSSERSSSSARNNLTEGGAESDEEIRRVPEMGGASASASSGAGADERPKGEDGKQXAGGGGGAAXAGGKKRGRTAGDKEQNRLKRLLRNRVSAQQARERKKAYLTELEAKAKGLELRNAELEQRVSTLQNENNTLRQILKNTTAHASKRSGGGGGGGGKGGDGGKKHHLAKS

SEQ ID NO: 6280 - protein, 152 aa, Zea mays
  Clone ID: TF_ZmC2315_11.pep
MSSSSLSPAGRTSGSDGDSAADTRRREKRRLSNRESARRSRLRKQQHLDELAQEAALLQAENARVAARAADVASQHARVEQENAVLRARAAELGARLRSVNEVLRVVEEFSGVAMDIQEEVPPADDPLLRPWQLPCYPAVAMPIGAPHMLRY

SEQ ID NO: 6281 - protein, 135 aa, Zea mays
  unsure (1)..(135): unsure at all Xaa locations
  Clone ID: TF_LIB4765-003-R1-M1-E5.pep
MEKRRKPRKESNRESAGRSRLRKQQHHXDLTSQVDQLKGQNKQLNMALSMTSQNLVAVQAQNSVLQTQRMELASRLGALTEILWCISSSTGTAAPTNPAMADGITTTWSWSDASGDILGASAWNQQQQPIDAYRC

SEQ ID NO: 6282 - protein, 366 aa, Zea mays
  Clone ID: TF_ZmC34339_1.pep
SDTAAGAAVPRSLSSPGGSEQQVPSASGLPPRGAGHRRSRSDFLVGFSRPNQLSLPMTPAAGEYRSREASVLEELFRSYRDPNLSSSGDNNSERNDHLGRQLTGQGAWSPGDSSDNDAESWAASGSAAAGTSASHTRHCRSLSVDSIMGNLNFGGLDQVSLRVPPLSPVADASVSLSRTGTGASGGAVATASSQPANGEFSESEMKKIMANDRLAELALVDPRRVKRILANRISAAKSKERKVKYMGELERKVRVLQMETSTLSSKAASSQRECEALRILNNEMKIRLQAMEQQAQLKDALNEALTAEVQRLKQIAGEASDPHVPNMSRKIVEQQLQKQPSEAQLAEQQQPQESEEFKAQQKQWNH

SEQ ID NO: 6283 - protein, 153 aa, Zea mays
  Clone ID: TF_ZmC3163_1.pep
LASLTSGTRRSACMPSCSENTSAGPGGLLGLGEVMMREGNFGRTSSWKTDGQPTKLRQNLPLSPWKADGRHSTGDEISAEPPPGKLMIKGAKFGRTSLDPLWKWMFRSRNFGRTSPWDRQQVQVSETRGWMESPNFASTIRSTQTGRTGGVCQ

SEQ ID NO: 6284 - protein, 351 aa, Zea mays
  Clone ID: TF_ZmC31647_1.pep
MQQQPEPADPPGRALPPPAVPAPAPVAARAAHHRRARSEVAFRLPDDLGIGGGGGPDGDTFDDIGSEDDLFSTFMDIEKISSSGPSDRDRAAETSSPPRPKHRHSSSVDGSGLFFSPGIGGGAGKDAAASLAEVMEAKKAMTPEQLAELAAIDPKRAKRILANRQSAARSKERKARYMTDLERKVQTLQTEATTLSAQLTLFQRDTTGLSTENAELKIRLQAMEQQAQLRDALNDALKQELERLKHATGEMTNSSEAYNMRFQHVPYNSSFFPLSQQNASPHLGSTQLPLPFHPPHPNVPNHQMVSHRNTLPDIMQQESLGRLQGLDIGKGPLVVKLESSSISASESSSTF

SEQ ID NO: 6285 - protein, 220 aa, Zea mays
  Clone ID: TF_ZmC99570_1.pep
QRRREPRRARLEERAIIMYHHHFHGEVASLRFLSPPNASTSFAAHHHMNMALPPPSYFQDDDATLAAIDGGGDAACFDELDTIVVVREADAAAAARCHLTGSNNGGLSGSDQLLDAAVIMAADEERRRRRMVSNRESARRSRMRKQRQLSELWAQVSHLRGANRRLLDDLNRALRSCADARRESARLREEKAELTKKLEQLLQAEKGSLSEAAEPCKSYC

SEQ ID NO: 6286 - protein, 338 aa, Zea mays
  unsure (1)..(338): unsure at all Xaa locations
  Clone ID: TF_ZmC1391_4.pep
MGHDEAVVTQNSVKAPSPPKDQPAIYPCFDWSTMQTMPPAAFGKSYAAIYPHAGGFLHQLMPLVVNPLSAEPAKSGNSKHASLNMNLKEIHGSAVSSCISQKTPGDPRLAGSGDGESFAKGVNXRRRRGDCLRACLPLKSPCQHHCSPRSRPPCLSHVNVESLLXAKPCVSTGSDFKVSGPTSTEWPAKADKESKRERRKQSNRESARRSRLRKQAETEELARSVXLLSEENTSRRSXISRLTESAQKLRMENSALMEKLADGTSDQAQEASAGHQTTPTAPSSACVVKNLLWMMDGEAASRGGGVSGFLSRRRDHGAPMLRQLLSSGPLAADAVAAS

SEQ ID NO: 6287 - protein, 420 aa, Zea mays
  Clone ID: TF_ZmC11253_1.pep
MHPVRPRAVVPRVPSSPAANLNIGGDYWAAPGCAAVPAGHGKAPAGSATFQPIGFLELNQLTPTPRPSKASKASEQDQPPATTTSSGTASVYPESPSFQAYSAIPPHAFFPPTVAANPQAHPYMWGAQPIVPPYGTPPPPPYVMYPPGTVYAHPSTPPAMHPFGHYPMPTNGHVETHGAAPSAPEISGKSEPGRTSAPSANGITSHSESGSESESEGSDDNSQNDSHSKDNDGKEDGNSQNGMSYSGSQGVVNQTMAMLPMQPGAMVGGVPSSTAANLNIGVDYWAAPGSAAVPAAHGKAPAGSARGDQWDERELKKQKRKQSNRESARRSRLRKQAECEELGQRAEALRSENSSLRAELERIRKEYEQLLSQNASLKEKLGAASSDSLPDMNEQNDQNDGDGGYRKQPDSDGHQPGSES

SEQ ID NO: 6288 - protein, 149 aa, Zea mays
  Clone ID: TF_ZmC11253_2.pep
GVDYWAAPGSAAVPAAHGKAPAGSARGDQWEKYILLTTDCDERELKKQKRKQSNRESARRSRLRKQAECEELGQRAEALRSENSSLRAELERIRKEYEQLLSQNASLKEKLGAASSDSLPDMNEQNDGDGDGGYRKQPDSDGHQPGSES

SEQ ID NO: 6289 - protein, 193 aa, Zea mays
  Clone ID: TF_ZmC5008_9.pep
MDDGDLDFSNPDTYLCPALGTDPPSSCSMDSYFDEILKDTEHLACTHTHTCNPPVHDLSHTHTCVHVHTKIVAASPGDAESPSENNSNGNAPSKKRPSGNRAAVRKYREKKKAHTASLEEEVVHLRALNQQLMKKLQSHAALEAEAARLRCLLVDIRGRIEGEIGAFPYQRPAAVKNVDLLSSVDQESLLGSA

SEQ ID NO: 6290 - protein, 369 aa, Zea mays
  Clone ID: TF_ZmC27955_1.pep
MSDDSDGQRQCRRGVTVDVELGAAMALADMAGVAGPGGEQPPPVRRATPAPSAHQEDEASTRLSLELGEVSIQASPCSSSSSFGGHPPPPPSHQAAYQQPAVPEPATTGYGPRPRHAVTEAEKEAKRLRRVLANRESARQTILRRQAIRDELARKVADLSSQNESMKKEKDVVMEEYLSLKEANKQLKEEVAKTSRKPAMPAQQQAAESLVPAPPRPGFLYSAAPPAPVPVPYVWGSWPPSAAAGSEQHGSPPPLCLQPCAWYYPAVADPRGSPSSAHAQQPPAFQDPRAATGEEDTDDDPCSLTLGLEVDKRSAPVGIVAGPASGSGSGGGGAQSDRDRAAQARRRRRDLTKLKHTHAAARPGSSEQW

SEQ ID NO: 6291 - protein, 170 aa, Zea mays
  Clone ID: TF_ZmC3163_2.pep
MSSGSSFGSSQWTQRSRSAEDDLDLDLQAEMEKRRKRRKESNRESARRSRLRKQQHHDDLTSQVDQLKGQNKQLNLALSTTSQNLVAVQAQNSVLQTQRMELASRLGALTEILWCISSSTGTAAPPTNPAMVNGGVTTTWSWSDASGDILGASAWNHQQQQPIDAYRCYY

SEQ ID NO: 6292 - protein, 332 aa, Zea mays
  Clone ID: TF_ZmC3503_2.pep
MDPRFPLPAAAAPSTGGGGGARGHHRRAHSETFLSFHDADLLLDPDGDFFSDLDFPSLSDDSPAASDPTPPPHPQQQPPQASPAPRPPGGTHTRSLSLDAAFFEGLAFQGPSGSAGGGGGPGHKRSGSMDGDTSPFEGESALSSGLPDYAKKAMPAERIAELALIDPKRAKRILANRQSAARSKERKIMYTSELEKKVQTLQTEATTLSAQLTLLQRDTTGLTAENRELKLRLQSMEEQAKLRDALNEALREEVQRLKIAAGQVGNMNGNPFNGGLQQQIPSYFVQQQHRMPYFGGHQAQLHNQNQNHRHQISSNVGQTLSGQSLNDSMDFM

SEQ ID NO: 6293 - protein, 159 aa, Zea mays
  Clone ID: TF_ZmC28236_1.pep
RAPLVPPLQFGNGFVSGAVGQQRGGPVPPAVSPRPVTASAFGKMEGDDLSSLSPSPVPYIFGGGLRGRKPPAMEKVVERRQRRMIKNRESAARSRQRKQAYMMELEAEVAKLKELNDELQKKQVEMLEKQKNEVLERMRRQVGPTAKRICLRRTLTGPW

SEQ ID NO: 6294 - protein, 171 aa, Zea mays
  Clone ID: TF_ZmC7838_1.pep
MASSSGSGSSGSLSAATAALAAAAGTEEELRALMEQRRAKRMLSNRESARRSRMRKQRHLDELTAQAAHLRRENAHVATALGLTAQGLLAVDAENAVLRTQTAELAARLGSLNDILACMNTNAVGAVAVSLTAAAAAAAASSDPCLAFDGATALDDLLRSCPENMFQYQLC

SEQ ID NO: 6295 - protein, 161 aa, Zea mays
  Clone ID: TF_ZmC95773_1.pep
PTRPAASSGAGARGGGGAAEMTLEDFLARDSCAMAAVMEGDMALGFPDGDGDAAGSVAGGVGGVRGGGKRALLDPADRAVMQRQKRMIKNRESAARSRDRKQAYVAELESQVMQLEEEQTELLREQEDRRQKRLKELTERAVPVIRKKSPQDLRRTNSMEW

SEQ ID NO: 6296 - protein, 135 aa, Zea mays
  Clone ID: TF_ZmC1133_1.pep
MSSSRRSSSPDSNDTTDERKRKRMLSNRESARRSRARKQQRLEELVAEVARLQAENAATQARTAALERDLGRVDGDNAVLRARHAELAGRLQSLGGVLEVLQMAGAAVDIPEMVTDDPMLRPWQPSFPPMQPIGF

SEQ ID NO: 6297 - protein, 325 aa, Zea mays
  Clone ID: TF_ZmC1133_2.pep
GSDSQNPMGCIGGKDGCQGRSMGSSVTISGMSTAAPAIWSTSRTPPSDCRRPASSAWRARSTALSPSTLPRSRSSAAVRACVAAFSACRRATSATSSSSRCCFRARDRRADSLLDSIRFRLRSSVVSLLSGLELRRDDDMDACLVGLNLFGGGWGGGRMGRNKSPRDGFKRLSKRERERERERETAKDQQVERGDAFMRRRRTSRGRRRRRSGSGGYGARSASSEHGGRQRNWWVNMGVGTVCSSDGRIYAGTGGGTGEQEFEETRGAGCKSSFTERRVLDLDGSQIERKKQEKREELRGPECKKKRGGRDLAEREERHSLSFIR

SEQ ID NO: 6298 - protein, 135 aa, Zea mays; identical to SEQ ID NO: 6296
  Clone ID: TF_ZmC1133_3.pep

SEQ ID NO: 6299 - protein, 332 aa, Zea mays
  Clone ID: TF_ZmC1133_4.pep
GSDSQNPMGCIGGKDGCQGRSMGSSVTPPGMSTAAPAIWSTSRTPPSDCRRPASSAWRARSTALSPSTLPRSRSSAAVRACVAAFSACRRATSATSSSNRCCFRARDRRADSLLDSIRFRLRSSVVSLLSGLELRRDDDMDACLVGLNKGTCVWWGVGWGETRALEMDSKDYLRERERETAKDQQVERGDAFMRRRRTSRGRRRRRSGSGGYGARSASSEHGGRQRNWWVNMGVGTVCSSDGRIYAGTGGGTGEQEFEETRGAGCKSSFTERRVLDLDLDGLLADRKKQEKREELRLRGPECKKKRGGRDLAEREERHSLSFIRRWGTRPGR

SEQ ID NO: 6300 - protein, 253 aa, Zea mays
  Clone ID: TF_CC-ZMPO148024B07_FLI.pep
ALIPRVEPTRGAGSRSRPWRSCRPRSPPWRRRGRSSGAGTSSSAAPPWARSSPPRPCSRRGWTSSSTSPPPSAARTAAPSATPWPSSSPSDHNSINDEKTDRGDAEEAQSKCHGAAAATAVDPKRVKRILANRQSAQRSRVRKLQYISELERSVTSLQTEVSALSPRVAFLDHQRSLLTLGNSHLRQRIAALAQDKIFKDAHQEALRKEIERLRQIYQQQSLKSGREPDAAPSVRDDKDMIGSEGTAAPGPPS

SEQ ID NO: 6301 - protein, 287 aa, Zea mays
  Clone ID: TF_ZmC2362_1.pep
MAQLPPKIPTVAPAWPEFGGGHQQQRSPSVGTFLAAAPMQPSWVDEFLDFSAAKRGAHRRSVSDSVAFLEPEPGPGDGNAGAHDFDRLDDDQLLSMFSDDLQPPPPQPQTQAAPAPVASSSSPSDHNSINDEKTDRGDAEEAQSKCHGAAAATAVDPKRVKRILANRQSAQRSRVRKLQYISELERSVTSLQTEVSALSPRVAFLDHQRSLLTLGNSHLRQRIAALAQDKIFKDAHQEALRKEIERLRQIYHQQSLKSGREPDAAPSVRDDKDMIGSEGTAAPGPPS

SEQ ID NO: 6302 - protein, 204 aa, Zea mays
  Clone ID: TF_ZmC1049640_1.pep
AKKAMSAANLAELALIDPKKAKRIINNRQSAARSKERKMRYIAELERKVQFMQREATALATQLALLQRDTAGLTVENGDLKIRLESTEQQIHLQDALNGALKSEMQRLKMATGQAGNQMMNFAEPPHTFGGANQQVFHHPGQAVPPFLVAMQQQQQLLLPHMNQPLHPLQSQPLHQAATLSIDMAGLPAPPPGQWQWGGDTWSE

SEQ ID NO: 6303 - protein, 151 aa, Zea mays
  Clone ID: TF_ZmC2315_10.pep
MSSSSLSPTAGRTSGSDGDSAADTHRREKRRLSNRESARRSRLRKQQHLDELVQEVARLQADNARVAARAADIASQYTRVEQENTVLRARAAELGDRLRSVNEVLRLVEEFSGVAMDIQEEMPADDPLLRPWQLPYPAAAMPIGAPHMLHY

SEQ ID NO: 6304 - protein, 151 aa, Zea mays; identical to SEQ ID NO: 6303
  Clone ID: TF_ZmC2315_14.pep

SEQ ID NO: 6305 - protein, 151 aa, Zea mays; identical to SEQ ID NO: 6303
  Clone ID: TF_ZmC2315_15.pep

SEQ ID NO: 6306 - protein, 151 aa, Zea mays; identical to SEQ ID NO: 6303
  Clone ID: TF_ZmC2315_9.pep

SEQ ID NO: 6307 - protein, 215 aa, Zea mays
  unsure (1)..(215): unsure at all Xaa locations
  Clone ID: TF_LIB3596-021-Q6-K6-F2.pep
EWRETRSTGRRTSLSPAXYVVSDASGPSSAPAGAGAGAGATPALCCGIWAAYDAIARSLRASAXASARSRAFWQRTARPCRARACRLASSSRFSPRSRAASARSSSSCCCFRARDRRADSRFDSLRRCRRRRSSSSSSSGSGCLAAAAGVDAAITCSRLGHDSGPHGVNPHVVTSIVVPQLDDASSRASCTDSISPCSFSPHGCRCTTYDVSAIP

SEQ ID NO: 6308 - protein, 352 aa, Zea mays
  unsure (1)..(352): unsure at all Xaa locations
  Clone ID: TF_ZmC13853_7.pep
MEFKNCGSSSQPRPAVVVGEEAALARQGSVYSLTFDEFQSAPGGAAAIFRXGGGSIPKDFGSMNMDELLRSIWTAEETQAMASASGAGAGGGMPPTSLQRQGSSLTLPRTLSTKTVDEVWRNLVRDEPXXXXXXXXXXQHHRQSTLGEMTLEEFLVRAGVVRENPAPAPPAPPPMIPPRPVPVAPKSSAXXGNLPGADADTAAAAAALGFAPVGXXXLAQIPPRAAGMGGGAMAVQAAVNQLDSGGKGYSDLSSPTEPLPFSFEGMIXXXXXXXXXEKVVERRQRRMIKNRESAARSRARKQAYTMELEAEVQKLKEQNQELERKQAEIMEMQKNEVTVNSKLRVFDPCILS

SEQ ID NO: 6309 - protein, 293 aa, Zea mays
  Clone ID: TF_ZmC3110_1.pep
ILFLDENDEELFSMFLDVDKLNSSCGASSEAEAESSSAAGGGGEGAELADAPRPRHQHSQSMDGSMSIKAEQLVGAPGMEGMSSAEAKKAVSAAKLAELALVDPKRAKRIWANRQSAARSKERKMQYIGELELKVQTLQTEATTLSAQLALLQRDTTGLTTENSELKIRLQTMEQQVHLQDALNDTLKTEVQRLKVATGQVGNGGGGMMLNFGAMPRLVGGNQQMFHSSQAMQSVLATHQLQQLQLHSQPQQQQLHSLQLQQVARDLKMKGHLGGQGQWGDGKSGSGSRSSGS

SEQ ID NO: 6310 - protein, 106 aa, Zea mays
  Clone ID: TF_ZmC69637_2.pep
MTLSGGASSGSSHGTRSLGSEGDMVHRMELMRKRRMESNRESAKRSRQRKQQHLDDLNSQVNLTQSKSQMKKTRLVLQDMLKQANSDNARCPLISQGPPPNKIDSK

SEQ ID NO: 6311 - protein, 259 aa, Zea mays
  Clone ID: TF_ZmC2931_1.pep
MASSRVMPSSSPSHTASDLARLAQAASRPGGGGSGLGSMNVEELLRGIYSDMPTPAPPASEPERPRSPAPAPEVATRRTAEEVWKEITGGGGSGEAVAPVAAQAVAPDGGAGTGGPEVTLEDFLARESAVKEDEVKISVPPAPVMGLPGGAEGVSVPGGGGGRERKRQLMDPVDRAAMQRQKRMIKNRESAARSRERKQAYIAELESLVTHLEEENAELLREQEERHQKRLKELLERVTPVILRKKPSGDLRRTNSMQW

SEQ ID NO: 6312 - protein, 356 aa, Zea mays
  Clone ID: TF_ZmC2884_1.pep
MDLNECERRGPAGPDPLSRQGSIYSLTFDEFQNTLGGMGGGLGKDFGSMNMDELLRSIWTAEESQAMASASASASASVSALGAAVDGGAALQRQGSLALPRTLSVKTVDEVWRDFVREAPPGTAGGEEPQPNRQPTLGEMTLEEFLVRAGVVRDNPAAAAAAVPAQPVAPRPIQAVSNGASIFFGNFGGANDAGAGAMVFAPVGIGDQAMGNGLMPGVAGMAGGAVTVSPVDTSVAQLDSMGKSDEDLSSPMAPVPYPFEGVIRGRRSGAGVEKVVERRQRRMIKNRESAARSRARKQAYTMELEAEVQKLKEQNAELQKKQEQIMEMQQNQVPELVSNPYAQKKRCLRRTLTGPW

SEQ ID NO: 6313 - protein, 99 aa, Zea mays
  Clone ID: TF_LIB5075-003-R1-XP1-H2.pep
QRLQRRKQSNRESARRSRSRKEDHLNELEAQVAEVRVENSSLLTRLAAVNHKLNETAGDNTVLKADVENLLPNVNMGEDSAKRPTGMNPLYPGETDMAS

SEQ ID NO: 6314 - protein, 665 aa, Zea mays
  Clone ID: TF_ZmC15321_1.pep
MAEPAILDPSPFDLRHYPAHLFDPDIPLAAADFPLGEFAGDDGCDGLDFDVPVDFSIDDFLLRSPDRGHDGDDSGEGSAAGSGPTASSLASPATSGTNSAVANVGNRKVKHEDSDEGRSGATPNWSLKRKQVSPGEATSDGAKCRRSGDGDVSPSASASRAATEDSDERGVGGEEEDKRRTARLMRNRESAQLSRQRKKRYVEELEEKVKSMHSVINDLSCKISFIAAENATLRQQLGGVGVSGPPPGVYPPPPPGIHFPWVSGYAMRPHGSHVPLVPIPRLKPQHAAAAVKVSKKPDVKKSVESKSKTKTKTKTKKVASISLLGLLFVAFVFGAFVPGFNHSLGLRGRSDNVMFGNFGQSDARVFSVTNHGKGPKGSFNSSDMISTDHDMMTGHDDGAGQKHRAANNSSEILPALLYVPRNGKHVMINGNLIIHSVMASEKAVAHKGSNSQSVKDHKETSVAIARYLSPPGKDMNSKEMFPPDAPLPQWFREGMEGPVLNSGMCSEVFQFDISPASAKSGGIIPASAKSASSVNATQKILKPSPAYRGKLKNRRIMYNEAIPLTGKTANNTKPQAFNSTAESSKVPDTDSKPASSVIVSVLADPREAGNGDGDPRVSPKPLSRIFVVVLLDGVRYVTYSCTLPFKSASPHLVELTLGPVQLSGP

SEQ ID NO: 6315 - protein, 147 aa, Zea mays
  Clone ID: TF_LIB5025-063-A1-XP1-D12.pep
MSSNSSNTDLINQLLSLPVDFTMDPLVIPTTTNVVRPKKSRVTLEDKDQKTKERILRNRAAAQESRDKKRRYVSDLESSNKRLEEENGQMKKKMKHLEEENMSLACQLESISKQFAALQAQIKFNTNSTFLFNDFCSARIVKEIICG

SEQ ID NO: 6316 - protein, 410 aa, Zea mays
  Clone ID: TF_ZmC191_1.pep
MERVFSMEEIPNPYWAPPHPQPAAGGAVAAPGGVGGAGDAAGAMNRCPSEWYFQKFLEEAVLDSPGPVAGVGRSSGQAGVEAAESKPLGAAAPASVSSSVVDPVEYNAMLKQKLEKDLAAIAMWRASGAAPPDLSATAASLPSVGVPHAAPLKPVGGTESLVQNMLAGAPVGGSGPHVVQIADIPVKQTTSSSSREQSDDDDMEGDAETNGNGNPVQQRQQRRKQSNRESARRSRSRKAAHLNELEAQVAQLRVENSSLLRRLADVNQKFNEAAVDNRVLKADVETLRAKVKMAEDSVKRVTGMNALYPAVSDMSSLSMPFNGSPSDSASDGTVPIQDDLNSYFANPSEIGGNNGYMPDIASSVQQDDNFVNGYQAAGKMGRTDSLQRVASLEHLQKRMCGGPASSGSTS

SEQ ID NO: 6317 - protein, 345 aa, Zea mays
  Clone ID: TF_ZmC191_3.pep
LTRGRTRGGFCPAARRSASIRNGARLLHGGDPQPLLDPVEYNAMLKQKLEKDLAAIAMWRASGAAPPDLSATAASLPSVGAPHAAPLKPVGGTESLVQNMLAGAPVGGSGPHVVQIADIPVKQTTSSSSREQSDDDDMEGDAETNGNGNPVQQRQQRRKQSNRESARRSRSRKAAHLNELEAQVAQLRVENSSLLRRLADVNQKFNEAAVDNRVLKADVETLRAKVKMAEDSVKRVTGMNALYPAVSDMSSLSMPFNGSPSDSASDSTVPVQDDLNSYFANPSEIGCNNGYMPDIASSVQQDDNFVNGYQAAGKMGRTDSLQRVASLEHLQKRMCGGPASSGSTS

SEQ ID NO: 6318 - protein, 300 aa, Zea mays
  Clone ID: TF_ZmC3759_1.pep
MDIDLFPDIDLDALLASFSGDPAAVSGLIIPSPPPPAPATAHDAEAGSPESVTSRTNPLGEVALSEIERLLMQEGEAELGGEVDGISVDQFFDALYDGEEAKGEREAGASADVDSGRDDVLEVVTPEAGTVEVDGDDPISKKKMRQMRNRDSAMKSRERKKSYIKDLETKSKHLEAECRRLSYALQCYAAENMALRQSLLKDRPLGAPTATQESAVLTETLPLVSLLWLVSIVCLFLMPVLPNRSPAAPSSGGRDLVMAAGKTSSETPEILELILHGRRCKSTRAKIKLCILPFHAGAAC

SEQ ID NO: 6319 - protein, 196 aa, Zea mays
  Clone ID: TF_ZmC382380_1.pep
FCNCSRTPRTASSLLSPHCKPPSLLHSEMQQNWAADLACLPGLDLGSLFLPQNDDPMYDFSTFDMVDLDPYPCSCNGSVTTTTVSSVSAAAADKHQERRGNDVERKKRRLASNRESARRSRVRKQRRLYELSLQVAELLGTNQRLLVELNHVTAKHALLARENAKLREEAAGLQRRLSEMELMGEAEAAALSPEVA

SEQ ID NO: 6320 - protein, 332 aa, Zea mays
  Clone ID: TF_ZmC3890_1.pep
MKKCPSELELEAFLRGREDATAAAAAAAVAEQKPAHDVAALAPFGAGGVFPSSDLSAFSFADSNTLNGTGNIHNHLWSHNHNVRHPAVSTTIESQSSICAAAAASPTSATNLYLKESQALGGTSGSDSDSDSLLDIEGGPCEQSTNPQDVKRMRRMVSNRESARRSRKRKQAHLADLETQVDQLRGENASLFKQLTDANQQFTTAVTDNRILKSDVEALRVKVKLAEDMVARGALSCGLGSLGLSPALNPRQACRGPDVLSVSGLDFPGADDACFTGLSPAEQLQLQSSPLQSIAASLESLDNRMASEVTSCGGPGVDVWPWDHHSNGGLSK

SEQ ID NO: 6321 - protein, 246 aa, Zea mays
  Clone ID: TF_ZmC3890_2.pep
LTVPTTEFNHWHAAAAAASPTSATNLYLKESQALGGTSGSDSDSDSLLDIEGGPCEQSTNPQDVKRMRRMVSNRESARRSRKRKQAHLADLETQVDQLRGENASLFKQLTDANQQFTTAVTDNRILKSDVEALRVKVKLAEDMVARGALSCGLGSLGLSPALNPRQACRGPDVLSVSGLDFPGADDACFTGLSPAEQLQLQSSPLQSIAASLESLDNRMASEVTSCGGPGVDVWPWDHHSNGGLSK

SEQ ID NO: 6322 - protein, 75 aa, Zea mays
  unsure (1)..(75): unsure at all Xaa locations
  Clone ID: TF_700154561H1.pep
GFRRRRPVAGDGRRRRDHEGSGGGGGVREQDRFLPIANISRIMKKAVPANGKIAKDAKETLQECVSEFISSXTAR

SEQ ID NO: 6323 - protein, 160 aa, Zea mays
  Clone ID: TF_LIB4729-029-R1-K1-G4.pep
MSPATADEPSVAMEEQPGKESEEAADAMEEQLGKESEEAAESAEAARQVEVEPEEGVDPAEAMEKAGEEAEAEEGASLRPALPVGRVKRIMRVDRDIKKVTSEAALLIAAATELFLGSLATGAHAAAARRSRRTVRAVHVRAAGRAHRPTADFLLDCLAA

SEQ ID NO: 6324 - protein, 142 aa, Zea mays
  unsure (1)..(142): unsure at all Xaa locations
  Clone ID: TF_LIB4744-036-R1-K1-A1.pep
MEPSSQPQPMMGVGSQPYPAAAPYVPVPGSLAVPPGSQPAAAFPNPTQLSAQHQMVYQQAQQFHQQLQQQQEQQLREFWTTQMDEIKQANDFKIHTLPLARIKKIMKADEDVRMISAEAXVVFAKACEVFILELTLRSWMHT

SEQ ID NO: 6325 - protein, 137 aa, Zea mays
  Clone ID: TF_LIB3689-246-Q1-K6-E11.pep
MEPSPQPMGVAAGGSQVYPASAYPPAATVALQSGQPFPANPGHMSAQHQIVYQQAQQFHQQLQQQQQQQLQQFWVERMTEIEATTDFKNHNLPLARIKKIMKADEDVRMISAEAPVVFAKACEIFILELTLRSWMHT

SEQ ID NO: 6326 - protein, 189 aa, Zea mays
  unsure (1)..(189): unsure at all Xaa locations
  Clone ID: TF_LIB4826-107-A1-N1-C9.pep
KISAGSNPLEEYTIPKGTITRIMRQVLPQDSRVTGGAKETMDQCIVQFSTALVRAATQECRRDRRXTITADDLIVGFANLGLADYVQPMSVYLRLYREAVNNQQQAVAPPAPTVQRGTTTAVPPPPPNLTLQLGLPSVPDVTELARDTDVYALWHGAAPAAGTTSASSVAPMPPPAGALQTKKVSYGSK

SEQ ID NO: 6327 - protein, 302 aa, Zea mays
  unsure (1)..(302): unsure at all Xaa locations
  Clone ID: TF_ZmC4739_2.pep
MDPMDIVGKSKEDVSLPKXTTMFKIIKEMLPPDVRVARDAQDLLVECCVEFINLLSSESNEVCSREEKKTIAPEHVIKALSDLGFREYIEEVYAAYEQHKLDTLDSPKAGKFTGIEMTEEEAVAEQQRMFAEARARMNNGAPKPKETEQEPPQQPQAQPQLQLHTEPQQPVQSQVQLHSPTQHSLQPQVQLHPQPQQLPQVQVHSQTQLHPQPQQPQVQVHPQLQQLPQLQAHSQPPQPQVQXPPQPQQPPQVQLQSSVQQTSQPQPQVHLYNHRGGSQAQLQPQLPGQLQTQGQTGPGIDS

SEQ ID NO: 6328 - protein, 262 aa, Zea mays
  Clone ID: TF_ZmC30175_1.pep
MNNPQNPKASAPCTLPSELPKEAVATDEAPPPMGNNNNTESATATMVREQDRLMPVANVSRIMRQVLPPYAKISDDAKEVIQECVSEFISFVTGEANERCHTERRKTVTSEDIVWAMSRLGFDDYVAPLGAFLQRMRDDSDHGGEERGGPAGRGGSRRGSSSLPLHCPQQMHHLHPAVCRRPHQSVSPAAGYAVRPVPRPMPASGYRMQGGDHRSVGGVAPCSYGGALVQAGGTQHVVGFHDDEASSSSENPPPEGRAAGSN

SEQ ID NO: 6329 - protein, 248 aa, Zea mays
  Clone ID: TF_ZmC2163_1.pep
MEPSPQPMGVAAGGSQVYPASAYPPAATVAPASVVSAGLQSGQPFPANPGHMSAQHQIVYQQAQQFHQQLQQQQQQQLQQFWVERMTEIEATTDFKNHNLPLARIKKIMKADEDVRMISAEAPVVFAKACEIFILELTLRSWMHTEENKRRTLQKNDIAAAITRTDIYDFLVDIVPRDEMKEDGIGLPRAGLPPMGAPADAYPYYYMPQQQVPGSGMVYGAQQGHPVTYLWQEPQQQQEQAPEEQQSA

SEQ ID NO: 6330 - protein, 177 aa, Zea mays
  Clone ID: TF_LIB4764-066-R1-K1-E2.pep
MEPSSQPQPVMGVGSQPYPAAALYVPLPGALAVPPGSQPAAAFPNPTQLSAQHQMVYQQAQQFHQQLQQQQEQQLREFWTTQMDEIKQANDFKIHTLPLARIKKIMKADEDVRMISAEAPVVFAKACEVFILELTLRSWMHTEENKRRTLQKDDIAAAITQTDIYDFLVDIIPRDEM

SEQ ID NO: 6331 - protein, 174 aa, Zea mays
  Clone ID: TF_LIB3732-044-Q6-K6-C4.pep
PASEEGYGHQGHLLSPVGSPLSDNESGAAAAAGGGGCGSSVGYCGGGGGESPAKEQDRFLPIANVSRIMKRSLPANAKISKEAKETVQECVSEFISFVTGEASDKCQREKRKTINGDDLLWAMTTLGFEAYVAPLKSYLNRYREAEGEKAAVLGGGARHGDGGGAADDAGPLAG

SEQ ID NO: 6332 - protein, 200 aa, Zea mays
  Clone ID: TF_ZmC10894_3.pep
MEPKSTTPPPPPVMGAPIAYPPPPGAAYPAGPYVHAPAAALYPPPPLPPAPPSSQQGAAAAHQQQLFWAEQYREIEATTDFKNHNLPLARIKKIMKADEDVRMIAAEAPVVFSRACEMFILELTHRGWAHAEENKRRTLQKSDIAAAVARTEVFDFLVDIVPRDEAKDADSAAMGAAGIPHPAAGLPAADPMGYYYVQPQ

SEQ ID NO: 6333 - protein, 189 aa, Zea mays
  unsure (1)..(189): unsure at all Xaa locations
  Clone ID: TF_ZmC11482_1.pep
RKIKAKRQRRTAAWRPATTGSRRTGTTGASPSRSSGGEPDRLLPIAERRAGSMKEIXLPPNAKISKEAKETMQECVSEFICFVTGEASDKCHNEKRKTINGDDLCWAFGALGFDDYVDPMRGYLHKYREVEGDRAAAAASSSRGGGDHHPASASTSTSPPAAAPPAGHFMFGAAAIDRPDNNTSSARPF

SEQ ID NO: 6334 - protein, 211 aa, Zea mays
  Clone ID: TF_ZmC587803_1.pep
MDPMDIVGKSKEDVSLPKSTMTKIIKEMLPPDVRVARDTQDLLVECCVEFINLLSSESNDVCSRDDKKTIAPEHVIRALQDLGFKEYVEEVYAAYEQHKLETLDSPKATKFTGIEMTEEEAVAEQQRMFAEARARMNNGAAKPKEPALEPQNQPQQPPQPQLQLHPTAQQPPQPQSQLHHPQSQQPLHPQLQPYTQAAPQQPLHPQLQPYT

SEQ ID NO: 6335 - protein, 212 aa, Zea mays
  Clone ID: TF_ZmC11482_2.pep
MPDSDNESGGPSNAEFSSPREQDRFLPIANVSRIMKKALPANAKISKDAKETVQECVSEFISFITGEASDKCQREKRKTINGDDLLWAMTTLGFEDYVEPLKLYLHKFRELEGEKAATTSASSGPQPPLHRETTPSSSTHNGAGGPVGGYGMYGGAGGGSGMIMMMGQPMYGGSPPAASSGSYPHHQMAMGGKGGAYGYGGGSSSSPSGLGR

SEQ ID NO: 6336 - protein, 175 aa, Zea mays
  Clone ID: TF_ZmC9362_1.pep
MPRKITLVKEGEPQPVDAAQGEPAPAPAAPTAALTEAEVDELPRAIVRRLVKDKLSHVAGGEGAEVIVNKDAMAAFAESARIFIHYLSATANDMCKESKRQTINADDVLNALDDMEFSEFVEPLRTSLQEFRNKNADKRSEAKKQQKEKRRKLNEETLPQKENDPADDAKENGVA

SEQ ID NO: 6337 - protein, 256 aa, Zea mays
  Clone ID: TF_ZmC10894_1.pep
MDNQPLPYSTGQPPAPGGAPVAGMPGAAGRHEKHLPLPLPPPPNPPRLTTLAAPESMDPNKSSTPPPPPVMGAPVAYPPPAYPPGVAAGAGAYPPQLYAPPAAAAAQQAAAAQQQQLQIFWAEQYREIEATTDFKNHNLPLARIKKIMKADEDVRMIAAEAPVVFARACEMFILELTHRGWAHAEENKRRTLQKSDIAAAIARTEVFDFLVDIVPRDDGKDADAAAAAAAAAAGIPRPAAGVPATDPLAYYYVPQQ

SEQ ID NO: 6338 - protein, 143 aa, Zea mays
  Clone ID: TF_ZmC10894_4.pep
MEPNSSIPPPVMGAAVAYPPAAGAAYSAGPYAHAHAALGALYPPPPAPGPPSSHQGGAAAAQLQLFWAEQYREIEATTDFKNHNLPLARIKKIMKADEDVRMIAAEAPVVFARACEMFILELTHRGWAHAEENKRRTLQKSDI

SEQ ID NO: 6339 - protein, 251 aa, Zea mays
  Clone ID: TF_ZmC598014_1.pep
MEPSSQPQPMMGVGSQPYPAAAPYVPVPGSLAVPPGSQPAAAFPNPTQLSAQHQMVYQQAQQFYQQLQQQQEQQLREFWTTQMDEIKQANDFKIHTLPLARIKKIMKADEDVRMISAEAPVVFAKACEVFILELTLRSWMHTEENKRRTLQKNDIAAAITRTDIYDFLVDIIPRDEMKEEGLGHNPIVGLPPAMGAPADHGSHPYYYVPAQQVQGAGMMYGGQQGHPVTYMWQTPQGQAAEPPEEEQQQSA

SEQ ID NO: 6340 - protein, 245 aa, Zea mays
  Clone ID: TF_ZmC10894_2.pep
MDNQPLPYSTGQPPAPGGAPVAGMPGAAGLPPVPHHHLLQQQQAQLQAFWAYQRQEAERASASDFKNHQLPLARIKKIMKADEDVRMISAEAPVLFAKACELFILELTIRSWLHAEENKRRTLQRNDVAAAIARTDVFDFLVDIVPREEAKEEPGSALGFAAPGTGVVGAGAPGGAPAAGMPYYYPPMGQPAPMMPAWHVPAWDPAWQQGAADVDQSGSFSEEGQGFGAGHGGAASFPPAPPTSE

SEQ ID NO: 6341 - protein, 127 aa, Zea mays
  Clone ID: TF_uC-zmflteosinte066e07b1.pep
SDFKNHQLPLARIKKIMKADEDVRMISAEAPVLFAKACELFILELTIRSWLHAEENKRRTLQRNDVAAAIARTDVFDFLVDIVPRPPSDRSARLLALASWLSYMCMMSIVQCAMLCILYRNVVMELL

SEQ ID NO: 6342 - protein, 99 aa, Zea mays
  Clone ID: TF_uC-zmflb73001e01b1.pep
AIVPLYGMAFFMMRLMLPMGRFLSCSLRLPPPPPPLGLPLLWLPPLPPWLPQASPICSSRIHISPGAISVHATQRRRPRTGAGPRCETLGQGCQRKIGP

SEQ ID NO: 6343 - protein, 297 aa, Zea mays
  Clone ID: TF_ZmC4739_1.pep
MDPMDIVGKSKEDVSLPKSTMVKIIKEMLPPDVRVARDAQDLLVECCVEFINLLSSESNEVCSREEKKTIAPEHVIKALSDLGFREYIEEVYAAYEQHKLETLDSPKAGKFTRIEMTEEEAVAEQQRMFAEARARMNNGAPKPKEPEQEPPQLPQAQPQLQLHTEPQQPMQSQVQLHSQTQHSLQPQLQLHHQPQQLPQVQLHSQPQLQPQVHLHPQPQLPPQLQVHQQLQQSPQVQVHEQPQVQPQEAQLQSSAQQTSQPQPQAQLQSQGHSQAQLQAGLLGQLQTQAQTGPGMDS

SEQ ID NO: 6344 - protein, 280 aa, Zea mays
  unsure (1)..(280): unsure at all Xaa locations
  Clone ID: TF_ZmC4739_3.pep
MDPMDIVGKSKEDVSLPKSTMFKIIKEMLPPDVRVARDAQDLLVECCVEFINLLSSESNEVCSTEEKKTIAPEHVIKALSDLGFREYIEEVYAAYEQHKLDTLDSPKAGKFTRIAMTEDDAAAEHQRMFAVARARMNNGAPKPKEPEQEPPQLPQAQPQLQLHTEPQQPMQSQVQLHSQTQHYLQPQLQLHSQPQLQPLSXQLPPQLQVHQQLQQPPQVQVHQQPEVQPQEAQLQSSAQQTSQPQPQAQLQSQGHSQAQLQAGLLGQLQTQAQTGPDMDS

SEQ ID NO: 6345 - protein, 169 aa, Zea mays
  unsure (1)..(169): unsure at all Xaa locations
  Clone ID: TF_ZmC29745_2.pep
MDSSFLPAGADNGSAGGANNGGAAAXQAPPIREQDRLMPIANVIRIMRRVLPAHAKISDDAKETIQECVSEYISFITGEANERCQREQRKTITAEDVLWPMSRLGFDDYVEPLSVYLHRYREFQGEARGVRLAPAPPCSDHQHHHSAAPPKLNKTREPASGAAMLPHPH

SEQ ID NO: 6346 - protein, 180 aa, Zea mays
  unsure (1)..(180): unsure at all Xaa locations
  Clone ID: TF_LIB4172-014-Q1-L1-H5.pep
GTPAGTGPEFPGRPTRPNVARIMKNAIPQTGKIAKDAKECVQECVSEFISFITSEASERCHQEKRKTINGEDILFAMSTLGFDSYVEPLKLYLQKFREAMKGEKGIGGAVSATDGLSEELTEEAFTNQLPAGLITADGQQQNVMXLHNVLPTDFWCPANSVFMIGRTDGTGLVWRESDGV

SEQ ID NO: 6347 - protein, 280 aa, Zea mays
  Clone ID: TF_ZmC29745_1.pep
MDSSSFVPAAGAENGSAAGGANNGRVAQQQAPAIREQDRLMPIANVIRIMRRVLPAHAKISDDAKETIQECVSEYISFITGEANERCQREQRKTITAEDVLWAMSRLGFDDYVEPLGAYLHRYREFEGDARGVGLVPGAAPSRGGDHHPHPHSMSPAAMLKSRGPVSGAAMLPHHHQHHHDMQMHGAMYGGTAVPPPAGPPHHGGFLMPHPQGSSHYLPYAYEPTYGGEHAMAAYYGGAAYAPGNGGSGDGSGSGGGGGSASHTPQGSGGLEHPHPFAYK

SEQ ID NO: 6348 - protein, 663 aa, Zea mays
  Clone ID: TF_ZmC16020_1.pep
MKERSSLCESAADGNWGLKYKRKRSKLTVSPSNENEATSPTSDSPMSHGSTKKKLKHDTNISPSAKKIRGHDGYFFECVECDLGGNLLCCDSCPRVYHLECLNPPLKRLPPGKWQCPRCRPKKGSLKMLGNAEVGTSKHEKSTRTYAGTTSGSPPSHTKVSFKTRNSTQDKTGSKKKKKGGARDLMNGGETNTKNNEVEKKKTLILHLKKRSTKELSENTKPSKSEFVELSEEKIVKHGSVLKLKKHPHRMDLSPSKSKTRRQSSQRESKRSGTKKIKYSMSDDDSVSSSEPSTSLDNSESPPKRKHSDGKAPSSSTKKGKKKVKFVEKKHSEEQGVVGDKMMTTQEDQQVDRILGCRLQMSQINPPSHASLEQFESANLQVDGMVLPHASAGIPNRPHDGTESSRNGTIEDICADESANHSGHNLEMRKDTDSKSHEKESHKREQVKKILSVCSGDETNIMRDDQVVRENVSASKKGEDETSDLPAEKDDTILPVTRACTMIRTNQDHTDESKQHGKIEQITNKDYNDAGYEFLIKWVGKSNIHNSWVSESEVKILAKRKLENYKAKYGMSLINICKEQWCQPQRVIGLRASVDEVEEVLIKWCGLPYDECTWERSDEPTLMKYSHLVTQFKNFECQALDKDVVKDYANARNRHELNVLVDQ

SEQ ID NO: 6349 - protein, 138 aa, Zea mays
  unsure (1)..(138): unsure at all Xaa locations
  Clone ID: TF_5108360.pep
SRRQRINGHLAKLRSLLPNTTKXLQIPVQVLQRRMNTSGVAQGLIKWSGLSSSLATWEDLETLKQTFPNAPAWGQAGSRRRGDVTSRAPQAAEPEGAGAKLDNVGRSKEKEEPAGPRRGTRERKLNQRLLGPEWVNSM

SEQ ID NO: 6350 - protein, 169 aa, Zea mays
  Clone ID: TF_LIB3060-107-Q1-K6-E10.pep
MVGDMVYLKLQPYVQSSLVKRANHKLAFKFFGPYPVIAKIGSVAYKLGLPPSSSIHPVFHVSLLKKALGSNMQVSSTLPPLPDSLQKPVRILQRRQMQTHTGVVPQLLIQWTDWPEELATWEDEAAIIARFPEVAAWGQAVTEGGENVMTSNEPTVRSRPRRERGPTQG

SEQ ID NO: 6351 - protein, 1432 aa, Zea mays
  Clone ID: TF_ZmC1278165_1.pep
MAGAEQKGEERWERMLTAVERLTGKMEAMEVGQRKAEEDRALMARQLQETEQTVSRLRLELLAKDLEGNESNSEREHRVHRGDERGGGFGREGGRERREQWGEGREFRPSSLPKWSFPKFHGNDPGIWFDRCVEYFTVYQVPEWIWASTASTHMEGNASKWLQVYKLKHGLGDWEQFTHAVREKFGVEEYPHAMRALVNVKQQHGVEEYSQAFNDIRYAATLHNPELDETLFVTHYVRGLKPEIQSQVMARTPKTVDKAMRLAQLYQEIAEKNRMRSQKGVMGIKTQAIGSRSGILNPELNKERQLRDYRRANGLCYICGDKFEPGHQAKCPKRVVTQIHQLTVEDMSTVLTDEVLLKLEQEEEHIVEGLHQLSWNAIKGTECDGCMRVLSLIQDQVLVMLIDSGSSTTFISQRMVTKLGLSTEDCPPVKVKVANGEIMVCEKNVREVKWKAGGHVYRTAMRVLALEAYDVILGYDWLKQHSPMHCDWINKVLTFCDQGVEVKLQGEADLKREVQQVSVLQLEKWVKGDEVWVFVMLEEVKGEEDEAGNETLTGILEEFADVFAVPTQLPPTRPYDHHIPLLPGSIPVNSRPYRYSPHHKTEIEKQVSELLAAGLIVPSVSPFASPVLLVQKKDGSWRFCVDYRKLNDMTIKNRFPMPLVEEILDELAGTKFFTSLDMTSGYHQIRMGAEDEFKTAFKTHHGHYQFRVMPFGLTNAPASFQCAMNSILQSFLRKFVMPRNVTELRGFLGLTGYYRRFVKNYGLLAKPLTRLLQKQQGFAWSEEAQIAFENLKQAMASTPVLALPRFDLPFTVETDASDIGLGAVLMQQGRPIAFISKALGEKNKHLSIYEKEFLALILAVDRWRQYLQRGAFVIKTDHKSLTYLGDQQLQSDLQKKAMTKLMGLQFQVVYKKGTENVVADALSRVEHMMGLSVLSEIQPIWIQEVVNSYATDEDAQQLITQLLIQSPDEQGFSLQQGIIRKANRIWIGCNSALRTKLIAALHDSAVGGHSGIQATYQRVKKVFWWKGLKNDVTQYVQQCAICQKAKAERVHPAGLLQPLPVPQGIWEDVTMDFIEGLPKSEGFDTILVVVDRFSKYSHFLPLKHPFTAKGVAQVFLENVVKLHGVPRSIVSDRDKVFTSAFWKNLFQLMGVKLLMSTAYHPQTDGQSERVNQCLEMYLRCAVHDQPNKWKSWLALAEYWYNTTYHSVLGCTPFKVLYGYEAPLLVAPKTLGMEDREIADWFAERNAFSVMLKEQLARAQLRMKQYADKGRTPREFQVGDLVLLKLQPYAQKTVVNRSCPKLAFKYFGPFKVISRIGEVAYKLELPGDAQVHPVFHVSQLKPFLPCYSPVFSELPPAVDLSQGGIEPEQVLDRRMVRKGNRAIVQVLVKWSGVPKEAATWEDYAVARARFPEANAWGQALSEARGDVMTEDAD

SEQ ID NO: 6352 - protein, 75 aa, Zea mays
  Clone ID: TF_700168802H1.pep
LNITSDKWSCPECVSPLTEMERILDIEVLEAPREDSSSTEPRSKKMERYLIKWKGLSYIHCSWVSEKRIFRSREY

SEQ ID NO: 6353 - protein, 738 aa, Zea mays
  Clone ID: TF_ZM4892.C1.o1.fg.pep
MEEHVLQVKQVFQKLKDHQLKLKLSKCRFAQTTLEFLGHIISAEGIATDPEKVQVIRDWPIPNNVKEVRSFLGMAGYYRRFVAHYGIISKPLTSLLKKDQIFVWNDEAQKAFEALKAALVQAPLITGALTSNMENFFIKTDQQSLTHLEDQKLSTIWQQKAITKLLGLQFRIIYKKGVENRVADALSRRPNLCTDGSKLQLNVLATSTVVPSWLTEVTNSYEENEEAKSILSTLAAGDTIEPFTLVSGVIKHKGRIWLGSSNQVQLKVMTALHDSPIGGHSGFPVTYHRIKKLFYWAGMKGQIKEFVQSCEICTKAKADRNRYPGLLLPLPIPDQAWQVISLDFISGLPTSRRFNCILVVVDKFSKYAHFLAMSHPFTALSVAKLFLSQVYKLHGLPLSIISDRDPIFTSNLWQELFKLVGTKLCLSSAYHPQSDGQTEWVNQCVEAYLRCFVHGCPKQWSNWLSLAEFWYNTCFHTALGQSPFEVLYGHTPSQLGLSTIEQCQSADLQTYLATRQLMLQRAKLHLQRAQDRMKKQADKGRSERVFQVGQRVFLKLQPICQSSMGSRLNTKLSFRYFGSFLITKQVNPVAYKLALPEGSAIHPVFHVSQLKSAEETRITTDATMPDLLQELKIPTEVLESRLLRKGNKVIPQLLIRWSNWPASLSTWEDEHAIKQQFPRAPAWGQAVCQGEGDVSSTGHLNTGKDAAMEEADAEVQEAKRSTRAKRPNPKYIENVWMN

SEQ ID NO: 6354 - protein, 397 aa, Zea mays
  Clone ID: TF_ZmC1646_4.pep
MDKPIQVRARVDDGGIMWSENIVPNCNWESGETMFYSEFKVLLLKGITSDIEWAGDDHLIYITTESILRPGLQASESKRYLFVKSGSKNTRFIFYLDILKQNKELAVLTPCVYGVDTTPSHCGNHVFMKRRSDELYNSELVACPLDNVAEITSPDHCSSPELQDLLHTRQQMLQQVQMHLQRAQVRMKRQAGKGRMERSFSVGDRVYVKLQPYCQSSAAERVNHKLAFKFFGPLSMVRKVNPVAYEVALPEGSNVHPVFHVSQLKSFVPANVISSSVLPALTPDYQIPEEVMDSRLQRRAGKEVPQLLVRWTSWPPSLAIWEDEHWIKEQFPRAPAWGQAVSEGGGDVNDAGIQDGMGKATQGGAGESPAGGEGDAVPAAQARPADHKAQQEEVHRP

SEQ ID NO: 6355 - protein, 103 aa, Zea mays
  Clone ID: TF_uC-zmromo17027b12a1.pep
QNPPFFHVSQLKPFTPNYGPVFSKLPKVLDLGHEIVQPMDILDKRLVKKGGAALTQVLIKWSGLPVTATTWEDYNVIRARFPNALPWGQASIPGGANVPAEGD

SEQ ID NO: 6356 - protein, 242 aa, Zea mays
  unsure (1)..(242): unsure at all Xaa locations
  Clone ID: TF_ZmC925537_1.pep
FLRCFVNACPSKWVSWLHLAEFWYNSSPHSAIGRSSFVALYGYEPRHFGIQPDTVVASSDLDTXLRDREAMTALIKQHLARSRARMRRQADKHHSERRFQEGDMVWVKLQPYIQSSLAPRANQKLAHRFFGPYKVIARIGSVAYKFDLPASSXLHPVFHVSQLKKSAPRDVXVIAAVPSDITHLRVPESFLRRRLLSHGLRPHHQVLVKWSQWPESLATWEDEDLLRRQFPSAPAWGQASAQ

SEQ ID NO: 6357 - protein, 1626 aa, Zea mays
  Clone ID: TF_ZM4576.C1.o6.fg.pep
MAAADVAVSLPALAGSLVVMTQEIARAFSPRTSQLVSEARRHPSRSRIQAGGSVAVKRWREVADTAPNKPSAQARHLVAAMEDVEKRLAEKFQQALDSSATTLMELSKKMDGIGVLASKLGEIESRQMESDKMVQYLQAKMDLSMKSLAQVSQEQTKLANMVTNAARGMASTSKSPAGDGLMGAHPIGPQVWQNVPPKQTLNVEGGFKRVEDLGNIGEVDSANKRVWLPKMDFPIFEGEDARVWIDHCEAYFALYSIPEEFKVSAAYLHLKGRAAHWFQSCRESVELFEWFQFRLAVLNEFEVSTHADKMLELLTLKQTGTALEYKIQFEKLVYHIRLFDKSISETFLVTQFVLGLKMELRACVEVQFPKSVSMAAQLALKHEAFQSRQGTGNKRFGLVKPAFVSHVNNRESSDLHGEVWKAKQLKEYRRVNGLCYKCGEKFVPGHKCKTAVQPQLNVIAIEEGGDGGPILDDEVLDYLETGIHQDGDEVTLSLNAMRGTDNSKCIKLRALINNQVILQLLDSGSSNTFVSNMTLARLHCELQQIEPVDVKVANGQVLRCTQKAIQLEWWSCGRTFHADAFVIPVAAYDMVLGMDWLEQYSPMLCAWDQKWVEFYYEGSIIRLQGEKDKRNKEILEVSGDQIQGWTKRNDIWAMALLQKVEVEEKKNAETVPPVVEDLLEQFSGVFKVPNSLPPYRDYDHAISLLPGSAPVNCRPYRYSPLQKDEIERQVKEMLQTGLITRSVSPFASPVLLVKKKDGSWRFCVDYRKLNDITVKNKFPMPIIDEFLDELVGATCFSKLDMASGFHQIRMAAGDEEKTAFKTHHGHFQFRVMPFGLTNAPATFQCLMNAIFQHCMRKFVLIFMDDILVYSSSLEQHVNHLQEVFSVLQKHQLYAKRSKCSFAVKHIEYLGHVISENGVSTDPSKTAVMQKWPIPTSHTDLRGFLGLTGYYRKFVQHYGILAKPLTMVLQQKQFVWPPAAQEAFEALKAAMATTPVLALPNFAETFVVETDACDKGVGAVLSQKGHPIAYYSKALGVQNSKLSIYEKEFLAILMAVDKWRCYLQRGLFIIKTDHKSLTHLQDQTLATELQKKAMAKLAGLQFKIQYKKGAENKVADALSRVAPNMELTAISVGTPVWIQEIVKSYELDVQSQNLLRELAVQSPNSQGFRLKDGLIYKNHQLMVGQNVGLQTKLIAAFHSSAVGGHSGIQATYQRIKRLFYWQGIKNDVETFVKQCQVCQRAKHEHCKYPGLLQPLPIPQNCWQDISMDFIEGLPKSSGYSVIMVVVDRLTKYAHFIPIKHPYTAHSIAHTFFSNVVKLHGLPKSIVSDRDKIFTSLFWQELFKLTGTQLHLSSAYHPQTDGQTERVNQCLEMFLRCAVHDTPSQWAKWLDSAELWYNSSYHTSLKCSPFKALYGVDPNVGMMPFEMGERENDASITFQNRHHYLEMIKAHLAAAQNKMKYYADQNRSFRQYQEGDMVYVKLQPFAQSSVAHRPCAKLSFKYFGPFQILSRIGSAAYKLNMPESAAVHPVFHVSQLKTHVPNNTPVYSQLPSAAFAEGVSPEPEVILDRRLVQKGAAAVVQVLIKWVGLPAEMSSWEDYTVLKDRFPDAIIWSPDAARGGENVMTQGA

SEQ ID NO: 6358 - protein, 114 aa, Zea mays
  Clone ID: TF_LIB5075-002-R1-XP1-E11.pep
MDPVSKGAWQKRFFSVAPPAALVFFFVLIFVAGAAVTLDHKEPQCILQRRLVKKGGAAIVQVLVRWQGLPADSATWEDWTVMQARFPDSSAWGQASIPGGGDVTPAPTITGVTA

SEQ ID NO: 6359 - protein, 165 aa, Zea mays
  Clone ID: TF_LIB4172-012-Q1-L1-E4.pep
GRLQVPVRNSRVDPRVRFAVESIRKKRVRKGKVEYLVKWKGWPPKYSTWEPEEHILDPRLVMAYEEKEERDRASGYRKRGPKPRRLLLQESAAPDVVQTPGDWEPMEQAPEEEAEADLTNGPPPWTPTLPSSEVTVTDITANSVTVTFREAQAAEGFFRDRNEKL

SEQ ID NO: 6360 - protein, 363 aa, Zea mays
  Clone ID: TF_UC-ZMROTEOSINTE048H12_FLI.pep
EGLPRSDGFNCILVVVDRLTKYAHFIPLRHPFTANQVASAVLTHVVKLHGVPASIVSDRDRIFTSAFWKGLFKLLDTKLLVSTAYHPQTDGQTERVNQCLEMYLRCTIYNSPAKWKAWLPLAELWYNSSYHSSLQCSPFKALYGYEPKLPSFPVLADVSTTDLSSLIKERDLHLELLKHNLLAAQTRIKLQADKKRIDRQFAEGEMVLLKLQPYTQSSVASRPFPKLAFKYFGPYKILQKIGVAAYKLELPAGSLVHPVFHVSQLKPYTADYSPVYADLPKIPDLTQRDLQPQCILQRRLVKKGGAAIVQVLVQWQGLPADSATWEDWTVMQARFPDSSAWGQASIPGGGDVTPAPTITGVTA

SEQ ID NO: 6361 - protein, 380 aa, Zea mays
  Clone ID: TF_ZmC38719_1.pep
MRRNRKDSGYPTAALGEEDEAEELTEEGDEEEEEQTEEGCGEEDEVEAETPAQEAVEPPKLAEGYFEIEAIRRRRLRKGQLQYLVKWRGWPESANTWEPLENLKACSDIVDAFNKRSRSPRSCGKRKRKTPTTPTSDPNASRGKRGRPPRSEARSMHSIHASEVKKLPCRTSSRRANNNSNKTSPGGLGAAVNLLGQRIVQEGSSGVVSAGFPSQEAPLSVSLTDQQDVQHPANGSLKMDNEIRAITPQGGQVTGAKKRKSGCVRRFKQDEVTQEQGDIRDRTSDKPGNETVDSTEGDPGDKNKGEDSGNQIHMPKIIKIIKPVRYFATVMDGVQQVAITFKALRSDGEMVFVDDKQLKAKEPLVLIDYYEQHLRYNPTS

SEQ ID NO: 6362 - protein, 222 aa, Zea mays
  unsure (1)..(222): unsure at all Xaa locations
  Clone ID: TF_ZmC290186_1.pep
QRYKRALSREEVEVHDVGKEMELDLIKQYSQVERIFADRVSKADGDDLVPEYLVKWQGLPYAESTXKFXETDIDFAQDAIDEYKAREAASDILGKTVDFQRKKSKASLRRLDGQPEWLKAGKLRDYQLEGLNFLVNGWRNDTNVILADEMGLGKTIQSVSMLGFLHNAQEINGPFLVVVPLSTLSNWAKEFRKWLPNMNVVVYVGNRASRKMCQQHEFFSDK

SEQ ID NO: 6363 - protein, 1384 aa, Zea mays
  Clone ID: TF_ZM3648.C14.o2.fg.pep
MGRLLLPQRRRRGWEVGDEWGSTWSTGLTKDHFDGSSVSKPVSAERRQGVMDPNTKMILDEMEKKFSAMDLKWEKRFSAFADAKEERLSAVEVAAEDLAVWRVKMDTTMEDVKLDLRKLNKHWDRASLEAATEPGLLQKPVAAIGRALGGPEGEGFGGIREEPILPEQGFGSVTTYVPTSNKGMHHFVPPPVQSSACCPGLAFDVGGSRHRNFESGFHSLGKLPQLPFPTFEGDNPRLWISRCENYFDMYFVDPDSWIRSLLDRYGKNQHQALLRQLFRIRQTNSVSDYIARFSTLMDQLSAYGAVSDPLYFTTRFLDGLRDEVRAVVIMQRPGDLDAACSLALLQEEVADSGRRRAFPRFESGSWSKSEGKGPFPLPSPPSGDRNVSSNSDKRPVSPSKSVDERLGALRAFRRAKGLRDRCAEKWHKGHTCAATVQLQAMQEGYIFHQDLKVLPLQHYDMILGMDWLEVHRPMHVHWRHKWLSITYHGSFVTLYGSDYGASESLLIQISSVYVPEPASESSKFYPEIESLLSQFSSVTSAPTSLPPVRSCDHAIPLLVGAKPVNIRPYRYPPALKDEIEAQVTVMLQQGLIRPSSSPFSSPVLLVRKKDGSYRFCVDYRYLNALTVKGKFPIPVFDQLMDELAGSSWFSTLDLVSGYHQVRLKSGEEFKTAFQTHGGHYEFVVMPFELAGAPGTFQGAMNTTLATLLRKYVLVFFDDILVYSRTFEEHLNHLRDVLLLLQQDHWHIKLSKCQFAQRTISYLGHIISEQGVATDSAKVAAVRDWPSPLNVKELRSFLGLAGYYRKFIRHFAILTKPLTELLRKGVLYVWTSDHEISFTAVKQALCTAPVLALPDFNKTFCIETDACKSGVGAVLLQEGHPLTFISKALGIKTQGLSTYEKEYLAILIVVEQWRPYLLHAEFIIFTDQNSLVHLNDQRLHTPWQQRVFTKLLGLQYKVVYKQGIQNRVTDALSRRTHEEKSIQEFVASCDICQQAKPDRSKYPGSLQPLAVPAGAWQTITLDFVEGLPLSRGKNCVLVVVDKFSKYGHFIPLKHPFTAASVAHVFMQQVYRLHGLPFAIVSDRDRIFTSQLWKSLFSLAGVALNMSSAYHPQSDGQTERVNQCLETFLRCFVNACPHKWVQWIYLAEFWYNAACPAPQLADWLQEKSVMSALVHQHLARAQQRMKIQADKHRSERHFAVGDSVYLKLQPYVQSSLAPRSNQKLAFRFFGPFSVIAKVGSVAYKLTLPASSHIHPVFLVSQLKKAVPSSVTVDQLPVSLAGFQIPELVLQRRLDSKGNTQALIKWSGLPPSLATWENLEVVQQAFPLSPAWGQAGLRRPGNVSKPVSAEVTEVLGQEDKTESVHRLKRSDRIRRKNVRLSGPEWMA

SEQ ID NO: 6364 - protein, 413 aa, Zea mays
  Clone ID: TF_ZmC5789_3.pep
PDHAWQVVTMDFISGLPVSHKYNSDAWADAWLDAWAHFLALAHPFTALTVAKLYLSDIYKLHGLPSSIVSDRDPIFTSKLWQELFRLAGTKLCMSSAYHPQSDGQTERVNQCLEAYLRCFVHSCPKQWYSWLSLAEFWYNTCYHTALGKSPFEVLYGHAPSQLGLDTVDQCSVPDLQTWLLGHQQMLQQVKFHLQRAQDRMKKQADKGRVERTYTVGDQVFLKLQPFCQRSVADRPVSKLAFRFFGPFEVIEQINPVAYELALPSGSAIHPVFHVSQLKSANGVRVPSTDSLPDIFTGLQVPEEVLESRLLRKGGKVISQLLIKWSNWPVSLSTWEDEEAIKQKFPQAPAWGQAVVKEGGNVSRADHMDHAEERTQAVQQKAQTEGVKEDNQSPRSRRVPKPNTKYIGAEWRV

SEQ ID NO: 6365 - protein, 40 aa, Zea mays
  Clone ID: TF_LIB3245-566-P1-K1-F10.pep
MAAAARHLRTVKWFNDTKGFRFIYPEDGSEDLFLHQSWIK

SEQ ID NO: 6366 - protein, 64 aa, Zea mays
  Clone ID: TF_LIB3070-015-Q1-N1-A3.pep
IGSTEPKAVIFITRDNGSDDLFIHEAYIKDDGFRSLNDGDDVEYTVRSGCYCLSSGSSMSLVPG

SEQ ID NO: 6367 - protein, 69 aa, Zea mays
  Clone ID: TF_LIB3354-053-P1-K1-D1.pep
MHREAVKRFNDTKGLGFIYPEDGSEDVLVHQALIKSEGFRSLAEGEEVELLLLNGDPGLIQAVDFTTPH

SEQ ID NO: 6368 - protein, 55 aa, Zea mays
  Clone ID: TF_LIB3332-019-P1-K1-B4.pep
GSCVGNAFAARHLCTVKCFNDTKGFGVISSEDGSEDLFVHHSCIKSEGFRSFAEG

SEQ ID NO: 6369 - protein, 78 aa, Zea mays
  unsure (1)..(78): unsure at all Xaa locations
  Clone ID: TF_LIB3180-013-P2-M1-D2.pep
MAAAARHRGTVKWLNDTKGFGFIYPXDGSEDLFVHQSLIKSEGLRSLAEGEEVQFSNFDGDYGPSKGGPTNHRSGCIQ

SEQ ID NO: 6370 - protein, 86 aa, Zea mays
  Clone ID: TF_LIB3137-035-Q1-K1-C7.pep
GSGVARAAAVTQRRTVKWFNDTKVFGFICPEDGSKHLFVHQSYIKSDGFHSLADGDDVEFSIYHGDYGRTKAVDLTIPDGSFLRGC

SEQ ID NO: 6371 - protein, 169 aa, Zea mays
  Clone ID: TF_ZmC519941_1.pep
MGERVKGTVKWFNVTKGFGFISPDDGGEDLFVHQSSIKSDGYRSLNENDAVEFEIITGDDGRTKANDVTAPGGGALSGGSRPVEGGGDRGGRGGYGGGGGGYGGGGGGYGGGGGGYGGGGGGYGGGGYGGGGGGGRGCYKCGEEGHISRDCPQGGGGGYGGGEYGGRDR

SEQ ID NO: 6372 - protein, 101 aa, Zea mays
  unsure (1)..(101): unsure at all Xaa locations
  Clone ID: TF_LIB3587-283-Q1-K6-B1.pep
LPRDGSEEGFVHQSSIKSEGFRSLAEGEEVEFSVSEGDDGRTKAVDVTGPDGSFVRGGGGGXGXXXXLXGGGGGGGGGCYNCGQAGHMARDCPSRGGRGGR

SEQ ID NO: 6373 - protein, 75 aa, Zea mays
  unsure (1)..(75): unsure at all Xaa locations
  Clone ID: TF_LIB3245-117-P1-K1-D5.pep
GCWRRXXXTVKWFNDTKGFGFISPEDFSEDLFIHQSSIKSEGFRSLAEGEEVEFSVSDGDDVLTKAHYMTSPYKS

SEQ ID NO: 6374 - protein, 323 aa, Zea mays
  Clone ID: TF_ZmC218_40.pep
MAAAARQRGTVKWFNDTKGFGFISPEDGSEDLFVHQSSIKSEGFRSLAEGEEVEFSVSEGDDGRTKAVDVTGPDGSFVRGGGGGGGGGGGGYGSRGGGGSGGGGRSYGGSWGGGRRSAPDAAFGSVLSGTAGDAAPSDQWFVDALNAPAPHPIERVRSESSSIVSDVPDYLFSLDSPSDDPSPGPSAARAKSDATETPHHHGDDVPPSARQIPHVAGGASSWPAPPPPYMAQPMYYFPVPPPVHYLDQSAQSGYMPRPIYHIVGGGGSEAPGGDLHAAGGVYGVSHHMQGFPPMMYAPPRAVIYNYKSEGMPSLPPEGGAHSS

SEQ ID NO: 6375 - protein, 230 aa, Zea mays
  Clone ID: TF_ZmC218_88.pep
MAAAARQRGTVKWFNDTKGFGFISPEDGSEDLFVHQSSIKSEGFRSLAEGEEVEFSVSEGDDGRTKAVDVTGPDGSFVRGGGGGGGGGGGYGSRGGGGSGGGGRSYGGSWGGGRRSGGGGGPGACYKCGEPGHMARDCPSADGGGGYGGGGYGGGGYGGGGGGGGGCFKCGEPGHMARDCSSGGGGYGGGRRRRGGGGGGGRFGGGGGGGGDRSCYNCGEAGHIARDCPT

SEQ ID NO: 6376 - protein, 249 aa, Zea mays
  Clone ID: TF_ZmC218_73.pep
MAAAARQRGTVKWFNDTKGFGFISPEDGSEDLFVHQSSIKSEGFRSLAEGEEVEFSVSEGDDGRTKAVDVTGPDGSFVRGGGGGGGGGGGGYGSRGGGGSGGGGRSYGGSWGGGRRSGGGGGPGACYKCGEPGHMARDCPSADGGGYGGGGYGGGGYGGGGGGGGGGCFKCGEPGHMARDCSSGGGGYGGGGGGGGGGCYNCGQAGHMARDCPSGGGGGGGRFGGGGGGGDRSCYNCGEAGHIARDCPT

SEQ ID NO: 6377 - protein, 267 aa, Zea mays
  Clone ID: TF_ZmC218_80.pep
GCCSLPSLSWLSLRAPPPRIQAARQRGTVKWFNDTKGFGFISPEDGSEDLFVHQSSIKSEGFRSLAEGEEVEFSVSEGDDGRTKAVDVTGPDGSFVRGGGGGGGGGGGYGSRGGGGSGGGGRSYGGSWGGGRRSGGGGGPGACYKCGEPGHMARDCPSADGGGGYGGGGYGGGGYGGGGGGGGCFKCGEPGHMARDCSSGGGGYGGGGGGGGGGGGCYNCGQAGHMARDCPSGGGGGGGRFGGGGGGGDRSCYNCGEAGHIARDCPT

SEQ ID NO: 6378 - protein, 245 aa, Zea mays
  Clone ID: TF_ZmC218_90.pep
MAAAARQRGTVKWFNDTKGFGFISPEDGSEDLFVHQSSIKSEGFRSLAEGEEVEFSVSEGDDGRTKAVDVTGPDGSFVRGGGGGGGGGGGYGSRGGGGSGGGGRSYGGSWGGGRRSGGGGGPGACYKCGEPGHMARDCPSADGGGGYGGGGYGGGGGGGGGCFKCGEPGHMARDCSSGGGGYGGGGGGGGGGCYNCGQAGHMARDCPSGGGGGGGRFGGGGGGGGGDRSCYNCGEAGHIARDCPT

SEQ ID NO: 6379 - protein, 138 aa, Zea mays
  Clone ID: TF_ZmC218_74.pep
MAAAARQRGTVKWFNDTKGFGFISPEDGSEDLFVHQSSIKSEGFRSLAEGEEVEFSVSEGDDPGHMARDCSSGGGGYGGGGGGGGGGCYNCGQAGHMARDCPSGGGGGGGRFGGGGGGGDRSCYNCGEAGHIARDCPT

SEQ ID NO: 6380 - protein, 297 aa, Zea mays
  unsure (1)..(297): unsure at all Xaa locations
  Clone ID: TF_ZmC353770_1.pep
MERLWSLMLLKEKRVRRQQMLQALVEFQFKAVNTQQTVTIIDAIHVVGVLHAITSKITRIVRVGKRTRDRKALLKARPNNAGPIAGEGSHLTTCGDPMRVDHSIPXPPVQGEVMEGADNQGAGEQGRPVRQNMYRGYRPRFRRGPPRQRQPREDGNEEDKENQGDETQGQQPPQRRYRRNFNYRRRRPENPKPQDGKETKAADPPAENSSAPEAEQGGXSKCRLTISTIIRFSHPTRRXYEIPAIRNEQKIGAEDLXSACFLPVDQIXELSALSMQHGVLYYFYLKTSLFGNNKRVF

SEQ ID NO: 6381 - protein, 159 aa, Zea mays
  unsure (1)..(159): unsure at all Xaa locations
  Clone ID: TF_LIB4762-117-Q1-K1-E3.pep
MASDRVLGTVKWFNGTKGFGFITPDDGSEDLFVHQSSIKSDGYRSLNDGDAVEYTVGSGNDGRAKALDVTAPGGGPLAGGERPDGGNGGGRGGYGGGDRGXGGGGXAAYGGGGDRGYGGGDRGYRVGGGATAANGGDRGFTGEAAAYGGWTVEGGRGGG

SEQ ID NO: 6382 - protein, 208 aa, Zea mays
  Clone ID: TF_ZmC3007_1.pep
MASDRVLGTVKWFNGTKGFGFITPDDGSEDLFVHQSSIKSDGYRSLNDGDAVEYTVGSGNDGRAKALDVTAPGGGPLAGGERPDGGNGGGRGGYGGGDRGYGGGGDRGYGGGGDRGYGGGDRGYGGGGDRGYGGDRGYGGGGGYGGGYGGGGGGGGRGCFKCGEEGHMARDCSQGGGYGGGGGGGRGSECYNCGQEGHISRDCPNKRR

SEQ ID NO: 6383 - protein, 120 aa, Zea mays
  Clone ID: TF_LIB5116-059-A1-PF1-B9.pep
MAMEARMKGTVKWFNDTKGFGFISPDDGSEDLFVHQSSIKADGFRSLAEGEVVEFAVSEGDDGRTKAVDVTGPDGSFVQGGAGGGGGGGGFGSRGGGGSRGGGGFGGRGGDGSGGYGGGY

SEQ ID NO: 6384 - protein, 122 aa, Zea mays
  Clone ID: TF_LIB4764-069-R1-K1-C6.pep
MVFSSLPIFLDPPNWGQMQMQMQPPLQCLLGSGGGSDHHHLMPPPSLAPLPGGPADTAASAPAGGVSSTSVSVQAAAGAGAGAQPRPVVSMAERARLARVPLPEPGTLRCPRCDSTNTKICY

SEQ ID NO: 6385 - protein, 95 aa, Zea mays
  Clone ID: TF_LIB3159-016-Q1-K1-C5.pep
HFFKNRLMYRTAGGSMRNLPKGAGPHKNNNASATFHFLQKVKAGLPVDPLVCAAANTNGTVLNFCSAMFSLNLTEHNKHLKEKLVPIAGDQPSNG

SEQ ID NO: 6386 - protein, 121 aa, Zea mays
  unsure (1)..(121): unsure at all Xaa locations
  Clone ID: TF_LIB3689-248-Q1-K6-G7.pep
MRELCNGEWPELLHRCCPWVRRKVHRLLPNKGVRLASSSLANANVVAHPTPISLAQRAQLALMPHPEPSINSPRCXNTTNTNFCYYNNYCMTHPRHLYKXCRRYWTRGGSLCNVHKRGGWR

SEQ ID NO: 6387 - protein, 153 aa, Zea mays
  unsure (1)..(153): unsure at all Xaa locations
  Clone ID: TF_LIB4739-052-Q1-K1-F6.pep
PVRERRRATAAGRHGIDGHGSNRLAPAAVLPAAASDGHVAEGPTLGSVAASVLPQVLVLARLGVRRLVHRDVPQRLXDDPTPRAPRRQPRRRGPPPPRRRPPDHEQPPQRRGQHGAQEEQRRRTARVHGSGAFGLGAEWGVELVRVSGSDRFP

SEQ ID NO: 6388 - protein, 141 aa, Zea mays
  unsure (1)..(141): unsure at all Xaa locations
  Clone ID: TF_8368141.pep
DVAQRAPVRPVAAARAAEVARLRRAVVVVVAELGVXXERQXAAHXQLAACRGLLAHLQRGLVAPAXLLGGAXGGGSSVREXSXQTSEVGPGRLERRRQGGWRERHGXLQALMSTKKTHPRMPXGGASGGFNRRPAXAAXER

SEQ ID NO: 6389 - protein, 151 aa, Zea mays
  Clone ID: TF_ZmC511329_1.pep
MAPAVSILSATASAKRKRPATSDADELPHDDSSAPHQQVQGQGQQPRQQQQLECPRCRSTNTKFCYYNNYSTAQPRHFCRACRRYWTHGGTLRDVPVGGASRRAATGGGGGKRRRVSAEPSSPPPSVADACLPSAFPFLSDGSFFPQLDLV

SEQ ID NO: 6390 - protein, 206 aa, Zea mays
  unsure (1)..(206): unsure at all Xaa locations
  Clone ID: TF_ZmC564558_1.pep
MEAQTCRLQPPTMAPFAPLPHQYNNTCKHLNTTTMAATSGNNNSNGSTATAAGGAAADGMAAYLQHLQQAGAEAAAKSGGGGGAARGEQCPRCASRDTKFCYYNNYNTSQPRHFCRACRRYWTLGGSLXRNVPVGGSTRKRPRLAHHHQHARLAPPAPHVFGLTPMMPPPLQPSSSTSSSQGQGQGQGQSGGLLGSLFALGAARRG

SEQ ID NO: 6391 - protein, 159 aa, Zea mays
  unsure (1)..(159): unsure at all Xaa locations
  Clone ID: TF_ZmC241107_1.pep
QPRQQQQLECPRCRSTNTKFCYYNNYSTAQPRHFCRACRRYXTHGGTLRDVPVRGASGRAATGSGGKRRRVSAEPSSPPPSVADACLPSAFPFLSDGSFFPQLDLVGGVALAPPAFSSSWQSVLVPDLYDGLAPWDDGATAGTWGDIGGLDLSWTLPGN

SEQ ID NO: 6392 - protein, 225 aa, Zea mays
  Clone ID: TF_1061305.pep
KGYPVPVAKEERPAPGGDPCPRCGSRDTKFCYYNNYNTSQPRHLCKSCRRYWTKGGSLRNVPVGGGTRKSSSSSSSSSAATTTTTTTSTSPGAAPKATKRSKNSKRRRVAPAPDPAAPGTDASTADVASTAPSAATVAASEKPSATEHAAAAVATEKPPAAPPVSVGAFADTSPAPDAGSGGVRELLPHPSRFEWPSGCDLGPPYWGWGTSVLADTDPALFLNLP

SEQ ID NO: 6393 - protein, 244 aa, Zea mays
  Clone ID: TF_ZmC13570_1.pep
MQEEPGRRPVPPFAGVDLRRPKGYPVAVAKEEERPAPGGDPCPRCGSRDTKFCYYNNYNTSQPRHLCKSCRRYWTKGGSLRNVPVGGGTRKSSSSSSSSSSSATTTSTSPGAAPKATKRSKNSKRRRVAPAPDPAAPGTDASTADVASTAPSAATVTASEKPSATEHAAAAVATEKPPAALPVSVGAFADTSPAPDAGSGGVRELLPHPSRFEWPSGCDLGPPYWGWGTSVFADTDPALFLNLP

SEQ ID NO: 6394 - protein, 238 aa, Zea mays
  Clone ID: TF_ZmC1074_1.pep
MQEASSAAAAGAEPGRRAAQHQFAGVDLRRPKGYAAPAPAPAVGEGDPCPRCASRDTKFCYYNNYNTSQPRHFCKGCRRYWTKGGTLRNVPVGGGTRKKPSSSSSSSSYVAAADADRQPKKKPASKKRRVVAPAPELATAADPGKTATTTTTTSEITTETGALEDSDSLAHLLLQPGTEDAEAVALGLGLSDFPSAGKAVLDDEDSFVWPAASFDMGACWAGAGFADPDPACIFLNLP

SEQ ID NO: 6395 - protein, 151 aa, Zea mays
  Clone ID: TF_LIB4744-032-R1-K1-G1.pep
MLSSHRESLLPYAPGRRAAVLLDHRRYRPNVEVAPSCPRCDSPNTKFCYYNNYSLSQPRYFCKGCRRYWTKGGSLRNVPVGGGCRKNRSRGKPVRAVAVDSVAPSSGGAAAFTHRASASSSSASPATLRPDMLLGGMLGSPSELCQLTVTD

SEQ ID NO: 6396 - protein, 232 aa, Zea mays
  unsure (1)..(232): unsure at all Xaa locations
  Clone ID: TF_ZmC25364_3.pep
MLSSHRESLLPYAPGRRAAVLLDHRRYRPNVEVAPSCPRCDSPNTKFCYYNNYSLSQPRYFCKGCRRYWTKGGSLRNVPVGGGCRKNRSRGKPVRAVAVDSVAPSSGGAAAFTHRASSSSSSSXPATLRPDMLLEGMLGSPGGLCQLTVTDDDAAENPAVAPDGPRIDLALLYAKFLNQQPPAPERRAVLPESLVVDTLSGSSSSDVGPVVPSRDHQPFTTQDDGLGELSAA

SEQ ID NO: 6397 - protein, 378 aa, Zea mays
  Clone ID: TF_ZmC14032_1.pep
CAVAAPCACCRQSLGLVKPLEEMLMAASAGAANPSQGSNPNPPPLAAPLTDAGSTERRARPQKEKALNCPRCNSTNTKFCYYNNYSLQQPRYFCKTCRRYWTEGGSLRSVPVGGGSRKNKRSSSSSSSSSSSAAAASASTSSSATSSSMASTPGAASKSPELAHEGAHDDLNLAFPHHGGLHAAEFAAFPSLESSNDMCDQGGGMTSNGRGGGAGPAVGALSATELLRSSGCYMPLQMPGGDYTAAGFALGEFRTPLLPPPSSQSPLGFSLDAHGPGSSGAAAAAGYGSSAGLPQGVPGNAGRLLFPFEDLKPPVSPGGGGVGGGGASATGGAGDGNSSHDQFDHNKERGGGGGRGAGAGHDTPGFWSSMIGGSGASW

SEQ ID NO: 6398 - protein, 317 aa, Zea mays
  unsure (1)..(317): unsure at all Xaa locations
  Clone ID: TF_21216063.pep
HEAASAPINNQQEAVVSSPTRKEQARNPKXXXXXXXXXXXXXXXRPRPPPDAAHSCPRCSSTNTKFCYYNNYNLTQPRYFCKTCRRYWTHGGTLRNXXXXXXXXRNKRASSSSSPFPGPSXXXXXXXXXEKTVSTRLMLMATSTMAMPSPTAGLFVPDDMSPAXXXXXXXXXXXDLAGMDEQHQQGFLPFSPLSLSDQAPELAPGGXXDTTPSFLDMLTGGYLDGGGYGGMSGGSDAMDMPFSLPEMGXPTTDPMPFQLQWTSSELGYAAGPAAGVQQQQINGGDHQKQDENKEAGNGKGNDYSFWMNTSSSDGAQG

SEQ ID NO: 6399 - protein, 88 aa, Zea mays
  Clone ID: TF_14645985.pep
CLRRPAWRRCAEVLLTRRRALQREAARPPRCRRRREQGQGRGRRQPRPVVSMAERARLVRVPLPEPGTLRCPRCDSANTKFCYFNNYS

SEQ ID NO: 6400 - protein, 383 aa, Zea mays
  Clone ID: TF_ZmC2150_2.pep
SSRRGQSTRSHPPDWNNQQQQGQQPRASGGADAPLLPMGPMAATAAASEPGGLPRSSSTSSAALAMHARPNSMAERARLARIPNPEPALKCPRCDSTNTKFCYYNNYSLSQPRHFCNMCRRYWTRGGSLRNVPVGGGCRRNKRSSKSSSSSAGSSSSKMSPSGRLLGGPSATPSTTPGTTGAIITPGLSSFSHHLPFLGSMHPSGPNLGLAFSAGLPLVGMQHLDTVDQFPVASGGGTTIGASLEQWRVRQQQQQFPFMTGGILDLSQPPTYQFGLEANRGGSGSAAVAFNSGQTTTTSATTGRQEGSSKKIRDCKGEEVSLQKQYMVPLRHGSGSHGVWDGSAGGTGSNGGGTGNGGSSWPMNMIPGFHSSSTSGCNDSGLS

SEQ ID NO: 6401 - protein, 511 aa, Zea mays
  Clone ID: TF_ZmC24704_1.pep
MAAPGGLDQDCAQDAAIKLFGRSIPVLHSSVFAATAAAESEVSTKLANDVRSKDGMPCLPNMSLIVKTNPFPSKSNMKNGLQAISSQHGKMEADSNSEEAKNSLQAIISQPGKRYDSKSEEAKTESGGSGQEKVLKKPDKILPCPRCNSMETKFCYFNNYNVNQPRHFCRNCKRYWTAGGTMRNVPVGSGRRRNKDPSHHHHFTKVCDYTIATNGDVSDATQRQSVAAKLCLLQGSGKQNETACKSVSPVSNIKEQNNADLISLVSGDNKEEKSCASSAVVSGSSENWMPENTVKKEEDNTSAYGNGVKLPDHKMQSHHAGPVSVFSRNPAAVMATNQCSEDGIHTPGNGTVSPLSLPPLPMVPTPGICAPAVPFPFPLVPAFVSCIPGWPSGLWGAPWPGSSAPTLLSLPPNGLAGSNSGVLGKHTRVANLQEEQKAEKKFWVPKALRIDNPEEAAKSSIWASLGIKPDDRIIFKSFQSKDLKNSATKMPESLQANPAAFSRSQTFQERA

SEQ ID NO: 6402 - protein, 332 aa, Zea mays
  unsure (1)..(332): unsure at all Xaa locations
  Clone ID: TF_ZM4161.C1.o10.fg.pep
MVFSSVPVYLDPSNWSQHHQAQEQQQHAQHGQLPSDGGMDAHAHHHHDQPPPVRPPHGGALMAPRPDMAVVVSASGNGPTGGGSAIRAGSMSERARLAKIPQSEPGLKCPRCESTNTKFCYFNNYSLSQPPSRLSPTPLMQHPLVGGDHYNISASRLGFLGLSSLDPMDYHQFGTGAGASSATIGLEQWRLPQIQRFPFLSGQPDVVQPTMSGIYPFDMEGQSGDTPVLPGGHMLGGSKMPGSAGLITQLASVKMEDNPASVAMASSSSRDFLSVTGNLQFWVDDSDNDGASGNNEGGVGNAGGGSGGGAVAPGTSWVDLSGXNSSSSGKLL

SEQ ID NO: 6403 - protein, 222 aa, Zea mays
  unsure (1)..(222): unsure at all Xaa locations
  Clone ID: TF_LIB4744-008-R1-K1-G4.pep
GFCYYXNYSLSQPRHFCKACKRYWTRGGTLRNVPVGGGCRKNKRSSRSGGGGRNGSSSSFSSSSADSTALPLPPPPTTMGSLPSSLGLPGGASLLLGSALPGGAGDHHHLGLFQAAMQSVVSSDATAYDEMQQQQQTQLDHLLGLGYGGGAGAQIQLKPWMQEAAGASGAPGIMDSFYAPLLSSSLVPGLEELHVKAEAAGAGDHQQKPSSREQQSASWDWE

SEQ ID NO: 6404 - protein, 217 aa, Zea mays
  Clone ID: TF_ZM4642.C3.o6.fg.pep
MGLAAGGFKLFGKVITQCAESAPPASLVARERDDPDERDQPVVKREAAAASDSDSAVVLVDKQRRSGGPAESEDSKGQHHPRPRQPQQQDTAEARAAASAPPLPCPRCRSRNTKFCYFNNYNVNQPRHFCKDCHRYWTAGGALRNVPVGAGRRKNRPLGAAPIPLAVSVPAQHLQHPQHPAAAAGHGLGLPGQHPSCPTSPSPAYAGRWPVCPDRRF

SEQ ID NO: 6405 - protein, 140 aa, Zea mays
  Clone ID: TF_LIB4730-013-R1-K1-B6.pep
MQLSHTAPRMQEPGRRPVPPFAGVDLRRPRGYPAPAAKEAEEEPAPAPAPGGDPCPRCGSRDTKFCYYNNYNTSQPRHFCKSCRRYWTKGGSLRNVPVGGGTRKSGSSSSATATPTSTGAAPKSPRSSKNSKRRRVGPAP

SEQ ID NO: 6406 - protein, 326 aa, Zea mays
  Clone ID: TF_ZM4824.C3.o2.fg.pep
MAPGGFKLFGKVITQCAESAPPAPPEAAAAASRATAFARERDDPDERDQPMVKREAAASDHDFAAVDKHHQHSGGSGGPGPGPDESDDSKGQQQQQHHPRPRHHQHHHQQQQDTVEARAAAAASSAPPLPCPRCRSRNTKFCYFNNYNVNQPRHFCKDCHRYWTAGGALRNVPVGAGRRKNRPLGPVVAGAVPVPVPVPAHHHHHHLHPAAAAAAAAAGFVLGFPGQQHPSSPTSPSPSPVYADRWPTRDRSKTRGQRACSTSADEGDAIPCCPVQSLARIPGVVGDHRTTNPALYIPSWEKVTTDGVLMLCLCAQMELTALASQR

SEQ ID NO: 6407 - protein, 313 aa, Zea mays
  Clone ID: TF_ZmC3845_1.pep
MGGALPDGGGGGGGGGQVGGPAKPMSMAERARLARIPLPEPGLKCPRCDSTNTKFCYFNNYSLTQPRHFCRACRRYWTRGGALRNVPVGGGYRRHAKRAKPKQQQQHAAAGTGAANGAMQQPPAGSMASSAAACTATTTMTTNALDAGPGGGMLPMLPPLLRLADFDAMSLGSSFSGISSMGKPGSIGAACYPHSVGGLEQWRVQQMQSFPFLHAMDQGPLGPPLAMAMAAPGGMFQLGLDTTSDNSRGGGGGGGEDGSSAGEALHMMQAATKRESYPAPPRAMYGDQHHNHLAAAGGYTSYSTNAAAGNHLL

SEQ ID NO: 6408 - protein, 159 aa, Zea mays
  Clone ID: TF_ZmC8312_1.pep
AICVHHQGLGLGKPMEEMLMAGNANLNQNPNPPPAAPSAPGAQRAGAPAAVAAAPPSAGATGGAGPERRARPQKEKALNCPRCNSTNTKFCYYNNYSLQQPRYFCKTCRRYWTEGGSLRNVPVGGGSRKNKRSSSAVRRRLRPPPPPPRLCLARSPWGS

SEQ ID NO: 6409 - protein, 351 aa, Zea mays
  Clone ID: TF_ZmC22467_1.pep
MDMNSNANNSTAAAASAPINNQQEAVVSSPTRKEQARNPKKARAAPQQAGGSGEPRPRPPPDAAHSCPRCSSTNTKFCYYNNYNLTQPRYFCKTCRRYWTHGGTLRNVPVCGGCRRNKRASSSSSPFPGPSSTAATSAAMEKTVSTRLMLMATSTMAMPSPTAGLFVPDDMSPAFTPTTGGSGFDDLAGMDEQHQQGFLPFSPLSLSDQAPELAPGGGGDTTPSFLDMLTGGYLDGGGYGGMSGGSDAMDMPFSLPEMGPPTTDPMPFQLQWTSSELDNYINDDGGYAAGPAAGVQQQQQQQQQQINGGDHQKQDENKEAGNGKGNDDGGGGSSSVYSFWMNTSGSDGAEG

SEQ ID NO: 6410 - protein, 387 aa, Zea mays
  unsure (1)..(387): unsure at all Xaa locations
  Clone ID: TF_ZmC2150_1.pep
MVFPSPSVQVYLDPHPPNWNNQQQQGQQPRANGGADAPLLPLGPAAATSAAPEQGGLPRSSSMANAAVAAHARPNSMAERARLARMPHPEPALKCPRCESTNTKFCYYNNYSLSQPRHFCKTCRRYWTRGGSLRNVPVGGGCRRNKRSSKSSSAGSSSSKXSPSGRLLGGPSATPSTTPGTTGAIITPGLSSFSHHLPFLGSMHPSGPNLGLAFSAGLPLVGMQHLDTVDQFPVASGGGTTIGASLEQWRVRQQQQQFPFMTRGILDLSQPSTYQLGLEASRGGSGSDAVAFTLGQSTTSAATITARQEGSAMKMGDDSKGQDASLQKQYTAPLRHGSGSHGVWDGSAGGTGSNGGGTGNGGSSWPMNMIPGFHSSSTSGCNDSGLS

SEQ ID NO: 6411 - protein, 326 aa, Zea mays
  Clone ID: TF_ZmC25364_2.pep
MLPYAPGPPPSLLLDRRYKQGGEAAPSCPRCDSPNTKFCYYNNYSLSQPRYFCKGCRRYWTKGGSLRNVPVGGGCRKNRRGKSSLRSAADSIASCGGGGRDAAFGHRFPGPVRPDLVLEGMVGNHPSNPAGQAAMPGGVPAAADGSTIDLAMLYAKFLNHPPAVEGVGAVAPESAGQVDEAFDASSDLMSPGALAPVQFDPCQPQDGFGEWSGVPVSSAGPSSTASTTAATTMLCTDVSVQAAFGELNFAMDQNCFDSLGLPTDDVGNLSSSWCSIVPGLSTLEDAKYDLDSFPDDALSLHDEGMISGTDHDWSVDCQGLETLYMP

SEQ ID NO: 6412 - protein, 432 aa, Zea mays
  Clone ID: TF_ZmC914_1.pep
MGEGRAGDGLIKLFGKTIPVPETAAVGEAAKDIQQSGGSGSGTTDPKGQENNVQDSTGSPPQQEVADTEDSSADKQQGEAGNPKEKLKKPDKILPCPRCNSMDTKFCYYNNYNINQPRHFCKNCQRYWTAGGAMRNVPVGAGRRKSKSASATSHFLQRVRAGLPVDPLVCAAAKTNGTVLSFGSAMSSLDLTEQMKQLKEKLVPIAGDERSVGSRTQGPSAKAEDPDRKENVTADKSARVVQHPCMTNGVAMWPFSCAPPVPASACYGPGSIAIPFYPAAAAAAAYWGCMVPGAWSGAWPPHSGQSETGSSITSASPAASTKSNICFTPGKHPRDRDEEGGAKGNGKVWVPKTIRIDDVDEVARSSILSLIGIGGDKAGKDGGRGCKLARVFEQNEEAARTATPHSAAISGLPFLQGNPAALSRSLTFQEGS

SEQ ID NO: 6413 - protein, 90 aa, Zea mays
  unsure (1)..(90): unsure at all Xaa locations
  Clone ID: TF_LIB3245-209-P1-N1-A3.pep
MQEASSTTAAGAEPGRRAAHHQFASVDLRRPKGYPAPAPAPTTGEGDPCPQSASRDTKFCYYNNYNTSQPRHFCKGXRRYWTKGGTLSNV

SEQ ID NO: 6414 - protein, 148 aa, Zea mays
  Clone ID: TF_ZmC3039_27.pep
MAANLPDADAAGFKLFGKVIQPPDAQKRGADEGDDPTPQTALPPPPPPPPPPPPQQAPAAGGPGAEPLPCPRCGSRETKFCYFNNYNVRQPRHLCRACRRYWTAGGALRRVASASPGRRRPRPTARSAPVAAAASSAPAAAEEVGGPR

SEQ ID NO: 6415 - protein, 66 aa, Zea mays
  unsure (1)..(66): unsure at all Xaa locations
  Clone ID: TF_ZmC3039_2.pep
LWQREAASLRQQLHNLQESHKYDLAMDSKIMXETLFQCCRQLMGEELSGLGVRDLQSLENQIGMSL

SEQ ID NO: 6416 - protein, 159 aa, Zea mays
  unsure (1)..(159): unsure at all Xaa locations
  Clone ID: TF_ZmC3039_11.pep
MANLPDADAAGFKLFGKVIQPPDAQRAAGDGDGAGAPPPSPPVLPPPPPPPPPPPQPLPLQQAAGAGGTGGEPLPCPRCGSRETRDENXTKFCYFNNYNVRQPRHLCRACRRYWTAGGALRRVASASPGRRRPRPNARSAAAAAAPSASAAAREVGGER

SEQ ID NO: 6417 - protein, 339 aa, Zea mays
  Clone ID: TF_ZmC12646_1.pep
MVFSSLPIFLDPPNWGQMQMQMQPPLQCLLGSGGGSDHHHLMPPPSGLAPLPGGPADTAASAPAGGVSSTSVSVQAAAGAGAGAQPRPVVSMAERARLARVPLPEPGTLRCPRCDSTNTKFCYFNNYSLSQPRHFCKACRRYWTRGGALRNVPVGGGCRRNTKRSSKKSSRGGGAGATAATSSSSTTSTSTTATTTTTTSAAMAAAEAIAGMQAQLPHLGLPPAAAAAALEASLEGYHHYLPLQMQPQFLQQAGLHGYHFADDGTGVLAADGFPRGVVASGLLAQLAAVKMEEHGSNGGGAIAAHHEQQSYWPGSTGGGGGWPVEFLSGFSSSSSGNVL

SEQ ID NO: 6418 - protein, 188 aa, Zea mays
  Clone ID: TF_LIB3116-015-H12_FLI.pep
MQEFQSIPGLAGRLFGGAAAPGDLRRAQAAQHGPGGARCGGASPAAPEAVKCPRCESTNTKFCYYNNYNLSQPRHFCKSCRRYWTKGGVLRNVPVGGGCRKAKRASPSASASASSPASSSAPSTPASADAAKNPRRASASPRSNSGSASPTAAAATTPTPTDPSTSATPSSNGVAFTGSHHSSNPFST

SEQ ID NO: 6419 - protein, 410 aa, Zea mays
  Clone ID: TF_ZmC1430_11.pep
MELAGAASPHPPPESHVAPPRPPPQPPEEDVCEDRGNMSVTGEKPCTHRESDVGQTNSCSLNNSSECENHTPSNDEISEPESNLEMAKTEGGDVPSGEKVLKKPDKILPCPRCNSMDTKFCYYNNYNIKQPRHFCKSCQRYWTAGGSMRNIPVGAGRRKSKSSSASCRSVLIPVPGSSSVANPGGEASLFPLSVKANQAAVSFGPDSPLCTSMASVLKIGGGGEQVKSCSPASAAAQPRNGETQTQTCAPSSAATTPSDGPGNGSQKGAESAHQNQNQNQNGIIGHSNGVTPVHPIPFFPGPPFVYPWSPAWNGIPAMGSGGVRSPSDKRRSDFIRREDLEQRRTTDAQTGDGPSESSAEVGLFCAHPYQRLAETCRRILLNITLAQSNNDVTNTLPSLKNAQEIAQKTI

SEQ ID NO: 6420 - protein, 224 aa, Zea mays
  Clone ID: TF_ZmC1430_18.pep
MELAGAASPHPPPESHVAPPRPPPQPPEEDVCEDRGDMSVTGEKACTHRESDVGQTNSCSLNNSSECENHTASNDEISEPESNLEMAKTEGGDAPSGENVLKKPDKILPCPRCNSMDTKFCYYNNYNIKQPRHFCKSCQRYWTAGGSMRNIPVGAGRRKSKSSSASCRSVLIPVPGSSSVANPGGEASLFPLSVKANQTCHICSVQYDWQHRCCCCTRQRAPLL

SEQ ID NO: 6421 - protein, 515 aa, Zea mays
  Clone ID: TF_ZmC1430_2.pep
MELAGAASPHPPPESHVAPPRPPPQPPEEDLCEDRGDMSVTGEKPCTHRESDVGQTNSCSLNNSSECENHTPSNDEISEPESNLEMAKTDQGGDVPSGEKVLKKPDKILPCPRCNSMDTKFCYYNNYNIKQPRHFCKSCQRYWTAGGSMRNIPVGAGRRKSKSSSASCRSVLIPVPGSSSVANPGGEASLFPLSVKANQAAVSFGPDSPLCTSMASVLKIGGGGEQVKSCSPASAAAQPRNGETQTQTCAPSSAATTPSDGPGNGLQKGAESAHQNQNQNQNGIIGHSNGVTPVHPIPFFPGPPFVYPWSPAWNGIPAMAAAVCAAPATAEAAISSEHGTASSTVQWNVPPAIVPVLPPGFCGPIPVPVIPPPSVWPLITPWPNAAWSAPWLGPSASVPPGSSRSSGSSTCSDSGCGSGSPVLGKHSRESRPQGDEKAERRCLWIPKTLRIDDPVEAAKSSIWTTLGIEPGDRGMFRPFQSKHGRQQELQASGAARALQANPAALSRSQSFQETT

SEQ ID NO: 6422 - protein, 345 aa, Zea mays
  unsure (1)..(345): unsure at all Xaa locations
  Clone ID: TF_ZmC8284_3.pep
MAGAGCAXSCAAAGGGGGXAAVARTGVGAGGAVADPRAEALRCPRCDSANTKFCYYNNYSLSQPRHFCKACKRYWTRGGTLRNVPVGGGCRKNKRSSRGSGGGRNGSFSSSADSTALPLPPPPTTTGSLPSSLGLPGGASLLLGSALPGGAGDHHHLGLFQAAMQSVVSSDATAYDEMQQTQLDHLLGLGYGGAGAQIQLKPWMQEAAGAGGAAGIMDSFYAPLLSSSLVPGLEELHVKAEAAGAGDHQQKPSSRDQQSASWDWELPTPSSSNVDANVTASDALMAAAAAAAAASMNPAVSVSSTPSAAPTAPSSFLYWGNGGIGGAAAAWPDLANCGSSIATLF

SEQ ID NO: 6423 - protein, 141 aa, Zea mays
  Clone ID: TF_ZmC8284_4.pep
MAGAGGATAVKQPAAGAPDAGASRSGVGAGAAGAPVADPRAEALRCPRCDSANTKFCYYNNYSLSQPRHFCKACKRYWTRGGTLRNVPVGGGCRKNKRSRSSGGPGAGGRNGSSAAAAAAAAAVVVTFSSVPVTLALPLYT

SEQ ID NO: 6424 - protein, 328 aa, Zea mays
  Clone ID: TF_ZmC752_1.pep
MDMISGSTAATSTPHNNQQAVMLSSPIIKEEARDPKQTRAMPQIGGSGERKPRPQLPEALKCPRCDSNNTKFCYYNNYSMSQPRYFCKACRRYWTHGGTLRNVPIGGGCRKNKHASRFVLGSHTSSSSSATYAPLSPSTNASSSNMSINKHMMMVPNMTMPTPTTMGLFPNVLPTLMPTGGGGGFDFTMDNQHRSLSFTPMSLPSQGPVPMLAAGGSEATPSFLEMLRGGIFHGSSSYNTSLTMSGGNNGMDKPFSLPSYGAMCTNGLSGSTTNDARQLVGPQQDNKAIMKSSNNNNGVSLLNLYWNKHNNNNNNNNNNNNNNNNKGQ

SEQ ID NO: 6425 - protein, 394 aa, Zea mays
  unsure (1)..(394): unsure at all Xaa locations
  Clone ID: TF_ZmC604766_1.pep
MARLPSGGNGGGGGGMDTHAHHHHHQLPPVPPPPSGALMAPRPDMSAXSPAASGGGGPTSGGTAIRPGSMTERAKLAKIPQPEPGLKCPRCESTNTKFCYFNNYSLSQPRHFCKTCRRYWTRGGALRNVPVGGGCRRNKRTKSSKSNSSSAAASASGGAGGTSSSTSSTATGGSSSAGAIMPSHQGQLQPFLASLHHPLAGGGGGGDHYSTGASRLGFPGLSSLDPMDYHQFGAGAGAGASSAAIGLEQWRLPHIQQFPFLSGRPDPVQPTMSSIYPFDLEGHGGDAPGFPGGHMLGASKVPGSAGLITQLASVKMEDNPASAAMASSSPREFLSLPGNLQFWGGGGNNNGGASGNNGGGAGNGGGGGGGGAVAPGSSWVDLSGFNSSSSGNVL

SEQ ID NO: 6426 - protein, 342 aa, Zea mays
  Clone ID: TF_ZmC25364_1.pep
MLSSHHEAMLPYAPPPPPPSLLVDRRYRQLQQAGEAAPSCPRCDSPNTKFCYYNNYSLTQPRYFCKGCRRYWTRGGSLRNVPVGGGCRRNRRAKSSLRSAVGGGGGGHRFPGPVVRPDLVLEGMVSNPAQEMPGVPAAADGSTIDLAMLYAKFLDHHPPAEEGLGSAVTPELAVALAGPGRVDEALFDTFSDLSPPAGVLAAPPVQFDPPCGHDDGFDDWSSGAPVRSAGPSSTASTATATTTMPPCADVSVHAAFGEEFNFAKDQSCLLFDSLGLPTDDVGDLSSSSWRSIVPGLSTLEDTEYDLLDSSFPDDALSLHEGMVSGTDHDCWSVVDCQGLEAL

SEQ ID NO: 6427 - protein, 84 aa, Zea mays
  Clone ID: TF_LIB4738-118-A1-K1-G10.pep
ARAQGPANARQQQLECPRCHTNMTKFWYYNNYSTAQPRHFCRACRRYWTHGGTLRDVPVGGASHRAATGRVGKRRRKLRRDLIP

SEQ ID NO: 6428 - protein, 413 aa, Zea mays
  Clone ID: TF_ZmC604766_2.pep
MVFSSVPVYLDPPNWNQHQHQPQHEQQQAHHGQLPSDARGGGGGGVDAHAHHHQLPPMPPSAPGGALMAPRPDMAAVVAASGGSTSGGGGPTGGGSPIRPGSMTERARLAKIPQPEPGLKCPRCESTNTKFCYFNNYSLSQPRHFCKTCRRYWTRGGTLRNVPVGGGCRRNKRTKSSKSNSSSAASASSAGGTSSSTSSTATGGSGSAASIMPPHQGHGGQPQFLASLHHPLVGGDHYSTGASRLGFPGLSSLDPMDYHQFGAGAGGAIGLEQWRLPQIQQFPFLSSRPDAVQPPMSGIYPFEVEGHGGEGSGFAGHMLGDPKVSGSAGLITQLASVKMEDNPTSAAMASSSPREFLGLPRNLQLWGASGNGGASGNNGGGTGNAAGGGDTIPPGSSWVDLSGFNSSSSGNVL

SEQ ID NO: 6429 - protein, 127 aa, Zea mays
  Clone ID: TF_LIB3078-017-G3_FLI.pep
MIFPPAFLQDSSSWNDNQQQQHHQQQQGHGHLLVAVSGSGDANHELLQQPIMGGALPDGGGGGGGGGQVGGPAKPMSMAERARLARIPLPEPGLKCPRCDSTNTKFCYFNNYSLTQPRHFCRACRRY

SEQ ID NO: 6430 - protein, 282 aa, Zea mays
  Clone ID: TF_ZmC3039_32.pep
MAMALAPLRRRRRSFLLLLLLPRPRRSLCPCSRRPGPGAPAASRCRARGAAAGRLGMKTVGNGIYSFGLPLSSLRETKFCYFNNYNVRQPRHLCRACRRYWTSRGALRRAVDASPVRSLNGCSAAYRIIRLVPNIENFRTALGCLQCWANSRRVYSNVTGFLGGVNWALLVARVCQLYPNAVPSMLVSRFFRVFTQWQWPNPVMLCSIEEDELGFPVWDPRKNPRDKCHHMPIITPAYPCMNSSYNVSTSTLRVMVEQFQFGNKICQVIFAPLKLLFQKYLP

SEQ ID NO: 6431 - protein, 284 aa, Zea mays
  Clone ID: TF_ZmC1430_6.pep
MELAGAASPHPPPESHVAPPRPPPQPPEEDVCEDRGNMSVTGEKPCTHRESDVGQTNSCSLNNSSECENHTPSNDEISEPESNLEMAKTDQGGDVPSGEKVLKRPDKILPCPRCNSMDTKFCYYNNYNIKQPRHFCKSCQRYWTAGGSMRNIPVGAGRRKSKSSSASCRSVLIPVPGSSSVANPGGEASLFPLSVKANQAAVSFGPDSPLCTSMASVLKIGGGGEQVKSCSPASAAAAAQPRNGETQTQTCAPSSFQTPPSDGTQVGSELRPVCVPLIQKVKAV

SEQ ID NO: 6432 - protein, 182 aa, Zea mays
  unsure (1)..(182): unsure at all Xaa locations
  Clone ID: TF_LIB4315-019-R1-K1-G5.pep
PPPAADASHGFGNPSLAVLASAPTNETPHGQWPGEWTPLGPFVPRWPPFPRAVGTSRPPPEATPVAVSQEEEMPAPGRDPCPXRCGSRDPQVSCFFHHFNTSQPRHLCKSCRPFWTQGGSLRNVPVGGGTRKNSSSSSSSSSSATTTSTSPGAAPKATKRSKNSKRRRVAPAPDPAAPGNGR

SEQ ID NO: 6433 - protein, 125 aa, Zea mays
  Clone ID: TF_21216762.pep
MTAAEVEAAKDIAEEKAVVPLPPSPAKPADDDSKAIVALVVKDAYLAKIVSEKRLSLITAWEESQKARADNRSNCRRRRRRTRRSSRTSWRCCRRPGPARRPSWRRRWPPSTEPRARAPPSSLAS

SEQ ID NO: 6434 - protein, 185 aa, Zea mays
  Clone ID: TF_ZmC1128497_1.pep
PRRACTPVALSPMASRSSTPVRRRQEGPVGVTTAIVAGTLTEQVAAADEVACVGDERPVAGHVPSVNSLESRAAAWDEAERAKFMARYKREEVKIQAWENHEKRKAETKMKKMQMKADQMKARGQEELSNRLATTRRMAEEKRASAEAKLNERANRTSEKANYIRRTGHLPSSFRISGLCGSSFE

SEQ ID NO: 6435 - protein, 69 aa, Zea mays
  Clone ID: TF_5791336.pep
KSNLPYALKHLRNFFGATLKAPGLSCHLLSLENFFTMLGHNHRSLFLGLLMDDCLLVFHLLSIFSHFLL

SEQ ID NO: 6436 - protein, 108 aa, Zea mays
  Clone ID: TF_LIB3587-206-Q1-K6-C5.pep
SKIAAWQIAEVAKVNNRFKREEVVINGWEGDQVEKSGAWLNKYERKLEEKRAKAMEKAQNEVARARHKAEAKRASAEAKRGTKVARVLELANFMRAVGRAPSAKRSFF

SEQ ID NO: 6437 - protein, 92 aa, Zea mays
  Clone ID: TF_LIB4766-035-R1-K1-A8.pep
HMDPIYKPREEKRKEREENNWHPVMDDTDRHHRGTSRRSTYTAYSFFSLQLGSRMQQRAYIDHTQAGRDGGGRGSRLARRRSAWWAPCRRPS

SEQ ID NO: 6438 - protein, 584 aa, Zea mays
  Clone ID: TF_ZmC145_1.pep
MLRPEPALGFLAAGPVRACKPPPERRRKKQPPTRRRRPASAATVVGLGPRGAADPDPAHSSALLPLTSGGSGSGFASRGTVAPDEEEGRDGASSAESQEVAEAANDSFSYSLRECQKQRRLKSERSALVRPPASHKLNNAGGIELLVLSPRCLIGGNPGGMSKSSTTSSRSRSGTGTFPSPGTPSCNRHCAGSMQYSKGWSSERVPLGTGRNRRYGGSGVVLPFNNGRKLPSKWEDAEKWILSPVSCDGMGRMSAPAPHHRRPKSKSGPLGHPAGIPGAYAAVSPLVPCFDGVLAAANFAAHSPFSAGVLIPEHGRIGDFSSGRDRCGDDGSSRSYSAEKESYILRSASIHAWTETLMEASAFANISEETVQDDKLQRQTEATSMISSPIIKKDIGTQMSPEDSISSPKARHSCSSLPSRHLIKETNSHIPKPEIRDVQVDDQVTVTRWSKRHVTRGSDKRSTNIIEWRKKTVETRAPSFDEKEREGCMSKCKREEAKITAWENLQKAKAEAAIRKLEMKLEKKRSSSMDKILGKLRSAQKKAQDMRSVVSSSEGQCSVRATKKTSSSVKTGRPFSCCFTYRAC

SEQ ID NO: 6439 - protein, 295 aa, Zea mays
  Clone ID: TF_ZmC1445_2.pep
MLSEQTAASTSSGEHQERSVVEDRRLQPVGENEEAEFRDIHALSPPPSQPSSYRRSRHASVGSDTAPSEPFPTMSREFSAMVAAAAAIANGAAADRLGEAEDEETNPLAIVPDSNPIPSPRRARGPPTPGAGAAHANGDGGVSVGQVRKEEVESKIAAWQIAEVAKVNNRFKREEVVINGWEGDQVEKAGAWLNKYEVVSPSHRSTPPHSLTSVVRTVQCLLTDTNACNVQRKLEEKRAKAMEKAQNEVARARHKAEAKRASAEAKRGTKVARVLELANFMRAVGRAPSAKRSFF

SEQ ID NO: 6440 - protein, 141 aa, Zea mays
  Clone ID: TF_ZmC1586_1.pep
DGGSPPGLAAADRDETAPGAPTTTAVSPAATWDAAERAKHMARYRREEMKIQAWENRRRQKAELQMKVAEAKAERMKLRAQEKTASKLASAQAAAREKRAQAEAKLNRRAARVDRADALRRTGHLPSSSSVFSLKLPLMCR

SEQ ID NO: 6441 - protein, 103 aa, Zea mays
  Clone ID: TF_ZmC1445_3.pep
REKSPGGQVNNRFKREEVVINGWEGDQVEKASAWLKKYERKLEEKRAKAMEKAQNEVAKARRKAEERRASAEAKRGTKVARVLELANFMRAVGRAPSTKRSFF

SEQ ID NO: 6442 - protein, 106 aa, Zea mays
  Clone ID: TF_ZmC145_4.pep
MKKKEKDACQSLRCKREEAKITAWENLQKAKAEAAIRKLEMKLEKKRSSSMDKILGKLRSAQKKAQDMRSVVSSSEGQCSVRATKKTSSSVKTGRPFSCCFTYRAC

SEQ ID NO: 6443 - protein, 129 aa, Zea mays
  Clone ID: TF_ZmC145_2.pep
SYTIFFFAISKKENSYTEDINLLHFVFRDLFICVLRCKREEAKITAWENLQKAKAEAAIRKLEMKLEKKRSSSMDKILGKLRSAQNKAQDMRSVVSSSEGQCSVRATKKTSSSVKTGRPFSCCFTYRAC

SEQ ID NO: 6444 - protein, 67 aa, Zea mays
  Clone ID: TF_ZmC1445_6.pep
MAQRKLEEKRTKAMEKAQNEVAKARRKAEEKRASAEAKRGTKVARVLELANFMRAVGRAPSTKRSFF

SEQ ID NO: 6445 - protein, 466 aa, Zea mays
  Clone ID: TF_ZmC509_1.pep
MQRSQVHGPPPKSANLHFLSSLSPPPPRRPASRATTGASPPRMEYERIHEPLPRRQSGGFSPAKLRAMLRGLEKHQRNSGEDTSPEANDSGELDDRRSLECSTSTEMSSNSGHRSRNRAPDDDSFDSESSSSGPPTVKRSAAVAALLPPFSRPTPSKWDDAEKWISSPTSNRTGRAGPTAGTMPKKSALAFPEHGARQPAVAKVVTDVPTIAGPLVKNSDGLAHPDLLKPAHDASIVDGPAPAVRSVSMRDMGTEMTPIASQEPSRTATPMIASSPTSSRTPTPQRTTEFSVSNIDSNKMAMSEEEVHISTRQEIMDLGERLGKTTIAAWASKEEKAAARSTDTAADNAVDVNRENRAADWQEAEKAKYLARFHREEAKIQAWENLQKAKIEAEMKRIEAKIERKRAREQDRLASKLAAVSHRAEAKREAAEARRDQEAARTEEQAAQIRETGHTPSSFSCWCWCL

SEQ ID NO: 6446 - protein, 268 aa, Zea mays
  Clone ID: TF_ZmC2853_1.pep
MLHEQQAPPPAVAAPPPSINPDDDGARDVEVTTFRDIHPLTPDAPPPASASWDTASHRSLSSSDDQQYMTMSREFTAMVAAGATMQPGGYDGAADQLTSIGEDELEETNPLAIVPDSHPIATPARSRASGLEVVPAGPAPQPQPQPPAHLEASQVKKEEVETKVTAWQTAEVAKINNRFKREDVVINGWETEQVEKASAWLKKIERKLDEQRAKALEKTQNDIAKARRKAEEKRASAEAKRGLKLAKVLELANFMKAVGRVPTKRSFF

SEQ ID NO: 6447 - protein, 83 aa, Zea mays
  unsure (1)..(83): unsure at all Xaa locations
  Clone ID: TF_LIB3689-224-Q6-N6-G2.pep
WGNPKKANIKAXLKRFRDHWKKKRLXFSEKIKNKVSIIPKEAQKKRTMVEAKPGXEVLKAQEMVSKYRAPGPAPKKLIGCFGA

SEQ ID NO: 6448 - protein, 91 aa, Zea mays
  unsure (1)..(91): unsure at all Xaa locations
  Clone ID: TF_LIB3632-055-Q6-K6-C12.pep
TEKRNSFIKPWEENEKTKALNKAANKEFAILSWENTTKANIELLLNKIEEQLXRSMLYMHDNMKNKAALIHRGAQEKRAMVEAKRGEEASE

SEQ ID NO: 6449 - protein, 116 aa, Zea mays
  unsure (1)..(116): unsure at all Xaa locations
  Clone ID: TF_21214887.pep
IRDLLLKGGNGEEDSLIKAWEDNEKAKADNKATKKVSVILSXEAEMKKIEEQLEKKKAEYAEKMXXKVAMIHREAEEKRAMVEAKRGEEVLKAEEMAAKYRATGHAPKKPIGCFGA

SEQ ID NO: 6450 - protein, 93 aa, Zea mays
  Clone ID: TF_LIB4764-010-R1-M1-F7.pep
KLVERLQKKKPVYDVQIKPKLAMVHRTPEETREQTEARQGKHIFLAEEMAAKNRAKVEGLSNLFGLFLAWPLLWIMLCFVCVLVSYSHLVLFL

SEQ ID NO: 6451 - protein, 426 aa, Zea mays
  Clone ID: TF_ZmC509_2.pep
MEYERIHEPLPRRQSGGFSPAKLRAMLRGLEKRQRNSGEDTSPEANDSGELDDRRSLECSTSTEMSSNSGHRSRNRAPDDDSFDSESSSSGPPTVKRSAAVAALLPPFSRPTPSKWDDAEKWISSPTSNRTGRAGPTAGAVPKKSALAFPDYGGRPPAVAKVVAGCAYQRWTRCGFIFSGLAHPDLLKAGHNASVVVDGAAPAVRSVCMRDMGTEMTPIASQEPSRTATPIIASSPTSSRTPTPQRTAEFSVSNIDPNKIEMPEEEVQMSTRQEIMDLGERLGKTTIAAWASKEEKSAARFTDTTAYKAVDIGRETRAADWQEAEKARYLARFQREEAKIQAWENLQKAKIEAEMKGIEAKIERKRAREQDRLASKLAAVSHRAEAKREAAEARRNQEAARTEEQAARIRYTGHTPSSFSCWCWCP

SEQ ID NO: 6452 - protein, 183 aa, Zea mays
  Clone ID: TF_ZmC1422_1.pep
MTAAEVEAAKDIAEEKAVVPLPPSPAKPADDDSKAIVALVVKDAAAGKPSTAIIGGSTERDAYLAKIVSEKRLSLITAWEESQKARADNRAAKKLAFITSWENAKKAEMEAELRKIEEQLQKKKAAYEEKLKNKLAMLHRTAEERRAQTEARRGEETILAEEMAAKYRAKGEGPTKLFGLLKA

SEQ ID NO: 6453 - protein, 154 aa, Zea mays
  Clone ID: TF_ZmC1422_4.pep
DDDSKAIVALVVKDAAAGKPSTAIIGGSTERDAYLAKIVSEKRLSLITAWEESQKARADNRAAKKLAFITSWENAKKAEMEAELRKIEEQLQKKKAAYEEKLKNKLAMLHRTAEERRAQTEARRGEETILAEEMAAKYRAKGEGPTKLFGLLKA

SEQ ID NO: 6454 - protein, 56 aa, Zea mays
  Clone ID: TF_LIB3159-017-Q1-K1-G7.pep
KPTAACAYTYITFNASLSLCSFLMLDEKHSCFLFNMSPFLLLLLTFNTDIFFFFFV

SEQ ID NO: 6455 - protein, 540 aa, Zea mays
  Clone ID: TF_ZmC4686_1.pep
MEYERIHQKAQPGALSPTKLRMKILGAHNRVRVITSNSSSRTSPAKTIEASQAQNRLLVCDVLEEDSADSTKHPSATNKTEAVEKVQKDPAVDISQVQNASTSSAAKPATGSSSMIQIHPLRPAEEDSTTECDSGLDNASTSSFEFHGVEKAAATQNPAAGYLSRQTSISSKWNDAEKWIVSRQNVSQKNNVAKGALQNQTVNQMSSAAARGAVVPKISARPVQKMKRVNPALSAPRSILERLSFASYQPKLVRHADVCPVSNAGANSEHHKATDTGSSIEVKPCNDTNDIPTVQSSVSVRDVGTEMTPIPSQEPSRTGTPLGSRTPTRSPNCSVPSTPVGGRSIASPPGEDCTDDGPFFHRKCGVHANELSDTETRLKTRQEIAALGIQLGKMNIATWASKEELELVSAAPSIADLERIRKEYAARAASYEEAENTKHTARFKKEEVKIEAWEGRQRAKIEYEMRRIEEFAERMRSEAMEKMAEKLEMTRRIAEEKRASANAKMNQQAAIAVQKAEKIRQTGRVPGSSILRCGGCFCGP

SEQ ID NO: 6456 - protein, 481 aa, Zea mays
  Clone ID: TF_ZmC4686_2.pep
DLLEEVSDSADSAKHPSASNINKTEAVEKYSAVDNSQVQNASTSSAAKPATGSSSMIQIHPVRPAEEDSTTECDSGLDNASTSSFEFHGVEKATAATQNPAAGYLSRQTSISSKWNDAEKWIVSRQNVSQNNVAKGALQNQTVNQMSSAAARGAVVPKISARPVQKMKRVNPALSAPRSILERLSFASYQPKLVRHADVCPVSNAGANSEHHKATDTGSSIEVKPCNDTNDIPTVQSSVSVRDVGTEMTPIPSQEPSRTGTPLGSRTPTRSPNCSVPSTPVGGRSIASPPGEDCTDDGPFFHRKCGVHANELSDTETRLKTRQEIAALGIQLGKMNIATWASKEELELVSAAPSIADLERIRKEYAARAASYEEAENTKHTARFKKEEVKIEAWEGRQRAKIEYEMRRIEEFAERMRSEAMEKMAEKLEMTRRIAEEKRASANAKMNQQAAIAVQKAEKIRQTGRVPGSSILRCGGCFCGP

SEQ ID NO: 6457 - protein, 186 aa, Zea mays
  Clone ID: TF_ZmC262_9.pep
FFSSCSSIFFSSASMFAFFVFSHERIADTFLAALFSAFVFSFSSQALIKEFLFSVSTLARARSLSLEPPCFAGAGFSGAGSSATFSTMARALESSAGGGGGGGSVAGMTALSSATSSFAAASGSLVTSTSTFLASSSAMLLSCGRGLAVAVECVCVCVCVCLCERGGGRVLIATGFNCWPCLLDSV

SEQ ID NO: 6458 - protein, 131 aa, Zea mays
  Clone ID: TF_LIB3137-040-Q1-K1-F12.pep
ARNSLSIYQSISPSSAEPNSEAMAELQTKVEPVTVPAPVDPEPPLAEAPPLEKKAVAVPPPVPAAAEETKALVIVEKEKENEKIPEPVKKNASRGSLDRDIALAEIEKEKRLSNVKAWEESEKSKAENKAQ

SEQ ID NO: 6459 - protein, 264 aa, Zea mays
  Clone ID: TF_ZmC262_7.pep
LLGHLTPKQKDIIYKLEAHDRFKRNAVGSALYIHPCLSELSEVNAEHRANTFRDDLVDSLVDSITVRDGVKANFFMNILSLANSAGEKVLAFSQYISPMIFFERLLVKKKGWHVGKEIFMISGDTSQEDRELATDHFNNSADAKIMFGSIKACGEGISLVGASRVVILDVHLNPSVTRQAIGRAFRPGQQKKVFVYRLVAADSDEVKVHETAFKKEVIPKLWFEWSEHCTTEDFKLGQIDIDDSGDELLDTKAIRKDIKALYRR

SEQ ID NO: 6460 - protein, 182 aa, Zea mays
  Clone ID: TF_ZmC1422_2.pep
MAAEVEAAKDIAEEKAVVPLPPSPAKPADDDSKAIVALVVKDAAAGKPSTAIIGGSTERDAYLAKIVSEKRLSLITAWEESQKARADNRAAKKLAFITSWENAKKAEMEAELRKIEEQLEKKKAAYEEKLKNKLAMLHRTAEERRAQTEARRGEETILAEEMAAKYRAKGEGPTKLFGLLKA

SEQ ID NO: 6461 - protein, 276 aa, Zea mays
  Clone ID: TF_ZmC1445_1.pep
RQEQPVAENEEEEEEQEEFRDIHALSPPPSQPSSYGRARGGEPWGSAAGGSRHTSVRSVGSDTAPSEPFPTMTREFSAMVAAAASAAAASRDADSDVVGRAEEEEEEELEETNPLAIVPDSNPIPSPRRGPPPAAPGADAAALVAADGHGSREGGGVSVGQVRKEEVESKIAAWQVAEVAKVNNRFKREEVVINGWEGDQVEKASAWLKKYERKLEEKRAKAMEKAQNEVAKARRKAEEKRASAEAKRGTKVARVLELANFMRAVGRAPSTKRSFF

SEQ ID NO: 6462 - protein, 164 aa, Zea mays
  Clone ID: TF_ZmC119_1926.pep
AKVLCTSPCFYVTIYINITNKVLLDQFFDHAIGINVPRSRFLPVKATSDLQLVQSDLYTLVDGFVTRNSARTNPSNPSIELGPEFKKVGSFLGRFKSIPSIVELDSLKVSGDVWFGSGIVLKGKVTITAKPGVKLEIPDGAVIGNKDNFGKGKRKQYQMPYNLN

SEQ ID NO: 6463 - protein, 763 aa, Zea mays
  unsure (1)..(763): unsure at all Xaa locations
  Clone ID: TF_ZmC220_3.pep
MRFRERRNASAGQEQGPKKRRITEDSNMCHQCQRNDSGRVVRCQGCAVRKRKYRYCVKCIKRWYPHLSEDDFANNCPVCQNNCNCKACLRGDITRANSRKKKKLLQINSGGYSVSEQDKIKFSMRIVHFLLPWLKQFHQEQMQEKSAEAATKGIDADKLEVPLTICGKKERIYCNNCRTSIVDFHRTCNKCNYDLCLQCCQELRRGLVSGNDGKVDGGGKQDFLSGVSHDKIISKGPSDGQNDMLIDSVVPGENNTSSLRQWSVNKDGTIPCPPNAFGGCGSSLLELKCLFKEKFIAELLEKANSALNNEMEVKIEGSKCPCFTESGDMDDGISRKSSCRENSCDNYIYCPTATDVQNGSLDHFQEHWLKGEPVIVRDTLALTSGLSWEPMVMWRALREKKEKVERLSVLALECLGWCEVCNILMTVNSXRNNKTFWVQTICPXLLKLKDWPPHSSFEERLPRHGAEFMSALPFREYTDPKWGPLNLAVKLPDNVNKPDLGPKTYIAYGVSKELGIGDSVTKLHCDMSDAVNILTHTDEIKLKAKRIAAVEKKKRTKKIEEGNASGLIAVAPESEDDDDAPFIDGNQAEGGALWDIFRREDVSKLHDYLMKHADEFRHCNFEPVKQVTHPIHDQCFYLTIEHKRKLKEEYGVEPWTFEQKLGEAVFIPAGCPHQVRNLKSCIKVALDFVSPENVRECIRLTEGFRLLPKWHKVNEDKLEVKKIALHAFNQAIKDITDESSNSNERMKPNGYTWSRAHKILMCW

SEQ ID NO: 6464 - protein, 209 aa, Zea mays
  Clone ID: TF_ZmC119_1493.pep
QRRVAGKHTISHIEEPNTNNSEGSLAGAVWDVFRRQDLPKLNEYLAVHREDCAARCQAVSSVKYPIYDQTVYLNDYHKKVLKDQYGIEPFTFHQHIGEAVFIPAGCPFQLKNLQSTVQLALNFLSPESLPESVRLSQEIRCLPNGHLAKLKMLEVKKISLYAASSAVREIQRITLDPKFNLDASFEDQNLTRAVSENLARVNKRKVSCS

SEQ ID NO: 6465 - protein, 102 aa, Zea mays
  unsure (1)..(102): unsure at all Xaa locations
  Clone ID: TF_LIB3115-030-P1-K1-C5.pep
RVWNSGSDHSRPPTLPGPLGHRLKFREEFGIKPWTFVQRLGNPVLIPVGGPNKDRNLRVCTKIVLDFVXPENIHKCFTLTEVFRRLQGGPRAKKEKLEVIKI

SEQ ID NO: 6466 - protein, 225 aa, Zea mays
  Clone ID: TF_ZmC1114_1.pep
LCSHLSDAVNVLMHTIRVVPSEEQKEGIRDLKIRHAEQDKKECLGNSSIDGNKTSMEHAHISSVSCEDGGGALWDIFRREDVGKLKEYLTKHSKEFRHMYCCPVEKIFNPVHDETFYLTSGHKRKLKEEYGIEPWTFVQRLGDAVFIPAGCPHQVRNLKSCTKIALDFVSPENIQQCLSLTEDFRRLPVGHRAKEDKLEVKKMIVYAVEHALAILKEPCTPRESA

SEQ ID NO: 6467 - protein, 279 aa, Zea mays
  Clone ID: TF_ZmC119_1806.pep
MKLLIAHGSHQELGKGDSMTNLMINMCDVVHMLMHATEVHYQCPKRVRVQSDVSERIANGTSVHVNTHVQNLNLDIEEQSHKHSISHIEEPNTNNSEGSLASAAVWDVFRRQDLPKLNEYLAVHREECAARCQAVSSVKYPIYDQTVYLNDYHKKMLKDQYEGLKTIEQITMDSASVETNMFKLCKVRFVQFGQKGIPYLNTYDGRAIRYLDPLIKANDTIKIDLQTNKIMDFIKFDVDNMVMVTGGRNTRRVGVIKNREKHKGSFETIHVLLGAFCYV

SEQ ID NO: 6468 - protein, 149 aa, Zea mays
  Clone ID: TF_LIB4172-054-R1-L1-D4.pep
NSARGIYCPTATDVVITSLDHFQEHWLKGEPVIVRDTLALTSGLSWEPMVMWRALREKKERVERLSVLALECLGWCEVDVNIHMFFAGYSSGLVGPDDLPLLLKLKDWPPHSSFEERLPRHGAEFMSALPFREYTDPKWGSLNLAVKLP

SEQ ID NO: 6469 - protein, 579 aa, Zea mays
  Clone ID: TF_ZmC3861_1.pep
ESKSVREAASRKGSSDNFLYCPVATGIQDDDIVHFQMHWAKGEPVVVSDVLQLTSGLSWEPMVMWRALRERSKGKAEDEQFAVWAIDCLDWCEVEINIHRFFSGYTTGRTHARTHWPQMLKLKDWPPSSSFDKRLPRHGAEFISALPFREYTDPRYGPLNLAAKLPAGVLKPDLGPKSYIAYGFYKELGRGDSVTKLHCDMSDAVNILTHTAEVTCQTDIGLIEKIQKDMREQDLQELYGGLNSRSELKLSPAPTECRDESVDEGLKTSYSREGNCVNRDNYNGLDINALPPDDDGDIAKDKESSPGSEWQSELGQSSDHNNGVNTTDEMYNGAHYISHNQKSTGRKVGIKPQEEKSEKADCSGTCAYLKGSSEDNPEMPIVESSEEQSTGGALWDIFRRQDSDKLQDYLRKHCSEFRHIYCNPVKKVFHPIHDQSFYLTEEHKRKLKEEYGIEPWTFEQKLGEAVFIPAGCPHQVRNLKSCIKVALDFVSPENVGECVKLTEEFRRLPSFHKAKEDKLEIKKMAVHALNEAVNFLDPRSSEELKIGVGENICEDESVDEKELPPRRGVEVSGVDEKPK

SEQ ID NO: 6470 - protein, 164 aa, Zea mays
  Clone ID: TF_UC-ZMFLMO17207D05_FLI.pep
AKVLCTSPCFYVTIYINITNKVLLDQFFDHAIGINVPRSRFLPVKATSDLQLVQSDLYTLVDGFVTRNSARTNPSNPSIELGPEFKKVGSFLGRFKSIPSIVELDILKVSGDVWFGSGIVLKGKVTITAKPGVKLEIPDGAVIGNKDNFGKGKRKQYQMPYNLN

SEQ ID NO: 6471 - protein, 243 aa, Zea mays
  unsure (1)..(243): unsure at all Xaa locations
  Clone ID: TF_ZmC220_2.pep
MSDAVNILTHTDEIKLKAKRIAAVEKKKRRLGMKILWISDIRGALSVGVLTYYLQLWDLISGIELQPEVDDKHIFSIAPNGVYSAKSTYEGLFLGSVTFGHYKRIWKSWALPKCRFFLWLVAHKRCWTTDRLAKRGLNHPEQCLLCDQEEENMDHLLVQCSFSREFWYLLLRKFGLHSLAPQPTANSFLGWWEVVGGAVLGLTKKGLNSXILGAWTLWNHRNKCIFDGCNPSMSLCLRAADGK

SEQ ID NO: 6472 - protein, 384 aa, Zea mays
  Clone ID: TF_ZmC3861_2.pep
GKDWPPSSSFDQRLPRHGAEFISALPFPEYTDPRYGPLNLTVKLPDGALKPDLGPKTYIAYGFYQELGRGDSVTKLHCDMSDAVNILTHTAQVPYARYQLEKIEETRKKMKEQDLQELYGVSELNLSSPFTDSRNISADEMSKTSCLDVNDVPPVNTESEVQSGAGQCSDYIDKDRSYAGMHNGERTGGALWDIFRREDSDKIQDYLRKHATEFRHIFCNPVKQVIHPIHDQTFYLTEEHKRKLKEEYGVEPWTFEQKLGEAVFIPAGCPHQVRNLKSCIKVAMDFVSPESVNECMKLTGEFRRLPPDHRAKEDKLEIKKIALHALNQVVNFLDPSSEWSKSWFAQPKNKKKAGAEEQEKPKRKRGRPCRKSNDEAAGDRHRKK

SEQ ID NO: 6473 - protein, 105 aa, Zea mays
  Clone ID: TF_ZmC220_4.pep
LLFKCPRLDSIFFLKLGEAVFIPAGCPHQVRNLKSCIKVALDFVSPENVRECIRLTEGFRLLPKWHKVNEDKLEVKKIALHAFNQAIKDITDESSNSNESKWIRR

SEQ ID NO: 6474 - protein, 74 aa, Zea mays
  Clone ID: TF_uC-zmroteosinte038a09b1.pep
VKIEGSKCPCFTESGDMDDGISWKSSCRENSCDNYIYCPTATNVQNGSLDHFQEHWLKGEHVHIGREIGNGIRL

SEQ ID NO: 6475 - protein, 668 aa, Zea mays
  unsure (1)..(668): unsure at all Xaa locations
  Clone ID: TF_ZmC119_1620.pep
LHCLLVYVLPVLKGIYSDQCFEIGVETRSSGPKTDVLRAKITSDEQMCCDFCKVPVFDYHRYCPRCSYDLCLDCCHDIRHSRANVARGEYTEGYVEDKGRDSFNRRARLEPSAESVNDKSLSWPIDINNIDIKSLFPTWRVNNDGSITCGPHEAGGCGSSKLVLRRIFKINWIAKLVKSSEEMVNGCKVHDLEDGCLSCSDGRRSEFTGQQNLGLSKCSNSDGIGRNCLYSPVLEDLKYEGIIHFRKHWKNAEPIIIREAFEPSLSSSWDPLSIWRGIQEIMDEEMDEDVIVKAVDCXEPIRDIELKQFIKGYSDGSKGGDGHLLMLKLKEWPRPSVLEAFLLCQRPEFIVNFPLVDFIHPRWGLLNLAAKLPPDALQPELGMKLLIAHGSHRELGKGDSMTNLMINMSDVVHMLMHATEVHYQCPKRVRVQSDVSEMIANGTSVHVNAHTPVQNLNLDIEEQSHKHSKSHIEEPNTNNSEGSLAGAVWDVFRRQDLPKLNEYLAAHREECAARCQAVSSVKYPIYDQTVYLNDYHKKMLKDQYGIEPFTFHQHIGEAVFIPAGCPFQLKNLQSTVQLALNFLSPESLPESVRLSQEIRCLPNGHLAKLKMLEVKKISLYAASSAVREIQRITLDPKFNLDPSFEDQNLTRAVSENLARVNKRKVSCS

SEQ ID NO: 6476 - protein, 229 aa, Zea mays
  Clone ID: TF_ZmC3788_1.pep
MRVKPEDRGRAYLFGTTNSKDGSKRFSMRRHSSSLENEPSNVVGSSEGANNSLELWKAESDGSIPCPPKELGGCGGSILDLKCFFPEKMLSNLEERADRIMRSEVFAKAVAKRSDQCPCYDHSGNIRTQDVRETANTKGSSDNHLYCPVATAIKEDDLAHFQMHWTKGEPVIVSDVLHLTSGLSWEPLVMWRALREKKTNGDVEDEHFAVRALDCLDWCEVRSYISLNV

SEQ ID NO: 6477 - protein, 84 aa, Zea mays
  Clone ID: TF_ZmC3523_1.pep
QKTPQWRAGPEGAKTLCNACGVRYKSGRLLPEYRPACSPTFVSSIHSNSHRKVLEMRRKKDGDLGQLPLPVPAALLLGPAVESF

SEQ ID NO: 6478 - protein, 68 aa, Zea mays
  unsure (1)..(68): unsure at all Xaa locations
  Clone ID: TF_LIB3245-468-P1-K1-F6.pep
YGFSSPNPINPSTDRCCPLFPPARAPTPIFSADRRKIDGIVVTEKGARSCVXCRATTTPMWRNGPTVP

SEQ ID NO: 6479 - protein, 89 aa, Zea mays
  Clone ID: TF_jC-zmXLIB3526P034dh01a1.pep
NDRLGPSGPRSLCNACGLFWANRGALRDLSKRHQEHSLPPVEQVDEGNDSDCRTATADPAHNNLHAFSEHDNPALVADHKVFQSQKMLK

SEQ ID NO: 6480 - protein, 330 aa, Zea mays
  Clone ID: TF_ZmC151453_1.pep
MIATSLSLLIPGCKLPFRHNNHCTSRFGSPLPTLHISHPDLHSSPNHTRSAYIAPSDLERKFLSVHPMSAIYMSQLSTALPLMEGDHQDHHHHHQGHFQAFTLPKETPILFPFVISNSSASEGSLSYGSAADHHLLRQRHQAMLEPQHMIGGSSTATGNSVFSTPFPTVESIRDDMIEPASYDPYDMGKLQVGGSMDACSWTPAAAKMRITRKATADPSAGKKPRRRAQAGYDDTMSGQPNLGVIRVCSDCNTTKTPLWRSGPCGPKSLCNACGIRQRKARRAMMAAASGSVSAVPTDSGKASPSNAAVAAAAAHPKVKKEKRVDVDRSL

SEQ ID NO: 6481 - protein, 195 aa, Zea mays
  Clone ID: TF_ZmC175881_1.pep
MGMEIDMETYPNLNTSPSAATASGDAKACANCHTTKTSLWRGGPEGPKSLCNACGIRYRKRRQAIGLDAGAAAAANSQQDLQQPKKKAAVDPQQQDQHQLRKKTTAVANPQQDRHQPRKRAAAAAAATDPQHTSITKKDTDKKDQQVTVDLHVVGFGKEATFKQRRRMRHNKCMSEEERAAVLLMALSSGVIYAS

SEQ ID NO: 6482 - protein, 360 aa, Zea mays
  Clone ID: TF_ZmC2051_1.pep
HWRPRCGPGPAGPAHRDASASAFFAAAGNDVFGTRGVVGAHIGSCGEIDSNFAQPEWFSGLFDDASIPHEPVFPGATAGGAPPIMTSFALAAGALVLPDEMEDPLLFHSSASISVLLHGSSRSAGASATLPSFSSSSSSIASSESFFGSGSGRERGRSGTAQAGASPAPEWLLHFRGRGLHDRSRASASTSAAAGAGGSREDILVPTPMYSSGSAHSDPESIAESSPHPAPPMKKKKKAKKPAPPAPAASSDDNDGDADYEEGGELAEPQGGAVRRCTHCQIEKTPQWRAGPLGPKTLCNACGVRYKSGRLFPEYRPAASPTFVPSIHSNSHKRVVEMRQKAVRSGDPSCDLLHFIRRRD

SEQ ID NO: 6483 - protein, 87 aa, Zea mays
  Clone ID: TF_LIB4172-036-R1-L1-E10.pep
MSSAAGRAPAPTPMGSADRCKVHPSALVSALSSSPLLRALSSRSASCDPPLQIDGIVAAEKATRSCVECRATTTPMWRSGPTGPRVS

SEQ ID NO: 6484 - protein, 200 aa, Zea mays
  Clone ID: TF_ZmC33566_2.pep
GGGTTSAGQDSGVAAAPGRGARSRRSRATAAAAAAWHSLVPRPPSQSSPSSSSCSSSDFPSSNKPARPNGGGGSRGKKVPGPPGGGPAGGEAGLEGGGVRRCTHCASEKTPQWRTGPLGPKTLCNACGVRFKSGRLMPEYRPAASPTFVLTQHSNSHRKVMELRRQKELILIRGSHRDAAAGSPPGGPRPELMFRDYGVC

SEQ ID NO: 6485 - protein, 139 aa, Zea mays
  Clone ID: TF_ZmC154_1.pep
MSSAAGRAPAPTPMGSADRCKIDGIVAAEKATRSCVECRATTTPMWRSGPTGPRSLCNACGIRYRKKRRQELGLDRKLQQQQNNGEAKTDEAKDSSSNSSSGSSNLQVVQKRRLLMGVEEAALLLMTLSSSPTSTLLHG

SEQ ID NO: 6486 - protein, 170 aa, Zea mays
  Clone ID: TF_ZmC154_2.pep
MSSAAGRAPAPTPMGSADRCKVHPSALVFALSSSPLLRALSSRSASCDPPLQIDGIVAAEKATRSCVECRATTTPMWRSGPTGPRSLCNACGIRYRKKRRQELGLDRKLQQQQNNGEAKTEEAKDSSSNSSSGSSNLQVVQKRRLLMGVEEAALLLMTLSSSPTSTLLHG

SEQ ID NO: 6487 - protein, 112 aa, Zea mays
  unsure (1)..(112): unsure at all Xaa locations
  Clone ID: TF_LIB3354-090-Q6-K6-E5.pep
LNGVSTPAASEDGTRGGAVVSASGVPRQEEEKSVSARKPWRPPKSAKQCLHCGSSWTPQWREGPLGRSTLCNACGVRYRQGRLLPEYRPLASPTFEPXEHANKHSQVMQFHR

SEQ ID NO: 6488 - protein, 201 aa, Zea mays
  Clone ID: TF_ZmC33566_1.pep
HAALAVVAAGNGGGGTSAGQDSCVTAAPAGRGARSKRSSRAPAAAAWHSLVSRPPSQPSPSSSSCSSSDFPSSSNRPARGRKSPGPGGDAVAGSDGGVRRCTHCASEKTPQWRTGPLGPKTLCNACGVRFKSGRLVPEYRPAASPTFVLTQHSNSHRKVMELRRQKELILIRGSHRDAAAAAGAGSAGPRPELMFRDYGVC

SEQ ID NO: 6489 - protein, 543 aa, Zea mays
  Clone ID: TF_ZmC3086_1.pep
MGKQGPCRHCGVTSTPLWRNGPPDKPVLCNACGSRWRTKGSLANYTPMHRNDNIDDDEPRVSKLKPPTSKLKSQKKKTNHIIMENGPFSSQNFRKMGDDDPSYRSSSGSAVSYSGSCAPYGAADASEMTGSAQSHAWESLVPSRKRSCVTRPKPSPVEKLAKELNSIMHEEKLYYLSESSEEDLLYHSETPIGSFEIGSGSVLLRHPNSKSLEEESKTSSIPADNKSYITSESYSDSASFVVHSGNKAAINLNLPTARSKKSPLHMEDNARRDKLHYENQHVLESVDSPLVSVDLEDVINYTNFMKYLTKEDRRQLLKFLPPVDSLTPPESLRSMFSCIQFSDAIDSYQMLLREGILDPSLCGDEEWKKVKTLALTNLTKCSWLECYKQKKGAKETGGVGGISGPEGFTKSTMKPLKRPRDTHFQSDAELDGTMRSPLRVLKSGALALQFESSSLPKSSYATEDSTCTGGAPNLFMLPLEKLPLLVPSQYAVSDQDLLLEIPLNARHPEAELLCQPSQLMSSITSSSTSMGGVAEGEGYLKQP

SEQ ID NO: 6490 - protein, 140 aa, Zea mays
  Clone ID: TF_ZmC3086_2.pep
MGKQGPCRHCGVTSTPLWRNGPPDKPVLCNACGSRWRTKGSLANYTPMHRKDDIDDDEPRVSKLKPPTSKLKSQKKKPNHIIMENGPFSGQNFRKMGDVDQSYRSSSGSAVSYSESCAPYGAADASEMTGSAQSHAWGSP

SEQ ID NO: 6491 - protein, 85 aa, Zea mays
  unsure (1)..(85): unsure at all Xaa locations
  Clone ID: TF_LIB3637-245-Q6-N6-D4.pep
ESRDAPPLLGQQEKRCAPCLSSKTPQWRAGPLGPKTLCNACGVRFKSGRLLPEYRPANXPPFVSCLPSNSPKKVMQIRQAVAQQQ

SEQ ID NO: 6492 - protein, 281 aa, Zea mays
  Clone ID: TF_ZM4332.C3.o2.fg.pep
MRQLSYLSGLDGLDDGVADCDGSCGLRDDGPPCLLHSGLCCPIGPLDDETDTVAIAIDNDKELLQDLAVAAGRVAASPLSSGNSPSSSAVETTTTLPPTPWRFVVPRRKRRKRRDRRPVVMRGSIRPGIPTLHAAAMSSSSSSSGNNRPCSLTAETSSPPQLWRLVVPTRKRDRRPVVMRGSIKRPCSLGTTPGIPTPHAAGNSNPSSSSGGGSTGARRQLESLQVRPRPPPTNRQRVQRVCSNCGSTETPLWRTGSDGSATLCNKCGLRLSRNRQAAQAS

SEQ ID NO: 6493 - protein, 357 aa, Zea mays
  Clone ID: TF_ZmC30321_1.pep
MSHHDGSKPYQPRRGPERHPQPADGIAAPPPAAVAPSVEHLVAAAAEAEALNRFAAEQQQQLQGHEQEVGEEEEEEDEQEDEMEEEDEDEHEGAHGGIGGEHVPMDADAAAAAAAAAVSQMDPHSALVAGTVPPMATNQLTLSFQGEVYVFDSVSPDKVQAVLLLLGGRELSSLGGASSSAPYSKRLNYPHRVASLMRFREKRKERNFDKKIRYSVRKEVALRMQRNRGQFTSSKPKPDEIAASEMASADGSPNWALVEGRPPSAAECHHCGTNATATPMMRRGPDGPRTLCNACGLMWANKGLLRDVTKSPVPLQATQSAPHLDGGNGSAMSAPGSELENAAAAMTNGHESSSSGV

SEQ ID NO: 6494 - protein, 184 aa, Zea mays
  unsure (1)..(184): unsure at all Xaa locations
  Clone ID: TF_LIB4719-002-R1-K1-E6.pep
TLGLAGESNQLTLVFXGEVYVFESVTPEKVQAVLLLLGRGELPPGLAGMVLPNQNDNKGYDDILQRTDIPAKRVASLIRFREKRKERNFDKKIRYAVRKEVALRMQRRKGQFAGRASLEGESPAPGCDPGSQGSGLDFASRESMCQNCGTSEKMTPAMRRGPAGPRTLCNACGLMWANKVQLHA

SEQ ID NO: 6495 - protein, 156 aa, Zea mays
  Clone ID: TF_LIB5116-045-A1-PF1-C5.pep
MSPAEMESHKMVEVEAAADPEERTASGDPKACDDCNTTKTPLWRGGPNGPKSLCNACGIRYRKRRRVAMGLDPEAKRKPKRDDAILSKAEASSTKEEEEEDNKASTNKIKTKTTTHTVELHMVGFAKDAVPKQRRRMRMRRRKPSCLGEEERAAIL

SEQ ID NO: 6496 - protein, 178 aa, Zea mays
  Clone ID: TF_LIB4727-001-R1-K1-C3.pep
TRQIEKKKKKKKKKKKKKKKILQRTDIPAKRVASLIRFREKRKERNFDKKIRYAVRKEVALRMQRRKGQFAGRASLEGESPAPGCDPGSQGSGLDFASRESMCQNCGTSEKMTPAMRRGPAGPRTLCNACGLMWANKGTLRSCPRAKVESPAVATEQGTSDNKALATLNNNNVAASNG

SEQ ID NO: 6497 - protein, 300 aa, Zea mays
  Clone ID: TF_ZmC42806_1.pep
MPDADVDTVIREAAAAAAPAGDDDSEGDTEEEEEEGDEVDEDEDDDEEELPAEAPAPDEEQPAPAPISTLPGNPNQLTLVFQGEVYVFESVTPEKVQAVLLLLGRGELPPGLAGMVLPNQNENKGYDDILQRTDIPAKRVASLIRFREKRKERNFDKKIRYAVRKEVALRMQRRKGQFAGRASLEGESPAPGCDPGSQGSGLDFASRESMCQNCGTSEKMTPAMRRGPAGPRTLCNACGLMWANKGTLRSCPRAKVESPAVATEQGTSDNKALATLNNNNVAASNGEATSAAEKGVPKAP

SEQ ID NO: 6498 - protein, 109 aa, Zea mays
  Clone ID: TF_ZmC11827_1.pep
MAAADGPLNWALVEGRPPSAAECHHCGINATATPMMRRGPDGPRTLCNACGLMWANKGLLRDLSKSPVPLHSIQQSAPILNGGQNGSAMSALGSELENAAAAMGNGHEP

SEQ ID NO: 6499 - protein, 128 aa, Zea mays
  Clone ID: TF_ZmC3131_1.pep
MGSADRSKIDGIVVTEKGARSCVECRATTTPMWRSGPTGPRSLCNACGIRYRKKRRQELGLEHNKQQQQQQNNGEAKTGVKDSSSNSSSSGSSNFHVVQKRRLLMEVEEAALLLMTLSSSPASTLLHG

SEQ ID NO: 6500 - protein, 156 aa, Zea mays
  unsure (1)..(156): unsure at all Xaa locations
  Clone ID: TF_LIB5116-002-A1-PF1-G8.pep
MGKEGPCCHCGVTSTPLWRNGPPHKPVLCNACGSRWRTKGSLENYTPMHSRDDIDADQPRVSKLKPPTLRLKEQRQLKKKPSHSIRENGAFSDQNFWKMGDADPSRSSSGSALSYSESCAPYGSADASEMGSAQSHAWESWVPSKRRXCVTRTKSS

SEQ ID NO: 6501 - protein, 39 aa, Zea mays
  Clone ID: TF_LIB3594-007-P1-K6-G4.pep
CRATTTPMWRSGPTGPRSLCNACGFRSRKKRRQELGLEH

SEQ ID NO: 6502 - protein, 116 aa, Zea mays
  unsure (1)..(116): unsure at all Xaa locations
  Clone ID: TF_LIB4171-052-R1-K1-B5.pep
PGPPGEVMXVGVEGGVXRCTHCASETXPQWRTGPLGPKTLCNACGVRFKSGRLVPEYRPGSSPPFVLTQHSNSHRKVMELPPQKELVLIRGTPRDPPAAAAGSPGPELMFRDYGVC

SEQ ID NO: 6503 - protein, 96 aa, Zea mays
  Clone ID: TF_ZmC34296_1.pep
MDSSVEKQGSVALDPDERAPASGETKACTECHTTKTPLWRGGPCGPMSLCNACGIRYRKKRREAMGLESSSKAATAGGSEHQQQQRKKKATAAARG

SEQ ID NO: 6504 - protein, 299 aa, Zea mays
  Clone ID: TF_ZmC3304_1.pep
MDVRPANAADDSSLGDLFPHQPAGLESDESNTEWLSGYVEDCFSSSTSYTNPVSAMASEGVGKPKLPPPPSSNGRRKKRSLASVMTNGDYQQFVLPLYVEPPLILIDQKHWMAESELIHPKKDDDDREVCQQQGQEQEKGVRRLVKMCSNCLSSQTPRWRDGPSGRQMMCSACGMRLKPETRLSAEQQCGQEEPTRKEQEPDRKRKKAAKKTCYESSDAPPSSDQQEKRCAHCLSSKTPQWRAGPLGPKTLCNACGVRFKSGRLLPEYRPANSPTFVSCLHSNSHKKVMQMRQAVAQQQ

SEQ ID NO: 6505 - protein, 171 aa, Zea mays
  Clone ID: TF_ZmC736_1.pep
RLLAEATPKGILKLMNTDGLTIYHIKSHLQKYRIAKYMPVSSTSEGKEEKRAAAANDVQNLDLGTGMKITEALRVQLDVQRRLHEQLEIQRNLQLRIEAQGKKLQKMFEEQMKTSRTVMGPPQGADVAFIGAGEQEEEVEVEDAFDDVQLLAAVSSASVGYRDGGFQSKIS

SEQ ID NO: 6506 - protein, 58 aa, Zea mays
  Clone ID: TF_ZmC80080_1.pep
MSSLGGQQQHGRGDEARARLRWTRQLHGRFVLAVAQLGGADKATPKSAMRSMAASGLT

SEQ ID NO: 6507 - protein, 142 aa, Zea mays
  unsure (1)..(142): unsure at all Xaa locations
  Clone ID: TF_ZmC2322_2.pep
QQXQQQQXKAXRCWSPELXRXFVAALHXLGGPQVATPKQIREVMQVDGLTNDEVKSHLQKYRLHNRRSSPGAAAAPVSQSIMLVDGVWAAQEQSSGSQSGSRQGPLQFSRAGMAVGGGDDSSSSNDDEDDDKSEDGYSLKCV

SEQ ID NO: 6508 - protein, 270 aa, Zea mays
  Clone ID: TF_ZmC1401_1.pep
MASSLGVGGQQQGHGHGHGEARARLKWTRQLHDRFVLAVAQLGGADKATPKSVLRAMAVPGLTLYHLKRHLQKYRLVAVSRGVASPLGDSGDGTDERSSSSSENQPADECDDGTVAEPHGDSSRSVARMQRKLQEQIEVQRHLQLRIEAQGRYLQSVLRRAQEVLADHGLGSAAGAEAELASAVDTGSLSSSCCCSPTRRRSADSCVTSSSSEAESQAPVGGATWLHTCAGTRDCSVEQQPVQGEKSTFLQRHGAAEDGTSSEIDPNGNR

SEQ ID NO: 6509 - protein, 263 aa, Zea mays
  unsure (1)..(263): unsure at all Xaa locations
  Clone ID: TF_ZmC18574_4.pep
MLSSTSRLRLQGVLADTLRGYGVHHHQQQHLDRLAAVRYMPRFLASMRVMRAPRMLWTSSLHAXFVHTGELLGXHEWATPKSELELMDVKDLTLAHVKSHLQMYRTVKSTDKSATTSSGGPPVDGGGDDDDLPSARRAQSSSSSPAGRRDGSSPQAFTRHRSAASSEGAASLAGGDDVECSSSADDSDCGRARSASSSRDQLLPPSAGSAGTLPSVGVSSSTTEDMEPAYRSVGLQQAPNHEMSCPPSLEFRLGRPIWNGAEH

SEQ ID NO: 6510 - protein, 91 aa, Zea mays
  Clone ID: TF_LIB3150-031-Q1-N1-H9.pep
MYSAIRSLPFNGSVRYYQRSSDGTNLPNDACLVLTTDPKPLLLLTAELHERFVDANTQLCGPDKSTPKTILITIRSKSLTLYYLKSHLYKY

SEQ ID NO: 6511 - protein, 112 aa, Zea mays
  Clone ID: TF_ZmC2861_1.pep
MERDYSSTDGGGCEMPGKKARKPYTITKPRERWSTEEHARFVDALLMFGRDWKKIEEHVGTKTTVQIRSHAQKYFLKVQKLGLAAGLPPMYPRRHFAIQQQQSSVADGSSAA

SEQ ID NO: 6512 - protein, 64 aa, Zea mays
  unsure (1)..(64): unsure at all Xaa locations
  Clone ID: TF_LIB4738-030-R1-K1-D12.pep
ARRGGFVKSSTGRTVCLRVNPADTVHTVKTKIQEQQYLVYDGVQXEDDRTLADYGMEHKXVLDL

SEQ ID NO: 6513 - protein, 74 aa, Zea mays
  Clone ID: TF_ZmC761_1.pep
WIGATPKLVLQTMNVRGLSIAHVKSHLQMYRSKKLDHESAGAGHDRAAIYSGSQFSSQFSLPSASPHPRLQILV

SEQ ID NO: 6514 - protein, 151 aa, Zea mays
  unsure (1)..(151): unsure at all Xaa locations
  Clone ID: TF_LIB4738-122-A1-K1-D8.pep
MKIFVKSSTGRTVCLRVNPADTVHTVKTKIQEQRYLVYDGVQLEDDRTLADYGIEHKSVLDLKEKMQIFIVETLAGTTITLEGERSETIDNIKERIKESEGXPKGQEGLIFGHKEVETXQDLVGQHISEGSTLLLGLRHMLLRGTMHISIY

SEQ ID NO: 6515 - protein, 159 aa, Zea mays
  unsure (1)..(159): unsure at all Xaa locations
  Clone ID: TF_LIB4767-071-Q1-K1-C2.pep
SRSCLATHEGLPRPQRYHTVWQWHWHHGRGARRLTDKEEAGPSSPAASRAHVAEMGGAGGGGRNGAATRRYNRSKVPRLRWTSELHRNFVRAVDCLGGQDSTFCSCLLTSHAKHACIHTYMSXGLVSSLYLSFLVGQNGPGLIHVLSSWSMSTACRSYS

SEQ ID NO: 6516 - protein, 226 aa, Zea mays
  unsure (1)..(226): unsure at all Xaa locations
  Clone ID: TF_ZmC4296_2.pep
HVHGAIVHPSYSWSSQTGLITAVAQLGGPDXCTPKAVMRTMGVKGLTLFHLKSHLQKYRLGRQSGKELTEHSKDASYLMEAQSGTTLSPRGSTPDVKESQEVKEALRAQMEVQRRLHEQVEVQKHMQIRMEANQKYIDTILDKAFKIVSEQLSGFSISDQDLPILTSARAMLSPADHLSSSVFPQLSVSSVSLHNPGPGGGKGLPHVADSHVFSQRPPEQFKRKSR

SEQ ID NO: 6517 - protein, 185 aa, Zea mays
  Clone ID: TF_UC-ZMFLB73117F06_FLI.pep
NENKHAHHILERRAEQVAVSAADIAQKPGPPPQVPTLKATPCLCRNVLFSPCTGCCSTEQSRVPAHVWSHVAPPTGAWLSASEEEDVTQLSAERRRVGEQQQEEDRDPVSTAEASSASAPAAEPRPWSARTSCARRSTDCRYLPCASILSCRCRCTCHHVWMCVVMNGRARLDQQPSTNRRHTIG

SEQ ID NO: 6518 - protein, 84 aa, Zea mays
  Clone ID: TF_LIB3354-025-P1-K1-G1.pep
RGMRAPRIRWTSSLQARFVHAVELLGGHERATPKSVLELMDVKDLTLAHVKSHLQVEFRPMRSWFFNSVYPCDSLIILCSSGRV

SEQ ID NO: 6519 - protein, 138 aa, Zea mays
  Clone ID: TF_ZmC424_12.pep
PRRQHRQHQRRRRRRAVATPKQIRELMKVDGLTNDEVKSHLQKYRLHTRRASSDGGDQHAGGLWSSAPDQQYTTSQHSTSQSQSQSGSPQGPLQLAVSSRAMSATAGDSCDAGDEAQGGRSESYGWEMPQHGTKASSS

SEQ ID NO: 6520 - protein, 58 aa, Zea mays
  Clone ID: TF_ZmC34324_3.pep
MVTDLYSQFVATMNQLGGPHVATPKKIRELMKVNGLINDEVKSHLQVRHAPCLLSLSI

SEQ ID NO: 6521 - protein, 185 aa, Zea mays
  Clone ID: TF_ZmC761_2.pep
AVRQYNRSKLPRLRWTPDLHMAFVHAVERLGGQERATPKLVLQTMNVRGITIAHVKSHLQMYRSKKLDQESAGHERAATSSVFSPMDFHMMRTGDHHRYHDMFLHRPAAGSAISSRLLHGGEFFGSRNAAVSPEARRLYELLLRRQPTMQTFDFKGYSSGSGLRDQEWRFSQHAAATARAVSIND

SEQ ID NO: 6522 - protein, 291 aa, Zea mays
  unsure (1)..(291): unsure at all Xaa locations
  Clone ID: TF_ZmC12579_2.pep
SSYDIYIYIYSRVLTLQAQRLRNELFGIYCGEWTQRPTAWRRHEQTEHGRRGAAHRPCQCQTRSHVRCSASCSPAAQCSIRSPWRVELPDRISPSNASTFCTSMYSSSSSSSAAADSSKSCRRAGALPFLPHPPKREQQQQQQSSSSPSLLVCTDLGNGGQDEAEAEHPAELKDFLNLSGEASWRGGFHGESSGVAFRFGEQVEFQFLSEQLGIAITDHDESPRLDDIYDRPPQTSSCPVLSCSDQEEGLQRAGSPVKAQPSSSRAASCNNKPRLRWTLELHEXFVKAVNK

SEQ ID NO: 6523 - protein, 176 aa, Zea mays
  Clone ID: TF_LIB4739-003-Q1-K1-F8.pep
MTTTTMTTTTTAAPDLSLHISPPSPPEPRLLLGLELDDDTAAAVAAKAATKKADDAAMREYNNLRQVQRRQLHQPSQTAGHGFKRGTSGSAAAGAGGRRSSRAPRMRWTTALHAHFVHAVELLGGHERATPKSVLELMNVKDLTLAHVKSHLQMYRTAKQQGADRPCVAVAGHGHA

SEQ ID NO: 6524 - protein, 276 aa, Zea mays
  Clone ID: TF_ZmC1401_4.pep
ARLRWTRQLHDRFVLAVAQVGGADKATPKSSVMRAMAVSGLTLYHLKSHLQRYRLAVSQGTASPVGEGDNGGGANERSSSSESQLDEYDDGSVADLHGDSSGSMAARVQREAKRKRHEQMQIEVQRHLQLRIEAQGRYMQSVLRRAQEALADHILGSPAGAEAELSELASAVETGTGCLSSTSCCSTSPSPVRHRSADSCVTSSSSSSSEAESQAPAGANTCAGTRDCSVERPVQDEESTFLQRHEDEDEAEEADVGAAAAAEDEDGTSSEIDLNR

SEQ ID NO: 6525 - protein, 229 aa, Zea mays
  Clone ID: TF_ZmC2088_2.pep
MATTAAAAPDLSLHISPPSPPDDARSSDMLFSKQTLCLGLVQTTTAAAAHDQDGQCDDVQQQQRLHQPSQIQRFKKTSSSSAPLLSAGGGTTRSGNGNSGGGKRSSRAPRMRWTTALHAHFVHAVELLGGHERATPKSVLELMNVKDLTLAHVKSHLQMYRTVKGTTADRSCAAGHVQMRDMGFLHRGCELNGFEAFSNGTSNATANNRDGGPAEARISKTLPPPRRSS

SEQ ID NO: 6526 - protein, 87 aa, Zea mays
  unsure (1)..(87): unsure at all Xaa locations
  Clone ID: TF_ZmC637236_1.pep
EKRIRLYNRSXVSRMRWTEELYRLFVEAVXCLGGQDEXTPNRILQLMGAKGATISHIKSHLQMYRGSISCSSSTHHQSSLQKSYINR

SEQ ID NO: 6527 - protein, 219 aa, Zea mays
  Clone ID: TF_ZmC1230639_1.pep
MSRGCCWGVSTGGGVGVQTTAAAVPDLSLHISPPSPPAGGVEVLPEPRLLLGLGLGPGPGLELDDDDAAVATKKVDDDDDAAAAAREHNLHAQRLRLQLHQPSQTAHGFKKSSSGTAAGGGRRSSRAPRMRWTPALHAHFVHAVELLGGHERATPKSVLELMNVKDLTLAHVKSHLQMYRTVKGSTDRSCVAAAAGHGGHAGDMVILRRRGAGEGDGGY

SEQ ID NO: 6528 - protein, 217 aa, Zea mays
  unsure (1)..(217): unsure at all Xaa locations
  Clone ID: TF_ZmC519380_1.pep
MTVEGRVGGGGKDKFPAGMRVLAVDDDPTCLKVLENLLRRCDYHVTTTGQAATALRMLRENKDQFDLVISDVHMPDMDGFKLLELVGLEMDLPVIMLSANGETQTVMKGITHGACDYLLKPVRLEQLKTIWQHVIRRNTKNRGSDNDDAGQKGPNAEGENGGANRNKRQSRRDRDDNGDDGDDSDENSNDNGDSSSQKKPXRVVWSVELHRKFVAAV

SEQ ID NO: 6529 - protein, 111 aa, Zea mays
  Clone ID: TF_uC-zmflteosinte056b03b1.pep
MYHQQQLHTHNQHLSSSRPGLPPEKQFLLHGAGGGGDAGLVLSTDAKPRLKWTPELHERFVEAVHQLGGPDKATPKTIMRLMGIPGLTLYHLKSHLQKYRLQQNFQAQAHT

SEQ ID NO: 6530 - protein, 108 aa, Zea mays
  Clone ID: TF_LIB3597-003-P1-N6-G6.pep
ASPSAASSAVTDAAGAHRRQHAQQRKARRCWSPGLHRRFVAALQRLGGAQVATPKQIRELMKVDGLTNDEVKSHLQKYRLHTRRASSDGGDQHAGGLWSSAPEQHYTT

SEQ ID NO: 6531 - protein, 206 aa, Zea mays
  Clone ID: TF_LIB5117-022-A1-PF1-A5.pep
MNTKKFRPPGDVVGSAALCDPSSPQQLSSSLHQEELENSATSSQQHCAGCRLHEDYTPWSALAQSCLGTDNAAFDCAESLFDYPPGMLLMPIARTHYQYQSSENDRCRPRPQRDAMETTPAQLHKQPLPPPPQQQQERDHGLFSFSNASTTWSRGGEPKTCSFSPLVAAPDTILPAMENQKVPLPGNCMDAPVTPRRRRRRQGASC

SEQ ID NO: 6532 - protein, 123 aa, Zea mays
  Clone ID: TF_LIB3355-001-P1-K1-E9.pep
APAFAPLCLRTDDKAAAARVGVPDLSSLLSSPATMPPADAGAEESRRQVVGFAQAAARAAAMAPSAPALGLQSQQQQQQARKARRCWSTELHRKFVAALDQLGGPQVATPKQIRELMKVDGLT

SEQ ID NO: 6533 - protein, 669 aa, Zea mays
  Clone ID: TF_ZmC10296_1.pep
MLLGAAAARMEEKRVITGRERDQFPVGMRVLAVDDDPVCLKVLETLLRRCQYHVITTNQAITALKLLRENRDMFDLVISDVHMPDMDGFKLLELVGLEMDLPVIMLSVNGETKSVMKGITHGACDYLLKPVRIEELRDIWQHVVRDAWGKRERSNLDVYKDFNRLPGADPCHSHGHGHGQTTAGASDQSGRIGRKRKEMHSDEEDDGEENDFQEGDEPSAAKKPRVVWSIELHRKFVAAVNQLGIDKAVPKRILELMNVEKLTRENVASHLQKYRLYLKRLSAVASQQASIVAAFGGRDPFLHMGAFEGLQSYQPFAPCAALSSFIPHHGSLGRTTAAAFGVPELAPAITVQAAASNGMISHCAGDASKFQLSGIQENQQPNLGQGSATSLGLPQLQQKWIQQETGDLSAVFSGSALANTLSGALQRVASSPLPPQELLEGVQTKVSAQPPITMASVSSELVERTVGVSANLQDSGISPQGTLPINDGFTADKLQLQDPFDSNGGTNFSVNMPVCPSGSLTASSNAKGGASSCSPVLLAPDTGRHSNYLQFGVAGNSGHDMNDIKQDHLHQGLSTGGFNHDFGTCMTEQTDPNVPYLMPQMKPNTLSSEDKLKQRNIYDLGIPKLHGGFSSSSCNFDGLLNSMIKAEKDDLSFTDSDLGCDFFPLGACI

SEQ ID NO: 6534 - protein, 461 aa, Zea mays
  Clone ID: TF_ZmC21783_1.pep
MLEVSTLRGPTSSGSKAEQHCGGGGGFVGDHHVVFPTSGDCFAMVDDNLLDYIDFSCDVPFFDADGDILPDLEVDTTELLAEFSSTPPPDDLLAVAVFGADDQPAAAVAQEKPSSSLEQTCGDDKGVAVAAARRKLQTTTTTTTTEEEDSSPAGSGANKSSASAEGHSSKKKSAGKNSNGGKRKVKVDWTPELHRRFVQAVEQLGIDKAVPSRILEIMGTDCLTRHNIASHLQKYRSHRKHLMAREAEAATWAQKRHMYAPPAPRTTTTTDAARPPWVVPTTIGFPPPRFCRPLHVWGHPPPHAAAAEAAAATPMLPVWPRHLAPPRHLAPWAHPTPVDPAFWHQQYSAARKWGPQAAAVTQGTPCVPLPRFPVPHPIYSRPAMVPPPPSTTKLAQLHLELQAHPSKESIDAAIGDVLVKPWLPLPLGLKPPSLDSVMSELHKQGVPKIPPAAATTTGATG

SEQ ID NO: 6535 - protein, 134 aa, Zea mays
  unsure (1)..(134): unsure at all Xaa locations
  Clone ID: TF_LIB4744-075-Q2-K1-H12.pep
EGKARQGVERIECSLPPEKQASTGAANPNDRPMCGQGGDSGGLVLTTDPKPRLRWTPELHDRFVDAVAQLGGPDKATPKTIMRVMGVKGXTLYHLKSHLQKFRLGKQHKELGDHTAMEMQRIVASFSGMIARSM

SEQ ID NO: 6536 - protein, 157 aa, Zea mays
  Clone ID: TF_LIB3632-054-Q6-K6-E9.pep
MVTTHVHKRACEVAGHPTKYISYWQPAAGCWQVVLRVVCSLRLRPGDDHCFVHAIHKLGGQDKATPKRVLQLMGVGGLTISHVKSHLQMYRNMRNDIGMQGTTMQLVHRAEEHVYGRGGMHMELCADTQRRRQPQPQPQCGHDECDGPACCCIVVCR

SEQ ID NO: 6537 - protein, 359 aa, Zea mays
  Clone ID: TF_ZmC2322_1.pep
MGLDVGEIGMGLDLGLDLRLFAARSAGGMAKGAAPAGIQSCIRSLEVERRKIEVFRRELPLCLRLLADVIDELKEEAAKRGEDDDGATVVDDGDKRKWMSTAQLWVDSDAKSDESDKEQQSEITSPPEPKLLGGGAPTPIRAAVSAVAVPPPLPPPLFRREDSSASSGLSLVSLSPATKAAVPISPPVVAASGTTTSARFCGTTMPPSGSEVINMHSQAQQQASRKARRCWSPELHRRFVAALHELGGPQVATPKQIREVMQVDGLTNDEVKSHLQKYRLHNRRSSPGAAAAPVSQSIMLVDGVWAAQEQSSGSQSGSRQGPLQFSRAGMAVGGGDDSSSSDDDEDDDKSEDGYSLKCV

SEQ ID NO: 6538 - protein, 196 aa, Zea mays
  Clone ID: TF_LIB4740-007-R1-K1-F4.pep
MYSPKPESSFGPNPNSGTHQQQMELTGANMGPGNGANNNTNMAGRQRLRWTNELHERFVEAVTQLGGPDRATPKGVLRIMGVQGLTIYHVKSHLQKYRLAKYIPDASTDGNKTDNKDPGDLLAGLEGSSGLQISEALKLQMEVQKRLHEQLEVQRQLQLRIEAQGKYLQKIIEEQQRLTGVKSETPAGRCFCHCIK

SEQ ID NO: 6539 - protein, 312 aa, Zea mays
  Clone ID: TF_ZmC785_1.pep
MYSPKPESSFGPNPNSGTHQQQMELTGANMGPGNGANNNTNMAGRQRLRWTNELHERFVEAVTQLGGPDRATPKGVLRIMGVQGLTIYHVKSHLQKYRLAKYIPDASTDGNKTDNKDPGDLLAGLEGSSGLQISEALKLQMEVQKRLHEQLEVQRQLQLRIEAQGKYLQKIIEEQQRLTGVKSETPAGGASVTVSSDQFPDSERTEPSTPAPASESPTQVGASNRDTGDRTEATKSTCHGDSLSRNEPLTPDSNCQNGSPVASPNHERAAKRQRGSGTEFLDSEAEFSLPRHIFESSSGSEFQQYSMSYSGQ

SEQ ID NO: 6540 - protein, 149 aa, Zea mays
  unsure (1)..(149): unsure at all Xaa locations
  Clone ID: TF_LIB4744-062-R1-K1-C9.pep
PRLRIRTRACGGILGSLPPHDHAVDYSPRPTGAPGTAGSGKQRLRRTSDLDNRFKDAIAQIGGPDRATPKGVLTEMDVPRITINHEKSHLQKYRLAKYIPDTRDEGPKDEKINYSDSLSNTDSEREXQITEALKMQKEVKKLLHEQIEG

SEQ ID NO: 6541 - protein, 306 aa, Zea mays
  Clone ID: TF_ZmC34044_2.pep
MDQIATPDETAHASAPSVHKLFDAKLGHHSVMDGTLASTSQSSNIKTQLIRSSSLSRSISVNLEKRSPESDPESPQSHVSHPKFAEPMFSNSSTFCTSLFSSSSTTEPCRQMGTLPFLPHPPKCEQQVSAGHSSSSSLLLSGDTGLDVAEQSDDLNDLLNLSGDASDGSFHGENNALAFDEQMEFQFLSEQLEIAITDNEKNPHLDDIYGTPPQLSSLPVSSCSNQNLGSPVKVQLSSSQSSSSSATANKSRLRWTLELHERFVEAVKKLEGPEKATPKGVLKLMKVEGLTIYHVKSHLQKYRLAK

SEQ ID NO: 6542 - protein, 213 aa, Zea mays
  Clone ID: TF_LIB3603-002-P1-K6-E9.pep
RACGGILGSLPPHDHAAASSPRPPGAPGTAGSGKQRLRWTSDLHNRFVDAIAQLGGPDRATPKGVLTVMGVPGITIYHVKSHLQKYRLAKYIPDSPAEGSKDEKKDSSDSLSNTDSAPGLQINEALKMQMEVQKRLHEQLEVQRQLQLRIEAQGRYLQMIIEEQQKLGGSIKASEDQKLSDSPSLDDYPESMQPSPKKPRIDALSPDSERDTT

SEQ ID NO: 6543 - protein, 257 aa, Zea mays
  Clone ID: TF_ZmC11254_1.pep
MMYHAKNFSVPFAPQRAQDNEHASNIGGIGGPNISNPANPVGSGKQRLRWTSDLHNRFVDAIAQLGGPDRATPKGVLTVMGVPGITIYHVKSHLQKYRLAKYIPDSPAEGSKDEKKDSSDSLSNTDSAPGLQINEALKMQMEVQKRLHEQLEVQRQLQLRIEAQGRYLQMIIEEQQKLGGSIKASEDQKLSDSPPSLDDYPESMQPSPKKPRIDALSPDSERDTTQPEFESHLIGPWDHGIAFPVEEFKAGPAMSKS

SEQ ID NO: 6544 - protein, 338 aa, Zea mays
  Clone ID: TF_ZmC2322_6.pep
MGLDVGEIGMGLDLGLDLRLFAARSAGGMAKGAAPAGIQSCIRSLEVERRKIEVFRRELPLCLRLLADVIDEFKLEAAKRGEDDDGATVVDDGDKRKWMSTAQLWLDSDAKSDESDKEQLSEITSPEPKLLGGAPMPIRAVAAVPPLPPPFFRREDSSSGSGLSLVPPAAKPPIPPMSASDNASGRFCATMPPSGSGVNLHSQAQQQARKARRCWSPELHRLFVAALHQLGGPQVATPKQIREVMKVDGLTNDEVKSHLQKYRLHNRRSPGVVAPVSQSVMLAGGLWAPPHQEQSSSQSGSPQGPLQFSGSGVAATVGGDSSSSDEDDKSEGYSRKYV

SEQ ID NO: 6545 - protein, 474 aa, Zea mays
  Clone ID: TF_ZmC1122_1.pep
MLAVSPSPVRCADAEECGGGGASKEMEETAVGPVSDSDLDFDFTVDDIDFGDFFLRLDDGDDALPGLEVDPAEIVFADFEAIATAGGDGGVTDQEVPSVLPFADAAHIGAVDPCCGVLGEDNDAACADVEEGKGECDHADEVAAAGNNNSDSGEAGCGGAFAGEKSPSSTASSSQEAESRRKVSKKHSQGKKKAKVDWTPELHRRFVQAVEELGIDKAVPSRILEIMGIDSLTRHNIASHLQKYRSHRKHMLAREVEAATWTTHRRPMYAAPSGAVKRPDSNAWTVPTIGFPPPAGTTPRPVQHFGRPLHVWGHPSPTPAVESPRVPMWPRHLAPRAPPPPPWAPPPPADPAFWHHAYMRGPAAHMPDQVAVTPCVAVPMAAARFPAPHVRGSLPWPPPMYRPLVPPALAGKSQQDALFQLQIQPSSESIDAAIGDVLTKPWLPLPLGLKPPSVDSVMGELQRQGVANVPQACG

SEQ ID NO: 6546 - protein, 361 aa, Zea mays
  Clone ID: TF_ZmC24081_2.pep
MHNRIEEMYHHQQQLQSHSHFLSSRQTFPPERHMLLQGGSIPAEPGLVLSTDAKPRLKWTPELHERFVEAVNQLGGPDKATPKTIMRLMGVPGLTLYHLKSHLQKYRLSKNIHAQANGVNAKNVIGCTMAMDKPLEGNGSPASHLNLGTQTNKSVHIGEALQMQIEVQRRLHEQLEVQRHLQLRIEAQGKYLQSVLEKAQETLSKQNAGSVGVETAKMQLSELVSKVSTECLQHAFTGFEEIDGSQILQGHTIQLGDGSVDSCLTACDGSQKDQDILSISLSAHRGKEIGGMTFDIQEKERGREDLFLDKLSMTPPGQLDRRERGSFSMTRKAAKLDLNINDTTDGPQNCKKIDLNGFNWT

SEQ ID NO: 6547 - protein, 233 aa, Zea mays
  Clone ID: TF_ZmC1401_5.pep
MASSLGVGGQQQGHGHGHGEARARLRWTRQLHDRFVLAVAQLGGADKATPKSVLRAMAVPGLTLYHLKRHLQLKYRLVAVSRGVASPLGDSGDGTDERSSSSSENQPADECDDGTVAEPHGDSSRSVARMQRKLQEQIEVQRHLQLRIEAQGRYLQSVLRRAQEVLADHGLGSAAGAEAELASAVDTGCLSSSSCCSPTRHRSDSCVTSSSSEAENQAPVGGATWLHTCAGTR

SEQ ID NO: 6548 - protein, 111 aa, Zea mays
  Clone ID: TF_LIB5117-031-A1-PF1-G6.pep
MMYHAKKFSVPFAPQRAQNSEHVSNIGAFGGSNISNPANPVGSGKQRLRWTSDLHSRFVDAIAQLGGPDRATPKGLLTVMGVPGITIYHEKSHLQKYRLVKYITQSPAEGS

SEQ ID NO: 6549 - protein, 312 aa, Zea mays
  Clone ID: TF_ZmC21090_1.pep
MGSGRNGAVVRRYVRSKEPRMRWSADLHRSFVQAIDSLGGQHKATPKLILQFMGARGLTISHVKSHLQMYRAASLGAERGGGTPAQLLQRRYSCSGDERGGPKEEFLCCPPPPPLKRARMGYESMQGSHGVSDARTTAGGGGLYCIDDYMQAMAVGWRIKEEGLIRWQRRDAAAAAAAPSNLQAMGCLVQESAPFKVRRPEAHRLGSALKQQDDDDSSKEDGNGRPQSSNAAKEDGPSEQCSLSLSLGNLDAKCGRGTAAAASSRSGESSCILTASPARRSSSDDCSGHSGCFVVGPGGVVSLELSLSICGS

SEQ ID NO: 6550 - protein, 398 aa, Zea mays
  Clone ID: TF_ZmC12579_1.pep
MVAVKQLTGPARPAHTCAAHAHQLLSARYDHRGASQAELPDRISPSNASTFCTSMYSSSAADSSKSCRQAGALPFLPHPPKREQQQQQSSSSPSLLVCTDLGNGGQDEAEAEHPAELKDFLNLSGEASWRGGFHGESSGVAFRFREKVEFQFLSEQLGIAITDHDESPRLDDQEDIYDRPPQTSSCPVLSCSNQEEGLQRAGSPVKAQLSSYRAACNNKPRLRWNLELHELFVKAVNKLGGPEKATPKGVLKLMKVEGLTIYHVKSHLQKYRFAKYLPETKEDMKSSSEDKMPGSNPGRKKILKSLQVAEALRMQMEVQKQLHEQLEVQRQLQVRIEEHAKYLQKILEQQKARNSLSATTSSIQTELSESTKEEKPETQADTSSAQLPNKKNSDTDME

SEQ ID NO: 6551 - protein, 175 aa, Zea mays
  Clone ID: TF_LIB4764-010-R1-K1-G5.pep
MLSSTGRLHLQGVLADTLRGYGGAHHHRQHLGSLAAARYMPKLPASRRGMRAPRMRWTSSLHARFVHAVELLGGHERATPKSVLELMDVKDLTLAHVKSHLQMYRTVKSTDKPPAATSSVGGGGPPVDGGGGSGDDDHPSDWRRAPSSSAGRDVSPQAFTGHRSAFSDGAASHAG

SEQ ID NO: 6552 - protein, 451 aa, Zea mays
  Clone ID: TF_ZmC21783_2.pep
MLEVSTLRGPTSSGSKAEQHCGGFVGDHHVVFPTSGDCFAMVDDNLLDYIDFSCDVPFFDADGDILPDLEVDTTELLAEFSSTPPPDDLLAVAVFGGDEQPAAAVAQEKPSSSLEQTCGDDKGGGVAVASRRKLQTTTTEEDSSPAGSGAKSSASAEGHSSKKKSAGKNSNGGKRKVDWTPELHRRFVQAVEQLGIDKAVPSRILEIMGTDCLTRHNIASHLQKYRSHRKHLMAREAEAATWAQKRHMYAPPAPRTTTTTDAARPPWVVPTTIGFPPPRFCRPLHVWGHPPPHAAAAEAAAATPMLPVWPRHLAPPRHLAPWAHPTPVDPAFWHQQYSAARKWGPQAAAVTQGTPCVPLPRFPVPHPIYSRPAMVPPPPSTTKLAQLHLELQAHPSKESIDAAIGDVLVKPWLPLPLGLKPPSLDSVMSELHKQGVPKIPPAAATTTGATG

SEQ ID NO: 6553 - protein, 219 aa, Zea mays
  Clone ID: TF_ZmC7194_1.pep
MGEEAVDDYELHMVCYGSDEDERVMEWESGLPGADELTPLSQPLVPPGLAAAFRIPPEPGRTLLDLHRASEATVARLRRAPPSSPGTSSSPHGHQEARGGEGADSAAATTTNSNRRPRLVWTPQLHKRFVDVVAHLGIKKAVPKTIMELMNVEGLTRENVASHLQKYRLYVKRMRGQGPSPSDHIFAPTPVHGVAVGMVPMVSGQAYHYLYNGGGGGDR

SEQ ID NO: 6554 - protein, 57 aa, Zea mays
  unsure (1)..(57): unsure at all Xaa locations
  Clone ID: TF_LIB5116-072-A1-PF1-H11.pep
MMDQTVFASLPARQRLRWTDEXHEQFVXAVTQLGGPDRATPKGVLRIMGTPGLTIYH

SEQ ID NO: 6555 - protein, 366 aa, Zea mays
  Clone ID: TF_ZmC2593_1.pep
MYHQQQLHTHNQHLSSSRPGLPPEKQFLLHGAGGGGGGDAGLVLSTDAKPRLKWTPELHERFVEAVHQLGGPDKATPKTIMRLMGIPGLTLYHLKSHLQKYRLSKNLQAQAHTASAKNALVGCRTGADNALCQGSASPPPPPPPPHLNLDPPQINRSMHISEALQMQIEVQRRLHEQLEVQRHLQLRIEAQGKYLQSVLEKAQEALAKQSGGADETTTTQQQMLPDLISRATATRRGHVQQEHLHLQHHLGGDGSVDSCLTACEGSRCQRERDQDLLSIGLSSAPPPTPSRGYNDRGGGGSASCEEFLQFLDEPSRRGAGGGGGPRMSSRSLTSASAAAGAIQGLAAAKAKGSTSTDPAGTEWSSF

SEQ ID NO: 6556 - protein, 68 aa, Zea mays
  Clone ID: TF_uC-zmroteosinte018b06b1.pep
KSVLRLMGMKGLTLYHLKSHLQKYRLGKQTKKDTGLDAGRVAFAAQGINFSTPVPPPSIPSTASDNTG

SEQ ID NO: 6557 - protein, 108 aa, Zea mays
  Clone ID: TF_LIB5116-037-A1-PF1-G10.pep
MMYHAKKFSVPFAPQRAQNSEHVSNIGAFSGSNISNPTNPVGSGKQRLRWTSDLHSRFVDAIAQLGGPDRATPKGVLTVMGVPGITIYHVKSHLQKYRLAKYIPESPA

SEQ ID NO: 6558 - protein, 240 aa, Zea mays
  Clone ID: TF_ZM4583.C7.o5.fg.pep
MQGSYGYDGAASRDPKPRLRWTPDLHQRFVDAVTKLGGPDRATPKSVLRLMGMKDLTLYQLKSHLQYFAHRASVQPQRILLQVFLIKGRTQDHVLLDCEYGTVEVQKKLQMRIEAQGKYLKTILEKAQTNISFHTNASNGIESTRSQLMDFNLDGFMNNATQVCKEHREQLVKAMSDENDKDSLGLQLYHLGSQEAKEVKCTPKTEDSLLLDLNIKGGYDLSSRGMQACELELKINQQIV

SEQ ID NO: 6559 - protein, 271 aa, Zea mays
  Clone ID: TF_ZmC3576_1.pep
MQGSYGYDGAASRDPKPRLRWTPDLHQRFVDAVTKLGGPDRATPKSVLRLMGMKDLTLYQLKSHLQKYRLGIQGKKSTGLEPASGGVLRSQGFGSTTAHPPPGVPDQGKNTREIALSDALRYQIQVQRKLQEQTEVQKKLQMRIEAQGKYLKTILEKAQTNISFHTNASNGIESTRSQLMDFNLDGFMNNATQVCKEHREQLVKAMSDENDKDSLGLQLYHLGSQEAKEVKCTPKTEDSLLLDLNIKGGYDLSSRGMQACELELKINQQIV

SEQ ID NO: 6560 - protein, 154 aa, Zea mays
  Clone ID: TF_ZmC359589_1.pep
SCAEVDARSATPQSYLCFHTESERSVPDPFNCDKLGADNLPSSNTAPKPRMRWTPELHERFVDAVNKLGGSEKATPKAVQKVMKVDGLTIYHVKSHLQKHRIVQHHSETSCAGVTGRRGRHTQADDDSIPQSKGEGGIEGGLVSQIGLQKQLHE

SEQ ID NO: 6561 - protein, 228 aa, Zea mays
  Clone ID: TF_LIB5023-008-A1-XP2-F4.pep
MMPSSDGGEGVADVPRGPDGRSSPSNSSTVELDGDGGGARKAGASPSSSVRPYVRSKNPRLRWTPELHLCFLRAVDRLGGQDRATPKLVLQLMNVKGLSIGHVKSHLQMYRSKKIDGSGQVIGGGGSWRGRLHRQLQDGGQAAYSLGHLSLHHGAGQTTAASSAILSARSGAWPHWNSFHDDPSYSMLLHGGHHHLLGSNPTATTTTHQQQLKLQQLLHPLTTVLRSR

SEQ ID NO: 6562 - protein, 195 aa, Zea mays
  unsure (1)..(195): unsure at all Xaa locations
  Clone ID: TF_LIB3600-022-Q6-K6-H5.pep
VVPQAALRLAXERGARAPRMRWTTSLHARFVHAVELLGGHERATPKSVLELMDVKDLTLAHVKSHLQMYRTIKTTDHKPANSASSYGQAAAAKPVIDIPDPDDDSLFDLITTSAGSDQSSSSAQHSNPDGGGGNEHGSSMCALWCSSSTSISRGGWFHDRPRDDDAATPGPGDDIKSFEDVQSHSLLDDVADLNS

SEQ ID NO: 6563 - protein, 168 aa, Zea mays
  Clone ID: TF_LIB4758-020-R1-K1-B5.pep
MRDMINLPFSPRPDSSLGTQTGATPKSVLELMDVKDLTLAHVKSHLQMYRTVKSTDKPATTSSGGPPVDGGGDEDHDDLLSARRAQSSSSSPAGRRGGRSPQAFTRHRSAASSEGAASLAGGDDVECSSSADDSDCGRARSASSSSSCVVSCNTTTPSMIFLPGMKAI

SEQ ID NO: 6564 - protein, 257 aa, Zea mays
  Clone ID: TF_LIB4570-003-R1-K1-G3.pep
NSESEKADAKGGSKSEVSGEQRVPSVRQYNRSKLPRLRWTPDLHMAFVHAVERLGGQERATPKLVLQMMNVRGLSIAHVKSHLQMYRSKKLDQDGRPRGAVSSVYSPMDFHFMRADHRRFHNMSFFQRAAASASSSGGQERGGFFASRNFSTPELSRLYGLLHHRPAPTQTFDFRNSSFRNHEWPWAASSNQQEAMTISRKHVVMPPSTSPQTHASLASSAALRSDRRWWPFTEAGAAVAAGEHRAGTGVTSVKFDN

SEQ ID NO: 6565 - protein, 199 aa, Zea mays
  Clone ID: TF_ZmC306667_1.pep
TASEGEAAALPELALAPADKDAADADRKPYLDAAAAGSNNGGVLSARRDVVQSGVVKPAPEGQQAAPPQTHRKARRCWSPELHRRFVNALQILGGAQVATPKQIRELMKVDGLTNDEVKSHLQKYRLHTRRPMPAPPAPATAAPQLVVLGGIWVPPEYASQAAGQAIYGAHPATQPHYTAAAQEYYPSPAAVHHLQHHP

SEQ ID NO: 6566 - protein, 279 aa, Zea mays
  Clone ID: TF_ZmC13106_1.pep
MNMFDGMESAGYGGGAGPMGGVVLSRDPKPRLRWTPDLHERFVEAVTKLGGADKATPKSVLRLMGMKGLTLYHLKSHLQKYRLGKQTKKDTGLDAGRVAFAAQGINFSTPVPPPSIPSTASDNTGETPLADALKYQIEVQRKLHEQLEVQKKLQMRIEAQGKYLQTILEKAQSNLSYHATGAANLEATRSQLTDFNLALSGFMDNVTQACEQNNGELVKAMSEDGLRANNLDFQPYHGVHDGDDVKCATDEGLLLLDLNIRGGYGHRISTDLKMNQHMR

SEQ ID NO: 6567 - protein, 267 aa, Zea mays
  Clone ID: TF_ZmC4296_1.pep
MFPSLIHHASHGRPDVAVAEDAPRSGCGLGLPGHGGGPSVVLTADPKPRLRWTADLHDRFVDAVAQLGGPDKATPKAIMRTMGVKGLTLFHLKSHLQKYRLGRQSGKELTEQSKDASYLMEAQSGTTLSPRGSTPDVKESQEVKEALRAQMEVQRRLHEQVEVQKHMQIRMEANQKYIDTILDKAFKIVSEQLSGFSISDQDLPILTSARAMLSPADHLSSSVFPQLSVSSVSLHNPGPGGGKGLPHVADSHVFSQRPPEQFKRKSR

SEQ ID NO: 6568 - protein, 270 aa, Zea mays
  Clone ID: TF_ZmC1401_2.pep
MASSLGVGGQQQGHGHGHGEARARLRWTRQLHDRFVLAVAQLGGADKATPKSVLRAMAVPGLTLYHLKRHLQKYRLVAVSRGVASPLGDSGDGTDERSSSSSENQPADECDDGTVAEPHGDSSRSVARMQRKLQEQIEVQRHLQLRIEAQGRYLQSVLRRAQEVLADHGLGSAAGAEAELASAVDTGSLSSSCCCSPTRRRSADSCVTSSSSEAESQAPVGGATWLHTCAGTRDCSVEQQPVQGEKSTFLQRHGAAEDGTSSEIDPNGNR

SEQ ID NO: 6569 - protein, 284 aa, Zea mays
  Clone ID: TF_ZmC2088_1.pep
LMNVKDLTLAHVKSHLQMYRTVKGTTADRSCAAGHVQMRDMGFLHRGCELNGFEAFSNGTSNATANNRMQAAAGSPAGKHAEVAWFLRPPLAHQSSGGGGGGGGAVPLPLPLPCPYLMSAHHNRYLLSQNQGWRTRGAHQQDAAAPPPLVLGQQDSARRLHPGFPDTAISSSRPSSWSAGVASRWSSTAAAAPSPSSGRSSISSGTEQPAACSWTMMTTNKQKQQQQPPSTSSSSRVVAVPNLEMSLGRQGWQHDLQDHHPQQQQQQRSGESTAPKELTLLKCL

SEQ ID NO: 6570 - protein, 89 aa, Zea mays
  Clone ID: TF_LIB3227-031-P1-K1-F10.pep
MFPSKKATSSAAAAAAAVSSNDSRQQAMCVQADSGSGLVLTTDPKPRLRWTVELHERFVDAVTQLGGPDKATSKTIMRVMGVKGLTLYH

SEQ ID NO: 6571 - protein, 589 aa, Zea mays
  Clone ID: TF_ZmC4646_1.pep
MAAASTPARSSAHLSQPVRVVLRVRPFLSSEAASATAPCVSLLGCHPGGGVTVQLKDQHTSRSEQYKLDAFFRQEDSVSQIFDQEVRAVIPSIFEGINATVFAYGATGSGKTYTMQGTEDFPGLIPLAASTILALCTGTWCSVEISYYEVYMERCYDLLEPKAKEIMALDDKDGNMQLKGLSWVPVRSMEEFQELYSIGVQRRKVAHTGLNDVSSRSHAVLSLRVSSTDVVKGKLNLIDLAGSEDNKRTLNEGIRLQESSKINQSLFALSNVISALNKNEHRIPYRQSKLTRLLRDSLGGGSRTVMIACLNPAEYQESANTVSLAARSCHIENFTSSSKQETPKLKIDMEAKLRAWLESKGKTKSIQRMDGLFSPIASKTPLSVSHMKQPTSSRIPCRVKAMDQDGGKIKKILFDPVVHVPTENIPREHRQTEVNTPKKVVLPSVTPCNEKHEASLRKALSPISSNMVPVEQQIPDNGNCPVLLEPQTPIEKRNIVEETPGATPLERFNALGSNLKEALVQQYLDLLNVANKEELQQLKGIGARRAEYILELREDSPKPFKTLEDLGNIGLSSKQIRDILKKTATGIFK

SEQ ID NO: 6572 - protein, 340 aa, Zea mays
  Clone ID: TF_ZmC39584_1.pep
MSSSSAHQKASPPIEEEATEHGPFPIEQLQASGIAALDVKKLKDAGLCTVESVAYSPRKDLLQIKGISEAKVDKIIEAASKLVPLGFTSASQLHAQRLEIIQLTTGSRELDQILDGGIETGSITEMYGEFRSGKTQLCHTLCVTCQLPLDQGGGEGKALYIDAEGTFRPQRILQIADRFGLNGADVLENVAYARAYNTDHQSRLLLEAASMMVETRFALMVVDSATALYRTDFSGRGELSARQMHLAKFLRSLQKLADEFGVAVVITNQVVAQVDGAAMFAGPQIKPIGGNIMAHASTTRLFLRKGRGEERICKVISSPCLAEAEARFQISSEGVTDVKD

SEQ ID NO: 6573 - protein, 340 aa, Zea mays
  Clone ID: TF_ZmC4042_1.pep
MSSAAQQQQKAAAAEQEEVEHGPFPIEQLQASGIAALDVKKLKDSGLHTVEAVAYTPRKDLLQIKGISEAKADKIIEAASKIVPLGFTSASQLHAQRLEIIQVTTGSRELDKILEGGIETGSITEIYGEFRSGKTQLCHTLCVTCQLPLDQGGGEGKALYIDAEGTFRPQRLLQIADRFGLNGADVLENVAYARAYNTDHQSRLLLEAASMMIETRFALMVVDSATALYRTDFSGRGELSARQMHMAKFLRSLQKLADEFGVAVVITNQVVAQVDGSAMFAGPQFKPIGGNIMAHASTTRLALRKGRGEERICKVISSPCLAEAEARFQLASEGIADVKD

SEQ ID NO: 6574 - protein, 397 aa, Zea mays
  unsure (1)..(397): unsure at all Xaa locations
  Clone ID: TF_ZmC9705_1.pep
MDGGREQQAPPESQPGKNLIKIPSYQEVFGTGASTSSSKPPSYNPPVATSAAAAASSSSSSSGSFSQAFSFLKSSEFYSPPPPPPQPTTTPRPTQASPSAPTPQSKNSILVSHRQRGNPLLKHIRNARWTFADVVPDYVLGQSSCALYLSIRYHLLHPDYLYYRIRELQKNFRLRVILCHVDVEDVIKPLHEITRTALLHDCTLLCGWSLEECGRYLETIKVYENKPADSIREHMDNDYLSRLTHGLTSIRHVNKTDVVTLGSXYLQSLSQIMNGSMDELARCPGIGERKVRRLYDTFHEPFKRVPARPRPNLVVPDTPDREKAKGQPSSTDGSSLQDAVEKPDASKKTKKGSDVRSALTVAFAKYSEKIRSQGRDAPNEAGESTGGSTVEAERAGD

SEQ ID NO: 6575 - protein, 201 aa, Zea mays
  Clone ID: TF_ZmC490976_1.pep
MDSSSSSVPAAAAAEGAPPAGENLAVFWHEGMLAHDAGRGVFDSGRDPGFLDVLDHHPENADRVRNMVSILRRGPIAPFLSWHSGTPAHASDLLSFHSPEYIEELAQANASGPKKLCEGTFLNPGSWGAALLAAGTTLSATRHILDGHGKIAYALVRPPGHHAQPDHADGYCFLNNAGLAVQLALDSGRAKVAVVDIDVHY

SEQ ID NO: 6576 - protein, 172 aa, Zea mays
  unsure (1)..(172): unsure at all Xaa locations
  Clone ID: TF_LIB3960-017-Q1-K6-C4.pep
MLEKDRISYFYDGDVGNVYFGPNHPMKPHRLCMTHHLVLSYGLHQKMEIYRPHKAYPIELAQFHSADYVEFLHRITPDSQHLYASELTRCMDAGVFSFQTILQDCXFTMKYMPYNLGEDCPVFDNLFEFCQIYAGGTLDAARRLNHKICDIAINWAGGLHHAKKCEASGFCY

SEQ ID NO: 6577 - protein, 430 aa, Zea mays
  Clone ID: TF_ZmC1898_1.pep
MLEKDRISYFYDGDVGNVYFGPNHPMKPHRLCMTHHLVLSYGLHQKMEIYRPHKAYPIELAQFHSADYVEFLHRITPDSQHLYASELTRYNLGEDCPVFDNLFEFCQIYAGGTLDAARRLNHKICDIAINWAGGLHHAKKCEASGFCYINDLVLGILELLKYHARVLYIDIDVHHGDGVEEAFYFTDRVMTVSFHKYGDLFFPGTGDIKDIGEREGKYYAINIPLKDGIDDTSFTRLFKTIIAKVVETYLPGAIVLQCGADSLARDRLGCFNLSIEGHAECVKFVKKFNIPLLVTGGGGYTKENVARCWAVETGVLLDTELPNEIPKNEYIEYFAPDYTLKVPNLNMDNLNSKTYLSSIKVQVMESLRYIQHAPGVQMQEVPPDFYIPDFDEDELDPDERVDQHTQDKQIHRDDEYYEGDNDNDHDDGTR

SEQ ID NO: 6578 - protein, 496 aa, Zea mays
  unsure (1)..(496): unsure at all Xaa locations
  Clone ID: TF_ZmC29703_3.pep
MDASAGGGGNSLPTTGADGSKRRVCYFYDAEVGNYYYGQGHPMKPHRIRMTHALLGRYGLLDQMQVFRPHPARDRDLCRFHADDYVSFLRSVTPETQQDQIRALKRFNVGEDCPVFDGLYSFCQTYAGGSVGGAVKLNHGHDIAINWAGGLHHAKKCEASGFCYVNDIVLAILELLKYHQRVLYVDIDIHHGDGVEEAFYTTDRVMTVSFHKFGDYFPGTGDIRDVGHSKGKYYSLNVPLDDGIDDESYQSLFKPIMGKVMEVFNPGAVVLQCGADSLSGDRLGCFNLSIKGHAECVRFMRSFNVPLLLLGGGGYTIRNVARCWCYETGVALGHELTDKMPPNEYYEYFGPDYTLHVAPSNMENKNTRHQLDDIKSKLLDNLSKLRHAPSVQFQERPPEAELPEQDEDKENPDERHDADSDVEMNDAKPLQDSGRMSIXVAAEHSRGTGPVADGVGSSKQTFPNATSRMAIDEPNXLRVEQEGSNKLQDQPSMHLK

SEQ ID NO: 6579 - protein, 119 aa, Zea mays
  unsure (1)..(119): unsure at all Xaa locations
  Clone ID: TF_LIB3150-049-Q1-N1-F11.pep
MAASGEGAXLPTTTGGEDAHRPRLSYLYKPPIVNYYYSQGYPMKPELIQMDHSIVVXYDLQRLHKLXRSYPNSEAYIRRLHSDDYVSFVAYATGNAGVLDPRANNHFNVREDCTMFDGL

SEQ ID NO: 6580 - protein, 138 aa, Zea mays
  Clone ID: TF_ZmC1028609_1.pep
HASETFNLPLLMLGGGGYTIRNVARCWTYETAVALDCEIPNELPYNDYFEYSGPDFKLHISPSNMTNQNTPEYMEKIKQRLFENLRMLPHAPGVQMQAIPEDAVHEDSGDEDGEDPDKRISIRASDKRIACDEEFSDS

SEQ ID NO: 6581 - protein, 115 aa, Zea mays
  Clone ID: TF_LIB3245-437-P1-N1-C7.pep
YSYQRTQKKTRQKTNCPGHPPKKKKGERTHTHKPQSPAAAIDPSSPASGGNSLPSVHPDGQKRRVNYFYNPDVDNYYYGQGHPMKPHRVRMTHYTLARYNLLNQMQVYRPNPPRN

SEQ ID NO: 6582 - protein, 81 aa, Zea mays
  unsure (1)..(81): unsure at all Xaa locations
  Clone ID: TF_LIB3152-001-Q1-K1-B2.pep
MLSGMAASGEGASLPSPAGGEDAHRRRISYFYXPSIGNYYYGQGYPMKPHRILMAHSLAVHYGLHRLLXAXRPYPVSEADI

SEQ ID NO: 6583 - protein, 364 aa, Zea mays
  unsure (1)..(364): unsure at all Xaa locations
  Clone ID: TF_ZmC1898_5.pep
MLEKDRISYFYDGDVGNVYFGPNHPMKPHRLCMTHHLVLSYGLHQKMEIYRPHKAYPIELAQFHSADYVEFLRRITPDSQHLYASELTRYNLGEDCPVFDNLFEFCQIYAGGTLXAFYFTDRVMTVSFHKYGDLFFPGTGDIKDIGEREGKYYAINIPLKDGIDDTSFTRLFKTIIAKVVETYLPGAIVLQCGADSLARDRLGCFNLSIEGHAECVKFVKKFNIPLLVTGGGGYTKENVARCWAVETGVLLDTELPNEIPKNEYIEYFAPDYTLKVPNLNMDNLNSKTYLSSIKVQVMESLRYIQHAPGVQMQEVPPDFYIPDFDEDELDPDERVDQHTQDKQIHRDDEYYEGDNDNDHDDGTR

SEQ ID NO: 6584 - protein, 701 aa, Zea mays
  Clone ID: TF_ZmC19940_1.pep
MAEPAPAPPVTAPLVGLLYDERMCAHATPNGEEHPENPERLRSIWRKLNAAGVASRCVALKAKEAEDKYIASVHSKRHIKLMKEISSTIYDASRNKIARKFNSIYFNKGSSESAVLAAGSVIEVAEKVAAGELSSAIALVRPPGHHAEHDEAMGFCLFNNVAVAANYLLNERPDLGIKKILIVDWDVHHGNGTQKMFYDDPRVLFFSVHRFDYGSFYPAEGDASHCFIGEEAGKGYNINVPWEHGKCGDADYIAAWDHVLLPVTKVFDPDIILVSAGFDAALGDPLGGCCITPNGYALLLTKLLGFAQGRIVMALEGGYNLRSIANSVCACAKVLLGDKFTFNTPEMQPFESTWRVIQAVRNELKTCWPVLSSKLPENVSLRIKPAPSELYASSDSESDSEDVDELLGTVASVNVIEATGVAISEHLSKMKLDDDSLAVKTNSSCSAAEQHPVDSVKVHNNASVVLTKKISDLSLEWRSDLSKTDVWYASFGSNMWRPRFLCYIQGGKAEGMNIPCCGSRDTSSPKGTVWKTVPHRLLFGRSSTPCWGTGGVAFLNPEINYNEKLYVCMYKITLEQFNDILFQENRLVLEDGKDGNTVYPDSPLIGSSEIKFISTNRAVHLEPIKDSWYSNVLYLGNEDEVPILTMTCPASDIERYKSGELRLAPPSETYAATLIKGLVEGKQMDADGAASYINAAAARAL

SEQ ID NO: 6585 - protein, 206 aa, Zea mays
  Clone ID: TF_ZmC2148_2.pep
AVAARYAQHQHGLKRVMIIDFDVHHGNGTSDSFYDDPDIFFLSTHQLGSYPGTGKINEVGQGDGEGTTLNLPLPGGAGDYAMRCAFDEVIAPSAHRFKPDIILVSAGYDAHALDPLAGLQFTTGTFYMLASSIKQVTKELCGGRCVFFLEGGYNLQSLSSSVADTFRAFLDEPSLAAQFDDPAILFEEPTRKIKEAIEKAKSIHSL

SEQ ID NO: 6586 - protein, 334 aa, Zea mays
  unsure (1)..(334): unsure at all Xaa locations
  Clone ID: TF_ZmC1898_2.pep
FSLLPLPRPSGVKRCWRKTGYPTSTTRPHKAYPIELAQFHSADYVEFLHRITPDSQHLYASELTRYNLGEDCPVFDNLFEFCQIYAGGTXRVMTVSFHKYGDLFFPGTGDIKDIGEREGKYYAINIPLKDGIDDTSFTRLFKTIIAKVVETYLPGAIVLQCGADSLARDRLGCFNLSIEGHAECVKFVKKFNIPLLVTGGGGYTKENVARCWAVETGVLLDTELPNEIPKXNECIEYFAPDYTLKVPNLNMDNLNSKTYLSSIKVQVMESLRYIQHAPGVQMQEVPPDFYIPDFDEDELDPDERVDQHTQDKQIHRDDEYYEGDNDNDHDDGTR

SEQ ID NO: 6587 - protein, 224 aa, Zea mays
  unsure (1)..(224): unsure at all Xaa locations
  Clone ID: TF_LIB4739-063-Q2-K1-C9.pep
TISPKLHVLGGQWTFYSMGSWVNSLPSFRPYGKKCGARYFYNPEEGNYYYGEGHTMKTERIRMIHSLLRRYRRLKQMKVNRPNPDSYRELCRNHVDYYLDLLLSSRPXSTQHDHTRLLKRFNCLEDCPVFHSPYSFCHSYGXGLPNTESASSTHSSRPLNATGSSGLHDDKKREGTGFCYPTDVVLAILELREHHHRARHAHSYILHGDEEDDACYTTETAMTA

SEQ ID NO: 6588 - protein, 432 aa, Zea mays
  Clone ID: TF_21207384.pep
MIASLPIYFITPIVGDVGNVYFGPNHPMKPHRLCMTHHLVLSYGLHQKMEIYRPHKAYPIELAQFHSADYVEFLHRITPDSQHLYASELTRYNLGEDCPVFDNLFEFCQIYAGGTLDAARRLNHKICDIAINWAGGLHHAKKCEASGFCYINDLVLGILELLKYHARVLYIDIDVHHGDGVEEAFYFTDRVMTVSFHKYGDLFFPGTGDIKDIGEREGKYYAINIPLKDGIDDTSFTRPFKTIIAKVVETYLPGAIVLQCGADSLARDRLGCFNLSIEGHAECVKFVKKFNIPLLVTGGGGYTKENVARCWAVETGVLLDTELPNEIPKNEYIEYFAPDYTLKVPNLNMDNLNSKTYLSSIKVQVMESLRYIQHAPGVQMQEVPPDFYIPDFDEDELDPDERVDQHTQDKQIHRDDEYYEGDNDNDHDDGTR

SEQ ID NO: 6589 - protein, 147 aa, Zea mays
  Clone ID: TF_uC-zmflteosinte76f08b1.pep
MASESSPPPAGAPPPGLGDKLAVFWDEGMLAHDAGRGVFDSGRDPGFLDVLDQHPENADRVRNMVSILRRGPIAHFLSWHSGRPAHASELLSFHSSEYIEELVQTNATGAKKKLCEGTFLNPGSWGAALLADGTTLSAAKHILDGQG

SEQ ID NO: 6590 - protein, 517 aa, Zea mays
  unsure (1)..(517): unsure at all Xaa locations
  Clone ID: TF_ZmC29703_2.pep
MDPSSAGSGGXXXXXXXXXGQKRRVCYFYDPDVGNYYYGQGHPMKPHRIRMTHSLLARYGLLNQMQVXXXXXXXXRELCRFHAEEYINFLRSVTPETQQDQIRLLKRFNVGEECPVLDGLYSFCQTXXXXXXXXXXKFNHGHDIAINWXXXLHHAKKCEASGFCYVNDIVLAILELLKHHERVLYVDIDIHHGDGVEEAFYTTDRVMTVSFHKFGDYFPGTGDIRDIGHSKGKYYSLNVPLDDGIDDESYQSXXKPIMGKVMEVFRPGAVVLQCGADSLSGDRLGCFNLSIKGHAECVRYMRSFNVPLLLLGGGGYTIRNVARCWCYETGVALGQEPEDKMPVNEYYEYFGPDYTLHVAPSNMXXXXXXXXXDDIRSKLLDNLSKLRHAPSVHFQERVPDTEIPEQDEDQDDPDERHDPDSDMEVDDHKAVEESSRRSILGIKIKREFGENATRVQDGGRVASEHRGLEPMAEDIGSSKQAPQADASAMAIDEPSNVKNEPESSTKLQGQAAAYHKP

SEQ ID NO: 6591 - protein, 221 aa, Zea mays
  unsure (1)..(221): unsure at all Xaa locations
  Clone ID: TF_ZmC515833_1.pep
MAASGEGASLPSPAGGEDSRRRRVSYFYEPTIGDYYYGQGHPMKPHRIRMAHSLVIHYGLHRLLELSRPFPASEADISRFHSDEYVSFLASATGNPTILDPRAVKRFNVGEDCPVFDGLFPFCQASAGGSIGAAVKLNRGDADITVNWAGGLHHAKKGEASGFCYVNDIVLAILELLKFHRRVLYVDIDVHHGDGVEEAFFPXNRVMTVSFHKYEDFFSWN

SEQ ID NO: 6592 - protein, 391 aa, Zea mays
  Clone ID: TF_ZmC13115_2.pep
MASESSPPPAGAPPPGLGDKLAVFWDEGMLAHDAGRGVFDSGRDPGFLDVLDQHPENADRVRNMVSILRRGPIAHFLSWHSGRPAHASELLSFHSSEYIEELVQTNATGAKKKLCEGTFLNPGSWGAALLAAGTTLSSAKHILDGQGNLAYALVRPPGHHAQPDHADGYCFLNNAGLAVQLALDSGRAKVAVVDIDVHYGNGTAEGFYRTDTVLTMSLHMMHGSWGPSHPQSGSVDEIGEGKGLGYNLNIPLPNGSGDAGYEYAMNELVVPSIDKFQPQLLFLVVGQDSSAFDPNGRQCLTMEGYRKIGQIMRRLADRHCNGQILVVQEGGYHITYSAYCLHATLEGVLDLEAPLLDDPIAYYPEDDKYTMKVVDMIKSYWKESVPFLKEI

SEQ ID NO: 6593 - protein, 517 aa, Zea mays
  Clone ID: TF_ZmC29703_1.pep
MDPSSAGSGGNSLPSVGPDGQKRRVCYFYDPDVGNYYYGQGHPMKPHRIRMTHSLLARYGLLNQMQVYRPNPARDRDLCRFHADDYINFLRSVTPETQQDQIRLLKRFNVGEDCPVFDGLYSFCQTYAGASVGGAVKLNHGHDIAINWSGGLHHAKKCEASGFCYVNDIVLAILELLKHHERVLYVDIDIHHGDGVEEAFYTTDRVMTVSFHKFGDYFPGTGDIRDIGHSKGKYYSLNVPLDDGIDDESYQSLFKPIMGKVMEVFRPGAVVLQCGADSLSGDRLGCFNLSIKGHAECVRYMRSFNVPLLLLGGGGYTIRNVARCWCYETGVALGQEPEDKMPVNEYYEYFGPDYTLHVAPSNMENKNTRQQLDDIRSKLLDNLSKLRHAPSVHFQERVPDTEIPEQDEDQDDPDERHDPDSDMEVDDHKAVEESSRRSILGIKIKREFGENATRVQDGGRVASEHRGLEPMAEDIGSSKQAPQADASAMAIDEPSNVKNEPESSTKLQGQAAAYHKP

SEQ ID NO: 6594 - protein, 253 aa, Zea mays
  Clone ID: TF_LIB4730-005-R1-K1-C11.pep
SRSRPGKKKKKTDSLSGDRLGCFNLSIKGHAECVRYMRSFNVPLLLLGGGGYTIRNVARCWCYETGVALGQEPEDKMPVNEYYEYFGPDYTLHVAPSNMENKNTRQQLDDIRSKLLDNLSKLRHAPSVHFQERVPDTEIPEQDEDQDDPDERHDPDSDMEVDDHKAVEESSRRSILGIKIKREFGENATRVQDGGRVASEHRGLEPMAEDIGSSKQAPQADASAMAIDEPSNVKNEPESSTKLQGQAAAYHKP

SEQ ID NO: 6595 - protein, 391 aa, Zea mays; identical to SEQ ID NO: 6592
  Clone ID: TF_ZmC13115_1.pep

SEQ ID NO: 6596 - protein, 458 aa, Zea mays
  Clone ID: TF_ZmC29909_1.pep
MAASGEGASLPSPAGGEDAHRRRVSYFYEPSIGDYYYGQGHPMKPHRIRMAHSLVVHYGLHRLLELSRPYPASEADIRRFHSDDYVAFLASATGNPGVLDPRAIKRFNVGEDCPVFDGLFPFCQASAGGSIGAAVKLNRGDADITVNWAGGLHHAKKSEASGFCYVNDIVLAILELLKFHRRVLYVDIDVHHGDGVEEAFFTTNRVMTVSFHKYGDFFPGTGHITDVGAAEGKHYALNVPLSDGIDDTTFRGLFQCIIKKVMEVYQPDVVVLQCGADSLAGDRLGCFNLSVKGHADCLRFLRSYNVPMMVLGGGGYTIRNVARCWCYETAVAVGVEPDNKLPYNDYYEYFGPDYTLHIQPKSVENLNTTKDLENIKNMILENLSKIEHVPSTQFHDRPSDPEAPEEKEEDMDKRPPQRSRLWSGGAYDSDTEDPDSLKSEGKDVTANFQMKDEPKDDL

SEQ ID NO: 6597 - protein, 414 aa, Zea mays
  unsure (1)..(414): unsure at all Xaa locations
  Clone ID: TF_ZmC29703_5.pep
MDPSSAGSGGNSLPSVGPDGQKRRVCYFYDPDVGNYYYGQGHPMKPHRIRMTHSLLARYGLLNQMQVYRPNPARDRDLCRFHADDYINFLRSVTPETQQDQIRLLKRFNVGEDCPVFDGLYSFCQTYAGASVGGAVKLNHGHDIAINWSGGLHHAKKCEASGFCYVNDIVLAILELLKHHERVLYVDIDIHHGDGVEEAFYTTDRVMTVSFHKFGDYFPGQGIXHAELNIXIYANMNKNWMRSFILVRFIFQVFNYLHKVIGSYQKCNFTNDXLVSVEFALVFXLEMISQXPDCFLDMFGVQQDEDQDDPDERHDPDSDMEVDDHKAVEESSRRSILGIKIKREFGENATRVQDGGRVASEHRGLEPMAGDIGSSKQAPQADASAMAIDEPSNVKNEPESSTXLQGQAAAYHKP

SEQ ID NO: 6598 - protein, 411 aa, Zea mays
  unsure (1)..(411): unsure at all Xaa locations
  Clone ID: TF_ZmC2148_1.pep
MMIQHSSACQSHHLDAIMWRNRFMTSRREQKQIRSWDAQCSANQDQASIEKCNAPKNLPIPDNSLLDARILYCTSPALGHNKEAHPESNKRVPVIVDTLEKLELSPKHRGSQVLEIQNFNPASLDDVARVHSRSYITGLEKAMGRASDEGLILIEGTGPTYATETTFRESLLSAGAGITLVDSVXPPGHHAVPQGPMGFCVFGNIAVAARYAQHQHGLKRVMIIDFDVHHGNGTSDSFYDDPDIFFLSTHQLGSYPGTGKINEVGQGDGEGTTLNLPLPGGAGDYAMRCAFDEVIAPSAHRFKPDIILVSAGYDAHALDPLAGLQFTTGTFYMLASSIKQVAKELCGGRCVFFLEGGYNLQSLSSSVADTFRAFLDEPSGRVGFDDPAILFEEPTRKIKEAIEKAKSIHSL

SEQ ID NO: 6599 - protein, 218 aa, Zea mays
  Clone ID: TF_ZmC22838_1.pep
MASSSSSSPAPALAGEALRQKRILSSKLYLEVPSSKAPVVYSPAYDISFLGLEKLHPFESAKWGRICRYLTREGYLDKKRMVEPLEACKEDLLVVHTEAYLNSLKCSFRVSSIVEVPPVSLVPNWIVHRKLLHPFRKQVGGSILSAKLAFERGWAINVGGGFHHCSADEGGGFCAYADISLCIHFAFVRLNISSVLIIDLDAHQGNGHEKDFANDAFR

SEQ ID NO: 6600 - protein, 618 aa, Zea mays
  Clone ID: TF_22135464.pep
LPLSPLLALSTQATASALRSGSGRRRHRLLLPPLSSRLAPSPPVLRTPAGDPAHTDVEASKENRGACSLNNDRADALEEEANVSTARIGHVESADPGGSVGVEKEIFMAVNEESEGEQAGATLEDLFFFNGEEDDDSDWEPASRLVVNRWFCLNCTMPNVDKITYCMNCRELPGSVVDGYDVFKKQIAQTALLSADTGLLPVSTAIGFDERMLLHSELEVKPNPHPERPDRLRAIAASLAAAGIFPSKCALVPPREITKEELLMVHSPDHIESVEQTKNMLYSYFTSDTYANGHSACAAKLAAGLCADLASLIVSGRVRNGFALVRPPGHHAGVKQAMGFCLHNNAAVAALAAKRAGAKKVLIVDWDVHHGNGTQEIFDGDKTVLYISLHRHEDGNFYPGTGAAHEVGVLDGQGFSVNIPWSRGGVGDDDYIFAFQTVVLPIASEFAADITIISAGFDAARGDPLGCCDVTPTGYSWMTSLLAGSSNGRLLVILEGGYNLRSISSSATEVVKVLLGEGPNRASFVVSPSKEALSTVSQVLKIQQQFWPVLGPTYASLQAQQGSVSSNHSNELKKRKRPGGGPGPFWWKMGSKRLLYEALIEPRSRPRKLKGSTGSAAP

SEQ ID NO: 6601 - protein, 568 aa, Zea mays
  Clone ID: TF_22135466.pep
FRFLPYSRSARRRRRRRSGRALGDGVIGFSSRLSPVASRPRLRSSAHRPVTLQKEIFMAVNEESEGEQAGATLEDLFFFNGEEDDDSDWEPASRLVVNRWFCLNCTMPNVDKITYCMNCRELPGSVVDGYDVFKKQIAQTALLSADTGLLPVSTAIGFDERMLLHSELEVKPNPHPERPDRLRAIAASLAAAGIFPSKCALVPPREITKEELLMVHSPDHIESVEQTKNMLYSYFTSDTYANGHSACAAKLAAGLCADLASLIVSGRVRNGFALVRPPGHHAGVKQAMGFCLHNNAAVAALAAKRAGAKKVLIVDWDVHHGNGTQEIFDGDKTVLYISLHRHEDGNFYPGTGAAHEVGVLDGQGFSVNIPWSRGGVGDDDYIFAFQTVVLPIASEFAADITIISAGFDAARGDPLGCCDVTPTGYSWMTSLLAGSSNGRLLVILEGGYNLRSISSSATEVVKVLLGEGPNRASFVVSPSKEALSTVSQVLKIQQQFWPVLGPTYASLQAQQGSVSSNHSNELKKRKRPGGGPGPFWWKMGSKRLLYEALIEPRSRPRKLKGSTGSAAP

SEQ ID NO: 6602 - protein, 453 aa, Zea mays
  Clone ID: TF_22135468.pep
PCNCRELPGSVVDGYDVFKKQIAQTALLSADTGLLPVSTAIGFDERMLLHSELEVKPNPHPERPDRLRAIAASLAAAGIFPSKCALVPPREITKEELLMVHSPDHIESVEQTKNMLYSYFTSDTYANGHSACAAKLAAGLCADLASLIVSGRVRNGFALVRPPGHHAGVKQAMGFCLHNNAAVAALAAKRAGAKKVLIVDWDVHHGNGTQEIFDGDKTVLYISLHRHEDGNFYPGTGAAHEVGVLDGQGFSVNIPWSRGGVGDDDYIFAFQTVVLPIASEFAADITIISAGFDAARGDPLGCCDVTPTGYSWMTSLLAGSSNGRLLVILEGGYNLRSISSSATEVVKVLLGEGPNRASFVVSPSKEALSTVSQVLKIQQQFWPVLGPTYASLQAQQGSVSSNHSNELKKRKRPGGGPGPFWWKMGSKRLLYEALIEPRSRPRKLKGSTGSAAP

SEQ ID NO: 6603 - protein, 618 aa, Zea mays
  Clone ID: TF_ZmC6866_1.pep
MRPPSSGKKTEVSHSVGKCGVSDQACHGKCQSCGIDAKPFCAGVNEVSLLTGSHTDVEASKENRGACSLNNDRADALEEEANVSTARIGHVESADPGGSVGVEKEIFMAVNEESEGEQAGATLEDLFFFNGEEDDDSDWEPASRLVVNRWFCLNCTMPNVDKITYCMNCRELPGSVVDGYDVFKKQIAQTALLSADTGLLPVSTAIGFDERMLLHSELEVKPNPHPERPDRLRAIAASLAAAGIFPSKCALVPPREITKEELLMVHSPDHIESVEQTKNMLYSYFTSDTYANGHSACAAKLAAGLCADLASLIVSGRVRNGFALVRPPGHHAGVKQAMGFCLHNNAAVAALAAKRAGAKKVLIVDWDVHHGNGTQEIFDGDKTVLYISLHRHEDGNFYPGTGAAHEVGVLDGQGFSVNIPWSRGGVGDDDYIFAFQTVVLPIASEFAADITIISAGFDAARGDPLGCCDVTPTGYSWMTSLLAGSSNGRLLVILEGGYNLRSISSSATEVVKVLLGEGPNRASFVVSPSKEALSTVSQVLKIQQQFWPVLGPTYASLQAQQGSVSSNHSNELKKRKRPGGGPGPFWWKMGSKRLLYEALIEPRSRPRKLKGSTGSAAP

SEQ ID NO: 6604 - protein, 70 aa, Zea mays
  unsure (1)..(70): unsure at all Xaa locations
  Clone ID: TF_LIB4730-068-R1-K1-E12.pep
ILQRLVREMCVGLXTDLHLQSYYVATLTEADVAYLVVLYEDTNLCAIHAKRVTIMPKDMQLARRIRGERA

SEQ ID NO: 6605 - protein, 123 aa, Zea mays
  unsure (1)..(123): unsure at all Xaa locations
  Clone ID: TF_LIB4315-045-R1-K1-H10.pep
PGVRISLAGEPRATTSASLPTVPMARTKQTARKNTGGTAPRKQLATKAARKSAPATGRLKKAERYPPSLHATGEPQYPKSTELLIPSLPFQRLVRENAQDLQTDLXRFQSSARAELKEAFEAY

SEQ ID NO: 6606 - protein, 144 aa, Zea mays
  unsure (1)..(144): unsure at all Xaa locations
  Clone ID: TF_LIB4730-025-R1-K1-G11.pep
LILTRSVARPNTTPTKSSGVSAPRNQLGTKEPLYSAPVTGGVKKAHRFRPGTVVFRYIRTYHTTQELLINNMSFSAWCSRSQRTPGPDLRLRXSSAVSLLTDAYGGLPRSRTSSRVPSDAIHYTRNTVMSKDLQLAPLIRGQKA

SEQ ID NO: 6607 - protein, 234 aa, Zea mays
  Clone ID: TF_ZmC11101_1.pep
MSSSASSVEGDAAGEFTEVVIVRHGETSWNASRIIQGHLDAELNDIGRQQAVAVAHRLSKEVKPVAIYSSDLKRAAETAQTIARICNVPNVVFDPALRERHIGDLQGMTLQDAATERPEAYKAFMSHKRNQQVPGGGESLDQLSERCVSFLYDIVGKHKGERVILVSHGGTIRELYRHASPTKPLHGKIHNTSVSVILVSDATGRCIVKMCGDVSHLQETGVLENAFGGDKTSA

SEQ ID NO: 6608 - protein, 111 aa, Zea mays
  unsure (1)..(111): unsure at all Xaa locations
  Clone ID: TF_LIB3180-021-P2-M1-B6.pep
MARTKQTARKSTGGKAPRKQLATKAVRKSAPTTGGVKKPHRYRPGTVALREIRKYQKSTELLIRKLSFQRLGREIAQDFKTDXLRFQSHSVLALQEASEAYLVVLFEDTNL

SEQ ID NO: 6609 - protein, 125 aa, Zea mays
  unsure (1)..(125): unsure at all Xaa locations
  Clone ID: TF_LIB5027-070-A1-XP1-H5.pep
RGGDRKAIDSRADEKATDSSSKSDLRVPRXRIASLLKGRKYXTQRVQAGAPVYLPAVLQYLAAEGLELCGNGTLDNKKTRXIVPTSYFLYLRTKXHNKISHLMSTVSIAIVDAMPNIHNLFCPEE

SEQ ID NO: 6610 - protein, 82 aa, Zea mays
  Clone ID: TF_LIB3595-050-Q1-N6-G7.pep
VLKQVHPVIGISSKTSFHHELPCIIAIFKKLAGKPANMAWYNNKPAIMSLEIQPPVLIVLAGELAKHAVQEETKTVAKFTSN

SEQ ID NO: 6611 - protein, 113 aa, Zea mays
  unsure (1)..(113): unsure at all Xaa locations
  Clone ID: TF_LIB4730-034-R2-K1-E1.pep
ARRRGTWEAGRGKKKKNTGGEGGTPAKQKPARRARTKQTARKTGGKAPRKQXATKGARKXAXATGGEKKPHRXRPGTXAXRENRKDQKSTEXPNRKQPXQRRGRENAQEXKTD

SEQ ID NO: 6612 - protein, 75 aa, Zea mays
  unsure (1)..(75): unsure at all Xaa locations
  Clone ID: TF_700086025H1.pep
MAPKAEKKPAEKKPASRRXAEKTTAGKKPKSEKRLPGSKFSGKEGGEKKGKKNANKNVETYKIXIFKVLKQVQPD

SEQ ID NO: 6613 - protein, 104 aa, Zea mays
  unsure (1)..(104): unsure at all Xaa locations
  Clone ID: TF_LIB4827-018-A1-N1-G11.pep
EEKRLPSFKYDPGEVHNGKNKDKTSVXTYEIYIFTGMKQAHPDIRISTEGMSIMNSFISNVLLTFTAXSAKLTXYHRTPTITSREIQTSVRMHPNGELSKYAVS

SEQ ID NO: 6614 - protein, 124 aa, Zea mays
  unsure (1)..(124): unsure at all Xaa locations
  Clone ID: TF_LIB4764-069-R1-K1-F8.pep
QGSVAGRKANNEGRRDKAARPTNKYLLRPAKAGLHLPAGRIGRYLKNVRHSKRVVTVAPVYLAGVLEYSLSXEELDLGANAAKDNKKTRIVPRHLLLSIRNDVEIGXLMTGVTIAHGDCPPQHQ

SEQ ID NO: 6615 - protein, 58 aa, Zea mays
  unsure (1)..(58): unsure at all Xaa locations
  Clone ID: TF_LIB3245-260-P1-N1-C6.pep
STGCLKKPHLFLPVTVLLLXIRMYQKSTDLLIRKLPFQLLVREIFHDFKTDLLFQSSV

SEQ ID NO: 6616 - protein, 103 aa, Zea mays
  unsure (1)..(103): unsure at all Xaa locations
  Clone ID: TF_LIB4740-076-R1-K1-A9.pep
WKGRVLRKQVGTREARKWEPMSVGGKRGGGDRAXIVALREIRKYQKSTELLIRKLPFQAPXVHEIAQDLKTDLRLQSXAVLGLKEGRRGLSLYGLFEDTNLWS

SEQ ID NO: 6617 - protein, 69 aa, Zea mays
  Clone ID: TF_LIB3637-204-Q1-N6-D3.pep
LAANSARDTKKTPFVPGHIQFPVRNDKKLSPFLGPVPLPTGGVMPPTHTLFLPKKAGGGSPKVSAGSQD

SEQ ID NO: 6618 - protein, 35 aa, Zea mays
  unsure (1)..(35): unsure at all Xaa locations
  Clone ID: TF_LIB4148-023-Q1-N1-H1.pep
GSVASYNKKPSFTSRXFQTSVRLVLSGDLPKHTVS

SEQ ID NO: 6619 - protein, 98 aa, Zea mays
  unsure (1)..(98): unsure at all Xaa locations
  Clone ID: TF_uC-zmroteosinte016h05a1.pep
PHRFRPGTVALREIRKYQKSTELLIRKLPFQRLVREIAQDFKTDLRFQSSAVAALQEAAEAXLVGLFEDTNLCAIHAKRVTIMPKDIQLARRIRGERA

SEQ ID NO: 6620 - protein, 53 aa, Zea mays
  unsure (1)..(53): unsure at all Xaa locations
  Clone ID: TF_LIB4300-003-R1-M1-B5.pep
PRHIQLAVRNDQXLSRLLGTVTIASGGXLPNIHNLLLPKTRRAAGSVSRVRDW

SEQ ID NO: 6621 - protein, 112 aa, Zea mays
  unsure (1)..(112): unsure at all Xaa locations
  Clone ID: TF_LIB3227-021-P1-K1-E2.pep
MSFCFFLLQRNRKKAKKGAGGARESDPVRTKXTPSVKNGLQFPAGRKKRGLKKARHSQRVGTGTPVYRDNALKNLALGELEXARNAAKENKKTRGGPRHKLLAIRNDEELGK

SEQ ID NO: 6622 - protein, 101 aa, Zea mays
  unsure (1)..(101): unsure at all Xaa locations
  Clone ID: TF_LIB4758-140-A1-K1-E2.pep
MTLLPSYPDSTIPLILHVTKAARKXAPTIGGSNNSHRYSXATEALREIRKNHKRTEMLISKLPFQRLGGXIVQHSTTDMRCQSHAVIALXEAAEVYLATTV

SEQ ID NO: 6623 - protein, 89 aa, Zea mays
  unsure (1)..(89): unsure at all Xaa locations
  Clone ID: TF_LIB5026-053-Q1-XP1-C6.pep
SGPGARSGRYGRRGTGDRPSRTSTPTSSLARRPCARPLPSSPYPXLRCRWSPWSYLGFDWLVWDEEKVLRSGTNGNASDRNRPLERRTG

SEQ ID NO: 6624 - protein, 66 aa, Zea mays
  Clone ID: TF_LIB3150-077-P2-N2-B2.pep
PKVPFFSRSGSARSSSHGRERSMREGEEGRGRAQGRRSDEEVGVAVLQGRSAVSRQPSWAVPHKGP

SEQ ID NO: 6625 - protein, 113 aa, Zea mays
  unsure (1)..(113): unsure at all Xaa locations
  Clone ID: TF_LIB3357-024-P1-K1-D4.pep
SHFPCNRLPIPLPTKDRWRPWARCMPAAKKPVEEEPAADMTTVGKKPMAEKRVPAVXSVGLDGGVGKRGMKXGMISVETYMIYIFKVLMLVHPDIGFFCKAMFIMNSFINDIF

SEQ ID NO: 6626 - protein, 42 aa, Zea mays
  Clone ID: TF_uC-zmroteosinte032e10a1.pep
PVRLDLPGELAKPAVSEGAKAVTKFTSSKPNNVTCTSLLFLQ

SEQ ID NO: 6627 - protein, 69 aa, Zea mays
  unsure (1)..(69): unsure at all Xaa locations
  Clone ID: TF_LIB3150-071-P1-N1-E2.pep
MDASGAGSMAINGAAGRKAGGPXKKSASRSXKAGLEFPVSRIGRYLMKGRGAQRVGTVARVYLGDVLEY

SEQ ID NO: 6628 - protein, 63 aa, Zea mays
  Clone ID: TF_LIB4185-034-R1-K1-G10.pep
RGGLKPFSGFFSEETPGVLKFFLENVIRDAVPYPEHAPRKTVTAMDVVYALKRQGRPLYGFGG

SEQ ID NO: 6629 - protein, 105 aa, Zea mays
  Clone ID: TF_LIB4975-015-R1-K1-D7.pep
PCRQRGKAIGSGADNNATFSSSKAGLEFPVGRIARLLKAGKYAERVGAGAPVYLGAEFEYPAAEAVELIVLAEWERKKILNVPCLIPTAPGRGRLPARAAYARHQ

SEQ ID NO: 6630 - protein, 238 aa, Zea mays
  Clone ID: TF_ZmC2089_41.pep
MREILHIQGGQCGNQIGAKFWEVVCDEHGIDPTGRYTGTSDLQLERVNVYYNEASCGRFVPRAVLMDLEPGTMDSVRTGPYGQIFRPDNFVFGQSGAGNNWAKGHYTEGAELIDSVLDVVRKEAENCDCLQGFQVCHSLGGGTGSGMGTLLISKIREEYPDRMMLTFSVFPSPKVSDTVVEPYNATLSVHQLVENADECMVLDNEALYDICFRTLKLTTPSFGDLNHLISATMSGVTC

SEQ ID NO: 6631 - protein, 98 aa, Zea mays
  unsure (1)..(98): unsure at all Xaa locations
  Clone ID: TF_LIB4730-062-R1-K1-C2.pep
YLDKNYIFNVMNQVHPDIGIXSRLMSIMNSFINDIFXEAQRGESTKLSRYNKKPTVTSREIQSSVRLLLPGXLAKHAVLRGHQEPSPRSHCEYVHSTR

SEQ ID NO: 6632 - protein, 137 aa, Zea mays
  unsure (1)..(137): unsure at all Xaa locations
  Clone ID: TF_LIB4732-087-A1-K1-B7.pep
MARTNHTARLSAGGNAPRLLLVTKAARKSASTTGGVXKAHRYRPXTVALLEIRMYHNSTELLIRKLPFHGLVREIAQDFXQTSRFHEPSSVMVLQEAVEAYLVGLFEDINLCVIHAKRVSSHAXDIEFVRRIRVERA

SEQ ID NO: 6633 - protein, 146 aa, Zea mays
  unsure (1)..(146): unsure at all Xaa locations
  Clone ID: TF_LIB3632-044-Q6-K6-D7.pep
TEPSSAIDLLSESSIAASMDCTMQTAGKSTGEKAPSKQMATNAARKTARATGGVKKPNRWRPETVGLXREMRKDQKRTXLLIRNLPFQRLVXRDIAQDCKTDLRSQSSARKTLQEADEAYLGWLLXDTNLRALHTKRVTIMPNVIH

SEQ ID NO: 6634 - protein, 111 aa, Zea mays
  Clone ID: TF_uC-zmflteosinte39a06b1.pep
SRLPRKPTCLPQTRAEEAMSGRARGGKGLVKGGTKRHRKVLRNSIQGITKPAIRRLARRGGVKRIYGLIYEETRGVLTISLQNVIRDAATYNEHSRLMNGTAMDVDYALKH

SEQ ID NO: 6635 - protein, 107 aa, Zea mays
  Clone ID: TF_LIB3227-021-P1-K1-A10.pep
FTKYTAGSVCPSSRQARNVRWLVSKHTALKSTGGKAPPKQLSTKALRMSVPATGGIKNPNRFRPDTVSLRKILMFHMSTELLMSMLTFQRLFRVIAQDFKTFLLFQS

SEQ ID NO: 6636 - protein, 90 aa, Zea mays
  unsure (1)..(90): unsure at all Xaa locations
  Clone ID: TF_LIB3279-011-P1-K1-F2.pep
MDASVAGRTANKGAPARKVVAPRKKSVSRIIKAALQCLIRRIGRYLKKGEXTHSSVGTQAYVYLGNVLEYLATHVLELAGNAVKDNKKTR

SEQ ID NO: 6637 - protein, 136 aa, Zea mays
  unsure (1)..(136): unsure at all Xaa locations
  Clone ID: TF_LIB4730-068-R1-K1-G9.pep
MAPKAEKKPAAKKPAEEEPATEKVEKAPAGKKPKAEKRLPAGGGXEGGEGKKGKKKAKKSVETYKIYIFKVLKQVHPDXGISAKAMSIMNSFINDXWEKLAGEPXKLARYNKKPTIISREIQTLVRLVRRGELEKN

SEQ ID NO: 6638 - protein, 138 aa, Zea mays
  unsure (1)..(138): unsure at all Xaa locations
  Clone ID: TF_LIB3279-194-Q1-K6-F7.pep
XGVPRFPFXSLXAFPAGSXPSAVGSSGGXAGXXAAVAXXRXFACVLCXXXRWXRPXGXWGPARXXRXXGPFSPLSFXAXLAAVVFAAXXPFPPFXAXASAPGXLXXLGFRLFVPVXLXXPXXRXAAARXLXPXAGSXR

SEQ ID NO: 6639 - protein, 80 aa, Zea mays
  Clone ID: TF_jC-zmshLIB3587P023b04a1.pep
KLLAGVTIAHGGVLPNINPVLLPKKTAVAAAKEGKEKKSPKKAASAKSPKKFLYAGLKFRQTMWCMFCKMPELGCSLLLN

SEQ ID NO: 6640 - protein, 105 aa, Zea mays
  Clone ID: TF_LIB3079-024-Q1-K1-D7.pep
HSWRPAVHGSKGKMGADDLTARCSRKKFVTRSFKACLQFPVNLIGLYLTKGQYVQRVNTVAYVYLVAVLEYLVGEVLELARNAANDSINTRIIPLHVLLAIRIDE

SEQ ID NO: 6641 - protein, 125 aa, Zea mays
  unsure (1)..(125): unsure at all Xaa locations
  Clone ID: TF_LIB4744-058-R1-K1-C4.pep
SYTGREGSCAVRTGKRLDNHVSNLCAPVQLDDQEPKLCLRRPYGLLWIRLPQRITAWKIGPLGIDGLPRENTQDLETDLSYQSXAGSPLQGALQGYLVGLFEDNKLCAIHAKRVTIMPKVMQLAR

SEQ ID NO: 6642 - protein, 120 aa, Zea mays
  Clone ID: TF_jC-zmX700043548a1.pep
MAPKADNNPAAKKPAEEEPAAPAEKAPAGKKPKAEKRLPAGKSAGKEGGVDKKGRKKAKKSVETYNIYIFKVLKHVHPDIGISSKAMFIMNLFINNIFLEARREGAKLARYNKKPTLPPG

SEQ ID NO: 6643 - protein, 142 aa, Zea mays
  Clone ID: TF_LIB4975-035-A1-K1-G6.pep
GMLPLAPVIVAGGSKNANPRCSLGCFADSRAEDRSAPQGRQVLPSAWDPAPLCTSPLDSSTSTLKSCSLLGTHRGYTQKDPRRAATHPHHRELRQGVSTYLLCRCTPSLQKFLLMPTHLCSTSSPRMLARLEASTVDDDDNS

SEQ ID NO: 6644 - protein, 104 aa, Zea mays
  unsure (1)..(104): unsure at all Xaa locations
  Clone ID: TF_LIB3079-035-Q1-K1-D5.pep
HEERDHTKHSANKTTGSXAARKHLGTKVARKSAPTTARTNKPDKYRHRTMALTEILKYNKSSQLIIQLLILQRLFHEIVHDINTDLQMQMHAQMDVQEAVEEYL

SEQ ID NO: 6645 - protein, 108 aa, Zea mays
  Clone ID: TF_LIB3070-005-Q1-N1-G9.pep
PPLPILYPPSMKPSYDTPQAKTVFLYNKSNAEILLPHHKSTSIDGGEKKAKKKAKKSVETYNIYIFKVLNQVLPDIGISSKAMSIMNSFINDIFEKLAADAINLSLYN

SEQ ID NO: 6646 - protein, 160 aa, Zea mays
  unsure (1)..(160): unsure at all Xaa locations
  Clone ID: TF_cC-zmle18900030g11d1.pep
GTPGRPTRTKPDSQSSKPYQPLANSERDPKAPKAEKKPAAKKPAEEEPAAPAEKAPAGKKPKGESRXPAGKCGGLEGGVDKKGRKKAKKSVETHKIXILKALKQVHPDIGIPXKAMSRMNSFINDQLEKLAGEAAKLARNNKKPTXTSRESQNLDRLDLP

SEQ ID NO: 6647 - protein, 116 aa, Zea mays
  unsure (1)..(116): unsure at all Xaa locations
  Clone ID: TF_LIB4730-002-R1-K1-C8.pep
MARTKQTPGSAPTERDPRKSASSKAERKRGPTTGGVKKPDRLHPDTARLHEILSYQKSTELVIRQLQXHGLFREIAQDYQTDLTLQDSAXLCLKRXSEEDLEKLFQDTNLCVMHSK

SEQ ID NO: 6648 - protein, 156 aa, Zea mays
  unsure (1)..(156): unsure at all Xaa locations
  Clone ID: TF_LIB4744-070-R1-K1-D6.pep
AAISREAGETEEAGEKAXTKQTARKXTGGKAPRKQLATKAARKSAPTTGGVKKPHRYRPGTVALRFXFKEQKSXEXPXRKGAXRGAEGXXQDXKTXXXXQSXAEXNXQEXXEAXXXGXXEDTNXXAXXXKXXTXXPKDXQXARRXRGERAPQTQKE

SEQ ID NO: 6649 - protein, 94 aa, Zea mays
  Clone ID: TF_LIB3227-024-P1-K1-B11.pep
SFRNAIKHLEQTEYIANHIARLQRTHDNIGSASKPYAFLGDLTAFLGDLASLLPPLDAFSAVFLGSRTGLILGNTNTRAMVTPVSSFPSSWSLR

SEQ ID NO: 6650 - protein, 103 aa, Zea mays
  Clone ID: TF_LIB3067-018-Q1-K1-F2.pep
GLEGDVNVRVHVVQHLEYVGLVGLNALQALLLALIALAALLGSGLARRDPLLRLRLLPGGRLNDRGLLLRRLLRRGLLLGLGRHRCGASWGLGCEGGWEEMRG

SEQ ID NO: 6651 - protein, 104 aa, Zea mays
  Clone ID: TF_ZmC4285_2.pep
MALACASHACRFLLAGQARSFHAQPYHAKVGVVEFLNGVGKGVEAHAAKLEEAVGGDLQRLLEARTLRLKKLGIPCKHRKLILSFAHKYRLGLWKPQAEPRKVE

SEQ ID NO: 6652 - protein, 100 aa, Zea mays
  Clone ID: TF_uC-zmroteosinte001d08a1.pep
KGKKKFKKSVGPFKFSIFKVLNQGPPNMGIWSKAMSTMNPFIKDIFEKPPAESPKLARYNKKPPVPPRGVQTPGGLGPPGGLAKHPVSGGPKAGPRFPPF

SEQ ID NO: 6653 - protein, 93 aa, Zea mays
  unsure (1)..(93): unsure at all Xaa locations
  Clone ID: TF_LIB4764-031-R1-K1-C2.pep
MARTKQTARKSTGGKAPRKQLATKAARKSAPTTGGVKKPHRYRPGTVVLREIRKYQKSTELLIRKLPSHSLVREIPHDFXTDLRFHSHVRPAP

SEQ ID NO: 6654 - protein, 94 aa, Zea mays
  Clone ID: TF_ZmC1048210_1.pep
GGAHTMARTKQTARKSTGGKAPRKQLATKAARKSAPSTGGVKKPHRYRPGTVALREIRRYQKSTVLLIRKLPFQRLVREIAQDFKTDLRFQSAV

SEQ ID NO: 6655 - protein, 77 aa, Zea mays
  unsure (1)..(77): unsure at all Xaa locations
  Clone ID: TF_LIB3150-075-P1-N1-G7.pep
MSRTKHTARKSTGDKAPMKHLSTKAVRKSAPATVGVNKPHRFRPVTVALRXSASSMNSTELLIHMLPFQRLVLEICP

SEQ ID NO: 6656 - protein, 84 aa, Zea mays
  Clone ID: TF_LIB4735-001-R1-M1-F3.pep
LSSGNNAEYFFSFFFFFFFALFFCFFLSSRSSGSLLAGVTIAHGGVLPNIHSVLLPKKAAEKAASAGCPEPKSPKKGASPPTKA

SEQ ID NO: 6657 - protein, 76 aa, Zea mays
  unsure (1)..(76): unsure at all Xaa locations
  Clone ID: TF_LIB3245-236-P1-N1-H10.pep
MSSGGGRGKPKGCKAVSRATKGRLXFPVWRIWRYLKGGKYAQRVCGGAPVYLFAVLEYISAEVLELAGNTARDNKK

SEQ ID NO: 6658 - protein, 131 aa, Zea mays
  Clone ID: TF_LIB3606-056-Q1-N6-B3.pep
SPKKGPYAKGVGKGAPVYLGAVLEDLPPGVLELPGNPPKEKKKTGFVPPPVLWGIPNKKELGKFFPGVPLPPGGGLPKINRVLLPKKTGEKGPPGGNKGAHSPKKAPQPPQKAKGLGGDPMLPWVGCNRPM

SEQ ID NO: 6659 - protein, 122 aa, Zea mays
  Clone ID: TF_LIB4975-032-A1-K1-C10.pep
QVIVSLLQQAVTFVVVVGIVFGGGIFSCGTAADVFYAYPLCSRWWQPLPYQSASPRCRTTIWMWRGSIRVFLYCLAAFRPSSTPSHARCSSTTTRCPAAPEESRSGSFAHRGVATIAGNQLG

SEQ ID NO: 6660 - protein, 78 aa, Zea mays
  unsure (1)..(78): unsure at all Xaa locations
  Clone ID: TF_LIB3279-216-Q6-N6-G10.pep
QKSLLLLIRELPFQSLVRKIAQYFKLILXFKNHSVLALQEIPEVYLVGLLQGNNLCAIQAKRVSIMPKGIHLARRTPG

SEQ ID NO: 6661 - protein, 78 aa, Zea mays
  Clone ID: TF_LIB4742-078-R1-K1-H5.pep
MAGKGKAIGSGAPKKATARSSKGGLQFPGGRIPRFLKGGKHAQRVGPGAPVYLAGGLENLAAEGLELAGNAARDNKKT

SEQ ID NO: 6662 - protein, 30 aa, Zea mays
  Clone ID: TF_LIB4730-056-R1-K1-C4.pep
VYPDMARSSRAMSIMKYFISDISEKLGWHA

SEQ ID NO: 6663 - protein, 96 aa, Zea mays
  Clone ID: TF_LIB4742-096-Q1-K1-A6.pep
MDSTGTGAGGKGKKGAAGRKVGGPRKTRIIPRHVLLAIRNDEELGKLLGGVTIAHGGVLPNINPVLLPKKTAEKASSGGSKEAKSPKKAAKSPKKA

SEQ ID NO: 6664 - protein, 98 aa, Zea mays
  Clone ID: TF_LIB3088-004-Q1-K1-E10.6C0.pep
NIFTAHHRFPSLLLLSSRKCERYSWRPSRRRSRRRRSCRSRSPRRSRLRRTRPPRGRSPRRRSGYLRASPPARRAATRRVGRRRRRAWRPTRSTSSRS

SEQ ID NO: 6665 - protein, 96 aa, Zea mays
  unsure (1)..(96): unsure at all Xaa locations
  Clone ID: TF_LIB3159-018-Q1-K1-C12.pep
MDVSGASGLAYNGAAGRLACWPTNKSVSRSSKAGLYFPVSRVWRYLKKGRFAQRVCTGAPVYLAAVLEYLAAEVLDLVCYAARXDNMKTRIIPRHV

SEQ ID NO: 6666 - protein, 130 aa, Zea mays
  unsure (1)..(130): unsure at all Xaa locations
  Clone ID: TF_LIB4740-040-R1-K1-C7.pep
GILAYDDGYNYTETYMMYIFYVLHDVHGAIGCWSTGMLIMSFLINDIFENVAADAMKLARYNXRPHITLREIQTSXRLGLTGEFAKHAVYEGTKAVTKFTSFYDPCDGHVRAGGRRGSADVILIAMDDDD

SEQ ID NO: 6667 - protein, 154 aa, Zea mays
  Clone ID: TF_ZmC697_49.pep
AYETKPMGKNTLESLHFVTATQDFCHDQQQLADTPDPSAAKSVEGAALPLERVDDVHGGDGLTAGEKGRREAHLGAHLRGDPRRAQDLPRERHPRRRHLHGARPPQDRHRHGRRLRPQAPGSHPLRIRRLRGATAAGGRGKSLGSRSRNREYSG

SEQ ID NO: 6668 - protein, 128 aa, Zea mays
  unsure (1)..(128): unsure at all Xaa locations
  Clone ID: TF_LIB4742-047-R1-K1-H7.pep
MAPKAEKKTAANKPAQDESAADKGPWVKKTYGQKRLPVXSQCGKEGVDENGETKADIPVDTYKIYLFEGLKQDHPDICLSSKGMSILNSFLDDVFHKFAWDGAKLARYXKNPTIPSLQIHTSVRLVLP

SEQ ID NO: 6669 - protein, 131 aa, Zea mays
  Clone ID: TF_LIB4975-026-R1-K1-H6.pep
NHSDHLLAFLPIRSPLRNQNPNSPRIDGAQGREETRGEEAGGGGARGREGARREEAEGGEAGPRWQVRCQGRRRGQEGQEEGQEERGDLRDRHLQGAVSGAPGLWHLLFFFFSPALPHYCYVFSASLLIAF

SEQ ID NO: 6670 - protein, 128 aa, Zea mays
  unsure (1)..(128): unsure at all Xaa locations
  Clone ID: TF_LIB4669-008-R1-K1-F3.pep
SIGGKATTLQLATKAARKSAXATGVXRKPHRFRPGGGALREIRKYQKSTELLIRKLPFQRLVREIAQDFKTDLRFQSXSAVARLKEASEAYLVGLFEDTNLCAIHAKRVTIMPKEQPACPSAIRGEEA

SEQ ID NO: 6671 - protein, 53 aa, Zea mays
  Clone ID: TF_jC-zmXLIB3526060bc11b1.pep
GDIKAPRGRKARGPTKNSVSRSSMARAHLPVSRLGRYLKKGRYAQRVSTGAPV

SEQ ID NO: 6672 - protein, 84 aa, Zea mays
  Clone ID: TF_jC-zmXLIB3527P074Bh05d1.pep
RVLRQVHPGLGVSGHAIQVLDMMMADMFERLADEAARLSKATGKATLTCREVQSAVRLVLPRELVRHAISEGTKAISKYMSYAA

SEQ ID NO: 6673 - protein, 63 aa, Zea mays
  unsure (1)..(63): unsure at all Xaa locations
  Clone ID: TF_LIB5025-070-A1-XP1-F2.pep
MDASGAGSKAKKGAAGRKAGGPRKKSVSRSVKAGLQXPAGRIGRYLXKXRDXQRVATLPPPFI

SEQ ID NO: 6674 - protein, 138 aa, Zea mays
  unsure (1)..(138): unsure at all Xaa locations
  Clone ID: TF_LIB4764-066-R1-K1-A7.pep
MVVKGGKGLFAANTTECKSAEKDEGKKXPISHSSRDGLQFPVGRIHRQLKKRTQENGPDVATVPVYSAAILEYLTAEVLEXDGNASKDLKVNRITPXRHLQLGIPADNDMNTLIKSTIEXGGAIPNIHKLLIDKTSKE

SEQ ID NO: 6675 - protein, 89 aa, Zea mays
  unsure (1)..(89): unsure at all Xaa locations
  Clone ID: TF_LIB3070-010-Q1-N1-H2.pep
RSLDSGYKCEPKARDDRNACGPRKKSLTRSVEAELQISEWRICRYLLNVWYTQRVCNGASVYLADVLXYLADEVLVLICDSDIDDMMTR

SEQ ID NO: 6676 - protein, 167 aa, Zea mays
  Clone ID: TF_ZmC25865_2.pep
CRAYAPEALKSSGGSRQTSGIKCFFWKSSGKVCRKANSTSLERFLGSLTDAPNFLSFWARKSFQPPSQPLSPLLCVNLTTSTSTSLSAPASRLAIGRLRGDGAGAETVGLLHSAGRRGRLARRLRGQLLPWRLAASGLPRRLLRAGHRDSTKGLALCFARGSAARDC

SEQ ID NO: 6677 - protein, 97 aa, Zea mays
  unsure (1)..(97): unsure at all Xaa locations
  Clone ID: TF_LIB3150-029-Q1-N1-H11.pep
MSGRGKGGKGLGKGGAKRHRKVLRDNIQGITKPAIRRLAKKGGVKRISGLIYQETRGVLKNFFENLNRDPLTXNEQPPRKTVTAMDVVYTLKRQGRT

SEQ ID NO: 6678 - protein, 114 aa, Zea mays
  unsure (1)..(114): unsure at all Xaa locations
  Clone ID: TF_LIB3606-014-Q6-N6-G11.pep
PKGGRKWAPPPGGVKNPQRFPPGPVPFREIPKPQKSRELLLRKLPSHRLVGEFAQAFKPPLGFQSPPVPPLKEPPKGYLVGLFXDPPLCPPPPKRVPLMPKDIQLAPRIRGERP

SEQ ID NO: 6679 - protein, 93 aa, Zea mays
  unsure (1)..(93): unsure at all Xaa locations
  Clone ID: TF_LIB3088-050-Q1-K1-G10.pep
MSGRVKVGMGLIQGGAKRQLKVLRDNIHSITKPMIRRLVRMGGVKLIXGAYIXETRSVLKIFLENVIRDTVTYTEHARRMTDTVMYVVYALKR

SEQ ID NO: 6680 - protein, 136 aa, Zea mays
  unsure (1)..(136): unsure at all Xaa locations
  Clone ID: TF_LIB4975-003-R1-K1-H11.pep
VDRTCDRGKGKPATKSERCSSKAGLQLPVWAHLQETSRPPXYTEREGDVSAEYLSCDLDQLPDEGLYMSANXAPYNDNNRIVPHHIHLRLLNDEEVSKVLGTETIAIGVEKSNIHQNLLPIKADLQEHIESDSQEL

SEQ ID NO: 6681 - protein, 95 aa, Zea mays
  unsure (1)..(95): unsure at all Xaa locations
  Clone ID: TF_LIB4740-003-R1-K1-H7.pep
MGLRPQGLQNPRSTSASHHPRLRTDRSAPKPKRHAIRLRRPTSIYLFKVLXLLHTHLDIYHNDLPIMNSFMNDIYDKLELEYAKLSRYHTKHTIT

SEQ ID NO: 6682 - protein, 127 aa, Zea mays
  unsure (1)..(127): unsure at all Xaa locations
  Clone ID: TF_LIB4729-116-A1-K1-H12.pep
PGGRDHNNTRTRPDSPPPPAYLSASALPGRGKGGKGHGTRRARHSRHTQGACADNIQGITKPAISKLDRRGGVKRISGIIXEETTRALNIFLENAIRDAATYTEHARRKTVPATDAVYALQCQRRTL

SEQ ID NO: 6683 - protein, 87 aa, Zea mays
  Clone ID: TF_LIB3150-002-Q1-N1-C10.pep
WIEGTYQSQLIDSTPPKTAELKHNHAERVGAGARAYLYAVLEHIAAEVLELAGNADRDNRKNRIVPCHIQLAVRNDEELSRLLCTVT

SEQ ID NO: 6684 - protein, 85 aa, Zea mays
  Clone ID: TF_jC-zmXLIB3526089bg07a1.pep
IPPARKNGFVSFPRPFRPVLKGCSRNNEVWKFLKNSKLCLKNLFQPLRRPFFNLGLFHPTNFWPQNFVSYFSGFNPLNQVIFSGG

SEQ ID NO: 6685 - protein, 38 aa, Zea mays
  Clone ID: TF_LIB3205-052-P1-N1-G12.pep
AYLDGLFKDTNLCAIHVKRVSIMPKNIQLASSTCGKVT

SEQ ID NO: 6686 - protein, 96 aa, Zea mays
  Clone ID: TF_LIB3116-028-P1-K1-C8.pep
MVGTKQTVGKSTEGKVPRKQFATKVARRFAPTTGGGKKLNRYRPETVAFRGIRRFKKSTELLIRKLPFQRLVREIAQDLKTDLRFQSHAGLALQEA

SEQ ID NO: 6687 - protein, 127 aa, Zea mays
  unsure (1)..(127): unsure at all Xaa locations
  Clone ID: TF_LIB4730-068-R1-K1-B4.pep
LPKESPYLCCLLRKRERLVTVIRLCHVRATGGKGLDKXGAKRQRRGLRDNIQSITNPSIRTLSRRLEVKRIWALIYXETRSVLKIFLYNVIRYADTYTEHARRMTVTDMDVAYALKRYGRTLYSFCS

SEQ ID NO: 6688 - protein, 100 aa, Zea mays
  unsure (1)..(100): unsure at all Xaa locations
  Clone ID: TF_LIB3608-053-Q6-N6-A2.pep
KNRPASCPGTVALPEIRKSPKSTELLFLKLPLQXFVQEIAQDFKRDLGFQSSAVAGLQKPPKAFLVGLFKNTNLWAIHAKRVPLMPKDIQLAPRIRGQRA

SEQ ID NO: 6689 - protein, 72 aa, Zea mays
  Clone ID: TF_ZmC653_38.pep
MARTKQTARKSTGGVKKPHRFRPGTVAALQEAAEAYLVGLFEDTNLCAIHAKRVTIMPKDIQLARRIRGERA

SEQ ID NO: 6690 - protein, 137 aa, Zea mays
  Clone ID: TF_ZmC697_108.pep
MVKFLKPGKAVILLQGRFAGRKAVIVRVFEEGTRDRPYGHCLVAGLAKYPKKVIRKDSAKKTAKKSRVKCFIKLVNFTHLMPTRYTLDVDFKDVATGGPDALSTHDKKVAACKTAKARLEERFKTGKNRWFFTKLRF

SEQ ID NO: 6691 - protein, 89 aa, Zea mays
  unsure (1)..(89): unsure at all Xaa locations
  Clone ID: TF_LIB3078-019-Q1-K1-H11.pep
HSFGHTRAIARLLKAAKYSELMISCVPGYIAAFLEYLIAEVLELAGNSTRDNNNTRIVPRHIQLSVRNDYELTKLLXGATITRRCIMPN

SEQ ID NO: 6692 - protein, 129 aa, Zea mays
  unsure (1)..(129): unsure at all Xaa locations
  Clone ID: TF_LIB3088-044-Q1-K1-D2.pep
RGAWYSQCVITGTCVYLXSILKYLAAYVMELAGNAARDNMKTLIIPRHVLVTIRIDYELGXLLASVTIFHRGVLGNIQCVLMSKNAAEKAVSAVSKEPKCPKKGAISNKKAYKVGTVFALCAVACSRLD

SEQ ID NO: 6693 - protein, 101 aa, Zea mays
  unsure (1)..(101): unsure at all Xaa locations
  Clone ID: TF_LIB3279-054-P1-K1-D6.pep
APKAEKNPAXEKKPSEEKAEKKPRAEKRVPSKEGCVTKGTKTAMKSVXSYKIYIFKELKQVHPVIGIXAKAMFIMNSLINDIFEKLAFEAAKLARYNKEPT

SEQ ID NO: 6694 - protein, 131 aa, Zea mays
  unsure (1)..(131): unsure at all Xaa locations
  Clone ID: TF_LIB4741-128-A1-K1-C2.pep
MAPKAEKKPREKKPAAEVQGGKDDRRLNAQAREPPVRLELLREGGRXQNTGKKNAPKSVETYQIYIFKVLKQVHPDIGISSKGMSIVNSFINDIXFDNLVVEADKLARYNKKPTITSREIQTSVRLVLPVE

SEQ ID NO: 6695 - protein, 83 aa, Zea mays
  unsure (1)..(83): unsure at all Xaa locations
  Clone ID: TF_LIB5027-045-B1-XP1-B5.pep
MSGRGKGGKGLGKGGAKRHRKVLRDNIXGLIYEETRGVLKIFLENVIRDAVTYTEHARRKTVTAMDVVYALKRQGRTLYGFGG

SEQ ID NO: 6696 - protein, 96 aa, Zea mays
  unsure (1)..(96): unsure at all Xaa locations
  Clone ID: TF_LIB3150-050-Q1-N1-E6.pep
MAANEAKGLLAAKTTAAKSDHKDKVNKVPISRSYGARLQLPVRRIHRQLKQQTHANARVRATXNRLLSSHSXYLTADVLELAANASKDLKVKRITP

SEQ ID NO: 6697 - protein, 83 aa, Zea mays
  Clone ID: TF_LIB3158-017-Q1-K1-G9.pep
MARTKQTARKSTGGKAPRKQLATKAARKSAPTTGGVKKPHRYRPGTVALREIRKYQKSTELLIRKLPFQRLVREIAQDFKTDL

SEQ ID NO: 6698 - protein, 133 aa, Zea mays
  Clone ID: TF_LIB3600-027-Q6-K6-A5.pep
MRGSNRHATLVESVACQHSYFTVQSNPIHPPVRSGGDRQPAAVMSGRGKGGKGGGGGGAKRHRKVLRDNIQGITKPGIRRLARRGGVKRISGLIYEETRGVLKIFLKNGMRDSVTYMEDDRCKNVSDMDEVWG

SEQ ID NO: 6699 - protein, 106 aa, Zea mays
  unsure (1)..(106): unsure at all Xaa locations
  Clone ID: TF_LIB4740-069-R1-K1-C9.pep
MSRSSKAGLQVPVGRIARILKVGRDAXRLTAVAPVYLTGALKYIAAEVLPLAGNTAXRHQEDADEGTRHIQVDVTDDEEVSRLLRTGTISSGGVLPNMTQPGGEPD

SEQ ID NO: 6700 - protein, 92 aa, Zea mays
  unsure (1)..(92): unsure at all Xaa locations
  Clone ID: TF_LIB4976-052-A1-K1-H6.pep
MTVAQTSPIRCCRDNIQGITKPAIRRLARRGDEKRISRLIYEETRGALPSFLXNDIRDDVTYTEHARRMTVTAMYAFYVLKGLGRTLYGFYG

SEQ ID NO: 6701 - protein, 110 aa, Zea mays
  unsure (1)..(110): unsure at all Xaa locations
  Clone ID: TF_LIB3088-044-Q1-K1-B10.pep
DDPIANTAPSAKNSNAAKPITACKSAFTDYGKGXRGAGRRSRRAVQTYNIYIFKALXQVHANINIFYNVMCIMNYLINDIFQKLAVEAVKLTRYNKKLTITSREIQIFLR

SEQ ID NO: 6702 - protein, 109 aa, Zea mays
  Clone ID: TF_700613664H1.pep
AETKPAEQNPTDETVEKKRKAANRVPRMDCRKNYVDAHCKYSVTTYEIYIINSVMHVHADIGISSNDMSIMNSFINDIYEKLAVEADILARYNKMLTITSREIQTSVRL

SEQ ID NO: 6703 - protein, 104 aa, Zea mays
  unsure (1)..(104): unsure at all Xaa locations
  Clone ID: TF_LIB3600-058-Q1-N6-B8.pep
MSGCGKGGKGLGKXGSKRXHSEGVHDNMQGIAKPVIXSLVRRGGVKRILGLMYEETLGVLNIFLENVIRDAVTYTEHALRKPVTAMDVVYALERQGGTLYGLGG

SEQ ID NO: 6704 - protein, 110 aa, Zea mays
  unsure (1)..(110): unsure at all Xaa locations
  Clone ID: TF_LIB4740-021-Q1-K1-A12.pep
PICQDPGLGRGAKTKAATFDVTYSIYFLTALKELHSKIWISAKCMTIMNSLINDFFEKLMAVYNMLSRINXMLIMTYLQIHTXKHLVFPGKLAEHAVCDGTNGATNLIYC

SEQ ID NO: 6705 - protein, 101 aa, Zea mays
  Clone ID: TF_LIB4965-006-R1-XP1-E12.pep
MAPKAEKKPAEKKPAAEEKAEKTTAGKKPKAEKRLPASKSSGKEGGEKKGKKKAKKSVETYKKPTITSREIQTSVRLVLPGELAKHAVSEGTKAVTKFTSN

SEQ ID NO: 6706 - protein, 156 aa, Zea mays
  unsure (1)..(156): unsure at all Xaa locations
  Clone ID: TF_LIB5045-035-B2-K1-C4.pep
GTSRPAGPGFRPPTAAGFLSSRPSRAAGAVLCKGLAARERAALPLSGLGKASSCLDRHGQDDDHTTAGLNKAHRYRPGTVALREIRKYQKSTELLIRKLPFQRLVREIAQDFKTDLRFQSSXAALALQEAAEAYLVGLPEDPHLRAIHDQRVTIMP

SEQ ID NO: 6707 - protein, 118 aa, Zea mays
  unsure (1)..(118): unsure at all Xaa locations
  Clone ID: TF_LIB3070-014-Q1-N1-C4.pep
LRWPQGGKKPSANKPAEEEPATDNAENASAXKKPNAEKRLPAGKFVAKEGGEGMTGTKKANNSVVTYKIYIFKVLKQVHLDIGILTNAMSIMNSFINDIFKKLAVESGKLARYNKKPT

SEQ ID NO: 6708 - protein, 136 aa, Zea mays
  unsure (1)..(136): unsure at all Xaa locations
  Clone ID: TF_LIB4766-069-R1-K1-H2.pep
DPPAAKPAAKKPAEEEPAAPAEKAPAGKKPKAEKRPPAGKPAGKEGGGDKKGRKKAKKSGETXKTXXXKGXKQGHPDXGTXXKARAXXNXHSNDXXEKPAGEAAKXARDNKKPTXTXRENQTXXRPXQPGEXAKHA

SEQ ID NO: 6709 - protein, 110 aa, Zea mays
  Clone ID: TF_LIB148-064-Q1-E1-B9.pep
MPRAGKVVSRSVVGGDRNRREPTLIRIGQPQASTTAKSSTSAKPHRYRPGTRALMEIRKFQKSTDLLIRKLPFARLVKEITQHYHHELRWQVEAVLALQTSAEDYLVGLL

SEQ ID NO: 6710 - protein, 77 aa, Zea mays
  Clone ID: TF_LIB4979-027-A1-K1-C12.pep
MKGKKSAQSYDIYLFIAVNSAHTKVGSYCKAMFFLNSFMSDIIERLAVEDINIARYRKRTTITSREITTSVRHFLTG

SEQ ID NO: 6711 - protein, 100 aa, Zea mays
  Clone ID: TF_LIB3357-029-P1-K1-B9.pep
PAAYKPAEEEPAADNAPAGKKPEAGNRVPACKAPAKESGEGNKGKKKGKKSAETYKIYIFKVLKQVHPDIWISSKAMCIMNSFINDIFEKLAAEADKLAR

SEQ ID NO: 6712 - protein, 132 aa, Zea mays
  unsure (1)..(132): unsure at all Xaa locations
  Clone ID: TF_LIB4185-031-R1-K1-A10.pep
PRKQLSTKPARKSAPTTVGVXKPHRNRPVPVALREIRKYHKSTEVLIRKLPFQQVVREIAXQDFKTDLRFQSHTVLALQEAAEAYLVGLFEDASLCAIPPKRVTIMPKDIQFVQQHPSRARVPFISEDLMNV

SEQ ID NO: 6713 - protein, 63 aa, Zea mays
  Clone ID: TF_cC-zmle1890011f01a1.pep
MNSFINDIFKKLRAESSSSARYSKKPTITSREIQTSVRMVLPGELRKHAVSEGTKAVTKFTSN

SEQ ID NO: 6714 - protein, 155 aa, Zea mays
  unsure (1)..(155): unsure at all Xaa locations
  Clone ID: TF_LIB4827-050-A1-N1-B2.pep
MQVAPPRTGRIEQRRMVRTNETARKSTGGKAPRKQLATKAERKSASTTGSVKKPHSXWPETAALNEIPXYKKSTELLIRKLPFQRLWRKISQDFEKDLGLYTHGVLHVQKALEAYLDYLFEDCKLCDIDANIVAIMRWDLQLLRRVGGHRLYPSF

SEQ ID NO: 6715 - protein, 107 aa, Zea mays
  Clone ID: TF_LIB4764-069-R1-K1-H1.pep
LEAGRDPPISTQPSPTPEKSPVLWSASERRRRCLGAARAARVWARGGVKRISGLIYEETRGVLKIFLENVIRDAVTYTEHARRKTVTAMDVVYALKRQGRTLYGFGG

SEQ ID NO: 6716 - protein, 144 aa, Zea mays
  Clone ID: TF_LIB4185-041-R1-K1-F4.pep
MSFNGPAGKAKKGPAGAKAGGPTKKSGLGSSRGGGQFPVNRGGGGLKKGRFPQGVGTGAPFFLPPVLGDPPAEGVEFPGNPARGNKKRGFFPGPGVFPIPKKKELGKLLGGVPLAPGGVLPKIPPGVLPKKGAQKGAKEPKKAL

SEQ ID NO: 6717 - protein, 149 aa, Zea mays
  unsure (1)..(149): unsure at all Xaa locations
  Clone ID: TF_LIB4171-011-R1-K1-G10.pep
LRKSGPAPRGVKKPPRFRPGPVAFREIPQFPKSPELLLRKLPLPRLGGEIAQNFKTDPWVPSSPVPPLQEAPQGDLVGFFXGPNLWALPPQRVPLMAQGIQVAPRLKGERARMLLCFPGFVKFEIGEGLYRFLSRHRGPMFLAKPFGCF

SEQ ID NO: 6718 - protein, 104 aa, Zea mays
  unsure (1)..(104): unsure at all Xaa locations
  Clone ID: TF_LIB4729-112-A1-K1-B10.pep
MTGRVKRAKGMGKAGAKRHRXVLRDNIHGITKAKIRRMDQAGAAVKRISGLIYXETRGGLKIFLENDIRERATYTEHARRKTVTAKDVVYALKRQGRTLYGIDG

SEQ ID NO: 6719 - protein, 73 aa, Zea mays
  unsure (1)..(73): unsure at all Xaa locations
  Clone ID: TF_LIB3279-014-P1-K1-D8.pep
RKLPFQRLGREIAPDWKKXXXFQSSAVAALQEAAEAYLVGLFEDTNLCAIHAKRVTIMPKDIQLARRIRGERA

SEQ ID NO: 6720 - protein, 116 aa, Zea mays
  unsure (1)..(116): unsure at all Xaa locations
  Clone ID: TF_LIB3279-192-Q1-N6-E9.pep
KGPYAKGVGTGAPVYLAAVLENLPPXVLELPGKSSRDNKKTRIIPPHVLLAIRKNKKLWKLFGGVTIAPGGVLPKKNPFFFPKKTAEKGSNGGNKKAKLPKKAPKSPKKAKTSCPE

SEQ ID NO: 6721 - protein, 71 aa, Zea mays
  unsure (1)..(71): unsure at all Xaa locations
  Clone ID: TF_LIB4730-090-Q1-K1-H2.pep
MARTKQTARKSTGGKAPRKQLATKXGALQEAAEAYLVGLFEDTNLCAIHAKRVTIMPKDIQLARXIRGERA

SEQ ID NO: 6722 - protein, 174 aa, Zea mays
  unsure (1)..(174): unsure at all Xaa locations
  Clone ID: TF_LIB4730-113-A1-K1-G1.pep
MPLYLDSPNPDAMAPKADNNSRHEKPAAEEKGEKTTAGKMPKSEKRLTASKSSGKEGAENNVKKKAQKSVXETYEIYLFXVLKQVHPVASSSPLMVMSIMNSFMNDIFQKVAGXDAKLGRHLWKPSINSRWIQTSVVPSSCPGLALPKTSFARYTHVVANVFSHGSLCTVHVIS

SEQ ID NO: 6723 - protein, 127 aa, Zea mays
  unsure (1)..(127): unsure at all Xaa locations
  Clone ID: TF_jC-zmX700240924b1.pep
MVVSEAGGKANNCADERTFGAPTKIFVSRPYMDRLQFPIRRVGRLLXKGRCPPMLITSAPFYISDSLDYLLNVVLALTGNPERDNKKTRIIPRHSALLHHQRHXLCKLISAVSISHSGFLPNIHTVL

SEQ ID NO: 6724 - protein, 155 aa, Zea mays
  unsure (1)..(155): unsure at all Xaa locations
  Clone ID: TF_LIB4729-048-R1-K1-H3.pep
MKNVAKCDTWCELQNPANHRVFERKLRPKPSGGGHVCLGVTPPRIKPTLSQIHRRLGSPIFAPSTESPMARTKQTARKSTGGKAPRKQLATKAARKSAPATGGVKNPHRFRPGTVALREIRKYQMSTELLIRKLPFQRLVREIAHDFKXTDXRFQ

SEQ ID NO: 6725 - protein, 95 aa, Zea mays
  unsure (1)..(95): unsure at all Xaa locations
  Clone ID: TF_cC-zmle189068a05d1.pep
PTRGRTRGRTPGLELSLFAARDNKKARVIPCHVLLAIRNDEELGKLLGGVTIAHGGVLPNINPVLLPKKTVEKAYSVGSKEAKSXKKAAKSPKKA

SEQ ID NO: 6726 - protein, 59 aa, Zea mays
  Clone ID: TF_LIB4762-010-R1-M1-E1.pep
EAGHKQGKNTPKESVEALKLWVYKVLKQLHPDIGIWPKGMSIMRSFMGLIFKNIQSKQT

SEQ ID NO: 6727 - protein, 148 aa, Zea mays
  Clone ID: TF_ZmC10394_1.pep
ICGRVGLARAGHLEEAWDFIEEMPGKVDAVMLGALLAACRKCKNTEVGERVINRIMKLEPSNSWNYVVSSKIYATSDKMDESARMIGLMRERGVNKTPGCSWVEVNGKVLEFYASTEPQHGAEDMYQLMGVLVNEMRLKGYVPNLDLV

SEQ ID NO: 6728 - protein, 106 aa, Zea mays
  unsure (1)..(106): unsure at all Xaa locations
  Clone ID: TF_LIB4762-024-R1-K1-G4.pep
MSARGKGGKGLGKGGANRHRKVLRDNIQGITNPSDPYVCARQGPAMKRMCGVLSTXETRGVLKIFLENVMRDAVTYTEHARRKTVTAMDVFYALKRQGRTLYGFGG

SEQ ID NO: 6729 - protein, 104 aa, Zea mays
  unsure (1)..(104): unsure at all Xaa locations
  Clone ID: TF_LIB4975-064-Q1-K1-A6.pep
ALPKTRTRLRPGTIALGEIRKYHNTTKLLXIQRLTFKRLRRXIAQDFKTELRDHCSDEAAMQEAVDVYLKRLLEDTNLCNIHVKMDTIMSKDIQIDSRIRDERA

SEQ ID NO: 6730 - protein, 123 aa, Zea mays
  unsure (1)..(123): unsure at all Xaa locations
  Clone ID: TF_LIB3357-030-P1-K1-H5.pep
MAPKGEYNPGANKPAEDEPAVDNTTVGKKSKAEKRVPVGKSVGKEGGXGNRCMNKGMKSVETYNIYIFKVLKQVHPDICISSKVISIMNSFINDIFXSWPARPSSFALYNKKXTITFREIHTF

SEQ ID NO: 6731 - protein, 73 aa, Zea mays
  Clone ID: TF_LIB4730-014-R1-K1-A9.pep
MARTKQTARKSTGGKAPRKQLATKAARKSAPATGGVKKPHRFRPGTVALRGRRKYHKSTELLIRKLPFQRLVR

SEQ ID NO: 6732 - protein, 175 aa, Zea mays
  unsure (1)..(175): unsure at all Xaa locations
  Clone ID: TF_LIB4762-019-Q1-K1-H6.pep
AAADRNAPHLPRPRTSPYPLAPKAYKKPAAKKPSAEEKAEKTTTGKKPKAEKRLPASNTSAKEGGKKKGKKKAKKSEETYKIYIFKALKQVHPDIRISSKAMSXIMNSFINHIFSQAWPARPPSLAPXNKKPTITSRRDPKPPYLLLPSPVEARQNTPHSRHNQGPANPSPTHQT

SEQ ID NO: 6733 - protein, 114 aa, Zea mays
  unsure (1)..(114): unsure at all Xaa locations
  Clone ID: TF_LIB3076-019-Q1-K1-A2.pep
HFHRRTTQAQCEGEIRRTDSTGTXAWAKAKNEAGQHKVRLPRKKPGSRSLKADLQFCVRRIGRYLKKGQYSQYVGTGAHDYLDAALEYLTAQDLELDGNADTDNMKTRIIPRHV

SEQ ID NO: 6734 - protein, 97 aa, Zea mays
  Clone ID: TF_LIB3357-024-P1-K1-E7.pep
MDSTGTGAGGKGKKGAAWRKVGGPRKKSVSRSVKANLQLHVGLIGRYLKKGRYAHRVNTNAPMYLDAVLEYLAAEVLVLYINAGSVNKMTSIITLHV

SEQ ID NO: 6735 - protein, 123 aa, Zea mays
  unsure (1)..(123): unsure at all Xaa locations
  Clone ID: TF_LIB4742-074-R1-K1-C10.pep
MVRSKQTALKFTGGKAPRXRSPPRWTWKSAPTTGGXKKPHMYWPETVVLRXIRMYHNSTVVLIGKVSFQCLIRDIAQDFKTHLVFQSHDALVLHEAGDGYLGGLFEDNNLCAVHADRVNIMPK

SEQ ID NO: 6736 - protein, 100 aa, Zea mays
  unsure (1)..(100): unsure at all Xaa locations
  Clone ID: TF_LIB4730-101-Q1-K1-H3.pep
MYVSVVGIKAKKGAAGRKAVVPXNNRCHASVKAGLQFPGGRXGRYLKKGRYAQRVGTGAHDYLVAVFEYLVCEVLELDDNAAKDNNERPSHRLRAHLCSV

SEQ ID NO: 6737 - protein, 122 aa, Zea mays
  unsure (1)..(122): unsure at all Xaa locations
  Clone ID: TF_LIB3357-059-P1-K1-H11.pep
PHQQQAKISRYPLVFVEKMSARAKGGKGLGKGGSXRHRKVLRDNIHGITKPAIRALAHRGGMKRICGLIYXETRSVLKIYLXENVIRDTXTYTEHARRKTVTAMDVVYALKRQGRTLYCFSR

SEQ ID NO: 6738 - protein, 107 aa, Zea mays
  Clone ID: TF_LIB3600-040-Q6-N6-C10.pep
APSPGGVKKPPPFPPGPVAGGEIPKSQKSRELFIPKLPFQPLVPKIAQDFKTDPRFQSSPVPPFQKAPKASLVGLFEDPNLWPIPPKGVPFMPKEIQFAPRIPGEGP

SEQ ID NO: 6739 - protein, 69 aa, Zea mays
  Clone ID: TF_jC-zmXLIB3526P037af07a1.pep
FKAMSIMNSFINDIFKKLAPKAAKLARYNKKPPFPSREIQTSVRLVLPGKFPKHPVSKGTKAVSKFPSS

SEQ ID NO: 6740 - protein, 127 aa, Zea mays
  unsure (1)..(127): unsure at all Xaa locations
  Clone ID: TF_LIB3355-039-P1-K1-D9.pep
MAPKAYKKPAANKPAEEDPAAEKTTAGKKPKAEKRVPAVKSAGKEGGXGKRGKKKGMKSVETYKIYIFKVLKQVHLDIGFLSKAMSIMNSFINDMFYMLLALSVKLXARYNKKSTHFVLVDPYLLAP

SEQ ID NO: 6741 - protein, 176 aa, Zea mays
  unsure (1)..(176): unsure at all Xaa locations
  Clone ID: TF_LIB4975-031-A1-K1-C6.pep
SRRRAGNRPVNAHCSSTSGSPVRNPPLPIPRWPLHLIKFARAPTGDEERRAIRTDGGERETRLGGTTRAGSEGAENKGKKNATKTVXTYXIYIFLVLXSRSWTLCISSKAMSIMNSFIIDIFDRLSAEVVXLVRYXKKPTITSRDIHTSERLVVPGELAEHAVSEGTHDDAKFASS

SEQ ID NO: 6742 - protein, 114 aa, Zea mays
  unsure (1)..(114): unsure at all Xaa locations
  Clone ID: TF_LIB3059-049-Q1-K1-G1.pep
MDANGASSKAKNGAAGRKAGGPRKKSVSRTVKDGMQFPVGRIGRYLKKGRYAQRVGTSAXCYLAVVLEYLADEVLELDVNASKDNKKTRIVPCHVLLAIANYVELGALLSGVTI

SEQ ID NO: 6743 - protein, 119 aa, Zea mays
  Clone ID: TF_LIB3637-242-Q6-K7-A5.pep
LCWGFPWGVSGHLLQGGQYPEHGDALAPGYLDVEQAYAPGEVLQLAENSERDNMKTPIRPLHIQVGVRNDEEQTKLVGGATSASGGGMPTMHYELPTKNAGSTKATTCKGRLLAALPTA

SEQ ID NO: 6744 - protein, 101 aa, Zea mays
  Clone ID: TF_LIB4758-112-R1-K1-B11.pep
QEQRRGGSARTASQTARTVHCRGKSPRKQLATKATRKSAPTTVGVKKPHRYRSVTVWLREIRKYQKSTELLIRKLPFQRLVREIAQDFEIYFFFQSPAGVA

SEQ ID NO: 6745 - protein, 102 aa, Zea mays
  unsure (1)..(102): unsure at all Xaa locations
  Clone ID: TF_uC-zmflteosinte93b03b1.pep
MTGRGKGGKGPGKGGAKRHRKVRRDNIQGITKPAIRRLARRGGEKRKTGHNYEETRGAPKNFLEKXIRDADTYTEHARRKTDTAKDSDYAPKRQGRTPNGIG

SEQ ID NO: 6746 - protein, 104 aa, Zea mays
  unsure (1)..(104): unsure at all Xaa locations
  Clone ID: TF_LIB3150-033-Q1-N1-C6.pep
AKQSASLPTVPMARTKQTARKFTGGKAPMKHLATKAARKFATATGXVKKPHRFRPDTVELLEIRMYQKSTDLLIHKLPFQHHVREIAQDFKTDLRLQSCVVAAL

SEQ ID NO: 6747 - protein, 127 aa, Zea mays
  unsure (1)..(127): unsure at all Xaa locations
  Clone ID: TF_LIB4730-060-R1-K1-F3.pep
PHPTLHSQPGGALAHEARTKQTARKXTGGKAPRKQXAXKAARKXAPATGGXKKPHRXRPGTGGRREXRKDQKSXEXXNRKXPXQRXXRENAQDXKXXXRXQTPAXAAXQEAAEAXXXGXXEDTNXSA

SEQ ID NO: 6748 - protein, 165 aa, Zea mays
  Clone ID: TF_LIB4729-057-R1-K1-C7.pep
TGRHQRAVGLYRTGHCRAPHGIQSSGRSAHGCHTDQRLASLSQTSRHAPTLRLSRGARPRRRVGTGCGTYLAVALKHLVAEGVTHRANQGKDNNMSRIMPQPCAPEDPNDEELGKLMNVLTIAHGGVLPNIHCVLLPKKARDKVDSGGSKEPKFPKKGAKYPKKA

SEQ ID NO: 6749 - protein, 113 aa, Zea mays
  Clone ID: TF_LIB3070-004-Q1-N1-G12.pep
MDSTGTGARGKGKKGAAVRKVSGPRQKSESRSVKAGLLLPVSRIDRNWRKGLNHKGLGAVPTIYLTVDLNSLALMFLKLAVKATGATRKPGFIPRHVLLATRTNRKLEKLLGG

SEQ ID NO: 6750 - protein, 69 aa, Zea mays
  Clone ID: TF_jC-zmshLIB3569P023a05a1.pep
FQRLVREIAQDFKTDLGFQSHAVLVLQEAAKAYLVGFFEETNLWGIHAKGVTIMPKDIQLAKRIRGKRG

SEQ ID NO: 6751 - protein, 79 aa, Zea mays
  unsure (1)..(79): unsure at all Xaa locations
  Clone ID: TF_LIB4730-112-A1-K1-A4.pep
AELLIRKLPFQRLVREIAQDFKTDLRFQSSAVAALQEAAEAYLVGLFEDTNLCAIXHARRVNIMPKDIQLARRIRGERA

SEQ ID NO: 6752 - protein, 70 aa, Zea mays
  unsure (1)..(70): unsure at all Xaa locations
  Clone ID: TF_700051888H1.pep
MDASAAIAGGKAKNGAAGRKAGGPRKKSVTRSVKAGLQFNVGRIVRYLKNGRYAQXXGTGAPVYMAAVLE

SEQ ID NO: 6753 - protein, 43 aa, Zea mays
  Clone ID: TF_LIB3180-060-P2-M1-H6.pep
MSSGGGRGKPKGSKAVSRSTKAGLQFPVGRIARYLKAGKYSER

SEQ ID NO: 6754 - protein, 96 aa, Zea mays
  unsure (1)..(96): unsure at all Xaa locations
  Clone ID: TF_LIB3279-051-P1-K1-C7.pep
GEEGHGRAQGRLADKNSVSRSCRAGLQFPVRRVGRYFIMGRFAYRVGTGAYVYLAGVLXYLEGDVLDLDGYAVIDNENTRMIPRHVLFSIRNDEEI

SEQ ID NO: 6755 - protein, 148 aa, Zea mays
  unsure (1)..(148): unsure at all Xaa locations
  Clone ID: TF_LIB3279-180-Q1-K6-D12.pep
GGAKKEASGRRSRRPRRRRRRRPQRSPPRSAPRPPARRAARREGGRGAFLFLETXKXXXXRGGRQXHPDTGXXXKAXXXXNPXXNDTXEKXAGEAAKXARGNKRPTXTXRENQTAXRRXXPGERAKHAXXEGTKAXTKXTSGAAPSGH

SEQ ID NO: 6756 - protein, 119 aa, Zea mays
  unsure (1)..(119): unsure at all Xaa locations
  Clone ID: TF_LIB4071-010-Q1-N1-D9.pep
SAQKETASDKAPTGKKLKSEYRVSAGKSLCQXGGEGKRGNKKGKKSVXETFKIFIFXVLKQVHPDVGISSKPMSIMNSFINDIFEKLAAQAAXLARYTNKPTISSREIQXSVRLVLNKE

SEQ ID NO: 6757 - protein, 88 aa, Zea mays
  unsure (1)..(88): unsure at all Xaa locations
  Clone ID: TF_LIB3607-024-Q6-K6-H11.pep
WAEPPAVRGDTKIMIRKLPFQRLVREIAQDFKTDLRFQSSAVAALFLASEAYLVGXGGDTYLCAIHAXRVTIMPKDMSFARRIRVVRA

SEQ ID NO: 6758 - protein, 54 aa, Zea mays
  Clone ID: TF_LIB3236-043-P1-N1-A7.pep
PRFHSSPVTALQKAAEAYLAGLFEETNLCAIHARRVSIMPKEIQLARRILGEGA

SEQ ID NO: 6759 - protein, 113 aa, Zea mays
  unsure (1)..(113): unsure at all Xaa locations
  Clone ID: TF_jC-zmXLIB3526P099bg02a1.pep
NVKKGAVGFYVFFSTKKTEKQPSRASLLIPVNRERGDLKKGRYPHCLCKEAPGYLDDGLEYLGDKVLELADNAARDNKKTRIILRXVLLGIRNDEEVGKLLAGITIAHGGVLP

SEQ ID NO: 6760 - protein, 96 aa, Zea mays
  unsure (1)..(96): unsure at all Xaa locations
  Clone ID: TF_700572124H1.pep
MALYDDKKPAAHNPADYDPAAVNTTAGNKPKADKRIPGVKSAGKDRGDGNRGETKCXKIVETCKIYIFKVLKQVQPDIGISSKDMSIMDSFINDIF

SEQ ID NO: 6761 - protein, 81 aa, Zea mays
  Clone ID: TF_LIB3078-007-Q1-K1-F11.pep
MMARTKHTARKSTVGKAPSMQLATKAARKSAPTTGGVNKPHRFKPGTVSLREILMYQKSTVLLIRKLPLQRLVREIAHDFK

SEQ ID NO: 6762 - protein, 74 aa, Zea mays
  Clone ID: TF_LIB3088-006-Q1-K1-F10.pep
VLDRERSPFFFFFFFFFFLFCFFFGGAGKLARYNKKPTITFREIQTSVRLVLPGELVKHAVFEGTKAVTKFTFF

SEQ ID NO: 6763 - protein, 147 aa, Zea mays
  Clone ID: TF_LIB4730-038-R1-K1-A2.pep
ASSYSPISATQRGPPSPILLSFLTTGADTPFRQHHEGVHLDPHRAGRDAGGKPLLRAVLTEAWEGGRCKNTGRKSEGTYKIYIFKVLKQVHPDIGISSKAMCMMNYFINDIFKKLAGEGDKLERYNKKPTITYREIQTYERLVLPAE

SEQ ID NO: 6764 - protein, 123 aa, Zea mays
  unsure (1)..(123): unsure at all Xaa locations
  Clone ID: TF_LIB4746-033-R2-K1-C10.pep
MRPTKPTAGEFSGGWAPRPKLVTEAPRKEAPTTDAEEKPHLHRPGTVAVLEIHKYHSKTELVIRXVPFQELGQRIAHDFKTDVRFQSHAVLALQESTEAYLDCLFNDTNLCAIHGERVTILPK

SEQ ID NO: 6765 - protein, 53 aa, Zea mays
  Clone ID: TF_LIB3600-054-Q2-K6-B9.pep
PRVRSAVAALQEAAEAYLVGLFEDTNLCAIHAKRVTIMPKDIQLARRIRGERA

SEQ ID NO: 6766 - protein, 146 aa, Zea mays
  unsure (1)..(146): unsure at all Xaa locations
  Clone ID: TF_LIB4729-090-Q1-K1-H12.pep
GRHAPALPRTSAPTPPPRTNHTARKSTXGKAPRNQLATKAARKSPPATXGXKKPHRFRPGTVALREIRKDQKSTELLIRKLPFQRLVREIAQDFKTDLRFQNSAGAELQEDAEAYLARLFQDTXNLCAIHDKRDTHTLPTDIQLAR

SEQ ID NO: 6767 - protein, 152 aa, Zea mays
  unsure (1)..(152): unsure at all Xaa locations
  Clone ID: TF_LIB3596-044-Q6-K6-B10.pep
MAPKAYMKPAANKPAXERSPRQTKRFNAPAGXQPMAEKCLPAGKSNEGVQGKTGKKQAKKSAETYKIYMFNVLKQVHPVIGISSKXMSIMNSFIYYIFEKLAAESAKLARYNKKPTITSHEIHTSVRLILPEELAMHARLRGTNAVTNFTSL

SEQ ID NO: 6768 - protein, 136 aa, Zea mays
  unsure (1)..(136): unsure at all Xaa locations
  Clone ID: TF_LIB3600-020-Q6-K6-G8.pep
MAVRGKAIGAGAAEEGNVKELQAGLQFPVRQRSPRILKGGGDAKRVGTGAPVYLADGLEYLADEVLELAGNPMRDNKKTRIVPRDMQLAVRNDEELTXLLGGATIWSGGVMPNIHHHLLPKKAGSIKAYTGTNDDN

SEQ ID NO: 6769 - protein, 108 aa, Zea mays
  Clone ID: TF_LIB3355-036-P1-K1-E9.pep
MARTKQTARKSTGGKAPRKQLATKAARKSAPTTGGVKKPHRFRPGTVALREIRTYQKSTELLIRKLPFQRLVREIAQDFKTDLRFQSHAVLALHEGREAYLVGLFEDT

SEQ ID NO: 6770 - protein, 99 aa, Zea mays
  Clone ID: TF_LIB3067-035-Q1-K1-C2.pep
HAFVHAFGHASVHASGKYQKSTELLIRKLPFQRLVREIAQDFKTDLRFQSSAVAALQEAGEAYLVGLFEDTNLCAIHAKRVTIMPKDIQLARRIRGQRA

SEQ ID NO: 6771 - protein, 193 aa, Zea mays
  unsure (1)..(193): unsure at all Xaa locations
  Clone ID: TF_LIB4975-058-Q1-K1-C4.pep
MARTKQTARKSTGGKAPRKQLATKAARKSAPATGGVKKPHRFRPGTVALREIRKYQKSTELLIRKLPSQRLVREIAQDFKTDLRFQSSAVSALQEAAEXYLVGLFEDTNLCAIHAKRVTIMPKDIQLARRIXWGEGLSIVYSVISARSEDVEVLGSGSFGLLSNHRGKLGCSLAVTYYHDAYEMAMNLCYQFS

SEQ ID NO: 6772 - protein, 136 aa, Zea mays
  Clone ID: TF_ZmC114_19.pep
MARTKQTARKSTGGKAPRKQLATKAARKSAPTTGGVKKPHRYRPGTVALREIRKYQKSTDLLIRKLPFQRLVREIAQDFKTDLRFQSHAVLALQEAAEAYLVGLFEDTNLCAIHAKRVTIMPKDIQLARRIRGERA

SEQ ID NO: 6773 - protein, 109 aa, Zea mays
  Clone ID: TF_LIB3597-054-Q1-K6-A2.pep
QKPHRFRPGTGALREIRTYQKSTELLIRKLPFQRLVREIAQDFKTDLRFQSSPVAALQEAFEAYLVGLFEDTNLCAIHAKRVTIMPKDIQLARRIRVERAYASRRRTSK

SEQ ID NO: 6774 - protein, 144 aa, Zea mays
  Clone ID: TF_uC-zmroteosinte048a10b1.pep
MAPKAEKKPVAKKPAEEEPATEKAEKAPAGKKPKVEKRLPAGKSAGKDGGEGKKGKKKAKKSVETYKIYIFKVLKQVHPDIGISSKAMSIMNSFINDIFEKLAAESAKLARYNKKPTVTFREIQTSVRLVLPGELAKHAVSEGT

SEQ ID NO: 6775 - protein, 165 aa, Zea mays
  Clone ID: TF_jC-zmXLIB3526088dc05b1.pep
SLQPTASSPPLSPSTPTTPIPDPLAPKAEKNPPEKKPAAEEKAEKTTAGKKPKSEKRLPASKSSGKEGGEKKGKKKAKKSVETYKIYIFKVLKQVHPDIGISSKAMSIMNSFINDIFEKLAGEAAKLARYNKKPTITSREIQTSVRLVLPGELAKHAVSEGTKAV

SEQ ID NO: 6776 - protein, 126 aa, Zea mays
  Clone ID: TF_ZmC653_30.pep
SGSTLASDFQFQILRSRKSAPATGGVKKPHRFRPGTVALREIRKYQKSTELLIRKLPFQRLVREIAQDFKTDLRFQSSAVAALQEAAEAYLVGLFEDTNLCAIHAKRVTIMPKDIQLARRIRGERA

SEQ ID NO: 6777 - protein, 93 aa, Zea mays
  Clone ID: TF_LIB3150-013-Q1-N1-B10.pep
MAPNAENKPADKKPAAEEKAEKTTARKKPKAEKRLPECKSFGKEGGQKNGKKNANKSVQTYKIYIFKELNHVHPDIGICYKAMYIMNSFINDI

SEQ ID NO: 6778 - protein, 160 aa, Zea mays
  unsure (1)..(160): unsure at all Xaa locations
  Clone ID: TF_LIB3150-013-Q1-N1-B10.F2.pep
SHLDPDIPEPDGAPRRRKKPAEKKPAAEEKAEKTTAXXKKPRAEKRLPESKSSGKEGGEKKGKKKANKSVETYKIYIFKVLKQVHPDIGICSKAMSIMNSFINDIFEKLAGEAGKLARYNKKPTITCREIQTSVRLVLPGELAKNAVSEGIQGVTKFTTN

SEQ ID NO: 6779 - protein, 156 aa, Zea mays
  Clone ID: TF_LIB4979-052-R1-K1-E6.pep
RNLQSPQKSLAESFHPHSLDGPHEAYGRRKSTGGKEPRKQLATKGARKSAPATGGVKKPHRFRPGTVELREIRMYQKSTELLIRKLPFQRLVREIAQDFKIDLRFQSSAVSALQEADEDYLVGLFEDTNLCAIHAKRVTVMPKDIQVARRIRGERA

SEQ ID NO: 6780 - protein, 174 aa, Zea mays
  unsure (1)..(174): unsure at all Xaa locations
  Clone ID: TF_LIB5045-063-Q1-K1-C9.pep
MARTKQTARKSTGGKAPRKQLATKAARKSAPATGGVKKPHRFRPGTVALREIRKYQKSTELLIRKLPFQRLVREIAQDFKTDLRFQSSAVSALQEAAEAYLVGLFEDTNLCAIHAKRVTIMPKDIQLARRIXRGEGLSVIFSVISARSEDVEMCWCSLGYCRIIEGTGLFTAVT

SEQ ID NO: 6781 - protein, 138 aa, Zea mays
  Clone ID: TF_LIB5116-040-A1-PF1-C2.pep
MAPKAEKKPVAEKAEKTTAAKKTKAEKRPPASKEGGEKKGKKKSKKSVETYKIYIFKVLKQVHPDIGISSKAMSIMNSFINDIFEKLAGESAKLARYNKKPTITSREIQTSDRLVLPGELAKHAVSEGTKAVTKFTSS

SEQ ID NO: 6782 - protein, 159 aa, Zea mays
  Clone ID: TF_LIB5116-002-A1-PF1-D2.pep
TQIAAAPDLQEHTTTRAADPQSPMARTKQTARKSTGGKAPRKQLATEAARKSAPATGGVKKPHRFRPGTVALREIRKYQKSTELLIRKLPFQRLVREIAQDFKTDLRFQSSAVSALQEAAEAYLVGLFEDTNLCAIHAKRVTIMPKDIQLARRIRGERA

SEQ ID NO: 6783 - protein, 135 aa, Zea mays
  Clone ID: TF_LIB5116-019-A1-PF1-F5.pep
MAPKAAEKKPVEKTPAGKKPKAEKKVPASKEGGDKKGKKKAKKSVETYKIYIFKVLKQVHPDIGISSKAMSIMNSFINDIFEKLAGESAKLARYNKKPTITSREIQTSVRLVLPGELAKHAVSEGTKAVTKFTSA

SEQ ID NO: 6784 - protein, 138 aa, Zea mays
  Clone ID: TF_LIB5116-045-A1-PF1-H7.pep
MAPKAEKKPVAEKAEKTTAGKKTKAEKRPPASKEGGEKKGKKKNKKSVETYKIYIFKVLKQVHPDIGISSKAMSIMNSFINDIFEKLAGESAKLARYNKKPTITSREIQTSVRLVLPGELAKHAVSEGTKAVTKFTSS

SEQ ID NO: 6785 - protein, 147 aa, Zea mays
  Clone ID: TF_LIB5116-047-A1-PF1-H1.pep
MAGRKGGDRKKAVTRSVKAGLQFPVGRIGRYLKKGRYAQRVGSGAPVYLAAVLEYLAAEVLELAGNAAKDNKKTRIIPRHLLLAVRNDQELGKLLAGVTIAHGGVIPNINAVLLPKKSPAAAEKEAKSPKKKTSTKSPKKKTAATKE

SEQ ID NO: 6786 - protein, 148 aa, Zea mays
  Clone ID: TF_ZmC644467_1.pep
MAGRKGGDRKKAVTRSVKAGLQFPVGRIGRYLKKGRYAQRVGSGAPVYLAAVLEYLAAEVLELAGNAAKDNKKTRIIPRHLLLAVRNDQELGRLLAGVTIAHGGVIPNINSVLLPKKSPAAAEKEATKSPKKKTAAKSPKKKTAATKE

SEQ ID NO: 6787 - protein, 229 aa, Zea mays
  Clone ID: TF_ZmC369_149.pep
MYVVYLSVATVLSDRTVMVLIQPSYMFLCEKKKKKKKKKKKKKKKKKKKKKKTTGDHISSHFFPSDPPFATKTPTRPASMAPKAEKKPAAKKPAEEEPAAEKAPAGKKPKAEKRVPAGKSAAKEGGEGKRGKKKGKKSVETYKIYIFKVLKQVHPDIGISSKAMSIMNSFINDIFEKLAAEAAKLARYNKKPTITSREIQTSVRLVLPGELAKHAVSEGTKAVTKFTSA

SEQ ID NO: 6788 - protein, 98 aa, Zea mays
  unsure (1)..(98): unsure at all Xaa locations
  Clone ID: TF_LIB3356-022-P1-K1-H9.pep
MAPRADNKPAAKKPAEEEPAAPAEKAPAGKNPKAEKRFPAGKSAGMEGGVDMKGRXKAKKSVETYNIYIFNVLKQVHPDIVISFKAMSIINFINNDIF

SEQ ID NO: 6789 - protein, 141 aa, Zea mays
  unsure (1)..(141): unsure at all Xaa locations
  Clone ID: TF_LIB3227-024-P1-K1-G6.pep
ITSYFFPSDPAFATKTTTGGLSIAFKAQNKPLLTKPAEDEPAVXKAPARKKPIAENRVPAGKSAAKEGPEGKRRKKNGKKSAETYKIYIFNVLKQVHPDIAXSSQAMSIMNSFINDIFEKLASDAGKLARYNKKPTITFRR

SEQ ID NO: 6790 - protein, 237 aa, Zea mays
  Clone ID: TF_ZmC2879_6.pep
RTRRVWWLSPVDLVFFLSAFLLNEDVMNSAEDVVCMLSWFIFLFYLSIYNIYRRRFDMKRKKKKKKKKKKKKKKKKKKKKKKKKKKTPEILNPPRNPKKKPSILTRSRARTKKTGRKPTGGKAPRKKLATKGARKFAPATGGVKKPHRFRPGTVALRKIRKNQKSTELLIRKLPSQPLGRKIAQDFKTDLRFQSSVVSPLKKGVEANLPGLFCVRRLQIWAPSTQRGGGVSFGNEYA

SEQ ID NO: 6791 - protein, 84 aa, Zea mays
  unsure (1)..(84): unsure at all Xaa locations
  Clone ID: TF_LIB3227-014-P1-K1-B9.pep
IFKVLKQVHPVIGISSKGMFIMNSFINDIYDKLAVXAAKLARYNMKPTITSRXFQTSVRLVLPGELAKHAVSXGTKAVTKITSS

SEQ ID NO: 6792 - protein, 144 aa, Zea mays
  unsure (1)..(144): unsure at all Xaa locations
  Clone ID: TF_LIB4073-010-Q6-K1-H10.pep
PFPLLPGKRARSTGREPWHSTSRSERVGEGRRRGAARTQGSGGPREEVSXRGSVIGPGLQFPVRGGAXALPEEGPRYAQXASAPRRXXVYLXPPSLEYPSPLRXLELAGNAARDNKKTRIIPRRVLLAIRNDEELGKLLSGVAI

SEQ ID NO: 6793 - protein, 174 aa, Zea mays
  unsure (1)..(174): unsure at all Xaa locations
  Clone ID: TF_LIB4740-141-A1-K1-E12.pep
RLPPWRRTCCRLLALSLPCLPAVTAPAGSGYGAAPGVAALAEAAVAYATSETVPQQSVDEISLSLAVLRRRAPLRLLVFVLETHYEDEERDDLIRKLAFHGLVREIAQDFKIYLLFPTHAVXALQEAAEAYLVGINKDTNLCAIHAKRVTIMPKDIQLARRIRGERANPSSPGI

SEQ ID NO: 6794 - protein, 103 aa, Zea mays
  unsure (1)..(103): unsure at all Xaa locations
  Clone ID: TF_700380613H1.pep
PSDPPFATKTPTRPASIAFYFEFLSSVKIVAEDVPAADKAPAGKKPKXTKRVPAGKSAAKECGDGKRGKKKGKKSVETYKIYIFKVLKQVHPDIGISSKAMSI

SEQ ID NO: 6795 - protein, 87 aa, Zea mays
  Clone ID: TF_ZmC119_816.pep
ARGSPSAASGATSRRAATRIVPRHVLLAIRNDEELGKLLTGVTIAHGGVLPNINPVLLPKKTAEKAASGGSKEAKSPKKAAKSPKKA

SEQ ID NO: 6796 - protein, 110 aa, Zea mays
  unsure (1)..(110): unsure at all Xaa locations
  Clone ID: TF_LIB4732-042-R1-K1-D11.pep
MARTKDTSSXSTVGKAPRXQLATXAAGKSAPDTGGVNKPHRFRPGTVALREIRKYQKSTELLIRKLPFQRLVREIAQDFKTDLRFQSSAVAALQEAAEAYLEGIFKDTNL

SEQ ID NO: 6797 - protein, 181 aa, Zea mays
  unsure (1)..(181): unsure at all Xaa locations
  Clone ID: TF_LIB4172-005-Q1-L1-A5.pep
IRHEAASSPSNSFRPGKEEIEQPRRGEDGFVRQQTARKSTGGKAPAQSSFATQWRRRIVLRPTXTGGVKKPHRYXRPGKVALRREPQVPRRARSLLIXKLPFQRLVREIAQDFKTDLRFQSHAVLPSKETRRAYLVGLFEDTNLCAIHAKRVTIMPKDIQLARRIRGERARRISRPAPVAA

SEQ ID NO: 6798 - protein, 105 aa, Zea mays
  Clone ID: TF_LIB5026-032-Q1-XP1-D12.pep
MDSTGTGAGGKGKKGAAGRKVGGPRKKSVSRSVKAGLQFPARRIGRYLKKGRYTQRVDTGAPVYLAADLEYLTAEVLELAGNAARDNKKTLVIPCHELLEIRNDK

SEQ ID NO: 6799 - protein, 128 aa, Zea mays
  unsure (1)..(128): unsure at all Xaa locations
  Clone ID: TF_LIB3245-532-P1-K1-A1.pep
MARTKQTARKSTGGKAPRKQLATKAARKSAPATGGVKKPHRFRPGTVALREIRKYQKSTELLIRKLPFQRLVREIAQDFKTDLRFQSSAVFALHEGADAYLGWLLQDTKPLALPAKRVTIXMPKDIQL

SEQ ID NO: 6800 - protein, 135 aa, Zea mays
  Clone ID: TF_LIB4185-042-R1-K1-H6.pep
EPAAPAEKAPPGKKPKAEKRLPAGKSPGKEGGVSKKGRKKAKKSVETSKIYIFKVLKQVHPDIGISSKAMSIMNSFINDIFEKLAGEGAKFARYNKKPPLPSREIQTSVRLVLPGELAKHPVSEGPKAVPKFPSS

SEQ ID NO: 6801 - protein, 150 aa, Zea mays
  unsure (1)..(150): unsure at all Xaa locations
  Clone ID: TF_ZmC838_10.pep
LIHSWKADSCLESFFAVPRARTKQTAGKSTGGKAPRKQLATKVARRSAPATGGVKKPHRFRPGTVALREIRKYQKSTELLIRKLPFQGLVREIAQDLKTDLRFQSSAVAGLKEAAEAYLGGLFEDTNLCAIHAKRVTIMPKDIQFARXIR

SEQ ID NO: 6802 - protein, 136 aa, Zea mays
  Clone ID: TF_LIB4570-006-R1-K1-G2.pep
MARTKQTARKSTGGKAPRKQLATKAARKSAPTTGGVKKPHRYRPGTVALREIRKYQKSTELLIRKLPFQRLVREIAQDFKTDLRFQSHAVLALQEAAEAYLVGLFEDTNLCAIHAKRVTIMPKDIQLARRIRGERA

SEQ ID NO: 6803 - protein, 150 aa, Zea mays
  Clone ID: TF_ZmC369_101.pep
MAPKAEKKPAAKKPAEEEPATEKAEKAPAGKKPKAEKRLPAGKSGAGEGKKGKKKAKKSVETYKIYIFKVLKQVHPDIGISSKAMSIMNSFINDIFEKLAAEAAKLARYNKKPTITSREIQTSVRLVLPGELAKHAVSEGTKAVTKFTSS

SEQ ID NO: 6804 - protein, 150 aa, Zea mays; identical to SEQ ID NO: 6803
  Clone ID: TF_ZmC369_148.pep

SEQ ID NO: 6805 - protein, 149 aa, Zea mays
  Clone ID: TF_ZmC369_50.pep
MAPKAEKKPAAKKPAEEEPAAAKAPAGKKPKAEKRLPAAKSSGKEGGDKKGKKKAKKSVETYKIYIFKVLKQVHPDIGISSKAMSIMNSFINDIFEKLAGEAAKLARYNKKPTITSREIQTSVRLVLPGELAKHAVSEGTKAVTKFTSN

SEQ ID NO: 6806 - protein, 150 aa, Zea mays; identical to SEQ ID NO: 6803
  Clone ID: TF_ZmC369_62.pep

SEQ ID NO: 6807 - protein, 150 aa, Zea mays; identical to SEQ ID NO: 6803
  Clone ID: TF_ZmC369_68.pep

SEQ ID NO: 6808 - protein, 150 aa, Zea mays
  Clone ID: TF_ZmC369_77.pep
MAPKAEKKPAAKKPVEEEPATEKAEKAPAGKKPKAEKRLPAGKSGAGEGKKGKKKAKKSVETYKIYIFKVLKQVHPDIGISSKAMSIMNSFINDIFEKLAAEAAKLARYNKKPTITSREIQTSVRLVLPGELAKHAVSEGTKAVTKFTSS

SEQ ID NO: 6809 - protein, 137 aa, Zea mays
  Clone ID: TF_ZmC369_89.pep
MAPKAEKKPAAKKPAEEEPAAAKAPAAKSSGKEGGDKKGKKKAKKSVETYKIYIFKVLKQVHPDIGISSKAMSIMNSFINDIFEKLAGEAAKLARYNKKPTITSREIQTSVRLVLPGELAKHAVSEGTKAVTKFTSS

SEQ ID NO: 6810 - protein, 95 aa, Zea mays
  unsure (1)..(95): unsure at all Xaa locations
  Clone ID: TF_LIB3078-055-Q1-K1-F9.pep
TRTRAVDLREIRRCQSSTELRTRNLPIRXLETEIALNCQTDLRFQYSTDCVLYEAVXAYLVGLFDDTNLCAIHSKRVTIMPTDIQLARRINGDKA

SEQ ID NO: 6811 - protein, 82 aa, Zea mays
  unsure (1)..(82): unsure at all Xaa locations
  Clone ID: TF_LIB3070-010-Q1-N1-G7.pep
MVYPTGLQFAVLRIHRQLMQKTXANGRVGTSAAVYSAVILQYLTAKDLELAVNASLDLNVKRITRRHLQFAILGDNELDTLI

SEQ ID NO: 6812 - protein, 78 aa, Zea mays
  Clone ID: TF_LIB3088-036-Q1-K1-H8.pep
MAPKAEKKPAAKKPEEEEPATEKAEKAPAGKKPKAEKRLPAGKSGAGEGKTGMKKAMKSVETYKIYIFKVLKQVHPDI

SEQ ID NO: 6813 - protein, 68 aa, Zea mays
  unsure (1)..(68): unsure at all Xaa locations
  Clone ID: TF_LIB3354-075-Q6-N6-E3.pep
KAMSIMNSFINDFFXKLGAESPKLGGYNKKPPIPSREIQTWGGLVLPGELPKHPVSEGPKAVTKFPPF

SEQ ID NO: 6814 - protein, 170 aa, Zea mays
  unsure (1)..(170): unsure at all Xaa locations
  Clone ID: TF_LIB4729-041-R1-K1-E9.pep
MQPSTESRWKESKEASGRKDGRPSKKXVTKTVKDGLHFPARRMDRYLQXRTATYTQCVGRPASTYAGVLDDLPGQGLDLAGNAGXDSQKTHMHPRHLLLAIHTDQRLAKLVAGWTIHHARRFANINPPLLAKKTEEKECIHRSKQGKQANKDGKHLNKDRYWRQIQPMHA

SEQ ID NO: 6815 - protein, 89 aa, Zea mays
  unsure (1)..(89): unsure at all Xaa locations
  Clone ID: TF_LIB4730-068-R1-K1-F4.pep
PHCTTATCRRPSRQAPKTTMDRTKQTARMSTGGKAPRKQLVTKAARKSAPTAGVVKKPHRLGGGTVTLRXIRKYQKRTELPIRKLPLQR

SEQ ID NO: 6816 - protein, 150 aa, Zea mays
  Clone ID: TF_LIB4974-021-Q1-K1-A5.pep
HVAYCSVSRGSAIILEVSSAVVNSIVLVSRCSLGRYVVDIYWDQKFMHLGHYGIHSDGPRAHQPRDILVFAGAEQNVAPSDSGLLCCHVRHSAQSQSLSSNILEHGSEVGSGHGIVSLGILIGHADSGDPSHGDLEASLGTPVRGFLGGT

SEQ ID NO: 6817 - protein, 113 aa, Zea mays
  Clone ID: TF_LIB3069-003-Q1-K1-G4.pep
AVSYNSQSIKLYQPFANSEEVIVPKAEKKPVFKIPSEDEPVAPADKAPAVNKPNADKLLPAGKSDGKECRVDKNVRKNAKKSVETYKIYIFKVLKHVHPDIGISSKAMSIMNS

SEQ ID NO: 6818 - protein, 158 aa, Zea mays
  unsure (1)..(158): unsure at all Xaa locations
  Clone ID: TF_LIB3279-200-Q1-K6-G11.pep
MDASGANNEANKGAAGRKASSPRKKSVTRSLKARLQLLVRRIRNYLNKDRFAHGVGTYLPVYLDYLLDYLVDXVLDLARDTAKDNMMTRIMLLHMLLDIHIDKELGKLMIGLTIVHGNILSNIHSMLLPKKAANNAGNARNNEPKCAKNGTKSSKKAY

SEQ ID NO: 6819 - protein, 147 aa, Zea mays
  unsure (1)..(147): unsure at all Xaa locations
  Clone ID: TF_LIB4762-006-R1-K1-G10.pep
MPLLASLRTLSPIPCLVVPTPTKPLTANAVHKRRPETAEANKPHHARPGLAXLSVIRFTTKSTELPLLKVPDQPLMRQIGQDVKTDLHFHSSAVSRLEEPAEAYLVVLLEDTNLCAIHAKRATILPKDIQLARRIRGDEGLSVTLHC

SEQ ID NO: 6820 - protein, 129 aa, Zea mays
  Clone ID: TF_LIB4300-007-R1-M1-G1.pep
RARSHKSSCSSSPQPNSSHSGETLGDVWRVARAYKGLGKGGAKRHRKVLRDNIQGITNPAIRRLARRGGDKRISGLIYEETRGVLKIFLENVMRDAVTYTEHARRKTVTVMDAVYAPKRQGRTLYGFGG

SEQ ID NO: 6821 - protein, 89 aa, Zea mays
  Clone ID: TF_jC-zmXLIB3527P083cd11d1.pep
VLKYLTAKVLELAASSSKGHKKTRLISSQVLLSIRTDQELSNLLSGVTIAHAGVLPTIILVLLPKKSADKAAPSETKSPKKAVKSPNKA

SEQ ID NO: 6822 - protein, 148 aa, Zea mays
  Clone ID: TF_LIB4762-143-Q1-K1-C1.pep
GESGLPLASRPGKGRGARGKVFGVGPAKKETSRISRAGFHFPVGRLARFLRGEKNREGVGPGPPGNLAAVLKNLGVGVLKFAGNPGGNKKKTRFGPRHFHFVGRNNEELPKLWGGAPFAGGGVLPNFLQIWLPKKVASSKARVNNNNN

SEQ ID NO: 6823 - protein, 118 aa, Zea mays
  Clone ID: TF_jC-zmX700345539a1.pep
MDATGTGAGGKAKKGAAGRKASGPRKKTVTRSEKAGLQFPAGRIGRYLKKGRYAQRVGSSAPVYLADDLEHIAAEDLELAGDSNNDTKKTRIVPSPGPLAIPNHKGAREAADRREPSP

SEQ ID NO: 6824 - protein, 55 aa, Zea mays
  Clone ID: TF_LIB3137-005-Q1-K1-A2.pep
DLRFQSHAVLALQEAAEAYLVGLFEDTNLCAIHAKRVTIMPKDIQLARRIRGERA

SEQ ID NO: 6825 - protein, 97 aa, Zea mays
  unsure (1)..(97): unsure at all Xaa locations
  Clone ID: TF_LIB3279-015-P1-K1-G10.pep
GKKGAAGRKVGRPKKKSVSRYEKACLQFPEGRIGRYLKKGRYAQRVCTGALVYLAGVLXYLSAXVLELAHNASRDNKKTRIISRHVLLAIRNDEELG

SEQ ID NO: 6826 - protein, 108 aa, Zea mays
  unsure (1)..(108): unsure at all Xaa locations
  Clone ID: TF_jC-zmXLIB3527P004bf03a1.pep
MQFATKAARKSAPTXSCVKKPHMYRLGTVALREIRMYQKSTELLILKLPFQRLVREIAQDFKTDLRFQSHAVLALQEAFEAYLVGLVEDTNLCAMHAKRVTMMPIDIQ

SEQ ID NO: 6827 - protein, 138 aa, Zea mays
  unsure (1)..(138): unsure at all Xaa locations
  Clone ID: TF_LIB3957-024-Q1-K6-B2.pep
PFQFQILRRAAPPALSQLSPMARTKQTARXKSTGGKAPRKQLATKAARKSAPATGGVKKPHRFRPGTVALREIRKYQKSTELLIRKLPFQRLVREIAQDFKTDLRFQSSDVTALEEAYXAYLVGLFEDTNLCRIHPNR

SEQ ID NO: 6828 - protein, 136 aa, Zea mays
  unsure (1)..(136): unsure at all Xaa locations
  Clone ID: TF_LIB3594-060-Q1-N6-D6.pep
MARTKQTARKSTGGKAPRKKLAPKGGRKWAPATGGVKKPHRFRPGTVAFREIPKYQKSPELLIRKLPFQRLVGEIAQNFKTALGFQSSPVPPLQKAPKGYLVGLFXDPNLWAIHAKRVPIMPKEIQLGPRIRGKRA

SEQ ID NO: 6829 - protein, 132 aa, Zea mays
  Clone ID: TF_LIB4071-005-Q1-N6-H8.pep
RKQLAPKAARKSAPAPGGVKKPPRFRPGPVALREIRKFPKSPGLFIRKLPFQRLVREIAQGFKTGLRFQSSAVAALQEAPEGFLVGLFEDPNLWAIPAKRVPFMPQDIQLAPRIRGERAFAVALLLFVVVMF

SEQ ID NO: 6830 - protein, 116 aa, Zea mays
  Clone ID: TF_LIB4766-057-R1-K1-E7.pep
LAKDGLHIPEGRIARFLKDGKYAERDGAGAPVYLAAVLEYLAAEVLELAGNAARDNKKTRIVPRHIQLAVRNDEELSRLLGTVTIASGGVMPNIHNLLLPKKDGGGSAKAADGDED

SEQ ID NO: 6831 - protein, 149 aa, Zea mays
  Clone ID: TF_ZmC369_116.pep
MAPKAEKKPAEKKPAAEEKAEKTTAGKKPKAEKRLPASKSSGKEGGEKKGKKKAKKSVETYKIYIFKVLKQVHPDIGISSKAMSIMNSFINDIFEKLAGEAAKLARYNKKPTITSREIQTSVRLVLPGELAKHAVSEGTKHAVTKFTSN

SEQ ID NO: 6832 - protein, 136 aa, Zea mays
  unsure (1)..(136): unsure at all Xaa locations
  Clone ID: TF_3341041.pep
KKPRAEKRVPSKEGGEKKGKKKAKKSVETYKIYIFKVFKQVHPDIGISSKAMSIMNSFINDILEKFAAEAAKFAXYNKKPTITSREIQTSVRFVFPGELAKHAVSEGTKAVTKFIFRPVLGCFCNNVEFVIYLGLC

SEQ ID NO: 6833 - protein, 150 aa, Zea mays
  Clone ID: TF_ZmC369_51.pep
MAPKAEKKPAAKKPAEEEPAAEKAPAGKKPKAEKRVPAGKSAAKEGGAGKRGKKKGKKSVETYKIYIFKVLKQVHPDIGISSKAMSIMNSFINDIFEKLAAEAAKLARYNKKPTITSREIQTSVRLVLPGELAKHAVSEGTKAVTKFTSA

SEQ ID NO: 6834 - protein, 153 aa, Zea mays
  Clone ID: TF_ZmC369_84.pep
MAPKADKKPAAKKSAEEEPATEKAEKAPAGKKPKAEKRLPAGKSAGKEGGGGKKGKKKAKKSVETYKIYIFKVLKQVHPDIGISSKAMSIMNSFINDIFEKLAAESAKLARYNKKPTITSREIQTSVRLVLPGELAKHAVSEGTKAVTKFTSS

SEQ ID NO: 6835 - protein, 146 aa, Zea mays
  Clone ID: TF_LIB5116-007-A1-PF1-C8.pep
MAGRKGGDRKKAVTRSVKAGLQFPVGRIGRYLKKGRYAQRVGSGAPVYLAAVLEYLAAEVLELAGNAAKDNKKTRIIPRHLLLAVRNDQELGRLLAGVTIAHGGVIPNINSVLLPKKSPAAAEKEARSPKKKTSTKSPKKKVAAKE

SEQ ID NO: 6836 - protein, 138 aa, Zea mays
  unsure (1)..(138): unsure at all Xaa locations
  Clone ID: TF_ZmC369_99.pep
MAPKAEKKPAEKKPAEEKAEKKPRAEKRVPSKEGGEKKGKKKAKKSVETYKIYIFKVLKQVHPDIGISSKAMSIMNSFINDIXEKLAAEAAKLXARYNKKPTITSREIQTSVRLVLPGELAKHAVSEGTKAVTKFTSS

SEQ ID NO: 6837 - protein, 123 aa, Zea mays
  unsure (1)..(123): unsure at all Xaa locations
  Clone ID: TF_LIB3279-011-P1-K1-H6.F2.pep
PDGRIGRSPKRAVTPSRVGPGAPVYLAPVLENLPPKGQERTGNPPKANKKTRIVPRHLLXATPNDQELGRLLSGVTIAHGGVIPNTNPVLLPKKAPEKAEKAEKTAPKSPKKATKSPKKATKA

SEQ ID NO: 6838 - protein, 93 aa, Zea mays
  Clone ID: TF_LIB3088-011-Q1-K1-D5.pep
ADAWAGGKAPWKHLATKAARESAPATGGVKKPHRFRPGTRALREIRKYQKSTELLIRKLALQRLVREIAHDFKTDLRLQSYAVDALHEAYQAY

SEQ ID NO: 6839 - protein, 96 aa, Zea mays
  unsure (1)..(96): unsure at all Xaa locations
  Clone ID: TF_LIB143-046-Q1-E1-C10.pep
LLAPKAEKSPAQKSAXENPRKSGSAEKAPAGKKPKXEKRLPAGKSAGKEAATKXEEAKKSVETYKIYIFKVLKXVHPDIGISSKAMSIMNSFINDI

SEQ ID NO: 6840 - protein, 109 aa, Zea mays
  unsure (1)..(109): unsure at all Xaa locations
  Clone ID: TF_uC-zmflteosinte78g07b1.pep
MDATGAGAGGKAKKGAAGRKAAGRXEAMTRCLKAGLQLRVGRIRRYLRKGRYAQRVGSGAPVYLAAVLEYLDAEVLELARNGGKDNKKTRISPRHVLLAIRNDEELGKL

SEQ ID NO: 6841 - protein, 136 aa, Zea mays
  Clone ID: TF_jC-zmshLIB3569P054h03b1.pep
MVRTKQAARKSTGGKALSKQLATKAERNSAPTTRGVKKPHRYRPGTVALRENRKYQKSTELLIRKKPFQHLVREIAQDLKTDLRFQSHAVLALKEATEAYLVGLCEDTNLCAIHPKRVTMMPKDIQVARRIRWERA

SEQ ID NO: 6842 - protein, 136 aa, Zea mays
  Clone ID: TF_LIB5116-021-A1-PF1-H10.pep
MAPKAAEKKPVEKTPAGKRPKAEKKVPASKEGGGDKKGKKKAKKSVETYKIYIFKVLKQVHPDIGISSKAMSIMNSFINDIFEKLAGESAKLARYNKKPTITSREIQTSVRLVLPGELAKHAVSEGTKAVTKFTSA

SEQ ID NO: 6843 - protein, 528 aa, Zea mays
  Clone ID: TF_ZmC19847_1.pep
RGRPGRDCRAHSFGLFSREFAHRLHLIGPREVRATSLVRAPEQSSLPDLHPSVIVRMKQMARKSMGGKAPRKQLATKGARKSETRTRGVKKAHQLRPGTAALCEIRQYKKSTGLLIRKLLFQRLVGHDATWFLLDIAFYSHNRFQEDSTSISGIPMSNTRSAEEKEVLATSPNRCLTNCFKLIQSCFSWDAVPYQQPWPPPHMQVEFGCGSADLCPIPWPFFTTIGTNEEIIDITSDDDKVDNVVDQLIDEQIAAVVFVPACMEATPNNVINTSKTVETFAAHQSPEYDSGLKDKDQRISFEDEISEGGQAEQSTPQQELWAMPPDTSDRETVERTTRSIEVEHFSQVESKHKMNSMSVEASEHVTITQIEKKPVQQVEITQELDSLPICSREHSNEALEGERTVQAGLEQECEVLGILSTITSDIFAIGLSPNQYTVYFYRNLMACMMLIRRRFLLSFGRSWDAVTYKQPWPPPVHVVILGDGFSVRLTPWQPLDTDIYSFPVNKPESSAGVFCIATESTQCAYDSQ

SEQ ID NO: 6844 - protein, 115 aa, Zea mays
  Clone ID: TF_LIB3076-004-Q1-K1-A11.pep
DATACRSPHVVTILLERLSTSCPDKSISRARDTDQWTCTWHLEQRGNGEEVELAWRKVLRAIGRSQESRSVKAVLQFPVGRIVRYLKNGRYSQCVCSGSRIYLDAVLEYLGDDDF

SEQ ID NO: 6845 - protein, 81 aa, Zea mays
  unsure (1)..(81): unsure at all Xaa locations
  Clone ID: TF_LIB3600-051-Q1-N6-A5.pep
SIARFIKAGKYDKKCHHGAPVYLNNVLEYLALQVRQLLGNAARHHHKSGIVTRHMQLAVRKAKNLCLVLGXVAITIAGVMP

SEQ ID NO: 6846 - protein, 108 aa, Zea mays
  Clone ID: TF_LIB3595-063-Q1-K6-B6.pep
TAHVSLARQIGASRRARSAWKTYKIYIFKVVKQVHPYILIYSNVLCIMNSFMNHIFNKLAADANKLERYNKKPTITYREIQTSVLLILPGELDEHTDCHGTKVRTMIS

SEQ ID NO: 6847 - protein, 100 aa, Zea mays
  Clone ID: TF_LIB4762-009-R1-K1-H2.pep
MARTKQTARKSTGGKAPRKQLATKAARKSAPATGGVKKPHRFRPGTVALREIRKYQKSTELLIRKLPFQRLVREIAQDFKTDLRFQSSAVAALQEAAEAY

SEQ ID NO: 6848 - protein, 104 aa, Zea mays
  unsure (1)..(104): unsure at all Xaa locations
  Clone ID: TF_LIB3597-038-Q1-K6-G10.pep
MLAYQGRQEKYAPTTHGVKKPHRFRPGTVVLRQIHTYTXDTGLLMPKFTFQRLICEITQDLKTDLRFQRHALLALHKAGQAYLVXLLQDTILXAIHSKRVTIMP

SEQ ID NO: 6849 - protein, 126 aa, Zea mays
  unsure (1)..(126): unsure at all Xaa locations
  Clone ID: TF_LIB3245-004-P1-N1-E8.pep
LIHSSPYAWGESCLGGXXXXKQTARKSTGGKAPRKQLATKAARKSAPATGGVKKPHRFRPGTVSLLEIRKYQKSTELLIRKLPLQRLVREIAQDFKTDLRFQSSAVTALQEAAEAYLVGLFETPTF

SEQ ID NO: 6850 - protein, 116 aa, Zea mays
  unsure (1)..(116): unsure at all Xaa locations
  Clone ID: TF_LIB4979-046-R1-K1-F12.pep
MARTKQTARKSTGGKAPRKQLATKAARKSAPATGGVKKPHRFRPGTVALREIRKYHKSTELLIRQLPFQRLVREIAQDFQTDLLFFFSPRAALQEVFQAYLVGLFXETNLCPILRP

SEQ ID NO: 6851 - protein, 153 aa, Zea mays
  Clone ID: TF_LIB4185-029-R1-K1-C8.pep
IPRRLGLPIFAPSTEFPMARPKQTARKLTGGKAPPKQLAPKAARKLAPATGGVKKPPRFRPGTVALREICKYQKSPELFIPKMPFQRLVREIAQDFKTDLRFQSSPVPALQEAPQASLVGLFEDTNLWAIPAKGVPIMPKDIQLARRIRGERA

SEQ ID NO: 6852 - protein, 131 aa, Zea mays
  unsure (1)..(131): unsure at all Xaa locations
  Clone ID: TF_LIB5025-020-A1-XP1-E2.pep
MARTKQTARKSTGGKAPRKQLATKAAHKSAPATGGVKKPHRFRPGTVALREIRKYQKSTELLIRKLPFQRLVREIAQDFKTDLRFQSSAVSALQDAAEVHLARLFEDTNLCAIHSKRVXLMPTDIHLARRI

SEQ ID NO: 6853 - protein, 160 aa, Zea mays
  unsure (1)..(160): unsure at all Xaa locations
  Clone ID: TF_LIB3279-174-P1-K6-D12.pep
KAEKKPAAKKPVEEEPAAEKTTAGKKPKAEKRVPAGKSVGKEGGEGKRGKKKGKKSVETYKIYIFKVLKQVHPDIGIFSKAMSIMNSFINDIFEKLAGEAAKLARYNKKPTITSREIQTSVRLMLLGELAKHAVXEGTMAVTKFTFFYACTLALCRLLLY

SEQ ID NO: 6854 - protein, 126 aa, Zea mays
  Clone ID: TF_LIB4975-062-Q1-K1-F6.pep
LCVGKGAGKHVTTKAERKSAPATGGVKKPHRFRPGTVALREIRKYHKSTELLIRKLPFQRLVREIAQDFKTDLRFQSSAVDALQEASEAYLVGLFEDTNLCAIHAKRVTIMPKDIQLARRIRGERA

SEQ ID NO: 6855 - protein, 136 aa, Zea mays
  Clone ID: TF_ZmC653_26.pep
MARTKQTARKSTGGKAPRKQLATKAARKSAPATGGVKRPHRFRPGTVALREIRKYQKSTELLIRKLPFQRLVREIAQDFKTDLRFQSSAVAALQEASEAYLVGLFEDTNLCAIHAKRVTIMPKDIQLARRIRGERA

SEQ ID NO: 6856 - protein, 129 aa, Zea mays
  Clone ID: TF_LIB3088-044-Q1-K1-A3.pep
MKCSSKSNTSRDAGMDGTAARANKDANKGTAGRTANKPRTKSVTRSLKARLQRIVRRMKKDLNKDRDAQGVRTYVAVYLDDVLEYVVDQVLDLADDNDKDNMMTRIMLLDMLMDKQLDEELGKLMIGDS

SEQ ID NO: 6857 - protein, 82 aa, Zea mays
  unsure (1)..(82): unsure at all Xaa locations
  Clone ID: TF_700021006H1.pep
SARATPKVPFFLSVWKRRSSSHGRERTGGKAKTGAAGRKAGGPTKKSVSRSSRAGLQFPVSRVGRYVKKGRYAQXLGTGAPV

SEQ ID NO: 6858 - protein, 148 aa, Zea mays
  unsure (1)..(148): unsure at all Xaa locations
  Clone ID: TF_LIB4730-058-R1-K1-H4.pep
MLHRHLCYHTTPMARTKKTARKSTGGKAPRKQLTTKAARKSAPTTGGVKKPHRFRPSTVVLQEIRKYQKSTELIIRKLFFQRLVHEIEQDFKTDLCFQSSAVAVLQEAXEDYLVGLFEDTNLCVIHAKRVIMMPNDIQLARRIXEERA

SEQ ID NO: 6859 - protein, 92 aa, Zea mays
  unsure (1)..(92): unsure at all Xaa locations
  Clone ID: TF_LIB3357-004-P1-K1-B2.pep
MAPKAEKKPAAKKPXAEEEPATEKVEKAPAGKKPKAEKRLPAGKSKEGGEGKKGKKKAKKSVETYKIYIFKVLKQVHPDIGISSRPCHHELL

SEQ ID NO: 6860 - protein, 81 aa, Zea mays
  Clone ID: TF_LIB4829-035-R1-N1-G5.pep
MARTKQTARKSTGGKAPRKQLATKAARKSAPTTGGVEKPHRYRPGTVVLREIRKKHKSPRLLIRKVPFHRVDREIRLECLM

SEQ ID NO: 6861 - protein, 104 aa, Zea mays
  Clone ID: TF_LIB4665-002-R1-N1-D12.pep
APAPGGVKEPQRFRPGTVALREIPQCQKSPQVLIRQLPFQRLVRELAQEFKPGLRFQSSPVPPLQEASQAYLVGLFQDTNLCAPHAKGVTLMPKGIQGRPPYPC

SEQ ID NO: 6862 - protein, 165 aa, Zea mays
  Clone ID: TF_LIB4766-036-R1-K1-A9.pep
MAAAALRSSARRLLRLTPAPSSALFAASRPTARVAPLSRPIAALSGGNNPISWKLRRFFSSNEKHLPAISDPEIEAAFKDLLAASWNELPDSLVAEAKKAVSKATDDNAGQEAFFPASHSSRGDHPIRSVRRDRRSGRDGSYQADCSQVHGREGSQEAACHQGCP

SEQ ID NO: 6863 - protein, 253 aa, Zea mays
  Clone ID: TF_ZmC460_2.pep
MKIQCDACEGAAATVVCCADEAALCARCDVEIHAANKLASKHQRLPLEALSASLPRCDVCQEKAAFIFCVEDRALFCRDCDEPIHVPGTLSGNHQRYLATGIRVGFASASSACSDACDAHDDSDHHAPPKAAVSSAAQQVPSPPQFLPQGWAVDELLQFSDCESSDKLHKESPLGFKELEWFTDIDLFHEQTPKAGRRLAEVPELSGTQAANDAAYYRPAKATATAVAGVRQSKKGRTEVTDDEDHLIVPDLV

SEQ ID NO: 6864 - protein, 119 aa, Zea mays
  unsure (1)..(119): unsure at all Xaa locations
  Clone ID: TF_LIB4729-095-Q1-K1-F11.pep
MEXRGKVDGAGAXKKATXRSSKAXLQIPVXRIARFLKAXKYAERVGAGAPXYLPPVLXYLPAEXLKLAXNAARNNKKTRIVPRHIPLPVRTHEELTQLLXAAPLPSAAPMPPIHQPLLP

SEQ ID NO: 6865 - protein, 129 aa, Zea mays
  Clone ID: TF_ZmC369_37.pep
MAPKAEKKPAAKKPAEEEPAAAKAPAGKKPKAEKRLPAAKSSGKEGGDKKGKKKAKKSVETYKIYIFKVLKQVHPDIGISSKAMSIMNSFINDIFEKLAGEAAKLARYNKKPKHAVSEGTKAVTKFTSS

SEQ ID NO: 6866 - protein, 119 aa, Zea mays
  unsure (1)..(119): unsure at all Xaa locations
  Clone ID: TF_jC-zmXLIB3526P100dc07a1.pep
MDSTGTGARGKGKKGAAGRKGGGPLKKAVXRSVKDGLQFPVGRIGRYLKKGRYAQRVGTGAPVYLADVLEYLPAEVLELAGNAARDNKKTRIISRHALVAIRNDKEPCEAVGRGAIAHR

SEQ ID NO: 6867 - protein, 146 aa, Zea mays
  Clone ID: TF_LIB4665-006-R1-M1-F6.pep
MAPKAEKKPAENNPAEDNAEKKPRADNRVPSKEGGENKGKKKAKKSVETYKIYIFKGLKQVHPDIGISSKAMCIMNSFINDIFEKLAAEAAKLARYNKKPTITSREIQTSGRLVLPGELAKHAVSEGTKAGTKVTSSYGAAAAARC

SEQ ID NO: 6868 - protein, 136 aa, Zea mays
  Clone ID: TF_LIB4764-037-R1-K1-D4.pep
MARTKQTGRKSTGGKAPRKQLATKAVRKSAPATGGVKKPHRFRPGTVALREIRKYQKSTEVLTRKLPFQRLGREIAQDFKTDLRFQSSAVSALQEAAEAYLVGLFEDTNLCAIHAKRVTIMPKDIQLGRRIRGERA

SEQ ID NO: 6869 - protein, 169 aa, Zea mays
  Clone ID: TF_LIB5026-055-A1-XP1-F7.pep
RQRQLSSSQLHPSSFPSSLRFLGGFLLPRPSPSPFSTLAGKQIGTKGDRKSAPTTGGVKKTHRYRPGTVALREIRKYQKSTELLIRKLPFQRLVREIAQDFKTDLRFQSHAELALQEAAEAYLVGLFEDTNLCAIHAKRVTIMPKDIQLARRIPRREGLIATSNIVTKT

SEQ ID NO: 6870 - protein, 136 aa, Zea mays
  Clone ID: TF_LIB3354-104-Q6-K2-B1.pep
MARTKHTVRKSTGGKAPRKQLATKAERKSAPTTGGVKKPHRYRPGTVALREIRKYQKSTELLIRKLPFQRLVREIAQDFKTDLRFQSHAVLALQEAAEAYLVGLLEDTNLWAIHAKRVTIMPKDIQLDRRIRGERS

SEQ ID NO: 6871 - protein, 136 aa, Zea mays
  unsure (1)..(136): unsure at all Xaa locations
  Clone ID: TF_LIB4666-020-R1-K1-G6.pep
MARTKQTARKSTGGKAPRKQLATKAARKSAPTTGGVKKPHRYRPGTVALREIRKYQKSTELLIRKLPFQRLVREIAQDFKTDLRFQSHAVLALQEAAEAYLVGLFEDTNLCAIHAKRVTIMPXDIQLAXRIPRERA

SEQ ID NO: 6872 - protein, 125 aa, Zea mays
  unsure (1)..(125): unsure at all Xaa locations
  Clone ID: TF_LIB4742-057-R1-K1-E4.pep
MAPKADKKPAAKKSAEEEPATEXGKKGKKKAKKSVETYKIYIFKVLKQVHPDIGISSKAMSIMNSFINDIFEKLAAESAKLARYNKKPTITSREIQTSVRLVLPGELAKHAVSEGTKAVTKFTSS

SEQ ID NO: 6873 - protein, 135 aa, Zea mays
  Clone ID: TF_ZmC519748_1.pep
MAPKAAEKKPVEKTPAGKKPKAEKKVPASKEGGDKKGKKKAKKSVETYKIYIFKVLKQVHPDIGISSKAMSIMNSFIYDIFEKLAGESAKLARYNKKPTITSREIQTSVRLVLPGELAKHAVSEGTKAVTKFTSS

SEQ ID NO: 6874 - protein, 136 aa, Zea mays
  Clone ID: TF_LIB4730-027-R1-K1-A5.pep
MARTKQTARKSTGGKAPRKQLATKAARKSAPATGGVKKPHRFRPGTVALREIRKYQKSTELLIRKLPFQRLVREIAQDFKTDLRFQSSTVAALQEASEAYLVGLFEDTNLCAIHAKRVTIMPKDIQLARRIRGERA

SEQ ID NO: 6875 - protein, 148 aa, Zea mays
  Clone ID: TF_ZmC369_106.pep
MAPKAEKKPAEKKPAAEEKAEKTTAGKKPKAEKRLPASKSSGKEGGEKKGKKKAKKSVETYKIYIFKVLKQVHPDIGISSKAMSIMNSFINDIFEKLAGEAAKLARYNKKPTITSREIQTSVRLVLPGELAKHAVSEGTKAVTKFTSN

SEQ ID NO: 6876 - protein, 148 aa, Zea mays; identical to SEQ ID NO: 6875
  Clone ID: TF_ZmC369_152.pep

SEQ ID NO: 6877 - protein, 148 aa, Zea mays; identical to SEQ ID NO: 6875
  Clone ID: TF_ZmC369_78.pep

SEQ ID NO: 6878 - protein, 129 aa, Zea mays
  unsure (1)..(129): unsure at all Xaa locations
  Clone ID: TF_LIB4975-071-A1-K1-F1.pep
RSPRRRSPRTEKAEKAPAGKKPKAEKRLPAGKSGAEEGKNGXSKKAKKSVESYKIYIFEVLKQVHPDIXGISSKVMYIMNSFINDIFEKLDVXAVKLDRYNKKPTIISLEIQISVRLVLPGELGKHAVS

SEQ ID NO: 6879 - protein, 69 aa, Zea mays
  Clone ID: TF_LIB3076-018-Q1-K1-E6.pep
MDATGTGTLLKANNVSAGRKAGRPMKKSVTRSVKAGLQFPVCRIGRYLKNGRYSQRVCSFAPVYLAVVL

SEQ ID NO: 6880 - protein, 82 aa, Zea mays
  Clone ID: TF_LIB3279-230-Q6-N6-E12.pep
ELPGNAARDNKKTCIISRHVLLGIRKKKELGKLLGGVTIAPGGVLPKINPVFLPKKTAEKGSSGGSKEAKLPKKAPKSPKKA

SEQ ID NO: 6881 - protein, 87 aa, Zea mays
  Clone ID: TF_LIB3608-007-Q1-N6-H1.pep
SFSFFKVLKQVPPAFGILSKAMSLMNSFINDIFEKLASKAPKFARFNKKPPIPSREIQILVGLVLPGELPKHPVSEGPKAVSKFSSS

SEQ ID NO: 6882 - protein, 125 aa, Zea mays
  unsure (1)..(125): unsure at all Xaa locations
  Clone ID: TF_uC-zmroteosinte022h10b1.pep
MARTKQTARXSTGGKAHRKQLATKAALKYAPTTGGVKKPHRYRPGTVALREIRTYHKSTELLIMKLPFQRLVREIAQDFQTXDLRFQSHAVLALHEAAEAYLVGLFXDTNLCAIHAKRVTIMPKD

SEQ ID NO: 6883 - protein, 150 aa, Zea mays
  unsure (1)..(150): unsure at all Xaa locations
  Clone ID: TF_ZmC2834_3.pep
GRRKTAEKPKKKLQFERSGGASTSATPERAXXXXXXXXXGGDSVKKTKPRHRWRPGTVALREIRKYQKSTEPLIPFAPFVRVVRELTNFVTNGKVERYTAEALLALQEAAEFHLIELFEMANLCAIHAKRVTIMQKDIQLARRIGGRRWA

SEQ ID NO: 6884 - protein, 135 aa, Zea mays
  Clone ID: TF_LIB4975-051-A1-K1-E8.pep
MMDIGKAIGSGAAKKATSRSSKAGLQCPVVRIARFLKGAKYAERVRAGAPVYLAAVLEYLAAEDLELAANAARDNKNTRIVPRHIQLAVRNDEELSRLLGTATIGSAGVPPNIHNLLLPKNAVGTSAKAADGDED

SEQ ID NO: 6885 - protein, 150 aa, Zea mays
  Clone ID: TF_ZmC369_39.pep
MAPKAEKKPAAKKPAEEEPAAEKTTAGKKPKAEKRVPAGKSAGKEGGEGKRGRKKGKKSVETYKIYIFKVLKQVHPDIGISSKAMSIMNSFINDIFEKLAGEAAKLARYNKKPTITSREIQTSVRLVLPGELAKHAVSEGTKAVTKFTSS

SEQ ID NO: 6886 - protein, 136 aa, Zea mays
  unsure (1)..(136): unsure at all Xaa locations
  Clone ID: TF_LIB4669-005-R1-K1-D3.pep
MARTKQTARKSTGGKAPRKQLATKAARKSAPATGGVKKPHRFRPGTVALREIRKYQKSTELLIRKLPFQRLVREIAQDFKTDLRFQSSAVSALQEAAEAYLVGLFEDTNLCAIHAKRVTIMPKDIQLARRIRXERA

SEQ ID NO: 6887 - protein, 136 aa, Zea mays; identical to SEQ ID NO: 6886
  unsure (1)..(136): unsure at all Xaa locations
  Clone ID: TF_LIB4669-006-R1-K1-G9.pep

SEQ ID NO: 6888 - protein, 136 aa, Zea mays
  Clone ID: TF_LIB4729-002-R1-K1-C10.pep
MARTKQTARKSTGGKAPRKQLATKAARKSAPATGGVKKPHRFRPGTVALREIRKYQKSTELLIRKLPFQRLVREIAQDFKTDLRFQSSAVSALQEAAEAYLVGLFEDTNLCAIHAKRVTIMPKDIQLARRIRGERA

SEQ ID NO: 6889 - protein, 136 aa, Zea mays; identical to SEQ ID NO: 6888
  Clone ID: TF_LIB4729-002-R1-K1-H10.pep

SEQ ID NO: 6890 - protein, 136 aa, Zea mays; identical to SEQ ID NO: 6888
  Clone ID: TF_LIB4729-040-R1-K1-C10.pep

SEQ ID NO: 6891 - protein, 136 aa, Zea mays; identical to SEQ ID NO: 6886
  unsure (1)..(136): unsure at all Xaa locations
  Clone ID: TF_LIB4729-041-R1-K1-D8.pep

SEQ ID NO: 6892 - protein, 136 aa, Zea mays; identical to SEQ ID NO: 6888
  Clone ID: TF_LIB4729-049-R1-K1-E2.pep

SEQ ID NO: 6893 - protein, 136 aa, Zea mays; identical to SEQ ID NO: 6888
  Clone ID: TF_LIB4762-025-R1-K1-B11.pep

SEQ ID NO: 6894 - protein, 136 aa, Zea mays
  Clone ID: TF_LIB5027-040-B1-XP1-A5.pep
MARTKQTSRKSTGGKAPRKQLATKAARKSAPATGGVKKPHRFRPGTVALREIRKYQKSTELLIRKLPFQRLVREIAQDFKTDLRFQSSAVSALQEAAEAYLVGLFEDTNLCAIHAKRVTIMPKDIQLARRIRGERA

SEQ ID NO: 6895 - protein, 136 aa, Zea mays; identical to SEQ ID NO: 6888
  Clone ID: TF_LIB5116-032-A1-PF1-F7.pep

SEQ ID NO: 6896 - protein, 136 aa, Zea mays; identical to SEQ ID NO: 6888
  Clone ID: TF_ZmC653_106.pep

SEQ ID NO: 6897 - protein, 136 aa, Zea mays; identical to SEQ ID NO: 6888
  Clone ID: TF_ZmC653_48.pep

SEQ ID NO: 6898 - protein, 136 aa, Zea mays; identical to SEQ ID NO: 6888
  Clone ID: TF_ZmC653_70.pep

SEQ ID NO: 6899 - protein, 136 aa, Zea mays; identical to SEQ ID NO: 6888
  Clone ID: TF_ZmC653_79.pep

SEQ ID NO: 6900 - protein, 136 aa, Zea mays; identical to SEQ ID NO: 6888
  Clone ID: TF_ZmC653_85.pep

SEQ ID NO: 6901 - protein, 136 aa, Zea mays; identical to SEQ ID NO: 6888
  Clone ID: TF_ZmC653_92.pep

SEQ ID NO: 6902 - protein, 136 aa, Zea mays; identical to SEQ ID NO: 6888
  Clone ID: TF_ZmC825079_1.pep

SEQ ID NO: 6903 - protein, 159 aa, Zea mays
  Clone ID: TF_LIB5116-061-A1-PF1-F4.pep
MDASATGAGAKAKKGAAGRKAGGPRKKSVTRSVKAGLQFPVGRIGRYLKNGRYAKRVGTGAPVYLAAVLEYLAAELLELAGNAAKDNKKSRIVPRHLLLAVRNDQELGRLLAGVTIAHGGVLPNINPVLLPKRTAEKEPKEGKSPKKVAKSPKKADKKA

SEQ ID NO: 6904 - protein, 164 aa, Zea mays
  unsure (1)..(164): unsure at all Xaa locations
  Clone ID: TF_LIB4730-094-Q1-K1-D12.pep
LSLAADARSKPSARLPTVPMDRTMHMERKSTGGKAPMKQLVTKAARKSASATCVVNKPHRFRPGTVALRXIRKNQKSTELLIHKLPFQCLERXIAQYFKTDLLFQSSAVAALQEASEDYLVGLXEDTNLCSIHTKRITIMPKDIQLVRRIRGERAYAVLSVHVE

SEQ ID NO: 6905 - protein, 96 aa, Zea mays
  unsure (1)..(96): unsure at all Xaa locations
  Clone ID: TF_LIB3356-007-P1-K1-D11.pep
MAPKAXKKPVAKKPAEEEPAVEKAPAGKKPKAEKRVPAGKSVARXGGEGKKGREKGKNSVETYKIYILKVLKQVHPDHGISFKXMVIMNSLINDIF

SEQ ID NO: 6906 - protein, 80 aa, Zea mays
  unsure (1)..(80): unsure at all Xaa locations
  Clone ID: TF_LIB5025-057-A1-XP1-H11.pep
GSQEKRTVPPQXGAANSCPRGRAQSKKPHRFRPGTELLREIRKYKNSSQLVIRKLPLQRLAREIAQNFKSDLRFQSSSGS

SEQ ID NO: 6907 - protein, 125 aa, Zea mays
  unsure (1)..(125): unsure at all Xaa locations
  Clone ID: TF_LIB4185-038-R1-K1-A7.pep
PGGKAPRKQLATKAGPKFAPSTGGVKKPPRFRPGTVALREIPQFPKSPELFIPKLPFQRLVREIAQDFKTDLRFQNFSVSPLQEAAXASPVGLFEDPNLWALPAKGVPLMAKDIQLAPRLPGERA

SEQ ID NO: 6908 - protein, 118 aa, Zea mays
  Clone ID: TF_ZmC653_24.pep
MARTKQTARKSTGGKAPRKQLATKAARKSAPATGGVKKPHRFRPGTVALREIRKYQKSTELLIRKLPFQRLVREIAQDFKTDLRFQSSAVAALQEAAKRVTIMPKDIQLARRIRGERA

SEQ ID NO: 6909 - protein, 136 aa, Zea mays
  Clone ID: TF_LIB5026-023-B1-XP1-G7.pep
MARTKQTARKSTGGKAPRKQLATKAARKSAPTTGGVKKPHRYRPGTVALREIRKYQKSTELLIRKLPFQRLVREIAQDFKTDLRFFFLAALPLQEAAEAYLVGLFEDTNLCAIHVKCVTIMPKDIQFARRIRAECA

SEQ ID NO: 6910 - protein, 135 aa, Zea mays
  unsure (1)..(135): unsure at all Xaa locations
  Clone ID: TF_9794541.pep
ARTKQTARKXTGGKAPRKQLATKAARKSAPATGGVKKPHRFRPGTVALREIRKYQKSTELLIRKLPFQRLVREIAQDFKTDLRFQSSAVAALQEASEAYLVGLFEDTNLCAIHAKRVTIMPKDIQLARRIRGERA

SEQ ID NO: 6911 - protein, 144 aa, Zea mays
  Clone ID: TF_LIB4730-042-R1-K1-G12.pep
MARTKQTARKSAGGKAPRKQLATKAARKSAPATGGVKKPHRFRPGTVALREIRKYQKSTELLIRKLPFQRLVREIAQDFKTDLRFQSSAVAALQEASEAYLVGLFEDTNLCAIHAKRVTIMPKDIQLARRIRGERSLASSRWRW

SEQ ID NO: 6912 - protein, 136 aa, Zea mays
  Clone ID: TF_LIB4975-022-R1-K1-H9.pep
MARTKQTARNSTDDKAPRKQLATKAARKSAPATGGVKKPHRFRPGTVALREIRKYQKSTELLIRKLPFQRLVREIAQDFKTDLRFQSSAVAALQEASEAYLVGLFEDTNLCAIHAKRVTIMPKDIQLARRIRGERA

SEQ ID NO: 6913 - protein, 136 aa, Zea mays
  Clone ID: TF_ZmC653_110.pep
MARTKQTARKSTGGKAPRKQLATKAARKSAPATGGVKKPHRFRPGTVALREIRKYQKSTELLIRKLPFQRLVREIAQDFKTDLRFQSSAVAALQEASEAYLVGLFEDTNLCAIHAKRVTIMPKDIQLARRIRGERA

SEQ ID NO: 6914 - protein, 136 aa, Zea mays; identical to SEQ ID NO: 6913
  Clone ID: TF_ZmC653_111.pep

SEQ ID NO: 6915 - protein, 155 aa, Zea mays
  Clone ID: TF_ZmC653_39.pep
QSLAADPRATQSASLPTVPMARTKQTARKSTGGKAPRKQLATKAARKSAPATGGVKKPHRFRPGTVALREIRKYQKSTELLIRKLPFQRLVREIAQDFKTDLRFQSSAVAALQEASEAYLVGLFEDTNLCAIHAKRVTIMPKDIQLARRIRGERA

SEQ ID NO: 6916 - protein, 136 aa, Zea mays; identical to SEQ ID NO: 6913
  Clone ID: TF_ZmC653_58.pep

SEQ ID NO: 6917 - protein, 136 aa, Zea mays; identical to SEQ ID NO: 6913
  Clone ID: TF_ZmC653_63.pep

SEQ ID NO: 6918 - protein, 155 aa, Zea mays
  Clone ID: TF_ZmC653_67.pep
QSLAADPRAKQSASLPTVPMARTKQTARKSTGGKAPRKQLATKAARKSAPATGGVKKPHRFRPGTVALREIRKYQKSTELLIRKLPFQRLVREIAQDFKTDLRFQSSAVAALQEASEAYLVGLFEDTNLCAIHAKRVTIMPKDIQLARRIRGERA

SEQ ID NO: 6919 - protein, 136 aa, Zea mays; identical to SEQ ID NO: 6913
  Clone ID: TF_ZmC653_72.pep

SEQ ID NO: 6920 - protein, 136 aa, Zea mays; identical to SEQ ID NO: 6913
  Clone ID: TF_ZmC653_73.pep

SEQ ID NO: 6921 - protein, 136 aa, Zea mays; identical to SEQ ID NO: 6913
  Clone ID: TF_ZmC653_89.pep

SEQ ID NO: 6922 - protein, 136 aa, Zea mays; identical to SEQ ID NO: 6913
  Clone ID: TF_ZmC653_96.pep

SEQ ID NO: 6923 - protein, 94 aa, Zea mays
  Clone ID: TF_LIB3357-025-P1-K1-A5.pep
MDASGARSKGKKGAVARKALGRSKKSMTLSGMAGLQFHGRRIRRYLKKGRYSQRVGTARPVYICCFLNYLSSDGLELSRNTSRDNMNTRVMPRH

SEQ ID NO: 6924 - protein, 101 aa, Zea mays
  Clone ID: TF_LIB3357-054-P1-K1-G3.pep
NPVEEEPADEKTTVWKKPKAENRIPVGKSACKEGGEGKRGKMIGKKSVVTYKIYIFKVLKQVHPYIGISSKAMCIMISFINDIFDKLAGEDANLARYNKKP

SEQ ID NO: 6925 - protein, 98 aa, Zea mays
  unsure (1)..(98): unsure at all Xaa locations
  Clone ID: TF_LIB4730-016-R1-K1-F7.pep
MAPTAEKKPAEKKPADEKAEKQPGADMRAPSKEGGEKMGQKKAMKSVETYKIYICXVLSHVHPDIGISTRAMSIMNSLMNEIFEKLGAAAVNLVRSSR

SEQ ID NO: 6926 - protein, 168 aa, Zea mays
  unsure (1)..(168): unsure at all Xaa locations
  Clone ID: TF_LIB4730-031-R1-K1-A2.pep
VPSGVPAGQTNYISHIHRRRWLILALSTECTMARTKHTKRTSTDGTAPRKQLTNKATSKSGTSTAGAKKPNRFHPFTAGLGEIRKYXQKSTEMIMLMMPLQRFQREIGQNFKNDLSFQCFDVSALDEVDEAYLVXLLEDTNLCNIHAKHVNIMPMDIQVMHLMRRKRA

SEQ ID NO: 6927 - protein, 58 aa, Zea mays
  Clone ID: TF_LIB3597-024-Q1-K6-E2.pep
LSSSSRARARQSAPAPKKAPRSGDQGAEEDGNKRKRSRKESYSVYVYKVLKQVHPDTG

SEQ ID NO: 6928 - protein, 98 aa, Zea mays
  Clone ID: TF_LIB3079-041-Q1-K1-C3.pep
MFAHRKGVKGLGKGGPNRHRKALRYNIERITKPAIQLLARRGCVNRISGLIYDETRGVLKIFLENVIRDAGTYTEHARRKTVTDMDVDYALKRPGRTL

SEQ ID NO: 6929 - protein, 86 aa, Zea mays
  unsure (1)..(86): unsure at all Xaa locations
  Clone ID: TF_LIB3279-004-P1-K1-H7.pep
MVNTTVNEELADKIALVNKKPKAEKRVYAGKYATNECGXGQEGLXKGKKSVETYXIYIFKVLKQVYPDIGISFKVMFIMNSFINDI

SEQ ID NO: 6930 - protein, 183 aa, Zea mays
  unsure (1)..(183): unsure at all Xaa locations
  Clone ID: TF_LIB3067-005-Q1-K1-G10.F2.pep
KAPTGKKPKPKKPPPAGKPAGKEAGEGKKGKKKAKKPGKTNKTNTXKXQKQAHPDXGXPPKARPNKNPXTNDXXEKXAAEPAKRARKNKKPTATPRENQTAGRXAPPGEXAKHAVPEGTKPATKXTPXKXXKNKAARRRKTGPXXKEKRKXGXKRPAPXXAVKTEEXWPTPXWXXATLPQXTX

SEQ ID NO: 6931 - protein, 172 aa, Zea mays
  unsure (1)..(172): unsure at all Xaa locations
  Clone ID: TF_LIB4742-143-Q1-K1-C6.pep
MQASAPVPRVHAMKGAAARKGGGARNKLVTTSVQAGLQFPXGRIGRHLNKARYAQSVGTVVPVYLASVLEYLAAEVLGAGSLFVPRYIKKTRIIPRHVLLVIRNDXELGNLLSGVTIAHGGVLPNINPVLLPKKTAXNAAPQEAKSSMNAATSPKKAYRAAFTVVMLNARVQ

SEQ ID NO: 6932 - protein, 111 aa, Zea mays
  unsure (1)..(111): unsure at all Xaa locations
  Clone ID: TF_LIB4976-005-R1-M1-E12.pep
SATKEADEGNRRKKKGKKSVEASKFYIFKLLKQVHPGIGTSSKPMSIMNSFLSDILEKLVSESHKLARYSKKPAITSREIQTSVRLVLPGELAKHXAVSEGAKSVTKFTSA

SEQ ID NO: 6933 - protein, 149 aa, Zea mays
  unsure (1)..(149): unsure at all Xaa locations
  Clone ID: TF_ZmC653_29.pep
QSLAADPRAKQSASPLRTVPMARTKQTARKSTGGKAPRKQLATKAARKSAPATGGVKKPHRXREIRKYQKSTELLIRKLPFQRLVREIAQDFKTDLRFQSSAVAALQEASEAYLVGLFEDTNLCAIHAKRVTIMPKDIQLARRIRGERA

SEQ ID NO: 6934 - protein, 146 aa, Zea mays
  unsure (1)..(146): unsure at all Xaa locations
  Clone ID: TF_LIB4979-098-A1-K1-E4.pep
MDRTKHTVXKSTGDKAPRKQLDTKAMRKSAPATGGVNKAHRFRPGTVXLREIRKYQKSTELLIRKLPVQRLVREIAQDFKTDLRFQSSAVAALQEASEAYLVGLFEDTNLCTIHAKRVTIMTKDIQLARRIREERAYAYSRCRRKL

SEQ ID NO: 6935 - protein, 136 aa, Zea mays
  unsure (1)..(136): unsure at all Xaa locations
  Clone ID: TF_LIB4185-043-R1-K1-A9.pep
MARTKQTARKSTGGKAPRKQLATKAARKSAPATGGVKKPHRFRPGTVALREIRKYQKSTELLIRKLPFQRLVREIAQDFKTDLRFQSSPVSALQEAAXAYLVGLFEDTNLCAIHAKRVPIMPKDIQLAPRIPGERA

SEQ ID NO: 6936 - protein, 144 aa, Zea mays
  Clone ID: TF_LIB4762-059-R1-K1-C11.pep
MARTKQTARKSTGGKAPRKQLATKAARKSAPATGGVKKPHRFRPGTVALREIRKYQKSTELLIRKLPFQRLVREIAQDFKTDLRFQSFAVSALQEAAEAYLVGLFEDTNLCAIHAKRRTIMPKDIQLARRIRGEKALSEASFSH

SEQ ID NO: 6937 - protein, 136 aa, Zea mays
  Clone ID: TF_JC-ZMSHLIB3569P021H08_FLI.pep
MARTKQTARKSTGGKAPRKQLATKAARKSAPATGGVKKPHRFRPGTVALREIRKYQKSTELLIRKLPFQRLVREIAQDFKTDLRFQSSAVAALQEAAEAYLVGLFEDTNLCAIHAKRVTIMPKDIQLARRIRGERA

SEQ ID NO: 6938 - protein, 136 aa, Zea mays; identical to SEQ ID NO: 6937
  Clone ID: TF_LIB4729-084-Q2-K1-F4.pep

SEQ ID NO: 6939 - protein, 167 aa, Zea mays
  Clone ID: TF_LIB4729-135-A1-K1-E10.pep
WDLEPAGPSSIRFPFQSFDRTAPPALTQLSPMARTKQTARKSTGGKAPRKQLATKAARKSAPATGGVKKPHRFRPGTVALREIRKYQKSTELLIRKLPFQRLVREIAQDFKTDLRFQSSAVAALQEAAEAYLVGLFEDTNLCAIHAKRVTIMPKDIQLARRIRGERA

SEQ ID NO: 6940 - protein, 136 aa, Zea mays; identical to SEQ ID NO: 6937
  Clone ID: TF_LIB4979-026-A1-K1-F2.pep

SEQ ID NO: 6941 - protein, 136 aa, Zea mays; identical to SEQ ID NO: 6937
  Clone ID: TF_LIB4979-075-A1-K1-H8.pep

SEQ ID NO: 6942 - protein, 169 aa, Zea mays
  Clone ID: TF_ZmC653_100.pep
LEAGRAGIHSSHPISNFKSFDRAAPPALSQLSPMARTKQTARKSTGGKAPRKQLATKAARKSAPATGGVKKPHRFRPGTVALREIRKYQKSTELLIRKLPFQRLVREIAQDFKTDLRFQSSAVAALQEAAEAYLVGLFEDTNLCAIHAKRVTIMPKDIQLARRIRGERA

SEQ ID NO: 6943 - protein, 188 aa, Zea mays
  Clone ID: TF_ZmC653_102.pep
GVRAPRARAIGSARPADSPRRAASKLPYSSHPISHFKSFDRTAPPALTQLSPMARTKQTARKSTGGKAPRKQLATKAARKSAPATGGVKKPHRFRPGTVALREIRKYQKSTELLIRKLPFQRLVREIAQDFKTDLRFQSSAVAALQEAAEAYLVGLFEDTNLCAIHAKRVTIMPKDIQLARRIRGERA

SEQ ID NO: 6944 - protein, 136 aa, Zea mays; identical to SEQ ID NO: 6937
  Clone ID: TF_ZmC653_103.pep

SEQ ID NO: 6945 - protein, 136 aa, Zea mays; identical to SEQ ID NO: 6937
  Clone ID: TF_ZmC653_104.pep

SEQ ID NO: 6946 - protein, 136 aa, Zea mays; identical to SEQ ID NO: 6937
  Clone ID: TF_ZmC653_109.pep

SEQ ID NO: 6947 - protein, 167 aa, Zea mays
  Clone ID: TF_ZmC653_27.pep
PPRLAGIPAHIRFLFQSFDRTAPPALSPLSPMARTKQTARKSTGGKAPRKQLATKAARKSAPATGGVKKPHRFRPGTVALREIRKYQKSTELLIRKLPFQRLVREIAQDFKTDLRFQSSAVAALQEAAEAYLVGLFEDTNLCAIHAKRVTIMPKDIQLARRIRGERA

SEQ ID NO: 6948 - protein, 165 aa, Zea mays
  Clone ID: TF_ZmC653_32.pep
PAGIHSSHPISYFKSFDRAAPPALSQLSPMARTKQTARKSTGGKAPRKQLATKAARKSAPATGGVKKPHRFRPGTVALREIRKYQKSTELLIRKLPFQRLVREIAQDFKTDLRFQSSAVAALQEAAEAYLVGLFEDTNLCAIHAKRVTIMPKDIQLARRIRGERA

SEQ ID NO: 6949 - protein, 136 aa, Zea mays; identical to SEQ ID NO: 6937
  Clone ID: TF_ZmC653_34.pep

SEQ ID NO: 6950 - protein, 169 aa, Zea mays
  Clone ID: TF_ZmC653_37.pep
HWVPRGRPGHTRILNLPLPPDPGLQTAHSSPLRMARTKQTARKSTGGKAPRKQLATKAARKSAPATGGVKKPHRFRPGTVALREIRKYQKSTELLIRKLPFQRLVREIAQDFKTDLRFQSSAVAALQEAAEAYLVGLFEDTNLCAIHAKRVTIMPKDIQLARRIRGERA

SEQ ID NO: 6951 - protein, 136 aa, Zea mays; identical to SEQ ID NO: 6937
  Clone ID: TF_ZmC653_41.pep

SEQ ID NO: 6952 - protein, 169 aa, Zea mays
  Clone ID: TF_ZmC653_43.pep
GKKKQKKKSNPHPTSLIHSSQPCSCLESSLAAPTARTKQTARKSTGGKAPRKQLATKAARKSAPATGGVKKPHRFRPGTVALREIRKYQKSTELLIRKLPFQRLVREIAQDFKTDLRFQSSAVAALQEAAEAYLVGLFEDTNLCAIHAKRVTIMPKDIQLARRIRGERA

SEQ ID NO: 6953 - protein, 136 aa, Zea mays; identical to SEQ ID NO: 6937
  Clone ID: TF_ZmC653_47.pep

SEQ ID NO: 6954 - protein, 157 aa, Zea mays
  Clone ID: TF_ZmC653_50.pep
ARAHFESFDRAAPPALSQFSPMARTKQTARKSTGGKAPRKQLATKAARKSAPATGGVKKPHRFRPGTVALREIRKYQKSTELLIRKLPFQRLVREIAQDFKTDLRFQSSAVAALQEAAEAYLVGLFEDTNLCAIHAKRVTIMPKDIQLARRIRGERA

SEQ ID NO: 6955 - protein, 161 aa, Zea mays
  Clone ID: TF_ZmC653_51.pep
NLPRTSSPNTVKHAPASTRTSAPTPMARTKQTARKSTGGKAPRKQLATKAARKSAPATGGVKKPHRFRPGTVALREIRKYQKSTELLIRKLPFQRLVREIAQDFKTDLRFQSSAVAALQEAAEAYLVGLFEDTNLCAIHAKRVTIMPKDIQLARRIRGERA

SEQ ID NO: 6956 - protein, 136 aa, Zea mays; identical to SEQ ID NO: 6937
  Clone ID: TF_ZmC653_53.pep

SEQ ID NO: 6957 - protein, 136 aa, Zea mays; identical to SEQ ID NO: 6937
  Clone ID: TF_ZmC653_55.pep

SEQ ID NO: 6958 - protein, 136 aa, Zea mays; identical to SEQ ID NO: 6937
  Clone ID: TF_ZmC653_56.pep

SEQ ID NO: 6959 - protein, 136 aa, Zea mays; identical to SEQ ID NO: 6937
  Clone ID: TF_ZmC653_57.pep

SEQ ID NO: 6960 - protein, 136 aa, Zea mays; identical to SEQ ID NO: 6937
  Clone ID: TF_ZmC653_60.pep

SEQ ID NO: 6961 - protein, 136 aa, Zea mays; identical to SEQ ID NO: 6937
  Clone ID: TF_ZmC653_61.pep

SEQ ID NO: 6962 - protein, 136 aa, Zea mays; identical to SEQ ID NO: 6937
  Clone ID: TF_ZmC653_62.pep

SEQ ID NO: 6963 - protein, 136 aa, Zea mays; identical to SEQ ID NO: 6937
  Clone ID: TF_ZmC653_64.pep

SEQ ID NO: 6964 - protein, 166 aa, Zea mays
  Clone ID: TF_ZmC653_65.pep
RTRGSPRKSTPPQFHAATNSPSSAPSIKAPMARTKQTARKSTGGKAPRKQLATKAARKSAPATGGVKKPHRFRPGTVALREIRKYQKSTELLIRKLPFQRLVREIAQDFKTDLRFQSSAVAALQEAAEAYLVGLFEDTNLCAIHAKRVTIMPKDIQLARRIRGERA

SEQ ID NO: 6965 - protein, 136 aa, Zea mays; identical to SEQ ID NO: 6937
  Clone ID: TF_ZmC653_68.pep

SEQ ID NO: 6966 - protein, 136 aa, Zea mays; identical to SEQ ID NO: 6937
  Clone ID: TF_ZmC653_69.pep

SEQ ID NO: 6967 - protein, 136 aa, Zea mays; identical to SEQ ID NO: 6937
  Clone ID: TF_ZmC653_71.pep

SEQ ID NO: 6968 - protein, 136 aa, Zea mays; identical to SEQ ID NO: 6937
  Clone ID: TF_ZmC653_75.pep

SEQ ID NO: 6969 - protein, 174 aa, Zea mays
  Clone ID: TF_ZmC653_76.pep
HWVPRGRPGDTRILQSALAAAADGSRSVDCSLLYAPLRMARTKQTARKSTGGKAPRKQLATKAARKSAPATGGVKKPHRFRPGTVALREIRKYQKSTELLIRKLPFQRLVREIAQDFKTDLRFQSSAVAALQEAAEAYLVGLFEDTNLCAIHAKRVTIMPKDIQLARRIRGERA

SEQ ID NO: 6970 - protein, 136 aa, Zea mays; identical to SEQ ID NO: 6937
  Clone ID: TF_ZmC653_78.pep

SEQ ID NO: 6971 - protein, 136 aa, Zea mays; identical to SEQ ID NO: 6937
  Clone ID: TF_ZmC653_80.pep

SEQ ID NO: 6972 - protein, 136 aa, Zea mays; identical to SEQ ID NO: 6937
  Clone ID: TF_ZmC653_81.pep

SEQ ID NO: 6973 - protein, 136 aa, Zea mays; identical to SEQ ID NO: 6937
  Clone ID: TF_ZmC653_83.pep

SEQ ID NO: 6974 - protein, 171 aa, Zea mays
  Clone ID: TF_ZmC653_84.pep
RPGESRYPTRILQSALAAAARSRSVDCSLLSAPVRMARTKQTARKSTGGKAPRKQLATKAARKSAPATGGVKKPHRFRPGTVALREIRKYQKSTELLIRKLPFQRLVREIAQDFKTDLRFQSSAVAALQEAAEAYLVGLFEDTNLCAIHAKRVTIMPKDIQLARRIRGERA

SEQ ID NO: 6975 - protein, 164 aa, Zea mays
  Clone ID: TF_ZmC653_86.pep
GRIHSSHPISNFKSFDRAAPPALSQLSPMARTKQTARKSTGGKAPRKQLATKAARKSAPATGGVKKPHRFRPGTVALREIRKYQKSTELLIRKLPFQRLVREIAQDFKTDLRFQSSAVAALQEAAEAYLVGLFEDTNLCAIHAKRVTIMPKDIQLARRIRGERA

SEQ ID NO: 6976 - protein, 136 aa, Zea mays; identical to SEQ ID NO: 6937
  Clone ID: TF_ZmC653_87.pep

SEQ ID NO: 6977 - protein, 136 aa, Zea mays; identical to SEQ ID NO: 6937
  Clone ID: TF_ZmC653_88.pep

SEQ ID NO: 6978 - protein, 136 aa, Zea mays; identical to SEQ ID NO: 6937
  Clone ID: TF_ZmC653_90.pep

SEQ ID NO: 6979 - protein, 136 aa, Zea mays; identical to SEQ ID NO: 6937
  Clone ID: TF_ZmC653_91.pep

SEQ ID NO: 6980 - protein, 136 aa, Zea mays; identical to SEQ ID NO: 6937
  Clone ID: TF_ZmC653_93.pep

SEQ ID NO: 6981 - protein, 160 aa, Zea mays
  Clone ID: TF_ZmC653_94.pep
GVPDPHTHPSSQPYSCLESSLAAPMARTKQTARKSTGGKAPRKQLATKAARKSAPATGGVKKPHRFRPGTVALREIRKYQKSTELLIRKLPFQRLVREIAQDFKTDLRFQSSAVAALQEAAEAYLVGLFEDTNLCAIHAKRVTIMPKDIQLARRIRGERA

SEQ ID NO: 6982 - protein, 136 aa, Zea mays; identical to SEQ ID NO: 6937
  Clone ID: TF_ZmC653_95.pep

SEQ ID NO: 6983 - protein, 136 aa, Zea mays; identical to SEQ ID NO: 6937
  Clone ID: TF_ZmC653_97.pep

SEQ ID NO: 6984 - protein, 136 aa, Zea mays; identical to SEQ ID NO: 6937
  Clone ID: TF_ZmC653_98.pep

SEQ ID NO: 6985 - protein, 165 aa, Zea mays
  Clone ID: TF_ZmC653_99.pep
ERAIHSSHPISNFKSFDRAAPPALSQLSPMARTKQTARKSTGGKAPRKQLATKAARKSAPATGGVKKPHRFRPGTVALREIRKYQKSTELLIRKLPFQRLVREIAQDFKTDLRFQSSAVAALQEAAEAYLVGLFEDTNLCAIHAKRVTIMPKDIQLARRIRGERA

SEQ ID NO: 6986 - protein, 134 aa, Zea mays
  Clone ID: TF_ZmC593337_2.pep
MTGGGKSGGKASGSKNAQSRSSKAGLAFPVGRVHRLLRKGNYAQRVGAGAPVYLAAVLEYLAAEILELAGNAARDNKKTRIIPRHLQLAIRNDEELNKLLGHVTIAQGGVLPNIHQNLLPKKTGKTGKTSSMEL

SEQ ID NO: 6987 - protein, 328 aa, Zea mays
  Clone ID: TF_ZmC20163_2.pep
STELLIRKLPFQRLVREIGQEFKTDLRFQSSASPAARGEIDTIFVGESGSQMRDSALSLTKCLAQTAQKTFSDFEEAVEKDATKNIHTDGTVHPLTSYVINYVKFLFDYQSTLKQLFQEFKEDGTGSELAAVTMKIMQALQNNLEAKAKQYKDPALMHIFLMNNIHYIVKSVRRSEAKDLLGDDWIQRHRRIVQQNANQYRRIAWAKVLQCLSGQGLTSSGGSGHVGSDGGNSSGASRTAVKERFRSFNVLFEEIYHKQCGWSVPDTELRESLRLAVAEILLPAYRSFIKRFGPLIENSKAPGKYVKHTPEQLELLLGNLFEGKQERA

SEQ ID NO: 6988 - protein, 125 aa, Zea mays
  unsure (1)..(125): unsure at all Xaa locations
  Clone ID: TF_LIB3357-001-P1-K1-H12.pep
ATLRSNKNSRPTQSIQEGALFGYRRRVLKAPKGLKKPXRPKPAGEEHRGEKALAEKNPTAEKRVPATKSRCKEAGKNKGXKKAKMSVETYKTYIFQVLGHAHPDIGIWLKAMIMMNSFINDIFEN

SEQ ID NO: 6989 - protein, 180 aa, Zea mays
  Clone ID: TF_LIB4762-134-Q1-K1-D11.pep
KVKYIYFKKKKKKKKKKKKKKKKKKKKKKNTPNPKSFIQSSKPNSGLKSSLAVPRARTKKTERKSTGGKAPRKKLATKVGRKSAPATGGGKKPHRFRPGIVGLREIRKNQKSTELLIRKFPFQGLVRKIAKNFKTDREVPVPPAVAGLKKAAKANLGGFFKDTNLCAIHAKGVIIMPKDI

SEQ ID NO: 6990 - protein, 146 aa, Zea mays
  unsure (1)..(146): unsure at all Xaa locations
  Clone ID: TF_LIB3689-232-Q1-N6-A8.pep
EGGEKKGKKKAKKRVEAFKISFFKVFKKGPPHMGIFSKAMSLMNSFIKGIFXKLAGEAPKLGGFNKKPPLPFRGIQTSGGLVLPGGLAKHPVFEGTKAVPKFPSNWGGWGVPGFFKRVFFWVLFPVPPPTRLGGRLPALLIRGAGL

SEQ ID NO: 6991 - protein, 78 aa, Zea mays
  unsure (1)..(78): unsure at all Xaa locations
  Clone ID: TF_700346422H1.pep
MDDTGTGAGGKAKKGAAGRKVGGPRKKSVTRSVKAELPFPVGRIGRYLKKGRYAQAYGSGAHVXLADVLEILAAEVLE

SEQ ID NO: 6992 - protein, 82 aa, Zea mays
  Clone ID: TF_LIB3689-237-Q1-N6-G2.pep
KVLKQVHPDMGISSRAMSIMNSFINDIFEKVAGEAPKFARYNKKPPFPSREIQTSVGLVLPGELAKHPVFGGPKAVPKFPSS

SEQ ID NO: 6993 - protein, 159 aa, Zea mays
  unsure (1)..(159): unsure at all Xaa locations
  Clone ID: TF_LIB4569-012-Q1-K1-G3.pep
MARTKQTARKSTGGKAPRKQLATKAARKSAPTTGGVKKPHRYXRPGTVALREIRKYQKSTELLIRKLPFQRLVREIAQDFKTDLRFQXSHAVLPXKEAXAEAYLVGLXFEDTNLCAIHAKRVTIIPKDIQLARRIRGERALVSRARPQWRRRDWKKANL

SEQ ID NO: 6994 - protein, 129 aa, Zea mays
  unsure (1)..(129): unsure at all Xaa locations
  Clone ID: TF_511379.pep
RKSTGGKAPRKQLXTKAARKFAPTTGGVKKPHRYRPGTFALRKIRKYQKSTELLIRKLPFQRLVREIAQDFKTNLXFQSHAVLALQEAAEAYLVGLFKDTNLCXIHAKRXXIMPKDHSAWQXRFRGERA

SEQ ID NO: 6995 - protein, 112 aa, Zea mays
  unsure (1)..(112): unsure at all Xaa locations
  Clone ID: TF_LIB3067-008-Q1-K1-H9.R2.pep
SCPPRHGARGERGARKKGKKSVEYLXIYIFNVLKQVHPDIGICFKAMSIMNSFINDIFEKLGAEAAKLVRYNKKPTITCREIHTSVRLVLQGELAKHALFQGTKGRTKFTSF

SEQ ID NO: 6996 - protein, 137 aa, Zea mays
  unsure (1)..(137): unsure at all Xaa locations
  Clone ID: TF_LIB4665-006-R1-N1-F6.pep
MAPKAEKKPPEKKPAEEKAEKKPRAEKRVPSKEGGEKKGKKKAKKSVETYKIYIFKVLKQGPPDIGILSKAMSIMNSFINDIFXKLPPEAAKFARYNKKPPIPSREIQTSVGLVLPGELAKHPVSEGAKAVSKFTSF

SEQ ID NO: 6997 - protein, 136 aa, Zea mays
  Clone ID: TF_LIB4742-061-R1-K1-F2.pep
MARTKQTARKSTGGKAPRKQLATKAARKSAPTTGGVKKPHRYRPGTVALREIRKYHKSTELLIRKLPFQRLVREIAQDFKTDLRFQRHAVLTLQEVAEAYLVGLFKDTNLCAIHAKCVTIMTKDIQLARLIRGESA

SEQ ID NO: 6998 - protein, 157 aa, Zea mays
  Clone ID: TF_LIB4764-133-Q1-K1-E5.pep
MARTKQTARKSTGGKAPRKQLATKAARKSAPATGGVKKPHCFRPGTVALREIRKYQKSTELLIRKLPFQRLVREIAQDFKTDLRFRSSAVAALQEASEAYLVGLFEDTNLCAIHAKRVTIMPKDIQLARRIRWGEGLGVVPGEVGSSSRPFLSSLSG

SEQ ID NO: 6999 - protein, 135 aa, Zea mays
  Clone ID: TF_ZmC653_36.pep
MARTKQTARKSTGGKAPRKQLAKAARKSAPATGGVKKPHRFRPGTVALREIRKYQKSTELLIRKLPFQRLVREIAQDFKTDLRFQSSAVAALQEAAEAYLVGLFEDTNLCAIHAKRVTIMPKDIQLARRIRGERA

SEQ ID NO: 7000 - protein, 146 aa, Zea mays
  Clone ID: TF_ZmC263912_1.pep
MAGRKGGDRKKAVTRSVKAGLQFPVGRIGRYLKKGRYAQRVGSGAPVYLAAVLEYLAAEMLELAGNAAKDNKKTRIIPRHLLLAVRNDQELGRLLAGVTIAHGGVIPNINSVLLPKKSPAAAEKEAKSPKKKTSTKSPKKKVAAKE

SEQ ID NO: 7001 - protein, 134 aa, Zea mays
  Clone ID: TF_LIB5075-003-R1-XP1-C9.pep
MTGGKSGGKASGSKSSAQSRSSKAGLAFPVGRVHRLLRKGNYAQRVGAGAPVYLAAVLEYLAAEILELAGNAARDNKKTRIIPRHLQLAIRNDEELNKLLGHVTIAQGGVLPNIHQNLLPKKTAKPGKGPSQEL

SEQ ID NO: 7002 - protein, 167 aa, Zea mays
  unsure (1)..(167): unsure at all Xaa locations
  Clone ID: TF_LIB4766-061-R1-K1-C1.pep
MAARDEAIADAVPNKDISRTFQAGLQLPXGGISAQILKIMKKRERMGXAAPPVYLSADLEYLDAXGLQLGANSARHNKNTRIVPRIIQITTTNNKKLTKLLGAATITSGRSMPQHRTRSSSPTTLARPTPPPSMTITTEADHCRRGIHYRLVSYDTTQIVSMSLRAR

SEQ ID NO: 7003 - protein, 111 aa, Zea mays
  unsure (1)..(111): unsure at all Xaa locations
  Clone ID: TF_LIB3076-002-Q1-K1-A4.pep
MAPKADKKPAAKKPAEEEPATEKAEKAPAGKKPKAEKRLPASKSAGKEGGEGKKGKKKAKKSVETYKIYNLKGLKXVHPDIGISCKGMSIMNFFINDIFEKLAGESGKLAR

SEQ ID NO: 7004 - protein, 109 aa, Zea mays
  unsure (1)..(109): unsure at all Xaa locations
  Clone ID: TF_LIB4979-087-A1-K1-C7.pep
MNSSGTETRDKENKGACXHNGGVTMNNSASRSVSAALQFHGGRIGSYLKKGRYAQRGGTGAPYYLAAAIKYLIAEVLQLAENAGRYNRNTGMIARHVXLAIRNDEELGK

SEQ ID NO: 7005 - protein, 100 aa, Zea mays
  unsure (1)..(100): unsure at all Xaa locations
  Clone ID: TF_LIB3067-019-Q1-K1-C12.pep
KAPYWKKPKADKLVLSGKSSXKEYVKVKRGKKKGKNSVXTYKIYIFKVLNHVHPDIGIYSKVISIMNSLINDIFEKLDAEAVKLARYNKKPTITLLEIHT

SEQ ID NO: 7006 - protein, 95 aa, Zea mays
  unsure (1)..(95): unsure at all Xaa locations
  Clone ID: TF_LIB3067-056-Q1-K1-F12.pep
QSLPPNPVPIQTPCPFVPVRLARPNQPARNSIAGKPPRNHLPTKRGPNVARDTGRLKNXHRFRPGTVSLREIRKYQKSTELLIRKLPFQRLVREI

SEQ ID NO: 7007 - protein, 136 aa, Zea mays
  unsure (1)..(136): unsure at all Xaa locations
  Clone ID: TF_LIB4732-093-Q1-K1-H8.pep
ARIKETARKSDGXGRLPGKHVAAEGARKSAPTTGGGKKPHRYRPGSVALREIRKDHRETEVLIRKLPXRSLPREFAEDFRTDWRFQRHARMPLQGVVRHTVVCCEENNEMXAWPASGVIMMAKDIYLXRRIRGQNT

SEQ ID NO: 7008 - protein, 138 aa, Zea mays
  unsure (1)..(138): unsure at all Xaa locations
  Clone ID: TF_LIB4729-031-R1-K1-A12.pep
MARTKQTARKSTGXGKAPRKQLATKAERKWGPDTGXGVKMPHRFRPGTVALREIRTYQKSTELLMRKLPFQRLMREIAQDFKTDLRFQSSAVXALQEAAEAYLVGLFEDTNLCAIHAMRVTIMPKDIQLARRVRGERA

SEQ ID NO: 7009 - protein, 158 aa, Zea mays
  Clone ID: TF_LIB4758-088-R1-K1-D11.pep
MARTKQTARKSTGGKAPRKQLATKAARKSAPTTGGVKKPHRYRPGTVALREIRKYQKSTELLIRKLPFQRLVREIAQDFKTDLRFQSHAVLALQEAAEAYLVGLFEDTNLCAIHAKRVTIMPKDIQLGKKDPWRGRKSVDGRKTLRSFCVSLSHPVVL

SEQ ID NO: 7010 - protein, 153 aa, Zea mays
  unsure (1)..(153): unsure at all Xaa locations
  Clone ID: TF_LIB4829-021-R1-N1-G8.pep
MRPKEENKPSHKKPAARRSTVTENVDKAPAXYKPICEKCLPLAMLIVGAEGKKAKNKXAKKALETYMIIHLQCAXQVHPDIGISSEVMSIMNSFINDIFEKLACESAKLWRYNQKTTISSREIQTSVRLVLLXELGKHVVSDCTKAVTKFTSS

SEQ ID NO: 7011 - protein, 160 aa, Zea mays
  unsure (1)..(160): unsure at all Xaa locations
  Clone ID: TF_LIB4730-131-A1-K1-E1.pep
MDSTGTRAAGKXKKRAARRXVGRPRKEVVSRSRGAGLQFPVGRIGRYLKEGRYAQRVXTGAPVYLAAVLEYLAAXVLXLAGNAARDNKKXRIIPRHVLLAIRNDXELXKLLGSVTIAHGGVLPNINPXFCFPXXTXEKASSXEMKGGXSPKRAPNSPKKA

SEQ ID NO: 7012 - protein, 95 aa, Zea mays
  unsure (1)..(95): unsure at all Xaa locations
  Clone ID: TF_700349182H1.pep
MALKAEKKPAEKKPAAEEKAEKTTARKKPXSEKRLPASKSSGKDGGENEGKKKAKKSVETXQIYIFKVLKXVHPDIGISSKAMSIMNSFIDDIFE

SEQ ID NO: 7013 - protein, 136 aa, Zea mays
  unsure (1)..(136): unsure at all Xaa locations
  Clone ID: TF_LIB3969-012-Q1-K1-H12.pep
AGGGGARAVKRPAGEPRRGSGSSLSSPSAGGGGGQPWQDSMGKKSVVTFRIYIFEVLDHVLPVIGVSSKALSIMNSFINDIFEKLAGEAAXLARFLLKPTITSREIQTFVRLVLPGELAQHAVSGWPKGVTNFTCF

SEQ ID NO: 7014 - protein, 129 aa, Zea mays
  unsure (1)..(129): unsure at all Xaa locations
  Clone ID: TF_LIB3088-042-Q1-K1-B9.pep
RTRGARTKQTSRMSTGGKATAQXELATKAARKSAPTTGGVKKPHRYRSGTVALPEIRTYHKSTELVIRKLTLQRLVLEIAQDFKTDLRVQSHAALALQEDAEAYIVGVFXDTNLCTIHTXRVTIMPNDI

SEQ ID NO: 7015 - protein, 123 aa, Zea mays
  Clone ID: TF_ZmC369_40.pep
PRQVWACWPSTRASPSTTPGATRAPSRSCSPRTPSSCCSSSASVSWSCRGGGTSSGAMSIMNSFINDIFEKLAGEAAKLARYNKKPTITSREIQTSVRLVLPGELAKHAVSEGTKAVTKFTSN

SEQ ID NO: 7016 - protein, 136 aa, Zea mays; identical to SEQ ID NO: 6802
  Clone ID: TF_ZmC653_45.pep

SEQ ID NO: 7017 - protein, 136 aa, Zea mays
  unsure (1)..(136): unsure at all Xaa locations
  Clone ID: TF_LIB4729-138-A1-K1-A10.pep
MARTKQTARKSTGGKAPRKQLATKAARKSAPATGGVKKPHRFRPGTVALREIRKYQKSTELLIRKLPFQRLVREIAQDFKTDLRFQSSAVAALHEAAEAYLVGLFQDTNLCAIHAKRVTIMPXDIQLARRIRGERA

SEQ ID NO: 7018 - protein, 136 aa, Zea mays
  Clone ID: TF_LIB5116-026-A1-PF1-C11.pep
MAPKAAEKKPAEKTPAGKKPKAEKKVPASKEGGGEKKGKKKSKKSVETYKIYIFKVLKQVHPDIGISSKAMSIMNSFINDIFEKLAGESAKLARYNKRPTITSREIQTSVRLVLPGELAKHAVSEGTKAVTKFTSA

SEQ ID NO: 7019 - protein, 148 aa, Zea mays
  unsure (1)..(148): unsure at all Xaa locations
  Clone ID: TF_LIB5116-006-A1-PF1-A2.pep
MAGRKGGDRKKAVTRSVKAGLQFPVGRIGRYLKKGRYAQRVGSGAPVYLAAVLEHLAAEVLELAGNAAKDNKKTRIIPRHLLLAVRNDQELGRLLAGVTIAHGGVIPNINSVLLPKKSPAAADKEAKSPNKKTSTKSXPKKKTAATKE

SEQ ID NO: 7020 - protein, 104 aa, Zea mays
  Clone ID: TF_ZmC369_31.pep
GGDKKGKKKAKKSVETYKIYIFKVLKQVHPDIGISSKAMSIMNSFINDIFEKLAGEAAKLARYNKKPTITSREIQTSVRLVLPGELAKHAVSEGTKAVTKFTSS

SEQ ID NO: 7021 - protein, 136 aa, Zea mays
  Clone ID: TF_LIB5116-028-A1-PF1-G10.pep
MDASAAGAVAKAKKYVVGRKLGGGPRKKAVARSVKAGLQFPVGRIGRFLKKGRYAQRVGMGAPVYLASVLEYLAAELLELAGNAAKDNKKSRIIPRHLLLAIRNDQELGKLLAGVTIAHGGVLPNINPVLLPKKTA

SEQ ID NO: 7022 - protein, 101 aa, Zea mays
  Clone ID: TF_LIB3608-036-Q1-N6-C6.pep
TGAPVYLAAFLESLPPEVLELAGNPAKNNKKRGIIPPQVFLAIRKKKELGKFLAGVPIGEGGVLPKIHSVFLPKKAAKKGAKGGKKKPKSPKKGAKSPKKA

SEQ ID NO: 7023 - protein, 113 aa, Zea mays
  unsure (1)..(113): unsure at all Xaa locations
  Clone ID: TF_LIB3245-084-P1-N1-B7.pep
KINTSQFHGRYSRCVARSTKXAPTKXTARKSTGGKAPRKQLSTKAARKSAPATGGVKKPHRFRPGTVALREIRKYQKSTELLIRKLPFQRLVREIAQDFKTDLRFQSSAVAAL

SEQ ID NO: 7024 - protein, 123 aa, Zea mays
  unsure (1)..(123): unsure at all Xaa locations
  Clone ID: TF_LIB4732-057-Q1-K1-D7.pep
MAPKAEKKPAAKKPAEEEPAAEKATAGKKPKAEKRLPAGKSAGKEGGEKKGKKKAKKSVETYKIYIFKVLKQVHPDIGISSKAMSIMNSFINDIFEKXLVLPGELAKHAVSEGTKAVTKFTSS

SEQ ID NO: 7025 - protein, 79 aa, Zea mays
  unsure (1)..(79): unsure at all Xaa locations
  Clone ID: TF_3341056.pep
KQVHPEIGISFKAMSIMKSFIKEIFEKLAGEAAKMAXXNKKPTIKSREIQTSVGLVLPGELAKQAVFEGTKAVTKFTSK

SEQ ID NO: 7026 - protein, 137 aa, Zea mays
  unsure (1)..(137): unsure at all Xaa locations
  Clone ID: TF_LIB4744-035-R1-K1-H5.pep
MARTKQTARKSTGGKAPRKHLATKAARKSAPATGGVNKPHRFRPGTVALREIRKHQKSTELLIRKLPIQRLVREIAQDFKTDLRFQSSAVSAXLQEAAEAYLVGLFEDTNLCAIHAKRVTIMPKDIQLARRIRGERA

SEQ ID NO: 7027 - protein, 104 aa, Zea mays
  unsure (1)..(104): unsure at all Xaa locations
  Clone ID: TF_LIB4758-023-R1-K1-H11.pep
TVGMAPRKQLATKAVRKSAPATGGMNNPXSVGPGTVALLEIRKYQKITELLIRKLPFQRLVREIAQDFKTVLRFQSSAVAALQEADEAYLEGLFEDTNLCAIHA

SEQ ID NO: 7028 - protein, 187 aa, Zea mays
  unsure (1)..(187): unsure at all Xaa locations
  Clone ID: TF_LIB4979-019-A1-K1-A12.pep
SLPEAFHPRSLDGPHEGDEERSPPRGKAPREAXATKADRESAPATDGGKKAHRFRPGTVSLREIRKYQNSTELLIRQLAFQRLVREIRAGLAKTDXLRFQSSAGLCSAGLRPRRATLTVSAXDTIPTCAIHAWRVTIMPKDIQLSHVRIRGREGLSISYSDIRGRSEDEEMCLESVILSDCGIHANR

SEQ ID NO: 7029 - protein, 122 aa, Zea mays
  unsure (1)..(122): unsure at all Xaa locations
  Clone ID: TF_LIB4979-061-R1-K1-G4.pep
TVRKSTXGKAPRKQMNTXAARKSSPGTGGVKKSHRFRPGSVALREIRKYHKSTELLIRKMPFQRLVRDISQDFKNDLWIQFYFVAALQEDDDAYLVGLFXRTNLCGIHAKRVTIMAKDIQLA

SEQ ID NO: 7030 - protein, 153 aa, Zea mays
  Clone ID: TF_LIB4729-135-A1-K1-H9.pep
TRILNLPLPPPPPDPGLQTAPSSSPLRMARTKQTARKSTGGKAPRKQLATGGVKKPHRFRPGTVALREIRKYQKSTELLIRKLPFQRLVREIAQDFKTDLRFQSSAVAALQEAAEAYLVGLFEDTNLCAIHAKRVTIMPKDIQLARRIRGERA

SEQ ID NO: 7031 - protein, 137 aa, Zea mays
  unsure (1)..(137): unsure at all Xaa locations
  Clone ID: TF_LIB4742-005-R1-K1-G10.pep
MARTKQXTARKSTGGMAPRKQLATKAARKSAPATGGVKKPHRFRPGTVTLREIRKHQNSTELLIRKLPFQRLVREIAHDFKTDLRLQSSAVSALQEAAEAYLVGLFEDTNLCAIHAKRVTIMPKDIQLARRIRGERA

SEQ ID NO: 7032 - protein, 148 aa, Zea mays
  unsure (1)..(148): unsure at all Xaa locations
  Clone ID: TF_LIB4665-006-R1-M1-E8.pep
MSGRGKGGKGLGKGGAKRHRKGLRDNIHGITKPGIRRLARMGGVNRISGLIYEETRGVLKIFXWENVIRDAVTYTEHARRKTVTAVERVYALKRQGRTLYGFGGARRGARRCRRCGSIVFAIRKVWLGGENAGYCATSSMVCVSEKMP

SEQ ID NO: 7033 - protein, 97 aa, Zea mays
  unsure (1)..(97): unsure at all Xaa locations
  Clone ID: TF_LIB3279-005-P1-K1-B7.pep
MDSTITCTGTKAKNEANKRTVGRTGKKSRXKSVKAGVQVPVQRIGRYMKNDLYTQRYANGVRTYVAVYLEYVVDYVVDLVVDAARDNKKDSMITRLM

SEQ ID NO: 7034 - protein, 148 aa, Zea mays
  Clone ID: TF_LIB5026-002-Q1-XP1-E7.pep
MSGRGKGGKGLGKGGAKRHRKVLRDNIQGITKPAIRRLARRGGVKRISGLIYEETRGVLKIFLENVIRDAATYTDHARRKTVTVLVSLYPVGGLPVLLEACDRTPGPVPHAPLSARLVSRSGPRTTSRSESLEILCIIPGASLRASCA

SEQ ID NO: 7035 - protein, 82 aa, Zea mays
  unsure (1)..(82): unsure at all Xaa locations
  Clone ID: TF_ZmC369_105.pep
KVLKQVHPDIGISFKAMSIMNSFINDXFEKLAAEAAKLARYNKKPTITSREIQTSVRLVLPGELAKHAVSEGTKAVTKFTSS

SEQ ID NO: 7036 - protein, 110 aa, Zea mays
  unsure (1)..(110): unsure at all Xaa locations
  Clone ID: TF_LIB3070-004-Q1-N1-E3.pep
AFDGRPKGPRRNPRGEEARRREEPPRPRKAPAGKKXKGGEKRVPAGKSRCQRKGGEGQEGHRRRASKSCXRTYKIYIFKVLKQVHPDIGIXXKAMSIMNSFINDIFEKLA

SEQ ID NO: 7037 - protein, 83 aa, Zea mays
  unsure (1)..(83): unsure at all Xaa locations
  Clone ID: TF_LIB3357-028-P1-K1-E9.pep
AGGPMMKSVTWSVXAGLHFPVGRIGRYLKXGRFAHRVGCGAPVYLAAVLEYLSADVLVLAGNAAKDNKKSRIVPRHVLLAIRN

SEQ ID NO: 7038 - protein, 127 aa, Zea mays
  unsure (1)..(127): unsure at all Xaa locations
  Clone ID: TF_LIB84-008-Q1-E1-G3.pep
MAPKAEKKPAAKKPAEEEPAAAKAPVGNKPMAXKRLSAVKSSGKESGDKKGKKNVNKSVETYKIYIFDVLKHVHPDIGISSKAMSIMNSFIIDIFEKLAGDAAKLARYNKKPSITSREIXTSVRLVL

SEQ ID NO: 7039 - protein, 130 aa, Zea mays
  Clone ID: TF_LIB3150-052-Q1-N1-B2.pep
KKRAILIRSRARTKQTRRSSSGGMVPRKHLPTKAARMSAPATGGVKKPHRFSLDTVALREILRYQKSPELLIRMLPIQRLLREIAHDFKTDLRFQSSAVSALHEAAEAYTGGLYEDTNLCVIHAKRVTIM

SEQ ID NO: 7040 - protein, 141 aa, Zea mays
  unsure (1)..(141): unsure at all Xaa locations
  Clone ID: TF_LIB4745-005-R1-K1-H3.pep
SNCRWRPRSEKKPAEKKPTEEKAEKKPRAEKRVPVKEGGEKKGKKKAKKSVETYKIYMLKVLKQVHPDIGISPKAMYIMNSFINDMLQKLAGEAGKLVRYNKKPSIASREIQTWVRLDLPGEXGKHAVSEGTKAVSKGTCC

SEQ ID NO: 7041 - protein, 112 aa, Zea mays
  Clone ID: TF_LIB3227-030-P1-K1-B8.pep
MDSTGTGAGGKGKKGAAGRKVGGPREKLVSRSVKAGLQVPVGRIERYLKKGRYAQRVGTGARVYLADVLEYLATEVLELAGNASRDNKKTRIISRHVLLGIRNDEELEKLLG

SEQ ID NO: 7042 - protein, 136 aa, Zea mays
  unsure (1)..(136): unsure at all Xaa locations
  Clone ID: TF_ZmC114_13.pep
MARTKQTARKSTGGKAPRKQLATKAARKSAPTTGGVKKPHRYRPGTVALREIRKYQKSTELLIRKLPFQRLVREIAQDFKTDLRFQSHAVLALQEAAEAYLVGLFEDXNLCAIHAKRVTIMPKDIQLARRIRGERA

SEQ ID NO: 7043 - protein, 153 aa, Zea mays
  Clone ID: TF_LIB5116-008-A1-PF1-D5.pep
MAPKADKKPAAENKVEKAAEKTPAGKKPKAEKRLPAGKTASKEAGGEGKTRGRKKGSKAKKGVETYKIYIFKVLKQVHPDIGISSKAMSIMNSFINDIFEKLAGESAKLARYNKKPTITSREIQTSVRLVLPGELAKHAVSEGTKAVTKFTSS

SEQ ID NO: 7044 - protein, 153 aa, Zea mays; identical to SEQ ID NO: 7043
  Clone ID: TF_LIB5116-037-A1-PF1-C8.pep

SEQ ID NO: 7045 - protein, 162 aa, Zea mays
  Clone ID: TF_LIB5025-058-A1-XP1-A9.pep
MARTKQTARKSTGGKAPRKQLATKAARKSAPATGGVKKPHRFRPGTVALREIRKYQKSTELLIRKLPFQRLVREIAQDFKTDLRFQSSAVAALQEAAEAYLVGLFEDTNLCAIHAKRVTIMPKDIQLARRIRREGLSARRAARRCSVTRSRWWHSFRGFLIL

SEQ ID NO: 7046 - protein, 155 aa, Zea mays
  Clone ID: TF_ZmC519824_1.pep
MDASATVATGKGKKGVAGRKAGGPRKKSVSRSVKAGLQFPVSRIGRFLKKGRYAQRVGSGAPVYLAAVLEYLAAELLELAGNAAKDNKKSRIIPRHLLLAIRNDEELGKLLAGITIAHGGVIPNINPVLLPKKTAEKSPKEPKSPKKTAKSPKKA

SEQ ID NO: 7047 - protein, 171 aa, Zea mays
  Clone ID: TF_ZmC119_1144.pep
MVKYSTEPTNPTKSTKAMGRDLRVHFKNTRETAFALRKLSLTKAKRYLEDVIAHKQAIPFRRYCGGVGRTAQAKSRHSNGQGRWPVKSARFILDLLKNAESNAEVKGLDVDTLYVSHIQVNQAQKQRRRTYRAHGRINPYMSSPCHIELILSEKEEPVKKEAESQIATRNA

SEQ ID NO: 7048 - protein, 102 aa, Zea mays
  unsure (1)..(102): unsure at all Xaa locations
  Clone ID: TF_LIB4730-068-R1-K1-D9.pep
MARTKQXTARKSTGGKAPRKQLATKAARKSAPATGGVKKPHRFRPSTGALREIRTYHKSTXLLIRKLPSQPPGRGDPQALHTRPRIKALNESERDRKKVKQH

SEQ ID NO: 7049 - protein, 148 aa, Zea mays
  unsure (1)..(148): unsure at all Xaa locations
  Clone ID: TF_LIB5025-045-A1-XP1-A10.pep
MSAPATGXLKRPTRFLHATTTLLKIRKYQKSTELLIRKLPLQRLFPDIVQDFLSELRFQSCCVDALQEESXLPQHHSSRDTNLCCIHYKSVTIMPPDIQLARRILRAEGLRDYGMHLEVVIPDSVITDWLQRVEMSPTLCQPILSAKS

SEQ ID NO: 7050 - protein, 133 aa, Zea mays
  unsure (1)..(133): unsure at all Xaa locations
  Clone ID: TF_681794.pep
MXRTKQTARKSTGGKAPRKQLATKAARKSXPATGGVKKPHRFRPGTVXLREIRKYQKSTELLIRKLSFQXLVREIAQXFKTXLRFQSSAXSALQEEVDXYLSXSSXXHPXCHPRQXVTYAKXIQLPAVSXXEG

SEQ ID NO: 7051 - protein, 71 aa, Zea mays
  unsure (1)..(71): unsure at all Xaa locations
  Clone ID: TF_LIB4730-067-R1-K1-C4.pep
GTKAARKSYPXTLGIKKPHRCGPDSASLREIRIYKNSRKLLIRKSAIERLELQIGEDFKTDLSFQASAVAA

SEQ ID NO: 7052 - protein, 91 aa, Zea mays
  unsure (1)..(91): unsure at all Xaa locations
  Clone ID: TF_LIB3076-046-Q1-K1-H11.pep
MAPRAGWISAARKPXXEDPAAEKTTAGKKPKAEKRVPAGKSAGKEGGXGKRCKKKGKKSVETYKIYIFKVLKQVHPDICISSKAMFIMNSF

SEQ ID NO: 7053 - protein, 136 aa, Zea mays
  Clone ID: TF_ZmC22376_3.pep
MSSGGGRGKPKGSKAVSRSTKAGLQFPVGRIARYLKAGKYAERVGGGAPVYLSAVLEYLAAEVLELAGNAARDNKKNRIVPRHIQLAVRNDEELSKLLGAVTIAAGGVLPNIHQTLLPKKAGGKGKADIGSASQEF

SEQ ID NO: 7054 - protein, 155 aa, Zea mays
  unsure (1)..(155): unsure at all Xaa locations
  Clone ID: TF_LIB3608-036-Q1-K6-A11.pep
LSITHLGGGGGGPRSSAAAAVRRPWTPAQHEPAGRRIRARPGARPVVSIKKSVTRFLRGGLQFPVXRIGRYLKKGQYPQRVCTGTPFYLAVVLXYLAPXVLDLAGNAAIDNKKTHIILIHLLLAILNYKNLGKLLVRVTINHGGVLPNINPVFLP

SEQ ID NO: 7055 - protein, 125 aa, Zea mays
  unsure (1)..(125): unsure at all Xaa locations
  Clone ID: TF_jC-zmXLIB3527P006bd04a1.pep
MARTKQTARKSXTGGKAPRKQLATKAARKSAPATGGVKKPHRFRPGTVALREIRKYQKSTELLIRKLPFQRLVREIAQDFKTDLRVQASGVAALEEAAEAYLVGLFEDTKLCAIHAKRVTIMPKD

SEQ ID NO: 7056 - protein, 150 aa, Zea mays
  Clone ID: TF_ZmC369_118.pep
MAPKAEKKPAAKKPAEEEPAAEKAPAGKKPKAEKRVPAGKSAAKEGGEGKRGKKKGKKSVETYKIYIFKVLKQVHPDIGISSKAMSIMNSFINDIFEKLAAEAAKLARYNKKPTITSREIQTSVRLVLPGELAKHAVSEGTKAVTKFTSA

SEQ ID NO: 7057 - protein, 150 aa, Zea mays; identical to SEQ ID NO: 7056
  Clone ID: TF_ZmC369_145.pep

SEQ ID NO: 7058 - protein, 137 aa, Zea mays
  Clone ID: TF_ZmC369_41.pep
MAPKAEKKPAEKKPTEEKAEKKPRAEKRVPGKEGGEKKGKKKAKKSVETYKIYIFKVLKQVHPDIGISSKAMSIMNSFINDIFEKLAAEAAKLARYNKKPTITSREIQTSVRLVLPGELAKHAVSEGTKAVTKFTSA

SEQ ID NO: 7059 - protein, 129 aa, Zea mays
  Clone ID: TF_LIB4073-021-Q6-N1-F8.pep
AEKAPPEKKPKAEKRLPASKSSGKEGGEKKGKKKAKKSVETYKIYIFKVLKQVHPDIGISSKAMSIMNSFINDIFEKLAGEAAKLARYNKKPTITSREIQTSVRLVLPGELAKHAVSEGTKAVTKFTSN

SEQ ID NO: 7060 - protein, 135 aa, Zea mays
  Clone ID: TF_ZmC519532_1.pep
MAPKAAEKKPVEKTPAGKKPKAEKKVPASKEGGEKKGKKKSKKSVETYKIYIFKVLKQVHPDIGISSKAMSIMNSFINDIFEKLAGESAKLARYNKKPTITSREIQTSVRLVLPGELAKHAVSEGTKAVTKFTSA

SEQ ID NO: 7061 - protein, 146 aa, Zea mays
  Clone ID: TF_LIB5116-031-A1-PF1-E3.pep
MAGRKGGDRKKAVTRSVKAGLQFPVGRIGRYLKKGRYAQRVGSGAPVYLAAVLEYLAAEVLELAGNAAKDNKKTRIIPRHLLLAVRNDQELGRLLAGVTIAHGGVIPNINSVLLPKKSPAAAEKEAKSPKKKKAAKSPKKKVAAKE

SEQ ID NO: 7062 - protein, 146 aa, Zea mays
  Clone ID: TF_LIB5116-048-A2-PF1-D4.pep
MAGRKGGDRKKAVTRSVKAGLQFPVGRIGRYLKKGRYAQRVGSGAPVYLAAVLEYLAAEVLELAGNAAKDNKKTRIIPRHLLLAVRNDQELGRLLAGVTIAHGGVIPNINSVLLPKKSPAAAEKEAKSPKKKTSTKSPKKKVAAKE

SEQ ID NO: 7063 - protein, 53 aa, Zea mays
  Clone ID: TF_LIB3205-078-P1-N1-H9.pep
GFKTNAVLAFQKAVMAYFVGVLEETYFWAIHAKRVTFMAKDIQLALRIRGERV

SEQ ID NO: 7064 - protein, 98 aa, Zea mays
  Clone ID: TF_ZmC1045423_1.pep
KNMARTKQTARKSTGGKAPRKQLATKAARKSAPSTGGVKKPHRYRPGTVALREIRRYQMSTELLIRKLPFQRLVREIAQDFITDLRFQSAAIGALQEA

SEQ ID NO: 7065 - protein, 118 aa, Zea mays
  Clone ID: TF_LIB4729-119-A1-K1-A4.pep
MAPKAEKKPAAKKPAEEEPAAEKAPAGKKPKAEKRVPAGKSAAKEGGEGKRGKKKGKKSVETYKIYIFKVLKQVHPDIGISSKAMSIMNSFINDIFEKLAAEAAACRILSCVHVSCCS

SEQ ID NO: 7066 - protein, 136 aa, Zea mays
  unsure (1)..(136): unsure at all Xaa locations
  Clone ID: TF_LIB4729-002-R1-K1-A4.pep
MARTKQTXRKXTGGKAPRKQXATKAXRKSAPATXGXKKPHRFRPGTVALREIRKYQKSTELLIRKLPXQRLEREIAQDFKTDLRXQSSAVSDLQEAXEAYLXGLLKDTNLXAIHXKRATIMPKDMQLARRIRGERA

SEQ ID NO: 7067 - protein, 126 aa, Zea mays
  unsure (1)..(126): unsure at all Xaa locations
  Clone ID: TF_LIB3245-603-P1-K1-D6.pep
MAPKADKKPAAKKPAEEPATEKAEKAPAVKKPKAEKRLPAGKSAGKEGGEGKKGKKKAKKSVETYKIYIFKVLKQVHPDIGISXKAMSIMNSFINDIFEKLAAESAKLARYNKXPTVTCREIQTSV

SEQ ID NO: 7068 - protein, 136 aa, Zea mays
  unsure (1)..(136): unsure at all Xaa locations
  Clone ID: TF_LIB4729-064-R1-K1-E10.pep
MARTKQTARKSTGGKAPRKQLATKAARKSAPATGGVKKPHRFRPGTVALREIRKYQKSTELLIRKLPFQRLVREIAQDFKTDLRFQSSAVSALQEAAXAYLVGLFEDTNLCAIHAKRRTIMPKDIQLARRIRGERA

SEQ ID NO: 7069 - protein, 83 aa, Zea mays
  Clone ID: TF_LIB4979-058-R1-K1-G4.pep
MDSTGTGAGGKGKKGAAGRKVGGPRKKSVSRSVKAGLQFPVCRIGRYLKNGRYVQRVCICSRVYLTAVLVSLVCGIVKPHVFF

SEQ ID NO: 7070 - protein, 143 aa, Zea mays
  unsure (1)..(143): unsure at all Xaa locations
  Clone ID: TF_LIB4719-018-Q1-K1-H12.pep
GASRIRTTQPYSRARNHSRRSEARTKHTARKSTGGKAPRKQLGTKAARKSPPATGGAKKPQRFRPATVALREIRKYQKSTELIIPKLPFQRLARQIAQDFKTDPSLQSSADAAQEEAAQAYHGGACXEDTNLCAIHAKRVTIR

SEQ ID NO: 7071 - protein, 100 aa, Zea mays
  Clone ID: TF_LIB3180-038-P2-M2-C6.pep
MAPKAEKKPPAKNPAEEEPAAPAEKAPAGKKPKAEKRLPAGKSSGKEGGVDKKGRKMATKSVETYKIYIFKVLNLVYPDMGISSKAMSIMNSFINDIFEK

SEQ ID NO: 7072 - protein, 50 aa, Zea mays
  Clone ID: TF_ZmC369_57.pep
AEAAKLARYNKKPTITSREIQTSVRLVLPFELAKHAVSEGTKAVTKFTSS

SEQ ID NO: 7073 - protein, 157 aa, Zea mays
  unsure (1)..(157): unsure at all Xaa locations
  Clone ID: TF_LIB3608-022-Q1-K6-D10.pep
VLLSLHRCVPLPPRPWRPRPXKKPAAKNRRRRSPRREKTTCRVSKPKAEKRIPAGKSAGKEGGEGKRGKKKGKKSVETYKIYIFKXLKQVHPDIGIFSKAMSIMNSFINDIFEKLAGEAVKLARYNKKSTITYREIQTYVRLVLPGELAKHAVFEGT

SEQ ID NO: 7074 - protein, 202 aa, Zea mays
  Clone ID: TF_ZmC275904_1.pep
MRHISSHFFPSDPPFATKTPTRPASMAPKAEKKPAAKKPAEEEPAAEKAPAGKKPKAEKRVPAGKSAAKEGGEGKRGKKKGKKSVETYKIYIFKVLKQVHPDIGISSKAMSIMNSFINDIFEKLAAEAAKLARYNKKPTITCREIQTSVRLVLTGELGKHAVFEGTKVGAKCTLGLSWADGGWGIVCWGAGCGWGLALVGGG

SEQ ID NO: 7075 - protein, 157 aa, Zea mays
  unsure (1)..(157): unsure at all Xaa locations
  Clone ID: TF_LIB4667-010-Q1-K1-D4.pep
MARTKQTARKSTGGKAPRKQLATKAARKSAPATGGVKKPHRFRPGTVALREIRKYQKSTELLIRKLPFQRLVREIAQDFKTDLRFQSSAVSALQEAAEAYLVGLFEDTNLCAIHAKRVTIMPKDIQLARRIRXGEGLSVIFSVISARSEDVEMCWVL

SEQ ID NO: 7076 - protein, 183 aa, Zea mays
  unsure (1)..(183): unsure at all Xaa locations
  Clone ID: TF_LIB4979-095-A1-K1-A11.pep
MARTKQTARKSTGGKAPRKQLATKAARKSAPATGGVKKPHRFRPGTVALREIRKYQKSTELLIRKLPFQRLVREIAQDFKTDLRFQSSAVSALQEAAEAYLVGLFEDTNLCAIHAKRVTIMPKDIQLARRIRXGEGLSIVYSVISARPEDVEMCCSWVTVESSGWVFTAVTYYHDAYMAMNYV

SEQ ID NO: 7077 - protein, 266 aa, Zea mays
  Clone ID: TF_LIB4762-141-Q1-K1-F10.pep
WVPRGRPGRMSQSPPALPTSTPSSLACHAPFSRHRRRVPASSGPLGVGRNQTETEAEYDACLPSSAERPLRHSCPSSSSSSANRLPLTPAIGDCPSRIPPPRDARSPKDLCLRQREEIRTLKYVVLFLHVEPEPEFDRRLRGDISMLTDQIQCLTQELAAQVKAEKHSARSCFDEDGYCSSPRTSGFNEDTAFSLVCSITPPSHSHSKTIGMSIRCFQNDWPPCTSPPFSSIAPPRCWSWPGTLLVTTRTVSCCATSSWWCGTTRS

SEQ ID NO: 7078 - protein, 63 aa, Zea mays
  Clone ID: TF_LIB3150-112-P2-K1-C2.pep
PVTALQKAPKAYLVGLFEDPNLCAIHAKGVTIMPKEIQLGGGIRGEGPKGVRFRGLLPTAGGV

SEQ ID NO: 7079 - protein, 141 aa, Zea mays
  unsure (1)..(141): unsure at all Xaa locations
  Clone ID: TF_LIB4742-062-R1-K1-G12.pep
MASHARKKSSDVDAAEEQPDAPWYKAPARTKPNADXISLPENPSRSQGDSSPTTVDNKAHKSVTENNIYIFKXHKLVHPDITITSTAMTIMNSSVNDITEKLAGEGRKFSRXSKKTTITNRQIHTSGRLVPPGYIHKHTVS

SEQ ID NO: 7080 - protein, 144 aa, Zea mays
  unsure (1)..(144): unsure at all Xaa locations
  Clone ID: TF_LIB4762-004-R1-K1-A11.pep
MAPKADKKPAANKPAEEEPAAEKAPAGKKPKAEKRVPAGKSAGKEGGEGKRGRKKGKKSVETYKIYIFKVLKQVHPDIGICSKAMSIMNSFINDIFEKLAVDAVELARYNKKPTITSREIQTSVRLLLPGXLVKHAVLRGTQAV

SEQ ID NO: 7081 - protein, 119 aa, Zea mays
  unsure (1)..(119): unsure at all Xaa locations
  Clone ID: TF_ZmC653_44.pep
MARTKQTARKSTGGKAPRKQLATKAARKSAXLREIRKYQKSTELLIRKLPFQRLVREIAQDFKTDLRFQSSAVAALQEAAEAYLVGLFEDTNLCAIHAKRVTIMPKDIQLARRIRGERA

SEQ ID NO: 7082 - protein, 150 aa, Zea mays
  unsure (1)..(150): unsure at all Xaa locations
  Clone ID: TF_LIB4730-129-A1-K1-H11.pep
MAPIAEKKPAPNKTKEEXPRCDNAPAGNNPNADNRFPAVKSAAKEGGADERMKIKVKKIVETXHIYIFWVLKQEHPYIGISSKAMSIMNSFINDIFEKLAAEAAKLARYNKKPTITSREIQTSVRLVLPGELAKHAVSEGTKAVTKFTSA

SEQ ID NO: 7083 - protein, 127 aa, Zea mays
  unsure (1)..(127): unsure at all Xaa locations
  Clone ID: TF_LIB4762-046-R1-K1-H9.pep
GSPIWQRASEELITQQXRKAPPATGGVKKPHRFRPGTVALRGGGEYQKSTELLIRKLPFQRLVREIAQDFKTDLRFQSSAVSALQEAAEAYLVGLFEDTNLCAIHAKRVTIMPKDIQLARRIRGERA

SEQ ID NO: 7084 - protein, 94 aa, Zea mays
  Clone ID: TF_LIB4730-069-R1-K1-H10.pep
LIHRSQPYFCLVSSGGGGGARTKQTARRSTGGKAPRKQLATKAARKSDPATGGVKKPHRFRPGTVVLGEGRKYHKSTELIIRKIMLQRLVREIA

SEQ ID NO: 7085 - protein, 107 aa, Zea mays
  Clone ID: TF_LIB4729-123-A1-K1-D9.pep
MARTKQTARKSTGGKAPRKQLATKAARKSAPATGGVKKPHRFRPGTVALREIRKYQKSTELLIRKLPFQRLVREIAQDTNLCAIHAKRVTIMPKDIQLARRIRGERA

SEQ ID NO: 7086 - protein, 137 aa, Zea mays
  Clone ID: TF_700379678_FLI.pep
MDSTGTGAAGKGKKGAAGRKVGGPRKKSVSRSVKAGLQFPVYLAAVLEYLAAEVLELAGNAARDNKKTRIIPRHVLLAIRNDEELGKLLGGVTIAHGGVLPNINPVLLPKKTAEKASSGGSKEAKSPKKAAKSPKKA

SEQ ID NO: 7087 - protein, 388 aa, Zea mays
  Clone ID: TF_ZmC38430_1.pep
QPRLHRSIPTPNPNPSSVPRRRGPSRADSSPQIGGRGRFRFGSVVRSASLAGVPPRRSGSMVGGGRRGGAAAEEVKLNTGNVFAALESLKKKKKGDKGRAAGPSSRKKHGAGAAQQQQEPPQKDVFWAPAPLTTKSWADVEDDDDDDYFATTAPPRPVWAAAAAAEPAKEEEEDVEDAVRAALQEDVESDDEDLDDEDLDDGAEHEVEDAPAELAVKTVEALAAPPKDTERQLSKKELKKRELAELDAVLAELGLSGNSTSAAQDAEKEGANQAGDAEKKEDATVPSESKTSKKKKKKDKSSKEGRKETQEAAEGSEETASAGPDEEDTTAVDVKERLKKMASMKKKRSSKETDTGAKIAAAEATARSARLAAAKKKEKSHYNQQPVR

SEQ ID NO: 7088 - protein, 127 aa, Zea mays
  Clone ID: TF_LIB4980-056-A1-K1-D5.pep
MALKAEKKPTGGKAPAKSIEKKAKSGDAKKRKASRKETYSSYIYKVLKQVHPDTGISNKAMSILNSFVNDIFERIAGEASKLAAYNKRSTISSREIQTAVRLILPGELAKHAVSEGTKAVTKYTSSK

SEQ ID NO: 7089 - protein, 137 aa, Zea mays
  Clone ID: TF_LIB5116-035-A1-PF1-G12.pep
MSSAGSGRGKGKAVSKTVSRSSKAGLQFPVGRIARYLKIGKYAQRVGAGAPVYLSAVLEYLAAEVLELAGNAARDNKKTRIVPRHIQLAVRNDEELSRLLGAVTIAAGGVLPNIHTTLLPKKVGKGKGDIGSASQEF

SEQ ID NO: 7090 - protein, 95 aa, Zea mays
  unsure (1)..(95): unsure at all Xaa locations
  Clone ID: TF_LIB3076-042-Q1-K1-H11.pep
MGAGGTGTGGKANKGAAGRKACGPMKKSVTRSVKAGLQFPVGRIGRYLKKGRYAQRFXSGAPRYLAACLEYLATDVLELAGNAAKDNKKTRIVPR

SEQ ID NO: 7091 - protein, 160 aa, Zea mays
  unsure (1)..(160): unsure at all Xaa locations
  Clone ID: TF_LIB4766-069-R1-K1-B4.pep
MDSTGTVSGGKAKKAAPARXVGGPRKKSLXRCEKDGLQIPAGRXIGRYLNNGLYPHRGGTGAPEYLAAALQYLGPEVLELPGHAARDNQNTPIIPPHGLLAIRNHDXLGKLLGSVTIAHGVVLPNINPDLLSNNTGFTRPECGXKERQSPQKVAQSPKNA

SEQ ID NO: 7092 - protein, 126 aa, Zea mays
  Clone ID: TF_ZmC119_1386.pep
MDASGAGSKGKKGAAGRKAGGPRKKSVTRSVKAGLQFPVGRIGRYLKKGRYAQRVGTGAPVYLAAVLEYLAAEVLELAGNAAKDNKKTRIIPRHVLLPKKAAEKAASGGSKEPKSPKKGAKSPKKA

SEQ ID NO: 7093 - protein, 157 aa, Zea mays
  Clone ID: TF_LIB4764-084-R1-K1-F2.pep
MAPKAEKKPAEKKPAAEEKAEKTTAGKKPKSEKRLPASKSSGKEGGEKKGKKKAKKSVETYKIYIFKVLKQVHPDIDCCLSLKKIGISSKAMSIMNSFINDIFEKLAGEAAKLARYNKKPTITSREIQTSVRLVLPGELAKHAVSEGTKAVTKFTSN

SEQ ID NO: 7094 - protein, 149 aa, Zea mays
  unsure (1)..(149): unsure at all Xaa locations
  Clone ID: TF_LIB4730-012-R1-K1-D8.pep
MAPKAEMMPAEMKPAAEEKAEKTTAGKKPKAEKRLPASKSSGKEGGEKKGKKKAKKSVETYKIYIFKVLKQVHPDIGISSKAMSIMNSFINDIFEKLAGEAAKLARYNKKPTITSREIQTSVRLVLPGELAKHAVSEGXTKAVTKFTSN

SEQ ID NO: 7095 - protein, 136 aa, Zea mays
  Clone ID: TF_LIB5116-009-A1-PF1-B11.pep
MARTKQTARKSTGGKAPRKQLATKAARKSAPATGGVKKPHRFRPGTVALREIRKYQKSTELLIRKLPFQRLVREIAQDFKTDLRFQSSVVSALQEAAESYLVGLFEDTNLCAIHAKRVTIMPKDIQLARRIRGERA

SEQ ID NO: 7096 - protein, 146 aa, Zea mays
  Clone ID: TF_LIB5116-022-A1-PF1-A12.pep
MAGRKGGDRKKAVTRSVKAGLQFPVGRIGRYLKKGRYAQRVGSGAPVYLAAVLEYLAAEVLELAGNAAKDNKKTRIIPRHLLLAVRNDQELGRLLAGVTIAHGGVIPNINSVLLPKKSPAAAEKEAKSPKKKTTTKSPKKKVAAKE

SEQ ID NO: 7097 - protein, 136 aa, Zea mays; identical to SEQ ID NO: 7053
  Clone ID: TF_ZmC22376_1.pep

SEQ ID NO: 7098 - protein, 121 aa, Zea mays
  Clone ID: TF_LIB5025-017-B1-XP1-E3.pep
RPGSEETAHPTSLIHCSQPHSCLVSSLADPMVCTKQTARKTTGGKAPRKQMPTKAARKTAPDTGGAKKPHRFRPGTVALREIRKHHKSTVPLIRTLPLQRLQEITHDSQTDLMFFFFLTSP

SEQ ID NO: 7099 - protein, 120 aa, Zea mays
  Clone ID: TF_LIB4732-132-Q1-K1-G10.pep
MARTKQTARKSTGGKAPRKQLATKAARKSAPATGGVKKPHRFRPGTVALREIRKYQKSTELLIRKLPFQRLVREIAYDFKTDLRPQHPKNAIISCVILKEQRSPPSDNLYCIASYLLPAA

SEQ ID NO: 7100 - protein, 169 aa, Zea mays
  unsure (1)..(169): unsure at all Xaa locations
  Clone ID: TF_ZmC5819_4.pep
MVRGSLGKLAXXXXXXXXRWQHQQLRRLNIHEYQGAELMGKYGINVPXXXXXXXXHEVKDALKNMFPSEKEIVVKSQILAGGRGLGTFKSGLQGGVHIVKAEEAELIASKMLGQILITKQTGPEGKIVSKVYLCEKLSLTNEMYFAITLDRKTAGPLIIACSKGGKHYS

SEQ ID NO: 7101 - protein, 99 aa, Zea mays
  Clone ID: TF_LIB3227-021-P1-K1-F11.pep
ALAAATARSRCADCSFLVSVPNARTKQTARKSTGGRAPGKQLPTRAARKWARPTGGVKNPHRFRPGTVALREIRKSQKSTELLIRKFPSKRFVREIAQD

SEQ ID NO: 7102 - protein, 122 aa, Zea mays
  Clone ID: TF_LIB4730-068-R1-K1-A11.pep
MAPKAEKKPAAKKPAEEEPAAEKAPAGKKPKAEKRVPAGKSAAKEGGAGKRGKKKGKKSVETYKIYIFKVLKQVHPDIGISSKAMSIMNSFINDIFERLGAEAAKLARYNKKPTISFREIQT

SEQ ID NO: 7103 - protein, 137 aa, Zea mays
  unsure (1)..(137): unsure at all Xaa locations
  Clone ID: TF_LIB4730-066-R1-K1-H6.pep
MARTKHTXRKSTGGQAPRKQLATTGGPHVXHRATDGVNKPHRFRPGTVPLREIRKYHKSTELLIRKLPLQRLVREIAQDFKADLRFQSSAVSALQEAAEAYLVGLFEDTNLCAIHAXRVTIMPKDIQLARRIRGERA

SEQ ID NO: 7104 - protein, 151 aa, Zea mays
  unsure (1)..(151): unsure at all Xaa locations
  Clone ID: TF_ZmC369_36.pep
MAPKAEMKPVAKNPVEEEPAAEKTTAGKKPXADKLIPIIKSAGMDGYEGNRGKKKGKKSVETYKIYIVEGRYKQVHPDICISSNAMSIINSLINDIFEKLSGEAGKLARYNKKPTITSREIQTYVRLVLPGELAKHAVSEGTKADTKFTSC

SEQ ID NO: 7105 - protein, 122 aa, Zea mays
  Clone ID: TF_LIB4730-084-R1-K1-A8.pep
MDSTGTGAGGNGKKAAAGRKVSGPRKKSVSRSVTGRLQFPVGRIGRYLNKGLYAQRVDTFAPFYLVAVLEYLAAEVLEFAGNAARDNKNTRIIPRHVLLAIRNDDELVNLLGWVTIAHGGVL

SEQ ID NO: 7106 - protein, 136 aa, Zea mays
  unsure (1)..(136): unsure at all Xaa locations
  Clone ID: TF_LIB4742-028-R1-K1-F6.pep
MDASASGAGGKAKKGAAGRKGGVPRKKSVTRSVKAGLQFPVGRIGRYLKKGRYAQRVGTGAPVYLDAGLEYLVADVLELGVNAAMDNKKTRIIPRHVLLVIRNCEELVKLLFGVAIAHGXGVLPNINPVLLCKKTA

SEQ ID NO: 7107 - protein, 137 aa, Zea mays
  unsure (1)..(137): unsure at all Xaa locations
  Clone ID: TF_LIB4974-072-Q1-K1-H4.pep
MSCTKHTARKSTSRLRRLRKHMXLRRPAESVPATGGVKKPHRFRPGTVALREIRKYQKSTELLIRKLPFQRLVRXIAQDFKTDLRFQSSAVSALQEAAEAYLVGLFEDTNLCAIHAKSVTIMPKDIQLVRRIRVERA

SEQ ID NO: 7108 - protein, 150 aa, Zea mays
  Clone ID: TF_LIB5027-055-Q1-XP1-F12.pep
MAPKAEKKPAAKNPGEEEPAAEKAPAGKKPKGEKGAPVGKSAAKEGGGGKRGKKKGKKRGETYKIYFFKGLKQGHPDFGISSKAMSIMNSFINDIFKKFVAEAAKFARYNKKPTITSREIQTSGRLVLPGELAKHAVSEGTKAVTKFTSA

SEQ ID NO: 7109 - protein, 191 aa, Zea mays
  Clone ID: TF_ZmC119_1450.pep
MDSTGTGAAGKGKKGAAGRKVGGPRKKSVSRSVKAGLQFPVGRIGRYLKKGRYAQRVGTGAPVYLAAVLEYLAAEVLQFEPSSLFVLIWRRSINSCVPIRFASLFDQVLELAGNAARDNKKTRIIPRHVLLAIRNDEELGKLLGGVTIAHGGVLPNINPVLLPKKTAEKASSGGSKEAKSPKKAAKSPKKA

SEQ ID NO: 7110 - protein, 125 aa, Zea mays
  Clone ID: TF_LIB4826-069-R1-N2-F1.pep
SYGRLGPSRPARKAARKSAPTTSGVKKPHRYRPGTVALREIRKYQKSTELLIRKLPFQRLVREIAQDFKTDLRFQSHAVLALQEAAEAYLVGLFEDTNLCAIHAKRVTIMPKDIQLARRIRGERA

SEQ ID NO: 7111 - protein, 136 aa, Zea mays
  Clone ID: TF_LIB4829-002-R1-N1-C2.pep
MARTKQTARKSTGGKAPRKQLASKAARKSAPSTGGVKKPHRYKPGTVALREIRRYQKSTELLIRKLPFQRLVREIAQDFKSDLRFQSSAIGALQESVESYLVSLFEDTNLCAIHAKRVTIQSKDIQLARRLRGERN

SEQ ID NO: 7112 - protein, 151 aa, Zea mays
  Clone ID: TF_ZmC369_138.pep
MAPKAEKKPAAKKPAEEEPATEKVEKAPAGKKPKAEKRLPAGKSKEGGEGKKGKKKAKKSVETYKIYIFKVLKQVHPDIGISSKAMSIMNSFINDIFEKLAAESAKLARYNKKPTITSREIQTSVRLVLPGELAKHAVSEGTKAVTKFTSS

SEQ ID NO: 7113 - protein, 151 aa, Zea mays; identical to SEQ ID NO: 7112
  Clone ID: TF_ZmC369_153.pep

SEQ ID NO: 7114 - protein, 78 aa, Zea mays
  Clone ID: TF_LIB3180-008-P2-M1-A11.pep
MARTKQTARKSTGGKAPRKQLATKAARKSAPATGGVKKPYRFRPGTVALREIRKYQKSTELLIRKLSFQRLVREIAQD

SEQ ID NO: 7115 - protein, 95 aa, Zea mays
  Clone ID: TF_LIB3587-200-Q1-N6-H6.pep
PAKPPKLARYNKKPPIPSREIKTSVRLVLPGELAKHPVWEGTKAVPKFPWFYPPCCRGRCCLLFKQALSWAASHARSGGWLVCVSGPGAFACVMN

SEQ ID NO: 7116 - protein, 172 aa, Zea mays
  Clone ID: TF_LIB3606-025-Q6-K6-A3.pep
HCQLRNHNSYNELVAQKLVDMKNSQVTITVNGDEIHMFQEIGHLRLKLTANRSNQPVEDHLSRRQLYPLHSQWMQQDATELNHQGQESLGGRGKPWNYQGIVQQTVQANAPFSYSFFGRVGPRRAQDLSRERHPRRRHLHGARPAQDRHSHGRRLRAQAPGPHPLRLRRLGR

SEQ ID NO: 7117 - protein, 90 aa, Zea mays
  Clone ID: TF_LIB5116-067-A1-PF1-C4.pep
MARTKQTARKSTGGKAPRKQLATKAARKSAPATGGVKKPHRFRPGTVALREIRKYQKSTELLIRKLPFQRLVREIAQDFKTDLRFQSSAV

SEQ ID NO: 7118 - protein, 159 aa, Zea mays
  Clone ID: TF_ZmC653_101.pep
PASAISLAADPRATQSASLPTVPMARTKQTARKSTGGKAPRKQLATKAARKSAPATGGVKKPHRFRPGTVALREIRKYQKSTELLIRKLPFQRLVREIAQDFKTDLRFQSSAVAALQEASEAYLVGLFEDTNLCAIHAKRVTIMPKDIQLARRIRVERA

SEQ ID NO: 7119 - protein, 143 aa, Zea mays
  unsure (1)..(143): unsure at all Xaa locations
  Clone ID: TF_LIB4979-020-A1-K1-G12.pep
VEEEEASQKXAPEVNGPVVKIPQEDKRLPVAISGGDEGDDKKGTKKVKNSVXTYKIYVFXVLKHAHPXDIDISSKVMYIMNSFINDVCERIAGEDVKLARDKIKTTITXSREIMTSVRLYLPGELDKHAVSEGTKDVTKLTSA

SEQ ID NO: 7120 - protein, 85 aa, Zea mays
  unsure (1)..(85): unsure at all Xaa locations
  Clone ID: TF_LIB3156-011-Q1-K1-C2.pep
TGRPTRTAERVRAGAPVYLAAVLEXIADGVLELDNNAVRDNKKTRIDPRLIQIADRIDKQMFRLLGTVTITSGGVMPNIHNLSLP

SEQ ID NO: 7121 - protein, 125 aa, Zea mays
  unsure (1)..(125): unsure at all Xaa locations
  Clone ID: TF_LIB4766-065-R1-K1-G3.pep
KPKEGKRLPAAXSGAGEGKKGKKKSEKSVETYKIYVFYVLXLVHPDIRISSNAMSIMNFCINEHLSRYLSAEGAKFARYNXKPIITYREMQTSGRLVLPGKLAKLAXSEGTKAVTKFTSSHIGCL

SEQ ID NO: 7122 - protein, 137 aa, Zea mays
  Clone ID: TF_ZmC683013_1.pep
MAPKAADKKPASKAPATASKAPEKKDAGKKTAASGDKKKRSKTRKETYSFYIYKVLKQVHPDTGISNRAMSILNSFVNDIFERVAFEASKLAAYNKKSPIFSREIQTSVRFILPGELAKHPVFEGTKAVTKYFSSTK

SEQ ID NO: 7123 - protein, 148 aa, Zea mays
  Clone ID: TF_LIB4729-038-R1-K1-D2.pep
MAPKAEKKPAEKKPAAEEKAEKTTAGKKPKAEKRLPASKSSGKEGGEKKGKKKAKKSVETYKIYIFKVLKQVHPDIDISSKAMSIMNSFINDIFEKLAGEAAKLARYNKKPTITSREIQTSVRLVLPGELAKHAVSEGTKAVTKFTSN

SEQ ID NO: 7124 - protein, 124 aa, Zea mays
  unsure (1)..(124): unsure at all Xaa locations
  Clone ID: TF_LIB4827-059-R1-N1-E1.pep
MAPKAEKKPAEKKPAAEEKXEKTTAVKASREXAASKSSGKEGGEKKGKKKAKKSVETYKIYIXXVLKQVHPDIGISSKAMSIMNSFINDIFXKLAXGEAAKLARYNKKPTITSREIQTSVRLVL

SEQ ID NO: 7125 - protein, 121 aa, Zea mays
  unsure (1)..(121): unsure at all Xaa locations
  Clone ID: TF_LIB4979-020-A1-K1-E4.pep
MAGRGKAIGAGAAXKKATSRSSKGGLQFPGGRIARFLQDGXHAQRVDAGXPLSSLSCALEHLAAESSLELAANATRHNKKTRIVLRHIQIAARNDEDLXTKLLGGATIASGGVMPNIHQHL

SEQ ID NO: 7126 - protein, 117 aa, Zea mays
  unsure (1)..(117): unsure at all Xaa locations
  Clone ID: TF_LIB143-037-Q1-E1-H1.pep
SPPAPIARTKQTARTSTGGNAPQTHLATNAARKMDPATRGLKNPHRFLPGNVALREIPTYXTSTDLLIRKLPFQLLVQEITXDFNTDIRFQSSAVATLQDATQAXLVSLFEDTDLCS

SEQ ID NO: 7127 - protein, 144 aa, Zea mays
  unsure (1)..(144): unsure at all Xaa locations
  Clone ID: TF_LIB3150-035-Q1-N1-E2.pep
NLPKPFVPNHLLPQIRGPKQTAGLLTAPMARTNQTARKSTAGKAPRKQLATNAARKSAPATGGVKKPHRFRPGTVALREIRXYQKSTELLIRKLPFQRLVREIAQDFKTDLRFQSSAVAALQEASEAYLVGLFEDTNLCAIHAK

SEQ ID NO: 7128 - protein, 136 aa, Zea mays; identical to SEQ ID NO: 6802
  Clone ID: TF_ZmC653_52.pep

SEQ ID NO: 7129 - protein, 122 aa, Zea mays
  Clone ID: TF_ZmC653_74.pep
DAPAVVLWLQAARKSAPTTGGVKKPHRYRPGTVALREIRKYQKSTELLIRKLPFQRLVREIAQDFKTDLRFQSHAVLALQEAAEAYLVGLFEDTNLCAIHAKRVTIMPKDIQLARRIRGERA

SEQ ID NO: 7130 - protein, 147 aa, Zea mays
  unsure (1)..(147): unsure at all Xaa locations
  Clone ID: TF_LIB4974-072-Q1-K1-C5.pep
MDSTGTGAGGKGKKGASWCXVGGSRKKSVSRSVKAGLQFPVGRIGRYLKKGRYAQRVGIGGPVYLVAVLEYLVAEVLEVAGNVARDNKNTRIIPRHVLLAIRNDEELVKLLCGVTISHGGVLPNINPVLLAKNTAVRRRAVCVARRL

SEQ ID NO: 7131 - protein, 136 aa, Zea mays
  Clone ID: TF_LIB5116-014-A1-PF1-C11.pep
MARTKQTARKSTGGKAPRKQLATKAARKSAPATGGVKKPHRFRPGTVALREIRKYQKSTELLIRKLPFQRLVREIAQDFKTDLRFQSSAVSALQEAAEAYLVGMFEDTNLCAIHAKRVTIMPKDIQLARRIRRERA

SEQ ID NO: 7132 - protein, 148 aa, Zea mays
  Clone ID: TF_LIB4760-007-R1-M1-F1.pep
MAPKAEKKPAEKKPAAEEKAEKTTAGKKPKSEKRLPASKSSGKEGGEKKGRKKAKKSVETYKIYIFKVLKQVHPDIGISSKAMSIMNSFINDIFEKLAGEAAKLARYNKKPTITSREIQTSVRLVLPGELAKHAVSEGTKAVTKFTSN

SEQ ID NO: 7133 - protein, 154 aa, Zea mays
  Clone ID: TF_473604.pep
MAPKAEKKPAAKKVAEEEPSEKAAPAEKAPAGKKPKAEKRLPAGKSAGKEGGDKKGRKKAKKSVETYKIYIFKVLKQVHPDIGISSKAMSIMNSFINDIFEKLAAEAAKLARYNKKPTITSREIQTSVRLVLPGELAKHAVSEGTKAVTKFTSS

SEQ ID NO: 7134 - protein, 154 aa, Zea mays; identical to SEQ ID NO: 7133
  Clone ID: TF_ZmC369_130.pep

SEQ ID NO: 7135 - protein, 154 aa, Zea mays; identical to SEQ ID NO: 7133
  Clone ID: TF_ZmC369_143.pep

SEQ ID NO: 7136 - protein, 154 aa, Zea mays
  Clone ID: TF_ZmC369_52.pep
MAPKAEKKPAAKKVAEEEPSEKAAPAEKAPAGKKAKAEKRLPAGKSAGKEGGDKKGRKKAKKSVETYKIYIFKVLKQVHPDIGISSKAMSIMNSFINDIFEKLAAEAAKLARYNKKPTITSREIQTSVRLVLPGELAKHAVSEGTKAVTKFTSS

SEQ ID NO: 7137 - protein, 89 aa, Zea mays
  unsure (1)..(89): unsure at all Xaa locations
  Clone ID: TF_LIB4729-002-R1-K1-F1.pep
MARTKQTARKSTGGKAPRKQLATKAARKSAPATGGVKKPHRFRPGTVALREIRKYQKSTELLIRKLPFPXALRPGDRRRDFPRTRTFPL

SEQ ID NO: 7138 - protein, 105 aa, Zea mays
  unsure (1)..(105): unsure at all Xaa locations
  Clone ID: TF_LIB3595-030-Q1-N6-E12.pep
QRVGAGAPVCLPPVVEYLRGEVVELAGXLPRSHQKTRIITSQVLLRDRXDKELAYLLDGVSIAPAGVLPNTDHVVVPNKPGEQGFSVGTKEAKSPNKTAKSPNKA

SEQ ID NO: 7139 - protein, 108 aa, Zea mays
  unsure (1)..(108): unsure at all Xaa locations
  Clone ID: TF_LIB4668-005-R1-K1-C12.pep
APSSPQHPYSEPSILSRSVARTKQTVRKSTGGKAPRKQLATKAARMSAPATGGVKKPHRFRPGTVALRGRRSPXTSSGLLIRSLPFPRLVRGVALGFLTALRFPRAAG

SEQ ID NO: 7140 - protein, 151 aa, Zea mays
  unsure (1)..(151): unsure at all Xaa locations
  Clone ID: TF_LIB4979-055-R1-K1-B6.pep
MSLFRIPSALYLKKGTMRAKGKGIESEAADKVTARSSQAALQFPVAIIDKFLIPAKYAERVPPVPPVYLPDVLEYLAADGLELCGNAARDSNNTRIVPCHIQLGVRNYEDVSRLVXRSTIGSAEDMPCIHXLLLPKKGVHCSDQGANVDQD

SEQ ID NO: 7141 - protein, 127 aa, Zea mays
  Clone ID: TF_LIB3357-037-P1-K1-D9.pep
MAPEAEKKPAANKPAEDEPAVDKTTAGKKPKAAKRVPAGKSAGKEGGEGKRGMKNGKMSVETYKIYIFKVLKQVHPDIGISSKAMSIMNSFINDIFKKLAGEAVKLARYNKKPTITFREIQTFVRLV

SEQ ID NO: 7142 - protein, 159 aa, Zea mays
  Clone ID: TF_ZmC653_25.pep
PASHTLIHSSQPYSCLVSSLAAPMARTKQTARKSTGGKAPRKQLATKAARKSAPATGGVKKPHRFRPGTVALREIRKYQKSTELLIRKLPFQRLVREIAQDFKTDLRFQSSAVAALQEAAEAYLVGLFEDTNLCARRAARCCSVTRSRWWHSFRGFLIL

SEQ ID NO: 7143 - protein, 131 aa, Zea mays
  unsure (1)..(131): unsure at all Xaa locations
  Clone ID: TF_LIB3608-043-Q1-K6-H7.pep
SSIGAQSRGGGRGEQLATKAARKSAPATGGVKKPXRFRPGTVALREIRMFQKSTELLGGGGPFQRLVREIAQDFKTDLRXQSSAVAALQEAAEAYLVGLFEDTNXWAIHAXRVTLLPKDMQFGRRIRGERA

SEQ ID NO: 7144 - protein, 51 aa, Zea mays
  Clone ID: TF_LIB3227-027-P1-K1-C8.pep
QRHAVLALEEGVDAYLVGLHEDTNLCAMHANRVTIMPNDIHLERRIRRERA

SEQ ID NO: 7145 - protein, 132 aa, Zea mays
  unsure (1)..(132): unsure at all Xaa locations
  Clone ID: TF_LIB3960-003-Q1-K6-F5.pep
LYWERRSSILAVSGAGGKANKALWRARPTGPTNNXVSRSCRAGLQFPVSRVRAVPQKGRYAHGVRTAAPVYLCFELEYLQVEAFXLPATRXRNIKKTRIIPRHVLISIRNEQELKKLLTGVTMLHSGLLSNI

SEQ ID NO: 7146 - protein, 122 aa, Zea mays
  unsure (1)..(122): unsure at all Xaa locations
  Clone ID: TF_LIB4746-094-R1-K1-H9.pep
LRTWRPPSNSGPKSAPTTAGVNKLHRYRPGTVALREIRKYHKSTELLIRKLPFQRLVKXELHRYFKTDLXFQSHAVLDLQEAAEAYLVGLFEDTNLCAIHAKRVTIMPKDIQLARRIRGERA

SEQ ID NO: 7147 - protein, 154 aa, Zea mays
  unsure (1)..(154): unsure at all Xaa locations
  Clone ID: TF_LIB4766-118-A1-K1-D8.pep
MKTNRREAPRNHLGTNAARKPDPRPVGAKKPHRFRPFTVALREIRKDHNRSDMIIFKLPFKRLDGEIXKELSRYDLRAQPLSFVXKLQEAVEEDLEGLFYXTSLSLIHATIVTIMTKDIHIARRIWIERHRAPVVQLCLVVVLQVYGGYRYLTP

SEQ ID NO: 7148 - protein, 92 aa, Zea mays
  Clone ID: TF_LIB3279-005-P1-K1-D5.pep
MFRTKQTDRKSTGGKAPRTQLATKAARKSAPTTGGVKKPHRYRPGTVALREIRKYQKSTELLIRKLPFQRLVREIAQDFKTDLRFQSHAVLA

SEQ ID NO: 7149 - protein, 87 aa, Zea mays
  Clone ID: TF_ZmC119_1366.pep
MILIYIILIKKKKKKKLETSSPRAEFGTRLELAGNAAKDNKKTRIIPRHVLLAIRNDEELGKLLAGVTITHGGVLPNIHSVLLPKKA

SEQ ID NO: 7150 - protein, 141 aa, Zea mays
  unsure (1)..(141): unsure at all Xaa locations
  Clone ID: TF_LIB3357-026-P1-K1-B7.pep
VSPSTALTGDSTYHKLSGCTGRTRQGRNTTGCKVSRKQVVTKAARKSXPATGGVNNSHPFRPGTVALREIRKYQKSTELLIRKLPFQRLVREIAQDFKTDLRFQSSAVAALXEAAEAYLVGLFEDTNLCAIHAKRVTIMPK

SEQ ID NO: 7151 - protein, 145 aa, Zea mays
  unsure (1)..(145): unsure at all Xaa locations
  Clone ID: TF_LIB4071-010-Q6-K1-F11.pep
MAPKAEKKPAAKKPAEEEPAAEKAPAGKKPKAEKRVPAGKSAGMEGXRERGARKKGKKSVETYKIYIFKVLKHVHPDIGISSKAMSIMNSFINDIFEKLAVEAVKLARYNMKPTITSREIHTSVRLVLPGELAKHAVSXGTKAVT

SEQ ID NO: 7152 - protein, 103 aa, Zea mays
  unsure (1)..(103): unsure at all Xaa locations
  Clone ID: TF_LIB4729-048-R1-K1-C1.pep
YFPFVGVESRLSTRNSAFVPTPEHFLLVPDKPIEAEIRPWTPPAPEQGVRGKKGAAGRKVGGPRKKSVSRSVKAGXQFPVGRIGRYLKKGRYAQRVGTGAPVY

SEQ ID NO: 7153 - protein, 192 aa, Zea mays
  unsure (1)..(192): unsure at all Xaa locations
  Clone ID: TF_LIB4976-005-R1-K1-E12.pep
MECMAEKKAAANKPPEDEPADEKGPVVKIPKVENGDPAGKAAVQECVEGMSCKKNVRXSVEIYKIYIFEVXLKQVHPDIGTSSKAMSIMNSFINDIFEKLAAEAVKLARYNKKSTITSREIQTSVRLVLPGELGKHAVSEGTKGVTKFTSAYAARPPLAGFSPEFTSLAVDMCCCLLGFYGCYLSGCSNCSI

SEQ ID NO: 7154 - protein, 103 aa, Zea mays
  unsure (1)..(103): unsure at all Xaa locations
  Clone ID: TF_3341036.pep
GEKKGKKKAKKSVETYKIYIFKVLKQVHPDIGISSKAMSIMNSFINDIFEKFAAEAAKFAXYNKKPTITSREIQTSVRFVFPGELAKHAVSEGTKAVTKFTSS

SEQ ID NO: 7155 - protein, 196 aa, Zea mays
  unsure (1)..(196): unsure at all Xaa locations
  Clone ID: TF_LIB4979-103-B1-K1-A5.pep
IPFSVSSSVPYQISIILGSSLAPPHTCRHGLQRRHYQGDRRVWPRRKACAPRNNSVTXSVKDGLQFPDSRIGRYLKKDRYAQRVGTGAPVYLAAVLEYLAAEVLELAGNAAKDNKKTRIIPRHVLLAIRNDEELGKLLAGVTIAHGGVLPNIHSVLLPKKAAENAASAGSKEPKSPKKGAKSPKKAYKVGTSFALC

SEQ ID NO: 7156 - protein, 140 aa, Zea mays
  unsure (1)..(140): unsure at all Xaa locations
  Clone ID: TF_LIB4669-003-Q2-K1-C9.pep
VPLVVTAGPHTISFSLAAYPRATQSASLPTVPMARTKQTARKSTGGKAPRKQLATKAARKSAPATGGVKKPHRFRPGTVALRXEIRKYQKSTELLIRKLPFQRLCGDRQTSDDFASELPVAALQEASEAYLGRVSFEGHP

SEQ ID NO: 7157 - protein, 89 aa, Zea mays
  Clone ID: TF_ZmC653_31.pep
MARTKQTARKSTGGKAPRKQLATKAARKSAPATGGVKKPHRFRPGTVALREIRKYQKSTELLIRKLPFQRVTIMPKDIQLARRIRGERA

SEQ ID NO: 7158 - protein, 123 aa, Zea mays
  unsure (1)..(123): unsure at all Xaa locations
  Clone ID: TF_LIB3637-196-Q1-K6-G12.pep
RPVSISPSAARALLEQGRYAQRVGTGAPVXYLAAVLEXLAAEVLELAGNAARAQQXKTRIIPRHVLLAIRNDEELGKLLGGVTIAHGGVLPNINPVLLPKKRRRMRPVAGARRQSRPISRQVP

SEQ ID NO: 7159 - protein, 133 aa, Zea mays
  unsure (1)..(133): unsure at all Xaa locations
  Clone ID: TF_uC-zmflB73006d03b1.pep
MARGFFKKPAVFSPAEEEPAGXCPAGKKPKAEKRXPAGKSASTEGGEKNGMKKAKKSVETYKIYMFKELKQVHPDIGIWSKAMCIMNSSMNDIFEKLAADADKLARYIKKPTITFREIHTFIGLVLPGELAKH

SEQ ID NO: 7160 - protein, 109 aa, Zea mays
  Clone ID: TF_ZmC653_42.pep
MARTKQTARKSTGGKAPRKQLATKAARKSAPATGGVKKPHRFRPGTVALREIRKYQKSTELLIRKLPFQRLVREIAQDFKTNLCAIHAKRVTIMPKDIQLARRIRGERA

SEQ ID NO: 7161 - protein, 135 aa, Zea mays
  Clone ID: TF_LIB4732-125-Q1-K1-D7.pep
MGGKGKAIGSGAAKKATSRSSKVGLQFPGERIARFLKAGKYAKRVGAGAPVYLVAGLENLAAEVLELAGNAARDNKKTRIEPRHIQFAVRNDKKLSRLLGTGTIARGGERPNIHNLLLPKKAGGGSAKVAVGDKN

SEQ ID NO: 7162 - protein, 131 aa, Zea mays
  Clone ID: TF_LIB5024-002-A1-K1-D11.pep
KKPAEKKPAEEKAEKKPRAEKRVPSKEGGEKKGKKKAKKSVETYKIYIFKVLKQVHPDIGISSKAMSIMNSFINDIFEKLAAEAAKLARYNKKPTITSREIQTSVRLVLPGELAKHAVSEGTKAVTKFTSS

SEQ ID NO: 7163 - protein, 137 aa, Zea mays
  Clone ID: TF_ZmC369_129.pep
MAPKAEKKPAEKKPAEEKAEKKPRAEKRVPSKEGGEKKGKKKAKKSVETYKIYIFKVLKQVHPDIGISSKAMSIMNSFINDIFEKLAAEAAKLARYNKKPTITSREIQTSVRLVLPGELAKHAVSEGTKAVTKFTSS

SEQ ID NO: 7164 - protein, 137 aa, Zea mays; identical to SEQ ID NO: 7163
  Clone ID: TF_ZmC369_46.pep

SEQ ID NO: 7165 - protein, 137 aa, Zea mays; identical to SEQ ID NO: 7163
  Clone ID: TF_ZmC369_75.pep

SEQ ID NO: 7166 - protein, 136 aa, Zea mays
  Clone ID: TF_ZmC653_54.pep
MARTKQTARKSTGGKAPRKQLATKAARKSAPTTGGVKKPHRYRPGTVALREIRKYQKSTELLIRKLPFQRLVREIAQDFKTDLRFQSHAVLALQEAAEAYLVGLFEDTTLCAIHAKRVTIMPKDIQLARRIRGERA

SEQ ID NO: 7167 - protein, 167 aa, Zea mays
  Clone ID: TF_LIB4756-019-Q1-K1-F11.pep
LHALQLFAFTWAARLVLSGVATCLLLTRLLSQLTRLFSHLFNITSFANSNSSRSSKAGLAFPVGRVHRLLRKGNYAQRVGAGAPVYLAAVLEYLAAEILELAGNAARDNKKTRIIPRHLQLAIRNDEELNKLLGHVTIAQGGVLPNIHQNLLPKKTAKPGKGPSQEL

SEQ ID NO: 7168 - protein, 79 aa, Zea mays
  unsure (1)..(79): unsure at all Xaa locations
  Clone ID: TF_700071688H1.pep
MVRTKQTARKSTGGKASRKQLATKAARKSASASGGAKNPHRFRRVHVVLLEICKXXKTMELLMRNLDFQLLARDIAQDF

SEQ ID NO: 7169 - protein, 55 aa, Zea mays
  Clone ID: TF_jC-zmX700553022b1.pep
FEKLAAKATKLARYNKKPTIPYGEIQTSVGLVLPGELVKHAVSEGAKAVPKFPSS

SEQ ID NO: 7170 - protein, 77 aa, Zea mays
  unsure (1)..(77): unsure at all Xaa locations
  Clone ID: TF_LIB3062-034-Q1-K1-D11.pep
MARTKHTARKSTGGKAPMKQLSTKAARKSAPATVVLKNPDRFRPRTVALLXIRKYHNSTELLIRKLSFQRLVREIAQ

SEQ ID NO: 7171 - protein, 77 aa, Zea mays
  Clone ID: TF_LIB3067-001-Q1-K1-A4.pep
YEADSSASPLGGKAPRKQLATKAARKSAPTTGGVKKPHRYRPVTVALREIRMYQYSSDLLIRMFYFMLFVRKISLDL

SEQ ID NO: 7172 - protein, 115 aa, Zea mays
  unsure (1)..(115): unsure at all Xaa locations
  Clone ID: TF_LIB3587-230-Q1-K6-H6.pep
MARTKQTARKSTGGKAPRKQLATKAARXSAPTTGGVKKPDRYRPETVALREIRKYYKSTVLLIRKLSFQRLAREIGQDFKADVSIQSHAELALQEADEAYLVRLYNDTNLGSVAC

SEQ ID NO: 7173 - protein, 135 aa, Zea mays
  Clone ID: TF_LIB4766-040-R1-K1-F3.pep
SRPAGPSPRPSQKIPHFLRGEESVKDRAPAATTSGRGKGGKGLGKGGAKRHRKVLRDNIQGITKPAIRRLARRGGVKRISGLIYEETRGVLKIFLENVIRDAVTYTEHARRKTVTAMDVVYALKRQGRTLYGFGG

SEQ ID NO: 7174 - protein, 487 aa, Zea mays
  unsure (1)..(487): unsure at all Xaa locations
  Clone ID: TF_ZmC697_106.pep
MAHPSSAAAVSSTAPAANPSYGAREEGGARSPPSPSPSPSQRGRAKVVIVMGATGAGKSRLAVDLAAHFAGVEVVSADSMQLYRGLDVLTNKAPLHEQNGVPHHLLSVIDPSVEFTCRDFRDRALPIIQEIVDRGGLPVVVGGTNFYIQALVSPFLLDDMAEEMQGCTLRDHIDDGIGLTDEDEGNGFERLKEIDPVAAQRIHPNDHRKIKRYLELYATTGALPSDLFQGEAAKYKLAGNSWXIMSEQKWGRPSNSRLYCCFLWVDADLQVLDSYVNKRVDCMMDGGLLDEVCSIYDADAVYTQGLRQAIGVREFDEFFRAYLARKESGEGSCASLLGMHDDQLKSLLDEFFSQLKANTRRLVRRQRRRLHRLSKDFGWNLHRVDATEAFFCATDDSWQKKVVEPCVDVVRRFLSDDSTVLPSTSASDPSSRELWTQYVCEACDNRVLRGAHEWEQHRQGRGHRKRVQRLKRKSLRPWPSLLPQDRS

SEQ ID NO: 7175 - protein, 465 aa, Zea mays
  unsure (1)..(465): unsure at all Xaa locations
  Clone ID: TF_ZmC697_131.pep
MIPGQHFAGKKKKKKRLRANQTKQTLLGCFPFSIPMAQDDIPESSASGSPTSSAPAARLNAAAPEFTPRSAAQHHGNNAHRRGPHHHHQPHHHPHYHPHQHYQPRHQHHQAQAEDEGSAAATAEDREGPAGAVQAQHRLPEPEARKLVKQVEFYFSDINLATTEHLMKFIAKDPDGFVPISVVASFRKIREIVYDRSLLVAALRTSSELVVSEDGKHVKRLQPFNAEEVQSRIVVAENLPEDQKHQTLMKIFSAVGNVKSIRTCYPQDISPAAANRTSRIEMIFANKLHSFVEYSAVEDAEKAVAEFGGGGNWREGIRVRSLLGCLKHGLGQGRKXGDEEYAADEDGPDTTDHPRDFGTDVTAQISETHFDHQAEDGTHDKGGMRQQGRGRGRGGRGRGRGQHYGHNSRDGHHPIGTPPSEHPAVPKPPPGPRMPDGTKGFTMGRGKPLSITIDAAANPTTTDAA

SEQ ID NO: 7176 - protein, 217 aa, Zea mays
  Clone ID: TF_ZmC697_152.pep
MSPEMRLTPPLRASLRIAGLVMPWMLSRSTLRWRLAPPLPSPLPPLPRPDIAETESYAPTRPPTRPPTRPPTRPLGCLKHGLGQGRKGGDEEYAADEDGPDTTDHPRDFGTDVTAQISETHFDHQAEDGTHDKGGMRQQGRGRGRGGRGRGRGQHYGHNSRDGHHPIGTPPSEHPAVPKPPPGPRMPDGTKGFTMGRGKPLSITIDAAANPTTTDAA

SEQ ID NO: 7177 - protein, 134 aa, Zea mays
  unsure (1)..(134): unsure at all Xaa locations
  Clone ID: TF_ZmC697_154.pep
MSSFQAPKKKKKKKKSTRPPTQKTLAAATEAASQVSRSVHPAAVMKRNPRVTSSRRKCRKAHFTAPSSVRRVLMSAGLSTELRHKYNVRSIPIRKDHXVQVVRGTYKGREGKGGQVYRRRWVIHLERXTPXKVN

SEQ ID NO: 7178 - protein, 208 aa, Zea mays
  Clone ID: TF_ZmC697_155.pep
ISPEMRFTPPLRASLRIAGLVMPWMLSRSTLRWRFAPPLPRPLPPLPRPDIVAAGALSFTLSSPRRKWGIFLTSSRSRAAARDLELVQISQSSCSTPLSSSNSAAMSGRGKGGKGLGKGGAKRHRKVLRDNIQGITKPAIRRLARRGGVKRISGLIYEETRGVLKIFLENVIRDAVTYTEHARRKTVTAMDVVYALKRQGRTLYGFGG

SEQ ID NO: 7179 - protein, 137 aa, Zea mays
  Clone ID: TF_ZmC697_159.pep
MVKFLKPGKAVILLQGRFAGRKAVIVRVFEEGTRDRPYGHCLVAGLAKYPKKVIRKDSAKKTAKKSRVKCFIKLVNFTHLMPTRYTLDVDFKDVASGGPDALSTRDKKVEACKAAKARLEERFKTGKNRWFFTKLRF

SEQ ID NO: 7180 - protein, 143 aa, Zea mays
  Clone ID: TF_ZmC697_92.pep
MGDLLGSPRVAFPKSKHLPKKIPHFLRGEESVKDRAPAATMSGRGKGGKGLGKGGAKRHRKVLRDNIQGITKPAIRRLARRGGVKRISGLIYEETRGVLKIFLENVIRDAVTYTEHARRKTVTAMDVVYALKRQGRTLYGFGG

SEQ ID NO: 7181 - protein, 158 aa, Zea mays
  unsure (1)..(158): unsure at all Xaa locations
  Clone ID: TF_LIB4826-120-R1-N1-A9.pep
MSQTILTPPQRSLQIQSSMGNVDRTKEIARQSTGGKAPRTQLATKAARKAHPATRGXKKPHRVTPAPPGTLXQIRKYQKSTELLIRKLPVQRLVRQIEHDFKTDLRFQSSAEAALHEAAEDYLVGLFEDTKLCDIHANEXTIMPNDIRLARRIRGERN

SEQ ID NO: 7182 - protein, 79 aa, Zea mays
  unsure (1)..(79): unsure at all Xaa locations
  Clone ID: TF_LIB3067-019-Q1-K1-C10.pep
DNAENRIPNGMSADKDVAKGNMGKKNVKKSVXPXKIYIFRVLNQVLPDIVMSSKAMWIMNSYINDFYEKFAPEAAKFSR

SEQ ID NO: 7183 - protein, 119 aa, Zea mays
  Clone ID: TF_ZmC369_45.pep
MAPKAEKKPAAKKPAEEEPAAPAEKAPAGKKPKAEKRLPAGKSAGKEGGVDKKGRKKAKKSVETYKIYIFKVLKQVHPDIGISSKAMSIMNSFINDIFEKLAKHAVSEGTKAVTKFTSS

SEQ ID NO: 7184 - protein, 117 aa, Zea mays
  Clone ID: TF_ZmC697_138.pep
GDLSTSLLFARAQHHPPTSSKRRRPATCGAKRHRKVLRDNIQGITKPAIRRLARRGGVKRISGLIYEETRGVLKIFLENVIRDAVTYTEHARRKTVTAMDVVYALKRQGRTLYGFGG

SEQ ID NO: 7185 - protein, 159 aa, Zea mays
  unsure (1)..(159): unsure at all Xaa locations
  Clone ID: TF_LIB4730-067-R1-K1-E10.pep
MLPGNPLTTKPSHPHCRSIGPHEMQTAEERSTRRASAHKVSELPTKAASKSAPXATGGVKKRHRFRPGXLALREIRKYHKSTELLIRKLPFQRLVREIAQDFKTDLRFQSSAVSALQEAAEAYLDGLFEDTNLCAIHAKRVTIMPKDIQLARRIRGERA

SEQ ID NO: 7186 - protein, 146 aa, Zea mays
  Clone ID: TF_LIB5117-054-A1-PF1-C10.pep
MAGRKGGDRKKAVTRSVKAGLQFPVGRIGRYLKKGRYAQRVGSGAPVYLAAVLEYLAAEVLELAGNAAKDNKKTRIIPRHLLLAVRNDQELGRLLAGVTIAHGGVIPNINSVLLPKKSAAAEKEAKSPKKKAATKSPKKKAAATKE

SEQ ID NO: 7187 - protein, 212 aa, Zea mays
  Clone ID: TF_LIB5117-054-A1-PF1-C1.pep
MSSSTGSLDHAGFTFTPPPFITSFTELLSGSGAGDAERSPRGFNRGGRAGAPKFKSAQPPSLPISSPFSCFSVPAGLSPAELLDSPVLLNYSHILASPTTGAIPAQRCDWQASADLNTFQQDELGLSGFSFHAVKSNATVNAQANCLPLFKEQQEQQQEEVVQVSNKSSSSSGNNKQVEDGYNWRKYGQKQVKGSENPRSYYKCTYNNCSMK

SEQ ID NO: 7188 - protein, 136 aa, Zea mays
  Clone ID: TF_ZmC22376_4.pep
MSSGGGRGKPKGSKAVSRSTKAGLQFPVGRIARYLKAGKYAERVGGGAPVYLSAVLEYLAAEVLELAGNAARDNKKSRIVPRHIQLAVRNDEELSKLLGAVTIAAGGVLPNIHQTLLPKKAGGKGKADIGSASQEF

SEQ ID NO: 7189 - protein, 92 aa, Zea mays
  unsure (1)..(92): unsure at all Xaa locations
  Clone ID: TF_LIB3354-002-P1-K1-E3.pep
MARTKQTFRKSTGGKAPRKQLATKAARKLAPXTGGVNXPHRYRPRTVALXEIRRYQNSMEFVIRKLLFQRLVXXIAQDFKTDLRFQSHARLA

SEQ ID NO: 7190 - protein, 145 aa, Zea mays
  unsure (1)..(145): unsure at all Xaa locations
  Clone ID: TF_LIB4979-083-A1-K1-F1.pep
MVRTKHTRRKSTXGNAPMKQLATKVERKSAPAWXGEKKPHRFRPVTVALREIRKYHKSTELLIRKLPFQRLXREIAQXDFETDLRFQSSDDDALHEASEVYLVAFFEDTNLCAIHAKRVTIMPKDIQLARRIRGERVYASSRGRC

SEQ ID NO: 7191 - protein, 160 aa, Zea mays
  unsure (1)..(160): unsure at all Xaa locations
  Clone ID: TF_LIB3279-193-Q1-K6-C9.pep
PPSRPQTRTPRRPGTEGPKAEKKPAAKKPAEEEPAAEKAPAGKKPKAEKRGPGGGGAGKEGGEGKRGRKKGKKSAETHKSXTXKGXKQGHPDXGSXXKARAXXNXXXNDXXEKHAAEAAKHARXNKKPTXTXXESQTXXRXXXPGERAKHAXXEGTKAXT

SEQ ID NO: 7192 - protein, 156 aa, Zea mays
  unsure (1)..(156): unsure at all Xaa locations
  Clone ID: TF_LIB3279-194-Q1-K6-E12.pep
ARQARSRGTTXDXTGTGAGGKGKKGAAGRKGGGPRKKXXXRAXKAXRGGGXGRXGRHXKKGRXAQXXGTGAPXXXAXXXRNXAXEGXEXAXKXARDNKKXRXXPRHXXXAXRNDEEXGKXXGGXTXXHGXGXPXXNXXXXPKKTAEKAXXGGSKEA

SEQ ID NO: 7193 - protein, 95 aa, Zea mays
  unsure (1)..(95): unsure at all Xaa locations
  Clone ID: TF_LIB4732-100-Q1-K1-G11.pep
MAPKADKKPAAKKPAEEEPATEKAEKAPAGKKPKAEKRLPAGKSAGKEGGEGKKGKKKAKKXXETYKTYIFKALKQAHPDIVISSMAMSLLNSFI

SEQ ID NO: 7194 - protein, 137 aa, Zea mays
  unsure (1)..(137): unsure at all Xaa locations
  Clone ID: TF_LIB4762-008-R1-K1-B11.pep
MAPKAEKKPAEKKPAAEEKAEKTTAGKKPKAEKRLPASKSSGKEGGEKKGKKKAKKSVETYKIYIFKVLKQVHPDIGISSKAMSIMNSLINDIFEKLAGEAAKLAXRYNKKPTITSRXEIQTSVRLVLPGELASTPS

SEQ ID NO: 7195 - protein, 131 aa, Zea mays
  unsure (1)..(131): unsure at all Xaa locations
  Clone ID: TF_jC-zmX700085305d1.pep
MAREAFKKPAANNPAEEEPAVEKAPAGKKPKAEKRVPPGKSVGKEGGEGKRGRKKGKKSVETYKIYIFKVLKQVHPDIGISSKAMSIMNSFINDIFEKLAAXAAKLSRYNKKPTITFREIQTSGRFVLPGE

SEQ ID NO: 7196 - protein, 201 aa, Zea mays
  Clone ID: TF_ZmC1773_3.pep
MGDWVHWVPRGRPGSTLDSPLSHPQPLELYSIPSISKRSSSSQAAMDASAAGAGGKAKKGAAGRKAGGPRKKSVTRSVKAGLQFPVGRIGRYLKKGRYAQRVGTGAPVYLAAVLEYLAAEVLELAGNAAKDNKKTRIIPRHVLLAIRNDEELGKLLSGVTIAHGGVLPNINPVLLPKKTAEKAAAKEAKSPKKAAKSPKKA

SEQ ID NO: 7197 - protein, 77 aa, Zea mays
  unsure (1)..(77): unsure at all Xaa locations
  Clone ID: TF_700432838H1.pep
VILEYFTDEVLELAGNARTVLKVXRITPRHLPMAIRGDEELDTHITGTIAGGGVIPHIQTSLINTSSKACCIGNAHC

SEQ ID NO: 7198 - protein, 96 aa, Zea mays
  Clone ID: TF_LIB4979-119-Q1-K1-H1.pep
SRSQSPLASLAADPRAKQSASPLRTVPMARTKQTARKSTGGKAPRKQLATKAARKSAPATGGVKKPHRFRPGTAALREHSSAEDTVDYVMITDADK

SEQ ID NO: 7199 - protein, 103 aa, Zea mays
  Clone ID: TF_LIB3150-038-Q1-N1-C5.pep
MSGRGKGAKGLGKGGANRHLKVLRDNIQRITNPPIRTLARRGGVKRISGLISQETHGVLTIFLENTILNSITYTEHARRKTATAMYVVYALNRQGPTLYRFRG

SEQ ID NO: 7200 - protein, 107 aa, Zea mays
  unsure (1)..(107): unsure at all Xaa locations
  Clone ID: TF_LIB4730-061-R1-K1-B3.pep
SPRIAPYEWRPKADKSSALNKPVEDELESXKAPNDKKPYADNCFPSGTYSRKEGGEGKRGQRKDWNSVDTYKIYILKALKQAHLCIGISYKAMSIMNSFMNDMFEKL

SEQ ID NO: 7201 - protein, 145 aa, Zea mays
  Clone ID: TF_LIB4730-079-R1-K1-D6.pep
QGLAFLLCRWPAASRRKRNSSGGWVPRNELATNEADKCAPGTDRMKNAHRFRPGTDAVGEIRKYQKNTDVLIRKLPFQHLVHVIDQYFKTERRFQSFAEVALQEGYEGYLVMLYQDNYLCAIHCKRVTIMHKDLQIARRIHGEKV

SEQ ID NO: 7202 - protein, 111 aa, Zea mays
  Clone ID: TF_LIB3357-020-P1-K1-H12.pep
MDCTGTGARGKGKKGADGRKGRGPKKKSVSRSVKAGLQFPVGRIGRYLKKGRYAQRVGTGAPVYLAAVLEYLAVEVLELAGNAARDNKKTRIIPAHVLLAIRNNQDLESCW

SEQ ID NO: 7203 - protein, 133 aa, Zea mays
  unsure (1)..(133): unsure at all Xaa locations
  Clone ID: TF_ZmC651026_1.pep
MARTKQTARKSTVGKAPRKQLATKDARKSAPTTGGVKKPHRYRPGTVALREIRKYQNSTELLIKKLPFQRLVRXIAQDFKTDLRFQSHAELALQEAAEAYLDGLFEDTNLCAIHAKRVTIMSKDIQLSRQIRG

SEQ ID NO: 7204 - protein, 136 aa, Zea mays
  Clone ID: TF_jC-zmX700206249a1.pep
MARTKQTARKSTGGKAPRKQLATKAARKSAPATGGVKKPHRFRPVTVALREIRKYQKSTELLIRKLPFQRLVREIAQDFKTDLRFQSSAVAALQEAAEAYLVGLLEDTNLCAIHAKRVTIMPKDIQLARGIKGERA

SEQ ID NO: 7205 - protein, 136 aa, Zea mays; identical to SEQ ID NO: 6772
  Clone ID: TF_ZmC114_23.pep

SEQ ID NO: 7206 - protein, 136 aa, Zea mays; identical to SEQ ID NO: 6772
  Clone ID: TF_ZmC114_31.pep

SEQ ID NO: 7207 - protein, 136 aa, Zea mays; identical to SEQ ID NO: 6772
  Clone ID: TF_ZmC114_33.pep

SEQ ID NO: 7208 - protein, 136 aa, Zea mays; identical to SEQ ID NO: 6772
  Clone ID: TF_ZmC114_36.pep

SEQ ID NO: 7209 - protein, 136 aa, Zea mays; identical to SEQ ID NO: 6772
  Clone ID: TF_ZmC114_39.pep

SEQ ID NO: 7210 - protein, 149 aa, Zea mays
  Clone ID: TF_ZmC369_103.pep
MAPKAEKKPAAKKPAEEEPAAEKATAGKKPKAEKRLPAGKSAGKEGGEKKGKKKAKKSVETYKIYIFKVLKQVHPDIGISSKAMSIMNSFINDIFEKLAAEAAKLARYNKKPTITSREIQTSVRLVLPGELAKHAVSEGTKAVTKFTSS

SEQ ID NO: 7211 - protein, 149 aa, Zea mays; identical to SEQ ID NO: 7210
  Clone ID: TF_ZmC369_104.pep

SEQ ID NO: 7212 - protein, 149 aa, Zea mays
  Clone ID: TF_ZmC369_111.pep
MAPKAEKKPAAKKPAEEEPAAEKAPAGKKPKAEKRLPAGKSAGKEGGEKKGKKKAKKSVETYKIYIFKVLKQVHPDIGISSKAMSIMNSFINDIFEKLAAEAAKLARYNKKPTITSREIQTSVRLVLPGELAKHAVSEGTKAVTKFTSS

SEQ ID NO: 7213 - protein, 149 aa, Zea mays; identical to SEQ ID NO: 7210
  Clone ID: TF_ZmC369_115.pep

SEQ ID NO: 7214 - protein, 149 aa, Zea mays; identical to SEQ ID NO: 7210
  Clone ID: TF_ZmC369_83.pep

SEQ ID NO: 7215 - protein, 238 aa, Zea mays
  Clone ID: TF_ZmC369_98.pep
MSGPPSTTSAIRIASVVRNGRTPSNSSTSAIRVAYPPTNGVQPPALYKVAPPAAFFRTQQQAISSPNKQPPPPRSRREEAQSRNRRPIPMAPKAEKKPAAKKPAEEEPAAEKATAGKKPKAEKRLPAGKSAGKEGGEKKGKKKAKKSVETYKIYIFKVLKQVHPDIGISSKAMSIMNSFINDIFEKLAAEAAKLARYNKKPTITSREIQTSVRLVLPGELAKHAVSEGTKAVTKFTSS

SEQ ID NO: 7216 - protein, 121 aa, Zea mays
  unsure (1)..(121): unsure at all Xaa locations
  Clone ID: TF_LIB3279-044-P1-K1-D9.pep
PHSSPFQTLLYFHSAFAARRYRWSEGDHEEHRAQVHVAGKVPRKQLATNAVRKSSPAXTGGVKKPHRFRPGTEALHEILKYQKSTELLIRKLPFQRLVREIAQDFKTDLRFQSFVVACAEG

SEQ ID NO: 7217 - protein, 94 aa, Zea mays
  unsure (1)..(94): unsure at all Xaa locations
  Clone ID: TF_LIB4729-111-A1-K1-C1.pep
TARKSTGXKAPRKXLXTKVARKSAPAPGGVKKPHRFRPGTVVLREIRKYXRARSCCIRKLPSQRPVREIAQDFQMNLRIQIXAVAALDEADEAH

SEQ ID NO: 7218 - protein, 149 aa, Zea mays
  Clone ID: TF_LIB4976-058-A1-K1-A12.pep
YPNPELYYTVVQSTRAQQVYIERRRASRRRRLLEVVVLVDDLGDVPGAAHALGEDDKVSRAEFPTSSRTSAARYSRTAARYTGAPAPTRSAYLPALRNLAILPTGNWSPALELLDVAFFAAPAPIALPRPAIPSHDRTTRKRQLALERL

SEQ ID NO: 7219 - protein, 113 aa, Zea mays
  Clone ID: TF_LIB3227-021-P1-K1-F10.pep
MDVSVACRKAKKGAVSRKAGWPTKKSVSRSYRAGLQFPVSRVWRYLKKGRYAQRVRTGAPVYLVDVLEYLADEVLVLDGYSARDNMKTRMIPRHVLLVIRNDEELSKLLAGVT

SEQ ID NO: 7220 - protein, 145 aa, Zea mays
  unsure (1)..(145): unsure at all Xaa locations
  Clone ID: TF_LIB3088-031-Q1-K1-E9.pep
QSLASDPRAKQSASVSSVPMARTKHTAMKSTGGKAPRKQLATKAARKSAPATDXVKKPHRFRPGTVSLREIRKYQKSTELLIRKLPFQHLVREIAHDSKTDLRFQSFGVASLHDACYAYLVHLFEDTNTCAIHAKPVTIMPKDIH

SEQ ID NO: 7221 - protein, 173 aa, Zea mays
  unsure (1)..(173): unsure at all Xaa locations
  Clone ID: TF_LIB3354-104-Q6-K6-B1.pep
PFRPSLASESWGPGQKAAPPRRGRREQRREXXXKQTARKXTGGKAPXQQLATXAARKSAPATGGVKKPHRYRPGTVALREIRXXQKSTELLIRXLPFQRLVREIAQDFKTDLRFQSHAVLALQEAAEAYLVGLFGDTFLCAIHAXRVTIMPKDIQLARRFRGERALLFSPGIC

SEQ ID NO: 7222 - protein, 150 aa, Zea mays
  Clone ID: TF_ZmC369_120.pep
MAPKAEKKPAAKKPAEEEPAAEKTTAGKKPKAEKRVPAGKSAGKEGGEGKRGKKKGKKSVETYKIYIFKVLKQVHPDIGISSKAMSIMNSFINDIFEKLAGEAAKLARYNKKPTITSREIQTSVRLVLPGELAKHAVSEGTKAVTKFTSS

SEQ ID NO: 7223 - protein, 150 aa, Zea mays
  Clone ID: TF_ZmC369_124.pep
MAPKAEKKPAAKKPVEEEPAAEKTTAGKKPKAEKRVPAGKSAGKEGGEGKRGKKKGKKSVETYKIYIFKVLKQVHPDIGISSKAMSIMNSFINDIFEKLAGEAAKLARYNKKPTITSREIQTSVRLVLPGELAKHAVSEGTKAVTKFTSS

SEQ ID NO: 7224 - protein, 150 aa, Zea mays; identical to SEQ ID NO: 7222
  Clone ID: TF_ZmC369_132.pep

SEQ ID NO: 7225 - protein, 150 aa, Zea mays; identical to SEQ ID NO: 7222
  Clone ID: TF_ZmC369_32.pep

SEQ ID NO: 7226 - protein, 150 aa, Zea mays; identical to SEQ ID NO: 7223
  Clone ID: TF_ZmC369_71.pep

SEQ ID NO: 7227 - protein, 153 aa, Zea mays
  Clone ID: TF_ZmC369_81.pep
MAPKADKKPAAKKSAEEEPATEKAEKAPAGKKPKAEKRLPAGKSAGKEGGEGKKGKKKAKKSVETYKIYIFKVLKQVHPDIGISSKAMSIMNSFINDIFEKLAAESAKLARYNKKPTVTSREIQTSVRLVLPGELAKHAVSEGTKAVTKFTSS

SEQ ID NO: 7228 - protein, 153 aa, Zea mays
  Clone ID: TF_ZmC369_85.pep
MAPKADKKPAAKKPAEEEPATEKAEKAPAGKKPKAEKRLPAGKSAGKEGGEGKKGKKKAKKSVETYKIYIFKVLKQVHPDIGISSKAMSIMNSFINDIFEKLAAESAKLARYNKKPTVTSREIQTSVRLVLPGELAKHAVSEGTKAVTKFTSS

SEQ ID NO: 7229 - protein, 151 aa, Zea mays
  Clone ID: TF_ZmC369_30.pep
MAPKAEKKPAAKKPAEEEPATEKVEKAPAGKKPKAEKRLPAGKSKEGGEGKKGKKKAKKSVETYKIYIFKVLKQVHPDIGISSKAMSIMNSFINDIFEKLAAEAAKLARYNKKPTITSREIQTSVRLVLPGELAKHAVSEGTKAVTKFTSA

SEQ ID NO: 7230 - protein, 106 aa, Zea mays
  unsure (1)..(106): unsure at all Xaa locations
  Clone ID: TF_700381601H1.pep
ELLIRKLPFQRLVREIAQDFKTDLRFQSAXIGALQEASEXAWWVCSKIPTCVPSTLRESPSCPKTSSWLAGYGERELKXRQXLWRFVVNSVKYFGLICDFFCKNCL

SEQ ID NO: 7231 - protein, 111 aa, Zea mays
  unsure (1)..(111): unsure at all Xaa locations
  Clone ID: TF_LIB3357-024-P1-K1-C11.pep
MAPMGGTNSANNTPLEDEPAVAXTTAGKKPKAQNAIPDGKSDAMDDGEGKRGLKKVTISVETYTIYILXALNLVLPYISISSKAMSIMNSFIINMFXKLVSEAIKLARYNK

SEQ ID NO: 7232 - protein, 113 aa, Zea mays
  Clone ID: TF_ZmC6067_4.pep
MARTKQTARKSTGGKAPRKQLATKAARKSAPTTGGVKKPHRYRPGTVALHEIRKYQKSTELLIRKLPFQRLVREIAQDFKTDLRFQSHAVLALQEAAEAYLVGLFELSDSATI

SEQ ID NO: 7233 - protein, 124 aa, Zea mays
  Clone ID: TF_LIB3153-005-Q1-K1-F11.pep
MHSTKQTSRKSTGINAPRKQLATKAARKSYPVTGGVNKPHRFRPVTVALREIRKYQKSTDLLIRMHPYQRLVREIAQDFKTDLRLQSSAAAALQDASDAYLVALFEDTNLCAIHAKRVTIMPKD

SEQ ID NO: 7234 - protein, 150 aa, Zea mays
  unsure (1)..(150): unsure at all Xaa locations
  Clone ID: TF_jC-zmX700431125a1.pep
FGSWPMDEKNSAEKKPAGVEKAVKTTAGQKPKCEKRLAASKSSCKEGGXRRGRXKAKKSVETYKMYIFKVLKQVHPDIGISCMAMFIRNFLINDIYQKLGGEVVKLARFIKKPTITSREIQTSVRLVLPGELAKHAVFEGTKGVTKSTSH

SEQ ID NO: 7235 - protein, 118 aa, Zea mays
  unsure (1)..(118): unsure at all Xaa locations
  Clone ID: TF_LIB3069-017-Q1-K1-H6.pep
EGGEKKGKKNAKKSVETCKMXIFKVLKQVHPDIGISSKAMSIMNSFINDIFEKLAAEAAKLARYNKKPTITSREIQTFVRLVLPGELAKHAVSEGTKAVTKFTSFYASDATCTRLFLQ

SEQ ID NO: 7236 - protein, 149 aa, Zea mays
  unsure (1)..(149): unsure at all Xaa locations
  Clone ID: TF_LIB3076-059-P1-K6-E11.pep
PRFSLHRWGSPSHQGAQGSPRNRWRRSPAVKDDRREEPKRRSGSPLASPPAREGGEGKRGKKKGKKSVETYKIYIFKVLKQVHPDIGISSKAMSIMNSFINDIFEKLAGEAAKLARYNKKPTITCREIQTXVRLVLPGELAKHAVSGGT

SEQ ID NO: 7237 - protein, 86 aa, Zea mays
  Clone ID: TF_LIB3088-027-Q1-K1-A6.pep
YASVLTTTKGYKNSPEKTPTNENSVNRATPNNFIPCKGDPHKNATKNANNSVATYKIYIFKELKHVHSYISISTKAMCIMNSFIND

SEQ ID NO: 7238 - protein, 41 aa, Zea mays
  Clone ID: TF_LIB3604-002-P1-N6-F12.pep
PTRAPLVGHFEDTNLCATQAKGVTTRPKDIHLARRIRGERA

SEQ ID NO: 7239 - protein, 117 aa, Zea mays
  Clone ID: TF_LIB3076-005-Q1-K1-D5.pep
FHIAPTAKTKPSPNKPTLENAHKKPTAEKLMPRKEVGEKNGNTNAMKSVTTYKIYIFNALNQVHPDIGISSNAMSIMNSFINYIFEKLAVDAGNLARYNKKPTITFLEIQTFVRLVL

SEQ ID NO: 7240 - protein, 114 aa, Zea mays
  unsure (1)..(114): unsure at all Xaa locations
  Clone ID: TF_LIB3067-001-Q1-K1-E7.pep
MAPKADKKPAAKKPAEEPATDKAEKAPAGKKPKAEKRLPAGKSDGKEGGEGKKGKKKAKKSGETYLIYSFKVLQYVHPYIGISSKAMCIMNSCSSTVSXKLASLSVKLARYIKK

SEQ ID NO: 7241 - protein, 122 aa, Zea mays
  unsure (1)..(122): unsure at all Xaa locations
  Clone ID: TF_LIB4742-054-R1-K1-C10.pep
MVRTKQTARKSTGGKAPRKLLATKAVRKSAPTTGGVNKPHRYWPGTVVAAXIRKYHKSTELLIRKLSFQSLVLEIAQDFKTDLRFHSHAVLVLQEAAEVYLFRLFQDTNLCAIHAKRVTILA

SEQ ID NO: 7242 - protein, 140 aa, Zea mays
  unsure (1)..(140): unsure at all Xaa locations
  Clone ID: TF_LIB3137-005-Q1-K1-G10.pep
MARTKQTARKGTGGKAPRKQLATKAARKSAPATGGVKKPHRFRPGTVALREIRKYQKSTELLIRKLPFQRLVREIAQDFKXDLRFQSSAXVSALQEXXEAYLVXLXEDTNLCAIHXKRVTIIXKDIQLARRSRARGLDMS

SEQ ID NO: 7243 - protein, 191 aa, Zea mays
  Clone ID: TF_ZmC119_1294.pep
MDSTGTGAGGKGKKGAAGRKVGGPRKKSVSRSVKAGLQFPVGRIGRYLKKGRYAQRVGTGAPVYLAAVLEYLAAEVLQFEPSSLFVLIWRRSINSCVPIRFASLFDQVLELAGNAARDNKKTRIIPRHVLLAIRNDEELGKLLGGVTIAHGGVLPNINPVLLPKKTAEKASSVGSKEAKSPKKAAKSPKKA

SEQ ID NO: 7244 - protein, 136 aa, Zea mays
  Clone ID: TF_LIB4757-029-Q1-K1-B8.pep
MARTKQTARKSTGGKAPRKQLATKAARKSAPAAGGVKKPHRYKPGTVALREIRRYQKSTELLIRKLPFQRLVREIAQDFKTDLRFQSSAIGALQEASEAYLVGLFEDTNLAAIHAKRVTIQPKDIALARRLRGERS

SEQ ID NO: 7245 - protein, 73 aa, Zea mays
  unsure (1)..(73): unsure at all Xaa locations
  Clone ID: TF_LIB3069-011-Q1-K1-F6.pep
PTITSRXEIQTSVRLVLTGELGKHAVSEGTKACTNFTSSYACTLDLASSSGADVHTELKLDVAGFSVRAALFL

SEQ ID NO: 7246 - protein, 145 aa, Zea mays
  unsure (1)..(145): unsure at all Xaa locations
  Clone ID: TF_LIB3607-002-P1-K6-A11.pep
PRPSRAGKGGKGGLAANPRRPXPPREDKGKKAPXXRXXRAGPQXXXGXXHXQXKQRTQAXXRGERTAXXXXXANQEXPTAEXXEPXGXASKXXKXKXXTXRXXQXAXRGDEEXDTXXKGTXAGGGXNPHKHKXXXNKXPKERRPG

SEQ ID NO: 7247 - protein, 137 aa, Zea mays
  unsure (1)..(137): unsure at all Xaa locations
  Clone ID: TF_LIB4730-068-R1-K1-G3.pep
MARTKQNGEEAHRRPSAPRKQLATKADRKSGPATGGXKKPHRFRPDTGALREIHKYHXSTELVIRKLPLQRLVREIAQDLKTVLHYQSSAAFALEQADEGYLAGLLEDTKLCAIHAKDRTIMPKGIHVVRRIRVRSA

SEQ ID NO: 7248 - protein, 109 aa, Zea mays
  Clone ID: TF_LIB4740-049-R1-K1-B11.pep
MIKMGELQNPRKGEIRRNCRVANNAPRQPRTAMASVQTTSELRRGREIAQDFKTDLRFQSSCVSALQEAGEAYLGGLCEDTNLCAIHAKRVTIMPKDIQLARRIREERA

SEQ ID NO: 7249 - protein, 145 aa, Zea mays
  Clone ID: TF_LIB4764-128-Q1-K1-C12.pep
FPYSCTERTSTACQAPPLNATANSWGRLAPPSSPATRAARNWCPATGIAKKPHRFRPGTVPLREIRKYQKSTELLIRKLPFQRLVREIAQDFKTDLRFQILSPSAPLQEAAKKHLTDAFEDTNICPIPRQRDTIMPTDPPPRAAH

SEQ ID NO: 7250 - protein, 184 aa, Zea mays
  unsure (1)..(184): unsure at all Xaa locations
  Clone ID: TF_LIB3635-001-P1-K6-F5.pep
ASGQSQLTANTAEPPPLPTRPASASPPPRINPQHRWRPXAEKKPAAKKPAEEEPATEKXEAPAGKKPKXEKRLPAGKSGAGEGKKGKKKAKKSVETYKIYIFKVLKQVHPDIGISSKAMSIMNSFINDIFEKLAAEAAKLARYNKKPTITFREIQTSVRLVLPGELAKHAVSXSTKGVTKFTFV

SEQ ID NO: 7251 - protein, 136 aa, Zea mays
  unsure (1)..(136): unsure at all Xaa locations
  Clone ID: TF_LIB4975-069-A1-K1-G5.pep
MARTKQTARKSTGGKAPRKQLATKAARKSAPTTGGVKKPHRYRPGTVALREIRKYQKSTELLIRKLPFQRLVREIAQDFKTDLRFQNHAVLGLQEGGEGXLGGLVEDTNLGGIHGKRVDIMAKDIPLARKNPGEKG

SEQ ID NO: 7252 - protein, 153 aa, Zea mays
  unsure (1)..(153): unsure at all Xaa locations
  Clone ID: TF_LIB4977-056-Q1-K1-D5.pep
EETARKSXGGKAPRKXLATKAAPQSGPGSGGVKXAPRLRPGTVAAREIRKYPKSAELLIRKLPFQRLVREIAQDFKTDLRFXSSAVSPLQEAAEAYLGGLFEDTNLCAIHAKRVTIMAKDIQLARRMPCGEGLSIVYSVISARSEDVEMCWVL

SEQ ID NO: 7253 - protein, 136 aa, Zea mays
  Clone ID: TF_LIB4756-072-R1-K1-D4.pep
MARTKNTAHRSTGVNARMKHLATKAARWSAPTTGVLKNAHRYRPVTAALREIRKYQKSTELLIRKLPFQRLVREIAQDFKTDLRFQSHAVLALQEAAEAYLVGLFEDTNLCAIHSKRVTIMPKDIQLARRIRGERA

SEQ ID NO: 7254 - protein, 136 aa, Zea mays
  Clone ID: TF_LIB4185-051-R1-L1-H7.pep
MARTKHTVRRSTGGKAPRKQLATNAARKSAPTTGGVKKPHRYRPGTVALREIRKYHKSTELLIRKLPFQRLVREISQDFKTDLRFQSHAVLALQEAADAYLVGLFDDTNLCAIHAKRVTIMPKDMQLARRLRGDRA

SEQ ID NO: 7255 - protein, 146 aa, Zea mays
  Clone ID: TF_ZmC519599_1.pep
MAGRKGGDRKKAVTRSVKAGLQFPVGRIGRYLKKGRYAQRVGSGAPVYLAAVLEYLAAEVLELAGNAAKDNKKTRIIPRHLLLAVRNDQELGRLLAGVTIAHGGVIPNINSVLLPKKSAAAEKEAKSPKKKAATKSPKKKAAAAKE

SEQ ID NO: 7256 - protein, 151 aa, Zea mays
  unsure (1)..(151): unsure at all Xaa locations
  Clone ID: TF_LIB4766-063-R1-K1-D1.pep
MDATATGAGGNANKGAVGRKAGXGRRNDLRGPMSRAMPNFQFPVGRIDRYLEMGRYPQHVSSAVPGYLACLLYHLAAEVLELPGNAAKDYEKTRIVSRHVLLAIHDHEDLGXLLTALTVAHGGXVLPNIRPVLLLKKTAVRASSSRDSGCQ

SEQ ID NO: 7257 - protein, 91 aa, Zea mays
  unsure (1)..(91): unsure at all Xaa locations
  Clone ID: TF_LIB143-070-P1-N6-A2.pep
PDKLYIYKVLHQVLPHIGISSKPMAIMNSFIEDIFEQLADESDKLAHYNHDPAVTSHEIQTWVSLVLMYKLAEHAVSXGTKAVTKFTSFLG

SEQ ID NO: 7258 - protein, 80 aa, Zea mays
  unsure (1)..(80): unsure at all Xaa locations
  Clone ID: TF_jC-zmX3059015Q1K1C08b1.pep
MARTKQTARKSTGGKAPRKQLATKAARKSAPATGGVNKPHRFRPGTVALREIRKYHKSTELLIRKLXPFQLLVRXIAQDF

SEQ ID NO: 7259 - protein, 56 aa, Zea mays
  Clone ID: TF_jC-zmX3059040Q1K1E07b2.pep
RLLRHQSHAVRALQEAAEAYQAGLHEDTNLSAIHAKRVTIMPKDMQLVRRIRGERA

SEQ ID NO: 7260 - protein, 121 aa, Zea mays
  unsure (1)..(121): unsure at all Xaa locations
  Clone ID: TF_LIB4668-003-R1-K1-B11.pep
MARTKQTARKSTGGKAPRKQLATKAARKSAPTTGGVKKPHRYRPGTGALREIRXCQKSTELLIRXLPFQRLVGEIAQDFETDLRFRSRAVLALREAGGACLGGLFVDAVLRAVRARRVPFL

SEQ ID NO: 7261 - protein, 130 aa, Zea mays
  Clone ID: TF_LIB4730-046-R1-K1-C4.pep
MAPKADKKPAAKKSAEEEPATEKAEKAPAGKKPKAEKRLPAGKSAGKEGGEGKKGKKKAKKSVETYKIYIFKVLKQVHPDIGISSKAMSIMNSFINDIFEKLAAESAKLARYNKKPTVTSPEIQTSVRLV

SEQ ID NO: 7262 - protein, 147 aa, Zea mays
  Clone ID: TF_LIB3059-015-Q1-K1-G3.pep
PLSHSEPFEPLIHPLELQTGPPPIRRPWPPPHQEPAGRRKKGAGGRKGRGPRKKVVTRSVKAGLQFPVGRIGRYLKKGRYAQRVRTGAPVYLARVLEYLAREVLEPGRNAAKDNKKTRIIPRHVLLAIRNDEELGKLLSGVTIAHGG

SEQ ID NO: 7263 - protein, 136 aa, Zea mays
  Clone ID: TF_LIB5072-097-A1-XP1-A11.pep
MARTKQTARKSTGGKAPRKQLAAKAARKSAPATGGVKKPHRYKPGTVALREIRRYQKSTELLIRKLPFQRLVREIAQDFKTDLRFQSSAIGALQESAEAYLVSLFEDTNLAAIHAKRVTIQPKDIQLARRLRGERS

SEQ ID NO: 7264 - protein, 156 aa, Zea mays
  Clone ID: TF_LIB3608-014-Q1-K6-F3.pep
RPASGSVQAREEIEQPRRGEEARTKQTARKSTGGKAPRKQLATKAARKSAPTTGGVKKPHRYRPGTVALREIRKYQKSTELLIRKLPFQRLVREIAQDFKTDLRFQSHAVLALQEAAEAYLVGLFEDTNLCAIHAKRVTIMPKDIQLARRIRCERT

SEQ ID NO: 7265 - protein, 136 aa, Zea mays
  unsure (1)..(136): unsure at all Xaa locations
  Clone ID: TF_LIB4732-063-Q1-K1-B4.pep
MARTKQTARKSTGGKAPRKQLATKAARKSAPATGGVKKPHRFRPGTVALREIRKYQKSTELLIRKLPFQRLVREIAQDFKTDLRFQSSAVSALHEAAEAYLVGLFXDTNLCAIHAKRVTIMPKDIQLARRIRGERA

SEQ ID NO: 7266 - protein, 149 aa, Zea mays
  Clone ID: TF_ZmC369_64.pep
MAPKAEKKPAAKKPAEEEPAAEKAPAGKKPKAEKRLPAGKSAGKEGGEKKGKKKAKKSVETYKIYIFKVLKQVHPDIGISSKAMSIMNSFINDIFEKLAAEAAKLARYNKKPTITSREIQTSVRLVLPGELAKHPVSKGTKAVPKFTSS

SEQ ID NO: 7267 - protein, 157 aa, Zea mays
  Clone ID: TF_ZmC76846_1.pep
MDGGGAKAKKAAAGRKLGGGGPKRKPVSRSVKAGLQFPVGRIGRYLKKGRYAQRVGTGAPVFLAAVLEYLAAEVLELAGNAARDNKKTRIIPRHLLLAIRNDEELGKLLGGVTIAHGGVLPNINPVLLPKKAAERAEKAAAAGPKSPKKAAAKSPKK

SEQ ID NO: 7268 - protein, 80 aa, Zea mays
  Clone ID: TF_LIB3116-025-P1-K1-F8.pep
APGRQLATKAVRKSAPTTGGGKKPNRSRPGPGALPRIRRSQKSTGFLIRRLPFKGLVRKIAQDLKTDFRFQSHAGLAFPE

SEQ ID NO: 7269 - protein, 153 aa, Zea mays
  unsure (1)..(153): unsure at all Xaa locations
  Clone ID: TF_LIB4766-128-A1-K1-G6.pep
MAPKVEKKPDAKKTAEEETAVAKGPVGKKAMADKRLPVDNSAGKEGVDKKGIKKXKKPVDTYKIYIFKGVKQDHPDICMSCKGMFIMHSFVNDIFXKLAGEAAKLARYSKKPAITSREIRTSVRLVLPGELIMHALSEGTKDVTKCHHRRFEA

SEQ ID NO: 7270 - protein, 137 aa, Zea mays
  unsure (1)..(137): unsure at all Xaa locations
  Clone ID: TF_jC-zmXLIB3527P004ah01a1.pep
MARTKHTARKLTGGKAXPRKQLATKAARKSAPTTGGVKKPHRFRPGTDALREIRKYQKSTELLMRKLPLQRLVREIAQDFKTDLRLQSSAVAELXEATEAYLVGLLEDTNLXAIHAKRVTIMPKDIQLARRIMGERA

SEQ ID NO: 7271 - protein, 150 aa, Zea mays; identical to SEQ ID NO: 7222
  Clone ID: TF_ZmC369_122.pep

SEQ ID NO: 7272 - protein, 156 aa, Zea mays
  Clone ID: TF_LIB5116-005-A1-PF1-A4.pep
MDASATGAGAKSKKGAAGRKAGGPRKKSVTRSVKAGLQFPVGRIGRYLKNGRYAKRVGTGAPVYLAVVLEYLAAELLELAGNAAKDNKESRIVPRHLLLAVRNDQELGRLLAGVTIAHGGVLPNINPVLLPKKTAEKEPKSPKKAAKSPKKAEKKA

SEQ ID NO: 7273 - protein, 44 aa, Zea mays
  Clone ID: TF_LIB3205-002-P1-N1-B12.pep
ARYNKKPTITSRKIQTSVGLVLPEKLAKHAVSEGTKAVTKFTSN

SEQ ID NO: 7274 - protein, 166 aa, Zea mays
  unsure (1)..(166): unsure at all Xaa locations
  Clone ID: TF_LIB4742-007-R1-K1-H9.pep
GTLGFGRVPAVLILPGGGALACPSLTRSRARTKQTARKTTGGKVRRKQVGSKASRKSAPATXGGGKKPHRFRPGTGTLRXEIRKNQKSTELLIRKLPCQXLVREIAQDFKTDLRFQSSAVSALQEAAEAYLVGLYEDTNLCAIHAKRVTIMPKDIQLARHIRGERA

SEQ ID NO: 7275 - protein, 170 aa, Zea mays
  unsure (1)..(170): unsure at all Xaa locations
  Clone ID: TF_LIB4979-048-R1-K1-A12.pep
MDSTGTGAGGKGKKGAAGRKGGGPRKKSVARSVKAGLQFPGGRIGRYLKKGRYAQRGGTGAPGYLAGGLEYLAAEVLELAGSGARDNKKTRIIPRHGLLAIRNDEELGKXLLGGVTIGHGGGVPNINPGLLAKKTAEKAPSVGTKEAKSPTKAAKSPTKDRLTAWRDLMV

SEQ ID NO: 7276 - protein, 135 aa, Zea mays
  unsure (1)..(135): unsure at all Xaa locations
  Clone ID: TF_LIB5024-012-R1-XP1-D8.pep
MSSGGGRGKPKGSKAVSRSTKAGLQFPVGRIARYLKAGKYAERVGGGAPVYLSAVLEYLAAEVLELAGNAARDNKKNRIVPRHIQLAVRNDEELSXLLGAVTIXXAGGVLPNIHQTLLPKKXGGKGKADIGSASQ

SEQ ID NO: 7277 - protein, 177 aa, Zea mays
  Clone ID: TF_ZmC653_59.pep
GRETPALKNAPEPATPKSPRTSSPNTVKHAPASTRTSAPTPMARTKQTARKSTGGKAPRKQLATKAARKSAPATGGVKKPHRFRPGTVALREIRKYQKSTELLIRKFPFQRLVREIAQDFKTDLRFQSSAVAALQEAAEAYLVGLFEDTNLCAIHAKRVTIMPKDIQLARRIRGERA

SEQ ID NO: 7278 - protein, 153 aa, Zea mays
  Clone ID: TF_ZmC369_53.pep
MAPKAEKKPAAKKPAEEEPATEKAEKAPAGKKPKAEKRLPAGKSAGKEGGEGKKGKKKAKKSVETYKIYIFKVLKQVHPDIGISSKAMSIMNSFINDIFEKLAAESAKLARYNKKPTITSREIQTSVRLVLPGELAKHAVSEGTKAVTKFTSS

SEQ ID NO: 7279 - protein, 159 aa, Zea mays
  unsure (1)..(159): unsure at all Xaa locations
  Clone ID: TF_LIB4828-008-R1-N1-F5.pep
GRGATASSPSNSFRPGIGRNRAAKERRRWPRTKQTAXRKSTGGKAPRMQLAXTKAARKSAPTTGGVKKPHRYRPGTVALREIRKYQMSTELLIRKLPFQRLVREIAHYFKTDLSFQSHAVLGLQEACEHSLQLLRWGIQIQGMQLLGMAIMAPSSSLAY

SEQ ID NO: 7280 - protein, 180 aa, Zea mays
  unsure (1)..(180): unsure at all Xaa locations
  Clone ID: TF_LIB5025-027-A1-XP1-C5.pep
MVTKVEKKSAVNITAKEEPAAEKAPAGKNSKADNRVPAGKSAVKEGVXVMRGKKKGMXSVETYKIYIFKVLKHVHPDIGISSQAMSIMNSFIIDIFEKLAADDGKLVRYNKKPTITSREIQTSVRLVLPGELAEHAVSDGTWADCEFTSDYAARSPLVGFSPVFTYLAAFRCCCLLASMH

SEQ ID NO: 7281 - protein, 134 aa, Zea mays
  Clone ID: TF_LIB4979-037-A1-K1-F8.pep
MARTKQTARKSTGGKAPRKQLATKAARKSAPATGGVKKPHRFRPGTVALREIRKYQKSTELLIRKLPFQRLVREIAQDFKTDLRFQSSAVAALQEASEAYLVGLFEDTIMPKDIQLARRIRGERAYASSRWRWK

SEQ ID NO: 7282 - protein, 138 aa, Zea mays
  unsure (1)..(138): unsure at all Xaa locations
  Clone ID: TF_LIB4729-095-Q1-K1-E3.pep
MARTKQTARKSTGGKAPRKQXLATNDALQVSPRATGXVKKPHRFRPGTVALREIRKYQKSTELLIRKLPFQRLVREIAQDFKTDLRFQSSDVAALQEVSEDYLVGLFEDTNLCAIHAKRVTIMPKDIQLARRIRGERA

SEQ ID NO: 7283 - protein, 199 aa, Zea mays
  Clone ID: TF_ZmC2139_5.pep
MYKLYSFKKKKKKKKKKKKKTDYKPVLCPSYHHRSPRFGFLPSSAPASRSGFRIPSALSLTKVAMAGRGKAIGSGAAKKATSRSSKAGLQFPVGRIARFLKAGKYAERVGAGAPVYLAAVLEYLAAEVLELAGNAARDNKKTRIVPRHIQLAVRNDEELSRLLGTVTIASGGVMPNIHNLLLPKKAGGGSAKAAAGDED

SEQ ID NO: 7284 - protein, 66 aa, Zea mays
  Clone ID: TF_LIB4762-070-Q1-K1-F9.pep
VAQGGPAHREGTAAPVYLAAVLEYLAAEVLELAGNAANDNKKTRIVPRHLLPAIRNDVGLWWLLSG

SEQ ID NO: 7285 - protein, 83 aa, Zea mays
  unsure (1)..(83): unsure at all Xaa locations
  Clone ID: TF_LIB3078-052-Q1-K1-H1.pep
MAPKGEKKPAEKKPAVEKGYKKPTAVKRVXELGGRREEGKXMAKKIVETYKIYMIKVLKHVHPVIGILINAMSIMNCFINDIF

SEQ ID NO: 7286 - protein, 97 aa, Zea mays
  Clone ID: TF_LIB3279-229-Q6-N6-F2.pep
MLQQVLELAGNPARDNKKTRIVPGHIQLPVGNDEELTQLLGGAPIASGGVMPNIPQPLLPKKGGLSKASPVDDDDNLSCPLEKRPSPPSCFLGLAPR

SEQ ID NO: 7287 - protein, 101 aa, Zea mays
  unsure (1)..(101): unsure at all Xaa locations
  Clone ID: TF_LIB3592-076-Q1-N6-E11.pep
KKGKKKAKKSVETSKIXIFRVLNQVPPDIGIWSKAMSIMNSFTNEIFKNRAAEGAKLAGYNKKPPIRSREIKTSVRLVLPGELPKHPVSEGPKPVPKFPSS

SEQ ID NO: 7288 - protein, 105 aa, Zea mays
  unsure (1)..(105): unsure at all Xaa locations
  Clone ID: TF_LIB5027-004-R1-XP1-C1.pep
MDVSGAGGKAKKGAAGRKAGGPTKKSVSRGSRAGLXLPVRRVGRYLKKGRYAQRVGTGAPVYFAAVLEYVAXEVLELAGNAGRDNKKTXIIARHVLLGIRNDEEL

SEQ ID NO: 7289 - protein, 89 aa, Zea mays
  Clone ID: TF_uC-zmroteosinte067a12a1.pep
RAREIRKYQKSTDLLIRKLPFQRLVREIAQDFKTDPRFQSSAVSALQKAAEAYLVGLFEDTNLCAIHAKRVTIMPKDIQLARRIRGERA

SEQ ID NO: 7290 - protein, 87 aa, Zea mays
  Clone ID: TF_ZmC103364_1.pep
REIRKYQKSTELLIRKLPFQRLVREIAQDFKTDVRFQSHAVLALQEAAEAYLVGLFEDTNLCAIHAKRVTIMPKDIQLARRIRGERA

SEQ ID NO: 7291 - protein, 110 aa, Zea mays
  unsure (1)..(110): unsure at all Xaa locations
  Clone ID: TF_uC-zmflteosinte076b05a1.pep
APPGNKPKSKKRVPLGXSSGKQGGQGXRGRNKGNNSVEPYKIYVFKVLKQVHPDIGISSKAMSIMNSFINDIFEKLASEPAKLARSIKKPSFSSREILTSVRLVLSGELS

SEQ ID NO: 7292 - protein, 150 aa, Zea mays
  Clone ID: TF_ZmC369_147.pep
MAPKAEKKPAAKKPAEEEPAAEKTTAGKKPKAEKRIPAGKSAGKEGGEGKRGKKKGKKSVETYKIYIFKVLKQVHPDIGISSKAMSIMNSFINDIFEKLAGEAAKLARYNKKPTITSREIQTSVRLVLPGELAKHAVSEGTKAVTKFTSS

SEQ ID NO: 7293 - protein, 147 aa, Zea mays
  Clone ID: TF_LIB5116-065-A1-PF1-F11.pep
MAGRKGGDRKKAVTRSVKAGLQFPVGRIGRYLKKGRYAQRVGSGAPVYLAAVLEYLAAGVLELAGNAAKDNKKTRIIPRHLLLAVRNDQELGRLLAGVTIAHGGVIPNINSVLLPKKSAAAAEKGAKSPKKKTSTKSPKKKTAATKE

SEQ ID NO: 7294 - protein, 120 aa, Zea mays
  unsure (1)..(120): unsure at all Xaa locations
  Clone ID: TF_LIB36-021-Q1-E1-G2.pep
FSILSRINASAIRESPANGIQSTPIPLEPDKPDPIAPNGDKKPAXKKPAAEDNAEKTTAGYKPKSEKRLPASKSSGKDGGEKNGKKKAKKSVXTYKIYIFKVLKHVHPDIRISSKGISIM

SEQ ID NO: 7295 - protein, 98 aa, Zea mays
  unsure (1)..(98): unsure at all Xaa locations
  Clone ID: TF_LIB3069-049-Q1-K1-E1.pep
MAPKADGKRAANKAAEDEPATEKADNAPAGKKPKAEKRLPAGKFSGKEGGXGKKGKKKAKKSVETYKIYIFKVLKHVHPDIGILFKGMFIMNSFINDI

SEQ ID NO: 7296 - protein, 201 aa, Zea mays
  unsure (1)..(201): unsure at all Xaa locations
  Clone ID: TF_LIB3606-017-Q6-K6-A3.pep
LVPAKPIASIRPWXSTGTGAGVREEGAAGRXVGGPRKKSVSRSVKAGLQFPVGRIGRYLKXGRYAQRVGTGAPVYLAAVLEYLAAEVLELAGNAARDNKKTRIIPLYVLLAIRNDEELGKLLGGVTIAHGGVLPNINPVLLPKKTAEKASSVGSKEAKSPKKAAKSPKKHRLTVWSDLMFSKTLIPVCGDALAVDGVDVLV

SEQ ID NO: 7297 - protein, 136 aa, Zea mays
  unsure (1)..(136): unsure at all Xaa locations
  Clone ID: TF_LIB4729-091-Q1-K1-D10.pep
MXXTXETARKATGGKAPRKQLATKAARKSAPATGGVKKPHRFRPXTXALREIRKYQKSTELLIRKXPFQRLVREIAQDFKTDLRXQXSAVAALQEAAEXYLVXLFGDTNLCAIHAKRVTIMXKDIQLARRIRGERA

SEQ ID NO: 7298 - protein, 177 aa, Zea mays
  unsure (1)..(177): unsure at all Xaa locations
  Clone ID: TF_LIB4975-019-R1-K1-C5.pep
MAAKSEKKPRRTSGARIDPRTTTQPAENNPNVEKRRPRVAMPAAKEGDXGESAEKKAKKSGETYXIYIFKVLKQAHPYIAISSSAMCIMNSFINDIFEKLAAEAAKLARYNKKXSITSREIQTSVRLVLPGQIDKHADLRRDRGRHRGRLDLLLRGRRLHDSLLSSRRLHVDTSCCL

SEQ ID NO: 7299 - protein, 115 aa, Zea mays
  unsure (1)..(115): unsure at all Xaa locations
  Clone ID: TF_LIB4729-014-R1-K1-D4.pep
MARTKQTARKSTGGKAPRKQLATKAARKSAPTTAGVKKPHRYRPGTGALREIRKNQKSTVLLIRKLILQRLVLKIAQDSKTDLLLQSHAVLALQEVXEAHLXELFVDTNLCAIHA

SEQ ID NO: 7300 - protein, 79 aa, Zea mays
  unsure (1)..(79): unsure at all Xaa locations
  Clone ID: TF_LIB3116-025-P1-K2-F8.pep
APRKQFATKVVRKSAPTTGVLNIPNRCGPGTVALREIRKYQKSTELLIRKLPFQRXVREIAQDFKTDFRFQSHSLLSLQ

SEQ ID NO: 7301 - protein, 94 aa, Zea mays
  Clone ID: TF_LIB4730-015-R1-K1-A10.pep
MARTKQTARMSTGGKAPRKQLATKAVRKSAPTTVGVKKPHRYRPVTVALREIRKYQKSTELLMRKLPFQRLVREIAHDLKTDLRLQSHACADTA

SEQ ID NO: 7302 - protein, 108 aa, Zea mays
  unsure (1)..(108): unsure at all Xaa locations
  Clone ID: TF_LIB4730-040-R1-K1-C12.pep
SAPTTGGVNKPHMYRPGMVVLXMIRKYQMITELVIRMLPFHRLVREIAQDLQTDLRVQRHPVLVLQEAGEVYLAGLFEDTNLCAIHAKRGIMMSKDIQLDRRIRSNWA

SEQ ID NO: 7303 - protein, 163 aa, Zea mays
  unsure (1)..(163): unsure at all Xaa locations
  Clone ID: TF_LIB4729-065-R1-K1-F10.pep
MDASAAGAGGKAKKGAAGRKAGGPRKKSVTRSVKAGLQFPVGRIGRYLKKGRYAQRVGTGAPVYLAAVLEYLAAEVLELGGNAAKDNKKTRIIPRHVLLAIRNDEELGKLLSRVTIAHXGVLPNINXVLLPKKTAEKGGGPRKAKSPREAGQSPQERHRRDRL

SEQ ID NO: 7304 - protein, 132 aa, Zea mays
  unsure (1)..(132): unsure at all Xaa locations
  Clone ID: TF_LIB4762-056-R1-K1-E5.pep
MQTARKSTGGKAPRKQLATKAARKSAPATGGVKKPHRFRPGTVALREIRKYQKSTELLIRKLPFQRLVREIAQDFKTDLRFQSSAVSALQEAAEAYLVGLFEDTNLCAIHAKRVTIMPKDIQLCPPIXGERA

SEQ ID NO: 7305 - protein, 150 aa, Zea mays
  Clone ID: TF_ZmC369_55.pep
MAPKAEKKPAAKKPAEEEPAAEKAPAGKKPKAEKRVPAGKSAGKEGGEGKRGRKKGKKSVETYKIYIFKVLKQVHPDIGISPKAMSIMNSFINDIFEKLAAEAAKLARYNKKPTITSREIQTSVRLVLPGELAKHAVSEGTKAVTKFTSS

SEQ ID NO: 7306 - protein, 79 aa, Zea mays
  unsure (1)..(79): unsure at all Xaa locations
  Clone ID: TF_LIB3279-059-P1-K1-H8.pep
KHRRTHTLPWGAAQSRGTMGRAKHTARKSTGGKVHRKHITTKEWRKTAPATGGEKKPHRFRPXTMALREIRMYQKSTEF

SEQ ID NO: 7307 - protein, 124 aa, Zea mays
  unsure (1)..(124): unsure at all Xaa locations
  Clone ID: TF_LIB3357-052-P1-K1-D5.pep
MVRTKQTGRKWTGGKAPQMHLATKAXARMSAPATDGIKKPHRFLPGTVQLRXILKHQKSTELLMRKLSCQRLVREIEQDLKTDLLFQFSAVAVLQEAADAHLVVLFEDTNLCAIQAMRVTIMPK

SEQ ID NO: 7308 - protein, 98 aa, Zea mays
  Clone ID: TF_LIB4185-050-R1-K1-D5.pep
KKKAKKKVQTPKISIFQGANQVPPAKGILSKAMSIMNPFINDIFEKRAVEAPKIARSNKKPPITSRGIQNSGALVLPGELPKPPVSKGPKAVSKFSSF

SEQ ID NO: 7309 - protein, 99 aa, Zea mays
  unsure (1)..(99): unsure at all Xaa locations
  Clone ID: TF_LIB4976-001-R1-K1-A4.pep
GVLKKVKYKAKNSGEMYKIYIFKVLKEVHPDIGISCMVMSIMNSFSNDIFEKLAAEAVKLARYNKKPSITSREIQTSVXLVLPGELAKHSVYEDTKVAT

SEQ ID NO: 7310 - protein, 127 aa, Zea mays
  Clone ID: TF_ZmC369_44.pep
APPGKKPKAEKRVPPGKSPPKKGGEGKRGKKKGKKSVETSKISIFKVFKQVPPDIGISSKAMSIMNSFINDIFEKLPVEAPKLARYNKKPPLPSREIQTSVGLVLPGELAKHPVSEGPKAVPKFPSA

SEQ ID NO: 7311 - protein, 178 aa, Zea mays
  unsure (1)..(178): unsure at all Xaa locations
  Clone ID: TF_LIB4731-015-R1-K1-F11.pep
PSPACFLSDRQPSQPSLPFVNSQRDRPAPTEGKKPAGKKHAQEEPARPPEKDRSGRKPTAGKQLPPGKNIRQEGGGDKQERTKDSQNERTDKLYIHKERTQAHPHIHMYFMDRHIQNXLINDIHQKQAGQAGKLARHNQKDTINYLEIHTYVRLALPTQLAKHARWEGTNDGSKHTYL

SEQ ID NO: 7312 - protein, 115 aa, Zea mays
  unsure (1)..(115): unsure at all Xaa locations
  Clone ID: TF_LIB3600-050-Q1-N6-E12.pep
VLKQVHPDIGISSKAMSIMNSFINDIFXKLAGEAPKLGRVHKKPPLPFREIQTSVGLVLPGELAKHPVSEGTKAVPQFPRNLARFGIPGFVKRVFFCVLFPVPPPTRLVASLPAL

SEQ ID NO: 7313 - protein, 175 aa, Zea mays
  unsure (1)..(175): unsure at all Xaa locations
  Clone ID: TF_LIB3595-026-Q1-K6-C2.pep
GPSRAPCFSLHWLLILLPSQYGGAQVRARSPRRKKPVAEEPAAREDDRRGRSPRAEKRVPAGXSAGKEGGEGKRGXKKKGMKSVETYKIYIFXVLKQVHPDIGILSKAMSIMNSFINDIFXEKLAGEAAKLARFNKKPTITFREILTSVRLVLPGELAKHALSEGTKAVTKFTSS

SEQ ID NO: 7314 - protein, 148 aa, Zea mays
  Clone ID: TF_LIB4758-062-R1-K1-D2.pep
MAPKAEKKPAEKKPAAEEKAEKTTAGKKPKAEKRLPASKSSGKEGGEKKGKKKAKKSVETYKIYIFKVLKQVHPDIGISSKAMSIMNSFINDIFEKLAGEAAKLARYNKKPTITSREIQTSVRLVLPGELAKHAVSEGTKVVTKFTSN

SEQ ID NO: 7315 - protein, 158 aa, Zea mays
  unsure (1)..(158): unsure at all Xaa locations
  Clone ID: TF_ZmC877532_1.pep
MDVSGTGAGAKGKKGAAGRKAGGPRKKSVTRSVKAGLQFPVGRIGRYLKKGRYAQRVGTGAPVYLAAVLEYLAAELLELAGNAAKDNKKSRIIPRHLLLAVRNDEELGKLLAGVTIAHGGVIPKINPVLLPKRTAEKEGXEPKSPKKATKSPKKTTKA

SEQ ID NO: 7316 - protein, 103 aa, Zea mays
  Clone ID: TF_LIB3227-021-P1-K1-F6.pep
MSGRGKGGKGLGKGGAKRHRRGLATTFKALTNPPFLSLPRRGGLNPFFGLFYKETRGVLKIFLENVFRDAVTYTEHARRRTVTAMVVVYALKRQGRTLYGFGG

SEQ ID NO: 7317 - protein, 101 aa, Zea mays
  Clone ID: TF_ZmC200443_1.pep
MNSMHFPVGRIHRHLKDSAQAGERVGATAAVYAAAVLEYLTAEIMELAGNACRDLKVKRITPRHLQLAVRGDEELDTLIKATIAGGGVIPHIHRELIDKAA

SEQ ID NO: 7318 - protein, 121 aa, Zea mays
  Clone ID: TF_LIB4979-081-A1-K1-B4.pep
APRKQMATKAARKSAPATGGVKKPHRFRPGTVALREIRKYQKSTELLIRKLPFQRLVREIAQDFKTDLRFQSSAVSALQEAAEAYLVGLFEDTNLCAIHAKRVTIMPKDIQLARRIRGERA

SEQ ID NO: 7319 - protein, 119 aa, Zea mays
  Clone ID: TF_LIB3150-078-P2-N2-D8.pep
ARKLEKAPAGRNAPHGGRPRHPRPDGAQGGEEASGEEAGGRGEGGEDDRREEAQGREAAARVQVLRQGGRREEGEEEGQEELGDLQDLHLQGAVGRCTPSSCIFSKVMSIIDFLYQLTF

SEQ ID NO: 7320 - protein, 100 aa, Zea mays
  Clone ID: TF_LIB4730-007-R1-K1-C6.pep
MARTKQTARKSTGGKAPRKQLATKAARKSAPATGGVKKPHRFRRGTVALREIRKYQKSTELLIRKLPFQRLVREIAQDLKTDLRFQSSDVGELEEVGEAY

SEQ ID NO: 7321 - protein, 118 aa, Zea mays
  Clone ID: TF_ZmC1215011_1.pep
KQLASKAARKSAPSTGGVKKPHRYKPGTVALREIRRYQKSTELLIRKLPFQRLVREIAQDFKSDLRFQSSAIGALQESVESYLVSLFEDTNLCAIHAKRVTIQSKDIQLARRLRGERN

SEQ ID NO: 7322 - protein, 155 aa, Zea mays
  Clone ID: TF_LIB3279-011-H6_FLI.pep
MDGSKAKKVAAKKFGGPRKKSVTKSIKAGLQFPVGRIGRYLKKGRYAQRVGSGAPVYLAAVLEYLAAEVLELAGNAAKDNKKSRIVPRHLLLAIRNDQELGRLLSGVTIAHGGVIPNINPVLLPKKAAEKAEKAEKTATKSPKKATKSPKKATKA

SEQ ID NO: 7323 - protein, 99 aa, Zea mays
  Clone ID: TF_LIB3632-007-Q1-N6-A9.pep
FRFQSSPVGALQEAPKASLVGLFEDTNLWAIPAKGVPFMPKDIQLGRRIRGERALTRRAPLPPGGVVVALAPLVGPGPLLVPLPGGKGLLGPLGLFLES

SEQ ID NO: 7324 - protein, 65 aa, Zea mays
  unsure (1)..(65): unsure at all Xaa locations
  Clone ID: TF_LIB5027-003-R1-XP1-H3.pep
MARRSKQMESTGGKAPRKXLATKVARKSPPATGGEKKPHRFRPGPAALREIRQHHNSTELIFRKA

SEQ ID NO: 7325 - protein, 71 aa, Zea mays
  Clone ID: TF_LIB4740-047-R1-K1-C8.pep
VTFQRLGREIGQYFKTDLSIQSHAVIALQEAAEAYLASLLEDTNLCAIHAKRVTIMPKDIQLARRIRGERA

SEQ ID NO: 7326 - protein, 175 aa, Zea mays
  Clone ID: TF_LIB3606-029-Q1-K6-F11.pep
SSPSQFVPCQAREIEQPRGEEARTKQTARKSTGGKAPRKQLATKAARKSAPTTGGVKKPHRYRPGTVALREIRKYQKSTELLIRKLPFQRLVREIAQDFKTDLRFQSHAVLALQEAAEAYLVGLFEDTNLCAIHAKRVTIMPKDIQLARRIRGERAYSYLAPGPHCGLRMEEGNL

SEQ ID NO: 7327 - protein, 136 aa, Zea mays; identical to SEQ ID NO: 6802
  Clone ID: TF_LIB4742-076-R1-K1-G12.pep

SEQ ID NO: 7328 - protein, 136 aa, Zea mays
  unsure (1)..(136): unsure at all Xaa locations
  Clone ID: TF_LIB4762-121-Q1-K1-C4.pep
MARTKQTARKSTGGKAPRKQLATKAARKSAPTTGGVKKPHRYRPGTVALREIRKYQKSTELLIRKLPFQRLVREIAQDFKTDLRFQSHAVLALQEAAEAYLVGLFEDTNLCAIHAKRVTIMPKDIQLARRIRXERA

SEQ ID NO: 7329 - protein, 136 aa, Zea mays; identical to SEQ ID NO: 6802
  Clone ID: TF_LIB4979-070-A2-K1-C5.pep

SEQ ID NO: 7330 - protein, 136 aa, Zea mays; identical to SEQ ID NO: 6802
  Clone ID: TF_LIB5116-015-A1-PF1-D3.pep

SEQ ID NO: 7331 - protein, 136 aa, Zea mays; identical to SEQ ID NO: 6802
  Clone ID: TF_LIB5116-023-A1-PF1-H6.pep

SEQ ID NO: 7332 - protein, 136 aa, Zea mays; identical to SEQ ID NO: 6802
  Clone ID: TF_ZmC114_10.pep

SEQ ID NO: 7333 - protein, 136 aa, Zea mays; identical to SEQ ID NO: 6802
  Clone ID: TF_ZmC114_15.pep

SEQ ID NO: 7334 - protein, 136 aa, Zea mays; identical to SEQ ID NO: 6802
  Clone ID: TF_ZmC114_20.pep

SEQ ID NO: 7335 - protein, 136 aa, Zea mays; identical to SEQ ID NO: 6802
  Clone ID: TF_ZmC114_22.pep

SEQ ID NO: 7336 - protein, 136 aa, Zea mays; identical to SEQ ID NO: 6802
  Clone ID: TF_ZmC114_24.pep

SEQ ID NO: 7337 - protein, 121 aa, Zea mays
  Clone ID: TF_ZmC114_26.pep
APRKQLATKAARKSAPTTGGVKKPHRYRPGTVALREIRKYQKSTELLIRKLPFQRLVREIAQDFKTDLRFQSHAVLALQEAAEAYLVGLFEDTNLCAIHAKRVTIMPKDIQLARRIRGERA

SEQ ID NO: 7338 - protein, 136 aa, Zea mays; identical to SEQ ID NO: 6802
  Clone ID: TF_ZmC114_28.pep

SEQ ID NO: 7339 - protein, 136 aa, Zea mays; identical to SEQ ID NO: 6802
  Clone ID: TF_ZmC114_30.pep

SEQ ID NO: 7340 - protein, 136 aa, Zea mays; identical to SEQ ID NO: 6802
  Clone ID: TF_ZmC114_34.pep

SEQ ID NO: 7341 - protein, 136 aa, Zea mays; identical to SEQ ID NO: 6802
  Clone ID: TF_ZmC114_35.pep

SEQ ID NO: 7342 - protein, 136 aa, Zea mays; identical to SEQ ID NO: 6802
  Clone ID: TF_ZmC114_38.pep

SEQ ID NO: 7343 - protein, 136 aa, Zea mays; identical to SEQ ID NO: 6802
  Clone ID: TF_ZmC114_40.pep

SEQ ID NO: 7344 - protein, 136 aa, Zea mays; identical to SEQ ID NO: 6802
  Clone ID: TF_ZmC114_41.pep

SEQ ID NO: 7345 - protein, 136 aa, Zea mays; identical to SEQ ID NO: 6802
  Clone ID: TF_ZmC263831_1.pep

SEQ ID NO: 7346 - protein, 136 aa, Zea mays; identical to SEQ ID NO: 6802
  Clone ID: TF_ZmC518114_1.pep

SEQ ID NO: 7347 - protein, 136 aa, Zea mays; identical to SEQ ID NO: 6802
  Clone ID: TF_ZmC518497_1.pep

SEQ ID NO: 7348 - protein, 136 aa, Zea mays; identical to SEQ ID NO: 6802
  Clone ID: TF_ZmC519633_1.pep

SEQ ID NO: 7349 - protein, 136 aa, Zea mays; identical to SEQ ID NO: 6802
  Clone ID: TF_ZmC653_105.pep

SEQ ID NO: 7350 - protein, 136 aa, Zea mays; identical to SEQ ID NO: 6802
  Clone ID: TF_ZmC653_107.pep

SEQ ID NO: 7351 - protein, 136 aa, Zea mays; identical to SEQ ID NO: 6802
  Clone ID: TF_ZmC653_108.pep

SEQ ID NO: 7352 - protein, 136 aa, Zea mays; identical to SEQ ID NO: 6802
  Clone ID: TF_ZmC653_28.pep

SEQ ID NO: 7353 - protein, 130 aa, Zea mays
  Clone ID: TF_ZmC653_33.pep
TARKSTGGKAPRKQLATKAARKSAPTTGGVKKPHRYRPGTVALREIRKYQKSTELLIRKLPFQRLVREIAQDFKTDLRFQSHAVLALQEAAEAYLVGLFEDTNLCAIHAKRVTIMPKDIQLARRIRGERA

SEQ ID NO: 7354 - protein, 136 aa, Zea mays; identical to SEQ ID NO: 6802
  Clone ID: TF_ZmC653_40.pep

SEQ ID NO: 7355 - protein, 136 aa, Zea mays; identical to SEQ ID NO: 6802
  Clone ID: TF_ZmC653_49.pep

SEQ ID NO: 7356 - protein, 136 aa, Zea mays; identical to SEQ ID NO: 6802
  Clone ID: TF_ZmC653_66.pep

SEQ ID NO: 7357 - protein, 136 aa, Zea mays; identical to SEQ ID NO: 6802
  Clone ID: TF_ZmC653_77.pep

SEQ ID NO: 7358 - protein, 136 aa, Zea mays; identical to SEQ ID NO: 6802
  Clone ID: TF_ZmC653_82.pep

SEQ ID NO: 7359 - protein, 42 aa, Zea mays
  Clone ID: TF_LIB3153-005-Q1-K1-H1.6U0.pep
HRFRFGSVALREIRKYLKSSELLIRKLPSQRLVRKIAQDSKT

SEQ ID NO: 7360 - protein, 145 aa, Zea mays
  Clone ID: TF_ZmC2139_2.pep
MAGRGKAIGSGAAKKATSRSSKAGLQFPVGRIARFLKAGKYAERVGAGAPVYLAAVLEYLAAEDSDSIIGALSVLELAGNAARDNKKTRIVPRHIQLAVRNDEELSRLLGTVTIASGGVMPNIHNLLLPKKAGGGSAKAAAGDED

SEQ ID NO: 7361 - protein, 125 aa, Zea mays
  Clone ID: TF_LIB4975-040-A1-K1-H3.pep
MAPKAEKKPAAKKPAEEEPAAEKAPAGKKPKAEKRVPAGKSAGKEGGEGKRGRKKGKKSVETYKIYIFKVLKQVHPDIGISSKAMSIMNSFINDIFEKLAAEAAKLARYNKKPTITSLVCSRVLL

SEQ ID NO: 7362 - protein, 178 aa, Zea mays
  unsure (1)..(178): unsure at all Xaa locations
  Clone ID: TF_LIB4764-068-R1-K1-D11.pep
HWVPRGRPGVLLLSPSSHHRCLRGSVSRRVRKTLLRSSLRIPSGHGRKRREAIGSRDAKNDMSSSSIRAGLQFPVGRIARFLKAGKYVERVGAGAPVYLAAVLEYLAAEVLXLAGNAARDNKKSRIVPRHIQLDDRNDEDLYRLLCTGTIDSGXDMPDIHNLVLSKKTACYQRQGCSW

SEQ ID NO: 7363 - protein, 312 aa, Zea mays
  unsure (1)..(312): unsure at all Xaa locations
  Clone ID: TF_ZmC119_1859.pep
MGGMPDAWADAWADAWADAWADAWEILVCTHIIESGIDIAHANTMIIQFAELYGLAQLYQLRGRVGRSGTEGFAYLFYTDKSLLSXLQRLGAIEEHSELGQGFHVAEKDMGIRGFGSLFGEQQSGDVANVGIDLFFDMLFDSLSKVDQFCLVPVPYKDVQLDINISPRLSSEYISYLENPVELLNEAAKAAEKDLWTLIQFTEDLRRRYGKEPRDMELLLKKLYVRRMAADLGISRIYPSGKMIFMKTNMNKKVFRLMTEAMTSETHRNSLSFAEKEIKAELLVNLPDTLLLNWLFHCLSDCYTVIPALVKY

SEQ ID NO: 7364 - protein, 156 aa, Zea mays
  unsure (1)..(156): unsure at all Xaa locations
  Clone ID: TF_LIB4979-060-R1-K1-E1.pep
MIPSAALTSRRTRGPREEEPATXNVDKDPTPKNPKARAWRLPAGKINGGRQRAKKDDKESQERRAYLPHLTSFKVXLRWWHPCIGLSCKAMSIMNSFINDIFENLAAESAKVLRYDEKATLTSREMHTSERLALPGELGQHAXSQGSKGGTKLTSS

SEQ ID NO: 7365 - protein, 68 aa, Zea mays
  Clone ID: TF_700426183H1.pep
MLVAMVGRGIAILFRLVYPATSMRSKAGLQFPVGRIARFLAAGKSAERVGAGAPVYLAAVLESLAAEV

SEQ ID NO: 7366 - protein, 183 aa, Zea mays
  Clone ID: TF_LIB4668-008-R1-K1-F1.pep
MLSGSRNNSEHISSHFFPSDPPFATKTPTRPASMAPKAEKKPAAKKPAEEEPAAEKAPAGKKPKAEKRVPAGKSAAKEGGEGKRGKKKGKKSVETYKIYIFKVLKQVHPDIGISFKAMSIMNFFINDIFEKLAGEGGQLARFYKKPTITFREIQTFVRLVLSGELGKHAVFEGTKGVTKVTSA

SEQ ID NO: 7367 - protein, 136 aa, Zea mays
  Clone ID: TF_LIB4744-093-A1-K1-H11.pep
MARTKQTARKSTGGKAPRKQLATKAARKSAPATGGVKKPHRFRPGTVALREIRKYQKSTELLIRKLPFQRLVREIAQDFKTDLRFQSSAVSVFHEAADAYLVGLFEDTNLCAIHAKRVTIMPKDIQLARRIRGERA

SEQ ID NO: 7368 - protein, 71 aa, Zea mays
  unsure (1)..(71): unsure at all Xaa locations
  Clone ID: TF_LIB3151-020-Q1-K1-G7.pep
AGEMARTKQTARKSTGGKAPRKQLATKAARKSAPTTGGMKKPHRYRPVTDALRXIRQYHKSTELLIRKLPF

SEQ ID NO: 7369 - protein, 135 aa, Zea mays
  unsure (1)..(135): unsure at all Xaa locations
  Clone ID: TF_LIB3151-020-Q1-K1-G7.R2.pep
MVRTKQTVRKSIFXKAPRKNLXGGGRKSAPTTGGVKKPHRYPPGTVALREIRKFQKSTELLIRKLPFQXLVGEIVQDFKTDLRFQSHAVLALQEAAVVYLGGLFEDTNLCAIHAKRVTIMPKDIHLAREIRGERA

SEQ ID NO: 7370 - protein, 69 aa, Zea mays
  unsure (1)..(69): unsure at all Xaa locations
  Clone ID: TF_LIB3245-607-P1-N1-A2.pep
MAFHNTAIHAVSEHKATSKSSKGGLLFLVGRIARVLKAGKYAERVCAGAPVYLAAVLXYLAAEVLELAP

SEQ ID NO: 7371 - protein, 136 aa, Zea mays
  Clone ID: TF_jC-zmXLIB3526P100ab02a1.pep
MARTKQTARKSTGGMAPRKQLATKAARKSEPTTVGVKKPHRYRPGTVALREIRKYHKSTELLIRKLTFQRLVREIAHDFKTDLRFQSHAVLALQEAAEAYLVSLFEDTNLCAIHAKRVTIMPKDIQLARRIRGERA

SEQ ID NO: 7372 - protein, 129 aa, Zea mays
  unsure (1)..(129): unsure at all Xaa locations
  Clone ID: TF_LIB3632-023-Q1-K6-G1.pep
EPGRDGRWRRTSPRRSCSRGEVPAGRTQAVNRLPAGXPAARTAATSKGTKKGTTSVRDLQEYLFTVLKHVHPYIMMYCNAMCIMNFFINDMLQKLDEMAVMLARYNMKATITSRVIQXTSVRLVLRGEL

SEQ ID NO: 7373 - protein, 129 aa, Zea mays
  Clone ID: TF_LIB4742-110-Q1-K1-E8.pep
MDASGAGMKGKKGAAARKVCGPTNKSSTRPVKAGLQFPVGRIGCYLMNGRNAQRVSTGSPVYLSAVLEYLAAEVLELAGNAWMDNKNTRIIPRHLLLAIRNDHDFAQLLACVTIAHGVPLPCMHSGLLP

SEQ ID NO: 7374 - protein, 136 aa, Zea mays
  unsure (1)..(136): unsure at all Xaa locations
  Clone ID: TF_LIB4828-124-R1-N1-B9.pep
MARTKQTARKSTGGKAPRKQLATKAARKSAPTTGGVKKPHRFRPGTVALREIRXYQKSTELLIRKLPFXRLVREIAQDFXTDLRYQSHAVLALXEAAEAYLVGLFEDTNLCAIHAXRVTIMXKDIXLARRIRGERA

SEQ ID NO: 7375 - protein, 231 aa, Zea mays
  Clone ID: TF_LIB4766-001-QB-K6-D11.pep
PEKKKKKKKKKKKKKKKKKKKKKKKKKKKGKGFFSGFSANRIQATPIPLDPEKPDPVGPKAGKKPGEKKPGAGEKGGKTTGGKKPKSEKGLAALKSFGKGGGGKKGKKKAKKRGGTYKIYIFKGLKQGPPDIGIFFKGMAIMNFFINDIFQKLAGGAPKFGGDKKEPTITFRGNQTFGGLGLPGGVGKNAGFGGTKGGPKFPNNWTAWRGHGFVRAPLFTRVFWRGLYPSP

SEQ ID NO: 7376 - protein, 128 aa, Zea mays
  unsure (1)..(128): unsure at all Xaa locations
  Clone ID: TF_LIB5026-022-B1-XP1-A5.pep
QSLAADPRAKQSASPLRTVPMARTKQTARKSTGGKAPRKQLATKAARKSAPATGGVKKPHRFRPGTVALREIRKYQKSTELLIRXQEASEAYLVGLFEDTNLCAIHAKRVTIMPKDIQLARRIRGERA

SEQ ID NO: 7377 - protein, 160 aa, Zea mays
  Clone ID: TF_jC-zmshLIB3587P009f02a1.pep
STGGKAPRKQFATKGARKLAPTTGGVKKPPRYRPGTVALREIPKFQKSQELVIPKLPFQRLVREIPQDFKTALRFQNHPVLAFQEAPKASLVGLLGGTNLWAIPDKRVPIMPKEIQLAPRIRGERVYPSFPGISASCMIQTNRKEQIGCAVLCYIELGYN

SEQ ID NO: 7378 - protein, 148 aa, Zea mays
  Clone ID: TF_ZmC369_151.pep
MAPKAEKKPAEKKPAAEEKAEKTTAGKKPKSEKRLPASKSSGKEGGEKKGKKKAKKSVETYKIYIFKVLKQVHPDIGISSKAMSIMNSFINDIFEKLAGEAAKLARYNKKPTITSREIQTSVRLVLPGELAKHAVSEGTKAVTKFTSN

SEQ ID NO: 7379 - protein, 149 aa, Zea mays
  Clone ID: TF_ZmC369_38.pep
MAPKAEKKPAAKKPAEEEPAAAKAPAGKKPKAEKRLPAAKSSGKEGGDKKGKKKAKKSVETYKIYIFKVLKQVHPDIGISSKAMSIMNSFINDIFEKLAGEAAKLARYNKKPTITSREIQTSVRLVLPGELAKHAVSEGTKAVTKFTSS

SEQ ID NO: 7380 - protein, 149 aa, Zea mays; identical to SEQ ID NO: 7379
  Clone ID: TF_ZmC369_134.pep

SEQ ID NO: 7381 - protein, 149 aa, Zea mays; identical to SEQ ID NO: 7379
  Clone ID: TF_ZmC369_150.pep

SEQ ID NO: 7382 - protein, 149 aa, Zea mays; identical to SEQ ID NO: 7379
  Clone ID: TF_ZmC369_72.pep

SEQ ID NO: 7383 - protein, 149 aa, Zea mays; identical to SEQ ID NO: 7379
  Clone ID: TF_ZmC369_74.pep

SEQ ID NO: 7384 - protein, 120 aa, Zea mays
  unsure (1)..(120): unsure at all Xaa locations
  Clone ID: TF_LIB3279-037-P1-K1-D4.pep
LEFSSTKFKVTAVKLSAISLPPKVCKGLGKGSSKLHRKVLRDNIYGITKPSIRRLARRGGVKRISGLIYXETRGVLNIFLENVIRYAVTYTEHSRLKTVTAMDVVYSFKRQGRTLYCFCG

SEQ ID NO: 7385 - protein, 157 aa, Zea mays
  unsure (1)..(157): unsure at all Xaa locations
  Clone ID: TF_LIB4729-103-Q1-K1-C10.pep
MDAIGAGTMGNKGAPGSKADVPRKKSETRSDKVGLQFHAGRIGCYLKKARYWQRGGTGAPVYLAADMEYLAAEVLXLLVNAVRDYKRTRIIPRHWLLMIRKDLVSSSYCCAKTTWGTVGVLCKILLRPPVQEGVEEGEHRGETGHPAMQEGRQCPLK

SEQ ID NO: 7386 - protein, 101 aa, Zea mays
  Clone ID: TF_LIB4975-015-R1-K1-D6.pep
MARTKQTARKSTGGKAPRKQLATKAARKSAPATGGVKKPHRFRPGTVALREIRKYQKSTELLIRKLPFQRLVREIAQDFKTDLRFQSSAAYSLKGLCVGYR

SEQ ID NO: 7387 - protein, 136 aa, Zea mays
  unsure (1)..(136): unsure at all Xaa locations
  Clone ID: TF_LIB4730-002-R1-K1-F8.pep
MGRTKQTVRKSTGGKAPRKQVATKAARKSAPATGGVKKPHRLRPGTXALREIRMDQKRTELLIRKLPIQRLVREIDQDIKTDLLFQSYIVDALHEAYDGYLVGLLEDTNLCAIYAERVAIMPKDIQLARRIPGERA

SEQ ID NO: 7388 - protein, 150 aa, Zea mays
  Clone ID: TF_LIB4766-002-R1-M1-B10.pep
MAPKAEKKPAAKKPAEEEPAAEKAPAGKKPKAEKRVPAGKSAGKEGGEGKRGRKKGKKSVETYKIYIFKVLKQVHPDIGISSKAMSIMNSFINDIFEKLAAEAAKLARYNKKPTITSREIQTSVRLVLPGELAKHAVSEGTKAVTKFTSS

SEQ ID NO: 7389 - protein, 150 aa, Zea mays; identical to SEQ ID NO: 7388
  Clone ID: TF_ZmC369_140.pep

SEQ ID NO: 7390 - protein, 150 aa, Zea mays; identical to SEQ ID NO: 7388
  Clone ID: TF_ZmC369_154.pep

SEQ ID NO: 7391 - protein, 150 aa, Zea mays; identical to SEQ ID NO: 7388
  Clone ID: TF_ZmC369_47.pep

SEQ ID NO: 7392 - protein, 49 aa, Zea mays
  unsure (1)..(49): unsure at all Xaa locations
  Clone ID: TF_LIB3114-059-P1-K1-G4.pep
QDFMTDLRFQSFXTAVLHEAXESYLVGLFEDTNLCAIHAERVTIMLKDI

SEQ ID NO: 7393 - protein, 94 aa, Zea mays
  unsure (1)..(94): unsure at all Xaa locations
  Clone ID: TF_LIB3357-025-P1-K1-G7.pep
MAPNAEKKPAANKPAEEEPAAEKAPAGKKPKAEKRVPAGKSAAKEGGEGKRGKKKGKKSVETYKIYIFKVLKQVHPDIGIXFKAMFIMNSFIYD

SEQ ID NO: 7394 - protein, 136 aa, Zea mays
  Clone ID: TF_ZmC697_67.pep
MARTKQTARKSTGGKAPRKQLATKAARKSAPATGGVKKPHRSRPGTVALREIRKYQKSTELLIRKLPFQRLVREIAQDFKTDLRFQSSAVSALQEAAEAYLVGLFEDTNLCAIHAKRVTIMPKDIQLARRIRGERA

SEQ ID NO: 7395 - protein, 90 aa, Zea mays
  unsure (1)..(90): unsure at all Xaa locations
  Clone ID: TF_LIB4835-001-R1-M1-H10.pep
VALRHIRKYHKSTQLLIRKLPSXRLVGEIAQDFKTDMRFQGHSVLAIQXAAEAYLVGLREVTNLCAIPAKRVPIMPKHIQLVRRIRGERA

SEQ ID NO: 7396 - protein, 110 aa, Zea mays
  unsure (1)..(110): unsure at all Xaa locations
  Clone ID: TF_LIB3069-057-Q1-K1-H9.pep
PNHRRLGSSSSRQHRVFEARTKQTAXKSTGGKAPRKQLATNAARKSAPATGGVKKPHRFRPGTVALREIRKYQKSTELLIRKLPFQRLVREIAQDFKTDLRFQSSAVAAL

SEQ ID NO: 7397 - protein, 98 aa, Zea mays
  Clone ID: TF_LIB3279-001-P1-K1-D10.pep
MAISISHRHDNMARANHTVRTSTQCNAPYKQVATNAQRKSAPTTCDDKKPHTYRPSTVALREIRKYQKSTELLILKLPFQRLDHEIAHDFKTDLQVQS

SEQ ID NO: 7398 - protein, 122 aa, Zea mays
  Clone ID: TF_LIB3357-027-P1-K1-F9.pep
MARTKQTARKSTGGKAPRKQLATKAARKSAPTTGGVKKPHRYRPGTVALREIRKYQKSTELLIRKLPFHRLAREIAQDFKTDLRFQSHAVLALQEAGEAYLVGLFEDTNLCAIHAKRVTIMP

SEQ ID NO: 7399 - protein, 101 aa, Zea mays
  Clone ID: TF_LIB3357-035-P1-K1-E10.pep
VVTYRVAGELKHLDREVLQYDAEVDRGNRANTMRVTALFEVPPNKADKKLQNGPGGPRHRLLSRTDGLEFVRNILSLKACSAQVHGCYCGASRSRKKRDLG

SEQ ID NO: 7400 - protein, 159 aa, Zea mays
  unsure (1)..(159): unsure at all Xaa locations
  Clone ID: TF_LIB3279-177-Q1-K6-A8.pep
PGEPPGATKTPTRPEAPKAEKKPAAKKPAEEEPAAEKAPAGKKPKAEKRGPGGKXXAKEGGEGKRGKKKGKKSXETXKXXXXKGXKQGHPDXGXXXKARAXXNXXXNXXXEKXXXEAAKXARXNKKXTXTXRENQTXGRXXXPGEXAKHAXXEGTKAGT

SEQ ID NO: 7401 - protein, 88 aa, Zea mays
  unsure (1)..(88): unsure at all Xaa locations
  Clone ID: TF_700206634H1.pep
MARKVEKKPAAKNPAEEEPAAEKTTAGKKLNAEKLVPAGKSAGIEGGEGKRGXMKGKKIVETYKIYIFKVLKQVHPVIGISSKAMSIM

SEQ ID NO: 7402 - protein, 122 aa, Zea mays
  unsure (1)..(122): unsure at all Xaa locations
  Clone ID: TF_LIB3969-002-Q1-M6-D12.pep
KGPRKQLTTKRARKXARATDGVKKSLRFRHGTVASREIRKYQKSTXMLIRKLPFQSFVLEIPQEFKTGLRFQSSPVTTMQESAKAYMVGLFKNTNLCAIHAKRVSIMPKDIQIVHRIRGERA

SEQ ID NO: 7403 - protein, 163 aa, Zea mays
  unsure (1)..(163): unsure at all Xaa locations
  Clone ID: TF_LIB4863-005-R1-K1-D7.pep
MDSTGTGAGGKGKKGAAGRKVGGPRKKSVSRSVKAGLQFPVDRIGRYLKKGRYAQRVGTGAPVYLAAVLEYLAAEVLELAGNAARDNKKTRIIPRHVLLAIRNDEELGKLLGGVTIAHGXVLLPNINPCSACQEERGEKASSVXEARRAKSPKKAGQVPPRRA

SEQ ID NO: 7404 - protein, 137 aa, Zea mays
  Clone ID: TF_ZmC369_114.pep
MAPKAEKKPAEKKPTEEKAEKKPRAEKRVPGKEGGEKKGKKKAKKSVETYKIYIFKVLKQVHPDIGISSKAMSIMNSFINDIFEKLAAEAAKLARYNKKPTITSREIQTSVRLVLPGELAKHAVSEGTKAVTKFTSS

SEQ ID NO: 7405 - protein, 137 aa, Zea mays; identical to SEQ ID NO: 7404
  Clone ID: TF_ZmC369_141.pep

SEQ ID NO: 7406 - protein, 137 aa, Zea mays; identical to SEQ ID NO: 7404
  Clone ID: TF_ZmC369_146.pep

SEQ ID NO: 7407 - protein, 67 aa, Zea mays
  Clone ID: TF_LIB5025-016-B1-XP1-F1.pep
MDVSGAGGKAKKGAAGRKAGGPTKKSVSRSSRAGLQFPVSRVGRYLKKGRYAHRVCTGAPVYLAAVL

SEQ ID NO: 7408 - protein, 136 aa, Zea mays
  unsure (1)..(136): unsure at all Xaa locations
  Clone ID: TF_LIB4827-072-R1-N1-D12.pep
ARTNHTARKSTVGNDPRKQLATKDARKSAPXAPGGEKKAHRYRPATVGLREIRKYHNSTELLIKKLPFQRLVRXIAHDFKTDFCFQSHAELALQEAAEAYLVGLFEDTNLCDIHAKRVTIMPKDIQLXRRIRGERA

SEQ ID NO: 7409 - protein, 117 aa, Zea mays
  Clone ID: TF_ZmC369_102.pep
KRVPAGKSAGKEGGEGKRGRKKGKKSVETYKIYIFKVLKQVHPDIGISSKAMSIMNSFINDIFEKLAAEAAKLARYNKKPTITSREIQTSVRLVLPGELAKHAVSEGTKAVTKFTSS

SEQ ID NO: 7410 - protein, 118 aa, Zea mays
  unsure (1)..(118): unsure at all Xaa locations
  Clone ID: TF_ZmC653_46.pep
MDGAEVGVLEETHQVRLTQLSPMARTKQTARKSTGGKAPRKQLATKAARKSAPATGGVKKPHRFRPGTVALREIRKYQKSTELLIRKLPFXQRLVREIAQDFKTDLRFQSSCSAATAE

SEQ ID NO: 7411 - protein, 110 aa, Zea mays
  Clone ID: TF_LIB4979-019-A1-K1-E4.pep
MAPARRTARKSTGAKAAEKQLATKGARKSAPATGVVKKLHRFRPGTVALREIGKSLKSTELLIREVAFQRLVREIAQALQSDLRFQSSAVSRLGEAAERYLVARCEDASL

SEQ ID NO: 7412 - protein, 127 aa, Zea mays
  unsure (1)..(127): unsure at all Xaa locations
  Clone ID: TF_LIB3279-174-P1-K6-E10.pep
MARTKQTARKSTGGKAPRKQLATKAARKSAPATGGVFKPHRFRPGTVALLXEIRKYQKSTELLIRKLPFQRLVLEIAQDFKTDLRXSPPPTRLLQEADRANLVGVLEDINFCSIQAKCVTFMPKDIS

SEQ ID NO: 7413 - protein, 137 aa, Zea mays; identical to SEQ ID NO: 7163
  Clone ID: TF_LIB4742-082-R1-K1-H5.pep

SEQ ID NO: 7414 - protein, 137 aa, Zea mays; identical to SEQ ID NO: 7163
  Clone ID: TF_ZmC369_125.pep

SEQ ID NO: 7415 - protein, 137 aa, Zea mays; identical to SEQ ID NO: 7163
  Clone ID: TF_ZmC369_126.pep

SEQ ID NO: 7416 - protein, 137 aa, Zea mays; identical to SEQ ID NO: 7163
  Clone ID: TF_ZmC369_67.pep

SEQ ID NO: 7417 - protein, 137 aa, Zea mays; identical to SEQ ID NO: 7163
  Clone ID: TF_ZmC369_91.pep

SEQ ID NO: 7418 - protein, 137 aa, Zea mays; identical to SEQ ID NO: 7163
  Clone ID: TF_ZmC369_92.pep

SEQ ID NO: 7419 - protein, 110 aa, Zea mays
  Clone ID: TF_LIB3076-044-Q1-K1-G3.pep
LRPVLVLQGDLLQLKGGKGLCKGGANRHRKVLRDNIHGITKPAILMLALMGGVKRISVLIYEETRYVLKIFLENVILDTFTYTEHARRKTDTAMDVDYTLKLQCRTLYGF

SEQ ID NO: 7420 - protein, 54 aa, Zea mays
  Clone ID: TF_LIB3279-224-Q6-N6-B8.pep
EKFAAGAAKFARYNKKPPFPSGEIQTWVGLVLPGGLAKHAVSEGAKGVPKFTPS

SEQ ID NO: 7421 - protein, 191 aa, Zea mays
  unsure (1)..(191): unsure at all Xaa locations
  Clone ID: TF_LIB4730-144-A1-K1-G1.pep
MARTKQTARKSTGGKAPRKQLATKAARKSAPATGGVKKPHRFRPGTVALREIRKYQKSTELLIRKLPFQRLVREIAQDFKTDLRFQSSAGAALQEAVEGYLGGFFEDSYLCAIRAEPRXVMTSALQLARRXRGERALSVHGGGGRSSRRSFWHPPVEVTTEKDEPFDKAFLVLARIWTGDPNLHFEVCCCS

SEQ ID NO: 7422 - protein, 60 aa, Zea mays
  Clone ID: TF_LIB4979-120-Q1-K1-A8.pep
TRISGLIYEETRHVLKIFLENVIRDAITYTQHARRNTDTAMHVEYAHKRQHRTLLRSRRS

SEQ ID NO: 7423 - protein, 126 aa, Zea mays
  Clone ID: TF_LIB3279-211-Q6-N6-C3.pep
PLGKNPKGEKRLPAGKSPAKEGGVSKKGGKKPKKRVERSKFSFFKVFNRGPPDMGFSSRALSFLNSFFKDFFKKFPGEGAKFPRFNKKPPFPSRGIQTSVPLFLPGGLPKPPVLGGPKAVPKFPSS

SEQ ID NO: 7424 - protein, 120 aa, Zea mays
  unsure (1)..(120): unsure at all Xaa locations
  Clone ID: TF_LIB4756-093-R1-K1-E3.pep
MARTKQTARKSTGGKAPRKQLATKAARTSAPTTGGAKKPHRYRPGTVALREIRKYQNSTELLIRKMPFQRLDREIAQDYNTDSRLXSHAVLALQEXCLRNTLLPLPEETNLXAIHAKTCD

SEQ ID NO: 7425 - protein, 109 aa, Zea mays
  Clone ID: TF_LIB3150-095-P1-N1-D1.pep
MARTKHTARKSTGGKAPRKQLATKAARKSAPATGGVKKPHRFRPGTVALREIRKYQKSTELLIRKLPSQRLVREIAQDFKTDLRFQSSAVAALHEAAEAYLVGLFEDTN

SEQ ID NO: 7426 - protein, 170 aa, Zea mays
  unsure (1)..(170): unsure at all Xaa locations
  Clone ID: TF_LIB4829-034-R1-N1-E6.pep
RPGFVSWHPQRACSVQATNYDVPPRAQEEDIEEDRLHEPTARESTEGNGPGKQVATNAESKSEPTNARSRRTPLIHRAGNVALRVIRKHCNSTLLLSRRVPCLRLWREIAHDFKTELRXRCSSPLELQQDGEGYLGVVLXDIILCCIDFKCDFIMPDDIQLCRRSRVLRK

SEQ ID NO: 7427 - protein, 121 aa, Zea mays
  unsure (1)..(121): unsure at all Xaa locations
  Clone ID: TF_LIB3059-047-Q1-K1-H1.pep
MAPKAEKKPAVEKPAEEEPAAEKATAGKKPKAEKRLPAGKYAGKEGGXKKGKKKANKSVETYKIYILQVLNQVHPDIGISSKAMSIMNSFINDIFEKLAAEAANLARYNKKPTITSSEIQT

SEQ ID NO: 7428 - protein, 101 aa, Zea mays
  unsure (1)..(101): unsure at all Xaa locations
  Clone ID: TF_LIB3279-014-P1-K1-D8.F2.pep
RRGAGGRQGPPRGPVRGHQPRRHPRQAGHHQAQGQPARPPQPRGARQGGRPERPGPGAQALHGSPPPAGGTWXRRGEXXSNVPNQANPXGGTNGNRHQGGP

SEQ ID NO: 7429 - protein, 92 aa, Zea mays
  Clone ID: TF_LIB3245-158-P1-N1-A4.pep
AAPKAKKGTGGHKDGGPTKKSVTWSLKAKMQFPIGRIGLYLKKGLYAQRVSTGALVYLVGDLEYLARRSCWICGGNPSQGPHERPASSLATC

SEQ ID NO: 7430 - protein, 121 aa, Zea mays
  Clone ID: TF_jC-zmX700352241a1.pep
MAPFAEKKPAAKKPAEEEPAAPAEKAPAGKKPKAEKRLPAGKSAGKEGGVDKKGRKKAKKSVETYKIYIFKVLKQVHPDIGIYSKAMSIMNSFINDIFEKLAGEAAKLRPYNMKPTITFRE

SEQ ID NO: 7431 - protein, 120 aa, Zea mays
  Clone ID: TF_LIB3332-011-P1-K1-A11.pep
PTRTKQTARKSSCGKAPRKQVSTKGGRVSAPATGGVKKPHRFRPGTAALREIRKYQKSTELLIQKLSFQLLVREIAQDFKTDLRFQSFAVTSLKEASLGAFLPIRMTSSFCLLITKPKKI

SEQ ID NO: 7432 - protein, 76 aa, Zea mays
  unsure (1)..(76): unsure at all Xaa locations
  Clone ID: TF_700448372H1.pep
AAEVLELAGNAAKDNKKTRIVXPRHIQLDVRNDEELTKLLGGVNIASCGFMPNIHQQLVPKKAGSSKASTVDDDEN

SEQ ID NO: 7433 - protein, 120 aa, Zea mays
  unsure (1)..(120): unsure at all Xaa locations
  Clone ID: TF_LIB3592-095-Q1-K6-C3.pep
SSLTPRSVRKCAPTTGGEKKXHRYRPGNCCTPSRSXTYQKSTELLIMKLPFQRLIREIAQXFKTDLAFXSSHAVLALQEAAEAYLAGLFEDTNLCAIHAKRVTIMPNDIQLARRIRGERA

SEQ ID NO: 7434 - protein, 164 aa, Zea mays
  Clone ID: TF_LIB4979-107-B1-K1-C9.pep
STISSFYTLLLEITSSRACFYSHFILSRGCAQQKTSTKSLVLLAPRNELATKAARKSAPATGGVKKPHRFRPGTVALREIRKYQKSTELLIRKLPFQRLVREIAQDFKTDLRFQSSAVAALQEASEAYLVGLFEDTNLCAIHAKRVTIMPKDIQLARRIRVDRA

SEQ ID NO: 7435 - protein, 148 aa, Zea mays; identical to SEQ ID NO: 7378
  Clone ID: TF_ZmC369_131.pep

SEQ ID NO: 7436 - protein, 148 aa, Zea mays; identical to SEQ ID NO: 7378
  Clone ID: TF_ZmC369_136.pep

SEQ ID NO: 7437 - protein, 148 aa, Zea mays; identical to SEQ ID NO: 7378
  Clone ID: TF_ZmC369_139.pep

SEQ ID NO: 7438 - protein, 148 aa, Zea mays; identical to SEQ ID NO: 7378
  Clone ID: TF_ZmC369_56.pep

SEQ ID NO: 7439 - protein, 148 aa, Zea mays; identical to SEQ ID NO: 7378
  Clone ID: TF_ZmC369_82.pep

SEQ ID NO: 7440 - protein, 148 aa, Zea mays; identical to SEQ ID NO: 7378
  Clone ID: TF_ZmC369_96.pep

SEQ ID NO: 7441 - protein, 85 aa, Zea mays
  Clone ID: TF_LIB4740-076-R1-K1-E7.pep
MSLNKPADKKSAAEEKVLMTTVVMKPKCEKRLPASKSFGTEGGEKKVKKMAKKIVETYKIYIFKALKLVHPDIGIFFNAMSMMNC

SEQ ID NO: 7442 - protein, 142 aa, Zea mays
  unsure (1)..(142): unsure at all Xaa locations
  Clone ID: TF_LIB4730-070-R1-K1-A3.pep
EPQNDQAATAAPRETWRRHPRQDKKPGAKKTGEEEPATEKAEKARAGKKPKREKRVPAGKSGGKEGGGGKKGKKKAKKSVETYKIYIFKVLKQVHPDIVIXVKAMSIMNCFISDIFEKLAGDCAELARYNKKPTVTCRDIHT

SEQ ID NO: 7443 - protein, 124 aa, Zea mays
  Clone ID: TF_LIB4730-063-R1-K1-H5.pep
MARTKQTARKSTGGKAPRKQLATKAARKSGPATGGVKKPHRYRPDTVALREIRKYHKSTELLIRKLPFQRLVRKIAQDFKPDLRFQSSGVAALEEAVEAYLVGFFEDTNLCDIHAKRVTKIPKV

SEQ ID NO: 7444 - protein, 112 aa, Zea mays
  Clone ID: TF_LIB4762-133-Q1-K1-G9.pep
RGSKSAPATGGVKKPHRFRPGTVALREIRKYQKSTELLIRKLPFQRLVREIAQDFKTDLRFQSSAVSALQEAAEAYLVGLFEDTNLCAIHAKRVTIMPKDIQLARRIRGERA

SEQ ID NO: 7445 - protein, 154 aa, Zea mays
  Clone ID: TF_LIB4974-066-Q1-K1-C8.pep
LEAGRAGQRTHLLAFLPIRSPLRNQNPNSPAGKKPKAEKRVPAGKSAAKEGGEGKRGKKKGKKSVETYKIYIFKVLKQVHPDIGISSKAMSIMNSFINDIFEKLAAEAKLARYNKKPTITSREIQTSVRLVLPGELAKHAVSEGTKAVTKFTSA

SEQ ID NO: 7446 - protein, 59 aa, Zea mays
  Clone ID: TF_LIB3088-050-Q1-K1-C2.pep
GSKAPAERTVGGPWKKSMSRCLKADLQFRVGRIWRYLKKGRYAQRVGTGALVYLDDVLE

SEQ ID NO: 7447 - protein, 41 aa, Zea mays
  Clone ID: TF_LIB3957-024-Q1-K6-E7.pep
MRDEEEDIDEIQTSVRLVLPGELAKHAVSEGTKAVTKFTSA

SEQ ID NO: 7448 - protein, 81 aa, Zea mays
  Clone ID: TF_LIB5116-016-A1-PF1-A4.pep
MAGRGKAIGAGAAKKATSRSSKAGLQFPVGRIARFLKAGKYAERVGAGAPVYLAAVLEYLAAEVRFSQISSLPLFSRYSIP

SEQ ID NO: 7449 - protein, 121 aa, Zea mays
  unsure (1)..(121): unsure at all Xaa locations
  Clone ID: TF_16917799.pep
ASDFQFQILRLRKSAPAPGGVKKPHRFRPGTVAFREIRKYQKSPELFIRKLPFQRVVGEIAQKFKTDLWFQSSPVPPLQEAPQGYLVGFFXDTNLWAIPAKRVPLMPKDIQLARRIRGERA

SEQ ID NO: 7450 - protein, 163 aa, Zea mays
  unsure (1)..(163): unsure at all Xaa locations
  Clone ID: TF_LIB4974-021-Q1-K1-B4.pep
MATMAEKNPALKKEASDDPSDEAAPIQXAPAMHKPQEEIRLPADKFADKEAVDNNGMKKENXSRRPYKTYICKVLKQEHHDLGISSKDMPIMNSFILHVVEIFGAQADKLGRXNKKATITSREIQTSVRLLLPGELVLHAVSDGTWVRHQGHLCLTALHYASM

SEQ ID NO: 7451 - protein, 123 aa, Zea mays
  unsure (1)..(123): unsure at all Xaa locations
  Clone ID: TF_LIB4762-046-R1-K1-G4.pep
ALSARSRHAIRSRDTAHGLSPDTGAGGKGEEWRAAXRMVGGPRKKSASRSEMAPLQFPDGRIGRYLKKGRYAQRVGTGAPVYLAAVLEYLAAEVLELAGNAARDNKKTRIIPRHVLLAIRNDE

SEQ ID NO: 7452 - protein, 147 aa, Zea mays
  unsure (1)..(147): unsure at all Xaa locations
  Clone ID: TF_LIB4758-085-R1-K1-H3.pep
MDASGAGSKGKKGAAGCKAGGPRKKSVTRSVKAGLQFPVCRIGRYLKKGRYSQRVGTGVPVYLAAVLEYLAAEVLELVGNAPKDFFXTRTLPRHVLLAIRNDEELPKLLASVTIXHGGVLLNIHSVLLPQKACEKAVSPGFNDLPFP

SEQ ID NO: 7453 - protein, 120 aa, Zea mays
  Clone ID: TF_LIB4730-018-R1-K1-A5.pep
MARTKQTARKSTGGKAPRKQLATKAARKSAPATGGVKKPHRFRPGIVALREIRKYQKSTELLIRKLPFQRLVREIAQDFKTDLRFQSSAVAALQEAAEAYLLGLFLDTILWAIHAKRVTI

SEQ ID NO: 7454 - protein, 152 aa, Zea mays
  Clone ID: TF_LIB4766-042-R1-K1-E3.pep
MAPKAEKKPAAKKPAEEEPAAPAEKAPAGKKPKAEKRLPAGKSAGKEGGVDKKGRKKAKKSVETYKIYIFKVLKQVHPDIGISSKAMSIMNSFINDIFEKLAGEAAKLARYNKKPTITSREIQTSVRLVLPGELAKHAVSEGTKAVTKFTSS

SEQ ID NO: 7455 - protein, 152 aa, Zea mays; identical to SEQ ID NO: 7454
  Clone ID: TF_ZmC369_107.pep

SEQ ID NO: 7456 - protein, 152 aa, Zea mays; identical to SEQ ID NO: 7454
  Clone ID: TF_ZmC369_109.pep

SEQ ID NO: 7457 - protein, 152 aa, Zea mays; identical to SEQ ID NO: 7454
  Clone ID: TF_ZmC369_110.pep

SEQ ID NO: 7458 - protein, 152 aa, Zea mays; identical to SEQ ID NO: 7454
  Clone ID: TF_ZmC369_119.pep

SEQ ID NO: 7459 - protein, 152 aa, Zea mays; identical to SEQ ID NO: 7454
  Clone ID: TF_ZmC369_133.pep

SEQ ID NO: 7460 - protein, 152 aa, Zea mays; identical to SEQ ID NO: 7454
  Clone ID: TF_ZmC369_33.pep

SEQ ID NO: 7461 - protein, 152 aa, Zea mays; identical to SEQ ID NO: 7454
  Clone ID: TF_ZmC369_43.pep

SEQ ID NO: 7462 - protein, 123 aa, Zea mays
  Clone ID: TF_ZmC369_59.pep
MAPKAEKRLPAGKSAGKEGGVDKKGRKKAKKSVETYKIYIFKVLKQVHPDIGISSKAMSIMNSFINDIFEKLAGEAAKLARYNKKPTITSREIQTSVRLVLPGELAKHAVSEGTKAVTKFTSS

SEQ ID NO: 7463 - protein, 152 aa, Zea mays; identical to SEQ ID NO: 7454
  Clone ID: TF_ZmC369_93.pep

SEQ ID NO: 7464 - protein, 152 aa, Zea mays; identical to SEQ ID NO: 7454
  Clone ID: TF_ZmC369_94.pep

SEQ ID NO: 7465 - protein, 117 aa, Zea mays
  unsure (1)..(117): unsure at all Xaa locations
  Clone ID: TF_LIB4730-036-R1-K1-H3.pep
FINQFIMPITYTTSPCPGAPALAPSTCTFCRSXRSSWPSSSPSSXRPPSRRTSRRAGASRTWASCLRPSSPPSPRPPASSPLASSRPWAPSGRDSGLSGSRGMGWTGCGWLETREWR

SEQ ID NO: 7466 - protein, 213 aa, Zea mays
  unsure (1)..(213): unsure at all Xaa locations
  Clone ID: TF_LIB4729-067-R1-K1-G7.pep
IPSRPASVAHDAEKKPAAKKPAEEDPAAEEAPGEKKPEEEKRLPAGXLLPREAGXGTRGKKDGKNSVASYNIFFLEVLKEVHPVIVFSSEVMFMMNFFIDDFFEKLADDADLLGCYNKNTIISSREIQSFGRLLLAGEVEQHAFYEGTEGVTKISSYYAGPPLVGGFSAVITFVAVSRCCWLLAFMDVYYPAGTAVLSDRTVMVIIPPRFFFF

SEQ ID NO: 7467 - protein, 102 aa, Zea mays
  Clone ID: TF_jC-zmXLIB3527P015Bh10d1.pep
QSGGTGAPVYLAAVLEYLVAEVLELAGNAAKDNKKTRIIPRHVLLAIRNDEELEKLLYGATIAHGGALPTIKPVLLPTKTAETAAAQDAKPPNKAVPPPKKA

SEQ ID NO: 7468 - protein, 149 aa, Zea mays
  unsure (1)..(149): unsure at all Xaa locations
  Clone ID: TF_LIB4185-036-R1-K1-H7.pep
MAPKAEKKPPPKKPPEEEPAAEKATAGKKPKAEKRLPPGKSPGKEGGEKKGKKKAKKSVETYKIYIFKVLKQVHPDIGILSKAMSIMNSFINDIFXKLAAEAAKLARYNKKPTITSREIQTSVRLVLPGELAKHPVSEGPKTVPKFPSS

SEQ ID NO: 7469 - protein, 153 aa, Zea mays
  Clone ID: TF_ZmC520105_1.pep
MAPKADKKPVAENKVEKAAEKTPAGKKPKAEKRLPAGKTASKEAGGEAKTRGRKKGSKAKKSVETYKIYIFKVLKQVHPDIGISSKAMSIMNSFINDIFEKLAGESAKLARYNKKPTITSREIQTSVRLVLPGELAKHAVSEGTKAVTKFTSS

SEQ ID NO: 7470 - protein, 136 aa, Zea mays
  Clone ID: TF_LIB4826-019-A1-N1-F2.pep
MARTKQTARKSTGGKAPRKQLATKAARKSAPTTGGVKKPHRYRPGTVALREIRKYQKSTELLIRKLPLQRLVREIAQDFKTDLRFQSHAVLALQEAAEAYLVGLFEDTNLCAIHAKRVTIMPKDIQLARRIRGERA

SEQ ID NO: 7471 - protein, 137 aa, Zea mays
  unsure (1)..(137): unsure at all Xaa locations
  Clone ID: TF_LIB4762-109-Q1-K1-E12.pep
MGRTILTARNSSDDKASRKRLVTNVPDQVCPRPLPVLNKPHRXRPDTVMLREIRKNQKSTNLLILKLSIXQLLCEIDQNFKTDLRFQSSGCAALKXESEIYLDGLFKDTNLCCIHVKSDTIMAKDIHFARRIPGYKT

SEQ ID NO: 7472 - protein, 106 aa, Zea mays
  Clone ID: TF_LIB3637-255-Q6-N6-H9.pep
FQGVGRGAPVCLPPVLEGLPREVLELAGNSAKATKKRGFVPRQGLRGIRTQGELGNLVGGGSLGPGGVLPENHSVFRPKKVAEKGASAGTKEPRSPKRGAWSPPRA

SEQ ID NO: 7473 - protein, 134 aa, Zea mays
  unsure (1)..(134): unsure at all Xaa locations
  Clone ID: TF_LIB3969-010-Q1-M6-G2.pep
RSVKTGLQFFFARMGCYVKKSRYAQCVGTGTSVCLTSVMXNLPAXVMQLTSFSAKSTNKASIVSGHVVFAIHNAEQLGNLVTSVPVALGGVLPNIHSVILPKKTSEKASTGGSKXTKSPKKFFKFLSYKAEGFK

SEQ ID NO: 7474 - protein, 75 aa, Zea mays
  unsure (1)..(75): unsure at all Xaa locations
  Clone ID: TF_LIB3150-075-P1-N1-F7.pep
MARTKHTARKSTGGKAPRKQLATKAVRKSAPTTGGVKNPHRYRPCTVALFEIRKFQKSTVLLIRKLPFSXLVREI

SEQ ID NO: 7475 - protein, 148 aa, Zea mays
  unsure (1)..(148): unsure at all Xaa locations
  Clone ID: TF_LIB4766-007-R2-K1-D10.pep
MAGRGKAIGSGAAKKATSRSSKAGLQFPVGRIARFLKAGKYAERVGAGAPVYLAAVLEYLAAENNGRILAEDLNLXVLELASNAARDNKKTRIVPRHIQLAVRNDEELSRLLGTVTIASGGGMPNIHNLLLPKKAGGGSAKAAAGDKD

SEQ ID NO: 7476 - protein, 128 aa, Zea mays
  unsure (1)..(128): unsure at all Xaa locations
  Clone ID: TF_LIB4740-009-R1-K1-F6.pep
MARTKQTARKSTGGKAPRKQLATKAARKSAPTTGGVKKPHRYRPGTVALREIRKYQKSTELLIRKLPFQRLVREIAQDFKTDLRFQSHAVLALQEAAEAYLVGLFXGPXLCALLAXRVAFLPLGLLLA

SEQ ID NO: 7477 - protein, 112 aa, Zea mays
  Clone ID: TF_LIB3357-004-P1-K1-G11.pep
AQGYTNQQQGKFSHSTLFYAGNIWLPATGGKGLCKDGSNRHRKVLRDNIQGITKPAIRRLARRGGVKRISGLIYEETRGVLKIFLENVIRDAFTYTEHARRKTVTAMDVFYA

SEQ ID NO: 7478 - protein, 126 aa, Zea mays
  Clone ID: TF_ZmC6351_58.pep
WLLCACWTSYNQKIEIFSRKKKKKKKKKKKKSATNLAFRGNSPAHHRPERKKPCPGAVRVARGSARAARSVTGRCCATTSRASPSRRSGGWRGGAASSASRGSSTRRPAACSRSSSRTHPRRRHLH

SEQ ID NO: 7479 - protein, 46 aa, Zea mays
  Clone ID: TF_LIB3357-035-P1-K1-H3.pep
EAHRFARTVALREIRRYQKSTELLIRKLPFQRLVREIAQELQRLDL

SEQ ID NO: 7480 - protein, 106 aa, Zea mays
  unsure (1)..(106): unsure at all Xaa locations
  Clone ID: TF_LIB3070-005-Q1-N1-B3.pep
MDSNDTGSXAKGKKGADGRKDCNPRKKSESEAVKAILQLHVCRIVRYLKKGRYTQHVSTCANVYLAAVLEYLAAEVLELAGNAARDIKMTRIITSHELMAIRNDEE

SEQ ID NO: 7481 - protein, 157 aa, Zea mays
  Clone ID: TF_ZmC2834_1.pep
MARTKHQAVRKTAEKPKKKLQFERSGGASTSATPERAAGTGGRAASGGDSVKKTKPRHRWRPGTVALREIRKYQKSTEPLIPFAPFVRVVRELTNFVTNGKVERYTAEALLALQEAAEFHLIELFEMANLCAIHAKRVTIMQKDIQLARRIGGRRWA

SEQ ID NO: 7482 - protein, 157 aa, Zea mays; identical to SEQ ID NO: 7481
  Clone ID: TF_ZmC2834_2.pep

SEQ ID NO: 7483 - protein, 136 aa, Zea mays
  Clone ID: TF_ZmC2834_4.pep
MARTKHQAVRKTQERAAGTGGRAASGGDSVKKTKPRHRWRPGTVALREIRKYQKSTEPLIPFAPFVRVVRELTNFVTNGKVERYTAEALLALQEAAEFHLIELFEMANLCAIHAKRVTIMQKDIQLARRIGGRRWA

SEQ ID NO: 7484 - protein, 187 aa, Zea mays
  Clone ID: TF_ZmC2834_5.pep
MARTKHQAVRKTAEKPKKKLQFERSGGASTSATPVSACVRGSVPSFCLFCGLLLLACKLFDGMQERAAGTGGRAASGGDSVKKTKPRHRWRPGTVALREIRKYQKSTEPLIPFAPFVRVVRELTNFVTNGKVERYTAEALLALQEAAEFHLIELFEMANLCAIHAKRVTIMQKDIQLARRIGGRRWA

SEQ ID NO: 7485 - protein, 167 aa, Zea mays
  Clone ID: TF_uC-zmflteosinte067f04b1.pep
SERDPGGPMAEKKPAAKKPAEEEPAAPAEKAPAGKKPKAEKRLPAGKSAGKEGGVDKKGRKKAKKSVETYKIYIFKVLKQVHPDIGISSKAMSIMNSFINDIFEKLAGEAAKLARYNKKPTITSREIQTSVRLVLPGELAKHAVWRAQGRTKSPRLALLVGLSAGRL

SEQ ID NO: 7486 - protein, 138 aa, Zea mays
  Clone ID: TF_LIB4730-049-R1-K1-C4.pep
MEPKRSRAETQVDRGAKGSRKQLATKAARTSSPSTGGVKKPHRLRPGTVALREIRKYQKSTKLVIRKLPIQRLEREIAQDFKTDLRFQSSAVAALQEAVEAYLVGLFEDTNLCAIHAKRVTIMPMDIQLARRIRGERA

SEQ ID NO: 7487 - protein, 136 aa, Zea mays
  Clone ID: TF_LIB4977-005-R1-K1-A4.pep
MARTKQTVRKSTGGKAPRKQLATKAARKSAPATGGVKKPHRFRPGTVALREIRKYHKSTELLIRKLPFQRLVREIAQDFKTDLRFQSSAVSALHEAAEAYLVSLFEDTNLCAIHAKRVTIMPKDIQLARRIRDERD

SEQ ID NO: 7488 - protein, 136 aa, Zea mays
  Clone ID: TF_LIB5026-038-Q1-XP2-B2.pep
MARTKQTARKSTGGKAPRKQLATKAARKSAPATGGVKKPHRFRPGTVALREIRKYQKSTELLIRKLPFQRLVREIAQDFKTDLRFQSSAGSALQEAAEGYLGGLFQDTNLWGIHGKGGTIMAQDIQLGRRIRGERA

SEQ ID NO: 7489 - protein, 102 aa, Zea mays
  Clone ID: TF_uC-zmroteosinte019g10a1.pep
DKKGRKKAKKSVKTYKIYIFKVLKQVHPDIGISSKAMSIMNSFINDIFEKLAAEAAKLARYNKKPTITSREIQTSVRLVLPGELAKHAVSEGTKAVTKFTSS

SEQ ID NO: 7490 - protein, 144 aa, Zea mays
  unsure (1)..(144): unsure at all Xaa locations
  Clone ID: TF_LIB4762-139-Q1-K1-C10.pep
EGGCEEPAQEEPAVAKAPADQXKPRTDKRLPAAKSTEKERGHQRAKKNAKNCXYTYYIYIFKVLKCDHSHIYISSEGMSXIMNSFINDIFEKLVVEAAKLARXNKKPTITSREIQTSVRLVLPGDVDKYALSEGTMGATKLTSS

SEQ ID NO: 7491 - protein, 150 aa, Zea mays
  Clone ID: TF_ZmC369_61.pep
MAPKAEKKPAAKKPAEEEPAAEKAPAGKKPKAEKRVPAGKSAAKEGGEGKRGRKKGKKSVETYKIYIFKVLKQVHPDIGISSKAMSIMNSFINDIFEKLAAEAAKLARYNKKPTITSREIQTSVRLVLPGELAKHAVSEGTKAVTKFTSA

SEQ ID NO: 7492 - protein, 134 aa, Zea mays
  Clone ID: TF_LIB5025-063-A1-XP1-B8.pep
MTGGGKSGGKASGSKNAQSRSSKAGLAFPVGRVHRLLRKGNYAQRVGAGAPVYLAAVLEYLAAEILELAGNAARDNKKTRIIPRHLQLAIRNDEELNKLLGHVTIAQGGVLPNIHQNLLPKKTGKTGKNASQEL

SEQ ID NO: 7493 - protein, 71 aa, Zea mays
  unsure (1)..(71): unsure at all Xaa locations
  Clone ID: TF_LIB4976-032-R1-K1-G8.pep
LYGGATGNLKNTRIWPHHIQLYVFSDHXLTKLLRTSTIPSGAVMPTIHQPLLSSNADSSNASDNNHNNCDC

SEQ ID NO: 7494 - protein, 79 aa, Zea mays
  Clone ID: TF_3341037.pep
KQVHPDIGISSKAMSIMNSFIKDIFEKLAGEAAKLVRYNKKPTIMSREIQTSVRLVFPGELAKHAVSEGTKAVTKFTSN

SEQ ID NO: 7495 - protein, 136 aa, Zea mays
  Clone ID: TF_LIB4762-048-R1-K1-H7.pep
MARTKQTARKSTGGKAPRKQLATKAARKSAPATGGVKKPHRFRPGTVALREIRKYQKSTELLIRKLPFQRLVREIAQDFKTDLRFQSSAVAVLQEAAEAYLVGLFEDTNLCAIHAKRVTMMPKDIQLARRIRGERA

SEQ ID NO: 7496 - protein, 136 aa, Zea mays
  Clone ID: TF_LIB4719-012-R1-K1-F1.pep
MARTKQTARKSTGGKAPRKQLATKAARKPAPTTGGVKKPHRYRPGTVALREIRKYQKSTDLLIRKLPFQRLVREIAQDFKTDLRFQSHAVLALQEAAEAYLVGLFEDTNLCAIHAKRVTIMPKDVQLARRIRGERA

SEQ ID NO: 7497 - protein, 136 aa, Zea mays
  unsure (1)..(136): unsure at all Xaa locations
  Clone ID: TF_3341197.pep
RQFAAASHPREPPPAVGNSPQPLTLASHLPQPAEDDPATDNVDNAPAGNKPKADKRLPAGKSNEGGEGYKGKKNANKSVETYKIYIFEVLKQVHPDIGISSNAMSIMNSFINDIFDKLAAESAXLARYXQKPTITS

SEQ ID NO: 7498 - protein, 124 aa, Zea mays
  unsure (1)..(124): unsure at all Xaa locations
  Clone ID: TF_LIB3595-023-Q1-N6-C2.pep
GKKPKAEKRVPAGKSAGKEGGEGKRGKKKGKKSVKTYKIYSSKVLKQVHPDIGISSKAMSIMNSFINDIFEKLAGEAAKLARYNKKPTITPREIQTPVRLVLPGELAKHAVXEGTKAVTKFTSP

SEQ ID NO: 7499 - protein, 170 aa, Zea mays
  Clone ID: TF_LIB4730-002-R1-K1-E2.pep
MAPKAEKKPAEKKPAAEEKAEKTTAGKKPKSEKRLPASKSSGKEGGEKKGKKKAKKSVETYKIYIFKVLKQVHPDIGISSKAMSIMNSFINDIFEKLAGEAAKLARYNKKPTITSREIQTSVRLVLPGELAKHAVSPSYKGSSSCPLPLPLPAYVCAVKIVMFSSGEQGQ

SEQ ID NO: 7500 - protein, 142 aa, Zea mays
  Clone ID: TF_ZmC584870_1.pep
MAPKAEKKPAAAEKTPAAEKTTAGKKPKAEKRPPKSKEGGADKRKKKAKKSVETYKIYIFKVLKQVHPDIGISSKAMSIMNSFINDIFEKLAGESAKLARYNKKPTITSREIQTSVRLVLPGELAKHAVSEGTKAVTKFTSS

SEQ ID NO: 7501 - protein, 153 aa, Zea mays; identical to SEQ ID NO: 7228
  Clone ID: TF_ZmC369_137.pep

SEQ ID NO: 7502 - protein, 152 aa, Zea mays
  Clone ID: TF_ZmC369_69.pep
MAPKADKKPAAKKPAEEPATEKAEKAPAGKKPKAEKRLPAGKSAGKEGGEGKKGKKKAKKSVETYKIYIFKVLKQVHPDIGISSKAMSIMNSFINDIFEKLAAESAKLARYNKKPTVTSREIQTSVRLVLPGELAKHAVSEGTKAVTKFTSS

SEQ ID NO: 7503 - protein, 133 aa, Zea mays
  Clone ID: TF_ZmC1223464_1.pep
MSGGKGGKAGGDKAASQSRSSKAGLQFPVGRIHRLLRKGNYAQRVGAGAPVYLAAVLEYLAAEILELAGNAARDNKKSRIIPRHLQLAIRNDEELNKLLGQKDISQGGVIPQIHSELLPAKSKDKTSKVSQEV

SEQ ID NO: 7504 - protein, 128 aa, Zea mays
  unsure (1)..(128): unsure at all Xaa locations
  Clone ID: TF_LIB4729-091-Q1-K1-H12.pep
PRPPPXXPPPPPPPPPPPVSVPPAPPGRRPRALLVSAHRGSGSGAHALGVLAGLEETGDPAGWERQPSLGAPGRRLVRGASANRLAGGRHCFARQGDRAAGAGVMRRGIWFNREXGCXSRERGGGPAG

SEQ ID NO: 7505 - protein, 111 aa, Zea mays
  unsure (1)..(111): unsure at all Xaa locations
  Clone ID: TF_ZmC114_32.pep
MARTKQTARKSTGGKAPRKQLATKAARKSAPTTGGVKKPHRYRPGTVALREIRKYQKSTELLIRKLPFQRLXEAYLVGLFEDTNLCAIHAKRVTIMPKDIQLARRIRGERA

SEQ ID NO: 7506 - protein, 55 aa, Zea mays
  Clone ID: TF_LIB148-002-Q1-E1-B12.pep
VVVHISTQDHGIEGAADAYLVGLFEDTNLCPIHAKRVTIMPKDIHLAMRIRRERA

SEQ ID NO: 7507 - protein, 66 aa, Zea mays
  Clone ID: TF_LIB3206-021-P1-N1-D8.pep
PRHVLLAIPNHEELGKFLTGVTIARGGVLPNINPVLLPKKTAEKASTGGSKEAKSPKKPAQSPKKA

SEQ ID NO: 7508 - protein, 154 aa, Zea mays
  unsure (1)..(154): unsure at all Xaa locations
  Clone ID: TF_LIB4730-061-R1-K1-A9.pep
GRREARRACRVARIGGPQEDSWMLRTVKAXSQIPVGRWARYIEEGXRYAQGGGTGAPVYLADVLEYVFAEVLELVGNAVRDNMKTRIIPSHVLLTIRNDEEIGKLLCGVTIAHGGVLTNINPDMLPKKTEREAYSXDSKEAKSTKKAAKSPKKA

SEQ ID NO: 7509 - protein, 148 aa, Zea mays
  unsure (1)..(148): unsure at all Xaa locations
  Clone ID: TF_jC-zmX700552707a1.pep
MAPKADKKSAAKKPVVDEPGGDKAHGGKKPKAEKCLPAAKXAGNDGGYKKGKKKATKWGETYKIYTFKVLKQVHPDIGISSKAMSIRNSFIDDIFDMLAGEAAKLARYNRKPTITCGEIQTSGRLVLAGELAKHAVFEGTMADTKFTS

SEQ ID NO: 7510 - protein, 153 aa, Zea mays; identical to SEQ ID NO: 7228
  Clone ID: TF_ZmC369_144.pep

SEQ ID NO: 7511 - protein, 168 aa, Zea mays
  Clone ID: TF_ZmC369_65.pep
AHGGLDLAGRDADAWADAWADAWAAAKKPAEEEPAAEKAEKAPAGKKPKAEKRLPAGKSAGKEGGEGKKGKKKAKKSVETYKIYIFKVLKQVHPDIGISSKAMSIMNSFINDIFEKLAAESAKLARYNKKPTVTSREIQTSVRLVLPGELAKHAVSEGTKAVTKFTSS

SEQ ID NO: 7512 - protein, 136 aa, Zea mays
  Clone ID: TF_ZmC584893_1.pep
MAPKAEKKPAAEKKPVETEKKPKAEKRVPGKDGGADKKKKKAKKSVETYKIYIFKVLKQVHPDIGISSKAMSIMNSFINDIFEKLAGESAKLARYNKKPTITSREIQTAVRLVLPGELAKHAVSEGTKAVTKFTSS

SEQ ID NO: 7513 - protein, 365 aa, Zea mays
  Clone ID: TF_ZmC21094_1.pep
MYHPQCELLTMAHETPDLDAGQPHLTVSGVASIPAELSFHLLHSLDAAAAVNPVTAPPQSTIDYFLGGADPHQQAMQYEPLPPAAGGHHQYTMDMFRDYCDGHYPTAEPYIRGTMTGALVFGATDDDDSAAAYMPGGHFETSPPPPRATGRGRKRGRALGGGFHAVLANGVEKKEKQRRLRLTEKFTALMHLIPNVTKTDRATVISDAIEYIQELGRTVEELTLLVEKKRRRRELQGDVVDAAPAAVVAAAGEAESSEGEVAPPPPAVPRQPIRSTYIQRRSKDTSVDVRIVEEDVNIKLTKRRRDGCLAAASRALDDLRLDLVHLSGGKIGDCQIYMFNTKIHKGSSVFASAVAGRLMEVVDEY

SEQ ID NO: 7514 - protein, 223 aa, Zea mays
  Clone ID: TF_ZmC3534_3.pep
NMNTGKCLEDGKRKGSGEDSSSLRSLGETSALQREVSMECADEKAGDARAKREDYVHVRAKRGQATNSHSLAERFRREKINERMKLLQDLVPGCNKITGKAMMLDEIINYVQSLQRQIEFLSMKLSAIGPGLNCDLDLQDILCTQDASSAFPGYNLQTSNVHINLYRASEEGFSHRNRIIPSPANVHVTRNAQLSAFPQRGVIWNEELCSIASDRNADSMKVE

SEQ ID NO: 7515 - protein, 156 aa, Zea mays
  Clone ID: TF_ZmC14919_2.pep
LIPHCNKTDKASILDETIEYLKSLQMQVQIMWMTSGMVPMVFPGAHQYMPPMALGMNSGCIPAAQGLSQMRRLPYMNHPMPNHIPLNSSPAMNPMNPLNTVNQFQNGHLREVPRPGPHVYGHQIAQAEEHNRILEVAASTVIPTSKAGQPPTFDGV

SEQ ID NO: 7516 - protein, 316 aa, Zea mays
  Clone ID: TF_ZmC25517_1.pep
MSSSGPLPATGTHHGSQRAECKSQGSTSARKVQKADREKMRRDKLNEQFQDLGNALDPDRPRNDKATILGDTIQMLKDLTTQVNKLKAEYTSLSEEACELTQEKNELRDEKASLKSEVDNLNNQYQQRMRVLYPWVGMEPSVVMGPPPAYPYPVPVPIPSGAVPMHPQLQTYHFFHSQASGTIPNTCIPYMAYTQPCHPPTDQPSNQLNTPVAHSSSHRSNSPAQDCRSKSSTLQQPSCGVRSSDAGDIATDLELKTPGSSCQSHAEIANNDSSSDLKTKKHCIKQINDCTLTESSSSSRCSSNGPPDVSNSAIDE

SEQ ID NO: 7517 - protein, 395 aa, Zea mays
  Clone ID: TF_ZmC6825_1.pep
MEDFGGWNMQYAAELCLPSRRDDDDDGLLGDFLGGGGLDIRSDHGGLNLPSSHPAVQNLVPCHGGVSLSVSDAFMGLDTADMLASVTGALDCSLLDTFACGSDAVVVAEEPAAQPTASSNAFSGYSSTTGGNYGNISSGESNTYGGSGGGHDTEVASPTCASKRKLAGKYPAIAASASATATTTTAEGQVAAPRRGTKRDSATSSSSTSATVAGHGGGNHAAGGGGSSSVGDGNGYEPDSEAIAQVKEMIYRAAAMRPVHQLVCGAAGGEPPSSSQNKPRRRNVRISSDPQTVAARLRRERVSERLRVLQRLVPGGSRMDTASMLDEAAGYLKFLKSQVKALERANPSSNGGYNDSSFLPQNYTGCLCVDGGTSVAFGSDGAIGGYVKPGRNMHR

SEQ ID NO: 7518 - protein, 231 aa, Zea mays
  unsure (1)..(231): unsure at all Xaa locations
  Clone ID: TF_ZmC35411_1.pep
EASGSGKHADGGKADREAIQLPGLFPPVFGGGVQPPHLRATPPTQVFHAQQPKQGGAAVGPQPPAPRPKVRARRGQATDPHSIAERLRRERIAXRMRALQELVGTRNKTDRAVMLDEILDYVKFLRLQVKVLSMSRLGGAGAVAQLVADIPLSVKGEASDSGSKQQIWEKWSTDGTERQIAKLMEEDIGAAMQFLQSKALCMMPISLAMAIYDTQHSQDGQPVKPEPNTPS

SEQ ID NO: 7519 - protein, 68 aa, Zea mays
  unsure (1)..(68): unsure at all Xaa locations
  Clone ID: TF_700085722H1.pep
PALASKNKRVEGKPSMNLMADRCCRKRLNDRLSILRSVVPXISKMDRTSILGFTIYYIKELLVSINLL

SEQ ID NO: 7520 - protein, 84 aa, Zea mays
  Clone ID: TF_jC-zmXLIB3527P075bd10a1.pep
MLAGCQHRNQFRFPCSLAYVQERRTRISKRLKKLQDLVPNMDKQTNTSDMLDLAVEYIKELKDQVEKLKHDQANCCCLGNKSCC

SEQ ID NO: 7521 - protein, 226 aa, Zea mays
  unsure (1)..(226): unsure at all Xaa locations
  Clone ID: TF_LIB5116-051-A1-PF1-E3.pep
NSPQEDGFFYSHHGACHADSSQGTECKAQSSVTARKVHKADRERMRRDKLNEQFLELGTTLDPDRPRHDKATILGDTVQMLKDXTSQVNKLKAEYSSLFEEECELTKEKNELRSEKASLKSDVDNLNNHYQQRIQMLYLCTTMEPSVLVGPPPSYPFSLQVPIPAGAVTMHPQLQPCPFFQNQTSGAISNPCTPYMAYSQSCQAPSDQPSSQFSTPVLLSVVIDLT

SEQ ID NO: 7522 - protein, 298 aa, Zea mays
  Clone ID: TF_ZmC4799_1.pep
MDPFYFGPDQLDAAAAVDEDYLTSLGLVVLSPEPVAPLPGGAFEAYQRRAPALLEHSLQTMSRRYSGEQNMHRRMFSYLRRVAHDAGAAVVAAPAFPAPARESVPGFGVGTSQAPRSSRFRNIMRERLRRERLSQGFADLHALLPHGASSKGGKNDIVGAAAGYVRELVARKEQLSARNQELLEKAASRWKQQGGTRSGVGRGMVVKVQAESQDHSMALGAFVRVLQRLKAMEAGLQVTAIRTRFSAGGVWMNIGVEGQVSACDVDKSITNALIELEGNDPRSSKPRFSCQVETVQMD

SEQ ID NO: 7523 - protein, 182 aa, Zea mays
  Clone ID: TF_LIB4729-053-R1-K1-G9.pep
PDRHPRRPPSASSPPSPPPTPSRKRLNDRLSMLRSVVPKISKMDRTSILGDTIDYMKELLERIKLLQEEIGQQQEEAPGMLSVFRELNPNEMVARNTPKFDVERKEGGDTRVEIYCAAKPGLLLSTVSTLDTLGLDIQQCVVSCFNDFGMHASCSEMQREMISADAIKQELFKNAGYGGGCL

SEQ ID NO: 7524 - protein, 136 aa, Zea mays
  Clone ID: TF_ZmC8592_3.pep
QRKARLLIVSVEVGSYVNTNDVFKEPNDVFKEPGSNKRLRSGSNDVHVPTSKASREKLRRNKLNDRFLELGSTLEPGKPVKADKAAILSDVTLMVIQLRSEAQQLKETNGSLEEKIKELKVIQPFLLNTVNPQIMH

SEQ ID NO: 7525 - protein, 101 aa, Zea mays
  unsure (1)..(101): unsure at all Xaa locations
  Clone ID: TF_ZmC2238_2.pep
KKTTHQARREKINARMELLKELVPGCSKVSGTALVLDEIINHVQSLQSXLSMRLATVNPRGDFGGLDSFLTTEINVSLEYHGWPTYYFQERLGKCSDMHTC

SEQ ID NO: 7526 - protein, 287 aa, Zea mays
  Clone ID: TF_LIB4746-137-Q2-K1-C12.pep
IGYLEAGRGDHRYVHFTVVHTVRVCPPNHQAIEPSNHRFSHPSSILEMNYTGYTIGSNSDYSPAQEMLSYPDQLGGTYIPDNYTTSPGFSLESFFDQAAFPSADVSTIFPKEQGQYATFPSSGASTTNDMAGNRISSHSTSRHPSDAAPLGKLEQFSFGFSFDALSTEPFERACFSPNTHISSRTPSLCGDASEKTSSPSSLTLSPCSLKRESPSSPDSASEEQPTPPRPQRKRGRPRLDRNETISSTSSPKGPKTGRLPHNQVERKYREGLNAELERLRKAVPTLT

SEQ ID NO: 7527 - protein, 167 aa, Zea mays
  Clone ID: TF_ZmC1150_1.pep
SLASREGRKKISERMKLLQDLVPGCSKITGKAVMLDEIINYVQSLQRQVEFLSMKLATVNPELGFDIEQIISKQMLLSQDRHLAFYGVDPGSSGLTGPFNQGIMQPALMCTISNPADVLHGAIHDVSTMNQIPSMWEGLQNMPQMNFNPGVAADSGTNNSGSMKIEQ

SEQ ID NO: 7528 - protein, 201 aa, Zea mays
  unsure (1)..(201): unsure at all Xaa locations
  Clone ID: TF_ZmC37662_1.pep
XGKRKGLPANNLMAVSPVAGKKLNDRLYMLRSVVPKISKMDRASILGDAIEYLKELLQKINDLQNDLESSPSTASLPPTPTSFHPLTPTLPTLPSRVKEELCPSALPSPTFQQPRVEVRMREGRAVNIHMLCARRPGLLLSAMRAIEGLGLDVQQAVISCFNGFSLDIFKAELCKEGPGLLPEEIKSVLLQSAGFHGGVMP

SEQ ID NO: 7529 - protein, 208 aa, Zea mays
  Clone ID: TF_LIB3279-183-Q1-K6-C7.pep
GRVGALALGSRVSTSLRSLDAGNADGLLQLQLRQFLPRRGSVLLPARCRAALPGAAHRPHCLARGAGAALRAADAGRVPGLPAGRRGRGGGSAVRGGQRARAGDRRDGRGRRAARAEHGNGGGRGGAAAVESSRGFRHMMRERQRREKLSQSYADLHALVAARSRGDKNSIVQAAAVYIHELRGARNQLQRPDEELKARILHDAGQQC

SEQ ID NO: 7530 - protein, 299 aa, Zea mays
  Clone ID: TF_ZmC14684_1.pep
MQMDSYNYNYASFFHDEAPSFYPHVAVPPSPELPIGLIASPGEPEPPFAPPMPASFQDYTGAVGVGVGVRAPFGGASVHGQAIDALGGGDGQREQSMAMAEDGEEPAPRRRQPAGGPAAAAVESSRGFRHMMRERQRREKLSQSYADLHALVAARSRGDKNSIVQAAAVYIHELRGARDQLQRRNEELKARILGHDAGQQCVKVQFEVDEPASAIDSMIGALRRLKGMDVRARGIRSSLSGRRLWTEMNVETTMAADEVERGVEEALLQEVERKQQQQLGAGSAAPGFPGPSSHVQNVF

SEQ ID NO: 7531 - protein, 182 aa, Zea mays
  Clone ID: TF_LIB3689-204-Q1-N6-A6.pep
HCNKTDKASMLDEAIEYLKSLQLQVQMMWMGSAGIAAPPAVMFPGVHQYLPRMGVGMGAAAAAARPSMPRLPFMAPQPVVPSAPVSVGPVPAYRGHMPAVGITEPYGHYIGVNHLQPAPPPPQVQHYAQGVSYYPPPLGATAKAVQQAAELHHVPGPGGSIMPAGAAPGVLLPESAQGRGPG

SEQ ID NO: 7532 - protein, 133 aa, Zea mays
  unsure (1)..(133): unsure at all Xaa locations
  Clone ID: TF_uC-zmflb73012g11b1.pep
MSKRPRGKRLSGISETVAPGKGKHARPKAGTKKKAEAASVAAAAAAAGHNTDYIDVRARRGQATISHSLFERLRRERISXRMPHLQELLPGFRKVTVKACMLDEIINYMQSLQKQAEFLSMKIDAFNPVVSFH

SEQ ID NO: 7533 - protein, 185 aa, Zea mays
  Clone ID: TF_ZmC5874_1.pep
MSARSMETVEEDVEEYSWREVVLPHLVPVVPGAQPELERETGERRRGRDLLVAVDFGPNSKHAFDWALGHIARMADTVHLVHAVSSVQNEIVYDKSRELMEDLAVEAFKTLLVRTKARIVEGDAGKVICREADRLKPAAVILGTRGRGLIQSVLQGSVSEYCFHNCKAAPIIIVPGKEAGEQSVL

SEQ ID NO: 7534 - protein, 191 aa, Zea mays
  Clone ID: TF_LIB3912-048-Q6-K6-D12.pep
MHSARCCCWFLERRDPEGMALEAVVLSQQGSRFGCGAMAAGGPWSGLFFSGMEGVVEIGSGAGGGRDVAGCSPPQLLQEPAARALPVASSVGSASGGAGQDAPAALAVTATAAAGTGRRKRRRMRPLKNEEEVESQRMVHIAVERNRRKQMNEYLAALRSLMPPAYTQRVTDELDSDDPHASHARPFLVPS

SEQ ID NO: 7535 - protein, 266 aa, Zea mays
  Clone ID: TF_ZmC3274_1.pep
MVPRDRAHSAAAATAPPTEKPVQGPIQNNKCEKKAPKKVHKSEREKRKRDKQNDLFGELGNMLEPDRQNNGKACILSDTTRILKDLLSQVESLRKENNTLKNESHYVALERNELLDETNMIRGEISDLQNEMRMRLEDNSIWSHDTSRPNLTAPHPATTVFTLQHSPHPQVIATMTLPLQQPAVVEQSYAAPRRELQLFPEAAPTEDTEPPQNEGTSNHVMRPQARSPPAMTTLPGHVYPVLPRVEDEQRSSGTTGSRKEGGVGNR

SEQ ID NO: 7536 - protein, 125 aa, Zea mays
  Clone ID: TF_ZmC3753_1.pep
PRVRPTFKVRKEKLGDRITALQQLVSPFGKTDTASVLHEAIEYIRFLHDQVASLSSPYLGCGRPVVQQIQQRRQAKDDGGAAAKEDLRSRGLCLVPVASTTTYAVAAGGETAPEFWLPNFGGTLR

SEQ ID NO: 7537 - protein, 89 aa, Zea mays
  Clone ID: TF_ZmC35784_1.pep
MSSRRPSSRGNISEDEINELISKLQALLPSSRRRGSGQASTTKLLKETCSYIKSLHREVDDLSDRLSDLMATMDHNSPGAEIIRSILRS

SEQ ID NO: 7538 - protein, 89 aa, Zea mays; identical to SEQ ID NO: 7537
  Clone ID: TF_ZmC35784_4.pep

SEQ ID NO: 7539 - protein, 52 aa, Zea mays
  Clone ID: TF_20803362.pep
MDGECSPMAATTRSGTGRSHSEAERKRRQRINAHLATLRTLLPAASRMDKAA

SEQ ID NO: 7540 - protein, 155 aa, Zea mays
  Clone ID: TF_ZmC1210628_1.pep
RRKQLNDLYSSLRSLLPDADHTKKLSIPTTVSRVLKYIPELQKQVDNLERRKRELTNANCKPGVLNTSEIVTTPIVSATCLNDTEIMVQVSLHSNVAATALPLSKCIKVLEDAGLHLISSSTYSTFGNKTFYSLHLQVCMHVHSMVPAVSFNFFI

SEQ ID NO: 7541 - protein, 175 aa, Zea mays
  Clone ID: TF_LIB3632-010-Q1-K6-F2.pep
MALEAVVFSQPQAAAGHFGYGRGDSTTYAVPWCDLLQGGVGGGGGGFGDLCAAGEWDLDIDTWAAAAAAAAPTVELGGDDWDWEALSRDYQSSDASTEYYHGGSRKAAAAPEPAGRRKRRRAKAVKNKEEIESQRMTHIAVERNRRRQMNEYLAVLRSLMPPSYAHRGDQASIVG

SEQ ID NO: 7542 - protein, 240 aa, Zea mays
  unsure (1)..(240): unsure at all Xaa locations
  Clone ID: TF_ZmC584642_1.pep
MSLPPTDGGDDWFLDCGILEDLPAAACGAFPWDASVSSSNPSAEVGSHVNKLDLPKDSGSNKRLRSEPCGRPTSKACREKVRRDKLNDRFLELGTTLDPGKPVKADKAAILSDATRMVTQLRAEAQQLKDTNGSLEDKIKELKAEKDELRDEKQKLKLEKETLEHQMKLLTATPAYMPHPTMMPSPFAQAPMAPFHAQGQALGQKLMMPFVGYPGYPMWQLMPASEVDTSKDSEACPPXA

SEQ ID NO: 7543 - protein, 290 aa, Zea mays
  Clone ID: TF_ZmC3491_1.pep
RPTLPQGQKKKKQSAALEARKSCRPEMDKYWEETQRYLEYEELSIYLEAQEDAMSCYDSSSPDGSISHSSSSAAACGNKNILMERDRRRKLNDKLYALRSVVPNITKMDKASIIKDAIEYIQQLQAEERRVLQELRVLDDDTAAAATAQVECCDVDGGLLRREAERAKKMKRAQSVASGAQSAPPPPPPAPPHVEVLELRVSEVGDHVLVVSVTCRKRRDAMARVCRAIEDLRLRVITANVTSVAGCHVHTVFVEVDKIDHIQVKNMIEAALTLLDAPGSPHSSMSYYET

SEQ ID NO: 7544 - protein, 224 aa, Zea mays
  Clone ID: TF_ZmC14059_1.pep
MMDAAAMPPFQQARPAKRSYDDMAAVAEAANAPSANTRPASQNQDHILAERKRREKLSQRFIALSKIVPGLKKMDKASVLGDAIKYVKQLQDQVKGLEDDARRRPVEAAVLVKKSQLSADDDEGSSCDDNSVGAEASATLLPEIEARLSGRTVLVRVHCDNRKGVLIAALSEVERLGLSVMNTNVLPFTASSLDITIMAMAGDDFCLSAKDIVKKLNQAFKSPF

SEQ ID NO: 7545 - protein, 84 aa, Zea mays
  Clone ID: TF_ZmC14059_3.pep
MMAEAARAPAAAAAAARPASQNQDHILAERKRREKLSQRFIALSKIVPGLKKMDKASVLGDAIKYVKQLQDQVKGLEDDARKRP

SEQ ID NO: 7546 - protein, 562 aa, Zea mays
  Clone ID: TF_ZmC13586_3.pep
MALSASPAQEELLQPAGRPLRKQLAAAARSINWSYALFWSISSTQRPRVLTWTDGFYNGEVKTRKISHSVELTADQLLMQRSEQLRELYEALRSGECDRRGARPVGSLSPEDLGDTEWYYVICMTYAFLPGQGLPGRSSASNEHVWLCNAHLAGSKDFPRALLAKSASIQTIVCIPLMGGVLELGTTDKVPEDPDLVSRATVAFWEPQCPTYSKEPSSNPSAYETGEAAYIVVLEDLDHNAMDMETVTAAAGRHGTGQELGEVESPSNASLEHITKGIDEFYSLCEEMDVQPLEDAWIMDGSNFEVPSSALPVDGSSAPADGSRATSFVVWTRSSHSCSGEAAVPVIEEPQKLLKKALAGGGAWANTNCGGGGTTVTAQENGAKNHVMSERKRREKLNEMFLVLKSLVPSIHKVDKASILAETIAYLKELQRRVQELESRRQGGSGCVSKKVCVGSNSKRKSPEFAGGAKEHPWVLPMDGTSNVTVTVSDTNVLLEVQCRWEKLLMTRVFDAIKSLHLDALSVQASAPDGFMRLKIGAQFAGSGAVVPGMISQSLRKAIGKR

SEQ ID NO: 7547 - protein, 423 aa, Zea mays
  Clone ID: TF_ZmC14919_1.pep
MDGNARSAATNQKKPVVADDDLVELLWHNGSVVAQPQAHQRPAPTYDPDRPGTSGLTGEETAAWFPDTLDDALEKDLYTQLWYSTIADAAPQHEGTLPGPTSQPSPSPPVGSSGVESSWAGDICSTFCGSNQVLRTPARIRGKDAALQSELPSNTGAHDGTSSSGGSGSNYGGSGLPSDSVHVQKRKGRCRDDSDSPSEDAECEEASEETKPSRRYGTKRRTRAAEVHNLSERRRRDRINEKMRALQELIPHCNKTDKASILDETIEYLKSLQMQVQIMWMTSGMAPMMFPGVHQFIPQMALGMNPGCIPAAQGLSQMPRLPYMNHTLPNHIPLNSSPAMNLMNPLNAANQVQIGHLRDAGSHVLHLDGGRAAVVPQVPGPGPHVVHGHQIAQAEEHNKILEVAASTVIPTSKAGQPPTFHGV

SEQ ID NO: 7548 - protein, 105 aa, Zea mays
  unsure (1)..(105): unsure at all Xaa locations
  Clone ID: TF_jC-zmXLIB3527P004ce08d1.pep
MALWKEEPSGRCFLEEREEEAESQQMTHIAVDRNRRKHINEHLSALRSLMPSDHTHRGDQAFIEXGSINCGKELDQLLQTLEARRPHPQGSAYARNPDDTAAEAD

SEQ ID NO: 7549 - protein, 195 aa, Zea mays
  Clone ID: TF_ZmC26240_1.pep
MMCLSCSPSGDGVVMTTVAVMEQWADKQQQAASTNAAAAAAQMPFLALLQGAGVVVEAEQQEEQHHDGRKRQAFARAVSDLDLLESCVTQAVAPAAAASAPVAGRTERRRKRQRPRARAAPPPEKRKKPEEAESQRMTHIAVERNRRRLMNDHLASLRSLIPSSYTPRGDQATVVGGAIDYVKQLEQQLVALQAA

SEQ ID NO: 7550 - protein, 290 aa, Zea mays
  Clone ID: TF_ZM4442.C1.o15.fg.pep
MDDLLSPCSSFSPPSPASFFSHAGHPVIEFASCEVPEQWLLDDLVVAKNEGYDDVDDLWPVRSSLSPDSEVSEQPLPPQPPPPSQQELTSVTAAPAQQQQRLGKRRGRKPGPRPDGPAVSHVESERQRREKLNRRFCDLRAAVPTVSRMDKASLLADAASYIAELRGRVARLEADSRRATAARWDPAVTAAASASAAAMGLAGAGGGADEAVEVRMLGPDAAAVRATSAGPHAPARLMGALRSLELHVQHACVTRVNGVTVQDVVVDVATPLQDDDGGLRAALLQMMQDS

SEQ ID NO: 7551 - protein, 237 aa, Zea mays
  Clone ID: TF_ZmC3240_1.pep
MSCAGQAGGWLLDYALVEEEIQGSEFIYMVDDPAVSSVILGFDAPRKEDGVQDNPGAKKRSRPESSAPPGTKACREKLRRDRLNERFNELCAILEPGKPPKADKVAILSDAARLLNQLQGEAQKLKQSNESLQESIKSLKAEKSELRDEKTRLKAEKERLEQMLKGVVSHAAVAAPGPFVPHPAAVAPSFHHHPAAFAQAGKFVPYPSYPPPAAFWQWIPPTSLDTTKDPAHWPPVA

SEQ ID NO: 7552 - protein, 285 aa, Zea mays
  Clone ID: TF_ZmC3240_10.pep
MSCAGQAGGWLLDYALVEEEIQGSEFIYMVDDPAVSSVILGFDAPRKEDGVQDNPGAKKRQSFSSSFLSVDPQHKRKSVHITLSPILLPLKSVGIICCAFLFPFLLRRSRPESSAPPGTKACREKLRRDRLNERFNELCAILEPGKPPKADKVAILSDAARLLNQLQGEAQKLKQSNESLQESIKSLKAEKSELRDEKTRLKAEKERLEQMLKGVVSHAAVAAPGPFVPHPAAVAPSFHHHPAAFAQAGKFVPYPSYPPPAAFWQWIPPTSLDTTKDPAHWPPVA

SEQ ID NO: 7553 - protein, 191 aa, Zea mays
  Clone ID: TF_ZmC3240_4.pep
ELLCANSFPFLLRRSRPESSAPPGTKACREKLRRDRLNERFNELCAILEPGKPPKADKVAILSDAARLLNQLQGEAQKLKQSNESLQESIKSLKAEKSELRDEKTRLKAEKERLEQMLKGVVSHAAVAAPGPFVPHPAAVAPSFHHHPAAFAQAGKFVPYPSYPPPAAFWQWIPPTSLDTTKDPAHWPPVA

SEQ ID NO: 7554 - protein, 108 aa, Zea mays
  Clone ID: TF_LIB4764-117-A1-K1-E8.pep
STSSRGPSRSSKDSKSLYAKRRRERINEKLRTLQQLIPNGTKVDMSTMLEEAVQYVKFLQLQIKVGTKVAAVSLKTNTTTHKILGVLTKGNTQIVCHIISPIRHALRC

SEQ ID NO: 7555 - protein, 316 aa, Zea mays
  Clone ID: TF_ZmC18277_1.pep
MAGFSRPNNSLLLKMPATLASSHTPNLSSLLFYDQNHGQAVNANAAAMTMVEDDASLQSSSAVLDTSPQPQGSAAAASPMERKRKPAEDSATLSSAQSKEDCKQQQESKSRRGKRPHNKEANTEEKSATEDEATRGYIHVRARRGQATDSHSLAERVRRERISERMRMLQALVPGCDKVTGKALILDEIINYVQSLQNQVEFLSMRIASMSPVLYGFGLDSDGLHDHAQKMGVMFQEALAMAGPVLSQASPAAPSEAIMDTTTPYSLHGHGQGSISFSQDNGSSTYLMQHQQAAGEPTRQQELLSQLVFNNMCSFQ

SEQ ID NO: 7556 - protein, 143 aa, Zea mays
  Clone ID: TF_LIB3597-024-Q1-K6-H7.pep
MKRAHPDYSSSDSELDETVEVEKESADENGNLSSALGSMSPTTSSQILARKRRRGIIEKRRRDRINNSLSELRRLVPSAFEKQGSAKLEKAEILQMTVDHLKMLHTAGGKGYFDAHALAMDYRSLGFRECLAEVARYLSIIEG

SEQ ID NO: 7557 - protein, 101 aa, Zea mays
  Clone ID: TF_LIB4764-112-A1-K1-B8.pep
ASSSRSEDDSAGACEEPIVLKQITISRGPRRSSKDSKSLYPKRRRERINEKLRTLQQLIPNGTKVDMSTMLEEAVQYVKFLQLQIKCSALRVPWKYASLLS

SEQ ID NO: 7558 - protein, 59 aa, Zea mays
  unsure (1)..(59): unsure at all Xaa locations
  Clone ID: TF_ZmC261576_1.pep
ARERRSKXNEKMKALQSLIPNSNKTDKASMLDEAIEYLKQLQLQVQLVGATLQRQALGQ

SEQ ID NO: 7559 - protein, 113 aa, Zea mays
  Clone ID: TF_LIB3245-181-P1-N2-A2.pep
KRKGSGEDSSSLRSLGETSALQREVSMECADEKAGDARAKREDYVHVRAKRGQATNSHSLAERFRREKINERMKLLQDLVPGCNKITGKAMMLDEIINYVQSLQRQIGFLSMK

SEQ ID NO: 7560 - protein, 287 aa, Zea mays
  Clone ID: TF_ZmC3534_1.pep
MMYSPPRTDPDREEEQCFSIGSNLLASLDHYHTMDFDEPVVSPMTNAGMQEGVQLYSSTGDAQLNRNMNTGKCLEDGKRKGSGEDSSSLRSLGKRKGSGEDSSSLRSLGETSALQREVSMECADEKAGDARAKREDYVHVRAKRGQATNSHSLAERFRREKINERMKLLQDLVPGCNKITGKAMMLDEIINYVQSLQRQIEFLSMKLSAIGPGLNCDLDLQDILCTQDASSAFPGYNLQTSNVHINLYRASEEGFSHRNRIIPSPANVHVTRNAQLSAYPQVFIRRP

SEQ ID NO: 7561 - protein, 351 aa, Zea mays
  Clone ID: TF_ZmC412624_1.pep
MTSHARVRKLGIRLEAAHQLLPWLGAAPFSEPAAVAGLGAAMGAYACDGVGGLGHGGVFGFGFDAAVQQQQQQQRAADGSGKAVVVSGLLGSLQAELGRMTAREMMDAKALAASRSHSEAERRRRQRINGHLARLRSLLPNTTKTDKASLLAEVLDHVKELKRQTSAMMAATDADADADDEGAGRTQAQAQAQLLPTEADELCVDAGADGAGRLVVRASLCCEDRPDLIPDIVRALAALQMRARRAEITTLGGRVRSLLLITADRRADVQRGGGGGGGDGDDDEEEEDEEEGGERAASHRRHECIASVQEALRGVMDRRTASSCDTSSSGGGGGSIKRQRMNYGAQEQCSV

SEQ ID NO: 7562 - protein, 253 aa, Zea mays
  unsure (1)..(253): unsure at all Xaa locations
  Clone ID: TF_LIB3205-339-Q1-K1-B8.pep
PRVRAWSQSKEVRFSCAPALAAGNLHQDMPLGRPGNNMTPQGKMEXQKACEVAVATPSLCSGNGESWREQKRKSQAECSASQDDDLDDESGGMRGSGGRGTKRSRTAEVHNLSERRRRDRINEKMRALQELIPNCNKIDKASMLDEAIEYLKTLQLQVQMMAMGSGLCIPPMLLPRAMQLQIPSIAHFHHLGMGLGYGMGXVLDMNSTAAVPFQPIPGAHYTCPMIPGTPPQGLGIGMPGTNTMPVFGLPGSI

SEQ ID NO: 7563 - protein, 257 aa, Zea mays
  Clone ID: TF_ZmC8592_2.pep
MSLAPDPADGGAGTGTGDDWFLDCGILDDLPAAACGAFPWDASPSSSNPSVEVGSYVNTNDVFKEPNDVFKEPGSNKRLRSGCNDVHVPTSKASREKMRRNKLNDRFLELGSTLEPGKPVKADKAAILSDATRMVIQLRSEAQQLKETNGSLEEKIKELKAEKDELRDEKQKLKLEKESLEHQMKLMTSTPTYMPHPTLMPAPFPQAPLAPFHAQGQAAGQKLMMPFVSYPGYPMWQFMPPSEVDTSKDSEACPPVA

SEQ ID NO: 7564 - protein, 255 aa, Zea mays
  Clone ID: TF_ZmC312_1.pep
GGFFAPLPASGFNDAGMSWDDEDEIDQSVDASSMAISASMENAAGAVAGASGAGGGSGRGKKKGMPAKNLMAERRRRKKLNDRLYMLRSVVPKISKMDRASILGDAIEYLKELLQRISDLHNELESAPSSSLVGPTSASFNPSTPTLQTFPGQVKEELCPGSFPSPTGQQATVEVRMREGHAVNIHMFCARRPGILLSTMTALDSLGLDIEQAVISCFNGFAMDVFRAECADGPGMVPEEIKAVLMHTAGLHNAM

SEQ ID NO: 7565 - protein, 124 aa, Zea mays
  unsure (1)..(124): unsure at all Xaa locations
  Clone ID: TF_ZmC112780_1.pep
MDAQQQLDLVMRHQSMATVCESEDALGSSESDPARPARPRGKRSRAAEVHNLSEKRRRSRINEKMKALQTLIPNSSKTDKASMLDDAIEYLKHLQLQVQMLSMRNGLYLPPGNLXSGAPETLAP

SEQ ID NO: 7566 - protein, 166 aa, Zea mays
  unsure (1)..(166): unsure at all Xaa locations
  Clone ID: TF_ZmC1150_2.pep
AKRGQATNSQSLAERLGRKKISERMKLLQDLVPECSKIIGKAIMLDEIINYVQSLQRQVEIISKQVKPPTRSPYLPLGSSGLTGPFNQGIMQPXLMCTIANPVDVLHGAIHEANISTKKKKKKKKKGGPQIPSMWEGLQSMPQMNFNPGVAADSGTNNSGSMKIEQ

SEQ ID NO: 7567 - protein, 231 aa, Zea mays
  Clone ID: TF_ZmC3246_1.pep
MMNCAGGGDPVEDFLISGAVDDEDLAIFCDGGLGIEGVNGDACGFEQSNLGKRSRDEPCSSGLKSKACREKMRRDKLNDRFLELSSVMNPGKQAKLDKANILSDAARMVAQLRGEAEKLKESNEKLRENIKDLKEEKNELREEKVRLKVEKDRLEQQVKAMSVAPTGYVPHLPHPASYHPAAFAPFVPPQQAAGNKSAPIPAPFPGMAMWQWLPPTIVDTTQDPKLWPPNA

SEQ ID NO: 7568 - protein, 129 aa, Zea mays
  Clone ID: TF_ZmC13338_1.pep
RSTQRPAGAADMVTNFSTIDPQFGLSNSSLELPGMDDYLQLQQDSVACRVRARRGCATHPRSIAERERRTRISKRLKKLQDLVPNMDKQTNTSDMLDLAVEYIKELKDQVEKLKHDQANCCCLGNKSCC

SEQ ID NO: 7569 - protein, 255 aa, Zea mays
  Clone ID: TF_ZmC34773_1.pep
MEPSPAVAAELWCSPHLAAGGGRPLEATSAVTEKSSGGRGGGGAVRRRPRETPVSEDDSSRIVSTSGGGGGQDLTDLEAKRSKTNKSSNNKGSLRTEVETDSRSAGKAVSKNIPAAEPPKQDYIHVRARRGQATDSHSLAERARREKISERMKVLQDLVPGCNKVIGKASVLDEIINYIQSLQCQVEFLSMKLEAVNAQANQGVEVFPAKDYGSQTYNTAPGLTFDTQTSREYAQGTSTSEWLHMQIGSGYERVS

SEQ ID NO: 7570 - protein, 253 aa, Zea mays
  Clone ID: TF_ZmC8592_1.pep
MSLPPGPADSGAGTGDDWFLDCGILDDLPAAACGAFPWDASPSSSNPSVEVGSYVNANDAFKEPNDVFKEPGSSKRLRSGSSDMPTSKACRERMRRNKLNDRFLELGSALEPGKPVKADKAAILSDATRMVIQLRSESQQLKETNGSLEEKIKELKAEKDELRDEKQKLKLEKESLEHQMKLMASAPAYMPHPTLMPAPFAQAPLAPFHAQGQAAGQKLMMPFVGYPGYPMWQFMPPSEVDTSKDSEACPPVA

SEQ ID NO: 7571 - protein, 203 aa, Zea mays
  unsure (1)..(203): unsure at all Xaa locations
  Clone ID: TF_ZmC8592_5.pep
EQVLAKYEKKVHVQLELLITLIFHSVEVGSYVNANDAFKEPNDVFKEPGSSKRLRSGSSDMPTSKACRERMRRNKLNDRFLELGSALEPGKPVKADKAAILSDATRMVIQLRSESQQLKETNGSLEEKIKELKAEKDELRDEKQKLKLEKESLEHQMKLMASAPAYMPHPTLMPAPFXPAPLAPFHAXGQAAGQKLMMPFVGY

SEQ ID NO: 7572 - protein, 263 aa, Zea mays
  Clone ID: TF_ZmC28558_1.pep
EGEEGSPVKLSKPEQAGSDSSVEDGGAQNQKPPPPGKGKNAKPVEPPRDYVHVRARRGQATDSHSLAERVRRERISQRMKVLQDLVPGCNKVIGKALMLDEIINYVQSLQRQVEFLSMKLATVNPLDLSNLPTLLQKDMFQACGASASSVFSLESCSPGFPFGGQGDVFQSFVPNGLENPCGGLNPLDLALSQATGGQFGFQDGTAGTNLQQRNYWEEEEEDLQSVFHIDDNGQSQEHGASASAQSFHGQLQPQEGHMKMEFF

SEQ ID NO: 7573 - protein, 167 aa, Zea mays
  Clone ID: TF_LIB5116-057-A1-PF1-A9.pep
MQNRIQSHPAGASSSASSGGDGSGSGFCLSDIMEIDAGSGGDHKAPGSPRSKHSATEQRRRCKINERFQILRDLVPQSDQKRDKATFLLEVIEYVKFLQEKVQKHEACAGGDWSQENTKLAPWSSNRVPVDLMPGVAPTTKIGSAGNFLDNSIPTMPEMLQNAETVV

SEQ ID NO: 7574 - protein, 705 aa, Zea mays
  unsure (1)..(705): unsure at all Xaa locations
  Clone ID: TF_ZmC9134_1.pep
MNLWTDDNASMMEAFMASADLPTFPWGAPAGGGNSSAAAASPPPXEMPAAMAPGFNQDTLQQRLQAMIEGSRETWTYAIFWQSSLDSATGASLLGWGDGYYKGCDEDKRKQKPLTPSAQAEQEHRKRVLRELNSLISGAAAAPDEAVEEEVTDTEWFFLVSMTQSFLNGSGLPGQALFAGQPTWIASGLSSAPCERARQAYNFGLRTMVCFPVGTGVLELGSTDVVFKTAESMAKIRSLFGGGAGGGSWPPVQPQAPSSQQPAAGADHAETDPSMLWLADAPVMDIKDSLSHPSAEISVSKPPPHPPQIHFENGSTSTLTENPSPSVHAPPPPPAPAAPQQRQHQHQNQAHQGPFRRELNFSDFASTPSLAATPPFFKPESGEILSFGADSNARRNPSPVPPAATASLTTAPGSLFSQHTATMTAAAANDAKNNNKRSMEATSRASNTNHHPAATANEGMLSFSSAPTTRPSTGTGAPAKSESDHSDLDASVREVESSRVVAPPPEAEKRPRKRGRKPANGREEPLNHVEAERQRREKLNQRFYALRAVVPNVSKMDKASLLGDAISYINELRGKLTSLETDKETLQTQVEALKKERDARPPSHSAGLGGHDGGPRCHAVEIDAKILGLEAMIRVQCHKRNHPSARLMTALRELDLDVYHASVSVVKDLMIQQVAVKMASRVYTQDQLSAALYSRLAEPGSAMGR

SEQ ID NO: 7575 - protein, 197 aa, Zea mays
  Clone ID: TF_LIB3597-024-Q1-K6-G11.pep
MQHLKSAAPGSPSGFRGAQTRRNPCGETAPLPGAPCRTVLTPTFRYCRRECTVAPARRAMERIPSAQPPPACLPKAPGLEPGDLPGMDFAHMYQVYKSRRGIKRSEDSKETYKLPHRLIEKKRRDRINECIAQLKDLLPEHLKLTTLGHLEKAVVLELTLKHVKALTNLIDQQQQKILALQSGLQAGELSGRNVEAG

SEQ ID NO: 7576 - protein, 220 aa, Zea mays
  Clone ID: TF_ZmC3797_1.pep
TTTRNMDMERTRRRKLNERLYALRSVVPNITKMDKASIVRDAIAHIEHLQEQERRLLAEISVLQSSDDGTAAAAAVKTEDAAATGGAAYDVDSVPWRKKPRAVPLPSVYFTDNPTSSISSSPPVRILEVQVSQAGERVAVVSLWCSRGRDAVGKICLALEPLRLRVVTATITARGDTVFHTLFVETGETGGARLKEAILAALARFNVLANADQVVHELLG

SEQ ID NO: 7577 - protein, 315 aa, Zea mays
  unsure (1)..(315): unsure at all Xaa locations
  Clone ID: TF_ZM3641.C1.o6.fg.pep
MAAQMPFLALLQGAXRRGGGGGGGAAAAARARRAQAAXAFARAVSKLDLLESCLTQAVDPAAEACAPVASRTTERRRKRPRTRARAAPPPEKRSKPEEAESQRMTHIAVERNRRRLMNDHLASLRSLIPSRYIPRVSHAMQSPCMHAAFRFDLTTQRLHAMQGDQATVVGGAIDYVKQLEQRLVALQAAAGARRGSSAASDDGVFLVSPQYASYSGSRGGGGGLGVDVEATGAVGGHVRVRVAGRRWPGRLVRAVAALEGLRLAVLHLAVTSVGRDAVVCCFNLKMEEGCEVATADEVATVVHQIFACSAAGACC

SEQ ID NO: 7578 - protein, 135 aa, Zea mays
  Clone ID: TF_jC-zmXLIB3527P004be08d1.pep
MAAAAASGRRKRWRMMPVKSEEEVESQRMIHIAVERNRRKQMNEHLAALRSLMPPAHTQRGDQASIVGGAINFVKELEQLLQSLEARRRSPQCAAYAVDPDDAGPFADFLTFPQYSMCAVIAAPENTGHHEGGAV

SEQ ID NO: 7579 - protein, 155 aa, Zea mays
  Clone ID: TF_LIB4073-014-Q6-K1-H9.pep
DSTENYYSCGSRKKATGGARRSHPAETHNLTEKRRRRKIDDKLKTLRQLVPGCDDKSNQASILDQTIQHINSLQQQIQVQPKAISLGCDAIKPPAVYPVVLPQGTAVAAAGELLPPAAALPPAVLAMAARGHVRPGLAPLHHLRRWCLSVPFFQW

SEQ ID NO: 7580 - protein, 285 aa, Zea mays
  unsure (1)..(285): unsure at all Xaa locations
  Clone ID: TF_ZmC792773_1.pep
MEDSSLFLQWAMSTLRHEQQPAAAVNDDCSSEATFPSLQALREASHAAEMVQELIGEAPANSWSSGDTTDGSIGGNSNSVPGPAAAAMEHDVWPAASSKTSPARRALSRSSSDTNPPVSWNFSAAASAQLAGSADGMLPEFAPKSALPPDQAYGSPRARRAGLKSLAGSMSSAAYAQDHIIAERKRREKINQRFIELSTVIPGLKKMDKATILSDATKYVKELHGKLKDLEAGGSNRRKXXETVVLVKRPCPHAAPAPDDDALPLSASSGTPAETKTQLPEIEAR

SEQ ID NO: 7581 - protein, 188 aa, Zea mays
  Clone ID: TF_ZmC10010_1.pep
MDDMGSVPFADAGLLDGFYGGSHGHGGDYELLASQLGAGASSTSPAILDGSVPLVDAAASAEEATRSKGDHLQDDKAAMALKSHSEAERRRRERINAHLATLRTMVPCSDKMDKAAVLAEVITHVKKLKSTAAHIRDRCAAVPADADDVVVELVHGGAAPPSAGGGVLVRATLSCDDGADVFADVRHA

SEQ ID NO: 7582 - protein, 257 aa, Zea mays
  Clone ID: TF_ZmC18771_3.pep
MLRPPWRISELLPERRRVLHGECCARGGSGGGKKKGMPAKNLMAERRRRKKLNDRLYMLRSVVPKISKASVTRALKKGTTLDSVIEMLKGVTPELSCPIVLFTYYNPILKRGVGNFMSTIKQAGIHGLVVPDLPLEETALLRSEAIMHNIELVLLTTPTTPTDRMKGIAQASEGFLYLVSAVGVTGARSNVNLRVEHLLREIKKVTDKPVAVGFGVSTPEHVKQIVGWGADGVIVGSAIVRQLCEAATPEEGLERLE

SEQ ID NO: 7583 - protein, 177 aa, Zea mays
  Clone ID: TF_ZmC252_1.pep
CPRSQRWTARRSEGAAQRLPAEAGGTSLGTQWAGSGWEDSSALMSDNLSGMKRPRDSSEPGQSGLTHQFSVPKTSSEMATIEKFLQFQDAVPWKIRARRGCATHPRSIAERGRRTKISERIRKLQELVPNMDKQTNTSDMLDLAVDYIKDLQKQVKVLKESQDNCTCSASKNQQHSC

SEQ ID NO: 7584 - protein, 160 aa, Zea mays
  Clone ID: TF_LIB4729-044-R1-K1-F12.pep
RRRDRINEKLRALQELLPNCTKTDKVSMLDEAIDYLKSLQLQLQMLVMGKGGGMAPVVPPELQQYMHYITADPAHQMMPPPLRPSAGQLQPAAGRQFQITQAAAAAANNDNDPQRRRQSNVESDFLSQMQNLHPSDQPPHHHNFLRPPRLQLFTPEQRGG

SEQ ID NO: 7585 - protein, 357 aa, Zea mays
  Clone ID: TF_ZmC2238_1.pep
MAPLPPSAASGPVSSSPRSLVPDACAEPMRRASPPQELPVARGEIQAALAPANASSAGAHGGGGSFTALLGLPTSQAMELLLPRTTPPALATAPAPTFPSDPHLVDRAARLSTFAPPSPSPSSTMTDQPLPAAANAGKRKADPVDRAPKGKAAKKGKTAEEKLAGGDGDDEKPAYVHVRARRGQATDSHSLAERARREKINARMELLKELVPGCSKVSGTALVLDEIINHVQSLQRQVEYLSMRLAAVNPRVDFGGLDSFLTTECGRIAGFNCKNGIDLEQVTWPEMGVHGARQLMQLQQQFWHGDLAHPHQVASQWEKRGDGHPPVFSNSSPSLFGYDLTSSGAQQTPASKLKTEL

SEQ ID NO: 7586 - protein, 252 aa, Zea mays
  Clone ID: TF_ZmC2238_3.pep
PPWVDPASAPTFPSDPHLVDRAARLSTFAPPSPSPSSTSPAPPLPAAANAGKRKADEKPAYVHVRARRGQATDSHSLAERARREKINARMELLKELVPGCSKVSGTALVLDEIINHVQSLQRQVECGRIAGFNCKNGIDLEQVTWPEMGVHGARQLMQLQQQFWHGDLAHPHQVASQWEKRGDGHPPVFSNSSPSLFGYDLTSSGKPCTQSYITFLNEFSCLSLTSHITAWLAPQLLSLSLSRQCSLENKVY

SEQ ID NO: 7587 - protein, 318 aa, Zea mays
  Clone ID: TF_ZmC18277_2.pep
MADADLTPNHSLLLKMPAASAHAHSPSLSSLLLYGQESHGEAAPANANANAAAATVEDAASLETSSAVVDSASPMERKRKATAEDSAAISSPQPKDCKQESKSRRGKRPRKETEEKSSTDEDEASKGYIHVRARRGQATDSHSLAERVRRERISERMRMLQALVPGCDKVTGKAMVLDEIINYVQSLQNQVEFLSMRIASMSPVLYGFGTNSEGLHDHHAPMGGVSFQEAAIAVPAGPAAAVSQASSRPAPSEATMNTACTTTPYSVSLQAQASISFSPSQENGGTYYLVQQAVGEQATRQEELLLSQLVFSNMCSFQ

SEQ ID NO: 7588 - protein, 103 aa, Zea mays
  Clone ID: TF_LIB3356-049-P1-K1-D8.pep
KLPLLSLIGSTPSISSYCTCKCITAGETSALQREVSMECADEKAGDARAKREDYVHVRAKRGQATNSHSLAERFRREKINERMKLLQDLVPGCNKITGKGMML

SEQ ID NO: 7589 - protein, 247 aa, Zea mays
  Clone ID: TF_ZmC25915_1.pep
MMDHQLFDDPFGSSISSLEAEIFSAAAQLPPSPPWPDIDLDDDYDIHDLSAPAANAATSSGGGYGSGGSGGHRKLSHNAYERGRRKQLNELYSSLRSLLPDADQTKKLSIPTTVSRVLKYIPELQKQVDNLERRKKELTNANCKPGVLKTTKAVTPIVSATCLNDTEIMVQVSLHSDVAATALPLSKCIKVLENEGLHLVSSSTYSSAFENKTFYSLHLQRSQRTMKEECPAFCEQLEKIVRKKAGA

SEQ ID NO: 7590 - protein, 285 aa, Zea mays
  Clone ID: TF_ZmC1916_1.pep
MAGQPPPSGASEDDFLEHFFAFPSAASAGAAGGHAGAGVGGDHPFPLALSLDAAAEAKPDRDPVQLAGLFPPVFAGAGGVHQPHLRGPPPPQMFQAQPKPGEGGMAPQPPAPRPKVRARRGQATDPHSIAERLRRERIAERMRALQELVPNTNKTDRAAMLDEILDYVKFLRLQVKVLSMSRLGGAGAVAQLVADIPLSVKGEAGDGGGAPQQQQQQHVWEKWSTDGTEKQVAKLMEEDIGAAMQFLQSKALCMMPVSLAMAIYDTQHPLDGHGHSLKPEPNASS

SEQ ID NO: 7591 - protein, 197 aa, Zea mays
  Clone ID: TF_LIB3587-269-Q1-K6-D12.pep
PRVRKLFVSWGAGNEEVGELDSIDAMTMEQLAKSLADELWDQPATTTHHQEQQQGRQLTNTTGFPFLGDMSRRSYAEADEGFLPTTAAISAGGNDSLFSFTGGKSKQLSFASREPKHESNGGGTTAAGTPMESSKGGRRASSGVHEHIVAERMRRQKMNHQFAALASMIPDITKTDKVSLLGSTIEYVQHLRGRLKA

SEQ ID NO: 7592 - protein, 198 aa, Zea mays
  Clone ID: TF_ZmC39148_1.pep
GAPKPRVRARRGQATDPHSIAERLRREKISDRMKNLQELVPNSNRTDKASMLDEIIEYVKFLQLQVKVLSMSRLGATEAVVPLLTQSQTENSGGGLLLSPRSGSGRQQQARGGSLPPSSSEVRDGAAFEQEVAQLMESDMTTAMQYLQSKGLCLMPVALASAISGQKGASSAAVQPENGGAKEMLRAVKPLASPIHGR

SEQ ID NO: 7593 - protein, 161 aa, Zea mays
  Clone ID: TF_ZmC693_10.pep
STPSEKNDRRTEAETNSGNASKSADKKPAPKEPPKDYIHVRARRGQATDSHSLAERARREKISERMKVLQDIVPGCNKVIGKASVLDEIINYIQSLQRQVEFLSMKLEAINAHVSNATVAFPTKDFGVAPYNTAPSLTLDPQTPREYAQGSMSDWLLSWAS

SEQ ID NO: 7594 - protein, 233 aa, Zea mays
  Clone ID: TF_ZmC253117_1.pep
MALEAVVFSQPQAGHFGCGRGDSPYAVPWSDLLQGGGGGGGGFGDVCAAGEWVDQHDLDTCWAAPTVGDDRDWGEALSRDHSSSDAASTDHGSRKAAPEPAAGRRKRRRTKVVKNKEEIESQRITHIAVERNRRRQMNEYLAVLRSLMPPSHAHRGDQASIVGGAINYVRELEQLLQSLEVQKSLKQSRERRPAAGGASCSPPFAGFFSFPQYSTASSTTSSSGGEKCRGHDV

SEQ ID NO: 7595 - protein, 77 aa, Zea mays
  Clone ID: TF_LIB3595-016-Q1-N6-F5.pep
ATHPRSIAERVRRTKISERIRKLQELVPNMEKQTNTADMLDLAVDYIKDLQKQVKVLNDGRASCTCSAGELQGQFTR

SEQ ID NO: 7596 - protein, 204 aa, Zea mays
  unsure (1)..(204): unsure at all Xaa locations
  Clone ID: TF_ZmC848_2.pep
MSAYCGKYADELIKNAAYIGTPGKGILAADESTGTIGKRLSSINVENVEENRRALRELLFCCPGALQYISGVILFEETLYQKTKDGKPFVDVLKEGGVLPGIKVDKGXEVVGTDKETTTQGHDDLGKRCAKYYEAGARFAXWRAVLKXGPNEPSQLAIDLNAQGLARYAIICHLPRLDMLIAALTVALLSTGRAGSPHRSPAAG

SEQ ID NO: 7597 - protein, 240 aa, Zea mays
  Clone ID: TF_ZmC3763_1.pep
MVGVPGVSGNIFQEIDGRQFDSPILGSRKQKGGFGKGKGKANFATERERREQFNVKYGALRSLFPNPTKNDRASIVGDAIEYINELNRTVKELKILLEKKRNSADRRKILKLDEEAADDGESSSMQPVSDDQNNQMNGTIRSSWVQRRSKECDVDVRIVDDEINIKFTEKKRANSLLCAAKVLEEFHLELIHVVGGIIGDHHIFMFNTKIPKGSSVYACAVAKKLLEAVEIKKQAYNIFN

SEQ ID NO: 7598 - protein, 232 aa, Zea mays
  Clone ID: TF_ZmC1926_1.pep
MGFLDVVEPKAASAALVDGAAGLGACKVEPGLAESGGAFGAGAGAAPPPALASKKKRVEGMPSKNLMAERRRRKRLNDRLSMLRSVVPKISKMDRTSILGDTIDYMKELLERIKLLQEEIGQQQEEAPGMLSVFRELNPNEMVARNTPKFDVERKEGGDTRVEIYCAAKPGLLLSTVSTLDTLGLDIQQCVVSCFNDFGMHASCSEMQREMISADAIKQELFKNAGYGGGCL

SEQ ID NO: 7599 - protein, 333 aa, Zea mays
  Clone ID: TF_ZmC7965_1.pep
MALEAVVFPKEHLAGTAKARSASSLACGFRTEEVEDNGGVVLQGEAGAATTWEYWDAALCPCSTAPAGAVEECWDVRHRLSASPPPPAPSAAVAAPSSGHGKAAAAARRRRRQRPKAVKNTEEVESQRRNHIAVERNRRRQMNEYLSVLRSALPPSYPQRGDQASIVAGAINFVKELEHLLQSLEAQKRRRQGCTEPPAPAPFAGLFTFPQYSTAATGVVAGSGDGAGCGAAGARRGVADIEVAVAESHASVKVVTPRRPRQLLRMVVALQCLGLTVLHLNVTTTADQLVLYSLSLKMEDECRLSSVDDIAAAVNDILAKISDERASRHLVAA

SEQ ID NO: 7600 - protein, 222 aa, Zea mays
  unsure (1)..(222): unsure at all Xaa locations
  Clone ID: TF_ZmC11694_1.pep
RQQKRKSQAECSASQDDDLDDESGGMRGSGGRGTKRSRTAEVHNLSERRRRDRINEKMRALQELIPNCNKIDKASMLDEAIEYLNTLQLLGKMKAVRNRRCTPPMVSTTKLPCLNIRSHSPWKSLTSFMIRQPDVSLEKGPINQDGFGGGMFRLSELRCSIVLXFVDGTGLPVRPNLAPQVPAVMANMVQEQQQGVATQQQQSLNNEAQQKANTGDPQILQK

SEQ ID NO: 7601 - protein, 275 aa, Zea mays
  Clone ID: TF_ZmC223756_1.pep
MDMEEQLLHLEHFMPSSPGFFDVGSGHDPAHFPNGGLFVEQVGATDDGGWVEELMQLGEELFGGPGDGGIMGDADDHYQQWQCDDDVDGGSPDGGPPPSVSLDGDDASPGEQGAGELASEPHREDGDDVSGATRKRRDRSKTIVSERKRRVRMKEKLYELRSLVPNITKMDKASIIADAVVYVKNLQAHARKLKDEVATLEARPRSPTRQDQPQHGRRAGPGRRRQQQQQQVERRDAGSAGAGARVTHVGAAQVGDGRFFVTVECERRDGVAAPC

SEQ ID NO: 7602 - protein, 251 aa, Zea mays
  unsure (1)..(251): unsure at all Xaa locations
  Clone ID: TF_21212345.pep
MASPEGTTWVFDCPLMDDLAVAADFAAAPAGGFFWAAPPSLQPQAPVQSVVAASAPNPCMEISSSVDCGQEKEQPTNKRPRSESTTESSTKASREKIRRDKLNERFLELGAILEPGKTPKMDKTAILSDAIRVVGELRSEAKKLKDSNENLQEKIKELKAEKNELRDEKPKAEXRKESLEHQIKFLNARPSLVPHHPVIPASAFPAPQGPATARHKLMMPVIGYPGFPMWQFMPPSDVDTSDDPRSCPPVA

SEQ ID NO: 7603 - protein, 252 aa, Zea mays
  Clone ID: TF_ZmC2546_1.pep
MASPEGTTWVFDCPLMDDLAVAADFAAAPAGGFFWAAPPSLQPQAPVQSVVAASAPNPCMEISSSVDCGQEKEQPTNKRPRSESTTESSTKASREKIRRDKLNERFLELGAILEPGKTPKMDKTAILSDAIRVVGELRSEAKKLKDSNENLQEKIKELKAEKNELRDEKQRLKAEKESLEQQIKFLNARPSLVPHHPVIPASAFPAPQGPAAAARHKLMVPVIGYPGFPMWQFMPPSDVDTSDDPRSCPPVA

SEQ ID NO: 7604 - protein, 223 aa, Zea mays
  Clone ID: TF_ZmC2546_2.pep
KRTEKLGRLAVRNRFWWPEVEKSPNKQGHSMEISSSVDCGQEKEQPTNKRPRSESTTESSTKASREKIRRDKLNERFLELGAILEPGKTPKMDKTAILSDAIRVVGELRSEAKKLKDSNENLQEKIKELKAEKNELRDEKQRLKAEKESLEQQIKFLNARPSLVPHHPVIPASAFPAPQGPAAAARHKLMVPVIGYPGFPMWQFMPPSDVDTSDDPRSCPPVA

SEQ ID NO: 7605 - protein, 215 aa, Zea mays
  Clone ID: TF_ZmC1313_1.pep
MEDGSSAPRRATPAPTRRSRSADFHNFSERRRRDRINEKLRALQELLPNCTKTDKVSMLDEAIDYLKSLQLQLQMLVMGKGGGMAPVVPPELQQYMHYITADPAHQMMPPPLRPSAGQLQPAAGRQFQITQAAAAAANNDNDPQRRRQSNVESDFLSQMQNLHPSDQPPHHHNFLRPPRLQLFTPEQRGGGGGLPNTSHNAGWISGRSSSYNFME

SEQ ID NO: 7606 - protein, 232 aa, Zea mays
  Clone ID: TF_ZmC3246_2.pep
MMDCAGGRDPVEDFLLGGAGAGDDGDLVAVFCDDGGLGIEGIHGDACGFEQSNLGKRGRDEPCSSGPTSKACREKMRRDKLNDRFLELSSVMSPGKEAKLDKANILSDAARMVAQLRGEAEKLKESNEKLRENIKDLKEEKNELREEKVRLKVEKDRLEQQVKAMSVAPTGYVPHLPHPASYHPAAFTPFAPPPANKSAPIPAPFPGMAMWQWLPPTIVDTTQDPKLWPPNA

SEQ ID NO: 7607 - protein, 368 aa, Zea mays
  unsure (1)..(368): unsure at all Xaa locations
  Clone ID: TF_ZmC21109_1.pep
MASAGHQQQWALPFAGSLQVSPPPQQAPPDRKGRGGAGGGVMESGSRSSGGAGFDDDDGLTTRREVSSSLQDLAVRVDRKGGSCSDGGTDQGPNTPRSKHSATEQRRRSKINDRFQILRELLPHNDQKRDKATFLLEVIEYIRFLQEKAQKYEATFPEWNQENPTMLPWSKGQIPGDSPPDXHISMRNGSSPGSNFTGKLDDNHNIVTSAAASGAQDQAETDHMASGCYRSAETTANFTNNAMSQSQPQWTGPSPVDDSAVNSETLNNQQLVIDEGTIRVSSNYSQELLNSLTHALQSSGVDLSQANISVQINMGKRAAKRPAAGVSSNSKEPADPASSNELGHQLTLSGAGADCLSHATKRHKRSNS

SEQ ID NO: 7608 - protein, 481 aa, Zea mays
  Clone ID: TF_ZmC1877_1.pep
MDFSAGSYFSSWPVNSASESYSLADGSVESYGGEGIMPPSSYFMTARSDHNLKFSVHEQDSTMLPNDQLTYAGARQTDLLPGETPSRDKLCENLLELQRLQNNSNLPSNLVPPGVLQHNSTPGAFHPQLNTPGLSELPHALSSSIDSNGSEVSAFLADLNAVSSASALCSTFQNASSFMEPVNLEAFSFQGAQSDSVLNKTTHPNGNISVFDSAALASLHDSKEFISGRLPSFASVQETNVAASGFKTQKQEQNAVCNVPIPTFTARNQIAVAAMPGSLIPQKIPSWINENKSEGPVSHPSDVQIQPNSVGNGVGVKPRVRARRGQATDPHSIAERLRREKISDRMKNLQDLVPNSNKADKASMLDEIIDYVKFLQLQVKVLSMSRLGAPGAVLPLLAESQTEGYRGQLLSAPTNAQGLLDTEESEDTFAFEEEVVKLMETSITSAMQYLQNKGLCLMPVALASAISTQKGVSAASIPPEQ

SEQ ID NO: 7609 - protein, 175 aa, Zea mays
  Clone ID: TF_ZmC1877_4.pep
DVQTQPNSAVNGVGVKPRVRARRGQATDPHSIAERLRREKISDRMKNLQDLVPNSNKADKASMLDEIIDYVKFLQLQVKVLSMSRVGAPGAVLPLLTESKTEGYHGQPLPQGLLDALDSEDSFVFEEEVVKLMETSITSAMQYLQSKGLCLMPVALASAISTQKGVSAAAVPPER

SEQ ID NO: 7610 - protein, 177 aa, Zea mays
  Clone ID: TF_ZmC178986_1.pep
MDELVCPAASSCSSPSPTSFFAAGHVPELEFVSWDVPEEWMEGTDWFDEPLDGDEGSRSAGNDLSGEPPAPAPKRRRGRKPGPRTNGPTLSHVEAERQRRDKLNRRFCELRAAVPTVSRMDKASLLADAVTYIGELRDRVEQLEAEAKQASAAVTTAVAAASHSFAPLHEKLGLEVR

SEQ ID NO: 7611 - protein, 203 aa, Zea mays
  Clone ID: TF_ZmC9134_3.pep
KRFLKPANGREERVNHVEAERQRREKLNQRFYALRAVVPNVSKMDKASLLGDAISYINELRGKLTSQQPAAGGDHVETDPSMLWLADAPVMDIKDSLSHPSAEISVSKPPPHPPQIHFDGGSGIMGLEALIRVQCHKRNHPSARLMTALRELDLDVYHASVSVVKDLMIQQVAVKMASRMYSQDQLSAALYSRLAEPGSVMGR

SEQ ID NO: 7612 - protein, 123 aa, Zea mays
  Clone ID: TF_ZmC13338_2.pep
NFRGDPPVRFVQFGLSNSSLELPFMDDYLQLQQGSVSCRVRARRGCATHPRSIAERERRTRISKRLKKLQDLLQDLVPNMDKQTNTSDMLDLAVDYIKELKDQVEKLKHDQANCCCLGNKSCC

SEQ ID NO: 7613 - protein, 262 aa, Zea mays
  unsure (1)..(262): unsure at all Xaa locations
  Clone ID: TF_LIB4758-026-R1-K1-A7.pep
MDGCRAVLTGDMQWHEATMSNSSCDSDHLHRERGEQGLMSSQLQQQLEQIYMLMDMELEHELHLHHNVPPQGCSQRQLSSPFLPFAVSSDVTSSPVLTSSSTTTFCQQPAEASPSPLDTPFSPLPYSYSDTIPDLEEIMSRPRHKDGHAESSISAFRQCVRHLRPKKKLKQGGCGQRAIKTAMSVLARMHSSRLSQWQRQISSTEMAAAVPSDESKNVQLLHVRSERKRREKINDSFEALKNALPPSCSQRDXTSILMRGRD

SEQ ID NO: 7614 - protein, 318 aa, Zea mays
  Clone ID: TF_ZmC3765_1.pep
MAAFGAAADHQPMNSAFSGSSEALLDHQRTKDGSDKGEPELGRNGHDGVLSSEAAAAGDCSSKGTSDSKKRRRPNEVMGGDQVQSSNLPADSANESVHSKDKGEESSLATTTTGPGKSKGKGARETSESQKEDYIHVRARRGQATNSHSLAERLRREKISERMKLLQDLVPGCSKVTGKAVMLDEIINYVQSLQRQVEFLSMKLATVNPRLDLNIEGLLSKDLLRFPGVPSSSLGFSPEMMHPQLQLSQPGLIQGGAAGMANPDVFRRIMQAQLSAKDGSQMPPHALNGAFSDVAQQQMAYPSSQDLSIGPSQDGFQM

SEQ ID NO: 7615 - protein, 303 aa, Zea mays
  Clone ID: TF_ZmC848_4.pep
MASHHQQEQMMLHSQSQSQHQQETGRSGGGLYRTVSSAMEAGGTGVGAASSLIRQSSSPAGFLDHFGMDNGYGAMLRASMGMGFQEGVASDSLAGGGGGGGSGRLGGQLSFSSRQGSLMSQISEMDSQEDVVVGASSPDAGGGGDAAYMPGYPMSSGGWDDSSSALLPDSLPATNKRPRDSLEHGGGLAHQFSLPKTSSSEVAAIEKFLQFQDAVPCKVRAKRGCATHPRSIAWRVRRTKISERIRKLQELVPNMEKQTNTADMLDLAVDYIKDLQKQVKVLNDGRANCTCSGGGKLQDPFTS

SEQ ID NO: 7616 - protein, 486 aa, Zea mays
  unsure (1)..(486): unsure at all Xaa locations
  Clone ID: TF_ZmC21109_2.pep
MGIQGNKAATHEHDFLSLYAAAAAKDAPLLLHDSKAPPPSQGNFLLKTHDFLQPLDQKPGAPPEPSPLPASAAESRHQPQQQVVVANQHALPLPGGVGTFSISPAPVSVALPAAVVKSEPPFVLWGQPAATLHPGARGHQQQWALPFAGAGQVRLPPQQAPPDRKGRGGAGGGVMESGSRSSGGAGFDDDDGLTTRREVSSSLQDLTVRVDRKGGSCSDGGTDQRPNTPRSKHSATEQRRRSKINDRFQILRELLPHSDQKRDKATFLLEVIEYIRFLQEKVQKYEATFPEWNQENAKMLPWKWIFPXGSNFTGKLDDNHNIVTSAAASGAQDQAETDHMASGCYRSAETTANFTNNAMSQSQPQWTGPSPVDDCAVNSETLNNQQLVIDEGTIRVSSNYSQELLNSLTHALQSSGVDLSQANISVQINMGKRAVKRPAAGVSTNSKEPADPASSNELGHQLTLSGGGAGADGLSHATKRHKRGSS

SEQ ID NO: 7617 - protein, 340 aa, Zea mays
  Clone ID: TF_ZmC21109_4.pep
MESGSRSSGGAGFDDDDGLTTRREVSSSLQDLTVRVDRKGGSCSDGGTDQRPNTPRSKHSATEQRRRSKINDRFQILRELLPHSDQKRDKATFLLEVIEYIRFLQEKVQKYEATFPEWNQENAKMLPWSNMYFRSFWKNAQSKGQISGDSPPDPSHFMRNGSSPGSNFTGKLDDNHNIVTSAAASGAQDQVETDHMASGCYRSAETTANFTNNAMSQSQPQWTGPSPVDDSAVNSETLNNQQLVIDEGTIRVSSNYSQELLNSLTHALQSSGVDLSQANISVQINMGKRAAKRPAAGVSSNSKEPADPASSNELGHQLTLSGAGADCLSHATKRHKRSNS

SEQ ID NO: 7618 - protein, 82 aa, Zea mays
  Clone ID: TF_ZmC252_2.pep
LKNRLDRTRPRTRGAQVRRTKISERIRKLQELVPNMDKQTNTSDMLDLAVDYIKELQKQVKVLKETQANCTCPASKSQQHSC

SEQ ID NO: 7619 - protein, 267 aa, Zea mays
  unsure (1)..(267): unsure at all Xaa locations
  Clone ID: TF_LIB5116-009-A1-PF1-D8.pep
MDQLDEQSFLDELMSLRREEAPSPAPWQAYPGSGMMTTSDLLFYGGEGTTEASSGMDFAGPFQQPMAPPPATSPHRPHEKFNFDCLSEVCNPYGSCVGGVPKPGVVHAAGQAYALQDAMAQNGTSGGKLHHGGGXASSSPAPFVFAGVAGESSEMTRGAFSGAHARSKLNGGTTSKNLMAERRRRKRLNDRLSMLRSIVPKITKMDRTSILGDTIDYVNELTERIKPFEGEIGATXPEDLNLXDTTKNFSSGYSEEMPMRNPPSLSS

SEQ ID NO: 7620 - protein, 610 aa, Zea mays
  Clone ID: TF_ZmC13586_1.pep
MALSASRVQQAEELLQRPAERQLMRSQLAAAARSINWSYALFWSISDTQPGVLTWTDGFYNGEVKTRKISNSVELTSDQLVMQRSDQLRELYEALLSGEGDRRAAPARPAGSLSPEDLGDTEWYYVVSMTYAFRPGQGLPGRSFASDEHVWLCNAHLAGSKAFPRALLAKSASIQSILCIPVMGGVLELGTTDTVPEAPDLVSRATAAFWEPQCPSSSPSGRANETGEAAADDGTFAFEELDHNNGMDDIEAMTAAGGHGQEEELRLREAEALSDDASLEHITKEIEEFYSLCDEMDLQALPLPLEDGWTVDASNFEVPCSSPNPAPPPVDRATANVAADASRAPVYGSRATSFMAWTRSSRQSSCSDDAAPAAVVPAIEEPQRLLKKVVAGGGAWESCGGATGAAQEMSGTGTKNHVMSERKRREKLNEMFLVLKSLLPSIHRVNKASILAETIAYLKELQRRVQELESSREPASRPSETTTRLITRPSRGNNESVRKEVCAGSKRKSPELGRDDVERPPVLTMDAGTSNVTVTVSDKDVLLEVQCRWEELLMTRVFDAIKSLHLDVLSVQASAPDGFMGLKIRAQFAGSGAVVPWMISEALRKAIGKR

SEQ ID NO: 7621 - protein, 354 aa, Zea mays
  Clone ID: TF_ZmC12850_1.pep
MDSDYVASLLMGMGSSAPALDFAALDAGFLETLCGGGGGLFGVSGVAAGAGCGGVSPEGSSVSDPAWARARDDDNVRKRKAPPTGSAGGKEACPGKAAEAKGPDGKRCRVGGSDSPVKPKVEEVAASDASVELKAQKKGKGKTAKPAVEPPKDYVHVRARRGQATDSHSLAERVRREKISQRMKFLQDLVPGCNKVVGKALMLDEIINYVQSLQQQVEFLSMKLATVNPQLDFSNLSTLLHKDMYQPCGPSANSVFPLESDGAAFPFCDQADLFHSFGSGSAAMEDQCSLSLLDTALPHAANPQFAFQKQQRDFWEDGLQNALPTGSEQRQEEDGLLVPNFDGQLHADQTKVEF

SEQ ID NO: 7622 - protein, 352 aa, Zea mays
  Clone ID: TF_ZmC12850_2.pep
MDSDYIASLLMGSSAPALSFAAVDAGFLDTLRGGGGGGGLFGVPAEAGCGGGSPEGSSVSDPAWARARDYGNARKRKAPPTGSAGGKEACLSKVAEANGPDGKRCRVGASDSPVKPKEEEAAAAAAASGALVEVKAQKKGKGKSSKPAVEPPKDYVHVRARRGQATDSHSLAERVRREKISQRMKFLQDLVPGCNKVVGKALMLDEIINYVQSLQQQVEFLSMKLATVNPELDFSNLSTLLHKDMYQQPCGGPSASSVFPLESAGAAFPFCEQADLFHSFGSGGSGSGSGMEDQCSLSLLLDTALPHAASPQFAFQKQQRDLWEDGLQHALPTPTTGSEQRQEEDGLLVPDP

SEQ ID NO: 7623 - protein, 116 aa, Zea mays
  Clone ID: TF_LIB3607-057-Q6-N6-A4.pep
NKKHCGAGRKASKAKLASTAPTKDPQSLAAKNRRERISERLRALQELVPNGTKVDLVTMLEKAISYVKFLQLQVKVLATDEFWPAQGGKAPEISQVREALDAILSSASQSQRGQLN

SEQ ID NO: 7624 - protein, 612 aa, Zea mays
  Clone ID: TF_ZmC13586_2.pep
MALSASRVQQAEELLQRPAERQLMRSQLAAAARSINWSYALFWSISDTQPGVLTWTDGFYNGEVKTRKISNSVELTSDQLVMQRSDQLRELYEALLSGEGDRRAAPARPAGSLSPEDLGDTEWYYVVSMTYAFRPGQGLPGRSFASDEHVWLCNAHLAGSKAFPRALLAKSASIQSILCIPVMGGVLELGTTDTVPEAPDLVSRATAAFWEPQCPTYSEEPSSSPSGRANETGEAAADDGTFAFEELDHNNGMDIEAMTAAGGHGQEEELRLREAEALSDDASLEHITKEIEEFYSLCDEMDLQALPLPLEDGWTVDASNFEVPCSSPQPAPPPVDRATANVAADASRAPVYGSRATSFMAWTRSSQQSSCSDDAAPAVVPAIEEPQRLLKKVVAGGGAWESCGGATGAAQEMSATKNHVMSERKRREKLNEMFLVLKSLLPSIHRVNKASILAETIAYLKELQRRVQELESSREPASRPSETTTRLITRPSRGNNESVRKEVCAGSKRKSPELGRDDVERPPVLTMDAGTSNVTVTVSDKDVLLEVQCRWEELLMTRVFDAIKGLHLDVLSVQASAPDGFMGLKIRAQFAGSGAVVPWMISEALRKAIGKR

SEQ ID NO: 7625 - protein, 906 aa, Zea mays
  unsure (1)..(906): unsure at all Xaa locations
  Clone ID: TF_ZmC2137_2.pep
MAASAPPIYFCAAPAFCPCRPHAKPDSKDVDEARVTMAPTTPICLRVAPAPRPCRVRVGRGRGGQRQQSGRDGLDTFMLFYTVFSVIDPKCDARDSHVPMSTNQRYRLFPRRQFHNTLHLLNDSRLLRDLRFRFFIAKCPHPHWPLPLCQGHGREEPISSAWSKHRQDPIQEGQSIGVIANDVDKNGKPHKVRLYSIASSANGDFGNSRQVLPSLAGLPDLLCRFSCHLICFSVLLAFLLELYVFLKLTPVKRRLFNRGCKEQHCESYSCIIAIVSVVHPDGWRSKWQIKLCYVPTLPGCHVFIRGKGSIKDPGKILGYSLNEAHQLLQECRQQQMNLDELLEKKCSTLANRGDGGSDQSGTAPSSPPHVFGSATPLRAGTSGQWHTHHKDEDLNQDEKWEQLVHLLKGIAVETEKFQATPLSQEVLIVWGDHDQLFPVEKAFAVHSSFKDSSECCCFPVTKKIPRNHFLSSSTGCLSSCSKTIAVLQVVVAAPTPASAIGFEGYEKRLEISFYEAPIFADPNGRGLNRLAGVAAGLPHDLGLASQTRHKAERSPGLAKIFRKDLNLGRPSVGLVVGVSKXDERTWEQRSAVGGTSLLPSVQKGLQNFSWSQARGLNSHQQKFGNGVLIVSNNEAAHRNNGAVDSPSTAQFQLQKVPQLQKLQLQKLPVVQKTPQLGNQQPMQTQVPRQIDFSAGSSSKPGVLVTRAAVLDGESAEVDGLCKEEGAPPVIEDRRPRKRGRKPANGREEPLNHVEAERQRREKLNQRFYALRAVVPNISKMDKASLLGDAITYITDLQKKLKEMETERERLLESGMVDPRERAPRPEVDIQVVQDEVLVRVMSPMENHPVKKVFQAFEEAEVRVGESKVTGNNNXGTVVHSFIIKCPGTEQQTREKVIAAMSRAMSS

SEQ ID NO: 7626 - protein, 265 aa, Zea mays
  Clone ID: TF_ZmC579456_1.pep
MEWAMDTLLQEEEPAALYDGCGEAVAVFPSLQGLRDASHAAEMVRELMAAVETDDAANSWTTSGSGGEVTDGGSSGATDPAAPAAAEAADFYGGSGPPHSPNSFPSGKTNTSLPTVRVSWNFVTGSAAAQPRSDGVLEKGAVPIRRVPPELAHRRRSPPPPPRRAHHPTRGMGAASCTPEHIVAERKRREKINNRLIELSTVIPGLKKMDKATILSDAAKYVKELQQRLRPLERAAAAAAGSSRTKAPTTTDENGGSRSPTSASS

SEQ ID NO: 7627 - protein, 181 aa, Zea mays
  unsure (1)..(181): unsure at all Xaa locations
  Clone ID: TF_ZmC944_3.pep
LGQLCFVYIFFYLIIHPLILFCVSLQKRRDRINQKMKTLQKLVPNSNKTDKASMLDEVIDYLKQLQAQVQLMSRMGSMMMPMAMPQLQMSMMAQMAQMAQMAQMAQMNMGSLGQPGYAGLTPPMMHPPPFVPVSWDTTXTVTTFLAPQAGSGTVPADAFYAFLACQAQQNGQQQPGSMEAY

SEQ ID NO: 7628 - protein, 287 aa, Zea mays
  Clone ID: TF_ZmC28831_1.pep
MASFPHLTQMEHGLASGASHGTPSFFFCHGTATADSASLETSSGVLDTSPRGTSSDDNKACRKHKEDSGASFSSARSKDSNSKESSKRSGGKRDRSSKKVDEEEPKGYIHVRARRGQATDNHSLAERVRRERISERMRVLQALVPGCDKVTGKALILDEIINYVQSLQNQVEFLSMRIASLSPVLYGFGMDSSDAFSDLITQKIEGMAHHEAFAMPSSSVLNGTPSEALVDTHTSSSSPSYEVHGDGGTASVSFPQDSGSYMVQTVGEPRQELFSQVVFSNHMCPFQ

SEQ ID NO: 7629 - protein, 167 aa, Zea mays
  unsure (1)..(167): unsure at all Xaa locations
  Clone ID: TF_ZmC178000_1.pep
MPRRQRTRSSEELKAEDFVDSVLNFGGEEEDGEEEKQEAGGDGQPAAEFKSKNLEAERKRRGKLNRNILALRAVVPNITKMSKESTLSDAIDLIRKLQNQVLELQRQLADSPGEAWEKQGSASCSESFTATENMPYQGQIELVPLGPCKYHLRIFCKKGXGXSSKGC

SEQ ID NO: 7630 - protein, 75 aa, Zea mays
  Clone ID: TF_LIB3245-506-P1-K1-G5.pep
QARREKISERMKVLQDLVPGCNKVIGKASVLDEIINYIQSLQCQVEFLSMKLEAVNAQANQGVEVFPAKDYGSQT

SEQ ID NO: 7631 - protein, 257 aa, Zea mays
  Clone ID: TF_ZmC238625_1.pep
MMPGSMAARQPLQGKQELQPYDGRDPSALGAGGSPVLLPRQQESAAPPAVRVAPPPDMSSSSGSGRSATEARALKVHSEAERRRRERINAHLATLRRMVPDTRQMDKATLLARVVEQVKLLKRKASEAATTTTQSTPLPPETDEVSIELHTGDAGADRSVYIRASISCADRPDLVAGLAQAFHGLRLKTVRANMTSLGGRARHVFVLCMEDGWGSAGASLRSLKEAVRQALARVASPETAYGSSPFQSKRQMILESH

SEQ ID NO: 7632 - protein, 403 aa, Zea mays
  Clone ID: TF_ZmC16354_1.pep
MAELVMAQCGVPSGGEGGAWPPGFAWDGGAADASRGMYGDAVPPSLSLFDAAGSVAADPFQAVQQAPGAGGGGVDDVAGWQYAAAAGSELEAVQLQQEQQPRDADSGSEVSDMQGDPEDDGDGDAQGRGGGKGGGKRQQCKNLEAERKRRKKLNERLYKLRSLVPNISKMDRAAILGDAIDYIVGLQNQVKALQDELEDPADGAGAPDVLLDHPPPASLVGLENDESPPTSHQHPLAGTKRARAAAEEEEEEKGNDMEPQVEVRQVEANEFFLQMLCERRPGRFVQIMDSIADLGLEVTNVNVTSHESLVLNVFRAARRDNEVAVQADRLRDSLLEVMREPYGVWSSSAPPVGMSGSGIADVKHDSVDMKLDGIIDGQAAPSVAVGVSEDHYGGYNHLLQYLA

SEQ ID NO: 7633 - protein, 150 aa, Zea mays
  Clone ID: TF_ZmC222321_1.pep
AVGAAGAGAERPRRKNVRISSDPQTVAARLRRERVSERLRVLQKLVPGGSKMDTASMLDEAASYLKFLKSQVQALETLGTTTATNANSSASATTSRSSAASRSPQYNYYGGGGNNNNPAGFLGFSNVISPAGYVNPGGSSSNTGSNKLLF

SEQ ID NO: 7634 - protein, 213 aa, Zea mays
  Clone ID: TF_LIB4976-045-A1-K1-G9.pep
MADADLTPNHSLLLKMPAASAHAHSPSLSSLLLYGQESHGEAAPANANANAAAATVEDAASLETSSAVVDSASPMERKRKATAEDSAAISSPQPKDCKQESKSRRGKRPRKETEEKSSTDEDEASKGYIHVRARRGQATDSHSLAERVRRERISERMRMLQALVPGCDKVNGKAMVLDEIINYVQSLQNQVEVIKTQTMNQVEVIQAWFWINC

SEQ ID NO: 7635 - protein, 224 aa, Zea mays
  Clone ID: TF_LIB3689-245-Q1-K6-D2.pep
SIIFWKNKREREREKLAFLFGVRSSFQGGEAAGVFGGSFAGSLHHHQQQQQHFQSHPQQTAPLPGQGFGGGAGASGGVSQPQAGAACGGAAAPPRQRVRARRGQATDPHSIAERLRRERIAERMKALQELVPNANKTDKASMLDEIVDYVKFLQLQVKVLSMSRLGGAAAVAPLVADMSSEGRGGVAVAAGSDDGLAVTEQQVAKLMEEDMGTAMQYLQGKGLC

SEQ ID NO: 7636 - protein, 471 aa, Zea mays
  Clone ID: TF_ZmC6843_1.pep
MQPTTREMQAMAAAGQQISLDDLRAAAGGVHDDFLDQMLGGLPPSAWPELSSAAGGKAPDGGAQAEQMQHQPQHLGGGGGLYDDSALLASRLRQHQISGGGGGEAVKQMVLQQLADLRQEHHVLLQGMGRSTSTGGSRDGGLLLPLSLGSGGSGGDVQALLKAVADSAGGEAAGVFGGSFAGSLHHHQQQQQHFQSHPQQQTAPLPGHGSGGGAGASGGVSQPQAGAACGGAAAPPRQRVRARRGQATDPHSIAERLRRERIAERMKALQELVPNANKTDKASMLDEIVDYVKFLQLQVKVLSMSRLGGAAFLLWTVRVCVVQGRGGVAVAAGSDDGLAVTEQQVAKLMEEDMGTAMQYLQGKGLCLMPVSLASAISSATCHMRPPVGGPGLGVAAAAAHHMAAMRLPPHAMNGGAGAGADAVPASPSMSVLTAQSAMAPNGAGGGTDGEGSHSQQQQRHHPKDAASVSKP

SEQ ID NO: 7637 - protein, 121 aa, Zea mays
  Clone ID: TF_ZmC32276_1.pep
MNPRGHRSNRTSLFDGIEEGGIRATSYSSHEIDEQENDGAIDGLQDRVSILKRLSGDIHEEVETHNRMLDRMGNDMDTSRGFLSGTVDKFKMVFETKSSRRMGTLVASFVALFLLVYYLTR

SEQ ID NO: 7638 - protein, 174 aa, Zea mays
  Clone ID: TF_ZmC1672_5.pep
VPKKRTHYQLNSITSGTTLSITNSEQALLVYSISKDRQLPDATEQQSPVRPNDDEISLLTASTWAAQSFTRHPSLITLLVPVVDLGLGLVRITRQCGSSSRLLVVIGVHLLCVLNLQLLGLRYVGSLLLRFRNCTTSKGGQGNKRILHRSVEVNMQVEQNPSRNEQISTSNSTK

SEQ ID NO: 7639 - protein, 119 aa, Zea mays
  unsure (1)..(119): unsure at all Xaa locations
  Clone ID: TF_LIB143-063-Q1-E1-G12.pep
TFSCSNNQTLIPIKAQGLQNKSMAQSNGWQPRLSVKEKKVEKDPTIPKRPPTPSSSSRENLRKDSKENHPKLKQVSLIGKAGCDKXVLSDSENAHYVSKAEKLKAEYTKKIDAYNNKQS

SEQ ID NO: 7640 - protein, 159 aa, Zea mays
  unsure (1)..(159): unsure at all Xaa locations
  Clone ID: TF_ZmC677_15.pep
GPASTGRSGTRFLFFLVIVTVLLVKLLCGCCCRLRAGGAAGKRKKAAASGKPKRPPSAFFVFMSEFRQEYQALHPGNKSVATVSKAAXXEKWRAMSDQEKQPYVDQAGQKKQDYEKTKANFDKKESTSSKKAKTEDEDGSKXVREDEDGSSDEENDDDE

SEQ ID NO: 7641 - protein, 128 aa, Zea mays
  unsure (1)..(128): unsure at all Xaa locations
  Clone ID: TF_LIB4742-022-R1-K1-E8.pep
RARLDTSKKDEGRLXRPGAHGKRKRAGASAIVKRPPCALIVLMSEFRQEHXALYTDNKSVATASKAPGEKWRAMSYKEKHPYVDQVXQKKQDCEETRANCHNKESTSSENAITEDDDGSKDMLKTRMA

SEQ ID NO: 7642 - protein, 96 aa, Zea mays
  unsure (1)..(96): unsure at all Xaa locations
  Clone ID: TF_700354730H1.pep
PYSCSHTQTVDAIRLKRLKLRSKDRYTTGDSRLSVMKPNAEXDPYKRKMPQSAFFVFMEEFWKDYEDKHPHEKQVSLVGTAGGAKWKSLSDDADAP

SEQ ID NO: 7643 - protein, 75 aa, Zea mays
  unsure (1)..(75): unsure at all Xaa locations
  Clone ID: TF_LIB4729-108-A1-K1-F3.pep
MKGKADTSKKDEGRLRAGGAAGKRKNAAASGKSXRPPSAFFVFMSEFWXEYQVLHPVFKSVATVIQAAGEQCRAM

SEQ ID NO: 7644 - protein, 137 aa, Zea mays
  Clone ID: TF_uC-zmflteosinte92e09b1.pep
LFSQPPRHFLLLLRIVILLSTGPPQNVRPHAVFPAVNPSSSRDGDIPAKGRKGKAGKDPNKPKRAPSAFFVFMEEFRKEFKEKNPKNKSVAAVGKAAGDRWKSLSESDKASYVAKANKLKLEYNKGIAAYNKGESTA

SEQ ID NO: 7645 - protein, 126 aa, Zea mays
  unsure (1)..(126): unsure at all Xaa locations
  Clone ID: TF_ZmC677_11.pep
MKGKADTSKKDEGRLRXGKPKRPPSAFFVFMSEFRQEYQALHPGNKSVATVSKAAGEKWRAMSDQEKQPYVDQAGQKKQDYEKTKANFDKKESTSSKKAKTEDEDGSKSEVDDEDGSSDEENDDDE

SEQ ID NO: 7646 - protein, 188 aa, Zea mays
  Clone ID: TF_ZmC677_3.pep
MKGKADTSKKDEGRLRAGGAAGKRKKAAASGKPKRPPSAFFVFMSEFRQEYQALHPGNKSVATVSKAAGEKWRAMSDQEKQPYVDQAGQKKQDYEKTKANFDKKESTSSKKAKTEDEDGSKSEVDDEDGSSDEERYALPHPKGKPTTSPTTLRLRLRHSCRFESPRPDPSQNPSSNHHEGQGQRLQEG

SEQ ID NO: 7647 - protein, 139 aa, Zea mays
  Clone ID: TF_ZmC677_4.pep
MKGKADTSKKDEGRLRAGGAAGKRKKAAASGKPKRPPSAFFVFMSEFRQEYQALHPGNKSVATVSKAAGEKWRAMSDQEKQPYVDQAGQKKQDYEKTKANFDKKESTSSKKAKTEDEDGSKSEVDDEDGSSDEENDDDE

SEQ ID NO: 7648 - protein, 139 aa, Zea mays; identical to SEQ ID NO: 7647
  Clone ID: TF_ZmC677_5.pep

SEQ ID NO: 7649 - protein, 101 aa, Zea mays
  Clone ID: TF_ZmC176449_1.pep
MPKAAAPAKRATRTKRAKKDPNAPKRGLSAYMFFANEQRENVREENPGISFGQVGKLLGERWKALNEKQRAPYEAKAAADKKRYEDEKQAYNADQEEEESS

SEQ ID NO: 7650 - protein, 101 aa, Zea mays
  Clone ID: TF_ZmC176449_2.pep
MPKAAAGKRGKAEKTKRGKKDPNAPKRGLSAYMFFANEQRENVREENPGISFGQVGKLLGERWKALNEKQRAPYEAKAAADKKRYEDEKQAYNADQEEEES

SEQ ID NO: 7651 - protein, 123 aa, Zea mays
  Clone ID: TF_4995920.pep
MKDTSFKATGAKRKKVGGAKRGLTPFFAFLAEFRPQYLEKHPELKGVKEVSKAAGEKWRSMSDEEKAKYGSSKKQDGKASKKENTSSKKAKADVREGDEAEGSNKSKSEVEDDEQDGNEDEDE

SEQ ID NO: 7652 - protein, 138 aa, Zea mays
  Clone ID: TF_1845196.pep
MKGKANASKKDEARLRAGGGGAGKRKKAAASGKPKRPPSAFFVFMSEFRQEYQAQHPGNKSVAAVSKAAGEKWRSMSEQEKQPYVDQAGQKKQDYEKTKANIEKSTSSKKAKTDDDDGSKSEVDDEDGGSDEDNDDDE

SEQ ID NO: 7653 - protein, 145 aa, Zea mays
  Clone ID: TF_ZmC677_10.pep
GFARGQDEGFRIGSCGAGGGGAGKRKKAAASGKPKRPPSAFFVFMSEFRQEYQAQHPGNKSVAAVSKAAGEKWRSMSEQEKQPYVDQAGQKKQDYEKTKANIEKESTSSKKAKTDDDDGSKSEVDDEDGGSDEDNDPRVRIFFFF

SEQ ID NO: 7654 - protein, 139 aa, Zea mays
  Clone ID: TF_ZmC677_14.pep
MKGKANASKKDEGRLRAGSGGAGKRKKAAASGKPKRPPSAFFVFMSEFRQEYQAQHPGNKSVAAVSKAAGEKWRSMSEQEKQPYVDQAGQKKQDYEKTKANIEKESTSSKKAKTDDDDGSKSEVDDEDGGSDEDNDDDE

SEQ ID NO: 7655 - protein, 139 aa, Zea mays; identical to SEQ ID NO: 7654
  Clone ID: TF_ZmC677_21.pep

SEQ ID NO: 7656 - protein, 139 aa, Zea mays
  Clone ID: TF_ZmC677_6.pep
MKGKANASKKDEGRLRAGGGGAGKRKKAAASGKPKRPPSAFFVFMSEFRQEYQAQHPGNKSVAAVSKAAGEKWRSMSEQEKQPYVDQAGQKKQDYEKTKANIEKESTSSKKAKTDDDDGSKSEVDDEDGGSDEDNDDDE

SEQ ID NO: 7657 - protein, 107 aa, Zea mays
  Clone ID: TF_ZmC190193_1.pep
SARVNRKPHRSGRRKKNKRRWDPNYPKPNRSGYNFFFAEKHYTLKTLYPNREREFTKMIGQSWNSLSPEERMVYQNIGLRDKERYKRELTEYKEKMKLRQTSEVGRP

SEQ ID NO: 7658 - protein, 126 aa, Zea mays
  Clone ID: TF_ZmC518120_1.pep
MKAKAGSRAGDSRLAVKKSKAEKDPNKPKRPPSAFLVFMDTFRKEYKEKHPDVKQVSVIGKAGGEKWKSLSDAEKAPYAAKAEKLKAEYAKKIDAYNNPQAGEASGDSDKSKSEVNDEDDGSEGDE

SEQ ID NO: 7659 - protein, 120 aa, Zea mays
  Clone ID: TF_LIB5116-064-A1-PF1-E12.pep
MRSKANGDTAFKASGKNKTATGGVAKPKRAPTPFFAFLAEFRPQYMEKHPEAKGVAAVTKAAGEKWRSMSDEEKAKYGGKKADAPASKAVNKKESTSSKKTKTNADEEGSDVEDDEEDEE

SEQ ID NO: 7660 - protein, 320 aa, Zea mays
  Clone ID: TF_ZmC677_2.pep
MKGKADTSKKDEGRLRAGGAAGKRKKAAASGKPKRPPSAFFVFMSEFRQEYQALHPGNKSVATVSKAAGEKWRAMSDQEKQPYVDQAGQKKQDYEKTKANFDKKESTSSKKAKTEDEDGSKSELDDEDGSTASEPGNALGASPPKKENQPPLPPPSASACATAADSKALVLTPRKTLAPTTMKGKANASKKDEARLRAGGGGAGKRKKAAASGKPKRPPSAFFVFMSEFRQEYQAQHPGNKSVAAVSKAAGEKWRSMSEQEKQPYVDQAGQKKQDYEKTKANIEKESTSSKKAKTDDDDGSKSEVDDEDGGSDEDNDDDE

SEQ ID NO: 7661 - protein, 206 aa, Zea mays
  Clone ID: TF_LIB5025-006-R1-XP-E8.pep
MSLSKLFSNLTIQTRSISSYRHMHPTKFVSILQNVPMKPRSAWQVYIREHLKGTKTTQEGLTKSSTELSAKWKALSEHEKQKYYTIYESEKDAYEKAFAVAVNNASPKQFYQENLLRKKYKLPLLVDPKKPKRPLNAYLSYYQALRDSKHASMEGQPVAEQAKIVGRLYKELPESEKKIYKDKANQAMEQYKKQVAEYNREAGIHA

SEQ ID NO: 7662 - protein, 218 aa, Zea mays
  Clone ID: TF_ZmC37456_1.pep
MATAAVESKRGSARGRKALVAVLDNEANISAGKAAQAADLSSCSAQKKAKRAPSRSSKAKAAAASAVVVVDDIAELQGMLERLRLEKEKAEEMVRERDEVIRKKEEEIETRDKEQERLQAELRKAQRAKEFKPTVSFPLVKSLLEKEQEADDKGKKKKGKGGHERKKPCPAYVLWLKDQWTEVKKENPEPDFKEVSNTLGAKWKALGAEEKQPYEDRY

SEQ ID NO: 7663 - protein, 123 aa, Zea mays
  Clone ID: TF_ZmC137_2.pep
MKHPSFKATGAKRKKVGGAKRGLTPFFAFLAEFRPQYLEKHPELKGVKEVSKAAGEKWRSMSDEEKAKYGGSKKQDGKASKKENTSSKKAKADVREGDEAEGSNKSKSEVEDDEQDGNEDEDE

SEQ ID NO: 7664 - protein, 188 aa, Zea mays
  Clone ID: TF_ZmC677_13.pep
MTSHARVRKLGIRLEPPSASACATAADSKALVLTPRKTLAPTTMKGKANASKKDEGRLRAGGGGAGKRKKAAASGKPKRPPSAFFVFMSEFRQEYQAQHPGNKSVPAMMSYFFVLVDQVSKAAREKWRSMSEREKQPYVDQAGQKKQDYEKTKANFEKKESTSSKKAKTDDDDGSKSEVDDEDDEDDE

SEQ ID NO: 7665 - protein, 117 aa, Zea mays
  Clone ID: TF_ZmC1209466_1.pep
MTTRYKKKSPSLSVGDISKEIGARWKKVSDDVRKRYEQKAAVEKQKYEVRVAEYKKSGGGGASSSPAKGGKGAAKGGSKKAAPAKGGKKKPAAKSKSSDEDNDDDDDDDDEDEDDEE

SEQ ID NO: 7666 - protein, 134 aa, Zea mays
  Clone ID: TF_LIB3067-045-C4_FLI.pep
NASKKDEGRLRAGGGGAGKRKKAAASGKPKRPPSAFFVFMSEFRQEYQAQHPSNKSVAAVSKAAGEKWRSMSEQEKQPYVDQAGQKRQDLQRVVPPERELHHRLQERGQYRRVLQARGLHVHQRVCREYWRCWC

SEQ ID NO: 7667 - protein, 139 aa, Zea mays
  Clone ID: TF_LIB4729-127-A1-K1-B9.pep
MKGKANASKKDEGRLRAGGGGAGKRKKAAASGKPKRPPSAFFVFMSEFRQEYQAQHPSNKSVAAVSKAAGEKWRSMSEQEKQPYVDQAGQKKQDYEKTKANIEKESTSSKKAKTDDDDGSKSEVDDEDGGSDEENDDDE

SEQ ID NO: 7668 - protein, 139 aa, Zea mays; identical to SEQ ID NO: 7667
  Clone ID: TF_ZmC677_7.pep

SEQ ID NO: 7669 - protein, 317 aa, Zea mays
  unsure (1)..(317): unsure at all Xaa locations
  Clone ID: TF_ZmC4984_1.pep
PVQNYRVDPRVYSGFSFLTSVHFKEVSKTLGAKWKALGAEEKQPYAERYRQEKEAYLQVVGQEKREAEAMQLLAQQPMQWTAKELLGQYLKFRQEAEEGDCKKGRKKKSKKDKDPSKPKQPMSAYFVYSQERRATLVAEKKSXEIGKITGEEWKNMTEGQRAPYEEVARKQKEEYHKQMEVYKQKKAEEAASLEKEEQEHKKIMKHEALQLLKKKEKADNIIKKTKEKRQKKKQENADPNRPKRPASSFLLFSKEERKQLIEERPGINNSTLNALITVKWKELSGEERQAWNAKAAPAMAAYKKEMEEYTKAQSSSA

SEQ ID NO: 7670 - protein, 229 aa, Zea mays
  unsure (1)..(229): unsure at all Xaa locations
  Clone ID: TF_ZmC4984_2.pep
AELRKAQRVKEFKPTVSFPLVKSLLEKEQEADDKGKKKKGKGGHERKKPCPAYVLWLKDQWTEVKKENPEADFKEVSNTLGAKWKALGAEEKQPYEERYRQEKEAYLQVVGQEKREAEAMKLLEEQQMQWTAKELLDQYLKFRQEAEEGDCKXXRKNKSKKDKDPSKPKQPMSAYFVYSQERRATLVAEKKNVPEIGKITGEEWKNMTEGQRAPYXEVARKQKEEYHKQ

SEQ ID NO: 7671 - protein, 85 aa, Zea mays
  Clone ID: TF_ZmC13336_1.pep
KKDPNAPKRGLSAYMFFANENRERVRDENPGIAFGALGRKLGELWKGLSDAERKPYEDKAAADKKRYEDQKATYLAGGDDDEESS

SEQ ID NO: 7672 - protein, 126 aa, Zea mays
  Clone ID: TF_ZmC1672_1.pep
MKSRARSTAGDSRLSVRKTKAEKDPNKPKRPPSAFFVFMEEFRKDYKEKHPNVKQVSLIGKAGGDKWKSLSDAEKAPYVSKAEKLKAEYTKKIDAYNNKQSGDPTASGDSDKSKSEVNDEDEEGDE

SEQ ID NO: 7673 - protein, 126 aa, Zea mays; identical to SEQ ID NO: 7672
  Clone ID: TF_ZmC1672_3.pep

SEQ ID NO: 7674 - protein, 165 aa, Zea mays
  Clone ID: TF_ZmC1672_4.pep
MPTAPYFKSRPLVGLGCDSHQSGAGLQPFSCSHTQTLVAIRPQGLEMKSRARSTAGDSRLSVRKTKAEKDPNKPKRPPSAFFVFMEEFRKDYKEKHPNVKQVSLIGKAGGDKWKSLSDAEKAPYVSKAEKLKAEYTKKIDAYNNKQSGDPTASGDSDKSKSEGDE

SEQ ID NO: 7675 - protein, 84 aa, Zea mays
  Clone ID: TF_ZmC146668_1.pep
AGKRKKATTSGKPKRPPSAFFVFMSEFRQEYQVQHPGNKSITAVSHLALCSPFIFWCVCRCDSLFVLVDQVSKAAGEKWHAMTD

SEQ ID NO: 7676 - protein, 115 aa, Zea mays
  Clone ID: TF_LIB4738-132-A1-K1-D9.pep
MKTRSQTSPKPLKTVAMAPRPSSTKRKPRPKPAGKGDPRAPKKPPTAFFYFMEDFRKIYKQEKPSVKSMQEIGKACGEKWNTMTFEEKVKYYDIATEKRAEFEKAMIEYNKKKES

SEQ ID NO: 7677 - protein, 115 aa, Zea mays; identical to SEQ ID NO: 7676
  Clone ID: TF_ZmC2000_1.pep

SEQ ID NO: 7678 - protein, 158 aa, Zea mays
  unsure (1)..(158): unsure at all Xaa locations
  Clone ID: TF_LIB3078-029-Q1-K1-F11.R2.pep
ALRFESAVECAKKGAKYKGAAKVDAKMAVKNKGAENPNGGTKGNADKDPNXPKRASSAMLEFMEEFREEITENNPLNKSVNAVGKACSHRRKSLSDSYKATYVTKANKLKLEYNNDISDYSTGDSTAANKAHDEEEEEEYEEDSDEFNDEDNDEGHEE

SEQ ID NO: 7679 - protein, 68 aa, Zea mays
  Clone ID: TF_LIB3151-003-Q1-K1-E11.pep
RSKSHTKSAKLSAKFQAGKKWEKASQDPNKPKRPPRAFFAFIEEFREQYKKDHPKNKSPAGVGKACGD

SEQ ID NO: 7680 - protein, 123 aa, Zea mays
  Clone ID: TF_ZmC137_1.pep
MKDTSFKATGAKRKKVGGAKRGLTPFFAFLAEFRPQYLEKHPELKGVKEVSKAAGEKWRSMSDEEKAKYGGSKKQDGKASKKENTSSKKAKADVREGDEAEGSNKSKSEVEDDEQDGNEDEDE

SEQ ID NO: 7681 - protein, 212 aa, Zea mays
  Clone ID: TF_ZmC15996_1.pep
MAGGKSTGNAARSRKRVEATVLKRSRDGSAFTRCEACNKDVPVVLIDMHSCSLDEKIRMTLEAQVVEKTVEVASADRKKSSAKGGGNKDAKRKRSPTAFFLFMDDFRKEFKATHPDNKSVATVAKEGGERWKSMTDEEKKPYIEKAAELKAEAENGEGSGENNVATKKAKTDDQEVDQPAKKLRKCKALHEDEDDDGDQEDEDEKNELDDDM

SEQ ID NO: 7682 - protein, 212 aa, Zea mays
  Clone ID: TF_ZmC15996_2.pep
MAGGKSTGNAARSRKRVEATVLKRSRDGSAFTRCEACNKDVPVVLIDMHSCSLDEKIRMTLEAQVVEKTVEVASADRKKSSAKGGGNKDAKRKRSPTAFFLFMDDFRKEFKATHPDNKSVATVAKEGGERWKSMTDEEKKPYIEKAAELKAEAENGEGSGENNVATKKAKTDDQEVDQPAKKLRKCKALHEDEDDEGDQEDEDEKNELDDDM

SEQ ID NO: 7683 - protein, 337 aa, Zea mays
  Clone ID: TF_ZmC1306_1.pep
EILAEKYKDRLESSYRGLIHEVFSKVLRGLSSAKVTRPSTFRSCLDGYAVKSSLKAEDGLLYPLEKGFFFLPKPPTLIPHEEIEYVEFERHGAGGASISSHYFDLLVKLTNDQELLFRNIQRNEYHNLFNFISGKHLKILNLGDGQGRTSGVTAVLQSTDDDSVDPHLERIKNQAGNEESDEEDEDFVADKDDSGSPTDDSDAEGSDASMSGGEKEKPSKKEASSSKPPVKKKQKSGPDEGSQKKKPKKKKDPNAPKRAIAPFMYFSKAERANIKSSNPELATTEIAKKLGERWQKMTAEERQPYVEQSQVDKQRYAEESAAYRGAAAQQGSGAGSE

SEQ ID NO: 7684 - protein, 223 aa, Zea mays
  Clone ID: TF_ZmC1306_2.pep
PTCFYESDIASCPFIIFLSGKHLKILNLGDGQGRTSGVTAVLQSTDDDSVDPHLERIKNQAGNEESDEEDEDFVADKDDSGSPTDDSDAEGSDASMSGGEKEKPSKKEASSSKPPVKKKQKSGPDEGSQKKKPKKKKDPNAPKRAIAPFMYFSKAERANIKSSNPELATTEIAKKLGERWQKMTAEERQPYVEQSQVDKQRYAEESAAYRGAAAQQGSGAGSE

SEQ ID NO: 7685 - protein, 139 aa, Zea mays; identical to SEQ ID NO: 7647
  Clone ID: TF_ZmC677_1.pep

SEQ ID NO: 7686 - protein, 178 aa, Zea mays
  Clone ID: TF_ZmC677_12.pep
MSSNEERVGGRVGGRVGGRVGGRVGALGASPPKKENQPPLPPPSASACATAADSKALVLTPRKTLAPTTMKGKANASKKDEARLRAGGGGAGKRKKAAASGKPKRPPSAFFVFMSEFRQEYQAQHPGNKSVAAVSKAAGEKWRSMSEQEKQPYVDQAGQKKQDYEKTKANIEKESTSS

SEQ ID NO: 7687 - protein, 84 aa, Zea mays
  Clone ID: TF_700351302H1.pep
KTEAEKDADMPKMPPRAFFVFMEEFRKDYNEQYPSVEQVSLIGNAGRDEWKSLSDAEKAHYVSKAVKLKDEYTKKIDVYSNKQS

SEQ ID NO: 7688 - protein, 694 aa, Zea mays
  Clone ID: TF_ZmC26216_1.pep
MSSLRRALRSTASAPQSRSQASCAPGLGLTGEAELEDRRCSGDTKRSAAGATSAEMTDGHHFNNILLGGRGGTNPGQFKVHSGGLAWKRQGGGKTIEIDKADVTAVTWMKVPRAYQLGVRIKAGLFYRFIGFREQDVSNLTNFIQKNMGVTPDEKQLSVSGQNWGGIDIDGNMLTFMVGSKQAFEVSLPDVAQTQMQGKTDVLLELHVDDTTGANEKDSLMDLSFHVPTSNTQFVGDESRPPAHILWETILKFADVGSSEEPVVTFEGIAILTPRGRYSVELHLSFLRLQGQANDFKIQYSSIVRLFLLPKSNNPHTFVVITLDPPIRKGQTLYPHIVIQFETEAVVERDLALSKELLVEKYKDRLEESYKGLIHEVFTKVLRGLSGAKVTRPGSFRSCQDGYAVKSSLKAEDGLLYPLEKGFFFLPKPPTLILHEEIEFVEFERHGAGGASISSHYFDLLVKLKNDQEHLFRNIQRNEYHNLFNFINGKNIKIMNLGGDGQGASGVVTDVLRDTDDDAVDPHLERIKNQAGDEESDEEDEDFVADKDDSGSPTDDSGDEESDASDSGGEKEKSSKKEASSSKPVQKRKHKARDDEGQEKKKPKKKKDPNAPKRAMTPFMYFSMAERGNMKSSNPDLPTTEIAKKLGEMWQKMSGEEKQPYIQQAQVDKKRYEKESAVYRGEATVDVDSGNESD

SEQ ID NO: 7689 - protein, 120 aa, Zea mays
  Clone ID: TF_LIB4742-042-R1-K1-D11.pep
MKSRARSGGGDSRLSVRKTKVEKDPNKPKRPPTAFFVFMEEFRKDYKEKHPNVKQVSVIGKAGGDMWKSLSDAEKAPYVSKAEKLKVEYTKKMDAYNNKQSGGGPTLSGDSDKSKSEGDE

SEQ ID NO: 7690 - protein, 127 aa, Zea mays
  Clone ID: TF_ZmC1672_2.pep
MKSRARSGGGDSRLSVRKTKVEKDPNKPKRPPTAFFVFMEEFRKDYKEKHPNVKQVSVIGKAGGDMWKSLSDAEKAPYVSKAEKLKVEYTKKMDAYNNKQSGGGPTLSGDSDKSKSEVNDGDEEGDE

SEQ ID NO: 7691 - protein, 125 aa, Zea mays
  Clone ID: TF_ZmC1258051_1.pep
IRSTRSQCTFTVWQRSCESHIESVSKHRIYHRKSKKKNPNKPKRAPSAFFVFMEEFRKEFKEKNPKNKSVAAVGKAAGDRWKSLSESDKAPYVAKANKLKLEYNKAIAAYNKGESTAAKKAPAKE

SEQ ID NO: 7692 - protein, 87 aa, Zea mays
  unsure (1)..(87): unsure at all Xaa locations
  Clone ID: TF_LIB3597-037-Q1-K6-H11.pep
MSAGSGSGDEDDDEGDLKNLGLSKDHAAVLEECFKTHHTFTSXQNAGLASRLGLRARKVXVWLQNRRARTKLKQTVVDCEYLRRWCE

SEQ ID NO: 7693 - protein, 360 aa, Zea mays
  Clone ID: TF_ZmC2781_1.pep
MEDLSDLGGHGHPGAAAWRPAAPSLASSSKVSVQVYTVPSSAATGREARGQGVAPMMHASSVAGHGGRAADLDPVKAKIVSHPSYHRLLAAFLDCHKVGCPPEAAEEIAAVAREREAWQRAAAGDVAHTRPDPELDQFMESYCELLVTWKEELTRPLREAEEFLTTVEAQLNSITNTGPTMGAFISSAAAADKTGVVDMSDDEQEEGSGMEAEVALGIDPCSDDKELKKQLLRKYSGCLGNLRKELCKKRKKDKLPKEARQKLLSWWELHYRWPYPSEMEKIALAESTGLEQKQINNWFINQRKRHWKPSEEMQFAVMDGFHPAPPNAAAFYVDARLVGATPAMFYARPDHGAHHGLWHN

SEQ ID NO: 7694 - protein, 153 aa, Zea mays
  Clone ID: TF_ZmC44427_1.pep
KHILARQTGLSRSQVSNWFINARVRLWKPMIEEMYTEEVNPKPADDTSQNPSAGGGVGVGVAIKPEQQVSTAAAGATIGGGGGGDHLFGPSYPSMYGSHGGAVSLTLGLQQQPFASTMMHQRRPLMTFQGDEQEPALPYRDLMGSQLLHHFAG

SEQ ID NO: 7695 - protein, 78 aa, Zea mays
  unsure (1)..(78): unsure at all Xaa locations
  Clone ID: TF_jC-zmXLIB3552003af03b1.pep
MAASHRTAGPGPSDGSSAGARKKLQLTNEQSTLLEDSXRAHNILSNAQKQELARQVDLSARQVEVWFQNTHVQITCFA

SEQ ID NO: 7696 - protein, 352 aa, Zea mays
  Clone ID: TF_ZmC1681_1.pep
MHSSIPQTIKYPQIARWLARMEKQLPALTGGSKAATTTPFYLALDHRAAATSSSPPAEAPTLPPSAAAVSDPSRQSNSDRGSEIIKAKIMSHPLYPALLRAFIDCRKVGAPLEIVGRLSALADDVETNSDGRQEEQPADPELDQFMEIYCHMLVRYRQELTRPIQEADEFFKSMEAQIDSFSLDDNGYEEGGGSSDEDEQETVDLGGLPVPETGSPSGEGKELKNHLLNKYSGYLSSLWRELSRKKKKGKLPRDARQKLLHWWQLHYRWPYPSELEKAALAESTGLDAKQINNWFINQRKRHWKPAPPTMALGTPDYRMGQHGGGASSSSASAGLRVQGQYFTGGSSYPRGP

SEQ ID NO: 7697 - protein, 189 aa, Zea mays
  unsure (1)..(189): unsure at all Xaa locations
  Clone ID: TF_LIB3606-036-Q1-K6-E1.pep
MIMSQLRNTSKVAASDGIGKDDMANFALMGGGADHLRGNSVNTFSQAHNIWRPQRGXPERAVSVLRSWLFEHFLHPYPTDSDKQMLAKQTGLTRNQVSNWFINARVRLWKPMVEEIHNLEMRQQXQKNTSAVDKTQLGMQQLIQHSSANSRQRGQSSGGTTRNQDELPPXMPHDMXGQGQQQQQXVSFA

SEQ ID NO: 7698 - protein, 579 aa, Zea mays
  unsure (1)..(579): unsure at all Xaa locations
  Clone ID: TF_ZmC2191_1.pep
MSSAAGGGYGAAGGAEHQHLLLGQASGQLYHVPQHSRREKLRFPPDPADSPPPTAWPAPPPFYSYASSSTSSYSPHSPTLAHTQLVAHALPAGAGAQIPSQNFALSLSSASSNPPPAPRRQLAAGVAAGPYGPFTGYAAVLGRSRFLGPAQKLLEEICDVGGRPPHLDRRSDDEGMLDMDAAGGVDHEMDGGDSCATAEAGXPVSGAEQQWRKTRLISLMDDVCRRYKQYYQQLQSVISSFETVAGLSNAAPFAFMALRTMSKHFKCLKGMVMSQLRNTSKVIANHGIIAKDDMANFALMGGGAGLLRGNSVNAFSQPHNIWRPQRGLPERAVSVLRSWLFEHFLHPYPTDSDKQMLAKQTGLTRNQVSNWFINARVRLWKPMVEEIHNLEMRQLHKTTSVDQNQLGMQQQNHHSSDGSGRPSSDPSNSQRGQSSGMTRNLSSRAPRHIQDDELSQMPHDMAGQVSFAYSGLPPAHHGLALSHHHHPQQAQAEAVGVGGVAASSGGGVSLTLGLHQNNNNNNRAYIAEPLPAALPLSLPHRFGLEDVSDAYVMGPFGGQDRHFSKGIGGGHNLLHDFVG

SEQ ID NO: 7699 - protein, 93 aa, Zea mays
  Clone ID: TF_LIB3067-032-F8-R1A.pep
DAWTDAWADAWADAWALAESTGLEQKQINNWFINQRKRHWKPSEEMQFAVMDGFHPAPPNAAAFYVDARLVGATPAMFYARPDHGAHHGLWHN

SEQ ID NO: 7700 - protein, 215 aa, Zea mays
  Clone ID: TF_LIB5117-049-A1-PF1-F11.pep
RAGTTDPTRRSMEMTVNGRDTEHHHHLGLALGLGLGLSLGMSGTTSPVEPAAPQTAAAPSSKLGLGQQSWNGAGLFFPASSGEQRSHADDRRLAALACHEMPFLRGIDVNRAPTTGGARGSCGASEDEEPGASSPDSTLSSLSGKRGAPTRSAGGEQERTGAGSDDEDDSGAGGGGSRKKLRLSKDQSAVLEDSFKEHSTLKPKQKAALARQLGL

SEQ ID NO: 7701 - protein, 146 aa, Zea mays
  Clone ID: TF_LIB3066-028-Q1-K1-E9.pep
PRVRPRVRPRVRSLRSAKRCSRRAPAREQNNEHTQSEQLHGSASEQQAREQLHGSVSKQQTEVLRSNVSSGDASKCHFGPIVTQKLKEHFEKDPYPCRATKEGLAQELGLTFNQISKWFSATHHYSRDAVAKNQKYPGENTTENNS

SEQ ID NO: 7702 - protein, 759 aa, Zea mays
  unsure (1)..(759): unsure at all Xaa locations
  Clone ID: TF_ZmC1775_3.pep
PAWPGEKVFPEAASIANGSKQVDTSDLLPDHIKHSDNPALVEGLMVNEVRLSAEDDSKGDGDFDPSGPDSSEDQKDGLNSEESDFTSDSDDFCAEIAKSCGQDEVSASPLSNVINHTYRMKLRASNNRSNEENHDHVFMDMELGQDMVLPVSSRRQVERLDYKKLYDEAYGKESSNSSDDKEWSGKELLEGXETDSLSERPHPVKRCSRXAQAEQQNNEHTPQSEQLHGSASEQQAREQLHGSVSKQQTEVLRSNVSSGDASKCHFGPIVTQKLKEHFEKDPYPCRATKEGLAQELGLTFNQISKWFSATHHYSRDAVAKNQKYPGENTTENNSSTIFDGIQVIEPNFGLIDKPDADTNDMISEKLMVQINLNEGIEEDIPPSQYTTRCEEKLTMTQAAISREAGPPGYGPGENFLQVSSRITSCEQSVIMAPSAIARGVGPPGYTPGEHQGNGAPWNTSYERRPFTSPATSSREVGPPGYGPEENQGSGISCNTSREQILFMSPTTISRELGPPGYLPRENQRSDTSWNTSCESGLFMSPATTSIEHGPPGYGPGENQENDSTSCELRMFTSPTIVSREVGPPGYQQGVFMSPKTISREVCPPGFGSGENQGNDTTWYKQSAFTSPTTISREVGPPGYGQEDQGNGGSWNTSCEQGVFTSPTRGISREVGPPGYGPGESQGNTTSWISTCQQRMLAGIQRTGGSRSMDLEAFPPGYGPGGASGSVISPQARSAENVEFSDEARKKAIQRELRRRQKFR

SEQ ID NO: 7703 - protein, 145 aa, Zea mays
  Clone ID: TF_LIB3067-036-Q1-K1-B12.pep
SNGMASSPSPFFPPNFLLQMRQTPSDHDPQEHHHLPAPPLHLHHNPFLPSSQCPSLQDFRGMAPMLRKRPTMYCGADDVGVGGEEANCGATNEDEVSDDGSLQAGGPGEKKRRLNVEQVRTLEKNFELGNKLEPERKLQLARALG

SEQ ID NO: 7704 - protein, 134 aa, Zea mays
  Clone ID: TF_ZmC115778_1.pep
KRLKLRPRQVEVLFQNRRARSKLKQTEVDCEYLKRWCEKLAQENRRLQREVADLRRLCSAAYPFYGAAAGFGVATARVCPSSCDNDVSEAAISGAPSAAAPPPSTLFASWPPHFGPFTVVVPPLLRRQPSATTS

SEQ ID NO: 7705 - protein, 616 aa, Zea mays
  Clone ID: TF_700221310_FLI.pep
YFLIKIKLEQNLLDAYSGDGWNGQSREKIKPEKELQRARKQIIKCKIAIRDIIRQLDLYTSTGSVDDPLMPTDQSTNPEHTMCSTCKSHESFPSNKIIFCKGPCKRACHEKCLEPPLNKSVLPTSSHGWLCKFCLCKVRILETINAHLGTSFTVKCHFEDIFKETTELIDSEDALDEDWLSEYSGDEDYDPDENEASGDCMDSGEKIMSDDSNGSGSPLYSPNDDIPDFISADLNVVEGFCHTNLDLGIDAVEDDFAQILTYQRPRRDVDYRRLNEEMFGKITGNEEQSEDEDWGHERRKKRTHSGVAGDNSVGFLNVISDEKSQKKGRKLFRIPPAAVEVLRRAFAENELPPRDVKENLSRELGISFEKIDKWFKNTRCAALRDRKAEGNSHNTAPSKSSKNKGKAGISGKTGRNGHVTGPCNNLRTNEEKTGISGKFDSGDNSCLVPFSEVINVPTRLPHNFEMRKMESTRSPARLHNKGGCLSATIQIKESTLLPTGKPCWQSEMSHPTTNEVSTSAQATTWIDAGACAEEQEPTPWVDIGASDYQPFLDVIDDMCGLEWRLQRLKENMLSSSIDGQTAASESDKRNQTVVLVPTAELKEKLPHDGLFGHYCP

SEQ ID NO: 7706 - protein, 721 aa, Zea mays
  unsure (1)..(721): unsure at all Xaa locations
  Clone ID: TF_ZmC1207_1.pep
MHSSENKLGWNETSMGLVPVPKRPARPDASHQCKSDSFMKRSPRKVRNATLAKSIKSKYHYSPLKQRKGSDSVPGKIVTGLTARKKKKRKIQITDEATRLERRARYFLIKIKLEQNLLDAYSGDGWNGQSREXINLERELQRDRKLIIKCKIAKREIIXPIDGHEEMLIIDGSLMTREQTTNPEHTMCSTCKSHESFPSNKIIFCKGPCKRACHEKCLEPPLNKSVLPTSSHGWLCKFCLCKVRILETINAHLGTSFTVKCHFEDIFKETTELIDSEDALDEDWLSEYSGDEDYDPDENEASGDCMDSGEKIMSDDSNGSGSPLYSPNDDIPDFISADLNVVEGFCHTNLDLGIDAVEDDFAQILTYQRPRRDVDYRRLNEEMFGKITGNEEQSEDEDWGHERRKKRTHSGVAGDNSVGFLNVISDEKSQKKGRKLFRIPPAAVEVLRRAFAENELPPRDVKENLSRELGISFEKIDKWFKNTRCAALRDRKAEGNSHNTAPSKSSKNKGKAGISGKTGRNGHVTGPCNNLRTNEEKTGISGKFDSGDNSCLVPFSEVINVPTRLPHNFEMRKMESTRSPARLHNKGGFLSATVQIKESTLLPTGKPCWQSEMSHPTTNEVSTSAQATTWIDAGACAEEQEPTPWVDIGVSDYQPFLDVIDDMCGLEWRLQRLKENMLSSSIDGQTAASESDKRNQTVVLVPTAELKEKLPHDGLFGHYCP

SEQ ID NO: 7707 - protein, 554 aa, Zea mays
  Clone ID: TF_ZmC295_2.pep
MAAYYHGGAGTDIQASTDGLQTLYLMNPSYAGGYADDGGASTPGAANMMLLNSAVTTMTPASFAHHHQQQSPPAAQQHFVGIPLQVQAPPPSGYNLWTPAMAGGAADMSPQAQAQTPGAAGAAGVSAVLSLSSREAPPVTVAAVAACTDEGKYLGVSATPQGQMVMSSKYLKAAQELLDEVVSVSKGVEDAKTAAAAATKSLAAVKKKEDSEGASGGGTDDGAGAKSGGGAAPEMSTAERQEMQMKKSKLLNMLDEVEQRYRQYHGQMQAVSSSFEAAAGAGSARTYTALALRTISRQFRCLRDAIASQVRAASRALGEDADAAVAGGRTVGSRLRYIDHQLRQQRALQQLGMMQGGAWRPQRGLPERSVSILRAWLFEHFLHPYPKDSDKIMLAKQTGLTRSQVSNWFINARVRLWKPMVEEMYLEETKDQDAGGGGNDEGKSGGGGSKSSDTVDGVMPRADVMSKSAVRVGGGGAGAESASTNKGIHGSSLLELGGGDHQQSHAGFYDDDEDDGDDVMGRRLKKARGNEPAPAFHHVHDIATLHAQAAAAAD

SEQ ID NO: 7708 - protein, 192 aa, Zea mays
  unsure (1)..(192): unsure at all Xaa locations
  Clone ID: TF_ZmC106001_4.pep
RPQRGLPXRSVNILRSWLFEHFLHPYPSDADKHLLARQTGLSRNQVSNWFINARVRLWKPMIEEMYQQECRELDGSSAGGGGPESVNDPSGADDSHSPTTTGAAQLPQQQHHLGTVPGVMPHKPDPGAAGPSAADAAFVGIDPVELLGGGADDLYGRFEPGVRVRYGPAAAGAAAGDVSLTLGLQHAGAGNA

SEQ ID NO: 7709 - protein, 289 aa, Zea mays
  unsure (1)..(289): unsure at all Xaa locations
  Clone ID: TF_ZmC11178_2.pep
MEQEEVGLALGLSLGSGHHHQELKPQHPSHPCAALLEPSLSLGSPATKDDGPTAPVRRFAAVKRELQTMEGNDDEATGRVLVYSVASSAVVTADDDEGCNSSRKKLRLSKEQSALLEDHFKEHSTLNPKQKAALARQLNLSPRQXEVWFQNRRARTKLKQTEVDCEILKRCCETLTEENRRLHRELQQLRAFFMPTAAAAALSIWSSSALLPPEHLPPPEPPPVQKISLRRAAPAAERHTCSALSPILPPAEHAYICIYMHAHTYIRMWCLALAASHALSFIDGHLLAR

SEQ ID NO: 7710 - protein, 132 aa, Zea mays
  Clone ID: TF_LIB4735-005-R1-K1-G6.pep
QRRVRGDGNDGSDGMGFGPLILTEGERSLVERVRKELKNELKQGYKEKLVDIREEIMRKRRAGKLPGDTASVLKAWWQAHSKWPYPTEDDKARLVQETGLQLKQINNWFINQRKRNWHSNPTSSAEKTKKKR

SEQ ID NO: 7711 - protein, 208 aa, Zea mays
  unsure (1)..(208): unsure at all Xaa locations
  Clone ID: TF_ZmC1104_1.pep
GGPSGGEELDLFMTHYVLLLCSSXVRPRVRQHVRVHAMEAVMGCWELEQSLQSLTGASPGEGTGATMSDDEDNQVDSEANMFDGNDGSDGMGFGPLMLTEGERSLVERVRQELKNELKQGYKEKLVDIREEIMRKRRAGKLPGDTASVLKAWWQAHSKWPYPTEDDKARLVQETGLQLKQINNWFINQRKRNWHSNPTSSGEKTKKKR

SEQ ID NO: 7712 - protein, 183 aa, Zea mays
  Clone ID: TF_ZmC1104_2.pep
KEQLQQHVRVHAMEAVMGCWELEQSLQSLTGASPGEGTGGTMSDDEDNQVDSEANMFDGNDGSDGMGFGPLILTEGERSLVERVRKELKNELKQGYKEKLVDIREEIMRKRRAGKLPGDTASVLKAWWQAHSKWPYPTEDDKARLVQETGLQLKQINNWFINQRKRNWHSNPTSSAEKTKKKR

SEQ ID NO: 7713 - protein, 84 aa, Zea mays
  unsure (1)..(84): unsure at all Xaa locations
  Clone ID: TF_ZmC1104_4.pep
LVDIREEXMRKRRAGKLPGDTASVLKAWWQAHSKWPYPTEDDKARLVQETGLQLKQINNWFINQRKRNWHSNPTSSAEKTKKKR

SEQ ID NO: 7714 - protein, 477 aa, Zea mays
  Clone ID: TF_ZmC895_1.pep
QHQSDSDDNNSHYLPSSLHRSVSWRRLVLLKTMATFFSTSTNQRDLAGGGGDMSSFHHYAYSDPPAGGLMPFPATIVSSEGHVAHGGDDGGRGAFVDVNARDGPTGGAEMGLQTQLLMANAASAVQHQGLSLSLGTQGVPVSLYQYRQAQAGMAAAAFLSPDQASAAASRSAQSIYVQNSRYLKAARELLDEVVNVQDAIKRKGDKSQQGKDSGGGGGGGEGKDAETSDEKAGEHEGNSSAPELSPSERQDLQNKVSALMALLDQVDRKYRHYHHQMQMVMSSFDAVAGAGAARPYTALALQTISRHFRSLRDAVGAQVQSLRRSLGEKDGSAQGGGLPRLRYIDQQLRQQRAMQQFGMMQQPQHAWRPQRGLPESAVSVLRAWLFEHFLHPYPKDSEKLMLARQTGLSRGQVSNWFINARVRLWKPMIEEMYREEFGAEMDSHSSSENAAGNKGKDEAISSEDHEEFQSPSSAAAA

SEQ ID NO: 7715 - protein, 246 aa, Zea mays
  unsure (1)..(246): unsure at all Xaa locations
  Clone ID: TF_LIB4757-069-Q1-K1-F12.pep
CFRKKLGEDDDASGKEGKLIRLRYIDQQIRQQRAFQQYGMLQQNAWRPQRGLPENSVSILRAWLFEHFLHPYPKDSEKLMLSRQTGLTRSQISNWFINARVRLWKPMIEDMYKEEIGEAELDSNSSSDNVQPNKDKPPSSEEKDHKTSTSQVCQTSQLGESKANIGGVVSFCGAPAGGFHNDANPDDSFMSLMLKAQRPGETDGSGLLHDAVAHHSDESARFMAXHLTEFGRYGNNNVSLTLGLQH

SEQ ID NO: 7716 - protein, 641 aa, Zea mays
  Clone ID: TF_ZmC352_1.pep
MATYYSSPGSERDSQTMYSAESGNVSYPVPSALGNFLYTNNASSGPYTEFSGIVQPQQNFMELTGHPSAMSHDSSSNEATNMGSSLTEQRSFGPLKDMRNEMLMHLMDGAHSSGSDLIHNDAHSTVQLEFGMLNNHNSTSVPLAPGQGLSLSLNTHILAPSYPHWSAKQDLLTPNSYQGDDNRMKNMQSEASQAIRNSKYLKAAQELLDEIVSVWKSVKQKTDKGPSEAGKSYRWKTDGGTKSEGVSFDPQESGANTAAELSTAEKQELQNKMAKLMTMLDEVDRKYKHYYHRMQLVMSSFDMVAGAGAAKPYTAVALQTISRHFRCLKDAINDQISVIRKKLGEDDNTSGKEGKLTRLRYIDQQIRQQRAFQQYGMLQQNAWRPQRGLPENSVSILRAWLFEHFLHPYPKDSEKLMLSRQTGLTRSQISNWFINARVRLWKPMIEDMYKEEIGEAELDSNSSSDNVQRNKDKAPSSEENEDHKTSTSQVCQTSQLGESKANIGGVMSFSGAPAGGFHNDANPDDSFMSLMLKAQRPGETDGSGLLHDAVAHHSDESARFMAYHLTEFGRYGNNNVSLTLGLQHAENTQPGFPGVRDQDIYNSTAPLNVTSTSSEYDSASQIDQQQRQRFEVSPLMHDFVA

SEQ ID NO: 7717 - protein, 176 aa, Zea mays
  Clone ID: TF_ZmC114837_1.pep
MAKGGGAPRLRVIDQCLRQHRAYQTGVVLESQPWRPQRGLPERAVSILRAWMFERWGGPYPSDVDKHILARQTGLSRSQVSNWFINARVRLWKPMVEEMYSEEMKDPKEGACSNANSSVNTGAGYASEELGQPLGHGGACGGVDEQKPTRAQLVHDAGSLASVVSIGSSRDQQQIS

SEQ ID NO: 7718 - protein, 264 aa, Zea mays
  Clone ID: TF_ZmC32595_1.pep
RQLLKGEIAVHPLCEQLVAAHVGCLRVATPIDHLPLIDAQLAQSSGLLHSYAAHHRPFLSPHDKHDLDSFLAQYLMLLCSFREQLQQHVRVHAVEAVMACREIEQSLQDLTGATLEEGTGATMSEDEDEAPMLEVGLDMGSDGHDMMGFGPLMPTDSERSLMERVRQELKMELKQGFKSRIEDVREEILRKRRAGKLPGDTTSILKQWWQEHSKWPYPTEDDKAKLVEETGLQLKQINNWFINQRKRNWHNNSQTSTLKSKRKR

SEQ ID NO: 7719 - protein, 553 aa, Zea mays
  Clone ID: TF_ZmC13862_1.pep
MAHDPSLGFADYFSAAAAAAAAGATAMDDDVGASELYGLHADDMEFLGMRGLAAMPPAAAHHQHHHHHGHSKAGALLDDDDAGVGPDVSGSADDATMRFLSEQQQQQQHQAPLSLSLCRPDVTTTLHEQHHLAGGGSSSRYHQEQQPAAWVQQQQHDYSPSPQIQAMDALELQRLKDKLYIMLEEVDRRYRRYCEQMRALAGGFEAVAGERAAAAYTALASRTISRHFRSLRDGVVAQLQAARRALGEKDVAVPGMTRGDTPRLRVLDQCIRQHKALTQAAGMMESHPWRPQRGLPERAVTILRAWLFEHFLHPYPSDVDKHILARQTGLSRSQVSNWFINARVRLWKPMVEEMYVEEMKAEGQQDGGGQQQAGVANNPNPSSAAHAHASEAAEDDGRGDSGGAAAVVDRKPTRAQLLHDAGSLASVVNIGGGSRAGFGIMDHLDFDAYGGHHAGAVSLTLGLQQHDSHADTGGVNIAFGAPPPAHHHGYLFAPTTAAAGHQMGAGVHPGIHHHVQFSGAGAGIDGGEAAHGQEHYRGLQGGGGFHLLRDLAG

SEQ ID NO: 7720 - protein, 316 aa, Zea mays
  Clone ID: TF_ZmC2618_1.pep
MAFNYHDHALAMDPAAAAAVGAAANPSFVSGGGMAGGPGWEREKAAIAAHPLYERLLEAHVACLRVATPVDQLPRIDAQIAARPPPMEAAAAAAAAGGAHSGGEELDLFMTHYVLLLCSFKEQLQQHVRVHAMEAVMACWELEQTLQSLTGASPGEGTGATMSDDEDNQVDSESNMFDGNEGSDGMGFGPLMLTEGERSLVERVRQELKHELKQGYRDKLVDIREEILRKRRAGKLPGDTASTLKAWWQAHSKWPYPTEEDKARLVQETGLQLKQINNWFINQRKRNWHNNSASSSSDKSKRKRNTAGDGNAEPAW

SEQ ID NO: 7721 - protein, 87 aa, Zea mays
  unsure (1)..(87): unsure at all Xaa locations
  Clone ID: TF_ZmC32595_2.pep
PGQDRXVREEILRKRRAGKLPGDTTSILKQWWQQHSKWPYPTEDDKARLVEETGLQLKQINNWFINQRKRNWHNNSQTSTLKSKRKR

SEQ ID NO: 7722 - protein, 158 aa, Zea mays
  unsure (1)..(158): unsure at all Xaa locations
  Clone ID: TF_ZmC105851_1.pep
ANKLEPXRKAQLARALGLQPRQVAIWFQNRRARWKTKQLEKDYDALRRQLDAARAENDALLSHNKKLQTEIMALKGGGGGRQEAASELINLNVKETEASCSNRSSDENSSEINLDISRPPRAADESPAAMDSYRGIPFYACARADDVDQLQLLHSGGH

SEQ ID NO: 7723 - protein, 248 aa, Zea mays
  Clone ID: TF_ZmC311845_1.pep
QVLDEFVIRLLQDVAGFAGGGEASCPLPSSSYCSKTTSSNPNPSVFVSSEEHHNELKNDFQKLLQIMDQRCKQCLDEIQNAASKYGSLVRPGGGGGALSTLFAQRAVSATHRRLRARITGEIAAATRGGNQPSSSSSLSLADRERSWESAFIQKHWALRQLRRGDQQSWRPQRGLPEKSVAVLKAWMFENFLRPYPRDKEKEMLAARSGLSRSQVSNWFINARVRLWKPMIEEMYEDLKKASAGIMEA

SEQ ID NO: 7724 - protein, 264 aa, Zea mays
  Clone ID: TF_ZmC74_263.pep
MALSCRYPKDSEKLMLARQTGLTRSQISNWFINARVRLWKPMIEDMYKEETGDIEQDSNSSSDNAPAGSKAKTASSRDKEDHLARSCCTPRAVCESSSQLSEPPGGASMRAMSVAAAAAGAPMGLFQNEPGHDHDHDDSFMSLMLKEQRPNDGGGGLLLHHSAVAQHQDENARFMAYHLAELGRYGNGNVSLTLGLQRSSSSLSVPHAQQSFPGVGIGVGDDDIYNATAAPLGVSVASPDYESMSQMDQRQRFEQSPLLHDFVA

SEQ ID NO: 7725 - protein, 356 aa, Zea mays
  Clone ID: TF_ZmC30025_1.pep
MVMAKQQHDKGLPKQARNEPAPFRLEQCCRCDDAHRQADDESMDAAGSAGPLHLTLGPLGSAAGPRCSCGVAPAPAPALAAPATVAVLRGSRYMRPAQELLGEVVRVADLAAADDEDEDQATERLEGGGHRAARRAAGNDGDGVQAKLLYLLSELESRRERYFGELERVVSSFEPALGGGAAAAYTTLMARAMGRHFGNLRRAILRRLRLQAAAAARRSLRRGGEDQDDDDDDDGDSDGEVTEELVDRLARRTKLAAAARAEQAWRPLRGLPDGSVAVLRAWLFDHFLHPYPNDGEKLRLAVTTGLSRRQISNWFINARVRLWKPMIEEMYKDEFSDGSAVSSYDDASASGASSSS

SEQ ID NO: 7726 - protein, 377 aa, Zea mays
  Clone ID: TF_ZmC352_3.pep
KLMTMLDEVDRKYKHYYHQMQLVMSSFNMVAGAGAAKPYTAVALQTISRHFRCLKDAINDQISVIRKKLGEDDNTSGKEGKLTRLRYIDQQIRQQRAFQQYGMLQQNAWRPQRGLPENSVSILRAWLFEHFPLPYPKDSEKLMLSRQTGLTRSQISNWFINARVRLWKPMIEDMYKEEIGEAELDSNSSSDNGQRNKDKAPSPEENEDLQTPTSQACQTSQLGQSKAIVGGVMGFSGVLAGGFHTEANPDDSFMSLMLKAQRPGETEGTGLLHDAVAHHSDDGARFMAYHLAEFGRYGNSSNVSLTLGLQHAENSLAVPPNTQPGFPGVRDQDMYNATAPPLNVASTSSEYDSASQIDQQQQRQRFEPSPLMHDFVA

SEQ ID NO: 7727 - protein, 278 aa, Zea mays
  Clone ID: TF_ZmC352_4.pep
QLKAWIWLLITRALAVKEIHKQCTQQSHAFVFLHPYPKDSEKLMLSRQTGLTRSQISNWFINARVRLWKPMIEDMYKEEIGEAELDSNSSSDNGQRNKDKAPSPEENEDLQTPTSQACQTSQLGESKAIVGGVMGFSGVLAGGFHTEANPDDSFMSLMLKAQRPGETEGTGLLHDAVAHHSDDGARFMAYHLAEFGRYGNSSNVSLTLGLQHAENSLAVPPNTQPGFPGVRDQDMYNATAPPLNVASTSSEYDSASQIDQQQQRQRFEPSPLMHDFVA

SEQ ID NO: 7728 - protein, 282 aa, Zea mays
  unsure (1)..(282): unsure at all Xaa locations
  Clone ID: TF_ZmC437205_1.pep
SRPAEFGTRPTRIAATTPHDILQPQPHSTGPAPQTTGGRGHLPASFSGHHRRPCKTCTDEAYLLIRRRGHGVLAVPHQVVDAHAVEHQLLPPQVPGRRGVLLIRLAPAARRSTSLRASRRGGGAYIQTRAPPLVGGAADGRRKRPFQLTAHDELQLQLQLQLDDELCGLDYELHGPQQERTTKRRLTAEQVRELELSFEEEKRKLEPERKSELXARRLGIAPRQVAVWFQNRRARWRSKQLEQDFDRLRAAHDDLIAGRDALLADNDRLRSQVITLTEKLQT

SEQ ID NO: 7729 - protein, 148 aa, Zea mays
  Clone ID: TF_UC-ZMFLMO17002E04_FLI.pep
PAGVLFVFEQKQKIALAKQLKLRPRQVEVWFQNRRARTKLKQTEVDCELLKRCCESLSEENRRLQRELQELRALKLAGPHPQAPSSSPAAATQGVPVPQLPMLPAATLSLCPSCERLRGGPAAPKAEPDRPQAANHRFFNPFTHSAAC

SEQ ID NO: 7730 - protein, 295 aa, Zea mays
  Clone ID: TF_ZmC2618_2.pep
MAFNYHDHALAMDPANPSFVSGGGMAGGPGWEREKAAIAAHPLYERLLEAHVACLRVATPVDQLPRIDAQIAARPPPMEAAAAAAAHEGAHSGGEELDLFMTHYVLLLCSFKEQLQQHVRVHAMEAVMACWELEQTLQSLTGASPGEGTGATMSDDEDNQVDSESNMFDGNEGSDGMGFGPLMLTEGERSLVERVRQELKHELKQGYRDKLVDIREEILRKRRAGKLPGDTASTLKAWWQAHSKWPYPTEEDKARLVQETGLQLKQINNWFINQRKGNWHNNSASSSSDKSKRKR

SEQ ID NO: 7731 - protein, 224 aa, Zea mays
  Clone ID: TF_ZmC32182_1.pep
HFLHPYPTDGDKQMLAKQTGLTRNQVSNWFINARVRLWKPMVEEIHNLEMRQVHKHPVLDKGQHVLHHQTQHSFESSGKPSDPSDSQLGQSSSITRNHNIPASQGFADELSEMSHSIQQGQVTFAYNGMSAPHHSLASSQHHQQAGPMSGIGGAGNGGVSLTLGLHQNNRVCIAEPLPASVPPNLAHRFGLEEVSDPYMMGSFGNQDRHFGKEIGGHLVHDFVG

SEQ ID NO: 7732 - protein, 197 aa, Zea mays
  Clone ID: TF_ZmC1389_7.pep
FDLGGGRWVGGWLTKVVSVSALQKQKAALASRLGLRARQVEVWFQNRRARTKLKQTEVDCEYLRRWCEQLAEENRRLGKEVAELRALSAAPAPAAPLTALTMCLSCRRVSSSSCSSSPPNTHAHAAAAGTGRSVAAAAATTLPAHRQFLCGFRDGGPPDWTADGRVQKGSAAIEFINLSSIDHVLLPCYLSWRQYRP

SEQ ID NO: 7733 - protein, 869 aa, Zea mays
  Clone ID: TF_ZmC354_4.pep
MSTALAVVGGGKDRPSPGGGGAPQVDTGKYVRYTPEQVEALERVYSECPKPSSLRRQQLIRECPILSNIEPKQIKGLACLPLNRVSIVVGRCREKQRKESSRLQTVNRKLSAMNKLLMEENDRLQKQVSRLVFDNGYMKNRLHSPSVATTDTSCESVVTSGQHNQQQNPAVLHPPQRDANNPAGLLAIAEETLAEFMSKATGTAVNWVQMVGMKPGPDSVGIIAVSHNCSGVAARACGLVSLEPTKVAEILKDRASWYRDCRRVDILHVIPTGNGGTIELIYMQTYALTTLAEPRDFWTLRYTSGLDDGSLVICERSLTHSTGGPSGPKTPDFIRAEVLPSGYLIRPCDGGGSMIYIVDHVDLNACSVPEVLRPLYESPKILAQKMTAAALRHIRQIAHESSGETPYGAGRQPAVLRTFSQRLSRGFNDAVSGFPDDGWSSLLSSDGAEDISITINSSPNKLIGSDVSPSPFFSAMGGGIMCAKASMLLQNVPPALLVRFLREHRSEWADPGVDAYSAASLRANPYNVPGLRAGGFMGNQVILPLARTVEHEECLEVIRLQGHGFSHDEVLMSPDMFLLQLCSGIDEDAPGACAQLVFAPIDESFADDAPLLPSGFRVIPLDAKTDVPSATRTLDLASALEVGSGGGLCALSDSGSGTRSTRSVLTIAFQFSFENHLRESVAAMARQYVRAVMAIVQRVAMAISPSRLGPHVELKHPPGSPEALALASWIGRSYRAHTGTEIRWSDTEDAAGSPLTLFWKHSDAIICCSLKPAFTLKFANSAGFDILETTVANVQDLQLEAVLDDGGQKALVAQLPKIMLQGLAYLPGGVCRSSMGRQASYEQAVAWKVVGDDGAPQCLALMFVNWTFI

SEQ ID NO: 7734 - protein, 84 aa, Zea mays
  unsure (1)..(84): unsure at all Xaa locations
  Clone ID: TF_uC-zmflteosinte017a09a1.pep
LHYKWPYPSETKKMALAETTGLAPKQITNWFINHRKRHWKXXSKYMPFAMMEGGFHVAQGTAALYMDRPAPPFMADGGMYRLGS

SEQ ID NO: 7735 - protein, 196 aa, Zea mays
  Clone ID: TF_ZmC13584_1.pep
MEVPRLPQGALPSMALPRPSPQSTPRSRAHLPAIKVVTPDEDGRESPHGGPGPSDSSGAGARKKLRLTNEQSTLLEDTFRAHNILSNAQKQELGRQVDLSARQVHIVFCVYVVVSSSILFVGKTLIGIFPAISLIGDIIIVGIFYFIGFALFCLEAFLNMWVIQLLHPSDQFRREPGEPCTCGVVHLESDTIIEYD

SEQ ID NO: 7736 - protein, 147 aa, Zea mays
  Clone ID: TF_ZmC1202393_1.pep
MESSDDGGSGPAAGSPGPPSAPAAVGGASSAPGASGSGGKPPVKRVMKTPYQLEVLERTYAEDSYPNETKRAELSVQLNLTDRQLQMWFCHRRLKDRKPPAKRQLRDEEVSVPVIGPPPPVLPPPLPPSEMMVGTVGTYGEQLLPVF

SEQ ID NO: 7737 - protein, 1579 aa, Zea mays
  unsure (1)..(1579): unsure at all Xaa locations
  Clone ID: TF_ZmC1775_1.pep
HTNPQARSAESEVSPSKRYPLRSAHSSGRVLRSALANNNKDSEPLNAAAATQATVKERSGNQLDSPNSTVRLLRSTSNIKDEAHSGPLNDRIIDKPAANKRKRANPSQVGSPSSSVRVLRSAIKNKDMARSEPQSDRTAGEAATNKRKNANSSKVGSLSSGLSVLRSASKAKDETCIKPLNDSPAVEPASSKRKCTSPSKVGSPSNSVRVLRSTSKYKNETCTEPLNDSGAVEPAANKRKGVSRSKEGSPNSSVRVLRSASNNKIDVSIEPLNNSTTGQPAAKRKKKNSSFKSSARVLCSTSERKNEASSEPLNDSTAAQPAARKKKGGAMPKTDNPKIGVRVLRSASGKKNETCTEPVNRSTSREPTVTKKRNCKPSKDRGPKKDYLKICQRIKYILNRMKYEQAFIQAYASEGWKGQSLEKIRPEKELERAKAEILQCKLRIREAFRNMDSLLSKGKLEESLFDSAGEISSEDIFCAVCGSKDVTLQNDIILCDGACDRGFHQNCLSPPLLTEEIPPGDQGWLCPACVCKADSIDALNELQGSKLSIHDSWVKVFPEAASTANGSKQVDASDLLPDHIKDSDNPALVEGLMVNEIRISEEDDSKADDLGLPSEDSGDGDFDPSGPDSSEDQNDGLNSEESDFTSDSDDFCAEIAKSCGQDEVSASPLSNVINHTDRMKLRAXNRRSNEENHDHAFMDMELGQDIVLPVASRRQVERLDYKKLYDEAYEEESSNSSDEEEWSGKELLEGSGTDSLDEPSSCKRLSRRAPAGQQNNELTPQSRPHGSNSEQKTEVLRSNGSSSTGRKYDPEVTQKLKVHFEKDPYPSRETKENLSEELGLTFNQVSKWFSSTRHYSRVASAKKEMHPDSHTCENNDETTVDSMQAKQPNAGVMEKLTGDRNDIVSEKPMVQDNLNQGAMEKLTRDRNDIVPEKQVMQSSLNQCNNEDIPLSGTEIEMESYEQESSESSDEEWSTLSTPRKTKLQDHGKSSVTESLRSAKRCSRRAPAREQNNERIQSEQLHGSASEQQTEFLRSNVSSGKVSKYHFGPIVSQKLKEHFEKDPYPCRATKESLAQELGLTFNQISKWFSGTRHYSRDAVAKNQKRPGENTTVNNNSTTFDDIQVIEPNVGLIDKPAADVNDMISEKLMVQINLNEGIEEDIPPSQYARCEEKITMTPAAISREAGLPGYGPGXNFLQVSSRNTSCEQSVIMAPSAIAREVGPPGYATGENQGNGAPWNTSYERRLFMNPVTSSRAVSPPGYGPEESRGSGISWNTSSEQILFMSPTTISRELGPPGYGPREDQCSGTSWNASCELGVFMSPVTTSREDSPPGYGPRENQENDNMRCELRMFTSPTTISREVGPPGYELTGKNKGNGASCTTNYQQGAFTSPEAFPREACPPGFVSGENQGNDTPWYMSSKQMAFTSPTTNPRVGPPGYGQENQGSRVSWNTSYEQGVFMSSTNISREAGPPGYGPGESQGNITSWISTGGQRMFTGPSTIPNEVGQQGYGPSGIPGTDGSRSMDLKAFPPGYGPAGENQGGGASGSVISPQARSAENVEFSDDARKKAIQRELRRRQKFR

SEQ ID NO: 7738 - protein, 373 aa, Zea mays
  Clone ID: TF_ZmC508_4.pep
MTPARRMPAMIGRNNGVAFGSSSALSLSQVIIPADFLDSHHLQQAFEQQLFEQIPSTAVDSSDNIIHGRSDALVDEFESKSCSENPDGTASGDDGQGDEDPNQRPNKKKRYHRHTQHQIEEMEAFFKECPHPDDKQRKELSRELGLEPLQVKFCSQNKRTQMKNQHERQENAQLRAENDKLRAENMRYKEALGTASCPSCGGPAALGEMSFDEHHLRLENARLRDEIDRISGIAAKHVGKPMVSFPVLSSPLAAAAAAARSPLDLAGAYGVQSAAAGLGADHVLFGAGAGDLLRSVSAGQLDADKPMIVELAVAAMDELLRMARPDALLWGGGASAGAQQQQLDEEEYVRTFPAGLGPRQYGLRPEASRDSAV

SEQ ID NO: 7739 - protein, 185 aa, Zea mays
  Clone ID: TF_LIB3591-095-Q6-K6-G2.pep
GSERSWSERRACVAMDGAEDDGTEWMMHGAGGKGKGGGALDKNKKRFSDEQTKSLESMFATQAKLEPRQKLQLARELGLQPRQVAIWFQNKRARWKSKQLEREYSALRDDYHALLCSYESLKDEKRALLKQVRDQDDANKAHASCMPSIDLPCISRSFVRSRTALHAPHADLYICMLELRRSCIY

SEQ ID NO: 7740 - protein, 211 aa, Zea mays
  unsure (1)..(211): unsure at all Xaa locations
  Clone ID: TF_ZmC254_1.pep
GSERSWSERRACVAMDGAEDDGTEWMMHGAGGKGKGGGALDKNKKRFSDEQTKSLESMFATQAKLEPRQKLQLARELGLQPRQVAIWFQNKRARWKSKQLEREYSALRDDYHALLCSYESLKDEKRALLKQLEKLAEMLHEPPQGKYYGGNADDVRSGGVGGTKEEEESTDACAGAALYSSDSTPAAAGXSSSAEQTCSGSQWWELESLSE

SEQ ID NO: 7741 - protein, 344 aa, Zea mays
  Clone ID: TF_ZmC3817_2.pep
MRPMASNGMASSPSPFFPPNFLLQMQQTPSDHDPQEHHHLPAPPLHLHHNPFLPSSQCPSLQDFRGMAPMLRKRPTMYCGADDVGVGGEEANCGATNEDEVSDDGSLQAGGPGEKKRRLNVEQVRTLEKNFELGNKLEAERKLQLARALGLQPRQVAIWFQNRRARWKTKQLEKDYDALRRQLDAVKADNDALLSHNKKLQAEILALKGREAAGGSSELINLNKETEASCSNRSEDSSEINLDISRTPPASEGPMDHPPPPPPHHAAGGGLIPFYPSVGGRHSIAAGVGMDQLLHASTPKLEQHGDGCAVAVQAAETAGSFGNLLCGVDETPPFWPWADHHHFH

SEQ ID NO: 7742 - protein, 349 aa, Zea mays
  unsure (1)..(349): unsure at all Xaa locations
  Clone ID: TF_ZmC3817_3.pep
MRPMASNGIASSLSPFFPPNFLLQMQQTPSDHDPQEHHHLPAPPLHLHHNPFLPSSQCPSLQDFRGMAPMLRKRPTMYCGADDVGVGGEEASCGATNEDEVSDDGSLQAVGPGEKKRRLNVEQVRTLEKNFELGNKLEAERKLQLARALGLQPRQVAIWFQNRRARWKTKQLEKDYDALRPQLDANICTLIYTNSQRLINRSLLMHAXILALKGREAAGGSSELINLNKETEASCSNRSEDSSEINLDISRTPPASEGPMDHPPPPPPHHAAGGGLIPFYPSVGGRHSIAAGVGMDQLLHASTPKLEQHGDGCAVAVQAAETAGSFGNLLCGVDETPPFWPWADHHHFH

SEQ ID NO: 7743 - protein, 132 aa, Zea mays
  Clone ID: TF_LIB4172-024-R1-L1-A4.pep
MSTALAVVGGGKDRPSPGGGGAPQVDTGKYVRYTPEQVEALERVYSECPKPSSLRRQQLIRECPILSNIEPKQIKVWFQNRRCREKQRKEASRLQTVNRKLTAMNKLLMEEDDRLQKQVSRLVYENGYMRQQ

SEQ ID NO: 7744 - protein, 166 aa, Zea mays
  unsure (1)..(166): unsure at all Xaa locations
  Clone ID: TF_LIB4739-120-Q1-K1-C7.pep
MSTALAVVGGGKDRPSPGGGGAPQVDTGKYVRYTPEQVEALERVYSECPKPSSLRRQQLIRECPILSNIEPKQIKVWFQNRRCREKQRKEASRLQTVNRKLTAMNKLLMEENDRLQKQVSRLVYENGYMRQQLHNPSAATTDXXCESVVTSGQHHQQQNTAAPASS

SEQ ID NO: 7745 - protein, 178 aa, Zea mays
  Clone ID: TF_ZmC102447_1.pep
PSPPSSTPPFFVPVPVHWLVMGATSPSGLELTMAVPGLSSSSGSEGFVCNNNISNNGGGNMRDLDMNQPASGGEEEDFLMGGVEEDEEERGAGGPHRPKKLRLSKEQSRLLEESFRLNHTLSPKQKEALAIKLKLRPRQVEVWFQNRRARTKLKHTEMECEYLKRCFGSLTEENRRLQ

SEQ ID NO: 7746 - protein, 235 aa, Zea mays
  Clone ID: TF_ZmC8754_1.pep
MERGDCQFTVVPPRQYDEAQFMHQLMVAGDQQDPAGAGRGAAAAGGERKRRFTEEQVRSLETTFHARRAKLEPREKAELARELGLQPRQVAIWFQNKRARWRSKQLEHDYAALRAQFDAMHARVESLRQEKIALAAQVDELRGRLNERQDQSGSCEVNDAEAAADDKRNNSTSSLVQDDGATPPPAAVDASEDSAATGEYYDHVAYEYDGLHDPFVCATPDLWDTWPLLEWNAVA

SEQ ID NO: 7747 - protein, 235 aa, Zea mays
  Clone ID: TF_ZmC8754_2.pep
MERGDCQFTVVPPRQYDEAQFMHQLMVAGDQQDPAGAGRGAAAAGGERKRRFTEEQVRSLETTFHARRAKLEPREKAELARELGLQPRQVAIWFQNKRARWRSKQLEHDYAALRAQFDAMHARVESLRQEKIALAAQVDELRGRLNERQDQSGSCEVNDAEAAADDKRNNSTSSLVQDDGATPPPAAVDASEDSAATGEYYDHVAYEYDGLRDPFVCATPDLWDTWPLLEWNAVA

SEQ ID NO: 7748 - protein, 171 aa, Zea mays
  Clone ID: TF_LIB4172-013-Q1-L1-G12.pep
MMSYLKQPPYAVNGLSLTTSGMDLLHPSVGYPGPWASCPAATPRKQRRERTTFTRAQLDVLEALFAKTRYPDIFMREEVALKINLPESRVQVWFKNRRAKCRQQQQQQQNGGQNKVRPAKKKSSPAREVSSESGTSGQFTPPSSTSVPTIASSSAPVSIWSPASISPLSDP

SEQ ID NO: 7749 - protein, 692 aa, Zea mays
  Clone ID: TF_ZmC260_66.pep
MEKKTVHVPAEGNGEIENGTSSSQNPETLEHPVLLSASQTVPNNLGIRKNYKRAANRGKKGSQGLTGQAYTLRSSDIDVRVLRSTSGSKTTSTEHVQPPGQPAAKRRKRSRASNKNSTDEFSQIRKRVRYILNRMNYEQSLIEAYASEGWKNQSLDKIRPEKELERAKSEILRCKLRIREVFQNIDSLLSKGKIDESLFDSEGEISCEDIFCATCGSKNATLGNDIILCDGACDRGFHQNCLNPPLRTEDIPMGDEGWLCPACDCKLDCIDLINELQGSDISIEDPWEKVFPEAAAMTNGSKQDEAFDLPSDDSDDNDFDPNMPEEHVASKEEGSSEEEEDDDGGSDSDDSDFLTCSDDLEPLIDKKKVDDLGLPSEDSEDDDYDPAGPDSDKDVEKKSNSDESDFTSDSDDFCKEIKKSGGHDEVSSPPLPDVRVGDMEKNTAQSNTTSSADDPMETEIDQSVVLPVSRRRQAERLDYKRLYDEAYGEASSDSSDEEEWSGKNTPIKSNEEGEVGSPAGKGSRVAHHNELTTQNTKESLHSLHGSVDEKHGDLTSNGSNIKDRKGHFGPVISQKLHEHFKTQPYPSRSLKESLAEELGLTFHQVNRWFENRRHFARLASSRKGISPDKHSPQNTNSPVTPSMQPKEPEGTVMEESNVCINRDATISKKAVSSKVGSRKNLSKSSPKSRVKS

SEQ ID NO: 7750 - protein, 291 aa, Zea mays
  unsure (1)..(291): unsure at all Xaa locations
  Clone ID: TF_ZmC26143_1.pep
QRPPFYTSPDELLEEEYYDEXAXPEKKRRLTPEQVHLLERSFEEENKLEPERKTELARKLGLQPRQVAVWFQNRRARWKTKQLERDFDRLKASFDALRADHDALLQDNHRLRSQVVSLTEKLREKEATEGDANGAAAALPAVGVVRASVADDVEEPEPEPEPEAEAAAFEERQVKSEDRLSTGSGGSAVVDAADALLYNGRIGGAAVDSSVESYFPGAEVQDQYHGCGTMGPVTHGAGGIQSDDDDGAGSDEGCSYYADEEAAAAFLSEHTHHADGDDEDAGQVSWWWMWN

SEQ ID NO: 7751 - protein, 217 aa, Zea mays
  Clone ID: TF_ZmC894_2.pep
MESGRLIFNAPGSGAGQMLFLDCGAGGGPGGGLFHRGGRPMLGLEEGRGVKRPFYTSPDELLEEEYYDEQLPEKKRRLTPEQVHLLERSFEEENKLEPERKTELARKLGLQPRQVAVWFQNRRARWKTKQLERDFDRLKASFDALRADHDALLQDNHRLRSQVVSLTEKLREKEATEWRRQCRAAAALPAVGVVRASRVTDDVENPGGVRAAGEATG

SEQ ID NO: 7752 - protein, 239 aa, Zea mays
  Clone ID: TF_ZmC11791_1.pep
MGCEEEERLLFPSFVFPESFAEAATPGSGGEQKKARQRRRRKPRPAEGGEGADEQARKRRLSDDQARFLELSFRKERKLETPRKVQLAAELGLDAKQVAVWFQNRRARHKSKLMEEEFSKLRAAHDAVVLHNCHLETELLKMKDRLAEVEEEKTKLVAAAAAAAGGAAGAGSSSPSSSSFSTVTHHPAAALQVGQFGVEPEEAADLAYMTEYAYNSYMNMMDLAPAYFGGVVYDYDHFN

SEQ ID NO: 7753 - protein, 163 aa, Zea mays
  Clone ID: TF_ZmC1389_8.pep
MPLLLPAKRTTEVTGEDGLRGGSDEEDGGCGIDGSRKKLRLSKDQSAVLEDSFREHPTLNPRQKAALAQQLGLRPRQVEVWFQNRRARTKLKQTEVDCEYLKRCCETLTEENRRLQKEVQELRALKLVSPHLYMHMSPPTTLTMCPSCERVSSSNGNSAAATA

SEQ ID NO: 7754 - protein, 797 aa, Zea mays
  unsure (1)..(797): unsure at all Xaa locations
  Clone ID: TF_ZmC508_1.pep
MTPARRVPPAAMIGRNGFAFGSSSALSLSQADLLDSHQLQQAFQQQLFDQIPTTTTVDDSSDNLIHGRSDTLVDEFESKSCSENPDGTSGDDGLEEDPNQRPNKKKRYHRHTQHQIQEMEAFFKECPHPDDKQRKELSRELGLEPLQVKFWFQNKRTQMKNQHERHENAQLRAENDKLRAENMRYKEALGTASCPSCGGPAALGEMSFDEHHLRLENARLRDEIDRISGIAAKHVGKPMVSFPVLWGSEDIYQWGVKNAPLDLAGAYGVQSAAAGLGADHLFGAGAGDLLRSVSAGQLDADKPMIVELAVAAMDELLRMARPDALRRVVVASAGTXQQLLVDEEEYVRTFPAGLGPRQYGLRPEASRDSAVVIMTCDSLIEILMDANRFAAVFSSIVSRASTHEVLSTGVAGSYNGALQVMSMEFQVPSPLVPTRESYFVRYCKNNPDGTWAVVDVSLDSLRPSPVIKCRRRPSGCLIQEMPNGYSKVTWVEHVEVDDRSVHNLYRPLVNSGLAFGAKRWVGTLDRQCERLASAMASNIPNGDLGVITSIEGRKSMLKLAERMVASFCGGVTASAAHQWTTLSGSGAEDVRVMTRKSVDDPGRPPGIVLNAATSFWLPVPPKRVFDFLRDETSRSEWDILSNGGAVQEMAHIANGRDHGNCVSLLRVNSANSNQSNMLILQESCTDASGSYVVYAPVDVVAMNVVLNGGDPDYVALLPSGFAILPDGPPPAGAAPSHGEGLDAGGGGSLLTVAFQILVDSVPTAKLSLGSVATVNSLIACTVERIKAAVCAEAGNPQ

SEQ ID NO: 7755 - protein, 63 aa, Zea mays
  Clone ID: TF_ZmC62880_1.pep
MYLYVLPGSEQTKARQLSDGQARKRRLSDGQARFLELSFGKERKLETPRKVQLAAELGLDAKQ

SEQ ID NO: 7756 - protein, 300 aa, Zea mays
  Clone ID: TF_ZmC1455_2.pep
MEDLYSIHPGISRHGAAATSEASGVAGGPGSPPPPPPPAADLTELVKAQIAGHPRYPSLLSAYIDCRKVGAPSEVATLLEEIGRERCAAASAGGEVVGMDPELDEFMETYCRLLERYKEELSRPLDEAASFLSNVRTQLSSLCGGAASLSDENEMVESSENEPCSGDTDATTDPGQEHSSRLADRELKEMLLKKYSGCLSRLRSEFLKKRKKGKLPKDARSALMDWWNTHYRWPYPTEEDKVRLAAMTGLDPKQINNWFINQRKRHWKPSEDMRFALMEGGVAGSSSGTTLYFDTGTIGP

SEQ ID NO: 7757 - protein, 298 aa, Zea mays
  Clone ID: TF_ZmC1455_3.pep
MEDLYSIHPGISRHGAAATSEASGVAGGPGSPPPPPPPAADLTELVKAQIAGHPRYPSLLSAYIDCRKVGAPSEVATLLEEIGRERCAAASAGGEVVGMDPELDEFMETYCRLLERYKEELSRPFDEAASFLSSVRTQLSSLCGGAASLSDEMVESSEDEPCSGDTDATTDPGQEHSSRLADRELKEMLLKKYSGCLSRLRSEFLKKRKKGKLPKDARSALMDWWNTHYRWPYPTEEDKVRLAAMTGLDPKQINNWFINQRKRHWKPSEDMRFALMEGGVSGSSSGTTLYFDTGTIGP

SEQ ID NO: 7758 - protein, 298 aa, Zea mays
  Clone ID: TF_ZmC1455_4.pep
MEDLYSIHPGISRAGGAATSEASGVAGGPGSPPPPPPPAADLTELVKAQIAGHPRYPSLLSAYIDCRKVGAPSEVATLLEEIGRERCAAASAGGEVVGMDPELDEFMETYCRLLERYKEELSRPLDEAASFLSNVRTQLSSLCGGAASLSDEMVESSEDEPCSGDTDATTDPGQEHSSRLADRELKEMLLKKYSGCLSRLRSEFLKKRKKGKLPKDARSALMDWWNTHYRWPYPTEEDKVRLAAMTGLDPKQINNWFINQRKRHWKPSEDMRFALMEGGVAGSSSGTTLYFDTGTIGP

SEQ ID NO: 7759 - protein, 292 aa, Zea mays
  Clone ID: TF_ZmC1389_6.pep
MAQEDVHLDDAGLALGLSLGSGSGGASGAARHGGISRRLSREVRLPSPHPLEPSLTLSLPDEATATGSGGGGAAHSVSSLSVAGVKRERVDDAEGERASSTAALPRACAGAEDDDDDGSTRKKLRLTKEQSALLEDRFKEHSTLNPKQKVALAKQLKLRPRQVEVWFQNRRARTKLKQTEVDCELLKRCCESLTEENRRLQRELQELRALKFAPHPQAPPSSATQAGAAAGVVPAPPPPLYMQMQMPAAATLSLCPSCDRLAGPGAAAKAEPRPKAAATHHFFNPFTHSAAC

SEQ ID NO: 7760 - protein, 121 aa, Zea mays
  Clone ID: TF_ZmC24942_3.pep
MEQYDGLFPPAYVDSSSSLLLVPNANGTAQEERPRARRRRRRAARCGGGGGELDGGGDHKKRRLTDEQVEMLELSFREERKLETGRKVHLAAELGLDLLYVPDYAYADSSVVEWFSLYGLM

SEQ ID NO: 7761 - protein, 222 aa, Zea mays
  Clone ID: TF_ZmC1389_14.pep
MMERVEDLGLSLRLSSSLAFPRTQHVATMLLRAPEKRFLEMPLLLPAKRTTEVTGEDGLRGGSDEEDGGCGIDGSRKKLRLAKDQSAVLEDSFREHPTLNQKQKAALAKQLNLKPRQVEVWFQNRRARTKLKQTEVDCEFLKRCCETLTEENRRLQREVAELRVLKLVAPHHYARMPPPTTLTMCPSCERLASASASADQAGRAGPCWGPLPVFVDGPARRP

SEQ ID NO: 7762 - protein, 269 aa, Zea mays
  Clone ID: TF_ZmC3383_1.pep
MKRPRGATPSLSAMPNHQEDDGYGVVGMEADVDVDVDEEMMACGGGGEKKRRLSSEQVRALERSFEVENKLEPERKARLARDLGLQPRQVAVWFQNRRARWKTKQLERDYSALRQSYDALRHDHDALRRDKDALLAEIKELKAKLGDDEAAASFTSVKAEPAASDGPAPAGVGSSESDSSAVLNDADPPVAEAPAPAPEVQGTLLVAPAGPVAGAAAANHGGVFFHGSFLKVEEDETGLLDDDGPCGGFFAVEQPPAMAWWNEPAEHWN

SEQ ID NO: 7763 - protein, 261 aa, Zea mays
  Clone ID: TF_ZmC3383_2.pep
MKRPRGASPPLAAMTNPNDDGYGVVGMEADADADADEEMMACGGGGEKKRRLSSEQVRALERSFEVENKLEPERKARLARDLGLQPRQVAVWFQNRRARWKTKQLERDYSALRQSYDALRHDHDALRRDKDALLAEIKELKAKLGDEEAAASFTSVKAEPAASDGPPPVGVGSSESDSSAVLNDADPPVAEAPVPEVRGTLLDAPGAVAANHGGVFFHGSFLKVEEDETGLLDDDEPCGGFFSVEQPPPMAWWTEPTEHWN

SEQ ID NO: 7764 - protein, 279 aa, Zea mays
  unsure (1)..(279): unsure at all Xaa locations
  Clone ID: TF_ZmC3383_3.pep
LPASPVLFFLRESIVFGGDVVAERVRRIESSCVFPDDGYGVVGMEADADADADEEMMACGGGGEKKRRLSSEQVRALERSFEVENKLEPERKARLARDLGLQPRQVAVWFQNRRARWKTKQLERDYSALXQSYDALRHDHDALRRDKDALLAEIKELKAKLGDEEAAASFTSVKAEPAASDGPPPVGVGSSESDSSAVLNDADPPVAEAPVPEVPGYSSXRASAPVAANHGGVFFHGSFLKVEEDETGLLDDDEPCGGFFSVEQPPPMAWWTEPTEHWN

SEQ ID NO: 7765 - protein, 175 aa, Zea mays
  Clone ID: TF_LIB3689-215-Q6-K6-D4.pep
MLGLEEGRGVKRPFFTSPDELLEEEYYDEQLPEKKRRLTPEQVLLLERSFEEENKLEPERKTELARKLGLQPRQVAVWFQNRRARWKTKQLERDFDRLKASFDALRADHDALLQDNNRLRSQVVSLTEKLQEKEDATEGGATADTAAPAVDVEASLADDVEEPAEPAATFEVLRV

SEQ ID NO: 7766 - protein, 330 aa, Zea mays
  Clone ID: TF_ZmC894_1.pep
MESGRLIFNAPGSGAGQMLFLDCGAGGGPGGGLFHRGGRPMLGLEEGRGVKRPFFTSPDELLEEEYYDEQLPEKKRRLTPEQVLLLERSFEEENKLEPERKTELARKLGLQPRQVAVWFQNRRARWKTKQLERDFDRLKASFDALRADHDALLQDNNRLRSQVVSLTEKLQEKEDATEGGATADTAAPAVDVEASLADDVEEPAEPAATFEVLQEVKSEDRLSTGSGGSAVVDADALLYGRFAAAVDSSVESYFPGGEDHYHDCGTMGPVNHGAGGGIQSDDDGAGSDEGCSYYADEAAAAAAAFFAGHATHHHADEDEDAGQISWWMWN

SEQ ID NO: 7767 - protein, 368 aa, Zea mays
  Clone ID: TF_ZmC894_5.pep
DFKWATFLASQRKKIDPLLYRPTTFVSRAGHPPLPPRSGRLIFNAPGSGAGQMLFLDCGAGGGPGGGLFHRGGRPMLGLEEGRGVKRPFFTSPDELLEEEYYDEQLPEKKRRLTPEQVLLLERSFEEENKLEPERKTELARKLGLQPRQVAVWFQNRRARWKTKQLERDFDRLKASFDALRADHDALLQDNNRLRSQVVSFVSLTEKLQEKEDATEGGATADTAAPAVDVEASLADDVEEPAEPAATFEVLQEVKSEDRLSTGSGGSAVVDADALLYGRFAAAVDSSVESYFPGGEDHYHDCGTMGPVNHGAGGGIQSDDDGAGSDEGCSYYADEAAAAAAAFFVGHATHHHADEDEDAGQISWWMWN

SEQ ID NO: 7768 - protein, 327 aa, Zea mays
  Clone ID: TF_ZmC1455_6.pep
MEDLYSIHPGISRAGGAATAASEVSGVAGGPGSPPPPPSQPPPPPPADLTELVKAQIAGHPRYPSLLSAYIECRKVGAPPEVATLLEEIGRERCAAASAGGEVGLDPELDEFMEAYCRVLERYKEELSRPFDEAASFLSSVRTQLSSLCGAAASLSAIYYTTANPETTSSFNIALVYEMVGSSEEDEACSGGDTEATEPGQQEHSSRLADHELKEMLLKKYSGCLSRLRSEFLKKRKKGKLPKDARSALMDWWNTHYRWPYPTEEDKVRLAAATGLDPKQINNWFINQRKRHWKPSEDMRFALMEGVTGGGPSSGTTLYFDTGTIGP

SEQ ID NO: 7769 - protein, 146 aa, Zea mays
  Clone ID: TF_ZmC13584_2.pep
MEVPRLPQGALPSMALPRPSPQSTPRSRAHLPAIKVVTPDEDGRGSPHGGPGPSDSSGAGARKKLRLTNEQSTLLEDTFRAHNILSNAQKQELGRQVDLSARQVEVWFQNTHVQITHMFMLMLTPHRTISNVMLYIHFLDMGGIFY

SEQ ID NO: 7770 - protein, 327 aa, Zea mays
  Clone ID: TF_ZmC11178_1.pep
IGGRETRRPTRPSFSFSLSPSWTILSISFLSLHILRRAEAARDTIGKLLQQEIKLSPTQDQKKLCMEQEEVGLALGLSLGSGHHHQELKPQHPSHPCAALLEPSLSLSGPATKDDGPTAPVRRFAAVKRELQTMEGNDDEATGRVLVYSVASSAVVTADDDEGCNSSRKKLRLSKEQSALLEDHFKEHSTLNPKQKAALARQLNLSPRQVEVWFQNRRARTKLKQTEVDCEILKRCCETLTEENRRLHRELQQLRALSHPHPHPAAFFMPTAAAAALSICPSCQRLVATGASAAAATTAGADNKPKAGGPGGRAPHVFSPFTNSAAC

SEQ ID NO: 7771 - protein, 227 aa, Zea mays
  Clone ID: TF_ZmC1389_2.pep
PRLCPSRRCRAAAAAASSSPNNSASSFPTDFSAHGQVAPGADRACSRASDEDDGGSARKKLRLSKEQSAFLEDSFKEHATLNPKQKLALAKQLNLRPRQVEVWFQNRRARTKLKQTEVDCEYLKRCCETLTEENRRLQKELSELRALKTVHPFYMHLPATTLSMCPSCERVASNSAPAPASSPSPATGIAAPAPEQRPSSFAALFSSPLNRPLAAQAQPQPQAPANS

SEQ ID NO: 7772 - protein, 725 aa, Zea mays
  Clone ID: TF_ZmC19193_1.pep
SLVLPSSDPKQGMSFGDLDGGGSKRKKPYNRHAPRQIEQLEAMFKEFHHPDEKQRAQLSRQLGLDPRQVKFWFQNRRTHLKNQLERQENARLKQENDKLRVENLSIREAIRDLVCSCCGGPAVLGELSPEEHQLRLENARLRDELARVCTVTSKFIGKPMSHMELLLAKEPHPITGSSLELAVAVGVGSGVPSSKMPVSTISELAGSTSSSTGTVTTPMVTASLPMVSIVIDKSKFAQLAVSAMNELVKMARMNEPLWIPTIPSPGSPIMETLNFKEYLKAFSPCVGVKPTGFVSEASRESGIVTIDSSAALMEVFMDERRWSDIFYCIVAKASIVEEILPGVAGSRNGALLLMQAELQMLSPRVPIREVTFLRFCKQLAEGAWAVVDVSIDGLQTDQCLDTNTKCRRLPSGCVLQDTPNGCKVTWVEHAEYPEASVHQLYQPLMRSGLALGAGRWLATLQRQCECLAILMSSLAAPEHDSAAVSLEGKWSLLKLARRMMENFCAGMGASSSREWSMLDGLTGSMGKDVRVMVQNSVDEPGVPPGVVLSVATAVWLPVTPERLFNFLRDEELRAEWDILSNGGPMQQVLRITKGQLDGNSVALLRSDHTDSHLNSILILQETCTDRSGAMVVYAPVDFPAMQLVLGGGDSKNVALLPSGFVILPAGSSAGGVGHKSRGSLLTVAFQILVNSQPTAKLTVESVDTVYSLISCTIEKIKAALHCDVC

SEQ ID NO: 7773 - protein, 234 aa, Zea mays
  Clone ID: TF_ZmC24942_1.pep
MEQYDGLFPPAYVDDSSSLLLVPNANGTAQEERPRARRRRRRAARCGGGGGELDGGGDHKKRRLTDEQVEMLELSFREERKLETGRKVHLAAELGLDPKQVAVWFQNRRARHKSKLLEEEFAKLKQAHDAAILHKCHLENEVMRLKDKLVLAEEELTRFRSAGNHAVSGDGGDVMARAVCSGSPSSSFSTGTCQQPGGGGGGGDHLGDDDLLYVPDYAYADSSVVEWFSLYGLM

SEQ ID NO: 7774 - protein, 206 aa, Zea mays
  Clone ID: TF_ZmC24942_2.pep
SAPARPGARRRRRRAARCGGGGGELDGGGDHKKRRLTDEQVEMLELSFREERKLETGRKVHLAAELGLDPKQVAVWFQNRRARHKSKLLEEEFAKLKQAHDAAILHKCHLENEVMRLKDKLVLAEEELTRFRSAGNHAVSGDGGDVMARAVCSGSPSSSFSTGTCQQPGGGGGGGDHLGDDDLLYVPDYAYADSSVVEWFSLYGLM

SEQ ID NO: 7775 - protein, 185 aa, Zea mays
  Clone ID: TF_ZmC24942_4.pep
MEQYDGLFPPAYVDSSSSLLLVPNANGTAQEERPRARRRRRRAARCGGGGGELDGGGDHKKRRLTDEQVEMLELSFREERKLETGRKVHLAAELGLDPKQVAVWFQNRRARHKSKLLEEEFAKLKQAHDAAILHKCHLENEVMRLKDKLVLAEEELTRFRSAGNPRVSGDGGDVMRAVCSGSPSS

SEQ ID NO: 7776 - protein, 166 aa, Zea mays
  Clone ID: TF_ZmC8754_4.pep
DPTDVDRAIDMDRPCHHQHQFFMPPPPQQQQLCVPMMDDPSSFLAEMGIGGGDGPSSSARGERKRRFTEEQIRSLESTFRARHGHAKLEPREKAELARELGLQPRQVAIWFQNKRARWRSKQLEHDYAVLRAKFDDLHARVESLKRDKLALSTQLNELSEKMKDRE

SEQ ID NO: 7777 - protein, 240 aa, Zea mays
  Clone ID: TF_ZmC254_2.pep
GVAMEGDDDGPEWMMEVGGAGATGKGKGGALDKNKKRFSEEQIKSLESMFATQTKLEPRQKLQLARELGLQPRQVAIWFQNKRARWKSKQLEREYSALRDDYDALLCSYESLKKEKHTLLKQLEKLAEMLHEPRGKYSGNADAAGAGDDVRSGVGGMKDEFADAGAAPYSSEGGGKFAHFTDDDVGALFRPSSPQPSAAGFTSSGPPEHQPFQFHSGCWPSSTEQTCSSSQWWEFESLSE

SEQ ID NO: 7778 - protein, 1540 aa, Zea mays
  unsure (1)..(1540): unsure at all Xaa locations
  Clone ID: TF_ZmC1775_2.pep
MGRKGSEMSPSKRYPLRSPHSSGRVLRSALANDNKDSEPLNAAAATQAAVKKRSGSQLDSPNSSVRLFHSTSKNKNEACSGPLNDRIPDKPAANKRKRASPSQVGSSSNSVRVLRSAIKNKDEACSKSLSDRTAGEPAANKRKNVNRSKTGSLSCGVRVLLSASKAKDETSTKPLNDSAAVEPASGKRKGTSPSKVGSASNSVRVLRSTSKYKNETCTEPLNDSGAVEPAANKRKGVSRSKERSLNSSVRVXALASNNKIEVSIKPLGNSTAGQPAAKRRKSGSSFEAGSPVSSARVLRSTSERKNEASKPLNESTAAQPAARKKKXAGVISKTDNPKIGLRVLRSASGKKNEACIGHVNDSTSAEPTVTKRNRKPSMDRSPKKDYLKICQRVRYILNRMNYQQTFIQAYASEGWKGQSLEKIRPEKELERAKAEILQCKLRIREAFRNMDSLLSKGKLEESLFDSAGEISSEDIFCAVCGSKDVTLQNDIILCDGACDRGFHQNCLNPPLLTEDIPPGDQRWLCPACVCKADSIDALNELQGSKLSIHDSWEKVFPEAASIANGSKQVDTSDLLPDHIKHSDNPALVEGLMVDEVRLSAEDDSKADDLRLSSEDSGDGDFDPSGPDSSEDQKDGLNSEESDFTSDSDDFCAEIAKSCGQDEVSASPLSNVINHTYRMKLRASNNRSNEENHDHVFMDMELGQDMVLPVSSRRQVERLDYKKLYDEAYGKESSNSSDDKEWSGKELLEGSETDSLSERPHPVKRCSRRAQAEQQNNEHTPQRERLHGSESEQKTGILRSNGSSSTGRKFGPVATQKLKVHFEKDPYPSRETKENISEELGLTFNQVSRWFSSTRHYSRVASARKEMHPDGHTSENNDTTTVDSMQARQPNTVVMEKLTGNRNDIVSEKPMVQNNLNQGVAEKLTRDRNDIVPEKQVVQSNLNQCNNEDIPLSGTEIEMESYEQESSESSDEEWSTLSTPRKTKLQGNEKVSLTESLRSAKRCSRRAPAREQNNEHTQSEQLHGSVSKQQTEVLRSNVSSGDASKCHFGPIVTQKLKEHFEKDPYPCRATKEGLAQELGLTFNQISKWFSATHHYSRDAVAKNQKYPGENTTENNSSTIFDGIQVIEPNFGLIDKPDADTNDMISEKLMVQINLNEGIEEDIPPSQYTTRCEEKLTMTQAAISREAGPPGYGPGENFLQVSSRITSCEQSVIMAPSAIARGVGPPGYTPGEHQGNGAPWNTSYERRPFTSPATSSREVGPPGYGPEENQGSGISCNTSREQILFMSPTTISRELGPPGYLPRENQRSDTSWNTSCESGLFMSPATTSIEHGPPGYGPGENQENDSTSCELRMFTSPTIVSREVGPPGYQQGVFMSPKTISREVCPPGFGSGENQGNDTTWYKQSAFTSPTTISREVGPPGYGQEDQGNGGSWNTSCEQGVFTSPTRGISREVGPPGYGPGESQGNTTSWISTCQQRMLAGIQRTGGSRSMDLEAFPPGYGPGGASGSVISPQARSAENVEFSDEARKKAIQRELRRRQKFR

SEQ ID NO: 7779 - protein, 129 aa, Zea mays
  unsure (1)..(129): unsure at all Xaa locations
  Clone ID: TF_LIB4744-009-R1-K1-B9.pep
MKRQSKRPTASRDSPETGTVDKQLALAESLTARKTEPDELGEKKRRLAPDQVRALERCFEADNRLDPDRKARVARDLALNPRQVAVWFQNRRARWKAKALHRDFAALRARHDALXXDKDALAAEIRELR

SEQ ID NO: 7780 - protein, 154 aa, Zea mays
  Clone ID: TF_LIB3960-010-Q1-K6-B2.pep
MASSRGRLRLSPRAAAAPQLDAGKYVRYTAEQVEALERAYGECPKPSSLRRQQLIRDCPVLTNVEPRQIKVWFQNRRCREKQRRESSRLQTVNRKLGAMNKLLMEENDRLQKQVSRLVFDNGYMKNRLHSPSVATTDTSCESVVTSGQHNKQQQ

SEQ ID NO: 7781 - protein, 247 aa, Zea mays
  Clone ID: TF_LIB5117-048-A1-PF1-F5.pep
MTRHRPWPPSHPPPPHPLPLRVVAAAPQATGSGAGKKMARLSPGAAAPQVDTGKYVRYTPEQVEALERVYNECPKPSSLRRQQIIRDCPILCNIEPKQIKVWFQNRRCREKQRKESSRMQTVNRKLTAMNKLLMEENDRLQKQVSRLVYENASVKSLKTKIHKASAATTDTSCESVVTSGQQQALAAPRPQRDANNPAGLLAIGEETLTAFLSKATGTAVEWVQMMGMKPGPDSWESSLFAQLYWRT

SEQ ID NO: 7782 - protein, 856 aa, Zea mays
  unsure (1)..(856): unsure at all Xaa locations
  Clone ID: TF_ZmC354_1.pep
MASAMVVFGGGKDRPSPGGGGAPQVDAGKYVRYTPEQVEALERVYGECPKPSSLRRQQLIRDCPILSNIEPKQIKVWFQNRRCREKQRKEASRLQTVNRKLTAMNKLLMEENDRLQKQVSRLVYDNGYMKKQLHSPSAATTDTSCESVVTSGQHHQQQNPAAXSPQRDANNPAGLLAIAEETLAEFMSKATGTAVDWVQMVGMKPGPDSIGIIAVSHNCSGVAARACGLVSLEPTKVAEILKDRPSWYRDCRCVDILHVIPTGNGGTIELIYMQTYAPSTLAAPRDFWTLRYTSGLEDGSLVICERSLTQSTGGPSGPNTPNFVRAEVLPSGYLIRPCEGGGSMIHIVDHVDLDAWSVPEVLRPLYESPKILAQKTTIAALRHIRQIAHESSGEMPYGGGRQPAVLRTFSQRLSRGFNDAVNGFPDDGWSLMSSDGAEDVTIAINSSPNKLIGPHVNSSQLFTAIGGGILCAKASMLLQNVPPALLVRFLREHRSEWADPGVDAYSAAALRASPYAVPGLRASGFMGSQVILPLAHTLEHEEFLEVIRLEGHSLCHDEVVLSRDMYLLQLCSGVDENAAGACAQLVFAPIDESFADDAPLLPSGFRVIPLDAKTDPPSGTRTLDLASTLEVGSGGTTRASSDASSTCNTRSVLTIAFQFSYENHLRESVAAMARQYVRTVVASVQRVAMAIAPSRIGGQLEMKQTPGSPEAHTLARWIGRSYRFHTGAELLRTDTQCTDASLKALWQHSDSIMCCSLKAAPVFTFANQAGLDMLETTLIALQDISLEKILDDDGRKALCTEYPKIMQQGFAYLPGGVCVSSMGRPVSYEQAVAWKVLSDDDTPHCLAFMFVNWSFV

SEQ ID NO: 7783 - protein, 86 aa, Zea mays
  Clone ID: TF_uC-zmflteosinte108d01b1.pep
MVLVRKGKGGASLDKNKKGFIDEQTTSLEAMFATQAMLEPRQKLQLAQELGLQPRHEVMWFQNKRARLKSKLLERKHSALRDDYHA

SEQ ID NO: 7784 - protein, 295 aa, Zea mays
  Clone ID: TF_ZmC1455_1.pep
MEDLYSIHPGISRVVGGAASEASVAGAGAGGPSPSDLTELMKAQIASHPRYPSLLSAYIECRKVGAHPHVTSLLEEVSRERRPDAGAGEIGVDPELDEFMDAYCRVLVRYKEELTRPFDEAASFLSSIQAQLSDLCSGGSSPAATATHSDDMMGSSEDEQCSGDTDVPDMGQEHSSHLGDHELKEMLLKKYSGCLSRLRSEFLKKRKKGKLPKDARTVLLEWWNTHYRWPYPTEEDKVRLAAMTGLDPKQINNWFINQRKRHWKPSEDMRFALMEGVAGGSSGTTLYFDTGTIGP

SEQ ID NO: 7785 - protein, 261 aa, Zea mays
  Clone ID: TF_ZmC1389_3.pep
MMPQASASLDLGLSLGLTLTSQGSLSSSTTTAGSSSPWAAALSSVVADVARARGDAYAQHHAGAAMTMRASTSPDSGDTTTAKREREGELERTGSGGVRSDEEDGADGGAGGRKKLRLSKDQAAVLEECFKTHSTLNPKQKVQLANRLGLRPRQVEVWFQNRRARTKLKQTEVDCEYLKRWCDRLADENKRLEKELADLRALKAAPPSSAAAQPASAAATLTMCPSCRRLASASASADQAGRAGPCWGPLPVFVDGPARRP

SEQ ID NO: 7786 - protein, 842 aa, Zea mays
  Clone ID: TF_ZmC12602_1.pep
MVPREIGMFPFMLLPLKFNLVPNSARVQVAKDEDMDQLEMEMELSGGSGSGHLDGLLSFADVDDDRPEQKPQHSGLELQTTADAAGQQQQLATANGKKKRYHRHTAHQIQQMEALFKECPHPDDKQRLKLSQELGLKPRQVKFWFQNRRTQMKAQQDRADNVLLRAENESLKSDNYRLQAAIRNVVCPNCGHAAVLGEMSYEEQQLRIENARLKDELDRLACIATRYGGGRQPSMSSSALVCLSAPPPVLMPPLDLDMNVYSRHFTDQSPVMGCGDLIQSVLGPPSQQITGTAEHHASTPSFMGAMAPVQEQDRQLVLDLLRAFSMTLAKMCRAGESLWLRRRGASSEVMVADEHARMFSWPVNGGQQDSSASPGGAAARTEGSRDGTVVIMNSITLVDAFLDANKWMELFPSILSKARTIQVINHGSASGHMGSGSLLLMQAELQFPSPLVPAREVVFFRYCVHNGDEGTWSLVDFPAEGFQLEALQTPSVVRCCRRPSGCIIQDMPNGYSSVVWVEHTEIVGEEKPLHQVFKDYVASGSAFGATRWVSLLQRQCERLASELARNIADLGVIRTPEARTNMMKLSQRMITSFSANISASGSQSWTSLSETTEDTIRVTTRKNTDPGQPSGVILTAVSTSWLPFNHQKVFELLADEQQRCQLEIMSSGGSLHEVAHIANGSHPKNCISLLRINAASNSSQNVELMLQESSTHPDGGSLVVFATVDVDAIQVTMSGEDPSYIPLLPLGFAIFPAANPSAAATSAAGSGDGQSSPAGNADEPASGCLLTVGMQVLASAVPSAKLNLSSVTAINSHVCNAVHQITAALKGAGAGGAAEPAAAASE

SEQ ID NO: 7787 - protein, 124 aa, Zea mays
  Clone ID: TF_uC-zmrob73033d11b1.pep
LERSFEKETKLEPERKTELARKLGLQPRQVAVWFQNRRARWKPKQLERDFDRLKASLDALRADHDALLQDNHRLRSQVLTSSRPQQPREQSFVPRPRSESEHVADDGGVARLLVLWLVSLRWCR

SEQ ID NO: 7788 - protein, 280 aa, Zea mays
  Clone ID: TF_ZmC1389_5.pep
PTRPLGLQWPPPDGGICHVGRDEAPARGFDVNRAPSVAGSALALEDDEEEPGAAALSSSPNDSAGSFPLDLGGPRAHAEGAAARAGGERSSSRASDEDEGASARKKLRLSKEQSAFLEESFKEHSTLNPKQKAALAKQLNLRPRQVEVWFQNRRARTKLKQTEVDCEYLKRCCETLTEENRRLHKELAELRALKTAPPFFMRLPATTLSMCPSCERVASGPSPASTSAPASSTPPATAATTAISYAAAAAAPVRADHRPSSFAALFAATRSFPLASQPRP

SEQ ID NO: 7789 - protein, 387 aa, Zea mays
  unsure (1)..(387): unsure at all Xaa locations
  Clone ID: TF_ZmC1389_4.pep
SGSAWTTPRASGRRRRPPLRGPVPAPRIRHERQLHRFIHRYLSLFQLQGKPSSKWQPSMDIMALNARDEEQYGNNHLGLGLSLSLGLGVATAAPVEVEPPPPPAAAAAAAAASYQRRAHHLPPRAVVVXWNGPGLFFGTTMDPSLERNQQQQHPAAARHGHEMPFLRGVDVNRAPAGETRRGSCSEDDEEPGGASSSPNSTLSSSLSGKRAAPARSGGEVADHTPRAGGGSDDEDSGGGSRKKLRLSKDQAAVLEESFKEHNTLNPKQKAALAKQLNLKPRQVEVWFQNRRARTKLKQTEVDCEFLKRCCETLTEENRRLQREVAELRVLKLVAPHHYARMPPPTTLTMCPSCERLASASASADQAGRAGPCWGPLPVFVDGPARRP

SEQ ID NO: 7790 - protein, 319 aa, Zea mays
  Clone ID: TF_ZM5012.C1.o5.fg.pep
MDIMALNARDEEQYGNNHLGLGLSLSLGLGVATAAPVEVEPPPPPRQQQQRAISVAPITSLPAPQWWKWNGPGLFFGTTMDQQQQPAAARHGHEMPFLRGVDVNRAPAGDTRRGSCSEDDEEPGGASSSPNSTLSSSLSGKRAAPARSGGEVADHTPRAGGGSDDEDSGGGSRKKLRLSKDQAAVLEESFKEHNTLNPKQKAALAKQLNLKPRQVEVWFQNRRARTKLKQTEVDCEFLKRCCETLTEENRRLQREVAELRVLKLVAPHHYARMPPPTTLTMCPSCERLASASASADQAGRAGPCWGPLPVFVDGPARRP

SEQ ID NO: 7791 - protein, 719 aa, Zea mays
  Clone ID: TF_ZmC260_62.pep
MEKNIAHCPVEGNGEIENGASSSQNPESLEHSVLLSTSQTMPNNLGIRKNYKRAANRGKKGSQGLTGQAYTLMSSNSDVRVLRSTSSSKTTSTEHVQAPVQPAAKRRKMSRASNKSSTDEFSQIRKRVRYILNRMNYEQSLIEAYASEGWKNQSLDKIRPEKELERAKSEILRCKLRIREVFRNIDSLLSKGKIDETLFDSEGEISCEDIFCSTCGSNDATLGNDIILCDGACDRGFHQNCLNPPLRTEDIPMGDEGWLCPACDCKIDCIDLINELHGSNISIEDSWEKVFPDAAAMANDSKQDDAFDLPSDDSDDNDFDPNMPEEHVVGKDEESSEEDEDGGSDSDDSDFLTCSDDSEPLIDKKVDDLRLPSEDSEDDDYDPAGPDSDKDVEKKSSSDESDFTSDSDDFCKEISKSGHDEVSSPLLPDAKVGDMEKITAQAKTTSSADDPMETEIDQGVVLPDSRRRQAERLDYKKLYDEAYGEASSDSSDDEEWSGKNTPIIKSNEEGEANSPAGKGSRVVHHNDELTTQSTKKSLHSIHGSVDEKPGDLTSNGSNSTARKGHFGPVINQKLHEHFKTQPYPSRSVKESLAEELGLTFRQVNKWFETRRHSARVASSRKGISLDKHSPQNTNSQVTASMEPKEPEGTVVEESNVCLNGGTTISKEAVSSKVGSRTPGSDVGGSKVDSAEDQNPGPDLAEKARQKAIQQELRKKKMGR

SEQ ID NO: 7792 - protein, 789 aa, Zea mays
  Clone ID: TF_ZmC1775_4.pep
RCILPSCATTAIGAKYDPEVTQKLKVHFEKDPYPSRETKENLSEELGLTFNQVSKWFSSTRHYSRVASAKKEMHPDSHTCENNDETTVDSMQAKQPNAGVMEKLTGDRNGIVPEKPMVQDNLNQGAMEKLTRDKNDIVPEKPVMQSSLNQCNNEDIPLSGTEIEMESYEQESSDSSDEEWSILSTPRKTRLQDHGKSSVTESLRSAKRCSRRAPAREQNNERIQSEQLHGSASEQQTEFLRSNVSSGKVSKYHFGPIVSQKLKEHFEKDPYPCRATKESLAQELGLTFNQISKWFSGTRHYSRDAVAKNQKRPGENTTVNNNSTTFDDIQVIEPNVGLIDKPAADVNDMISEKLMVQINLNEGIEEDIPPSQYARCEEKITMTPAAISREAGLPGYGPGPGENFLQVSSRNTSCEQSVILAPTAIAREVGPPGYATGENQGNGAPWNTSYERRLFMNPVTSSRAVSPPGYGPEESRGSGISWNTSSEQILFMSPTTISRELGPPGYGPREDQCSGTSWNASCELGVFMSPVTTSREDSPPGYGPRENQENDNMRCELRMFTSPTTISREVGPPGYELTGKNKGNGASCTTNYQQGAFTSPEAFPREACPPGFVSGENQGNDTPWYMSSKQMAFTSPTTNPRVGPPGYGQENQGSRVSWNTSYEQGVFMSSTNISREAGPPGYGPGESQGNITSWISTGGQRMFTGPSTIPNEVGQQGYGPSGIPGTDGSRSMDLKAFPPGYGPAGENQGGGASGSVISPQARSAENVEFSDDARKKAIQRELRRRQKFR

SEQ ID NO: 7793 - protein, 254 aa, Zea mays
  Clone ID: TF_ZmC1389_1.pep
MAPQSLDLGLSLGLGVAAFQPSFCHPAGNDAAEREASPTADERERRCSPAGSPTSSGSGKRVAAERSAGSGSGDEDDDGGARKKLRLSKDQAAVLEECFKTHHTLTPKQKAALASRLGLRARQVEVWFQNRRARTKLKQTEVDCEYLRRWCEQLAEENRRLGKEVAELRALSAAPAPAAPLTALTMCLSCRRVSSSSCSSSPPNTHAHAAAAGTGRSVAAAAATTLPAHRQFLCGFRDGAGRPSIHVYFWACML

SEQ ID NO: 7794 - protein, 344 aa, Zea mays
  Clone ID: TF_ZmC3817_1.pep
MRPMASNGMASAPSPFFPPNFLLQMQQTPSDHEHQEQHHHHHHHEHHLAAPPLHPHHNPFLPSSQCPSLQDFRGMAPIMLGKRPMYGADVQVVGGEEVNGCGGVNEDELSDDGSQAGGEKKRRLNVEQVRTLEKNFELGNKLEPERKLQLARALGLQPRQVAIWFQNRRARWKTKQLEKDYDALKRQLDAVKADNDALLSHNKKLQAEILSLKGREAGGSSELINLNKETEASCSNRSENSSEINLDISRAPASEAPLDPTPPPGAGGGGMIPFYPPSVGGRPASAAGVDIDQLLHTSAPKLEQHGSGGAVVVQAAETASFGNLLCGVDEPPPFWPWADHQHFH

SEQ ID NO: 7795 - protein, 778 aa, Zea mays
  unsure (1)..(778): unsure at all Xaa locations
  Clone ID: TF_ZmC13476_1.pep
MSDFVGSRYTKQEDFHVLLSKKDPGEPPEHKHVLWMAHWTKASSNNGSSNPLEGTTKGTTTKDSETLPYEFTESTVAKRLMVGVSHGSASMQHDRQFNSSVWGMARHISNELGPKNSEHVDGSFEKFVKKDAVNLRARAVVSETYSVHKLSELPLDFQHLGDSDDPSPDWSHFXPQSRLSRPTRMAASHRTAEFDPILNGQAGFHPDNPGPSASHVMALSSQEYMMHSHQTADENMDTCKPAEGFASRVEDHAGFNSDPPGPKLKGQLLDTMSCSCSKDDNNSADCPIDEQHTSHYFANSKHELPSVSNKKKFKFAGNNHNRIVASASHDLKTKRSAVHKQQSAAEAVFCAPVLDSEFQNEPITISNIDKKDGENFHDMYKCLGKAVSCPLLPYEHRHLNTQRTESAENLKVCTLPDHQTANKLTEKSHGELLTYGPKPKKNTGSCNRRSLYLFEKLTIPSKSQSAYPKNSASSGKSSGFGVCMYGTNIGSQLFGAQNQSSSKTETLHSDALIGSKSSAGIASLSAQKDNGCPAPAPAPAPDEAKSEQLAAPSSNTKQGGESAYSKEDGSHNLNEGHDVSSKAAIGSKQPCMPGAGITNLDLILSQMSRMRNQIPSGGVTQPPIGAEPSDRWLKRLQLGVPDPDVPGSKTKRPKVGDSPPPPRQINRSFDVALPCNPGKQEEQSLNGGGKVQGRAPPIPEKSVSRWIGRWCQGGTPVFREGPGQQGRQATKPAGRLSEELEGQFFPSTAAMAMMGRAMHKLRPCEQQQKGPFVVWKID

SEQ ID NO: 7796 - protein, 223 aa, Zea mays
  Clone ID: TF_ZmC3309_1.pep
PDQLNFLFRSSGLRFSNLYCDPLIIPGGHKITARQRWQPTPMQLQILESIFDQGNGTPSKQKIKEITAELSQHGQISETNVYNWFQNRRARSKRKQAAASLPNNAESEAEADEEPLADKKPKSDRPPPPPPPIQDNTKATGALSADRVSGGTRHLDTGHDQTSGVMYGCNDSGLLRSSGSSGQMSLYENFMSNPRIDRFPAKVESSRSFPHLQQHGEGFGMFG

SEQ ID NO: 7797 - protein, 784 aa, Zea mays
  Clone ID: TF_ZmC39640_1.pep
MQFPFTTGFSSSPALSLGLDNAGGGMVGRMLPVGGAPADGGMARDAADAENDSRSGSDHLDAMSAGAGAEDEDDAEPGNPRKRKKRYHRHTPQQIQELEALFKECPHPDEKQRGELSKRLGLDPRQVKFWFQNRRTRMKTQLERHENALLKQENDKLRAENMAIREAMRSPMCGSCGSPAMLGEVSLEEQHLCIENARLKDELNRVYALATKFLGKPMPVLSGPMLQPNLSLPMPSSSLELAVGGLRGLGSIPSLDEFAGGVSSPLGTVITPARATGSAPPPMVGVDRSMLLELAISAMDELVKLAQVDEPLWLPSLSGSPDKKLLNFEEYAHSFPPSVGAVKPVGYVSEASRESGLVIIDNSLALVETLMDVRRWSDMFSCMIAKATVLEEVTSGIAGSRNGALLLMKAELQVLSPLVPIREVTFLRFCKQLAEGAWAVVDVSIDGLVRDHNSGTASNAGNIRCRRLPSGCVMQDTPNGYCKVTWVEYTEYDEASVHQLYRPLIRSGLAFGARRWLAMLQRQCECLAILMSPDTVSANDSSVITQEGKRSMLKLARRMTENFCAGVSASSAREWSKLDGAAGSIGEDVRVMARKSVDEPGEPPGVVLSAATSVWVPVAPEKLFNFLRDEQLRAEWDILSNGGPMQEMANIAKGQEHGNSVSLLRASAMSANQSSMLILQETCTDASGSMVVYAPVDIPAMQLVMNGGDSTYVALLPSGFAILPDGPSSVGAEHKTGGSLLTVAFQILVNSQPTAKLTVESVETVNNLIFCTIKKIKTALQCDA

SEQ ID NO: 7798 - protein, 641 aa, Zea mays
  Clone ID: TF_ZmC354_2.pep
MAAVASRERLSPGAAPQVDAGKYVRYTPEQVEALERVYSECPKPSSLRRQHLIRDCPILRNIEPKQIKVWFQNRRCREKQRKESSRLQTVNRKLSAMNKLLMEENDRLQKQVSRLVFDNGYMKNRLHSPSVATTDTSCESVVTSGQHNQQQNPAVLHPPQRDANNPAGLLAIAEETLAEFMSKATGTAVTGCKWGRGFNDAVSGFPDDGWSCLLNTDGAEDITVTINSSPNKLVGSHVSASPLFSAMGGGIMCAKASMLLQNVPPALLVRFLREHRSEWADPGIDAYSVASLRANPYTVPGLRAGGFMGNQVILPLARTLEHEESLEVIRLEGHGFSHEEVLMSRDMFLLQLCSGVDEDAPGACAQLVFAPIDESFADDAPLLPSGFRVIPLDAKTDVPTATTRTLDLASALEVGSGGSGMRASCDGSGTCATRSVLTIAFQFSFENHLRESVAAMAKQYVRGVMASVQRVAMAIAPSRLGSRIELKHPPGSPEALALATWIGRSYRAHTGTEIRWSDTEGADSPLMLFWKHSDAILCCSLKPPAFTLKFANSAGFDILETTMVNIQDLPLEAVLDEEGQKALSAQLPAIMQQGLAYLPGGVCRSSMGRQASYEQAVAWKVVGDDGAPQCLALMLANWTFI

SEQ ID NO: 7799 - protein, 142 aa, Zea mays
  unsure (1)..(142): unsure at all Xaa locations
  Clone ID: TF_LIB4148-005-Q6-K1-H3.pep
MLPAVVPYKGSLREIDAGPMTSYYREKREGHWPSMAAGVAMDGAEATGRTGMRNGGDRQRKMQRRTRQEQERSYDEQTKSMESMFTTHAKLDPRQKLQLARELCLHPHQVAIWFQNKRSRXKYKRLEREYLALRDDYHAPTL

SEQ ID NO: 7800 - protein, 119 aa, Zea mays
  Clone ID: TF_LIB3245-448-P1-N1-C8.pep
RRFTEEQIPAVESTFRARHGHAKLEPREKAELARELGLQPRQVAIWFQNKRARWRSKQLEHDYAVLRAKFDDLHARVESLRRDKLALSTQLFAWCARVHDQLNELSERLRDREDPAAAG

SEQ ID NO: 7801 - protein, 294 aa, Zea mays
  Clone ID: TF_ZmC17115_1.pep
MKRPTSRGSSMVSGQATTDLQEDSCRSMEPHGVDGDATAAAERDDVDAGAYDEEEDEEEELAGSRGGLGEKKRRLAADQVRALERSFEVDNKLDPERKARIARDLSLHPRQVAVWFQNRRARWKTKQIERDFAALRVRHDALRVECDALRRDKDALAAEIKELRGMVEKQMEVKLESAAEELLPVATRSAAAAAVYNKDGSTDSDSSAVFNEEASPYPYSGAALDHQQQQETSHPLGFTGFTSFLTSSFPSVYHGDSHLDQEADGFFSAAAAGDGFFAEEQSAGIGSWYGGEGW

SEQ ID NO: 7802 - protein, 175 aa, Zea mays
  unsure (1)..(175): unsure at all Xaa locations
  Clone ID: TF_ZmC254_3.pep
VGREAGREGAMEQGEEDGDWMMEPAAGKKGGAMIDRKKRFSEEQIKSLESMFATQTKLEPRQKLQLARELGLQPRQVAIWFQNKRARWKSKQLERQYAALRDDYDALLSSYDQLKKDKQALLNQLEKLAEMLREPGGAKCGDNAGAARRDDVRLAVXGMNMKDEFVDAGGASKLY

SEQ ID NO: 7803 - protein, 285 aa, Zea mays
  Clone ID: TF_ZmC12553_1.pep
RDLDLRHPRIAWLDRTKASAAAAAAAADERAGGAEGLAGYVKVMTDEQMEVLRKQISIYATICEQLVEMHRALTEHQDTIAGELRIRFSNLYCDPQIIPGGHKITARQRWQPTPMQLQILENIFDQGNGTPSKQRIKEITAELSHHGQISETNVYNWFQNRRARSKRKQAASLPNNAESEAEVDEESLTDKKPKSDRSLQDNKAMGAHNADRISGMHHLDTDHDQIGGMMYGCNDNGLRSSGSSGQMSFYGNIMPNPRIDHFPGKVESSRSFSHLQHGEGFDMFG

SEQ ID NO: 7804 - protein, 273 aa, Zea mays
  Clone ID: TF_ZmC12553_2.pep
MEWVDRTKASAAAAAAAADERAGGAEGLAGYVKVMTDEQMEVLRKQISIYATICEQLVEMHRALTEHQDTIAGIRFSNLYCDPQIIPGGHKITARQRWQPTPMQLQILENIFDQGNGTPSKQRIKEITAELSHHGQISETNVYNWFQNRRARSKRKQAASLPNNAESEAEVDEESLTDKKPKSDRSLQDNKAMGAHNADRISGMHHLDTDHDQIGGMMYGCNDNGLRSSGSSGQMSFYGNIMPNPRIDHFPGKVESSRSFSHLQHGEGFDMFG

SEQ ID NO: 7805 - protein, 325 aa, Zea mays
  Clone ID: TF_UC-ZMFLB73016H05_FLI.pep
MSFGGMFDGAGSGVFSYDATGGGTGMHNPGRLVPAPPLPKPGGFGATGLSLGLQTNMEGAQLGDLGRMGLIGGGGSGSGGDGDSLGRGREDEIDSRSGSDNVDGASGDEIDPDNSNPRRKKKRYHRHTPQQIQELEAVFKECPHPDEKQRMELSKRLNLESRQVKFWFQNRRTQMKTQIERHENALLRQENDKLRAENMTIREAMRNPICANCGGAAVLGEVSLEEQHLRIENARLKDELDRVCALAGKFLGRPISSGSSMSSSLQGCSGLELAVGSNNGYGPGPLGASALQPLPDLLGAGLPGPVGSAAMRLPMGIGALDVALH

SEQ ID NO: 7806 - protein, 863 aa, Zea mays
  unsure (1)..(863): unsure at all Xaa locations
  Clone ID: TF_ZmC3271_1.pep
MSFGGMFDGAGSGVFSYDATGGGTGMHNPGRLVPAPPLPKPGGFGATGLSLGLQTNMEGAQLGDLGRMGLIGGGGSGSGGDGDSLGRGREDEIDSRSGSDNVDGASGDEIDPDNSNPRRKKKRYHRHTPQQIQELEAVFKECPHPDEKQRMELSKRLNLESRQVKFWFQNRRTQMKTQIERHENALLRQENDKLRAENMTIREAMRNPICANCGGAAVLGEVSLEEQHLRIENARLKDELDRVCALAGKFLGRPISSGSSMSSSLQGCSGLELGVGSNNGYGLGPLGASALQPLPDLPSSHGGIPDPGEQLRLPMGIGALDVARQQPALLGIDRTVLLELALAAMEELMKVAQMDEPXWLRRPDGSGLEALNLDEYHRAFARVFGPSPTGYVTEATREAGVAITSSVDLVDSLMDAARWSEMFPCIVARASTTDIISSGMGGTRSGSIQLMHAELQVLSPLVPIREVVFLRFCKQHAKGLWAVVDVSVDAILRPDGGHHHAQNGGGAGYMGCRLLPTGCIVQDMNNGYSKVTWVVHAEYDEAVVHQLYRPLLQSGQALGARRWLASLQRQCQYLAILCSNSLPARDHAAITPVGRRSMLKLAQRMTDNFCAGVCASAAQKWRRLDEWRSGEGGDAAGNGGSAAAGEGEEKVRMMARHSVGAPGDPPGVVLSATTSVRLPATSPQRVFDYLRDEQRRGEWDILANGEAMQEMDHIAKGQHHGNAVSLLRPNATSGNQNNMLILQETCTDPSGSLVVYAPVDVQSMHVVMNGGDSAYVSLLPSGFAILPDGHCQSPNTAHQGSPSCGGSSSSSSTGSLVTVAFQILVNNLPTAKLTVESVETVSNLLSCTIQKIKSALQASIVTP

SEQ ID NO: 7807 - protein, 840 aa, Zea mays
  unsure (1)..(840): unsure at all Xaa locations
  Clone ID: TF_ZmC14030_1.pep
MAAAVAMRGGSSDSGGFDKVPGMDSGKYVRYTPEQVEVLERLYIDCPKPSSSRRQQLLRECPILSNIEPKQIKVWFQNRRCRDKQRKESSRLQAVNRKLTAMNKLLMEENERLQKQVSQLVHENAHMRQQLQNTSLANDTSCESNVTTPPNPIRDASNPSGLLAIAEETFTEFLSKATGTAIDWVQMPGMKPGPDSVGIVAISHGCRGVAARACGLVNLEPTKVIEILKDRPSWFRDCRSLEVFTMFPAGNGGTIELIYMQMYAPTTLVPARDFWTLRYTTTMEDGSLVVCERSLTGSGGGPNAASAQQFVRAEMLPSGYLVRPCEGGGSIVHIVDHLDLEAWSVPEVLRPLYESSRVVAQKMTTVALRHLRQIAQETSGEVVYALGRQPAVLRTFSQRLSRGFNDAISGFNDDGWSVMGGDGIEDVVVACNSTKKIRNTSNAGITFGAPGGIICAKASMLLQSVPPAVLVRFLREHRSEWADYNIDVYLASSLKTSACSLPGLRPMRFSGGQMIMPLAHTVENEEILEVVRLEGQPLTHDEALLSRDIHLLQLCTGIDEKSVGSSFQLVFAPIDEHFPDDAPLISSGFRVIPLDMKTDGVSSGRTLDLASSLDVGSAAPQASGDAPPDDCNLRSVLTIAFQFPYEMHLQDSVATMARQYVRSVVSAVQRVSMAISPSQSGLNAGQRMLSGFPEAVTPTIWVWQSYHYHLXAGEALLKMLWHHPNAVLCCSFKEKPMFTFFKEKPMFTFANKAGLDMLETSFIALQDLTLDKIFAESGRKAIFSDISKLMEQGYAYLPSGVCMSGMGRHVSFDQAVAWKVLGEDSSVHCLGLCFVNWSFV

SEQ ID NO: 7808 - protein, 324 aa, Zea mays
  unsure (1)..(324): unsure at all Xaa locations
  Clone ID: TF_ZmC74833_2.pep
QQTSPLTVYASIPQMLVRVVKLLKNPHFMAKPAAIDLIRSIIQAEGASTEQALSSALTSIMDALKSTDWNTRKAASLALSSIAVSSGYLVTSFRTSCLRSLERSKFDKVKPVRDTIIHAIQLWXAIPGSHTPEPSEAGSSTKENYFGDHHDARSIHDGGSRDTSFRRTDHGPSVSVISGSSLSSAKRRSPLSINKVAINNAANLQRMKTGDWRVEVSVPKQSMIPLVNNDEKGSSKACSLKDTKRNAYESVDVDSKFDYDIVDDKQECSSVSEVASRSFETKHVTTAQECTEDCDSAEVTEQCPRGRESKSIGSTLQMLLLMTH

SEQ ID NO: 7809 - protein, 186 aa, Zea mays
  unsure (1)..(186): unsure at all Xaa locations
  Clone ID: TF_LIB4741-079-Q1-K1-H2.pep
MPEVDAPADPHPLEGLLHGPQLPPFLSKTHQLESEPXLHGVISXGAADNSFTGCDPSTFARDGLPHNFQHNHFSTFARXINTYGLRKAHADTRQIAREDLLQDTKHLLKTMVRRRTSPRKQGGVLPGLSSVESSLDPELSRXEREEPLLEEVARVTQEHLLTIDAMNTLNHWLVSAEDRQMXMVSF

SEQ ID NO: 7810 - protein, 138 aa, Zea mays
  Clone ID: TF_LIB4757-078-A1-K1-B1.pep
MDKSMLGDLDGLPEEDKMRMAAMIDQLQIRDRFVPYQRISWAEQGRSFMVWKPVELARDLLPLHFKHYNFSFVRPLTTYVSTSKTPSTIYTTSILLVTEIVAAKSRFKFGSICVAFVYVQSKLMEKKTLASGGVTVAL

SEQ ID NO: 7811 - protein, 102 aa, Zea mays
  Clone ID: TF_LIB3912-037-Q6-K6-D2.pep
TSHMVSDPATHSGGRWGGFHNIFHVLYPDYLLDYLLKYYFKHRYFRSFNRYLNTYGFTNVDTDRHEFVHEWQLRLLALLLPLIKHEENNAGAGARGLGQDLY

SEQ ID NO: 7812 - protein, 132 aa, Zea mays
  Clone ID: TF_ZmC12124_7.pep
MDKPVAPGIIKEELLEQQPPTQDGVGGGGDAPRPMEGLHEVGPPPFLTKTFDLVEDPATDAVLSWSRAGNSFIVWDPHVFADGLLPRLFKHSNFSSFVRQLNTYLDGTRYWMKYQESDCFVLEDSTDHLHML

SEQ ID NO: 7813 - protein, 242 aa, Zea mays
  Clone ID: TF_LIB4705-001-R1-K1-H10.pep
GKLLYYKLYSMLEDSSISHLISWAENGESFVMSPSADFSKVLSQYFKHTNISSFVRQLNMYGFHKERDVFHTGHPESTLWEFKHGNGNFKRGDLLGLREIKRRASRHALVHRENSYAKPSSSHPGTPAEAMPMPPETSESRMTSIEHTLFDLSARLQRSEEAAQYMHVRNSVITDTMGRLLHFNQELSRTVLSLFPSESPHYRDVMALQAGIQKQVDAVRALDEHHEAPYGGRQHYFGAMEN

SEQ ID NO: 7814 - protein, 359 aa, Zea mays
  unsure (1)..(359): unsure at all Xaa locations
  Clone ID: TF_ZmC2162_1.pep
MSHGNGMLNSVKVERWPAAVAANGQPRPMDVLHDGSSPPFLTKTYDMVDDPTTNAVVSWSAANNSFVXWDPHIFGTVLLPRYFKHNNFSSFVRQLNTYGFRKVDPDRWEFANEEFLRGQRHLLKNIRRRKPPHSSPNQQSLGSYLEVGHFGYEEEIDQLKRDKQLLMAEVVKLRQEHQNTRSDLQAMEEKLQDTEQKQQQMMAFMARVMQNPDFMRQLISQREMRKELEDAISKKRRRRIDQGHEAGSMGTGSSLEQGPQGVFEPQEPVESVANGVPSDLESSSVEAKGLEVRQGVSSGGSEHLNGRPSGELNDDFWEDLLHEGGLGADAGNAVGQDDMNMDMDPDVSLPQLKQHGPRH

SEQ ID NO: 7815 - protein, 508 aa, Zea mays
  Clone ID: TF_ZmC3537_2.pep
MHRARPTAHANDPDAPYAAAAAMLLEPKLEDEELPLQQLASPGTFVSLDQLMPPVTAPAEPRPLEALLHGPQLPPFLSKTYDLVNEPSLDGVISWGAAGNSFVVWDPSTFARDVLPHNFKHNNFSSFVRQLNTYGFRKVHADRWEFAHEDFLRDSKHLLKRIVRRRSSPTKQCSVQPGSSSGESSLDPELHTLRREKNALLEEVARLKQEHRQTIEQMSTLNHRLESAEDRQRQMVSFLAKLLQNPSFVRKLKLHREKKEIDSTRVKRKFLKHVPHGSVESGESSSQHAGESGSYFAVSSPMATTTSVHDDITELQNFLLEDDDLNFGMDSENTGLEGTEAPDDIGELIQGFDTQEELDLGSGAELQEMPPASGSLAQDPTIGRFKGKNVLCPGLDATSSEGDCLSPLPDNMGLLSGTMLGTAGSMMAADDEQIWGVDASAALQSSCSGTSQQAFGSHVSDPYLMDIANRPERFWELDFQALDEADLQLDKCAIDDPALQQQPSMKKP

SEQ ID NO: 7816 - protein, 417 aa, Zea mays
  Clone ID: TF_ZmC2340_1.pep
MGFTKRSPQHPASPAGGEVGAQTAGKVTPVPAAPESAPVAVVPRPPDVAPFLTKVYDMVSDPATDAVISWSAGGGSFVIWDSHAFERDLLPRHFKHNHFTSFIRQLNTYGFHKVDPDRWEWANEGFVKGQKHLLKTIKRKKKSSQDVPSDLQSVPVKTAPGTENIEIGKYGGLEKEVETLKRDKALLMQQLVDLRQYQQSSSAEVQNLIQRLRVMEQNQQQMMALLAIVVQNPDFLNQLVQQQRRSNWWNDDGNRKRRFQALEHGPVDDQETSGGGAQIIQYRPPVPETSNQPIPANEAFYSTPAQPASSPALEMPMDVEMTSNNVDTFDSTGNDFTDTSALCEWDDMDIFGDELEHILQQPEQDFQVDPPLTVEDYGYDHPRLEQDCQMEAQQNCKNPQYVACVLKQRESHASDVH

SEQ ID NO: 7817 - protein, 365 aa, Zea mays
  unsure (1)..(365): unsure at all Xaa locations
  Clone ID: TF_ZmC10545_1.pep
GFKKIDPEQWEFANDDFIRGQQHRLKNIHRRKPIFSHSSHTQGSGPLPDTERRDYEEEIERLKCDNAALTSELEKNAQKKLVTEKRMQDLEDKLIFLEDRQKNLMAYVRDIVQAPGSFSSFVQQPDHHGKKRRLPVPISLYQDSNAKGNQVVHGGFITNPPACRESFDKTESSLNSLENFLREASEAFNISYDDGLPXPSSAVVITELHSSGESDPHVPSPVSRMHTSSAGAGDSLSSRDLTESTSCAESPRLPQIQPCTDSRTKVSEIDVNREPAVTETGPTRDQPAEEPPHVAAGVNDGFWQQFLTEQPGPDVHQEAQSERRDGDDDKGDQTRIGDRENFWWGKKNVEQMREKLGRLTSVEKT

SEQ ID NO: 7818 - protein, 133 aa, Zea mays
  Clone ID: TF_LIB5117-035-A1-PF1-F1.pep
MGEQAAAVSSCETPAPAEVGTGVGQRSLPTPFLNKTYQLVDDPAVDDVISWSEDGSAFIVWRPAEFARDLLPKYFKHNNFSSFVRQLNTYGFRKIVPDRWEFANDCFRRGEKRLLCDIHRRKVTPTVSPLHPL

SEQ ID NO: 7819 - protein, 249 aa, Zea mays
  Clone ID: TF_ZmC476_1.pep
MGSECKGYGVGVATSPQQEQEQAGAAVAPFVAKTFHMVSDPATDAVVRWGGASNTFHVLDPATFSDYLLPSYSRVRNFASFVRQLNTYGFRKVDTDRWEFAHESFLRGQARLLPLVVRKRKKAGAGAGAGGRELCEAGEEVRGTIRAVQRLREQQRGVEDELRAMDRRLRAAESRPAQMMAFLAKLADDPGLVLRAMLAKEEELALIDKGSEAQPAKRRRIGAEAVDLAHSRGGGAVPFPFSVLGQVFY

SEQ ID NO: 7820 - protein, 375 aa, Zea mays
  Clone ID: TF_ZmC38206_1.pep
MDSTLNQVKEESHGEGGDLMAGTVEAADGPSAAVAAAPKPMEGLHDPGPPPFLTKTYDMVDDSDTDLIVSWSATNNSFVVWDPHAFATVLLPRHFKHNNFSSFVRQLNTYGFRKVDPDRWEFANEGFLRGQRHLLKNIRRRKPPAQNATNQQSIGPYLEVGHFGYDAEIDMLKRDKQLLMAEVVKLRQEQQNTKANLKAMEDRLQGTEQKQQQMMAFLARVMRNPEFLKHLVSQNEMRKELQDAISKKRRRRIDQGPEADDLGASSSLEQGSPVLFNAQDPVEFLVDGIPADLESPAFDGHGLIGPHDIDIDIDIGSTYEQQQDMPQEDLNDNFWEQLLNEGLGEENDSPVIEDDMNVLSEKMGYLNSDGPTSSN

SEQ ID NO: 7821 - protein, 184 aa, Zea mays
  unsure (1)..(184): unsure at all Xaa locations
  Clone ID: TF_LIB5117-051-A1-PF1-F7.pep
MDPMPTLVKEEEDGHGTGESPGATAASRPVKGLRDARPSLFLTKTYDMVDDRSTDDVVSWSAGNNSLVVWDLHHFSTVLLPRHFKHSNFSSFVKQLNTYGFRKVDPDRWEFANEGFLRXQRHLLKNIRRRRPPANTASNQQSLGSYLEVGHFGXHTDTDQLKRDKQLLMAEVVKAKAEQQSMKT

SEQ ID NO: 7822 - protein, 117 aa, Zea mays
  Clone ID: TF_ZmC12124_3.pep
MDKPVAPGIIKEELMEQQPPMQDGVGGGGDAPRPMEGLHEVGPPPFLTKTFDLVEDPATDAVLSWNSARNSFIVWDPHVFADGLLPRLFKHSNFSSFVRQLNTYVSRQNPNPLLSFL

SEQ ID NO: 7823 - protein, 184 aa, Zea mays
  unsure (1)..(184): unsure at all Xaa locations
  Clone ID: TF_LIB4766-021-Q1-K1-C7.pep
MTPAAGNGSATAAPPPPFLMKTYEVVDDPATDDVISWGPGNNSFIVWNTPEFARDLLPKYFKHSNFSSFVRQLNTYGFRKVDPDRWEFANEGFLRGQKHLLKTINRRKPSLQGNSQPQQPQSQNAPVPSCVEVGKFGLEEEIERLKRDKNVLMQELVRLXTAQQTTDHQLQTLGKRLQGMGVTA

SEQ ID NO: 7824 - protein, 101 aa, Zea mays
  Clone ID: TF_ZmC2162_4.pep
MNHGNGMLNSVKVERWPAAVAANGQPRPMDVLHDGSSPPFLTKTYDMVDDPTTNAVVSWSAANNSFVVWDPHIFGTVLLPRYFKHNNFSSFVRQLNTYVSC

SEQ ID NO: 7825 - protein, 271 aa, Zea mays
  unsure (1)..(271): unsure at all Xaa locations
  Clone ID: TF_LIB4738-034-R1-K1-C9.pep
MTMVDDPTTNAVVSWSAANNSFVVWDPHIFGTVLLPRYFKHNNFSSFVRQLNTYVAVLPCLFLRLWNHARRDDAAVXKGFRKVDPDRWEFANEEFLRGQRHLLKNIRRRKPPHSSPNQQSLGSYLEVGHFGYEEEIDQLKRDKQLLMAEVVKLRQEHQNTRSDLQAMEEKLQDTEQKQQQMMAFMARVMQNPDFMRQLISQRKMRKELEDAISKKRRRRIDQGHEAGSMGTGSSLEQGPQGVFEPQEPVESLANGVPSDLESSSVEAKGLE

SEQ ID NO: 7826 - protein, 371 aa, Zea mays
  Clone ID: TF_ZmC5551_1.pep
MDPFHGIVKEEFDLDFDFTCASAAAAAAASWAVALPEMPRPMEGLGEVGPTPFLTKTYDVVDDPNTDTIVSWGFAGTSFVVWDANAFALVILPRYFKHSNFSSFVRQLNTYGFRKVDPDRWEFANEGFQRGQRELLRTIKRRRPPSSPSAQQGQAPSACLEVGQFGLDGEVHRLQRDRGILLAEVVKLRQEQQATRAQMQAMEKRITTAEQKQQQMTVFLARAMKNPSFIRMLVDREGLGGCRRELEDALSRKRRRPIEYLPRDGERSGTATESAVSDYISGLPVGVNGVAEADDDERRWERRGGGGGGEDTESFWAKLLNLGLEEKHREGRCDGEEGNGADVDNDVDDDVDVLVQSIYHLNPNPGSPGGK

SEQ ID NO: 7827 - protein, 186 aa, Zea mays
  Clone ID: TF_LIB5074-012-R1-XP1-F10.pep
MMTELAPNTIQTDENIPCFIRKTYKILEDGNYSNIICWNNEGTAVVIRNPADFAQNVLPIYFKHNNLNSFIRQLNMYDFHKKKTPDGEHVYFHELFQRDKKHLLRNIKRKSTEYSGGNTEKNKLGQELSRTKQDIATIINENFLLKQINREHLATITNLEAQANEISLKNQAILSQLMKKKKKKGP

SEQ ID NO: 7828 - protein, 212 aa, Zea mays
  Clone ID: TF_ZmC142676_2.pep
MEVAGAREPGSGGGGGGGGGGPAPFLLKTYEMVDDPSGDAVVSWSDASDGSFVVWNQPEFAARMLPTYFKHNNFSSFIRQLNTYGFRKIDPERWEFANEYFVKGQKHLLKNIHRRKPIHSHSHQPGALPDNERALFEDEIDRLSREKAALQADLWKFNQQQSGAVNQLEDLERRVLDMEQRQTKMLSFLQQARKNPQFGRKLVKMAEESPIF

SEQ ID NO: 7829 - protein, 226 aa, Zea mays
  unsure (1)..(226): unsure at all Xaa locations
  Clone ID: TF_ZmC8681_1.pep
AASRHVAAGGGRDGGXGQRSVPTPFLSKTYQLVDDPAVDDIISWNDDGSAFIVWRPAEFARDLLPKYFKHNNFSSFVRQLNTYGFRKIVPDRWEFANDCFRRGEKRLLCDIHRRKVSPATGAVTVAAAAAAAIPMALPVGSPVYSGEEQVLSSSSPEPPSLQQHPPAPSGSGSGGVVSGDVGEENERLRRENARLARELGQMKKLCNNILLLMSKYAATQQPDAAK

SEQ ID NO: 7830 - protein, 294 aa, Zea mays
  unsure (1)..(294): unsure at all Xaa locations
  Clone ID: TF_ZmC142676_1.pep
MEVAGAREPGSGGGGGGGGGGPAPFLLKTYEMVDDPSSDAVVSWSDASDGSFVVWNQPEFAARMLPTYFKHNNFSSFIRQLNTYGFRKIDPERWEFANEYFVKGQKHLLKNIHRRKPIHSHSHQPGALPDNERALFEDEIDRLSREKAALQADLWKFNQQQSGAVNQLEDLERRVLDMEQRQTKMLSFLQQARKNPQFVRKLVKMAEESPIFADAFHKKRRLPGLECITDATGTATSFFDDHSSSSRQEMGNLLNQHFSDKLKLGLCPAXGGNNLITLSTQSSHEDNGSPLGKH

SEQ ID NO: 7831 - protein, 156 aa, Zea mays
  Clone ID: TF_ZmC2234_2.pep
MERCGSWDCDAAAAQKAVPAPFLTKTYQLVDDPATDHIVSWGDDRVSTFVVWRPPEFARDILPNYFKHNNFSSFVRQLNTYGFRKVVPERWEFGNEFFRKGEKQLLCEIHRRKTSTSAAPPSPPPFFAAPHFPLFHPDAPHHHHHHQFVGGGDDGA

SEQ ID NO: 7832 - protein, 204 aa, Zea mays
  unsure (1)..(204): unsure at all Xaa locations
  Clone ID: TF_LIB4743-074-R1-K1-C12.pep
GRAAWLAPPGCRAGHHRCGCGRAAGGGSGXGQRSVPTPFLTKTYQLVDDPAVDDVISWNDDGSAFIVWRPAEFARDLLPKYFKHNNFSSFVRQLNTYGFRKIVPDRWEFANDCFRRGEKRLLCDIHRRKVTPPAAAATVVATIPMALPVDSPVYSGEEQVLSSSSSPEPPSLLQQQPTPSALVSGDLGEENERLWWENAWFARE

SEQ ID NO: 7833 - protein, 116 aa, Zea mays
  Clone ID: TF_LIB3356-009-P1-K1-H1.pep
MVAEQATTTVAVGEPPTATPQPAAAAAAGQRSVPTPFLTKTYQLVDDPAVDDVISWNDDGSAFIVWRPAEFARDLLPKYFKHNNFSSFVRQLNTYGFKKIVPDRWEFANDCFRRGE

SEQ ID NO: 7834 - protein, 159 aa, Zea mays
  Clone ID: TF_ZmC2234_1.pep
MERCGSWDCDAAAAQKAVPAPFLTKTYQLVDDPATDHIVSWGDDRVSTFVVWRPPEFARDILPNYFKHNNFSSFVRQLNTYGFRKVVPERWEFGNEFFRKGEKQLLCEIHRRKTSTSAAPPSPPPFFAAPHFPLFHPDAPHHHHHHQFVGGGDDGAVAA

SEQ ID NO: 7835 - protein, 167 aa, Zea mays
  Clone ID: TF_ZmC3537_1.pep
MHRARPTAHANDPDAPYAAAAMLLEPKLEDEELPLQQLASPGTFVSLDQLMPPVTAPAEPRPLEALLHGPQLPPFLSKTYDLVNEPALDGVISWGAAGNSFVVWDPSTFARDVLPHNFKHNNFSSFVRQLNTYVRTHNSSVPLFLPPHKSTIRRSVVGMLCFGSCPP

SEQ ID NO: 7836 - protein, 182 aa, Zea mays
  Clone ID: TF_ZmC10545_2.pep
MEGGSSLPPFLSKTYEMVDDPATDAVVAWTPLGTSFVVANQAEFCRDLLPKYFKHNNFSSFVRQLNTYGFKKIDPEQWEFANDDFIRGQQHRLKNIHRRKPIFSHSSHTQGSGPLPDTERRDYEEEIERLKCDNAALTSELEKNAQKKLVTEKRMQELEDKLIFLEDRQKNLMAYVRDIGQA

SEQ ID NO: 7837 - protein, 298 aa, Zea mays
  Clone ID: TF_ZmC12537_1.pep
MQLTERCACSSLCDVQGFRKIDPDSWEFANEGFLRGQRHLLRLIKRRRPAPPPPYLQASQSQGSCLEVGRFGGLDGEMERLRRDKSILLAEVVKLRQEQQSTRADMRAMEERLRHAEHKQVQMMGFLARAVQSPDLFQLLAQQQGRRRELEGAALLSAASRKRRRPIGAAPANGGLQQQEEEQQQGDDDDPTATRALFAELDERGTTSELENLALNIQGLGKRRQDGSEKQGGRARSQQQGGFETAELTDDFWEELLNEGMKGGAEAETLPPERRRPAWYVDALAQKLSSMSNNTTAK

SEQ ID NO: 7838 - protein, 146 aa, Zea mays
  Clone ID: TF_ZmC11401_1.pep
MAEQGGAAGEAAGSDPPAPAPATAPAPAPALAADAAGQRSLPTPFLTKTYQLVDDPAVDDVISWNEDGSTFVVWRPAEFARDLLPKYFKHNNFSSFVRQLNTYGFRKMVPDRWEFANDFFRRGEKRLLCDIHRRKVAPAPAAGLAT

SEQ ID NO: 7839 - protein, 327 aa, Zea mays
  unsure (1)..(327): unsure at all Xaa locations
  Clone ID: TF_ZmC1964_1.pep
MAFLVERCGEMVVSMESPHAKPVPAPFLTKKYQLVDDPCTDHIVSWGDDDTTFVVWRPPEFARDLLPNYFKHNNFSSFVRQLNTYGFRKLVXADRWEFANEFFRKGAKHLLAEIHRRKSSQPLPTPLPPHQPYHHHHHHLHHHLSPFSPPPLAQPVPSYHHHFQEEPIATATAPHGGAQAAAGGGNNEGSGAGAGAGGDFLAALSEDNRQLRRRNSLLLSELAHMKKLYNDIIYFLQNHVAPVTSPSSAAHASLPSAGGGGAAASSCRLMELDPADSPSPPRRPEADDGTDTDTVKLFGVALQGKKKKRAHQEDGDDGNHEQGSSDV

SEQ ID NO: 7840 - protein, 357 aa, Zea mays
  Clone ID: TF_ZmC12124_1.pep
MDKPVAPGIIKEELLEQQPPTQDGVGGGGDAPRPMEGLHEVGPPPFLTKTFDLVEDPATDAVLSWSRAGNSFIVWDPHVFADGLLPRLFKHSNFSSFVRQLNTYGFRKVDPDRWEFANEGFLRGQRHLLKMIKRRKPPSAVAPLRQQRAPASCLEVGEFGFEEEIDRLKRDKNILITEVVKLRQEQQSTKDHVRAMEERLRVAEQKQVQMMGFLARAMRNPEFFQQLAQQQDKRKELEDTISKKRRRPIDNTPFYSDGESEQLDSQLKMFESGVLNGLNEPELENLAVNIQELGKGSIDDGNLTQVSDQSELNDDFWAELLVEDFGDKAGQPELEGRTEDVNDLAQQLGYLSSSSPK

SEQ ID NO: 7841 - protein, 182 aa, Zea mays
  Clone ID: TF_ZmC363424_1.pep
EGVRQDDFIRGHKHLLKRIHRRKPVHSHSLRTQASGPLAESQRRELEDEISRLRYEKSLLLADLQRQNQQQRGISWQMQSLESRLAQMEERQRSVVASLCDILRRRGVVRVPASAMETTDHSSKKRRVPIPKTDLFVAGEQPKVEEQQVLPFLQAVGAEAPGVSTIRVLDAEPFEKMELALV

SEQ ID NO: 7842 - protein, 527 aa, Zea mays
  Clone ID: TF_ZmC3627_1.pep
MQGGVMAHAAAAAAAASTVTTAVAPPVTAHAVAVAPPVTAHAAAAAGNGSATAAPPPPFLMKTYEVVDDPATDDVISWGPGNNSFIVWNTPEFARDLLPKYFKHSNFSSFVRQLNTYGFRKVDPDRWEFANEGFLRGQKHLLKTINRRKPSLQGNSQPQQPQSQNAPVPSCVEVGKFGLEEEIERLKRDKNVLMQELVRLRQQQQTTDHQLQTLGKRLQGMESRQQQMMSFLAKAMQSPGFLAQFVQQNEKSRRRIVAANKKRRLPRQDGGLDSESAAASLDGQIIKYQPLINEAAKAMLRKILKLDSSHRLESMGNSENGNFLLENYMPGAQAFESSSSTRNSGVTLSEVSANPGLPYGGGGGTSSGLSAICPPEIQCPVVMDNMSSNQVPSMSAVPPVSKATIDMGIPEFSALADLVNEGSVDIPGGAFEMPGPEFPLPEGDDSVPIETDETMYNNNDETQSLPGIIDSFWEQFLVGSPLSADNDEVDSGSPQENGWSKVGNIGDLTEQMGLLSSTNHRDSGNGL

SEQ ID NO: 7843 - protein, 495 aa, Zea mays
  unsure (1)..(495): unsure at all Xaa locations
  Clone ID: TF_ZmC3627_2.pep
SPRAPRPTXTTPLLAVPGRAGLPYMTPPFLMKTYEVVDDPATDDVISWGPGNNSFIVWNTPEFARDLLPKYFKHSNFSSFVRQLNTYGFRKVDPDRWEFANEGFLRGQKHLLKTINRRKPSLQGNSQPQQPQSQNAPVPSCVEVGKFGLEEEIERLKRDKNVLMQELVRLRQQQQTTDHQLQTLGKRLQGMESRQQQMMSFLAKAMQSPGFLAQFVQRNENSRRRIVAANKKRRLPKQDGGLESESSAASLDGQIIKYQPSINEAAKAMLRKILNVDSSHMFESMGNSDNSNNNNNNLLEDYMPAGQAFESSSSTRNSGVTLAEVPANSGLAYVGTSSAICSPPAAPEMQCPVVLDNKAYKQVASMSAVPPVSSDMGIIPEFSDLADLVSVDILGGAFEMMPGPEFPLPEEGDDGTTMYNNNDEEAQSLPGIINSIWEQFLVGSPLSTDNEEVDSAGGLYAQEDGWSKVGNIANLTEQMGLVSSTNHRDSGNGLY

SEQ ID NO: 7844 - protein, 106 aa, Zea mays
  Clone ID: TF_LIB4185-044-R1-K1-H6.pep
TPLPPPPRGGGAPPPPPPLFVNPAGRKSFPPPPFFLGKTPPPPGGGGGTPGARHGVIGWGNGNNSFVFADPFVFFQTVLPGPFKPNNFSSFVRQLNPFVSLIPPPR

SEQ ID NO: 7845 - protein, 138 aa, Zea mays
  Clone ID: TF_LIB5116-017-A1-PF1-D3.pep
MDGLHTELALGLIGCGHGDLQTAPFVAKTYQMVCDPRTDALVRWGKGNNSFLVTDVAGFSQLLLPCFFKHGNFSSFVRQLNTYGFRKVHPDRWEFAHESFLRGQTHLLPRIVRRKKRGEGRCWRLVLVCSRRRRAAPA

SEQ ID NO: 7846 - protein, 57 aa, Zea mays
  Clone ID: TF_LIB4315-023-R1-N1-F11.pep
FCCMVRKIFIYPKEEVRKMNPGPLSCRSEEKAVVGEGSDAKDAKSASNPSLSSAGNS

SEQ ID NO: 7847 - protein, 54 aa, Zea mays
  Clone ID: TF_UC-ZMROMO17026D01_FLI.pep
LVADAMEYHQRVPHEKPAHVLTYEDRDGDWMMVGDVPWELFLGSVKKLRICKNR

SEQ ID NO: 7848 - protein, 87 aa, Zea mays
  Clone ID: TF_ZmC12865_5.pep
GRTAYLPGAELKGERRCLGQAFFHLCSGICVLLSRTPILPTSWSSRAVAFCLGKIAYCLLYDTFICVRKFVALHILEGSKENVHAVR

SEQ ID NO: 7849 - protein, 121 aa, Zea mays
  unsure (1)..(121): unsure at all Xaa locations
  Clone ID: TF_LIB4303-018-R1-M1-C3.pep
ISDIQFLDRNLRGSSSXVQHRTRTYTKVHKRRAARRANDTDRQNAYXELXHDXDRXFGIEGHLINQNRPGWKLVYDDHYVDVPLVVDYPCEDFLNCARCIRILSPHDERXMMLXIDYGDSF

SEQ ID NO: 7850 - protein, 175 aa, Zea mays
  Clone ID: TF_LIB3632-008-Q1-K6-C5.pep
AWAVSSSSPAAGAGTAAPSKRAKADAAPNSPGTVASGHPQSSFGVVGWPPIRTFRMNSLFNQAKENASEAGAKKPIVEPDMQEDKEESKKGRTVGWVKVNMEGDIIGRKVDLNAHRSYKTLASALELMFMKPSIGLCTSSKSYSLIFYFHYIYRYNPVAYLAIHLGHDTVLDIVS

SEQ ID NO: 7851 - protein, 66 aa, Zea mays
  Clone ID: TF_LIB5116-066-A1-PF1-A4.pep
DLRHLLETYALYFVVPTLLYACYFHPCKWLVSSARATAVFDDSYVFCHSCPEPVVRRKCEGCKTII

SEQ ID NO: 7852 - protein, 68 aa, Zea mays
  Clone ID: TF_ZmC784_7.pep
RGYSLSLSLSDGAPYLRKIDLKTYKNYKDLSTALEKMFSGFSTGEMSRGYSLSLSLSDGASVSNYVSF

SEQ ID NO: 7853 - protein, 75 aa, Zea mays
  Clone ID: TF_ZmC435820_1.pep
GDDPWQEKGSSVSCIKILSGHKVKQMGKHPLELLSSAPARRFGSNCAVSVSRQELRSLSPGVGAVGSVGGGLPAR

SEQ ID NO: 7854 - protein, 145 aa, Zea mays
  Clone ID: TF_LIB5025-034-A1-XP1-E4.pep
MSGGAASGSGSGGASFQQHAKRRRPPAGPQRLTLSVQDADADDAAAAVVPPVTVVLDGRCICHRVHLNRHTGYRSLAGTLRRMFVDSDDDSDQQQQQQRRRAEDDLDLANAVPGHVVAYEDMEDDLLLAGDLKWNSIDLLSRWCA

SEQ ID NO: 7855 - protein, 74 aa, Zea mays
  Clone ID: TF_LIB4171-041-R1-K1-C3.pep
KMFSGFSTGKDGFFESPKEGENVFPSEAKDGDWMLVGDVPWEMFVDFFPRVGFLKGSNAIGLAPRAGFKSKNCH

SEQ ID NO: 7856 - protein, 112 aa, Zea mays
  unsure (1)..(112): unsure at all Xaa locations
  Clone ID: TF_jC-zmX700440508a1.pep
ISRGGTGTVNIHHAPYSAKDIQSTAQGALTRSWTTAHKHGVLLGMGEDLCKSTDYGELQSELDKMLDFXGELVSRYQNWEMVYTDHQGDMMLEGDDPREDDCNITRKSYIYT

SEQ ID NO: 7857 - protein, 82 aa, Zea mays
  unsure (1)..(82): unsure at all Xaa locations
  Clone ID: TF_LIB3912-054-Q6-N6-B5.pep
TDNEGDMMLVGDDPXXEFCDMVHKIFIYTREEVERMNPGALNARLEDCLSDSLGRGLASKEPRSGPSTSAVDFENRANLSSQ

SEQ ID NO: 7858 - protein, 315 aa, Zea mays
  Clone ID: TF_ZmC9734_1.pep
RGKKLCVPLYPELPLEGQFPAPMFHGSPLLGRGGAGGPMCYFPDGTPAGIQGARHAQFGISLSDLHLNKLQPGLSPHGLHRQLDHGVQVQVQQPRIAAGLIVGGHPAARDDVSCLLTIGTPKSKKPPSDVKKASTAAAPQLMLFGKAILTEQQISLGGGNVVPALLAKKSPSDDDDDVAERTVSNSDVSSPGRSNQDGTSSGGGPAARACWQEEECNNRAAGSEDDLLGHCKVFMQSEDVGRTLDLSAVASYEELYQRLADMFGVDKAELTSHVFYRDDASGALKHPGDEPFSEFTKTARRLTILTDESSDSLAR

SEQ ID NO: 7859 - protein, 98 aa, Zea mays
  Clone ID: TF_LIB3608-010-Q1-N6-C6.pep
CQDNKAAATATDDDDLLGHCKVFMQSEDVGRTLDLSAVASYEELYQRLADMFGVDRAELTSHVFYRDGASGALKHAGDEPFSEFTKTARRLTILTDAR

SEQ ID NO: 7860 - protein, 193 aa, Zea mays
  unsure (1)..(193): unsure at all Xaa locations
  Clone ID: TF_LIB4979-126-Q1-K1-G8.pep
LPLAPLTGTLLVTTITDTPHLTRPTRQVLAGPHDHPASRPLVLGLSPAVAAADDHHDLKAMHLRLGVPGCESPDXRDESDITGPLHLLPSIVGYRAPADQVPTPSTEADSDQQKKAAQYSDQWNVEETTASDAXDYRRPASPPIPTYRENTMSTTHMKGIQEDXEAKHDQLFLHIQVSMDGAPHLKKIDLMTY

SEQ ID NO: 7861 - protein, 139 aa, Zea mays
  Clone ID: TF_LIB3354-016-P1-K1-B5.pep
GQEAPRRRGGGGKQARRGGSTPGGQLLVTNSCRAPVVGWPPVRSYRKSCFQQAKQQAVSSSSKAADKEDAAAPAPSCTASAAASNATASAGAGSFVKVSMDGAPYLRKLDLRMYKGYRELREALEAMFVSFGSANNNNN

SEQ ID NO: 7862 - protein, 99 aa, Zea mays
  Clone ID: TF_LIB4977-002-R1-K1-H7.pep
GRAAYLPGAELKGERRCLGQAFFHLCSGICVLLSRTPILPTSWSSRAVAFCLGKIAYCLLYDTFICVRKFVALHILEGSKENVHVSGENFYKKKKKKGP

SEQ ID NO: 7863 - protein, 244 aa, Zea mays
  Clone ID: TF_ZmC148771_1.pep
MLVRRSLSRQESSLLYPGLRRPGAVGQTVPTPSVPGTDLTIGGAPARDGVPCALSVGASKQNPDAVKPAGLVLFGRTILTEHQMSLSSSGGATSPAATGNSSLCWTAEKGPNVSEGSGSGSGSGVIQNSPTGKNTSSERLPWFGDGSSQQASEPGLEPGQCKVFVESDTVGRNLDLSALGSFDELYGRLSEMFGVEGAEMRSRVLYRGATGEVRHAGDEPFSDFVKSARRITILTDAGSDNLGS

SEQ ID NO: 7864 - protein, 45 aa, Zea mays
  Clone ID: TF_jC-zmX700344041a1.pep
FGSRFYTHFSIGKDAKPTWKLVDPVNGTAHLPTYKDRVRDWMLVG

SEQ ID NO: 7865 - protein, 104 aa, Zea mays
  unsure (1)..(104): unsure at all Xaa locations
  Clone ID: TF_LIB4172-001-Q1-K1-C12.pep
GKKVWRLFGPRGQMEDPFRSGWHLVFVSRGGNVLLVGDVPRQGFLYSVSCIKILSPXEVQRMGKPGLPLLRAAPSKRVGNGSARSASIQKPRGLWAGGAPVGSV

SEQ ID NO: 7866 - protein, 82 aa, Zea mays
  Clone ID: TF_ZmC2665_2.pep
RTRGRTRGRTRGRTRGEDHEKDVLLVGDDPWEDFVNCVRCIRILSPQEERQMRLASDYGDSFVGNQACSSSDGGRPWRVTGD

SEQ ID NO: 7867 - protein, 74 aa, Zea mays
  Clone ID: TF_701186148_FLI.pep
VGDLPWEVDYLRGWRSSPLGRFFAYRQRGTAVASQSHTGAVSYFTSICRKLKIMRGSDAVGIAPRTVEQTGQNK

SEQ ID NO: 7868 - protein, 39 aa, Zea mays
  Clone ID: TF_ZmC1098_3.pep
SYLFLFSYFTSICRKLKIMRGSDAVGIAPRTIEQTGQNK

SEQ ID NO: 7869 - protein, 100 aa, Zea mays
  Clone ID: TF_ZmC2833_20.pep
TRKKSDLWLCTTTHHGDSTRLSTPFACLAKHTHTHTHTPLLGAQKKKNKATTHHSTHAQSFPLSLPLVPSKQLHLSPRHVSGLLLAAAPLLADNARGEGT

SEQ ID NO: 7870 - protein, 201 aa, Zea mays
  unsure (1)..(201): unsure at all Xaa locations
  Clone ID: TF_LIB4828-045-R1-N1-D2.pep
MAECKDDDSGRRSPSSSMDSSTHPPALSTASSASRRPPERRDQLSPDLQLGLSLSPASSALLVAETNNSIVPSTPRNQALPDWPPIKPFLRSALTASARRRRTLFVKVYMEGVPIGRKLDMLLLDGYSSLLAKLCHMFKASITXVPHEKAAHVLTYEDHDGDWMMVXDVPXELFLSVKSRCENRQVLDSKLFMRGDSPLSF

SEQ ID NO: 7871 - protein, 103 aa, Zea mays
  Clone ID: TF_ZmC258_2.pep
YIYRSLPQILLLKEAYISHLTKLHGQMGNNGTQMPEFLLPGGSCWHGSPKASKTQGNRTPTTSSAHGAMVHGQFTPIVNGGNNKISQVIQTVSLRRSASCCHC

SEQ ID NO: 7872 - protein, 136 aa, Zea mays
  unsure (1)..(136): unsure at all Xaa locations
  Clone ID: TF_LIB3597-060-Q1-K6-A9.pep
RVLSGLAGSTARTPGSRSPYVLAGSEPCAAADGEGSLYLYFWKGCGLRDPDRKRACYDAGPRIDPPQVGAFYDAEPAPKDGVAGWPPVRSYRKXARRRRGLQKAVKVAKEASDGAPYLRKEDLQAYAGYDQMHRAL

SEQ ID NO: 7873 - protein, 60 aa, Zea mays
  unsure (1)..(60): unsure at all Xaa locations
  Clone ID: TF_LIB4759-002-R1-N1-D4.pep
IIFNIEQSLSTIEDRHSSARTRTHASSIRASHDXKFPAKCGEQAAKRTLEITSKCLIHHR

SEQ ID NO: 7874 - protein, 84 aa, Zea mays
  Clone ID: TF_ZmC615_1.pep
SEDVGRTIDLSVFGSYEELYGQLADMFGSEKAEVMSHLCYRDAAGAVKRTGDEPFCDFMKVARRLTIVESTEGRLQKPLVEYMA

SEQ ID NO: 7875 - protein, 229 aa, Zea mays
  Clone ID: TF_LIB5116-030-A1-PF1-G6.pep
SLQSSLSPHGLHQVDHGGQPPRIAAGLIIGHPAARDDISCMLTIGSHQNNNNNKSDVKKASPQLMLFGKPILTEQQITLGNSGGFSPSAARKSSSEMSAEKSANNSDLPSPQSNQNGTTKNLSCGGVPLCQDNKVLDLGLDIGHCKIFMQSEDVGRTLDLTAVGSYEELYRRLSDMFGMEKAELMSHVFYRDAAGALKHTGDEPFSDFTKTARRLTILTDTSGDSSVAS

SEQ ID NO: 7876 - protein, 77 aa, Zea mays
  Clone ID: TF_jC-zmX700553368a1.pep
MKATPLDKVNMDGAPYLSKVDLMAYSTYKDLSLALKRISGTCTLCGNNHNQGRLLDPASDTVDIDTTHDDVDRDGTL

SEQ ID NO: 7877 - protein, 215 aa, Zea mays
  Clone ID: TF_LIB4738-131-A1-K1-C12.pep
MHTCGQHMAGCKQDDDAVGRSPSSSSMDSSSSTHPPALSAASSSGFRPTTTERRDDLSTDLQLGLCRLSPAAPSALLVVPETKSIPSTPRTTQDWPPIKPFLRSALTASARRRRRTLLVKVYMEGVAIGRKLDLLLLDGYDSLLAKLRHMFKASITSSMAGCKQDDDAGGRSPSSSSMDSRSTTHPPGLSAASSFVFRPTKERRDDFSTDLSLGL

SEQ ID NO: 7878 - protein, 73 aa, Zea mays
  unsure (1)..(73): unsure at all Xaa locations
  Clone ID: TF_LIB3156-001-Q1-K1-D9.pep
LNDFMKNDNLMHLLNLXDYVPTYXHKDPDCILDCDHPCEMLIESCKKLHIMKCTEAIELSPRAMDKCNIRISS

SEQ ID NO: 7879 - protein, 176 aa, Zea mays
  unsure (1)..(176): unsure at all Xaa locations
  Clone ID: TF_14203817.pep
MAFDSIXSAIDXGVMLXGXSCPPAPPRGMRXFXXVYRRGAVGXSIDMGGFSGYXXLXHAVARMFGMEGXLGXXRXMGWXLVYPXHGDDXILLLGXAPWGXFVNCVXCIXXXSPXXVPQMXXDGXLGXXVLSDRACXXXVGGXAWXPRRARXPGXPSIGFCGXFGPGPGGSGWGFWL

SEQ ID NO: 7880 - protein, 101 aa, Zea mays
  Clone ID: TF_ZmC427602_1.pep
NGELKGFNKEWMVVFPDYEGDIILVGGDPWNKFFSMGPKIFVYPRGGVQGMNPGALNLRPEENGLPNLTERGSAFIFFVKKAPGYQSAFLFKSDNCLCLGN

SEQ ID NO: 7881 - protein, 61 aa, Zea mays
  Clone ID: TF_ZmC1117_6.pep
DALFTNSFSAAAEGGGDHHQHAIAYEDKDGDLMLAGDVPWDMFISSCKKLRIMKGSASEAR

SEQ ID NO: 7882 - protein, 78 aa, Zea mays
  Clone ID: TF_ZmC965_4.pep
RRIMLAGDDPWNEFCHMVHKILIYTREEVERMNPGALNSRLEDCLSDSLGRGVASKEPRSGPSTSAVDSENRANLSSQ

SEQ ID NO: 7883 - protein, 127 aa, Zea mays
  Clone ID: TF_18178970.pep
APTPDRHACRRRTGNRMTEADLNVRAAEASSGQDLHCCTYIAQVARGKLANVTTTQFWTRFQHTIPTTTYDLLTYYMSCACAAGMQLTSLTSKHFSSISSLRDFDFGHAHLPLPSPSSCHIIALFLL

SEQ ID NO: 7884 - protein, 160 aa, Zea mays
  Clone ID: TF_LIB3689-252-Q1-K6-C5.pep
MSVDTERSSTESSAASGLGYEDTALALTLRLPGSDPGRSSPLAAPSDAAPSPKARVVGWPPVRSYRKNALADSSKASRAANFVKVAVDGAPYLRKVDLQAYGGYDQLLRALQDKFFSHFTIRKFADDERKLVDAVNGTEYVPTYEDKDGDWMLVGDVPWK

SEQ ID NO: 7885 - protein, 305 aa, Zea mays
  Clone ID: TF_ZmC784_2.pep
HPSNRSLFAPAPTRTLSPSLPFPLPGSHSHPFRLPTQTAHELTATSHVPHPLVHVLLLPMSPPLELDYIGLSPPAAAAAAENDELKGTELRLGLPGSGSPDRRVVAATATTLDLLPAKGAKRGFSDEAPPPSPVATAGKGKKVAEEEYDEKKVAATPQPAAKAQVVGWPPVCNYRKNTMTTTQLEGSKEDGDAKQGQGFLYVKVSMDGAPYLRKIDLKTYKNYKDLSTALEKMFSGFSTGKDGSSEYRKDGEYVLTYEDKDGDWMLVGDVPWEMFAGSCRRLRIMKGSDAIGLAPRAADKSKNRN

SEQ ID NO: 7886 - protein, 138 aa, Zea mays
  unsure (1)..(138): unsure at all Xaa locations
  Clone ID: TF_LIB3332-001-P1-K1-G7.pep
HASGTRVVGWPPVRXYRKNALSDSGEGNRSSSFVKVAVDGAAYLRKVDLQAYGGYDQLLRALQDKFFSHFTISQCFVHRPALGLVFRSALLCLIERRLRLMKGSEAVNLGTYVFSSKALPSFMCYKIRSDCKPSGSFF

SEQ ID NO: 7887 - protein, 205 aa, Zea mays
  Clone ID: TF_ZmC1407_1.pep
MAGCKQDDDAVGRSPSSSSMDSSSSTHPPALSAASSSGFRPTTTERRDDLSTDLQLGLCSLSPAASSALLVVAESKSVLSTPRGSRTTQDWPPIKPFLRSALTASARRRRRTLFVKVYMEGVAIGRKLDLLLLDGYDSLLAKLRHMFKASITFADAMEYHQRVPHEKPAHVLTYEDRDGDWMMVGDVPWELFLGSVKKLRICKNR

SEQ ID NO: 7888 - protein, 168 aa, Zea mays
  Clone ID: TF_ZmC2230_2.pep
MEMIDAELRLGPPGSNNRDVINVVQPALAAAKRPSSSVLESEASGTDDHDHDDAAPTSKVQVVGWPPVRVYAAGESQQGGGGLYVKVSMDGAPYLRKVDLRTYGGYRELRDALDALFGCFSSSADGGCQFAVAYEDKDGDLMLAGDVPWEMFICSCKKLRIMRGSEAR

SEQ ID NO: 7889 - protein, 228 aa, Zea mays
  Clone ID: TF_ZmC13155_2.pep
MAWNARFGDDEEGSGLELSLGLPGYFSGSPDQAAGFEEKASRGSAAAPPPPPPAAARAKGSDGFKARPAAAAPVVGWPPVRAFRRNLATSSSKPSSHGGKEPAASADGGNKGLFVKVNMDGVPIGRKLDLAAHAGYDTLSAAVDSLFRGLFAAQAAGPGGEQQAVAGILSGGGGGEHTLVYEDDEGDQMLVGDVPWPMFVATARRLRVLKSSDLSPSSLRAARAAAEC

SEQ ID NO: 7890 - protein, 212 aa, Zea mays
  Clone ID: TF_ZmC31703_1.pep
TEGLLVSAINPVKCQSNLSTDVEINYRIQKDAQQEISTSMVSQSFGQSDIAFNSIDSAINDGVMLNRNSCPPAPPQRMRTFTKVYKRGAVGRSIDIGRFSGYEELKHAVARMFGIEGQLEDRQRIGWKLVYTDHEDDVLLLGDDPWEEFVNCVKCIRILSPQEVQQMSLDGDLGNNVLSNQACSSSDGGNAWKPRRDQNPGNPSIGFYDQFE

SEQ ID NO: 7891 - protein, 200 aa, Zea mays
  unsure (1)..(200): unsure at all Xaa locations
  Clone ID: TF_LIB4742-105-Q1-K1-G3.pep
DRLFCWRXRRRRTWPPGPPGAPGSPCPSSGRASAGSGRRPCXPXRMSRPRRRRWRLRRLRTXVQLXRXAPQPSLFVGRLAAAAADGLLLCLLEAALPVRPHRWPSDHGRLGRRGCCLRVALVCLLLLGGGALLAPSRVGRRRGHLQLGLLLVLAAVVHGARQAKPQLGRHEVSHDGFHVPMHSALKSRVDLLLRLQQLGL

SEQ ID NO: 7892 - protein, 74 aa, Zea mays
  Clone ID: TF_ZmC1167_6.pep
TLQISKVMELQTFLRQKQQVTAVHIAIYMSREDPQNSDEVRSLVPPTSQATKSQCILVTVELRLRLIGRLLVPS

SEQ ID NO: 7893 - protein, 234 aa, Zea mays
  Clone ID: TF_ZmC1428_1.pep
MKLKQEQADDDCSKMQGGRGLMSSLELRLGMSSDNGDASCGGDPWLGVGVHPWSLAGRQAEKVALEQDHQRPPPPQPVGWPPVGAFRRSHLQVGAKAVEEPTSKVKLGEQGPAPARSTMFVKVNMEGCAVGRKVDLQAHCGYASLSRALQAMFHGFLSDGQWRIAGREEDDDDDNEQQPEPTKKGESKSNKKAYILLYEDNEGDRMLVGDVPWELFMASVKRLYIAQDPRKTKN

SEQ ID NO: 7894 - protein, 282 aa, Zea mays
  Clone ID: TF_ZmC965_3.pep
MPEGANFTGKSAFTSLQDHGTDKCSTGCFGHIESSSHTDHASSSLIRPQPLVLGNGVQKSKGTSFKLFGIPLGSPEKSEPLVSPPSVAYDGKLQTSPSEKGNQLDVVEVDNCSHPSKTVKPLDGPQSDSITENNQPSPEATLNIQNKVQSSSTRSCKKVHKQGSALGRSIDLTKFACYDELIAELDQMFDFDGELKSPCKSWLVVYTDNEGDIMLVGDDPWNEFCDMVHKIFIYTREEVERMNPGALNSRSEDSLSDSLGRGVASRDPRGGGSTSALDSENC

SEQ ID NO: 7895 - protein, 296 aa, Zea mays
  unsure (1)..(296): unsure at all Xaa locations
  Clone ID: TF_ZmC1433_1.pep
MGDVAKDLTAGTVGGAANLIVGHPFDTIKVKLQSQPTPAPGQLPKYAGAIDAVKQTVAAEGPRGLYKGMGAPLATVAAFNAVLFSVRGQMEAFLRSEPGVPLTVKQQVVAGAGAGIAVSFLACPTELIKCRLQAQSSLAEAATASGVALPKGPIDVAKHVVRDAGAKGLFKGLVPTMGREVPGNALMFGVYEATKQYLAGGPDTSGLGRGSQVLAGGLAGAAFWLSVYPTDVVKSVIQVDDYKKPKYSGSLDALRKIVAADGVKGLYKGFGPXPPRSRRSNAATCGAYEITRSVLG

SEQ ID NO: 7896 - protein, 123 aa, Zea mays
  unsure (1)..(123): unsure at all Xaa locations
  Clone ID: TF_LIB3357-037-P1-K1-E7.pep
MEMIDAELRLGPPGSNNRDVINVVQPALAAAKRPSSSVLESEASGTDDHDHDDAAPTFKVHVVGWPPVRVYRKNAFHAAAEAKRTRRCEQQGGGGLYVKVSMDXAPYLRKVDLRTYXGYRELR

SEQ ID NO: 7897 - protein, 100 aa, Zea mays
  Clone ID: TF_ZmC1428_2.pep
VDLQAHCGYASLSRALQAMFHGFLSDGQWRIAGREEDDDDDDEQPEPTKKGENKSNKKAYILLYEDNEGDRMLVGDVPWELFMASVKRLYIAQDPRKTKN

SEQ ID NO: 7898 - protein, 267 aa, Zea mays
  Clone ID: TF_ZmC784_3.pep
GKTTTLRFDSHSHSPFPLSGSHSPPTGYPTHHTQTATPHLPRPPVHVLLLPMSPPLDLDYIGLSPAAAAAAAHDDLKGTELRLGLPGSGSPDRRVVAATATTLDLLPAKGAKRGFSDEAPTPSPGAASGKGKKVAEEEDDKKVAATPQPVAKAQVVGWPPIRSYRKNTMSTTQLKGSKEDAEAKQDQGFLYVKVSMDGAPYLRKIDLKTYKNYKDLSTALEKMFSGFSTGEMSRVTLLSRMARQYVIVFHFDVDGVRSTSRSLLKAS

SEQ ID NO: 7899 - protein, 198 aa, Zea mays
  Clone ID: TF_ZmC1407_2.pep
MAECKDDDSGRRSPSSSMDSSTHPPALSTASSASRHPAERRDQLSADLQLGLSLSPASSALLVAETNNSIVPSTPRNQALPDWPPIKPFLRSALTASARRRRTLFVKVYMEGVPIGRKLDMLLLDGYSSLLAKLCHMFKASITYADAVEYHQRVPHEKAAHVLTYEDHDGDWMMVGDVPWELFLGSVKKLRIAKTDRC

SEQ ID NO: 7900 - protein, 166 aa, Zea mays
  Clone ID: TF_ZmC2833_10.pep
SSGPEDAPKKRDCETDADADAAPPPAAKAQLVGWPPVRSYRKSCFQQQAAAKNKPAAALAEEAPAAGGLFVKVSMDGAPYLRKVDLKMYKGYRELREALEAMFLCFSGAADAPAVNPSDFAVTYEDKDGDLMLVGDVPFGMFISTCKRLRIMKGSEARGLGSAKNN

SEQ ID NO: 7901 - protein, 228 aa, Zea mays
  Clone ID: TF_ZmC1405_3.pep
MAGADVDVGTELRLGLPGGGAAAAKKDTIDLKLKLPTAGMEEAAAAARPEPAAEKAKRPAEAPAADAEKPPAPKAQAVGWPPVRSYRRNAMTVVQAVRSKKEEEPEKQQQPAAANAFVKVSMDGAPYLRKVDLKTYGSYKDLSAALKKMFGTFVTATGNSMNEGRLVDPAGDADDVVTTYEDKDGDWMLVGDVPWEMFVDSCKRLRIMKSSEAIGLAPRTKDKCKNKS

SEQ ID NO: 7902 - protein, 112 aa, Zea mays
  Clone ID: TF_LIB3689-238-Q1-K6-B1.pep
IKVTNQLVSCLEHRAKTLCLRQDTYLEFFYIHPPKHRKQSTRIIQYDSMNTIPRQTHGNTPLAKKNRHDVALFYRIGKDYPYLFYVPNPSRGFYVRKREYLFHSIKNNKPIL

SEQ ID NO: 7903 - protein, 111 aa, Zea mays
  Clone ID: TF_ZmC1206_12.pep
RSLPSSSGSRSRLVSPHPLLLLLLKKWKVIYTDDEDDMMLVGDDPWSEFCRMVKRIYIYSYEEAKSLTPKAKLPAIGGDTGVKPDPSKLPAESDVPQSDSDNSAPVAADKD

SEQ ID NO: 7904 - protein, 128 aa, Zea mays
  Clone ID: TF_LIB3116-025-P1-K1-C6.pep
PPLRASRRNTFQAEAAETAKRADQNQNQGGLSLKVSMAGPPYLRRGDLRLSKGSRELRGVLDPLLTNSFSGGEKGGGNNNQNALVYKAKDGNLMLAENVPWDMLIFSCRKLRIMKGFAFEARGSLIHT

SEQ ID NO: 7905 - protein, 240 aa, Zea mays
  Clone ID: TF_ZmC784_12.pep
CAALEAAGRDHHTQTATPHLPRPPVHVLLLPMSPPLDLDYIGLSPAAAAAAAHDDLKGTELRLGLPGSGSPDRRVVAATATTLDLLPAKGAKRWFSDEAPTPSPGAASGKGKKVAEEEDDKKVAATPQPVAKAQVVGWPPIRSYRKNTMSTTQLKGSKEDAEAKQDQGFLYVKVSMDGLSEYRKDGEYVLTYEDKDGDWMLVGDVPWEMFADSCRRLRIMKGSDAIGLAPRAADKSKNRN

SEQ ID NO: 7906 - protein, 260 aa, Zea mays
  Clone ID: TF_ZmC1405_6.pep
MAGADVDVGTELRLGLPGGGADAAKAAKRGFEDTIDLKLKLPTAGMEEAAAAAAAKPEPAAEKAKRPAEAPAADAEKPPAPKNAEPVANKNINMHDLATIVKKYQFEALTRIIVTRAQAVGWPPVRSYRRNVMTVQSVKSKKEEEPEKQQSAANAGGNGSAFVKVSMDGAPYLRKVDLKMYNSYTELSVALKKMFSTFTTSGNNMNEGKLVDPVSGADVVTTYEDKDGDWMLVGDVPWEMFVESCRRLRIMKSSEAIGLG

SEQ ID NO: 7907 - protein, 383 aa, Zea mays
  Clone ID: TF_ZmC790_1.pep
MLFDCLSLLTSSPRTSSAPRTTPSISMGDSGGRRGPPLPRLLDLIPDGKERKGREAQDAGRSKNSGGFGGEEDAKLELKLGPPGLTLVEEGTTATVPRDGGVLQRETTTTPTLSLGCFPRNPSKPAVDAATAGTKRGFFDTAVEAKTEGRDERMEQQAGAGCGNELALDEKTAAAAASERQKGSCCPPTPQHAPPAATVHSGAHVLQLGRRPPTRPPTRPPTRPRTRGLAHHHHGSSSKQPTEPQNSEASRKEKPACKKNPLVKINMDGIPIGRKVDLAAYDSYERLSLGVKELFHGFLQAQKDMSPTAGKIFSQLLDGSGEYTLVYEDNEGDRMLVGDVPWNVFVSTAKRLRVLRSSELAKGLVGTRPPQIAVAPRRGPPDC

SEQ ID NO: 7908 - protein, 122 aa, Zea mays
  Clone ID: TF_ZmC790_2.pep
LVKINMDGIPIGRKVDLAAYDSYERLSLGVKELFHGFLQAQKDMSPTAGKIFSQLLDGSGEYTLVYEDNEGDRMLVGDVPWNVFVSTAKRLRVLRSSELAKGLVGTRPPQIAVAPRRGPPDC

SEQ ID NO: 7909 - protein, 229 aa, Zea mays
  Clone ID: TF_ZmC2833_4.pep
MEVAAASAAGYGFKADDDVDSLRATELRLGLPGTEEEEAEESQNKAPPPPPSTPRGKKRDVVASSGPEDAPKKRDCETDTDAAPPPAAKAQLVGWPPVRSYRKSCFQQQAAAKNKPAAALAEEAPAAGGLFVKVSMDGAPYLRKVDLKMYKGYRELREALEAMFLCFSGAGAADAPAVNPSDFAVTYEDKDGDLMLVGDVPFGMFISTCKRLRIMKGSEARGLGSAKNN

SEQ ID NO: 7910 - protein, 237 aa, Zea mays
  Clone ID: TF_ZmC1405_1.pep
MAGADVDVGTELRLGLPGGGADAAKAAKRGFEDTIDLKLKLPTAGMEEAAAAAAAKPEPAAEKAKRPAEAPAADAEKPPAPKAQAVGWPPVRSYRRNVMTVQSVKSKKEEEPEKQQSAANAGGNGSAFVKVSMDGAPYLRKVDLKMYNSYTELSVALKKMFSTFTTSGNNMNEGKLVDPVSGADVVTTYEDKDGDWMLVGDVPWEMFVESCRRLRIMKSSEAIGLAPRTKDKCKNRS

SEQ ID NO: 7911 - protein, 234 aa, Zea mays
  unsure (1)..(234): unsure at all Xaa locations
  Clone ID: TF_ZmC13155_1.pep
MAWNGRFGDDEEGSGLELSLSLPGYFSGSPTQAAAGFEDKADGGSAAAAAAGRAKGSNGFKARPAAAAPVVGWPPVRAFRRNLASASSKPSRDPPPXTEETSPRAAGGKAVEGGNKGLFVKVNMDGVPIGRKLDLAAHAGYDTLSAAVDSLFRGLFAAQAAGPGGERQAVAGILSGGGGGEHTLVYEDDEGDQMLVGDVPWQMFAATARRLRVLRSSDLNPSSLRAATRKRAAA

SEQ ID NO: 7912 - protein, 108 aa, Zea mays
  unsure (1)..(108): unsure at all Xaa locations
  Clone ID: TF_ZmC37343_1.pep
RSELERLFGLEGQLEXDPVRSGWQLVFVDRENDILLVGDDPWQEFVNSVWCIKILSPQDVQQMVRGGGDLLSTTGVRTLQGSVCDDYSAGHDMQNLTGSIAPVVPLDY

SEQ ID NO: 7913 - protein, 156 aa, Zea mays
  Clone ID: TF_ZmC792_1.pep
SFRRNLANGSSSKQSLEQQQQNDDEASCDKAKQTCKRSPLIKINMDGIPIGRKINLSAYDSYQKLSSAVQDLFCGFLDAAQKDESRGRGAEEKMFSGLLDGTGEYTLVCEDSEGGRTLVGHLPWNVFVSTAKRLRVMESSELPHGLIKTASKRADG

SEQ ID NO: 7914 - protein, 110 aa, Zea mays
  Clone ID: TF_LIB3245-012-P2-N1-D10.pep
ARNSARVVKVAVDGAPYLRKVDLAAHDGYAALLRALHGMFASCLVAGAGADGAGRIDTAAEYMPTYEDKDGDWMLVGDVPFKMFVDSCKRIRLMKSSEAVNLSPRTSSRQ

SEQ ID NO: 7915 - protein, 198 aa, Zea mays
  Clone ID: TF_ZmC6227_1.pep
MQQDLRNSERRNPEQAHPVMSASSTNSAASPAVSGLDYDDTALTLALPGSSAEPAADRKRAHADHDKPPSPKARAVGWPPVRAYRRNALRDEARLVKVAVDGAPYLRKVDLAAHDGYAALLRALHGMFASCLVAGAGADGAGRIDTAAEYMPTYEDKDGDWMLVGDVPFKMFVDSCKRIRLMKSSEAVNLSPRTSSRQ

SEQ ID NO: 7916 - protein, 118 aa, Zea mays
  unsure (1)..(118): unsure at all Xaa locations
  Clone ID: TF_ZmC3003_2.pep
FWDTSPIPLHGGYALLLVGTLEWNRYRQNLQVHKQGVALDRSMDLSRCTDXGELKAELDMMFEFEGELVSANQNWQIVYTDNEGDMMLVGDDPWENLMWLCMMYFIFWHTMHKNKCLL

SEQ ID NO: 7917 - protein, 211 aa, Zea mays
  Clone ID: TF_ZmC13783_4.pep
EQQQQQAWKQKFMGSQSMSFGGSVSLNSPTTKDGPVDNKIGRDVQNQTLFSPQVDSSSLLYNMVPNLTSNVADNNISTIPSGSTYLQSPMYGCLDDSSGLLQNTGENDPTTRTFVKVYKSGSVGRSLDITRFSNYAELREELGQMFGIKGQLDDPDRSGWQLVFVDRENDVLLLGDDPWESFVNSVWYIKILSPEDVHKMGKPGNDPRYLS

SEQ ID NO: 7918 - protein, 122 aa, Zea mays
  unsure (1)..(122): unsure at all Xaa locations
  Clone ID: TF_ZmC13783_6.pep
MYGCLDDSSGLLQNTGENDLXTRTFVKVYKSGSVGRSLDITRFSNYAELREELGQMFGIKGQLDDPDRSGWQLVFVDRENDVLLLGDDPWESFVNSVWYIKILSPEDVHKMGKPGNDPRYLS

SEQ ID NO: 7919 - protein, 81 aa, Zea mays
  unsure (1)..(81): unsure at all Xaa locations
  Clone ID: TF_ZmC1249_9.pep
KMFDFXGELVSGSQNWQIVYTDDEGDMMLVGDDPWEEFCSIVRKIYIYPKEEVQKMNSKSAAPRKEESPAPGGGGCPPPNE

SEQ ID NO: 7920 - protein, 136 aa, Zea mays
  Clone ID: TF_LIB4746-023-R1-K1-H9.pep
CRRARPTPRLPRPCPASTTTTRRSPSRSRAPPPSPPPIASAPYLRKVDLAAHDGYAALFRALHGMFASCLVAGAGADGAGRIDTAAEYVPTYEDKDGDWMLVGDVPFKMFVDSCKRIRLMKSSEAVNLSPRTSSRQ

SEQ ID NO: 7921 - protein, 212 aa, Zea mays
  unsure (1)..(212): unsure at all Xaa locations
  Clone ID: TF_LIB4742-134-Q1-K1-A5.pep
MELDADNLSATELRLGLPGTSSSSSSDDWQKKPSPSVGAKRALDDGTKSEASGTSTAAGDLDFDHDHDTAAPPXVRTRPPMAQVVGWPPVRAYRKNTFQAAAAAKKVEQKQKQQQQGGLYVKVSMDGAPYLRKVDLRMYKGYRELREALDALFTNSFSAAAEGGGDHHQHAIAYEDKDGDLMLAGDVPWDMFISSXQKLRIMKGSASESGGQ

SEQ ID NO: 7922 - protein, 39 aa, Zea mays
  unsure (1)..(39): unsure at all Xaa locations
  Clone ID: TF_cC-zmle189022c10d1.pep
NVPWEMFVXSCKRFRIMKGKEALGLGLAPKAMAKSKNRS

SEQ ID NO: 7923 - protein, 118 aa, Zea mays
  Clone ID: TF_ZmC342443_1.pep
AKVHMDGYAIGRKINLRAQGGYASLSRVLTNMTTNFYSPADCSTGATGTGEKDLPTNNDKFIFLYEDFEGDRMQVGDVPWELFLASAKRLYIVRNPTSSDKGQGEDDRKYTTEQPTDD

SEQ ID NO: 7924 - protein, 186 aa, Zea mays
  Clone ID: TF_ZmC1167_2.pep
MSVDTERSSTESSAASGLGYEDTALALTLRLPGSDPGRSSPLAAPSDAAPSPKARVVGWPPVRSYRKNALADSSKASRAANFVKVAVDGAAYLRKVDLQAYGGYDQLLRALQDKFFSHFTIRKFADDERKLVDAVNGTEYVPTYEDKDGDWMLVGDVPWKMFVETCRRLRLMKDSEAVNLAPRAAR

SEQ ID NO: 7925 - protein, 203 aa, Zea mays
  Clone ID: TF_ZmC1426_2.pep
SRESDRMELELGLAPPNPHQPLAAAAEFVGLLSSSAGSCGNKRVLGDAFGAAKAATLPLFVCEDGDGGGGDRDRDGVVDHEQQSNNVPRKKRLVGWPPVKCARRRSCGGGYVKVKLEGVPIGRKVDVSIHGSYQELLRTLESMFPSGNQQDHAEDEVVVSHERRRRHPYVVTYEDGEGDWLLVGDDVPWEVFVKSVKRLKILA

SEQ ID NO: 7926 - protein, 111 aa, Zea mays
  Clone ID: TF_ZmC1328_2.pep
SASGSYDELSLSVDKLFRGLLAAQQDPLAAGAKECSQEEVAISGLLDGTGEYTLVYEDYEGDRVLVGDVPWGMFVSSVKRLRVLKTSDLSSSLTAPPGQKRTVTECPVFTS

SEQ ID NO: 7927 - protein, 191 aa, Zea mays
  unsure (1)..(191): unsure at all Xaa locations
  Clone ID: TF_ZmC12865_4.pep
MPPPPPLLEPRDYLGAGATSSCCSSSCSSGREGAGPHLALRLGLPGSDDSPGRGADAEHARAHVDAALTLGPAPAPAPPRGSAKRGFADSLDRSAKLDGVAADDAAGGVTRVAGAAAGAPPAANAMDRAQVVGWPPVRSYRKNTLAASATKTNGGDEGTSEAGCCYVKXSMDGAPYLRKVDLQTYSSYEDL

SEQ ID NO: 7928 - protein, 147 aa, Zea mays
  unsure (1)..(147): unsure at all Xaa locations
  Clone ID: TF_LIB4766-015-R1-K1-F6.pep
MAGADVDFWTELRLGLPGGGAAAAKKDTIDLKLKLPTAGMEXRAAAAARPEPAAEKAKRPAEAPAADAEKPPAPKAQAVGWPPVRSYRRNAMTVVQAVRSKKEEEPEKQQQPAAANAFVKVSMDGAPYLRKVDLKTYGSYKDLSAAL

SEQ ID NO: 7929 - protein, 263 aa, Zea mays
  Clone ID: TF_ZmC1117_1.pep
MRPARPVVATSQPPYKARGLRLAGTSSIPVPHKVSPRSSSPPSLESRAEQLPNKLSFRFRSMELDADNLSATELRLGLPGTSSSSSDDWQKKPSPSVGAKRALDDGTKSEASGTSPAARDLDFDHDHDTAAPPKAQVVGWPPVRAYRKNTFQAAAAAKKVEQKQKQQQQGGLYVKVSMDGAPYLRKVDLRMYKGYRELREALDALFTNSFSAAAEGGGDHHQHAIAYEDKDGDLMLAGDVPWDMFISSCKKLRIMKGSASEAR

SEQ ID NO: 7930 - protein, 112 aa, Zea mays
  Clone ID: TF_LIB4744-117-Q1-K1-E4.pep
LIHDFSLLLCALQTDDNVLGSSVGNSTKCKMQLIMSSSPRASDFGPNFECYVQEDGKYITQESYHHRCRDHELCLLSEEVLIKVVSCTTNNTSYLDHHIMYHPTMSTNQLRL

SEQ ID NO: 7931 - protein, 118 aa, Zea mays
  Clone ID: TF_ZmC2833_15.pep
SFSISLHLRPLVPIQASSFIFSLMADEEGMVQHKPILPHASDAQQSPAHACTSRRVRGSRSGLHNGRRLPLPQSLFLADPRPSLASDPFMILSRLQVPMNMLLADAPLLADNARGEGT

SEQ ID NO: 7932 - protein, 198 aa, Zea mays
  Clone ID: TF_ZmC1407_3.pep
MAECKDDDSGRRSPSSSMDSSTHPPALSTASSASRRPPERRDQLSPDLQLGLSLSPASSALLVAETNNSIVPSTPRNQALPDWPPIKPFLRSALTASARRRRTLFVKVYMEGVPIGRKLDMLLLDGYSSLLAKLRHMFKTSITYADAVEYHQRVPHEKAAHVLTYEDHDGDWMMVGDVPWELFLGSVKKLRIARTDRC

SEQ ID NO: 7933 - protein, 181 aa, Zea mays
  Clone ID: TF_ZmC2230_1.pep
MEMIDAELRLGPPGSSNRDVINVVQPSLAAAKRPSSSVVESEASGTDDHDHDDAAPTSKVQVVGWPPVRVYRKNAFHAAAEARRTRRGEQQGGGGLYVKVSMDGAPYLRKVDLRTYAAATGMRDALDALFGCFSSSADGGCQFAVAYEDKDGDLMLAGDVPWEMFICSCKKLRIMRGSEAR

SEQ ID NO: 7934 - protein, 173 aa, Zea mays
  unsure (1)..(173): unsure at all Xaa locations
  Clone ID: TF_LIB4172-012-Q1-K1-H10.pep
ISSKDSQQELSSSMISXHPFGVADIAFNSIDSSINDIQFLNRNSRAPGPVQQRMRTYTKVHKRGAVGRSIDINRYSGYDELKHDVARMFGIEGQLSDQNRVGWKLVYEDHEKDVLLVGDDPWEDFVNCVRCIRILSPQEERQMRLASDYGDSFLGNQACSSSDGGRPWRVTGD

SEQ ID NO: 7935 - protein, 228 aa, Zea mays
  Clone ID: TF_ZmC2833_8.pep
MEVAAAASYSYYGLEAADDDVDNLRATELRLGLPGTEAAAAEEEEPRQAQKVAPPPSTPRGKKRDGVSAAPPAAKAQVVGWPPVRSYRKSCFQQQQQAAAASAKGKPAAADEGAPGPAGGGVFVKVSMDGAPYLRKVDLGTCGGYRQLREALEAMFLCFSGPGSGSGDASGGGGGSPSDFAVTYEDKDGDLMLVGDVPFSMFIGTCKRLRIMKGSEARLGLGSAKNND

SEQ ID NO: 7936 - protein, 256 aa, Zea mays
  Clone ID: TF_ZmC2833_9.pep
MEVAATSAAGYGFKADDDVDSLRATELRLGLPGTEEEEADEGHNKAPPPPPSTPRGMKREEAAAAAAEAEEEEPRQAQKVAAPPSTPRGKKRDGVSGVTDPAPPAAKAQVVGWPPVRSYRKSCFQQQQAAAGAKGKPAAADEGAPGPAGGGVFVKVSMDGAPYLRKVDLGTCGGYRQLREALEAMFLCFSGPGSGSGDASGGGSPSDFAVTYEDKDGDLMLVGDVPFGMFIGTCKRLRIMKGTEARLGLGSAKNND

SEQ ID NO: 7937 - protein, 167 aa, Zea mays
  unsure (1)..(167): unsure at all Xaa locations
  Clone ID: TF_ZmC2734_3.pep
DKVNRPPATFVKVYKSGTYGRSLDITRFSSYHELRRELGRLFGLEGQLEDPLRSGWQLVFVDREEDVLLVGDDPWQXALHATLFLFFFCILPHIALATQPHREFVSTVSCIKILSPQEVQQMGKQGLELLSSAPARRLGSSCDDYVSRQESRSLSTGIASVGSVELG

SEQ ID NO: 7938 - protein, 85 aa, Zea mays
  unsure (1)..(85): unsure at all Xaa locations
  Clone ID: TF_ZmC1249_5.pep
AELDKMFDXEGELVSGSQNWQIVYTDDEGDMMLVGDDPWEEFCSIVRKIYIYTKEEVQKMNSKSAAPRKEESPAAGGGGCAATNE

SEQ ID NO: 7939 - protein, 335 aa, Zea mays
  Clone ID: TF_ZmC784_1.pep
SLPRFHSPFPLPLPLSLSLSTLRLPLPPYRLPYPSHTNGHRELTTLRFDSHSHSPFPLSGSHSPPTGYPTHHTQTATPHLPRPPVHVLLLPMSPPLDLDYIGLSPAAAAAAAHDDLKGTELRLGLPGSGSPDRRVVAATATTLDLLPAKGAKRGFSDEAPTPSPGAASGKGKKVAEEEDDKKVAATPQPVAKAQVVGWPPIRSYRKNTMSTTQLKGSKEDAEAKQDQGFLYVKVSMDGAPYLRKIDLKTYKNYKDLSTALEKMFSGFSTGKDGLSEYRKDGEYVLTYEDKDGDWMLVGDVPWEMFADSCRRLRIMKGSDAIGLAPRAADKSKNRN

SEQ ID NO: 7940 - protein, 293 aa, Zea mays
  Clone ID: TF_ZmC1324_1.pep
MRGGGAGPTAAFMSDEPPPADAEEVEENSGAEEEDEETVVEQDDDELELGLCLGSKQQQQQHPPPCRILTARDLQPRSLSPDSSVSSSSPAAGAGTAAPSKRAKADAAPNSPGTVASGHPQSFGVVGWPPIRTFRMNSLFNQAKENASEAGAKKPIVEPDMQEDKEESKKGRTVGWVKVNMEGDIIGRKVDLNAHRSYKTLASALELMFMKPSIGLCTSSSSKTLKLLDSSSEYQLTYEDRDGDWMLVGDVPWEMFVGSVKRLKIMRTSDAKGLGPRFQGSHRPTAACTRGRT

SEQ ID NO: 7941 - protein, 118 aa, Zea mays
  Clone ID: TF_ZmC347_3.pep
VANRSEHRNVQSEPNVCLSYVRYVAPVVGWPPVRSYRKLDLRMYKGYRELREALEAMFVSSGSANNNNNLSEFAVTYQDKDGDLMLVGDVPFEMFASTCRKLRIMKRSEATGLGSARQ

SEQ ID NO: 7942 - protein, 229 aa, Zea mays
  Clone ID: TF_ZmC2833_7.pep
MEVAAASAAGYGFKADDDVDSLRATELRLGLPGTEEEEAEESQNKAPPPPPSTPRGKKRDVVASSGPEDAPKKRDCETDTDAAPPPAAKAQLVGWPPVRSYRKSCFQQQAAAKNKPAAALAEEAPAAGGLFVKVSMDGAPYLRKVDLKMYKGYRELREALEAMFLCFSGAGAADAPAVNPSDFAVTYEDKDGDLMLVGDVPFGMFISTCKRLRIMKGPEARGLGSVKNN

SEQ ID NO: 7943 - protein, 204 aa, Zea mays
  unsure (1)..(204): unsure at all Xaa locations
  Clone ID: TF_ZmC1117_4.pep
MELDADNLSATELRLGLPGTSSSSSDDWQKKPSPSVGAKRALDDGTKSEASGTSPAAGDLDFDHDHDTAAPPKAQVVGWPPVRAYRKNTFQAAAAAKKVEQKQKQQQQGGLYVKVSMDGAPYLRKVDLRMYKGYRELREALDALFTNSLSAAAEGGGDHHQHAIAYEGKDGDLMLAGDAPFXALMFISSCKKLRIMKGSASEAR

SEQ ID NO: 7944 - protein, 113 aa, Zea mays
  Clone ID: TF_ZmC37228_1.pep
GIYLHRGRRPNACMRASSCSTASPAGSYDHTHHGHDQMEHGSMEVMVQGSRRRSTRHAVSPATSQADVLWTADWTCMHVRSEIIQPSSIGEKLLPRNFFGTVHASSYAVAYAC

SEQ ID NO: 7945 - protein, 87 aa, Zea mays
  Clone ID: TF_ZmC1167_3.pep
LVVLQDVRGNLPAPSSDERFRGRELGYVHVFPLKPTSMCLKTSAFFHSHRSCSFSQHQEPPDEAHSVGRWHARTHWRLEGKGELCWS

SEQ ID NO: 7946 - protein, 67 aa, Zea mays
  Clone ID: TF_ZmC1249_4.pep
WQIVYTDNEGDMMLVGDDPWEEFCNIVRKIYIYTKEEVQKMNSKSSAPRKEEPPAAGEGCAAAAANE

SEQ ID NO: 7947 - protein, 100 aa, Zea mays
  Clone ID: TF_ZmC2833_22.pep
TRKKSDLWLCTTTHHGDSTRLSTPFACLAKHTHTRTPLLGAQKKKNKATTHHSTHAQSFPLSLSPPPSKQAASSFSSPCLWFAASCCSIVGTDNARTRGA

SEQ ID NO: 7948 - protein, 108 aa, Zea mays
  Clone ID: TF_ZmC1237_1.pep
PRVRPRVRPRVRPRVREDLRHDLACMFGIQGQLEDPYRTDWKLVYVDHENDILLVGDDPWEEFVSCVKSIKILSSVEVQQMSLDGDLGCIPPQTQACSASDDANAWRA

SEQ ID NO: 7949 - protein, 99 aa, Zea mays
  unsure (1)..(99): unsure at all Xaa locations
  Clone ID: TF_21213622.pep
ARGYPGRQKLFHGFLQAQKDMSPTTGKXFSQVLDGSDEXTLVYEHNEGDTMLVGDVPWNVFVSTAKRLRVLRSSELAKGLVGPRPPQIAVAPRRGPPDC

SEQ ID NO: 7950 - protein, 205 aa, Zea mays
  Clone ID: TF_ZmC1117_3.pep
MELDADNLSATELRLGLPGTSSSSSSDDWQKKPSPSVGAKRALDDGTKSEASGTSTAAGDLDFDHDHDTAAPPKAQVVGWPPVRAYRKNTFQAAAAAKKVEQKQKQQQQGGLYVKVSMDGAPYLRKVDLRMYKGYRELREALDALFTNSFSAAAEGGGDHHQHAIAYEDKDGDLMLAGDVPWDMFISSCKKLRIMKGSASESEAR

SEQ ID NO: 7951 - protein, 101 aa, Zea mays
  Clone ID: TF_LIB3637-253-Q6-K6-C11.pep
SFFKIQVYKSGSVGRSLDITRFSNYAELREELGQMFGIKGQLDDPDRSGWQLVFVDRENDVLLLGDDPWESFVNSVWYIKILSPEDVHKMGKPGNDPRYLS

SEQ ID NO: 7952 - protein, 131 aa, Zea mays
  Clone ID: TF_LIB4666-004-Q1-K1-E11.pep
TKPLREKFGFSDPNVNSSSFISSSSNENMLESNFLQVYKSGSVGRSLDITRFSNYAELREELGQMFGIKGQLDDPDRSGWQLVFVDRENDVLLLGDDPWESFVNSVWYIKILSPEDVHKMGKPGNDPRYLS

SEQ ID NO: 7953 - protein, 86 aa, Zea mays
  Clone ID: TF_ZmC784_9.pep
KNYKDLSTALEKMFSGFSTGKDGLSEYRKDGEYVLTYEDKDGDWMLVGDVPWEMFADSCRRLRIMKGSDAIGLERRHNSWSLHLWW

SEQ ID NO: 7954 - protein, 224 aa, Zea mays
  Clone ID: TF_ZmC347_2.pep
METVVGDLMATELRLGLPGTVDDCSQHQQQTQLKVAAPPSNPTRGKKRPAAEEEEANKRDAEAAPPAAKAPVVGWPPVRSYRKSCFQQAKQQAVSSSSKAADKEDAAAPAPSCTASAAASNATASAGAGSFVKVSMDGAPYLRKLDLRMYKGYRELREALEAMFVSSGSANNNNNLSEFAVTYQDKDGDLMLVGDVPFEMFASTCRKLRIMKRSEATGLGSARQ

SEQ ID NO: 7955 - protein, 227 aa, Zea mays
  Clone ID: TF_ZmC1405_2.pep
MAGADVDVGTELRLGLPGGGAAAAKKDTIDLKLKLPTAGMEEAAAAARPEPAAEKAKRPAEAPAADAEKPPAPKAQAVGWPPVRSYRRNAMTVVQAVRSKKEEEPEKQQQPAAANAFVKVSMDGAPYLRKVDLKTYSSYKDLSAALKKMFGTFTASGNSMNEGRLVDPAGDADDVVTTYEDKDGDWMLVGDVPWEMFVESCKRLRIMKSSEAIGLAPRTKDKCKNKS

SEQ ID NO: 7956 - protein, 272 aa, Zea mays
  Clone ID: TF_ZmC1098_1.pep
MSPPLEPHDYIGLSAAAAAAPPTPTSSSSSSSSPAPRLTLRLGLPGSESPDRDRDRDRCEDVAAALSLGPLPATPKAPAAVSAKRAFPDPAQRPGAAKASDDKQASPAAPPAAKAQVVGWPPVRNYRKNTLAASASRSKAPAAEDAASAARPMYVKVSMDGAPYLRKVDIKMYSSYEDLSVALQKMFSCFIAGQSGLHKSSSKDRLTNGSKVDALKDQEYVLTYEDKDADWMLVGDLPWDYFTSICRKLKIMRGSDAVGIAPRTIEQTGQNK

SEQ ID NO: 7957 - protein, 138 aa, Zea mays
  Clone ID: TF_LIB3606-053-Q1-K6-C8.pep
DAWADAWADAWEEEEPEKQQQPAAANAFVKVSMDGAPYLRKVDLKTYGSYKDLSAALKNMFGTFTASGNSMNEGRLVDPAGDADDVVTTYEDKDGDWMLVGDVPWEMFVDSCKRLRIMKSSEAIGLAPRTKDKCKNKS

SEQ ID NO: 7958 - protein, 68 aa, Zea mays
  Clone ID: TF_LIB3597-014-Q1-N6-H10.pep
MNEGRLVDPAGDADDVVTTYEDKDGDWMLVGDVPWEMFVDSCKRLRIMKSSEAIGLAPRTKDKCKNKS

SEQ ID NO: 7959 - protein, 151 aa, Zea mays
  Clone ID: TF_ZmC1336_1.pep
KQTAGASSAVAGNGGTPPGSTTTATHTGGGETNGAAAAALAARPALAASSMFAKVHMEGYAIGRKVNLRAQDGYDSLSRTLTNMATNFFCPADCSGAAEKDAPKSDKFIFLYEDFEGDRMLVGDVPWELFLASAKGLYIVRKPSIRRQRSG

SEQ ID NO: 7960 - protein, 258 aa, Zea mays
  Clone ID: TF_ZmC8950_1.pep
PMSNFNQQQQMFKAAAPETDIQGADPSNNTLFGINGDGQLGFPMGADDFLSNGIDASKYQGHISTDIDGNYRIPKDGQQEISSSMVSQSFGASDMAFNSIDSGMNDGGFVNRTSWPPAPPLKRMRTFTKVYKRGAVGRSIDISQFSGYDELKHALARMFSMEGQLEERQRIGWKLVYKDHEDDILLLGDDPWEEFVNCVKCIRILSPQEVQQISLDGDLGNNILPNQACSSSDGGNAWRARCDQNSGNPSTGSYDQFE

SEQ ID NO: 7961 - protein, 239 aa, Zea mays
  Clone ID: TF_UC-ZMFLMO17210E05_FLI.pep
MEVAAAASYSYYGLEAADDDVDNLRATELRLGLPGTEEAAAAAAEAEEEEPRQAQKVAAPPSTPRGKKRDGVSGVTDPAPPAAKAQVVGWPPVRSYRKSCFLQQAAAAAGAKGKPAAAAPALAKGAPGPAGGGVFVKVSMDGAPYLRKVDLGTCGGYRQLREALEAMFLCFSGPGSGDASGGGGGGSPSDFAVTYEDKDGDLMLVGDVPFGMFIGTCKRLRIMKGSEARLGLGSAKNND

SEQ ID NO: 7962 - protein, 386 aa, Zea mays
  unsure (1)..(386): unsure at all Xaa locations
  Clone ID: TF_ZmC2734_2.pep
AEAPDATPKNHXQQQQPQCLPVPQHQQMQQQNMTNYQSISNALSPFSQLSPVSQSSPMALQTILPFSQAQSFTDTNVGSLSPSNGNTMQNTLRPFSSEAVSHLSMPRPTAIPVADPWSSKRVAVESLLPSRPQVSSQMEQLDPAPASIPHSSALAPLPGRGCLVDQDVNSDPQNHLLFGVSIDSQSLLMQGGIPGLQNGNDSAAIPYSTSNFLSPSQNDFPLDHTLNSSGCLDDSGYVPPCSDNSDKVNRPPATFVKVYKSGTYGRSLDITRFSSYHELRRELGRLFGLEGQLEDPLRSGWQLVFVDREEDVLLVGDDPWQEFVSTVSCIKILSPQEVQQMGKQGLELLSSAPARRLGSSCDDYVSRQESRSLSTGIASVGSVELG

SEQ ID NO: 7963 - protein, 94 aa, Zea mays
  Clone ID: TF_ZmC3003_4.pep
AAPASTGSAYACRPMRSERQPFHILLKARVLAPIVCLLGDHYYHFLQLKSFPVRTGLVANESTTPPLLHFPTILVNIMPIKAQQNKGARHRFIA

SEQ ID NO: 7964 - protein, 158 aa, Zea mays
  Clone ID: TF_ZmC1405_5.pep
MHVRAQAVGWPPVRSYRRNAMTVVQAVRSKKEEEPEKQQQPAAANAFVKVSMDGAPYLRKVDLKTYGSYKDLSAALKNMFGTFVTATGNSMNEGRLVDPAGDADDVVTTYEDKDGDWMLVGDVPWEMFVDSCKRLRIMKSSEAIGLAPRTKDKCKNKS

SEQ ID NO: 7965 - protein, 200 aa, Zea mays
  unsure (1)..(200): unsure at all Xaa locations
  Clone ID: TF_ZmC1426_1.pep
SRESDRMELELGLAPPNPHQPLAAAAEFVGLLSSSAGSCGNKRVLGDAFGAAKAATLPLFVCEDGDGGGGDRDRDGVVDHEQQSNKXKRLVGWPPVKCARRRSCGGGYVKVKLEGVPIGRKVDVSIHGSYQELLRTLERMFPSGNQQDHAEDEVVVSHERRRRHPYVVTYEDGEGDWLLVGDDVPWEVFVKSVKRLKILA

SEQ ID NO: 7966 - protein, 285 aa, Zea mays
  Clone ID: TF_ZmC37547_2.pep
YPRVFRDSPIPWDLFSPRKKLRVPHHPDFPFDGQLLNPIFHGNPLGPSNGGGALRCFSDIAPAGIQGARHAQFGLPLTDRQLNKLHLGLFQGGGFKRRLDAITPPCPISRGFVIGSAPVDESVSCVLTIGTPRAAERSDDRKKPHLMLFGKPILTEQQMSSRGSRETLSPEATGNSSDGSVQKTGNVSDGSGSSICIGSSSRGREASRLGFEFEAGHCKVFVESEDVGRTIDLSVFGSYEELYGQLADMFGIERAEVMSHLCYRDAAGAVKRTGDEPFCDFMKVA

SEQ ID NO: 7967 - protein, 128 aa, Zea mays
  unsure (1)..(128): unsure at all Xaa locations
  Clone ID: TF_LIB4185-022-R1-L1-G9.pep
MQDAAADEAPCCSASVRDVTNTSMNIITGVVTRFFVKLSLDCATYLRKADLMMYHCYXSSIXALDVMVNSVITSYMLTKFAAFYEDPNGDLMLVGYDQVDMFASTYAKVEIMMRSESTRVVSYTARYQ

SEQ ID NO: 7968 - protein, 247 aa, Zea mays
  Clone ID: TF_ZmC12865_2.pep
MPPPPLLEPRDYLGAGATSSCCSSSCSSGREGAGPHLALRLGLPGSDDSPGRGADTEHARAHVDAALTLGPGPGPAPPRGSAKRGFADSLDRSAKLDGVAADDAAGGVTRVAGAAAGAPPAAKAQVVGWPPVRSYRKNTLAASATKTNGGDEGRSEAGCCYVKVSMDGAPYLRKVDLKTYSSYEDLSLGLEKMFSCFITGQNSSCKTSRRDRLTDGSRVDALQDQEYVLTYEDKDADWMLVGDLPWE

SEQ ID NO: 7969 - protein, 353 aa, Zea mays
  Clone ID: TF_ZmC11045_1.pep
GNNEDSSVALTRGDFAGELQVQQVEQDELLPPPKLESSKSPDGGKSVSSFPNQGCFPQFFEGLDWMIPPSCYQDSNGIHSVTASDSIFNPSEGIPPSTMNADGMDAFQTSCLSECFPNSIQEFISSPDINTLTFMSPEMQHLDAQHDGSNLQSTSNSYVQMSFSEESQSASLSGLHMEAVHINSSCLQPLATGSFDAGTFSKLSNIKECQALPLQEIHSSSMGTPSCSMDAAAVEYCMDRSVKPLKPPVRTYTKVQKLGSVGRSIDVTRFRDYHELRSAIACMFGLQGKLEHPGSSDWKLVYVDYENDVLLVGDDPWEEFINCVRCIRILAPSEVQQMSENGVHVLNDCMQMA

SEQ ID NO: 7970 - protein, 336 aa, Zea mays
  Clone ID: TF_ZmC9890_1.pep
MAALPRSPNSARLPLSLRDLRWIGESMDPRIAGLPNPPRIPPAEASFYGDESRAPSSNHRPFITVTPAKGSGSARSIFLSPPTTAIHCIRIPSFLLSVQVQQPARASLQETESIRVPKLAALPAKQEDSCGMELELGLAPPSARRPTPMTIDQQQQQQQRHLAEDELSSTSSDHHPCAARSGKRGFAEAFQEAAATTTTLPLFDDGSSCGGRSGGGKRPLVGWPPLSSARSRACGGGAAKYVKVKKEGDAIGRKVDLSLHASYDELLATLARMFPTNNGSQDDKEISSKSTAAATTTTSHRDVVVTYEDGEGDWMLLGDVPWDDFARSVKRLKLLG

SEQ ID NO: 7971 - protein, 102 aa, Zea mays
  Clone ID: TF_ZmC2833_18.pep
TDRQERRVIFGFVQPRIMEIQLDSPLLLHVLLNTHAHTPLLGAQKKKNKATTHHSTHAQSFPLSLSLSLLPSKQLHISPRHVSGLLLAAAPLLADNARGEGT

SEQ ID NO: 7972 - protein, 151 aa, Zea mays
  Clone ID: TF_ZmC1098_2.pep
MSPPLEPHDYIGLSASRSKAPAEEAASGAGPMYVKVSMDGAPYLRKVDIKMYSSYEDLSLALEKMFSCFIAGQSGLHKSSSKDRLTNGSKVDALKDQEYVLTYEDKDADWMLVGDLPWDYFTSICRKLKIMRGSDAVGIAPRTVEQTGQNK

SEQ ID NO: 7973 - protein, 271 aa, Zea mays
  Clone ID: TF_ZmC1098_4.pep
KKKKKNRRSPPHHLHSKQGEGERQTNPPHRPSSSSSSPAPRLTLRLGLPGSESPDRDRDCCEDVAATLSLGPLPAAAAVSAKRAFPDPAQRPGASKASDAKQQASPAAPPAAKAQVVGWPPVRNYRKNTLAAATASRSKAPAEEAASGAGPMYVKVSMDGAPYLRKVDIKMYSSYEDLSLALEKMFSCFIAGQSGLHKSSSKDRLTNGSKVDALKDQEYVLTYEDKDADWMLVGDLPWDYFTSICRKLKIMRGSDAVGIAPRTVEQPGQNK

SEQ ID NO: 7974 - protein, 51 aa, Zea mays
  Clone ID: TF_LIB3236-105-P1-N1-E7.pep
SFLMNLIYIKRRRNRVYPPHEKDCYLASVCFSNPQLFLHFREKASTVHPQP

SEQ ID NO: 7975 - protein, 54 aa, Zea mays
  Clone ID: TF_LIB3159-016-Q1-K1-H5.pep
ICMRFVDYAPPPKLTLLAGGLSHKKNQIKYWGSNKKKEELDMNVVGPSVVVTHC

SEQ ID NO: 7976 - protein, 359 aa, Zea mays
  Clone ID: TF_ZmC12865_1.pep
MVCPLLILLSATSTTPPPARTENSPRPSPLVLLLPHRVSSTPGTRPLSVCPLPSSPPMPPPPPLLEPRDYLGAGATSSCCSSSCSSGREGAGPHLALRLGLPGSDDSPGRSADAEHAGAHVDAALTLGPGPAPAPPRGSAKRGFADSLDRSAKRDGVAADDAAGGVTRVAGAAAGAPPAAKDLFMIAFSAMDRAQVVGWPPVRSYRKNTLAASATKTNGGDEGRSEAGCCYVKVSMDGAPYLRKVDLKTYSSYEDLSLALEKMFTCFITGQSGSCKTSRRERLTDGSRADALQDQEYVLTYEDKDADWMLVGDLPWDLFTTICGKLRIMRGSDAAGMAPRSPEQIVGTRIRNVARHAES

SEQ ID NO: 7977 - protein, 166 aa, Zea mays
  Clone ID: TF_ZmC784_8.pep
STSSSCLVKTIELRCVALCRAQVVGWPPVCNYRKNTMTTTQLEGSKEDGDAKQGQGFLYVKVSMDGAPYLRKIDLKTYKNYKDLSTALEKMFSGFSTGKDGSSEYRKDGEYVLTYEDKDGDWMLVGDVPWEMFAGSCRRLRIMKGSDAIGLVLLAPRAADKSKNRN

SEQ ID NO: 7978 - protein, 166 aa, Zea mays
  unsure (1)..(166): unsure at all Xaa locations
  Clone ID: TF_ZmC1117_2.pep
TPHVHAPSSLRRHRLHQDSIQETGVHGLTCLFRFVRAQVVGWPPVRAYRKNTFQAAAAAKKVEQKQKQQQQGGLYVKVSMDGAPYLRKVDLRMYKGYRELREALDALFTNSFSAAAEGGGDHHQHAIAYEDKDGDLMLAGDVPWDXMFISSCKKLRIMKGSGSEAR

SEQ ID NO: 7979 - protein, 318 aa, Zea mays
  Clone ID: TF_ZmC1060_1.pep
MEASATGAADPHFPIYISSDEEDGHAYFIESYSPEEVQIQQTILLSLYTSRAQTAAACSASSSYPTGASSTPKAGTSSTPKETPIDHKRKRKLKLEDDTNDSKMKRSTRNRFNCAICFEMVLAAEKFVVSHCPHAFCNSCIGRYVAGKVADNVAVIGCPDPACETGFIEMDLCRDIIPPELFDRWSVVLCEELLGDDKFYCPFKDCSALLLNDDSAKIRETECPHCHRLFCARCHVPWHDGIECKEFRKLGDDEKGENDLMLKKLADKEKWQRCPKCRMYVSRKSGCLLINCRCKQYFCYHCAAPMDRETHYCENCKH

SEQ ID NO: 7980 - protein, 128 aa, Zea mays
  Clone ID: TF_ZmC1132424_1.pep
SLFLGARRTYCRFPVGSGMMVADDDGEECVTQSECHGCRRLFCARCAVPWHAGLTCEEIARLGEGEREREDLLLVKAAREGSWKRCPRCRFYVEKSSGCLHITCRCGYEFCYGCGQQWQLIHDGCPGA

SEQ ID NO: 7981 - protein, 122 aa, Zea mays
  unsure (1)..(122): unsure at all Xaa locations
  Clone ID: TF_700348060H1.pep
SCWNEYXTTRIEQNLVVNCTCRIADCRAQPTGAFIRAIVSSPEVISKYEKALMXGYVESFSNLTXCTNPQGCDRILCRHGLGCGTTCCKCGXASCFNCSFSDAHYAASCGHMSQWVDDGCYY

SEQ ID NO: 7982 - protein, 199 aa, Zea mays
  Clone ID: TF_ZmC108794_1.pep
VGTLPGCPQEGCATKLSVEGSRVFLSPRPVEIMVQRMREGQIPPSQKVYCPYPRCSALMSLGEVIHPMQESSSRHTAADAATLRKCVKCRGSFCLSCKVPWHDGMGCFEYKMWYPLAHPGDAKLQNLARQRLWRQCVKCKHMIELAEGCYHMICVCGYEFCYTCGKEWKNKKASCSCPLWDERNIIRDEDDDDDEDDLY

SEQ ID NO: 7983 - protein, 636 aa, Zea mays
  Clone ID: TF_ZmC13270_1.pep
IEFHGSLLKVSPVSIYSHSGLPFPAVRAKVSWPRKASRGVALVTCASGEAEFIVKDCFALGVGGRYVNCEVSNKWANCVFVTGIPLHVTEPELYDAFHSTTTRRILDIHLLRGQPTASSSVSECTEALMRAISLFMPNRNFPCQKFRVQVFPPEEKDSMMKATITFDGSFHREAARALDHLQGSVLPCCLPWQIIQCEHVFHSTVSCPMRIYNVISQDVGALLESFRSQKGVAYNLEKNENGNFRVKLTANATKTIADLRRPLELLMKGKIINHPDLMLSTVQLLWSRDGMEQLRSVERETGTYILYDRQSLNIKIFGSTDNVAAAEEKLVHALVQLHEKKPLEVCLRGRNLPPNLMKEVIVKFGADLEGLKNEVPAVDLQLNTRRQTLYVRGSKEDKQRVEGMISELITSSDHSAQLSSENACPICLCELEDPFKLESCGHMFCLACLVDQCESAMKSQDGFPLRCLESGCNKLFLLADLRSLLPDKLDELFRASLNAFVASSAGLYRFCPTPDCTSIYQVAAAGAQGDRPFVCGACSVETCTKCHIEYHPFISCEAYKEYKADPDATLLEWRKGKENVKNCPSCGFTIEKSEGCNHVECRCGSHICWNCLENFKSSEECYGHLRSVHLSYADLM

SEQ ID NO: 7984 - protein, 400 aa, Zea mays
  Clone ID: TF_ZmC3535_1.pep
DCGPRGRAGSSPLRNSEKLYFQIAEAEILEDQLLVALGHRILELVDKLEDFDLILLPSFELERPLQLAKEAIGIRYLSPYEVGTCPICREEKLGSQMIKAGCSHTYCYNCLTGYVEEKLLTSKLPIRCPQLRCKYIISASECKSFLPVSSYDSLERAFAEAGTSGMERFYCPFPNCSVLLDLSQHFSRASSSSQSDLSCVECPECHRDICINCGVPWHIMMGCDEYQSLPAEERDAGDLSLHRLAQNNRWRRCQRCRRMIELTQGCFHMTCWCGHEFCYSCGADYASGVQTCQCVFWDDEAMEPSSAARSTQAASEIWAWDTFDCMPTAVEGYSEQERAQLALIQRFLAGGFSLGENPCQSPPRCADSYIVDTMKDLHQLPWLERFVSVISDTYNDDYMQ

SEQ ID NO: 7985 - protein, 589 aa, Zea mays
  unsure (1)..(589): unsure at all Xaa locations
  Clone ID: TF_ZmC1251_2.pep
MESEDDMHDANDSAEDDFYSGGEAGLAASDDGDADYDFADHDSDDSAELISHRQQQNYSILSEVDIQRRQEDDINRVSTVLSISKPEACVLLRNYNWSVSKVHDEWFADEERVRKVVGLPEKHNEMPNDREVTCGICFESCPRGSMSAAACGHPFCSTCWRGYISTAISDGPGCLMLRCPDPSCAAAVGQDMINSLAADDDKEKYGRYLRRSYIEDNRKTKWCPAPGCEYAVEFVMGSGSYDVNCNCSYGFCWNCTEEAHRPVDCATVSKWILKNSAESENMNWILANSKPCPKCKRPIEKNQGCMHITCTPPCKFEFCWLCLGPWSEHGERTGGFYACNRYESARQEGAYDESERRREMAKNSLERYTHYYERWAANQSSRQKALGDLQSLQNDKLERLSDIQSQPESQLKFIVEAWLQIVECRRVLKWTYAYGFYLPEHEHAKRQFFEYLQGEAESGLERLHQCAEKELQIYLDAESPSKDFNDFRTKLAGLTSVTRNYFENLVRALETGLNDVGPSTSHGTCXKSATSKSLGGKSKSGKNRASSSSSKSGGSTRGVDDSNIWTCDQCTYANPKSARACQACDRQHR

SEQ ID NO: 7986 - protein, 607 aa, Zea mays
  unsure (1)..(607): unsure at all Xaa locations
  Clone ID: TF_ZmC12013_1.pep
MGRDAENTSPPVSSSELEQEDDDDCYLSDQGDDALEESVLHVLEDEHLEDCHWSASCVITKESLLAAQREDLRKVMELLGLREHHARTLLIHYRWDVERIFELLDQKDRDSLFSEAGIPLQYTNNAGPTSSAEVTCNVCYDDVPPSCALEMDCGHSYCNDCWTEYFIVKINEGQSRRVRCMAPKCNAICDEAIIRKLVIARHPDIAERFERFLLESYIEDNDTVKWCPSTPHCGNAIRVKGDIYCEVECTCGCQFCFNCSLRAHSPCSCMMWELWIKKCRDESETVNWITVNTKPCPKCHKPVEKNGGCNLVACICGQAFCWLCGGATGRDHTWSTISGHSCGRFTDDQTKKTEQARRDLYRYMHYHNRYKAHTDSLKQEAKLKNEIQGKISISENKESKIKDYSWVINGLNRLFRSRRVLSYSYPFAFYMFGDEIFKDEMTPEERELKQNLFEDQQQQLEFNVERLSGFLEKDFQLFTDDEVMDTMKHVINLPNVVDRLCKQMYQCIENDLLYPLRTPHNIAPYKSKGIDRASELNISWDPGEQSSQSTKHSQDEHRNKQASNILGKRTHELHGSSSSNKRERVDVNGGXVALFDLNVPAEVVDKI

SEQ ID NO: 7987 - protein, 589 aa, Zea mays
  Clone ID: TF_ZmC1251_1.pep
MESEDDMHDANDSAEDDFYSGGEAGLAASDDGDADYDFADHDSDDSAELLSHRQQQNYSILSEVDIKRRQEDDINRVSTVLSISKPEACVLLRNYNWSVSKVHDEWFADEERVRKVVGLPEKHIEMPNDREVTCGICFESCPLGSMSAAACGHPFCGTCWRGYISTAISDGPGCLMLRCPDPSCAAAVGQDMINSLADVEDTEKYGRYLRRSYIEDNRKTKWCPAPGCEYAAEFVMGSGSYDVNCNCSYGFCWNCTEEAHRPVDCATVSKWILKNSAESENMNWILANSKPCPKCKRPIEKNQGCMHITCTPPCKFEFCWLCLGPWSEHGERTGGFYACNRYESARQEGAYDESERRREMAKNSLERYTHYYERWAANQSSRQKALGDLQSLQNDKLERLSDIQSQPESQLKFIIEAWLQIVECRRVLKWTYAYGFYLPEHEHAKRQFFEYLQGEAESGLERLHQCAEKELQIYLDAESPSKDFNDFRTKLAGLTSVTRNYFENLVRALETGLNDVGPSTSHGTCSKSATSKSLGGKSKSGKNRASSTSSKSGGSSRGVDDSNIWTCDQCTYANPKSARACQACDHQHR

SEQ ID NO: 7988 - protein, 595 aa, Zea mays
  Clone ID: TF_ZmC2198_1.pep
MDSDVEMNTASDEEVMDNDDYYDYCYSDVGDDGGSNSGSEELVAGDYDEGLEAEGTDEVVSRREQTFVVLNEQVISERQAEDVSKVSAVTLITREEACALLHHYKWNISKLSDEWFADEEKVRHTVGLLLNGNHDPRSRKLVCGICFEGCSSDMMSSAGCAHFYCHECWEGYISAAIGDGPGCLSLRCPDPSCSAMVLQGMINELAKDEDRKKYARFLLRAYVEGSKKTKWCPAPDCTCAVEFLGDENYDVSCNCMFSFCWNCTEEAHRPVNCETVSKWILKNSAESENMNWILANSKPCPKCKRPIEKNQGCMHMTCTPPCKFEFCWLCLGAWSDHGERTGGFYACNRYESAKKEGVYDETDARRERAKNSLERYMHYYERWASNQTSRQKAQADLLKAEKDQIANLTDIFGIPETQLKFIIEAWSQIIECRRVLKWTYAYGYYLDDKIKSEFFEYLQGEAESGLERLHQCAEKDLQNFLPSVKSDSTETTTPTVAEFGEFRVKLAGLTSVTRNYFENLVQALEAGLEDVRATGQAAGTSSTATSSKKGGTKSKKKQHTAPSSDHTDDGWPCERCTFLNPPTVDACSVCEKSRY

SEQ ID NO: 7989 - protein, 123 aa, Zea mays
  Clone ID: TF_LIB143-055-Q1-E1-D9.pep
TEWSLTKLTCPDTTCCSPLPPSVLKSLLGDDCYKRWESFALQKLLDTMPDLVYCPRCNAACLEDDNDAQCPECFFTFCSLCKERRHVGKDCVTPEEKIRILREKHQKYSLPEKQLLKEQREID

SEQ ID NO: 7990 - protein, 164 aa, Zea mays
  Clone ID: TF_LIB4603-008-R1-K1-G12.pep
MTINCFPRWFCLHNSSSSDVSNYEFVMARLFICQTLIAEFLFQSELLAAEINYMAKRETELQNDHMNLRTKIEEGEQQLQQVTVAQSVAAAAATDVELNPFLEMDTKCFFPGGPFATLDMKCFFPGSLQMLEAQQRQMLATELNLGYQLAPPDTDVANNNPQQF

SEQ ID NO: 7991 - protein, 217 aa, Zea mays
  Clone ID: TF_ZmC1392_3.pep
PRVLLHLSLPSCRVVVGCRSGGARGWRSRSGGAMVGTGKRERIAIRRIDNLAARQVTFSKRRRGLFKKAEELSILCDAEVGLVVFSATGKLFHFASSRQMRGEELQRLSVEQLQELEKTLESGLGSVLKTKSQKILDEISGLERKRTQLIEENSRLKEQVTRMSRMETQLGADPEFVYEEGQSSESVTNTSYPRPSTDTDDCSDTSLRLGLPLFSSK

SEQ ID NO: 7992 - protein, 154 aa, Zea mays
  Clone ID: TF_ZmC2086_2.pep
MGRGRVELKRIENKINRQVTFAKRRNGLLKKAYELSVLCDAEVALIIFSNRGKLYEFSSTQSMPKTLEKYQKKEQMFCEANKCLRRRLEESNQVIWQHAWEQSERHSEVQPQQLNGNNFFHPLDGAGEPTLQIGYPSEALTSSCMTTFLPPWLP

SEQ ID NO: 7993 - protein, 88 aa, Zea mays
  Clone ID: TF_ZmC84_3.pep
TFANLQHYKQESARLRQQIVNLQNSNRALIGDSITTMSHKELKHLETRLDKALGKIRAKKNDVLCSEVEYMQRRVDSNKNTFFLSGPY

SEQ ID NO: 7994 - protein, 99 aa, Zea mays
  Clone ID: TF_LIB3067-030-Q1-K1-E9.pep
RTRGRTRGRTRGTELQKKERMFCEANKCLRRRLEESNQVIWQHAWEQSERHSEVQPQQLNGNNFFHPLDGAGEPTLQIGYPSEALTSSCMTTFLPPWLP

SEQ ID NO: 7995 - protein, 107 aa, Zea mays
  unsure (1)..(107): unsure at all Xaa locations
  Clone ID: TF_LIB3088-002-Q1-K1-D4.pep
MGNAQEANGALCETQTWYQEMLNLRALFXVLTRTHRHXIGLELGPLSAKELHQLEKQLECAKSHARHIKTLLIMDQVKXLRIKERHLGEINTQLTHNLEAAGCSNYG

SEQ ID NO: 7996 - protein, 260 aa, Zea mays
  unsure (1)..(260): unsure at all Xaa locations
  Clone ID: TF_ZmC1145_11.pep
MGRGKVQLKRIENKINRQVTFSKRRSGLLKKAHEISVLCDAEVALIIFSTKGKLYEYSTDSCMDKILDRYERYSYAEKVLISAESETQVSYASVWSSSRRAAFGAWLVHQLCRTSSCASSLGDPSSLPAGGRFGRVVAMCAWRVVLMSGGLSQLMVESISALQRKEKSLQEENKVLQKEKALLLHXLAEKQKDQRQQVQRDQTQQQTSSSSTSFMLREAAPTTNVSIFPVAAGGRVVEGAAAQPQARVGLPPWMLSHLSC

SEQ ID NO: 7997 - protein, 182 aa, Zea mays
  Clone ID: TF_LIB4758-083-R1-K1-A9.pep
MVRGKTQMKRIENPASRQVTFSKRRNGLLKKAFELSVLCDAEVALVVFSPRGKLYEFASGSAQKTIERYRTYTKDNVSNKTAHQDIEQVKADAEGLAKKLEALEAYKRKLLGERLEECSFEELHSLEVKLEKSLHCIRGRKCKKQPPPPPPMLMGPPPPPAPAAIDHTGAGGCRDGRGDGAV

SEQ ID NO: 7998 - protein, 197 aa, Zea mays
  unsure (1)..(197): unsure at all Xaa locations
  Clone ID: TF_ZmC1460_7.pep
GXLXELIEXYQTASAGKTTTDGCGRHNRMDPKHETTVLQQEINLLQKGLRYIYGNRANEHMNVDELNALERYLEIWMYNTRSAKMQIMAQEIQALKSKACQNPVHINSTKTRGFQHPFTSLKVSACTQEGMLKAANEILQEKIVEQSSLLDVGMVVADQQNGRFSTVPLVEEVISSNPLTVLSGYSSCRGSEMGYSF

SEQ ID NO: 7999 - protein, 133 aa, Zea mays
  Clone ID: TF_ZmC1089_9.pep
MGRGRVELKRIENKINRQVTFAKRRNGLLKKAYELSVLCDAEVALIIFSNRGKLYEFCSGQSITKTLERYEKNSYGGPDTAVQNKENELVQSSRNEYLKLKAKVDNLQRTQRNLLGEDLGSLGVKELEQLEKQ

SEQ ID NO: 8000 - protein, 199 aa, Zea mays
  Clone ID: TF_ZmC3819_2.pep
MGRGRSEIKRIENPTQRQSTFYKRRDGLFKKARELSVLCDVDLLLLLFSTSGKLYHYLSPTVPSVKDLVERYEATTHTKVWTDIRQERRAELEKAEQMCELMEKELRVMTVDDGEQYTVPSLELLEHSLEAAVRKVRSEKDRKIGGEINYLENIIRGRHEERYGLCDKLAHSQASNNGGEGGGSTPPSGGGLELKLGFN

SEQ ID NO: 8001 - protein, 235 aa, Zea mays
  Clone ID: TF_ZmC18079_3.pep
MGRGKVELKKIENPTNRQVTFSKRRMGLFKKANELAILCDAQIGVIIFSGSGRMYEYSSPPWRIASVFDRYLKAPSTRFEEMDIQQKIVQEMTRMKDERNRLRMIMAQYMAEDLASFSAQDLSNLEQQIEFSLYKVRLRKQELLDQQLLEIHQREMHMPAEQGGYLCLMNPAAAIASGQHQQAGEMVGINPRPFPWWDVGASGSGSGSQSQQQLLHGRDAAESSMTALGLSQLHG

SEQ ID NO: 8002 - protein, 273 aa, Zea mays
  unsure (1)..(273): unsure at all Xaa locations
  Clone ID: TF_21213723.pep
MGRGKVQLKRIENKINRQVTFSKRRNGLLKKAHEISVLCDAEVAVIVFXXKGKLYEYATDSRMDKILERYERYSYAEKALISAESESEGNWCHEYRKLKAKIETIXXCHKHLMGEDLESLNPKXXXXXXXXXXXXXXXXXSRKSHLMAESISXXXXXXXXXXXXXXXXXXXXXXXXXXXXXXXXXXXXXXXXXXXTHAQAQTSSSSSSFMMRQDQQGLPPPHNICFPPLTMGDRGEXXXXTARARAXQPLPGQAQPQLRIAGLPPWMLSHLNA

SEQ ID NO: 8003 - protein, 188 aa, Zea mays
  unsure (1)..(188): unsure at all Xaa locations
  Clone ID: TF_ZmC18079_1.pep
MGRGKVELKKIENPTNRQVTFSKRRMGLFKKANELAILCDAQIRVIIFSGSGRMYEYSSPPWRIASVFDRYLKAXSTRFEEMDIQQKIVQEMTRMKDERNRLRMIMAQXMAEDLASFSAQDLSNLEQQIEFSLYKVCLRKXELLDQQLLEIRQRVHNIPTSDPSLGSLYTSLFQKARVVVTHKSSVSS

SEQ ID NO: 8004 - protein, 212 aa, Zea mays
  Clone ID: TF_ZmC2134_5.pep
MGRGKIEIKRIENSTNRQVTFSKRRAGLVKKAREIGVLCDAEVGVVIFSSGGKLYDYCSPRTSLSRILEKYQTNSGKILWGEKHKNLSAEIDRVKKENDNMQIQLRHLKGEDLNSLQPRELIAIEEGLQNGQTNMREKQMDYWRMHKTNGKMLEDEHKILTFRMHQQAVDLSGGMRELETGYHQVQHDRDFISQMPFTFRVQPNHPNLQEDE

SEQ ID NO: 8005 - protein, 240 aa, Zea mays
  Clone ID: TF_ZmC1408_2.pep
MGRGKVVLQRIENKISRQVTFAKRRNGLLKKAYELSILCDAEVALVLFSHAGRLYQFSSSSNLLKTLERYQRYIYASADAAVPSSDQMQNNYQEYVKLKARVEVLQHSQRNLLGEDLALLSPSELDQLENQVDKTLKQIRSRKTQVLLDELCDLKRKEQMLQDANRVLKRKLGEFEAEAASPPQLAWQGEGGMLSHDPPQPEHFFQALESNPCLQPTYHTMDMNQQPVPAPGGCYPAWMS

SEQ ID NO: 8006 - protein, 241 aa, Zea mays
  Clone ID: TF_ZmC2121_1.pep
MGRGKVELKRIENKISRQVTFAKRRNGLLKKAYELSLLCDAEVALIIFSGRGRLFEFSSSSCMYKTLERYRSSNYSQEVKTPLDTEINYQDYLKLRTRVEFLQTTQRNILGEDLGPLSMKELEQLEDQIEISLKHISSRKNQMLLDQLFDLKSKEQELLDLNKDLRKQLQETRPENALRVSWEEGGHSGASGNVLDPYQGLLQHLDNDPSLQFGYHHQAYMDQLNNEDLVDPNEHGRSGWI

SEQ ID NO: 8007 - protein, 212 aa, Zea mays
  Clone ID: TF_ZmC2134_1.pep
MGRGKIKIKRIENSTNRQVTFSKRRAGLVKKAREIGVLCDAEVGVVIFSSGGKLYDYCSPRTSLSRILEKYQTNSGKILWGEKHKNLSAEIDRVKKENDNMQIQLRHLKGEDLNSLQHRELIAIEEGLQNGQTNMREKQMDYWRMHKTNGKMLEDEHKILTFRMHQQAVDLSGGMRELETGYHQVQHDRDFISQMPFTFRVQPNHPNLQEDE

SEQ ID NO: 8008 - protein, 185 aa, Zea mays
  unsure (1)..(185): unsure at all Xaa locations
  Clone ID: TF_ZmC1442_5.pep
MGRGRVELKRIENKINRQVTFSKRRNGLLKKAYELSVLCDAEVALIIFSSRGKLYEFGSAGITKTLERYQHCCYNAQDSNGALSETQSWYQEMSKLRAKFEALQRTQRHLLGEELGPLSVKELQQLEKQLECALSQARQRKTQLMMEQVEELRRKERHLGEMXRQLKHXLEAEGCSNYRTLQHAA

SEQ ID NO: 8009 - protein, 208 aa, Zea mays
  unsure (1)..(208): unsure at all Xaa locations
  Clone ID: TF_ZmC7776_6.pep
MGRGKIEIKRIDSATSRQVTFSKRRSGLFKKAKELAILCDAEVGLAVFSSTGRLYDFASTSMKCVIERYSEAREEHRQTMSASXLRPRQLLGQQLSGLNVGDLQNLENKLETSLRNIRLKKDQLIFYQIQELNRKGSLMHQESIELYNKVNLLHQHNTELQRKVYGQGVNNEQTSTTVRHSTRDTENLPINLELSVQRDKSETPSVGL

SEQ ID NO: 8010 - protein, 339 aa, Zea mays
  unsure (1)..(339): unsure at all Xaa locations
  Clone ID: TF_ZmC1145_13.pep
MGRGKVQLKRIENKINRQVTFSKRRSGLLKKAHEISVLCDAEVALIIFSTKGKLYEYSTDSCMDKILDRYERYSYAEKVLISVESETQMRHQRIGLTQSRSVFIEPKALDSNQSLWKCXDKGNWCHEYRKLXAKVETIQKCQKHLMGEDLETLNLKELQQLEQQLESSLKHIRTRKNQLMLESISELQRKEKSLQEENKVLQKEKALLLPXLAEKQKAQRKQVQWGQTQQQTSSYSSCFVIREAAPPXNISIXFPVAAGGRLVEGAAAQPQARVGLPPWMLSQMSTPPPQQLFPFIRLVQYSIIVIARAAAVGLPFFFYQCMSIYVSIKSAMCSPPPPP

SEQ ID NO: 8011 - protein, 594 aa, Zea mays
  unsure (1)..(594): unsure at all Xaa locations
  Clone ID: TF_ZmC7776_4.pep
GFIVSHREIEANLEKIEAIMRMEAPRSQKKVHRLTGCMAALSRLISRLGEKCMPFYKLLKKVDKFQWTTEAHEALEALKKFLTTPVLKPPXPNQPAEDLLLYISCTTHVVSTALVVERVEEGHTYPVQHLVYFISEVLGPXKMKYPQVQKLLYVVLLTARKLRHYFDDHKVIVGFPIGDILHNKEAIGRIAKWACELGAHDIEFRPRTAIKTQALVDFVSECTEHQVLDNLETTEVWRMYFDDSLKLQGAGARILFIAPGGEQLKYALQLLFPASNNAAEYEALIHGLNIAVSLSIKKLMVYGDSLVVISQINKDCDCSTDSMSKYRAAVRKSEYKFEGLEFHHVERDRNATADALSKLXSSRAQAPPGIFVQKISQPSILSLSQPESDPNDWREPIIRYIENEEEPDDKAAAERIARQSAHYTLIGGILYRRGATGVLMKCIHSAIGKQLLDEIHVGQCEAHAASRTLVGKAFRFGFYWPTTKSDAAELVHRCEAXQFLSKKQHLSAQQLQTIPVTWPFAYXRLDMIXPFKKAQXGYTHVLVAIDKFTYWLPLTSSCTACLIDFCKSISCKKKNHVARCFIVIYVSIAPSDIL

SEQ ID NO: 8012 - protein, 94 aa, Zea mays
  Clone ID: TF_LIB4736-006-R1-K1-F10.pep
KQWYNPRVRGNELLYAEVDYMQKREMALQTDNMYLRSKIAESNETGQPAMHMMGVPPPTSEYDHMAPFDSRNFLQVSMPQHYSHQLQPTTLQLG

SEQ ID NO: 8013 - protein, 152 aa, Zea mays
  Clone ID: TF_LIB4764-099-A1-K1-G5.pep
MGRGKIKIKRIENSTNRQVTFSKRRAGLVKKAREIGVLCDTEVGVVIFSSGGKLYDYCSPRTSLSRILEKYQTNSGKILWGEKHKNLSAEIDRVKKENDNMQIQLRHLKGEDLNSLQHRELIAIEEGLQNGQTNMREKQAVILTLPVAPELI

SEQ ID NO: 8014 - protein, 255 aa, Zea mays
  Clone ID: TF_ZmC1442_2.pep
MGRGRVELKRIENKINRQVTFSKRRNGLLKKAYELSVLCDAEVALIIFSGRGKLYEFGSAGVTKTLERYQHCCYNAQDSNNSALSESQSWYQEMSKLRAKFEALQRTQRHLLGEDLGPLSVKELQQLEKQLECALSQARQRKTQVMMEQVEELRRTERHLGEMNRQLKHKLEAEGCSNYTTLQHAACWPAPGGTIVEHDGATYQVHPPAHSVAMDCEPTLQIGYPHHQFPPPEAANNIPRSAATGENNFMLGWVL

SEQ ID NO: 8015 - protein, 70 aa, Zea mays
  unsure (1)..(70): unsure at all Xaa locations
  Clone ID: TF_LIB3117-033-P1-K1-D5.pep
GPLIMNELEQLXNQIEVWGGHIRGGRNHMLLYQLFYLKSKEQELHDLNTDLRVMLHETSPHIVIHDDSWE

SEQ ID NO: 8016 - protein, 89 aa, Zea mays
  unsure (1)..(89): unsure at all Xaa locations
  Clone ID: TF_LIB3068-025-Q1-K1-D7.pep
DLGSLDDMEVDQLEKPTDSFLNHIRSTRSQHMLEQLTDLQTWXQMMCEAYNFLTRKLDETSIQLHVQVCVHGANXLLYYQRYSLPQPAP

SEQ ID NO: 8017 - protein, 240 aa, Zea mays
  Clone ID: TF_ZmC2121_2.pep
MGRGKVELKRIENKISRQVTFAKRRNGLLKKAYELSLLCDAEVALIIFSGRGRLFEFSSSSCMYKTLERYRSSNYSTQEVKAPLESEINYQDYLKLRTRVDFLQTTQRNILGEDLGPLSMKELEQLENQIEVSLKHIRSRKNQMLLDQLFDLKSKEQELQDLNKDLRKKLQETSPQNVIHDVSWEEGGHSGSSVLGPFQGLLQHHGNDPSLQTRYHQQAYMDQLNEDMADPDEHGRSGWI

SEQ ID NO: 8018 - protein, 255 aa, Zea mays
  Clone ID: TF_ZmC1442_3.pep
MGRGRVELKRIENKINRQVTFSKRRNGLLKKAYELSVLCDAEVALIIFSGRGKLYEFGSAGVTKTLERYQHFCYNAQDSNNGALSESQSWYQEISKLRAKFEALQRTQRHLLGEDLGPLSVKELQQLEKQLECALSQARQRKTQLMMEQVEELRRTERHLGEMNRQLKHKLEAEGCSNYTTLQHAACWPAPGGTIVEHDGATYQVHPPAHSVAMDCEPTLQIGYPHHQFPPPEAANNIPRSAATGENNFMLGWVL

SEQ ID NO: 8019 - protein, 286 aa, Zea mays
  Clone ID: TF_ZmC84_1.pep
MHIREEEATPSTVTGIMSTLTSAGQQKLKEPISPGGGSASVAGSAAERNNGGRGKGKTEIKRIENTTNRQVTFCKRRNGLLKKAYELSVLCDAEVALIVFSSRGRLYEYANNSVKGTIERYKKATSDNSSAAGTIAEVTIQHYKQESARLRQQIVNLQNSNRALIGDSITTMSHKELKHLETRLDKALGKIRAKKNDVLCSEVEYMQRREMELQNDNLYLRSRVDENERAQQTANMMGAPSTSEYQQHGFTPYDPIRSFLQFNIVQQPQFYSQQEDRKDFNDQGGR

SEQ ID NO: 8020 - protein, 286 aa, Zea mays
  Clone ID: TF_ZmC84_2.pep
MHIREEEATPSTVTGIMSTLTSAGQQKLKEPISPGGGSASVAGSAAERNNGGRGKGKTEIKRIENTTNRQVTFCKRRNGLLKKAYELSVLCDAEVALIVFSSRGRLYEYANNSVKGTIERYKKATSDNSSAAGTIAEVTIQHYKQESARLRQQIVNLQNSNRALIGDSITTMSHKELKHLETRLDKALGKIRAKKNDVLCSEVEYMQRREMELQNDNLYLRSRVDENERAQQTANMMGAPSTSEYQQHGFTPYDPIRSFLQSNIVQQPQFYSQQEDRKDFNDQGGR

SEQ ID NO: 8021 - protein, 228 aa, Zea mays
  Clone ID: TF_ZmC371_1.pep
MVRGKTQMKRIENPASRQVTFSKRRNGLLKKAFELSVLCDAEVALVVFSPRGKLYEFASGSAQKTIERYRTYTKDNVSNKTAHQDIEQVKADAEGLAKKLEALEAYKRKLLGERLEECSFEELHSLEVKLEKSLHCIRGRKTQLLEEQLHKLKEKEMNLRKSNEDLREKCKKQPPPPPPMLMAPPPPPAPAAIDHTGPKDVGMDVETELYIGLPGRDYRSNNKDMTAQ

SEQ ID NO: 8022 - protein, 201 aa, Zea mays
  Clone ID: TF_ZmC53_11.pep
MSFLLKEKEMIIAAGIVASMGRGRIEIKRIENNTSRQVTFCKRRNGLLKKAYELSVLCDAEVALIVFSSRGRLYEYANNSVKATVERYKKAHTVGSSSGPPLLEHNAQQFYQQESAKLRNQIQMLQNTNRHLVGDSVGNLSLKELKQLESRLEKGISKIRARKSELLAAEISYMAKRETELQNDHMTPQTKIEGGESTAAA

SEQ ID NO: 8023 - protein, 113 aa, Zea mays
  Clone ID: TF_LIB4764-117-A1-K1-G12.pep
RPKKNSKKKKKKKKKSTRTQHMVDQLTELQKKEQMFCEANKCLRRRLEESNQVIWQHAWEQSERHSEVQPQQLNGNNFFHPLDGAGEPTLQIGYPSEALTSSCMTTFLPPWLP

SEQ ID NO: 8024 - protein, 228 aa, Zea mays
  Clone ID: TF_ZmC1460_2.pep
MARGKVQLRRVENPVHRQVTFCKRRAGLLKKARELSVLCDASVGIIVFSAHGKLYDLATTGTMEELIERYKAASAGEATTDGCGRHNRMDPKHETTVLQQEINLLQKGLRYIYGNRANEHMNVDELNALERYLEIWMYNTRSAKMQIMAQEIQALKSKEGMLKAANEILQEKIVEQSSLLDVGMVVADQQNGRFSTVPLVEEVISSNPLTILSGYSSCRGSEMGYSFC

SEQ ID NO: 8025 - protein, 227 aa, Zea mays
  Clone ID: TF_ZmC1460_3.pep
MARGKVQLRRVENPVHRQVTFCKRRAGLLKKARELSVLCDASVGIIVFSAHGKLYDLATTGTMEELIERYKAASAGEATTDGCGRHNRMDPKHETTVLQQEINLLQKGLRYIYGNRANEHMNVDELNALERYLEIWMYNTRSAKMQIMAQEIQALKSKEGMLKAANEILQEKIVEQSSLLDVGMVVADQQNGRFSTVPLVEKVISSNPLTVLSGYSSCRGSKMGYSF

SEQ ID NO: 8026 - protein, 275 aa, Zea mays
  unsure (1)..(275): unsure at all Xaa locations
  Clone ID: TF_ZmC1808_2.pep
ILTDLSCGPSSKAKGGQPAAAPGSGGDRQGRGKIEIKRIENTTNRQVTFCKRRNGLLKKAYELSVLCDAEVALVVFSSTLEAGRDANNSVKSTIERYKKANSDTSNSGTVAEVNAQHYQQESSKLRQAIDSLQNANRTIVGDSIHTMGLRELKQMEGKLEKAINKIRARKNELLYAEVEYMQRRMDLQTDNMYLRSKIAENNNETGQPAMNMIGVPSTSEYDHMASFVDSRNFLQVNMQQQQPQHYSHXAATNDPPTRMMKLRIFGQQSMHASTQ

SEQ ID NO: 8027 - protein, 118 aa, Zea mays
  Clone ID: TF_LIB4719-003-R1-K1-B4.pep
NCWQTQLMMEQVEELRRKERHLGEMNRQLKHKLEAEGCSNYRTLQHAAWPAPGSTMVEHDGATYHVHPTTAQSVAMDCEPTLQIGYPPHHQFLPSEAANNIPRSPPGGENNFMLGWVL

SEQ ID NO: 8028 - protein, 212 aa, Zea mays
  Clone ID: TF_ZmC2134_2.pep
MGRGKIEIKRIENSTNRQVTFSKRRAGLVKKAREIGVLCDAEVGVVIFSSGGKLYDYCSPRTSLSRILEKYQTNSGKILWGEKHKNLSAEIDRVKKENDNMQIQLRHLKGEDLNSLQPRELIAIEEGLQNGQTNMREKQMDYWRMHTTNGKMLEDEHKILTFRMHQQAVDLSGGMRELETGYHQVQHDRDFISQMPFTFRVQPNHPNLQEDE

SEQ ID NO: 8029 - protein, 179 aa, Zea mays
  Clone ID: TF_ZmC1408_3.pep
KDCYKLKRVDVETFGTSPSNTCCEKMQNNYQEYVKLKARVEVLQHSQRNLLGEELAPLSPSELDQLESQVDKTLKQIRSRKTQVLLDELCDLKRKEQMLQDANRVLKRKLHEFETEAASPPQLAWQGGGGMLSHDPPQPEHFFVALESNAPLQPTYHTMDMNQQPEPAPGDCYPPAWMA

SEQ ID NO: 8030 - protein, 121 aa, Zea mays
  Clone ID: TF_LIB4764-090-A1-K1-F3.pep
GIDRTLSLDGGSITKTLERYQHCCYNAQDSNGALSETQSWYQEMSKLRAKFEALQRTQRHLLGEELGPLSVKELQQLEKQLECALSQARQRKTQLMMGAVEELRRKERHLGEMTRQLKHQL

SEQ ID NO: 8031 - protein, 255 aa, Zea mays
  Clone ID: TF_ZmC1442_1.pep
MGRGRVELKRIENKINRQVTFSKRRNGLLKKAYELSVLCDAEVALIIFSSRGKLYEFGSAGITKTLERYQHCCYNAQDSNGALSETQSWYQEMSKLRAKFEALQRTQRHLLGEELGPLSVKELQQLEKQLECALSQARQRKTQLMMEQVEELRRKERHLGEMNRQLKHKLEAEGCSNYRTLQHAAWPAPGSTMVEHDGATYHVHPTTAQSVAMDCEPTLQIGYPPHHQFLPSEAANNIPRSPPGGENNFMLGWVL

SEQ ID NO: 8032 - protein, 219 aa, Zea mays
  Clone ID: TF_ZmC53_7.pep
MGRGRIEIKRIENNSVKATIERYKKAHAVGSSSGPPLLEHNAQQFYQQESAKLRNQIQMLQNTNRHLVGDSVGNLSLKELKQLESRLEKGISKIRARKSELLAAEINYMAKRETELQNDHMNLRTKIEEGEQQLQQVTVAQSVAAAAATDVELNPFLEMDTKCFFPGGPFATLDMKCFFPGSLQMLEAQQRQMLATELNLGYQLAPPDTDVANNNPQQF

SEQ ID NO: 8033 - protein, 265 aa, Zea mays
  Clone ID: TF_ZmC53_2.pep
MGRGRIEIKRIENNTSRQVTFCKRRNGLLKKAYELSVLCDAEVALVVFSSRGRLYEYANNSVKATIERYKKAHAVGSSSGPPLLEHNAQQFYQQESAKLRNQIQMLQNTNRHLVGDSVGNLSLKELKQLESRLEKGISKIRARKSELLAAEINYMAKRETELQNDHMNLRTKIEEGEQQLQQVTVAQSVAAAAATDVELNPFLEMDTKCFFPGGPFATLDMKCFFPGSLQMLEAQQRQMLATELNLGYQLAPPDTDVANNNPQQF

SEQ ID NO: 8034 - protein, 265 aa, Zea mays; identical to SEQ ID NO: 8033
  Clone ID: TF_ZmC53_4.pep

SEQ ID NO: 8035 - protein, 265 aa, Zea mays; identical to SEQ ID NO: 8033
  Clone ID: TF_ZmC53_5.pep

SEQ ID NO: 8036 - protein, 241 aa, Zea mays
  Clone ID: TF_ZmC1408_1.pep
MGRGKVVLQRIENKISRQVTFAKRRNGLLKKAYELSILCDAEVALVLFSHAGRLYQFSSSSDLLKTLERYQRHIYASADAAVPSSDEMQNNYQEYVKLKARVEVLQHSQRNLLGEELAPLSPSELDQLESQVDKTLKQIRSRKTQVLLDELCDLKRKEQMLQDANRVLKRKLHEFEAEAASPPQLAWQGGGGMLSHDPPQPEHFFVALESNAPLQPTYHTMDMNQQPEPAPGGCYPPAWMA

SEQ ID NO: 8037 - protein, 115 aa, Zea mays
  unsure (1)..(115): unsure at all Xaa locations
  Clone ID: TF_ZmC2121_7.pep
REKGXSLKHISSRKNQMLLDQLFDLKSKEQELLDLNKDLRKQLQETRPENALRVSWEEGGHSGASGNVLDPYQGLLQHLDNDPSLQFGYHHQAYMDQLNNEDLVDPNEHGRSGWI

SEQ ID NO: 8038 - protein, 268 aa, Zea mays
  Clone ID: TF_ZmC8761_2.pep
MGRGKIEIKRIENTTSRQVTFCKRRNGLLKKAYELSILCDAEIALIVFSTRGRLYEYSSNSVRSTIERYKKASASTSGTAPVTDVNSLQYFQQEAAKLRQQIQTLQNSNRHLMGESTGNMTAKELKGLESRLERGIGRIRSKKHELLLAEIEYMQKREADLHNENMFLRAKVAEAERALEQEAAEDQTMMVPAAVRGATTELKALPASFDASGYYQYQQHQHVVAAASAASSSQYAEQPQGQQEYHHQTALHLGYHVKIDSAADKGFL

SEQ ID NO: 8039 - protein, 208 aa, Zea mays
  unsure (1)..(208): unsure at all Xaa locations
  Clone ID: TF_ZmC1408_4.pep
PTPHCPRPSLSLVLFSHAGRLYQFSSSSDLLKTLERYQRHIYASADAAVPSSDEMQNNYQEXVKLKARVEVLQHSQRNLLGEELAPLSPSELDQLESQVDKTLKQIRSRKTQVLLDELCDLKRKEQMLQDANRVLKRKLHEFEAEAASPPQLAWQGGGGMLSHDPPQPEHFFVALESNAPLQPTYHTMDMNQQPEPAPGGCYPPAWMA

SEQ ID NO: 8040 - protein, 66 aa, Zea mays; identical to SEQ ID NO: 6415
  unsure (1)..(66): unsure at all Xaa locations
  Clone ID: TF_LIB4185-037-R1-L1-D9.pep

SEQ ID NO: 8041 - protein, 268 aa, Zea mays
  Clone ID: TF_ZmC53_6.pep
MGRGRIEIKRIENNTSRQVTFCKRRNGLLKTYELSVLCDAEVALIVFSSRGRLYEYANNSVKATIERYKKAHTVGSSSGPPLLEHNAQQFYQQESAKLRNQIQMLQNTNRHLVGDSVGNLSLKELKQLESRLEKGISKIRARKSELLAAEISYMAERETELQNDHMTLRTEIEEGEQQLQQVTVARSVAAAAAAATNLELNPFLEMDTKCFFTGGPFATLDMKCFLPGSLQQMLEAQQRQMLATELNLGYQLAPPGSDAADNNPHHQF

SEQ ID NO: 8042 - protein, 257 aa, Zea mays
  unsure (1)..(257): unsure at all Xaa locations
  Clone ID: TF_ZmC1089_4.pep
MGRGRVELKRIENKINRQVTFAKRRNGLLKKAYELSVLCDAEVALIIFSNRGKLYEFCSGQSITKTLERYEKNSYGGPDTAVQNKENELVQSSRNEYLKLKARVDNLQRTQRQVDSTFELYLRNKRNLLGEDLGSLGVKELEQLEKQLDSSLRHIRSTRTQHMLDQLTDLQRREQMLCEAISAFRXKLEETSNQVHGQVWEHGANLLGYERHSPQQQAPSHVGNGLFFHPLEAAAEPTLQIGFAPEHMNNFMPTWLP

SEQ ID NO: 8043 - protein, 259 aa, Zea mays
  Clone ID: TF_ZmC29979_1.pep
MGRGKIEIKRIENSTNRQVTFSKRRGGLLKKANELAVLCDARVGVVIFSSTGKMFEYCSPACSLRELIEQYQHATNSHFEEINHDQQILLEMTRMKNEMEKLETGIRRYTGDDLSSLTLDDVSDLEQQLEYSVSKVRARKHQLLNQQLDNLRRKEQILEDQNTFLYRMINENQQAALTGEVKLGEMAPLAMLQPPPAFAHSATAYYGGESSSSGTALQLMSAAPQLHADDLGFRLQPTQPNLQDPAAPCGGLHGHGLQL

SEQ ID NO: 8044 - protein, 259 aa, Zea mays; identical to SEQ ID NO: 8043
  Clone ID: TF_ZmC29979_2.pep

SEQ ID NO: 8045 - protein, 212 aa, Zea mays
  Clone ID: TF_ZmC2121_4.pep
KISRQVTFAKRRNGLLKKAYELSVLCDAEVALIIFSSRGRLFEFSTSSCIYKTLERYRSCSFASEASAPLEAELNNYQEYLKLKTRVEFLQTTQRNLLGEDLGPLSVKELEQLENQIEISLKQIRSSKNQQMLDQLFDLKRKEQQLQDANKDLRMKIEETSEENVLRLSSQDIGCSGSSGHGDEANQEHLQLALDPSLHIGYQAYMDHLNND

SEQ ID NO: 8046 - protein, 200 aa, Zea mays
  Clone ID: TF_ZmC2121_5.pep
FEFSSSSCMYKTLERYRSSNYSQEVKTPLDTEIKYQDYLKLRTRVEFLQTTQRNILGEDLGPLSMKELEQLEDQIEISLKHISSRKNQMLLDQLFDLKSKEQELLDLNKDLRKQVMQWPPNISVYTYLQETRPENALRVSWEEGGHSGASGNVLDPYQGLLQHLDNDPSLQFGYHHQAYMDQLNNEDLVDPNEHGRSGWI

SEQ ID NO: 8047 - protein, 240 aa, Zea mays
  Clone ID: TF_ZmC2086_1.pep
MGRGRVELKRIENKINRQVTFAKRRNGLLKKAYELSVLCDAEVALIIFSNRGKLYEFSSTQSMPKTLEKYQKCSFAGPETALQNRENEQLKSSRNEYLKLKARVDNLQRTQRNLLGEDLESLGIKELEHLEKQLDSSLKHIRSTRTQHMVDQLTELQKKEQMFCEANKCLRRRLEESNQVIWQHAWEQSERHSEVQPQQLNGNNFFHPLDGAGEPTLQIGYPSEALTSSCMTTFLPPWLP

SEQ ID NO: 8048 - protein, 240 aa, Zea mays; identical to SEQ ID NO: 8047
  Clone ID: TF_ZmC2086_3.pep

SEQ ID NO: 8049 - protein, 240 aa, Zea mays
  unsure (1)..(240): unsure at all Xaa locations
  Clone ID: TF_LIB4742-134-Q1-K1-B1.pep
MGRGRIEIKRIENNTSRQVTFCKRRNGLLKKAYELSVLCDAEVALVVFSSRGRLYEYANNSVKATIERYKKAHAVGSSSGPPLLEHNAQQFYQQESVKLRNQIQMLQNTNRHLVGDSVGNLSLKELKQLESRLEKGISKIRARKSELLAAEINYMAKRETELQNDHMNLRTKIEEGEQQLQQVTVAQSVAAAAATDVELNPFLEMDTKCFFPGGPXATLDMKCFFPXSLQMLEAQQRQML

SEQ ID NO: 8050 - protein, 187 aa, Zea mays
  unsure (1)..(187): unsure at all Xaa locations
  Clone ID: TF_LIB5026-042-Q1-XP2-F5.pep
MARGKVQLRRVENPVHRQVTFCKRRAGLLKKARELSVLCDASVGIIVFSAHGKLYDLATTGTMEELIERYKAASAGEATTDGCGRHNRMDPKHETTVLQQEINLLQKGLSIVLGRYIHGNRANEHMNVDELNALERYLEXIWMYNTRSAKMQIMAQEIQALKSKEGMVKAANEILQEKIVEQSSLLD

SEQ ID NO: 8051 - protein, 228 aa, Zea mays
  unsure (1)..(228): unsure at all Xaa locations
  Clone ID: TF_LIB4742-069-R1-K1-D8.pep
MSFLLKEKEMIIAAGIPSMGRGRIEIKRIENNTSRQVTFCKRRNGLLKKAYELSVLCDAEVALIVFSSRGRLYEYANNSVKATIERYKKAHTVGSSSGPPLLEHNAQQFYQQESAKLRNQIQMLQNTNRHLVGDSVGNLSLKELKQLESRLEKGISKIRARKSELLAAEISYMAKRETELQNDHMTLRTKIEEGXQQLQQVTVARSVAAAAAAATNLELNPFXEMDTK

SEQ ID NO: 8052 - protein, 268 aa, Zea mays
  Clone ID: TF_ZmC53_1.pep
MGRGRIEIKRIENNTSRQVTFCKRRNGLLKKAYELSVLCDAEVALIVFSSRGRLYEYANNSVKATVERYKKAHTVGSSSGPPLLEHNAQQFYQQESAKLRNQIQMLQNTNRHLVGDSVGNLSLKELKQLESRLEKGISKIRARKSELLAAEISYMAKRETELQNDHMTLRTKIEEGEQQLQQVTVARSVAAAAAATNLELNPFLEMDTKCFFTGGPFATLDMKCFLPGSLQQMLEAQQRQMLATELNLGYQLAPPGSDAANNNPHHQF

SEQ ID NO: 8053 - protein, 287 aa, Zea mays
  Clone ID: TF_ZmC53_3.pep
MSFLLKEKEMIIAAGIASMGRGRIEIKRIENNTSRQVTFCKRRNGLLKKAYELSVLCDAEVALIVFSSRGRLYEYANNSVKATIERYKKAHTVGSSSGPPLLEHNAQQFYQQESAKLRNQIQMLQNTNRHLVGDSVGNLSLKELKQLESRLEKGISKIRARKSELLAAEISYMAKRETELQNDHMTLRTKIEEGEQQLQQVTVARSVAAAAAATTNLELNPFLEMDTKCFFTGGPFATLDMKCFLPGSLQQMLEAQQRQMLATELNLGYQLAPPGSDAADNNPHHQF

SEQ ID NO: 8054 - protein, 233 aa, Zea mays
  unsure (1)..(233): unsure at all Xaa locations
  Clone ID: TF_ZmC53_8.pep
MGRGRIEIKRIENNTSRQVTFCKRRNGLLKKAYELSVLCDAEVALIVFSSRGRLYEYANNSVKATIERYKKAHTVGSSSGPPLLEHNAQQFYQQESAKLRNQIQMLQNTNRHLVGDSVGNLSLKELKQLESRLEKGISKIRARKSELLAAEISYMAKRETELQNDHMTLRTKIEEGEQQLQQVTVARSVAAAAAAATNLELXPFLEMDTKCFFTGGPXTLDMKCFLPGSLQQM

SEQ ID NO: 8055 - protein, 251 aa, Zea mays
  Clone ID: TF_ZmC53_9.pep
MGRGRIEIKRIENNTSRQVTFCKRRNGLLKKAYELSVLCDAEVALIVFSSRGRLYEYANNSVKATVERYKKAHTVGSSSGPPLLEHNAQQFYQQESAKLRNQIQMLQNTNRHLVGDSVGNLSLKELKQLESRLEKGISKIRARKSELLAAEISYMAKRETELQNDHMTLRTKIEEGEQQLQQVTVARSVAAAAAATNLELNPFLEMDTKCFFTGGPFATLDMKCFLPGSLQQMLGAQQRQMLATELNLGYQ

SEQ ID NO: 8056 - protein, 212 aa, Zea mays
  Clone ID: TF_13274179.pep
MGRGKIKIKRIENSTNRQVTFSKRRAGLVKKAREIGVLCDTEVGVVIFSSGGKLYDYCSPRTSLSRILEKYQTNSGKILWGEKHKNLSAEIDRVKKENDNMQIQLRHLKGEDLNSLQHRELIAIEEGLQNGQTNMREKQMDYWRMHKTNGKMLEDEHKILTFRMHQQAVDLSGRMRELEIGYHQVQHDRDFISQMPFTFRVQPNHPNLQEDE

SEQ ID NO: 8057 - protein, 240 aa, Zea mays
  Clone ID: TF_ZmC37457_1.pep
MGRGKIVIRRIDNSTSRQVTFSKRRNGIFKKAKELAILCDAEVGLVIFSSTGRLYEYSSTSMKSVIDRYGKAKEEQQVVANPNSELKFWQREAASLRQQLHNLQENYRQLTGDDLSGLNVKELQSLENQLETSLRGVRAKKDHLLIDEIHDLNRKASLFHQENTDLYNKINLIRQENDELHKKIYETEGPSGVNRESPTPFNFAVVETRDVPVQLELSTLPQQNNIEPSTAPKLGLQLIP

SEQ ID NO: 8058 - protein, 221 aa, Zea mays
  Clone ID: TF_ZmC1460_4.pep
MARGKVQLRRIENPVHRQVTFCKRRAGLLKKARELSVLCDAHVGIIVFSAHGKLYDLATTGTMEELIERYRTASSGEAADGCGDNNRMDAKQETMVLQQEINLLQKGLRYIYGNRTNEHMNVEELNALERYLEIWMYNIRSAKMQIMIQEIQALKSKEGMLQAANEVLQEKIVEQSSLLDVGMVVADQQNGHFSTVPLVEEMISNPLTILSGYSNCRGYSF

SEQ ID NO: 8059 - protein, 245 aa, Zea mays
  Clone ID: TF_ZmC17645_1.pep
MGRGRGKVEVRRIENSVSRQVTFSKRRRGLAKKARELAVLCDADVALLVFSDKGRLHDFAAHGSMERILGRYERYLLCEDRDDVTQDYPEESQGNMSYDHIKLRSKLEAIKKSQRNLMGEQLESLTFREVQQLEHRIDSALRNVRSRKDHILLNSIQELRNKETFLMEQNGILEKEKAAVGASSSLHTTTSTAAASSTAAAAAALPNLNICPDDSDEPGMAAAAGIRLPWWMLQPSAVSQRQEQH

SEQ ID NO: 8060 - protein, 243 aa, Zea mays
  Clone ID: TF_ZmC1089_1.pep
MGRGRVELKRIENKINRQVTFAKRRNGLLKKAYELSVLCDAEVALIIFSNRGKLYEFCSGQSITKTLERYEKNSYGGPDTAVQNKENELVQSSRNEYLKLKARVDNLQRTQRNLLGEDLGSLGVKELEQLEKQLDSSLRHIRSTRTQHMLDQLTDLQRREQMLCEANKCLRRKLEETSNQVHGQVWEHGANLLGYERHSPQQQAPSHVGNGLFFHPLEAAAEPTLQIGFAPEHMNNFMPTWLP

SEQ ID NO: 8061 - protein, 173 aa, Zea mays
  Clone ID: TF_ZmC2134_9.pep
MGRGKIKIKRIENSTNRQVTFSKRRAGLVKKAREIGVLCDAEVGVVIFSSGGKLYDYCSPRTSLSRILEKYQTNSGKILWGEKHKNLSAEIDRVKKENDNMQIQLRPVHLKGEDLNSLQHRELIAIEEGLQNGQTNMREKQMDYWRMHKTNGKMLEDEHKILTFRMHQQAVDL

SEQ ID NO: 8062 - protein, 259 aa, Zea mays
  Clone ID: TF_ZmC1808_1.pep
MLNMMTDLSCGPSSKVKEQVAAAPTGSGDRQGQGRGKIEIKRIENTTSRQVTFCKRRNGLLKKAYELSVLCDAEVALVVFSSRGRLYEYANNSVKSTIERYKKANSDSSNSGTVAEVNAQYYQQESSKLRQMIHSLQNANTRNIVGDSIHTMGLRDLKQMEGKLEKAIIKIRARKNELLYAEVDYMQKREMDLQTDNMYLRSKIAESNETGQPAMHMTMGAPPTSEYDHMAPFDSRNFLQVSMPQHYSHQLQPTTLQLG

SEQ ID NO: 8063 - protein, 155 aa, Zea mays
  Clone ID: TF_ZmC2121_3.pep
INYQDYLKLRTRVEFLQTTQRNILGEDLGPLSMKELEQLEDQIEISLKHISSRKNQMLLDQLFDLKSKEQELLDLNKDLRKQLQETRPENALRVSWEEGGHSGASGNVLDPYQGLLQHLDNDPSLQFGYHHQAYMDQLNNEDLVDPNEHGRSGWI

SEQ ID NO: 8064 - protein, 252 aa, Zea mays
  unsure (1)..(252): unsure at all Xaa locations
  Clone ID: TF_ZmC371_4.pep
MVRGKTQMKRIENPASRQVTFSKRRNGLLKKAFELSVLCDAEVALVVFSPRGKLYEFASGSAQKTIERYRTYTKDNVSNKTAHQDIEQVKADAEGLAKKLEALEAYKRKLLGERLEECSFEELHSLEVKLEKSLHCIRGRKTQLLEEQLHKLKEKEMNLRKSNEDLREKVMGAKTFCRRCTAASGMPTTQENXCKKQPPPPPPMLMAPPPPPAPAAIDHTGPKDVGMDVETELYIGLPGRDYRSNNKDMTAQ

SEQ ID NO: 8065 - protein, 149 aa, Zea mays
  unsure (1)..(149): unsure at all Xaa locations
  Clone ID: TF_LIB4172-011-Q1-L1-C9.pep
MAQRLMTFRDVAVDFSPEEWECLSLDQRSLYRDVMLESYSHLVSVGLFVYRPHLFSLLEKGQDPWMILRDETRGPYPDIDFSSQNKKFLGKPSTYEELSQREMKEYFRKRSLERFLFLEMXXDGXNQFQTHXNQEYSKXLAVAYEKVLT

SEQ ID NO: 8066 - protein, 107 aa, Zea mays
  Clone ID: TF_LIB3597-024-Q1-K6-D9.pep
MATAQELLTFRDVCVDFTLEEWQQLDSAQKNLYRDVMLENYSHLVSVGYLGAKPDVVLRLGRGEEAGMTEGETPTWKYPDVAPLDVNRTGLLWKEASCQHPDAYDEK

SEQ ID NO: 8067 - protein, 139 aa, Zea mays
  unsure (1)..(139): unsure at all Xaa locations
  Clone ID: TF_LIB4073-009-Q6-K2-F5.pep
MALSQGLFTFKDVAIEFSQEEWECLDPAQRALYRDVMLENYRNLLSLDEDNIPPEDDISVGFTSKGLSPKENNKEELYHLVILERKESHGINNFDLKEVWENMPKFDSLWDYDVKNYXGNALTCNKLTHDQTYKLIHFS

SEQ ID NO: 8068 - protein, 122 aa, Zea mays
  unsure (1)..(122): unsure at all Xaa locations
  Clone ID: TF_ZmC180138_1.pep
GFACVNCIFRAPAPKRTLRLLVFWRGKVRSFRSEEEISGEEAXRRMASSSSQHTVCGLVTFRDVAVDFSQEEWACLDATQKVLYRDTMLETYSHLVTVVGSCLSKPHLITLLEQEKEPWMAV

SEQ ID NO: 8069 - protein, 95 aa, Zea mays
  Clone ID: TF_LIB3595-024-Q1-N6-E1.pep
VIKTLVDSGSNAWLLKTLQVTVEEKSYHKSCFKCSHGGCAITPSNYAALEGILYCKHHFSQLFKEKGSYNHLIKCASVKRAAEAQPEQPASDSSS

SEQ ID NO: 8070 - protein, 101 aa, Zea mays
  unsure (1)..(101): unsure at all Xaa locations
  Clone ID: TF_LIB148-007-Q1-E1-H9.pep
MSFTGTHATCPACDWTVHVIAVFMAVGCIYHIGCFKCSXCIGVLSMCRSSSMDGVLYCTTXFDQLFKETGTFSYTFTPSAMSIDDGEVTWCSTNLSSAFSG

SEQ ID NO: 8071 - protein, 77 aa, Zea mays
  Clone ID: TF_LIB3066-032-Q1-K1-B12.pep
CDKTVHLINLLTADGVTYHMTCFKCSHCKGILYMSSYYCMDGALNCTTHFEQIFVDTDSFSKIFTPSGQSSDMGVLA

SEQ ID NO: 8072 - protein, 503 aa, Zea mays
  Clone ID: TF_ZmC1365_1.pep
MAYSSRTCGRCNNHERRSGFMKWLCNFLKGPKPGEPNRRRPQVTAGEEEDALWHQRPVRPKNDPPRNDNEEVDRAIAESLTEDVRTPKEKTRKGDKDDEDLARAIQDSLNMNPYTPYNPYAPSHAQPRGHRLCAGCKHEIGHGHYLSCMGIYWHPQCFRCNSCGHPIRETEFTLLSTDPYHKLCYKELHHPKCDVCLQFIPTNRSGLIEYRAHPFWGQKYCPSHEHDRTPRCCSCEKMEPRNTKYMSLGDGRSLCMECLGSAVMDTGECQPLYHSIRDYYEGMNMKLDQQIPMLLVERQALNEAMEGESRGPHHMPETRGLCLSEEQTVSSILRRPRIGGNRLLDMRTQPQKLTRRCEVTAILVLYGLPRLLTGSILAHELMHGWLRLKGYRNLNAEVEEGICQVMSYLWLESEILPSSSRHAQPSSSYASSSSSSYSYPPTSSKKGGISHTEKKLGEFFMHQIAHDTSTAYGDGFRTAYAAVNKYGLRQTLNHIRLTGGLPV

SEQ ID NO: 8073 - protein, 157 aa, Zea mays
  unsure (1)..(157): unsure at all Xaa locations
  Clone ID: TF_LIB4742-051-R1-K1-H8.pep
HWVPRGRPGLHSFEGVLYCRPHFDQLFKRTGSLDKSFQGTPKVVKPERNVGNENATKVSSAFAGTREKCVGCSKTVYPIERVTVNNTMYHKSCFKCCHGGCTISPSNYIAHEGKLYCKHHHVQLIKEKGXTSASSRMTTRRHRRLGRWRTTKKKSIN

SEQ ID NO: 8074 - protein, 121 aa, Zea mays
  unsure (1)..(121): unsure at all Xaa locations
  Clone ID: TF_LIB3061-021-Q1-K1-D2.pep
FEPSSLDNRLSIQVTVNNTMYHKSCFKCCHGGCTISPSNYIAHEGKLYCKHHHIQLIKEXRGTSASLRMTTRRHHRLGHNGGHVCSENNDIVVLYLHVNVVIFESDTLPGFTIFIGQKMPL

SEQ ID NO: 8075 - protein, 261 aa, Zea mays
  Clone ID: TF_ZmC7269_1.pep
MVSADTIRTAIGVIGNGTALVLFLSPVPTFVGIWKKRAVEQYSPIPYVATLLNCMMWVLYGLPLVHPHSMLVVTINGTGMLIQLTYVALFILCSAGAVRRRVVLLFAAEVAFVVALAALVLTLAHTHERRSMLVGIVSVFFGTGMYAAPLSVMKLVIQTKSVEYMPLFLSLASLANSICWTAYALIRFDLYITIPNGLGVLFALGQLGLYAMFYKNTKQIMEARRRKADQQSTMMEVVTDASATPPPPPNNNNGGGGGNGY

SEQ ID NO: 8076 - protein, 198 aa, Zea mays
  Clone ID: TF_ZmC383_1.pep
MFSGTQQKCKVCTKTVYPMDQLSTDGVVFHRSCFKCQHCKSTLSLSNYSSFEGVPYCKTHFEQLFKETGSYNKSFQSQSPAKITPEKLAPELTRSPSKAARMFSGTQDKCATCGKTAYPLEKVTVEEKSYHKSCFKCSHGGCAITPSNYAALEGILYCKHHFSQLFKEKGSYNHLIKCASVKRAAEAQPEQPASDSSS

SEQ ID NO: 8077 - protein, 198 aa, Zea mays
  unsure (1)..(198): unsure at all Xaa locations
  Clone ID: TF_LIB4744-028-R1-K1-C9.pep
MATSFQGTTTKCTACDKTVYLVDKLTADNRIYHKACFRCHHCKGTLKLANYNSFEGVLYCRPHFDQLFKRTGSLDKSFEGTPKVVKPERNVGNENATKVSSAFAGTREKCVGCSKTVYPTERVTVNNTMYHKSCFKCCHGGCTISPSNYIAHEGKLYCKHHHIQLIKEXGTSASLRMTTRRHHRXLGHWRRMNKSIDH

SEQ ID NO: 8078 - protein, 198 aa, Zea mays
  unsure (1)..(198): unsure at all Xaa locations
  Clone ID: TF_ZmC844_1.pep
MATSFQGTTTKCTACDKTVYLVDKLTADNRIYHKACFRCHHCKGTLKLANYNSFEGVLYCRPHFDQLFKRTGSLDKSFEGTPKVVKPERNVGNENATKVSSAFAGTREKCVGCSKTVYPTERVTVNNTMYHKSCFKCCHGGCTISPSNYIAHEGKLYCKHHHIQLIKEXRGTSASLRMTTRRHHRLGHWRRMNKSIDH

SEQ ID NO: 8079 - protein, 198 aa, Zea mays; identical to SEQ ID NO: 8078
  unsure (1)..(198): unsure at all Xaa locations
  Clone ID: TF_ZmC844_3.pep

SEQ ID NO: 8080 - protein, 508 aa, Zea mays
  Clone ID: TF_ZmC13606_1.pep
MGWLTKFFRGSTHNISEEQYHSRPAEDTAWNEPSSSPVVTDILSEFNNEDIDRAIALSLSEEEQRKEKAIDKDMHLEEDEQLARAIQESLNVESPPRRNGSANGGTMYHPPRETGNAYQPPRENGSANGGNAYHPLPFMFSSGFRACAGCHREIGHGRFLSCMGAVWHPECFRCHACSQPIYDYEFSMSGNHPYHKTCYKEQFHPKCDVCKQFIPTNMNGLIEYRAHPFWVQKYCPSHEMDGTPRCCSCERMEPRESKYVLLDDGRKLCLECLDSAVMDTNDCQPLYLEIQEFYEGLNMKVEQQVPLLLVERQALNEAMEGEKAGHHHLPETRGLCLSEEQTVSTILRPRMAGNKIMGMITEPYRLTRRCEVTAILILYGLPRLLTGSILAHEMMHAWLRLKGYRTLSPDVEEGICQVLAHMWIESEIMAGSGSSAASSSSGSSSSTSSKKGGRSQFEHRLGDFFKHQIETDTSMAYGDGFRTGNRAVLHYGLKRTLEHIRLTGTFPF

SEQ ID NO: 8081 - protein, 197 aa, Zea mays
  unsure (1)..(197): unsure at all Xaa locations
  Clone ID: TF_ZmC844_2.pep
MATSFQGTTTKCTACDKTVYLVDKLTADNRVYHKACFRCHHCKGTLKLANYNSFDGVLYCRPHFDQLFKRTGSLDKSFQGTPKVVKPERNVGNENATKVSSAFAGTREKCVGCSKTVYPIERVTVNNTMYHKCCFKCCHGGCTISPSNYIAHEGKLYCKHHHVQLIKEXGTSASSRMTTRRHRRLGRWRTTKKKSIN

SEQ ID NO: 8082 - protein, 201 aa, Zea mays
  Clone ID: TF_ZmC2245_1.pep
MSAGKCAACGKTAYPLESVTALEQTFHKICFKCDVCKGTLNLKNYKGVNGKVYCFTHTPVDRSSTGSDSVTTKTAMQAPKKQAEGLGTAQKGTGEKPNVGLDTVTVQTAIKAPKAVAEGLGTAQKGTGEKPTVGTESVHLKSALSAPKVRAENIGTVHKGDSITAPQQASFDVEHPAPASEEAHHHEEAEPVSYDEQPADE

SEQ ID NO: 8083 - protein, 204 aa, Zea mays
  Clone ID: TF_ZmC1143_1.pep
MSFTGTQDKCTACDKTVHFIDLLTADGAIYHKTCFKCSHCKGVLSMCSYSSMDGVLYCKTHFEQLFKETGSFSKNFTPGGKSSDKGELTRAPSKLSSAFSGTQDKCAACQKTVYPLEKLTLEGESYHKSCFKCSHGGCILTTSSYAALNGVLYCKIHFAQLFMEKGSYNHMNKKSPSQEVLPDVADEEQPPEPAPPQDEKEEDN

SEQ ID NO: 8084 - protein, 129 aa, Zea mays
  Clone ID: TF_LIB5116-029-A1-PF1-H8.pep
MFSGTQQKCKVCTKTVYPMDQLSTDGAVFHRACFKCHHCKSTLSFSSYSSFEGVPYCKPHFAQLFKETGSYNKSFQSQSPAKSATEKLTPELTRSPSKAAGMFSGTQDKCATCGKTAYPLEKVTVEEKS

SEQ ID NO: 8085 - protein, 117 aa, Zea mays
  unsure (1)..(117): unsure at all Xaa locations
  Clone ID: TF_ZmC844_14.pep
MATSFQGTTTKCTVCDKTVYLVDKLTXDNRIYHKACFRCHHCKGTLKLANYNSFEGVLYCRPHFDQLFKRTGSLDKSFEGTPKVVKPERNVGNENATKVSSAFAGTREKCVGCSXTV

SEQ ID NO: 8086 - protein, 188 aa, Zea mays
  unsure (1)..(188): unsure at all Xaa locations
  Clone ID: TF_ZmC1143_8.pep
MSFTGTQDKCTACDKTVHFIDLLTADGAIYHKTCFKCSHCKGVLSMXQLFKETGSFSKNFTPGDKSSDKGELTRAPSKLSSAFSGTQDKCAACQKTVYPLEKLTLEGESYHKSCFKCSHGGCILTTSSYAALNGVLYYKIHFAQLFMEKGSYNHMNKKSPSQEVLPDVADEEQPPEPAPPQDEKEEDN

SEQ ID NO: 8087 - protein, 155 aa, Zea mays
  Clone ID: TF_ZmC383_2.pep
QLSNYSSFEGVPYCKTHFEQLFKETGSYNKSFQSQSPAKITPEKLAPELTRSPSKAARMFSGTQDKCATCGKTAYPLEKVTVEEKSYHKSCFKCSHGGCAITPSNYAALEGILYCKHHFSQLFKEKGSYNHLIKCASVKRAAEAQPEQPASDSSS

SEQ ID NO: 8088 - protein, 137 aa, Zea mays
  unsure (1)..(137): unsure at all Xaa locations
  Clone ID: TF_ZmC844_11.pep
LHIIWQNATKVSSAFAGTREKCVGCSKTVYPTERVRFCVQPSQSFFRXFEPSSLDNRLSIQVTVNNTMYHKSCFKCCHGGCTISPSNYIAHEGKLYCKHHHIQLIKEXRGTSASLRMTTRRHHRLGHWRRMNKSIDH

SEQ ID NO: 8089 - protein, 177 aa, Zea mays
  unsure (1)..(177): unsure at all Xaa locations
  Clone ID: TF_ZmC844_7.pep
LHIIWQNATKVSSAFAGTREKCVGCSKTVYPTERVRFCVQPSQSFFRXFEPSSLDNRLSIQVTVNNTMYHKSCFKCCHGGCTISPSNYIAHEGKLYCKHHHIQLIKEXRGTSASLRMTTRRHHRLGHWFHHFHWSEDASSPGSYGLLKLPSPGSRLAHAHLLDPSPIGFPLIPTAPA

SEQ ID NO: 8090 - protein, 82 aa, Zea mays
  unsure (1)..(82): unsure at all Xaa locations
  Clone ID: TF_LIB3601-009-P1-N6-H8.pep
VYPTKRVTVNNTMYHKSCFKCCHGGCTISPSNYIAHEGKLYCKHHHIQLIKEXRGTSASLRMTTRRHHRLGHWRRMNKSIDH

SEQ ID NO: 8091 - protein, 190 aa, Zea mays
  unsure (1)..(190): unsure at all Xaa locations
  Clone ID: TF_LIB4172-053-R1-L1-A4.pep
NSARGRKRDDGGHGDLLQGTTTKCTACDKTVYLVDKLTADNRIYHKACFRCHHCKGTLKXNYNSFEGVLYCRPHFDQLFKRTGSLDKSFEXATKVSSAFAGTREKCVGCSKTVYPTERVTVNNTMYHKSCFKCCHGGCTISPSNYIAHEGKLYCKHHHIQLIKEKGNFSQLENDHEKTSQAGSLEEDEQE

SEQ ID NO: 8092 - protein, 206 aa, Zea mays
  unsure (1)..(206): unsure at all Xaa locations
  Clone ID: TF_LIB5116-045-A1-PF1-G4.pep
MATSFQGTTTKCNACDKTVYLVDKLTADNRVYHKACFRCHHCKGTLKLANYNSFEGVLYCRPHFDQLFKRTGSLDKSFEGTPKVVKPERNVGNENAIKVSSAFAGTREKCFGCTKTVYPIERVTVNNTMYHKSCFKCCHGGCTISPSNYIAHEGKLFCKHHHTQLIKEKGXSASSRTITTRRHRVPGQWMMKTRSISQSLRISRDE

SEQ ID NO: 8093 - protein, 108 aa, Zea mays
  Clone ID: TF_ZmC1143_5.pep
MSFTGTQDKCTACDKTVHFIDLLTADGAIYHKTCFKCSHGGCILTTSSYAALNGVLYCKIHFAQLFMEKGSYNHMNKKSPSQEVLPDVADEEQPPEPAPPQDEKEEDN

SEQ ID NO: 8094 - protein, 198 aa, Zea mays
  unsure (1)..(198): unsure at all Xaa locations
  Clone ID: TF_ZmC844_4.pep
MATSFQGTTTKCTACDKTVYLVDKLTADNRVYHKACFRCHHCKGTLKLANYNSFEGVLYCRPHFDQLFKRTGSLDKSFQGTPKVVKPERNVGNENATKVSSAFAGTREKCVGCSKTVYPIERVTVNNTMYHKSCFKCCHGGCTISPSNYIAHEGKLYCKHHHVQLIKEKGXTSASSRMTTRRHRRLGRWRTTKKKSID

SEQ ID NO: 8095 - protein, 138 aa, Zea mays
  Clone ID: TF_LIB5116-033-A1-PF1-B12.pep
MFSGTQQKCKVCTKTVYPMDQLSTDGAVFHRACFKCHHCRSTLSFSSYSSFEGVPYCKPHFAQLFKETGSYNKSFQSQSPAKSATEKLTPELARSPSKAAGMFSGTQDKCATCGKTAYPLEKVTVEEKSYHKSCFNAL

SEQ ID NO: 8096 - protein, 165 aa, Zea mays
  unsure (1)..(165): unsure at all Xaa locations
  Clone ID: TF_LIB3608-040-Q1-K6-E4.pep
MFSGTQQKCKVCTKTVYPMDQLSTDGVVSFQSQSPVFHRSCFKCQHCKSTLSLSNYSSFEGVPYCKTHFEQLFKETGSYNNKXTPEKLAPELTRSPSKAARMFSGTQDKCATCGKTAYPLEKVTVEEKSYHKSCFKCSHGXGCAITPSNYAALEGILYCKHHFSQ

SEQ ID NO: 8097 - protein, 205 aa, Zea mays
  Clone ID: TF_ZmC1143_3.pep
MSSFTGTQDKCAECDKTVHFIDLLTADGVTYHKTCFKCSHCKGILSMCSYSSMDGVLYCKTHFEQLFKETGSFSKNFTPGGKSSDKGELTRAPSKLSSAFSGTQDKCAACQKTVYPLEKLTLEGESYHKSCFKCSHGGCILTTSSYAALNGVLYCKIHFAQLFMEKGSYSHMMKKSPSQDTLPDMAADEQPPEPAPPQDGEGEDN

SEQ ID NO: 8098 - protein, 205 aa, Zea mays; identical to SEQ ID NO: 8097
  Clone ID: TF_ZmC1143_7.pep

SEQ ID NO: 8099 - protein, 87 aa, Zea mays
  Clone ID: TF_701158756H1.pep
APAAAAPPSHLLECRIWRLGMKCAVCHTTAYFAEEAQCEGISFHKCCLLCMVCKKNLDSTTVAVHGEEIYCKSCYGKKYGPKGYGYG

SEQ ID NO: 8100 - protein, 538 aa, Zea mays
  Clone ID: TF_ZmC26552_1.pep
MGHKGEASKELIVKVPCVFGTGAGRRIVSLSKTINMGWLSKIFKGPVNRVSRGHYNGNSHEGYSTQHTKSYGVHGNEDEDMDHAIALSLSEEDQRKGKAIDTGHHLDEDEQIAQALQENIGHNLAEDEQLARALQESMNDGPPRQHIPVEDVNSESTPASILPSNIFRTSGLRVCAGCRSPIGRGRFLSCMDSVWHPECFRCYACDRPISEYEFAVHENHAYHRPCYKERFHPKCDVCSSFIPTDKNGLIEYRAHPFWMQKYCPSHENDGTPRCCSCERMEPKDSQYITLDDGRRLCLECLHTAIMETNECQPLYIDIQEFYEGMNMKVEQQVPLLLVERQALNEAMEAEKSVHHLPETRGLCLSEEQIVRTILKGPIGPGNRIIDMVTGPYKLIRRCEVTAILILYGLPRLLTGSILAHEMMHAYLRLKGYRTLSPEVEEGICQVLAHLWLESEITSGSGSMSTTSDASSSSSTSSSSKKGAKTEFEKRLGEFFKYQIETDSSVAYGDGFRAGMRAIERYGLRSTLDHIKMTGSFPC

SEQ ID NO: 8101 - protein, 204 aa, Zea mays
  Clone ID: TF_ZmC383_3.pep
MFSGTQQKCKVCTKTVYPMDQLSTDGAVFHRACFKCHHCKSTLSFSSYSPFEGVPYCKPHFAQLFKETGSYNKSFQSQSPAKSATEKLTPELTRSPSKAAGMFSGTQDKCATCGKTAYPLEKVTVEEKSYHKSCFKCSHGGCALSPSNYAALEGILYCKHHFSQLFKEKGSYNHLIKCASVKRAAEAQTAQAAAQAAPAAAESS

SEQ ID NO: 8102 - protein, 504 aa, Zea mays
  Clone ID: TF_ZmC39_1.pep
MSWLNKIFKGSVNRVSRGHYDGDWHEGHSSDHTRDTYDDSDNEDIDRAIALSLAEEDQNKGKSVAIDTDYNLEEDEQLARALQESLNAESPPRQNVPIEDVPVPQWNIPVERVPPRQYVPANEPTPHVYPRGGSRICAGCQNPIGHGRFLSCMDSVWHPQCFRCFACNKPISEYEFAMHDDQPYHKSCYKEFFHPKCDVCNNFIPTNRDGLIEYRAHPFWMQKYCPSHEDDGTPRCCSCERMEPREIKYITLDDGRKLCLECLNSAVMDSPECQHLYMDIQEFFEGLNMKVEQQIPLLLVERQALNEALEAEKNGHHLPETRGLCLSEEQVVRTILKRPQIGPGNRILDMIIGPYKLSRRCEVTAILILYGLPRLQTGSILAHEMMHAYLRLKGFRNLSIEVEEGICQVLSHLWLESEIIAGSSSNVASSSEASSSSSSSAPTSSKKGAKTEFEKKLGAFIKHQIETDSSEAYGGGFRAGYPAVERYGLKRTLDHMKLTGSFPY

SEQ ID NO: 8103 - protein, 202 aa, Zea mays
  Clone ID: TF_ZmC39_5.pep
MSWLNKIFKGSVNRVSRGHYDGDWHEGHSSDHTRDTYDDSDNEDIDRAIALSLAEEDHNKGKSVAIDTDYNLEEDEQLARALQESLNAESPPRQNVPIEDVPVPQWNIPVERVPPRQYVPANEPTPHVYPRGGSRICAGCQNPIGHGRFLSCMDSVWHPQCFRCFACNKPISEYEFAMHDDQPYHKSCYKEFFHPKCDVCNN

SEQ ID NO: 8104 - protein, 91 aa, Zea mays
  unsure (1)..(91): unsure at all Xaa locations
  Clone ID: TF_ZmC844_10.pep
MNISMLIATHRLSIQVTVNNTMYHKSCFKCCHGGCTISPSNYIAHEGKLYCKHHHIQLIKEXRGTSASLRMTTRRHHRLGHWRRMINTLVH

SEQ ID NO: 8105 - protein, 70 aa, Zea mays
  unsure (1)..(70): unsure at all Xaa locations
  Clone ID: TF_700450670H1.pep
MLNLGGGAKCGACEKTVYHAEEIQCNGRSFHKTCFHCMACRKALDSTTVAAHESEIYCKAGYGRRXGPKG

SEQ ID NO: 8106 - protein, 136 aa, Zea mays
  Clone ID: TF_LIB4185-052-R1-L1-E7.pep
IRHEAPLQFLEPSLPLVIPLVTMPALAKPASRTAKPAAAPKPKPAAAKPKAATAGASHAAYFEMIKGAITALRERTGSGSPAMGVGGAVTCGGSLFGVFWIWGATSPLGWGALRPRPRAAGATARLYARGGGSVPG

SEQ ID NO: 8107 - protein, 66 aa, Zea mays
  Clone ID: TF_jC-zmX3059031Q1K1F04b1.pep
MPALAKPTFRTAKPASAPKPNPADIWPKAATAGASHPPNFEMIKEAFTALKERTDPRPCEQPRSLD

SEQ ID NO: 8108 - protein, 69 aa, Zea mays
  unsure (1)..(69): unsure at all Xaa locations
  Clone ID: TF_LIB3332-033-P1-K1-A2.pep
MSTEEAVVPEVPVTEVPAEVPAAHVVDAPNANKAPNEKKAPNENKPSAGXKPAAHPPYAEMIVEAIAAL

SEQ ID NO: 8109 - protein, 73 aa, Zea mays
  Clone ID: TF_LIB143-015-Q1-E1-F7.pep
MSTEEAVVAEVPVTEVPADVPADQVAEAPKANKAPKENKAPKDKNLSAANIPAAQPPYAEIIVQAIAALKERK

SEQ ID NO: 8110 - protein, 298 aa, Zea mays
  Clone ID: TF_ZmC1172_2.pep
MGAPKQRWTSEEEAALRAGIARHGVGKWRTILKDPEFSSTLCYRSNVDLKDKWRNMNVIVSTSSSRDKAKSALKRIRTIPKNNEHTMAITRVTSDIDDEIVDEKPIVSLPSEAKNTSSSKKSHRLDNIIMEAIKNLNEPTGSHRTTIANYIEEQYWPPSDFDHLLSAKLKDLSTSGKLIKVNRKYRIAPSSPNSERRSPKMPLLEDVQREPVKIWSDDTKTLTRSQVDAELARMATMTAEEASVAAARAVAEAEAIMAEAEAAAKEAEAAEAEAQAAQAFAEAAFLTLKNRNAGKLMA

SEQ ID NO: 8111 - protein, 107 aa, Zea mays
  unsure (1)..(107): unsure at all Xaa locations
  Clone ID: TF_jC-zmX700092020b1.pep
MSTEEAVVADVPVTEVPAEVPVAHVAXAPNANKAPKEKKAPNEKKLSVANKPVAHPPYSEMIVEAIAALKERKGFSSVAISMYVEGKHGGKFPSTFCXHFTVQLKKL

SEQ ID NO: 8112 - protein, 116 aa, Zea mays
  unsure (1)..(116): unsure at all Xaa locations
  Clone ID: TF_LIB4729-127-A1-K1-F6.pep
ADMIAELIADPQKRNGSRYACITKYVQVKHGDKVCTILGKDLTVQLKKVADDDKLTRVNNSFKLPATDAKPKXAKPHAPKVAYXTKSSPKGKDKTAAKPKAASTQPKAKAKVKSVA

SEQ ID NO: 8113 - protein, 179 aa, Zea mays
  unsure (1)..(179): unsure at all Xaa locations
  Clone ID: TF_LIB4766-082-R1-K1-G7.pep
SAVSTEEAVVXAEVPVTEVPTEVPSAHVAEGPKDNKAPXKEKKVPKEKKLSAPKKPAAHPPYAEMIVEAISALXERNASSSVAINKYVEGXYGGKLPTIFCWXFTVQLNNVAVVGKLTRLKNSFXWRAPTPRPRTSCPMHSMSRPMPSPXDESDVKTAANSKAVSSQSCAKDMAKPVAP

SEQ ID NO: 8114 - protein, 101 aa, Zea mays
  unsure (1)..(101): unsure at all Xaa locations
  Clone ID: TF_LIB3354-080-Q6-K6-F1.pep
MSTEEAVVAEVPVTEVPAEVPAAHVAXAPKAKKARQENKAPKEKKLFADNKPAAHPTYSEMIVQAIAVFKERNGSSSVAIIKYFXGKHGGKLFHQLTQACY

SEQ ID NO: 8115 - protein, 158 aa, Zea mays
  unsure (1)..(158): unsure at all Xaa locations
  Clone ID: TF_LIB4730-100-Q1-K1-F2.pep
MPARAIPGSRSDKRDEAPKPKRAAANPKARTAGASHPAYFQMIKEAITAEKERIASRLSSASTRKWGTRTMNSLPANLKKMLSIQLRVHXAKGKLGKAKAFXKLSDAAXNASPKTKAKTRKAAAAKNTAPKCGKDDADKSKNERVAKIKKVADAETKG

SEQ ID NO: 8116 - protein, 99 aa, Zea mays
  Clone ID: TF_ZM5033.C5.o1.fg.pep
MPWSSTTADGRRQQQRRTVESSLSEPTIVGREPGLARVTPMIVAALAALAEENGSSQAAIARRIEAEARGDLPASHPALVAAHLSRMSAAGELVAVAGG

SEQ ID NO: 8117 - protein, 125 aa, Zea mays
  Clone ID: TF_ZmC366_3.pep
RSPPRVDPASAPVVTVSEEPAPEAAKEVVKKPEEGKKPDEEGDERKKADPAAEKEKKARKPRSRKPKSAGLHHPPYFEMIKEAILSQDGGKVGASPYAIAKHMGEKHRDVLPPNYRCLGAVEGGT

SEQ ID NO: 8118 - protein, 79 aa, Zea mays
  Clone ID: TF_jC-zmX700095987b1.pep
MPDLAKPATRTAKPAEAPKPKPAAAKPKANTAGANHPPYFEMNKEAITALKERTDSSPQAIAKYEGDKHGAYMAANSKK
